United States Patent Application Publication US 2011/0182862 A1 - sequence listing, part 17

SEQ ID NO: 24154 - protein, 353 aa, Muscodor strobelii
  misc_feature: SGI Peptide ID NO. 568231
  misc_feature (1)..(348): NCBI GI: 171694171 Blast Desc: protein product [Podospora anserina] gi|170947034|emb|CAP73838.1| protein product [Podospora anserina]
  misc_feature (1)..(352): NCBI GI: 85103277 Blast Desc: NCU03708 [Neurospora crassa OR74A] gi|12718297|emb|CAC28859.1| conserved [Neurospora crassa] gi|28923030|gb|EAA32248.1| conserved [Neurospora crassa OR74A]
  misc_feature (1)..(348): NCBI GI: 116198295 Blast Desc: CHGG_07303 [Chaetomium globosum CBS 148.51] gi|88178582|gb|EAQ86050.1| CHGG_07303 [Chaetomium globosum CBS 148.51]
  misc_feature (1)..(345): NCBI GI: 256728490 Blast Desc: [Nectria haematococca mpVI 77-13-4]
  misc_feature (1)..(345): NCBI GI: 46109986 Blast Desc: FG01875.1 [Gibberella zeae PH-1]
  misc_feature (1)..(350): NCBI GI: 261360828 Blast Desc: conserved [Verticillium albo-atrum VaMs.102]
  misc_feature (21)..(347): NCBI GI: 156051842 Blast Desc: SS1G_07328 [Sclerotinia sclerotiorum 1980] gi|154705106|gb|EDO04845.1| SS1G_07328 [Sclerotinia sclerotiorum 1980]
  misc_feature (3)..(346): NCBI GI: 169623018 Blast Desc: SNOG_14735 [Phaeosphaeria nodorum SN15] gi|111056807|gb|EAT77927.1| SNOG_14735 [Phaeosphaeria nodorum SN15]
  misc_feature (22)..(284): NCBI GI: 154315378 Blast Desc: BC1G_04728 [Botryotinia fuckeliana B05.10] gi|150847691|gb|EDN22884.1| BC1G_04728 [Botryotinia fuckeliana B05.10]
  misc_feature (12)..(347): NCBI GI: 145238272 Blast Desc: An07g07090 [Aspergillus niger] gi|134076266|emb|CAK39551.1| protein product [Aspergillus niger]
  misc_feature (153)..(351): SWISSPROT Homolog: EC 2.1.1.1 Nicotinamide N-methyltransferase
MSLTTRITPLRTSTSTQDSSEDIFGASLGVLYKGQDITAQHGDNDHTSLLYTSPHLPHSLNIALADPEDENERRLRSHYLCNSSLLLAEFIEAGSLGLDYDVGGPTLSEGEGGVEGEGEDEAEGEDGDRDKGEKKRGRDEFSISHFNITHLRTLELGSGTALPSILASLLGARSVIATDYPSPSVLSTLQRNIAVNCQTKNSPLGSVSSVSVAGHAWGDISDDHEFARKNKGTFDRVFVCDCLWMPWLHYNLLKSIAYFLKPSTVHALSHHSEDREARAWVIGAFHTGRANIRSFFDEASLTRHGLVVERIWERDCDGVERAWKGDRGVEDLSVLKRWLVIGILRRKRGGVEG

SEQ ID NO: 24155 - DNA, 424 bp, Muscodor strobelii
  misc_feature: SGI EST ID NO. CUFF.56913.0
  misc_feature: Variant of the nucleotide sequence at SEQ ID NO 24153
catgcatggggcgatataagcgatgaccacgagttcgcaagaaagaataagggaacattcgatagagtgttcgtctgtgattgtctatggatgccgtggctgcactataatttgctgaaatctattgcgtattttcttaagccatccactgttcacgccttatctcatcacagtgaagacagagaggcccgtgcctgggtaataggcgctttccacacaggacgtgcgaacattaggagtttcttcgacgaagcgagtctgacgcggcatggacttgtagttgagcggatttgggaacgggattgtgatggagttgaacgggcttggaagggtgacaggggcgtggaggatttgagtgtgcttaagaggtggttggttattgggattttgaggaggaaaagggggggtgttgaaggataggggg

SEQ ID NO: 24156 - DNA, 879 bp, Muscodor strobelii
  misc_feature: SGI cDNA ID NO. 568232
  misc_feature: Encodes the peptide sequence at SEQ ID NO 24157
atggctgccaataataacccgaatcttccgatgccaccacatcgaacggattccacgcgtcttatgttccaagaaaccggcctgcgagacattgccaatgcccttggtatcaggccagcagatacaaggtatctatatacacttgtgcgggttttacgtcgagtgggttccagtggcgtgttgacacctgacatagtatccttccttttcacatactcatggggggagcaggttgatcagcccgccgacttaatcaagactgcaatgggcttagaccgtgacaggcaatttatctggcaagaaggtctgtctcagctcagaccacggtcattgtctcaatgcttgttctggtttgcgacgcgatttgttgatgttattgcacagattggaatcagaaatgacgagcacccccaggacatgatctggatgccaagccgtcaagcccatatctattcattcgcgctggtctccatgctgtggatgtatatggagatgctacctgatgaacatgcccgtcagcaaatcctgcacccactgtggcaagcgctgaacgatcttcgcttgagttatcgttgcccggaatgtagggctgactataaccttgtcgatgaagctaacagtgtctacgatacgtcgtgtattctctgcgcagatcgtgaggaaggtgaggttatcgaagccccatttatcggctatcgtccacgtccagaagatgcaccaacgcgtggggctcaagtcaacaataacgattccgttgaagctcaggctgataggttccttgatcaacttgaagccgaaatcttgcagacccaggccgaggcccgggcccgggctgatcagttcttggatcagcttggtaacgagctcgctcggcgatga

SEQ ID NO: 24157 - protein, 292 aa, Muscodor strobelii
  misc_feature: SGI Peptide ID NO. 568232
MAANNNPNLPMPPHRTDSTRLMFQETGLRDIANALGIRPADTRYLYTLVRVLRRVGSSGVLTPDIVSFLFTYSWGEQVDQPADLIKTAMGLDRDRQFIWQEGLSQLRPRSLSQCLFWFATRFVDVIAQIGIRNDEHPQDMIWMPSRQAHIYSFALVSMLWMYMEMLPDEHARQQILHPLWQALNDLRLSYRCPECRADYNLVDEANSVYDTSCILCADREEGEVIEAPFIGYRPRPEDAPTRGAQVNNNDSVEAQADRFLDQLEAEILQTQAEARARADQFLDQLGNELARR

SEQ ID NO: 24158 - DNA, 1326 bp, Muscodor strobelii
  misc_feature: SGI cDNA ID NO. 568233
  misc_feature: Encodes the peptide sequence at SEQ ID NO 24159
atggagcccagaacgatgagtctcaagtccgcctcgcgaccctcgacaccgcgctctttgcacacgccgatgccgcatgtcacatctcccccagtcgcaatgggcgcagcagccagcagtgccgtcgagacaggcaacggagacgaaattgatcacactgttgcgcgccatgtctcctccgccgatgtcgagtcgcagagcggcagttcgcgcctacgggataatgacccctacaacttaagctccgggctcaagaccgaggaagaaatcaccgcgatccaagctaatacctcccggaagcgtgtcttgaagctcggtcgctccgacaaagtcgccagcttctaccaaaaccagaatgaaacaatcgagcgccttctcaagagcgtcgaggagcactgcgccgaacaagaacaggcagcgggtgaggatcacctgcgttatcagatcgccgtctacgcctccttcattggcaatatcattctggctggagtccaactgtacggtgccacatcttccggatcactctcactccttaccactgcagccgatgccgtcttcgaccctttgagcaacgcgaccttgcttctgtctcaccgcgctatcaagcgtgtggatgcccggaaatttccctcgggtaaagctcgtctcgaaaacgttggcaatatcgctttctgttttattctcgcctcagtttctattctgctgatcgccttttctatccgagatctcgtcagccacaaaggcgatgaacttcggaacttccatttgccgtccgtcatcgctgtggcagtcgcgttcggcaccaaagtcctcctgctactgtactgctggggactcaaggacaaatacagtcatatcgacattctatggcaagaccaccgcaacgacctcacaatcaacggcttcggtcttttgacatctatcggtggttctaagctccgctggtggatcgatcccgctggatccatctttctagcagtcttgttgattttcctgtggctacgcactgcactttccgagtttaagttactcgtcggcgttgcggcaagcacggagatgcagcagcttatcacgtacgtctgcgtcacgcactcgcctgaaattctaggtattgataccgtgcgtgtttaccattctggccaccgtctcattgcggaagtcgatatcgtcatgaatccggattcaacactccgcgatacccatgatgttgctgaggaactgcagttcaagcttgagagtatgccggatatcgagagagcttatgtccatgtcgactacgagactacgcacaagcccgagcatcctatcaagaagaagcagatgtga

SEQ ID NO: 24159 - protein, 441 aa, Muscodor strobelii
  misc_feature: SGI Peptide ID NO. 568233
  misc_feature (151)..(431): Pfam Id: PF01545 Pfam Desc: Cation efflux family
  misc_feature (30)..(438): NCBI GI: 116199211 Blast Desc: CHGG_07761 [Chaetomium globosum CBS 148.51] gi|88179040|gb|EAQ86508.1| CHGG_07761 [Chaetomium globosum CBS 148.51]
  misc_feature (4)..(438): NCBI GI: 171692837 Blast Desc: protein product [Podospora anserina] gi|170946367|emb|CAP73168.1| protein product [Podospora anserina]
  misc_feature (35)..(438): NCBI GI: 85100697 Blast Desc: NCU06699 [Neurospora crassa OR74A] gi|28922550|gb|EAA31778.1| NCU06699 [Neurospora crassa OR74A] gi|28949937|emb|CAD70923.1| conserved [Neurospora crassa]
  misc_feature (37)..(438): NCBI GI: 256728485 Blast Desc: [Nectria haematococca mpVI 77-13-4]
  misc_feature (37)..(439): NCBI GI: 258563050 Blast Desc: UREG_07043 [Uncinocarpus reesii 1704] gi|237907777|gb|EEP82178.1| UREG_07043 [Uncinocarpus reesii 1704]
  misc_feature (36)..(439): NCBI GI: 189208708 Blast Desc: cation diffusion facilitator 1 [Pyrenophora tritici-repentis Pt-1C-BFP] gi|187976780|gb|EDU43406.1| cation diffusion facilitator 1 [Pyrenophora tritici-repentis Pt-1C-BFP]
  misc_feature (3)..(438): NCBI GI: 46110002 Blast Desc: FG01883.1 [Gibberella zeae PH-1]
  misc_feature (1)..(439): NCBI GI: 240108631 Blast Desc: cation efflux family protein [Coccidioides posadasii C735 delta SOWgp]
  misc_feature (1)..(439): NCBI GI: 119186271 Blast Desc: CIMG_03183 [Coccidioides immitis RS]
  misc_feature (9)..(439): NCBI GI: 238837556 Blast Desc: cation diffusion facilitator 1 [Microsporum canis CBS 113480]
MEPRTMSLKSASRPSTPRSLHTPMPHVTSPPVAMGAAASSAVETGNGDEIDHTVARHVSSADVESQSGSSRLRDNDPYNLSSGLKTEEEITAIQANTSRKRVLKLGRSDKVASFYQNQNETIERLLKSVEEHCAEQEQAAGEDHLRYQIAVYASFIGNIILAGVQLYGATSSGSLSLLTTAADAVFDPLSNATLLLSHRAIKRVDARKFPSGKARLENVGNIAFCFILASVSILLIAFSIRDLVSHKGDELRNFHLPSVIAVAVAFGTKVLLLLYCWGLKDKYSHIDILWQDHRNDLTINGFGLLTSIGGSKLRWWIDPAGSIFLAVLLIFLWLRTALSEFKLLVGVAASTEMQQLITYVCVTHSPEILGIDTVRVYHSGHRLIAEVDIVMNPDSTLRDTHDVAEELQFKLESMPDIERAYVHVDYETTHKPEHPIKKKQM

SEQ ID NO: 24160 - DNA, 2428 bp, Muscodor strobelii
  misc_feature: SGI EST ID NO. CUFF.56934.0
  misc_feature: Variant of the nucleotide sequence at SEQ ID NO 24158
cttgacttcgcaagtcttcggatcacttttttctagattgcgatgtcgtagtcgtaacagagcgtacggtattagatacgtacgaagttcctggtaacgatgacgcaaatctggatccgtgtcacttcactgcccgcccggaagggtaagcggcagttcggttcggagcgctggctgcctctgtgatgagcctctttgatccacatggccaaacaacaagcgaattcaagtcgcgacagtgttcattccgtttccgccaccaagtcacagccattctatatccacaagaagctcggtgatttggccgaaagacgccttggctggtccaagcttggcaacccactgatggttcattcatttgcctgatgaagtctgggcggagggattctaatttttgagaggagcaatctatccattgccaatttccgtcaatatctcttcggcagctttcgcgtaacttatcaccatattgcaagttctgttgttttctgctgtcttagcggtgaatgtcgttgtgtattgacttgatcttcaaggattactactgtactactaaatctaggggcttatagttattgtggggtgaaccctcagagatccctaacgtaatcgtcgcatctttttaaccgttcgtccgacgtcgaacaacatcctctcctaagcatttctgggagtgcacatatcttccttccgagaagcagccatggagcccagaacgatgagtctcaagtccgcctcgcgaccctcgacaccgcgctctttgcacacgccgatgccgcatgtcacatctcccccagtcgcaatgggcgcagcagccagcagtgccgtcgagacaggcaacggagacgaaattgatcacactgttgcgcgccatgtctcctccgccgatgtcgagtcgcagagcggcagttcgcgcctacgggataatgacccctacaacttaagctccgggctcaagaccgaggaagaaatcaccgcgatccaagctaatacctcccggaagcgtgtcttgaagctcggtcgctccgacaaagtcgccagcttctaccaaaaccagaatgaaacaatcgagcgccttctcaagagcgtcgaggagcactgcgccgaacaagaacaggcagcgggtgaggatcacctgcgttatcagatcgccgtctacgcctccttcattggcaatatcattctggctggagtccaactgtacggtgccacatcttccggatcactctcactccttaccactgcagccgatgccgtcttcgaccctttgagcaacgcgaccttgcttctgtctcaccgcgctatcaagcgtgtggatgcccggaaatttccctcgggtaaagctcgtctcgaaaacgttggcaatatcgctttctgttttattctcgcctcagtttctattctgctgatcgccttttctatccgagatctcgtcagccacaaaggcgatgaacttcggaacttccatttgccgtccgtcatcgctgtggcagtcgcgttcggcaccaaagtcctcctgctactgtactgctggggactcaaggacaaatacagtcatatcgacattctatggcaagaccaccgcaacgacctcacaatcaacggcttcggtcttttgacatctatcggtggttctaagctccgctggtggatcgatcccgctggatccatctttctagcagtcttgttgattttcctgtggctacgcactgcactttccgagtttaagttactcgtcggcgttgcggcaagcacggagatgcagcagcttatcacgtacgtctgcgtcacgcactcgcctgaaattctaggtattgataccgtgcgtgtttaccattctggccaccgtctcattgcggaagtcgatatcgtcatgaatccggattcaacactccgcgatacccatgatgttgctgaggaactgcagttcaagcttgagagtatgccggatatcgagagagcttatgtccatgtcgactacgagactacgcacaagcccgagcatcctatcaagaagaagcagatgtgagaagtttaatgacgtgatattatgaggaacaaatacgagaagtggataacttcgagtcgagagttgagtttcgagcattcagcagcaggagtagcatcaaggcaaaataagtgcatttccgtatatgttccgcgtgtggtttgatattgcatatacagcacagaatagagaaaatggatacagctcaatcatcaaatcttacaagagccgaggaatagactgttagtgtacataaacaagaaaattcaatgatactctgacctccctcgcccaattcatataaaaatgaatactgatttagaaactgttaagcgtgcaacatttagaagggccagttactcatcatggacgcttttcaatactgataattttgttcctttaagacaaggcggcaatgcg

SEQ ID NO: 24161 - DNA, 1872 bp, Muscodor strobelii
  misc_feature: SGI cDNA ID NO. 568234
  misc_feature: Reduced expression when VOC is produced
  misc_feature: Encodes the peptide sequence at SEQ ID NO 24162
atgacaatggcaaatagccattcatataaaatgttccatcgaccaaaccacgagcaagccgatttcatgctctatcctgagcccgccacacgaccgggatacacatcgccaccaatggatatgagcatgagtccaaacggatttggctaccctcgaggcgcgcacgaagattttacacacgcccaagcttgtgacggcatagtatacccggaaatgagcaacctcatgtaccgaggcagaacctcaccaacaatgtatcccgaggatggcgagctccggatccctccctcagatttatcaaccgcctcagcaccatctgcgacatcgtctacggtgggatctccgaactcgaaccacgggcagcttgctttcattccagaatactcgcagtctggcatgagtgtcaacccagggattgttggttcgaatgaatattatgcgggaaccgagtattcggcgttcactggtccaggtatggaagaattcatgaccttcgacagcaaatcatctttcgttgatccgtctttgattcaccctgaaattcgtgggcctatggcaccaccaatgtcggcgtatgagcatcgcaatgcttactcgccgccaaacccgtatccccactccccttctctgtctggcgcaacctccccagcccctgttatgaggaacggtagccagtcgccctatatgcacacatatcatccccagcaatatagcccatatgcaatcccccctggtaatggcagacgacctagcatctcgtatcagtcacatagctctcacgagttctcatacaacagtgacgaatccgaaaagaagcagagatgccctcacccagattgtggaaagaccttcaaagacctgaaagcgcacatgctcacgcatcaaacggaacggcctgaaaagtgtccgatccaaacatgcgagtatcacgtcaagggatttgcgcgaaagtatgacaagaatcggcatactctaacccactacaaaggtaccatggtatgcggattctgtcctggctctggatctgccgccgagaagtcgtttaacagggcagacgtcttcaagcggcatctcactgctgttcatggagtagaacagacaccaccaaatagccggaagaagacgtcacctggcgctaacagtggcaagaaactgaccggatatgcaccggatgccacgggcaaatgttccacttgctcggcaacatttgccaatgcgcaggatttctatgaacatcttgacgactgtgttttgcgcattgttcaacaagaggaccctgccgaagcaatcaacgcccagcggttgggtgaagtggaagacgacaaagaggttcatcagactctagagaagaaccatctcccactcacaacacaatctcttcctcactcggatgaagaggatgatgacgaaatggccgacgaagatgatatggatgatgctcgggataccaggaaaggctcttccccttccaagaagaagggcaaccctgccaatggcgtacagaaatcccgtggtatgacgcattcccgaggcggtgttccggtcgcgacgaagacaaaggggcgcaaaaaccgacagaattatccttcctcttggggcttcgacaagggtcagatgactatgaagaagcgcgttttaacagtgttcgacggaccacgccgcctagccaaagatgacatgatgttgtctaccgagcatgaggtccgcgtcaagctaggagacggcaagtcctacgtgacggatttggatgtcaacacaatgaagcgagctgagggctttctcaatgcgaccgaggaagagaagggcttctggatctctgacgatcctacagaggaagacatggcccgcatgttggaaatgagccgaaattga

SEQ ID NO: 24162 - protein, 623 aa, Muscodor strobelii
  misc_feature: SGI Peptide ID NO. 568234
  misc_feature (23)..(618): NCBI GI: 171694169 Blast Desc: protein product [Podospora anserina] gi|170947033|emb|CAP73837.1| protein product [Podospora anserina]
  misc_feature (1)..(623): NCBI GI: 46109990 Blast Desc: FG01877.1 [Gibberella zeae PH-1]
  misc_feature (1)..(620): NCBI GI: 256728488 Blast Desc: [Nectria haematococca mpVI 77-13-4]
  misc_feature (23)..(620): NCBI GI: 85103239 Blast Desc: NCU03699 [Neurospora crassa OR74A] gi|16944565|emb|CAC18184.2| conserved [Neurospora crassa] gi|28923021|gb|EAA32239.1| conserved [Neurospora crassa OR74A]
  misc_feature (1)..(622): NCBI GI: 154309756 Blast Desc: BC1G_07348 [Botryotinia fuckeliana B05.10] gi|150851809|gb|EDN27002.1| BC1G_07348 [Botryotinia fuckeliana B05.10]
  misc_feature (11)..(620): NCBI GI: 261360827 Blast Desc: zinc finger protein [Verticillium albo-atrum VaMs.102]
  misc_feature (172)..(619): NCBI GI: 116198293 Blast Desc: CHGG_07302 [Chaetomium globosum CBS 148.51] gi|88178581|gb|EAQ86049.1| CHGG_07302 [Chaetomium globosum CBS 148.51]
  misc_feature (83)..(622): NCBI GI: 156052034 Blast Desc: SS1G_07425 [Sclerotinia sclerotiorum 1980] gi|154705202|gb|EDO04941.1| SS1G_07425 [Sclerotinia sclerotiorum 1980]
  misc_feature (50)..(618): NCBI GI: 39957776 Blast Desc: MGG_09200 [Magnaporthe grisea 70-15] gi|145013365|gb|EDJ98006.1| MGG_09200 [Magnaporthe grisea 70-15]
  misc_feature (171)..(606): NCBI GI: 255945527 Blast Desc: Pc20g10390 [Penicillium chrysogenum Wisconsin 54-1255] gi|211588266|emb|CAP86368.1| Pc20g10390 [Penicillium chrysogenum Wisconsin 54-1255]
  misc_feature: Useful for introducing or modulating the production of volatile compounds
MTMANSHSYKMFHRPNHEQADFMLYPEPATRPGYTSPPMDMSMSPNGFGYPRGAHEDFTHAQACDGIVYPEMSNLMYRGRTSPTMYPEDGELRIPPSDLSTASAPSATSSTVGSPNSNHGQLAFIPEYSQSGMSVNPGIVGSNEYYAGTEYSAFTGPGMEEFMTFDSKSSFVDPSLIHPEIRGPMAPPMSAYEHRNAYSPPNPYPHSPSLSGATSPAPVMRNGSQSPYMHTYHPQQYSPYAIPPGNGRRPSISYQSHSSHEFSYNSDESEKKQRCPHPDCGKTFKDLKAHMLTHQTERPEKCPIQTCEYHVKGFARKYDKNRHTLTHYKGTMVCGFCPGSGSAAEKSFNRADVFKRHLTAVHGVEQTPPNSRKKTSPGANSGKKLTGYAPDATGKCSTCSATFANAQDFYEHLDDCVLRIVQQEDPAEAINAQRLGEVEDDKEVHQTLEKNHLPLTTQSLPHSDEEDDDEMADEDDMDDARDTRKGSSPSKKKGNPANGVQKSRGMTHSRGGVPVATKTKGRKNRQNYPSSWGFDKGQMTMKKRVLTVFDGPRRLAKDDMMLSTEHEVRVKLGDGKSYVTDLDVNTMKRAEGFLNATEEEKGFWISDDPTEEDMARMLEMSRN

SEQ ID NO: 24163 - DNA, 3005 bp, Muscodor strobelii
  misc_feature: SGI EST ID NO. CUFF.57462.3
  misc_feature: Variant of the nucleotide sequence at SEQ ID NO 24161
ctagattctctaccaatacccccctagccagactgttcacacccatacacccccgtaccattgccttatgatgggctgtgtcctgcagcaggcggtcctagcttgcctgctctacttgtttgtatacatatacagccttgagcccccaacatcatcaacagagtattctcaccaccagcttcacgacgactaacaccgaggacagtcatcctgaagagactgtcacctattacttactttgtcttcaatagaagcagtacataatatcaacagtatataataccatctgaacccttcacctagtcactttccgctcatataccctttcctacgcggggcaatcgtcttgagtaaacgactatcgtagacgaataccttagtctcgatatccaaatcgcatgttccatacagtggcggcagcaagacagtcaaccgagaaattttgattttcaataaggcccaaggcttcgtctcgtcttcaaccaccacatcttaactctagccatcgccgcttgttagatcggccgtctgaaacaaggcgcggatcgcgcttctagcgacttgaagcaagacacagcttcgtaagcctacttcggtaaaattgaaatgatgacaatggcaaatagccattcatataaaatgttccatcgaccaaaccacgagcaagccgatttcatgctctatcctgagcccgccacacgaccgggatacacatcgccaccaatggatatgagcatgagtccaaacggatttggctaccctcgaggcgcgcacgaagattttacacacgcccaagcttgtgacggcatagtatacccggaaatgagcaacctcatgtaccgaggcagaacctcaccaacaatgtatcccgaggatggcgagctccggatccctccctcagatttatcaaccgcctcagcaccatctgcgacatcgtctacggtgggatctccgaactcgaaccacgggcagcttgctttcattccagaatactcgcagtctggcatgagtgtcaacccagggattgttggttcgaatgaatattatgcgggaaccgagtattcggcgttcactggtccaggtatggaagaattcatgaccttcgacagcaaatcatctttcgttgatccgtctttgattcaccctgaaattcgtgggcctatggcaccaccaatgtcggcgtatgagcatcgcaatgcttactcgccgccaaacccgtatccccactccccttctctgtctggcgcaacctccccagcccctgttatgaggaacggtagccagtcgccctatatgcacacatatcatccccagcaatatagcccatatgcaatcccccctggtaatggcagacgacctagcatctcgtatcagtcacatagctctcacgagttctcatacaacagtgacgaatccgaaaagaagcagagatgccctcacccagattgtggaaagaccttcaaagacctgaaagcgcacatgctcacgcatcaaacggaacggcctgaaaagtgtccgatccaaacatgcgagtatcacgtcaagggatttgcgcgaaagtatgacaagaatcggcatactctaacccactacaaaggtaccatggtatgcggattctgtcctggctctggatctgccgccgagaagtcgtttaacagggcagacgtcttcaagcggcatctcactgctgttcatggagtagaacagacaccaccaaatagccggaagaagacgtcacctggcgctaacagtggcaagaaactgaccggatatgcaccggatgccacgggcaaatgttccacttgctcggcaacatttgccaatgcgcaggatttctatgaacatcttgacgactgtgttttgcgcattgttcaacaagaggaccctgccgaagcaatcaacgcccagcggttgggtgaagtggaagacgacaaagaggttcatcagactctagagaagaaccatctcccactcacaacacaatctcttcctcactcggatgaagaggatgatgacgaaatggccgacgaagatgatatggatgatgctcgggataccaggaaaggctcttccccttccaagaagaagggcaaccctgccaatggcgtacagaaatcccgtggtatgacgcattcccgaggcggtgttccggtcgcgacgaagacaaaggggcgcaaaaaccgacagaattatccttcctcttggggcttcgacaagggtcagatgactatgaagaagcgcgttttaacagtgttcgacggaccacgccgcctagccaaagatgacatgatgttgtctaccgagcatgaggtccgcgtcaagctaggagacggcaagtcctacgtgacggatttggatgtcaacacaatgaagcgagctgagggctttctcaatgcgaccgaggaagagaagggcttctggatctctgacgatcctacagaggaagacatggcccgcatgttggaaatgagccgaaattgatgattcggcccagtacatatatacttataattacctcaccatattggacatacttacaccgcataagcctcacaatattgagggcgaacacacatactcacgacggacatgaccccctcgaacaaaaagcaatagagcatttcaacatcaacggcgcagggtgatggtcacattcacttgtcacacggaagaacactgataaatgaaggtgcatgctgggcgcatttggttatatatcttttcgacttgatggatttgaaatgggagcgatgaaacaggtccgaaagggcactatgattagcattgggaacgacatgctgggtttaatcttgtcgggcgttcataggcatagtggacgaaccgtttcttactaactggttttgttttttttggttggtcctctgtttgtctacggaaccgatgatcatctgttcgatggaatgcgcctgacaaagatacccctgatgtacaatatttattaaggctcaacattgtgtctattacaacgcttcatgaaatgatcg

SEQ ID NO: 24164 - DNA, 1239 bp, Muscodor strobelii
  misc_feature: SGI cDNA ID NO. 568235
  misc_feature: Encodes the peptide sequence at SEQ ID NO 24165
atgcttccgccgcccgaaccctccagttttgtttctagcgatgtggtttcgtctctgaacaaagttgagggcactccagctgaggctcgcgaagagcagattcacacgcaagaagcacccgctcctgaagctgaggtcgagcagaagcccccgccatttcaaccaagcatgtccaattgggatgcgcaaaggcatgctcctccgtcggattcgaagcctgaagctgcaaactttcccgccactatatacgagatgtcccagagtgttgccccattcgttgctccgaaacgataccctagtcctcccaaagacatgtggtatgaggttcctaaagaagctccagctgcctcttctgcgccgccaagagccattttcccttgggaagccaatcagccaaaacctactcgcgtgttcgtcgatgaagagccccagatatcgcacgagccagaaagaagagattcagatgcaatctctggtgagcagagtcaaagttcggaatcgcaagcgtcaactgagttgtcgatggtagatacgagcgaacaaaagagcgagccagtcaccccaatcaccccgactatccaaatcacaccatcagatccttggacctctttcacgcgaactaatgcatgggatgacgtgccggagattgaacgatacgttgattccatgcagaagcacaaacgttcaaagagtctcaagtccaaggctcctggtatgattgcgataccaagtccgggtgatggtattgatgagctttcgcggcaacggcggggcagcaaattgaccgatttcccgagtgaagtcgagcgccctagcttgcctgtcactcccgcccccatccgtcggccgaacttctggagtggtggctccagactcaaaggcgacgataacgttccaagccaggatgagtgggatcctgtggcacaactacagaaacttgctaagcaacaaagcgatgcgatattacagaaattgggtggtagcaatcgagacagtgatgacttgccgtctcggcctatgccatttgggtccgagggcatggtctctcctacttatgtggcacgaactgcaccggtgttgagtccgcgtccggtaaaagggaatgcaagcagtgctgtgctgaaccttgtcacggactcggatgcaacacccagagcatctccacaacaggccacgacacgaatagcgcctgccacatctacgactgctagccaacagtcgacgactgcgaaatcatag

SEQ ID NO: 24165 - protein, 412 aa, Muscodor strobelii
  misc_feature: SGI Peptide ID NO. 568235
  misc_feature (43)..(382): NCBI GI: 256728486 Blast Desc: NECHADRAFT_123235 [Nectria haematococca mpVI 77-13-4]
  misc_feature (17)..(374): NCBI GI: 261360823 Blast Desc: glycogenin-2 [Verticillium albo-atrum VaMs.102]
  misc_feature (56)..(392): NCBI GI: 46110000 Blast Desc: FG01882.1 [Gibberella zeae PH-1]
  misc_feature (58)..(371): NCBI GI: 85100693 Blast Desc: glycogenin [Neurospora crassa OR74A] gi|28922549|gb|EAA31777.1| glycogenin [Neurospora crassa OR74A] gi|28949936|emb|CAD70922.1| related to glycogenin-2 beta crassa]
  misc_feature (58)..(397): NCBI GI: 45594294 Blast Desc: glycogenin [Neurospora crassa]
  misc_feature (60)..(328): NCBI GI: 145609295 Blast Desc: MGG_07493 [Magnaporthe grisea 70-15] gi|145016683|gb|EDK01113.1| MGG_07493 [Magnaporthe grisea 70-15]
  misc_feature (56)..(345): NCBI GI: 156051812 Blast Desc: SS1G_07313 [Sclerotinia sclerotiorum 1980] gi|154705091|gb|EDO04830.1| SS1G_07313 [Sclerotinia sclerotiorum 1980]
  misc_feature (33)..(286): NCBI GI: 116199209 Blast Desc: CHGG_07760 [Chaetomium globosum CBS 148.51] gi|88179039|gb|EAQ86507.1| CHGG_07760 [Chaetomium globosum CBS 148.51]
  misc_feature (58)..(349): NCBI GI: 171692835 Blast Desc: protein product [Podospora anserina] gi|170946366|emb|CAP73167.1| protein product [Podospora anserina]
  misc_feature (55)..(325): NCBI GI: 258576663 Blast Desc: UREG_02029 [Uncinocarpus reesii 1704] gi|237902779|gb|EEP77180.1| UREG_02029 [Uncinocarpus reesii 1704]
MLPPPEPSSFVSSDVVSSLNKVEGTPAEAREEQIHTQEAPAPEAEVEQKPPPFQPSMSNWDAQRHAPPSDSKPEAANFPATIYEMSQSVAPFVAPKRYPSPPKDMWYEVPKEAPAASSAPPRAIFPWEANQPKPTRVFVDEEPQISHEPERRDSDAISGEQSQSSESQASTELSMVDTSEQKSEPVTPITPTIQITPSDPWTSFTRTNAWDDVPEIERYVDSMQKHKRSKSLKSKAPGMIAIPSPGDGIDELSRQRRGSKLTDFPSEVERPSLPVTPAPIRRPNFWSGGSRLKGDDNVPSQDEWDPVAQLQKLAKQQSDAILQKLGGSNRDSDDLPSRPMPFGSEGMVSPTYVARTAPVLSPRPVKGNASSAVLNLVTDSDATPRASPQQATTRIAPATSTTASQQSTTAKS

SEQ ID NO: 24166 - DNA, 4171 bp, Muscodor strobelii
  misc_feature: SGI EST ID NO. CUFF.57189.0
  misc_feature: Variant of the nucleotide sequence at SEQ ID NO 24164
tggaaatcaagcattaactagtgtgaaaggaattcgcttagaaatgttttaataccaaatgcgtgcagcgaacagtggaatatttccaagctgggcaattctaaggctcctctgagacatgcgattggctacgacctcttccccagatgtatcactgtgcatgtgaactagcatcgatcccgtcctcctatggcgtcacttaacatacattccgtgtccgcttctaattgtgccggcgtcgatcgaggttgaatgatgcagctaattcgacctcgtctcgagcgttgttatgtgaggggagcgttgagtgcggggaaatacctcctaacgtaccatggaagctgtcttggacaaatagtgatcaggtgtttcgacgaccgaccgttcctaaaggaaattgatattctgatggaagtttcaattgaaattgaaggcagcctactctcagatttccatcgtccatataagtgatgctataaccgccatacgcgtgatttgttgccagagactcacagcatagaatgaagagcatttatgtactcgtgctcgtacgacgattagatgtttcaaggttggagcttggatgattttgagaccacgtgcttctacgccgaagctacccacggttcctgggcatattatctccgagtcttgtggcgtcatattcaacagcaaaattatagttcatttcgttcgggaaaaacgctccaggtcctcaagactcagcattgaagacttaatgctgatggccattctatcaatgcaatacatgcaaatgcgaaatatactatagatacctggcgcgagaaataaatgacacgccacagctcttattcaccaaggattgagaatccagacctcccagattcatctgaaaaattggaggaggtggacccttgccatggcccccatgctccagtgacgctacctgaggagctactgtaaaagctcgaagctgcagcagagcggcgccgatgttgcgggacaattggtttatcaacaacgaaacgcgcgcaacgccttgctctctacgaatatcccacctatcgcaggcaaactcatttccgtagccaggcttcgagtatccagagaaccgtccaattgagcttctacaaggccgattgaactctcttctgtcttctgacactagcatatagcttcacaatttatttctgccctatttttgctacattccagctgtctcgcgtgtaagggcggctgttcctctccctattatccacaccatccttcattccccaattctacgagttcgcgccgattccggtaggcctctcttagtattgtagacctccctcgcacgaaaatggctgtgccgggaggaggggaggaggatgtgtatgctacactattgctgagcgacacatacttgcctggcgcgttggtgttggctcactctctacgcgatgccgctacaaccaagaagctcgccgtcctggtcaccctcgacagcgtgtccgccgaagcgattaccgaacttagatctctctatgactatgtcatccccgtacctcgaatccgcaattcccacccagccaaccttgagctgatgaatcgaactgatcttcactcggcattcacgaaaatcaacctttggaaacagacccagtttcgcaagatcgtctacatagacgcggatgtggtggcataccgagctcccgacgagctgttttcgattgctcatccattctcagcagcgccagatatcggctggcccgatctgttcaacactggcgtcatggttttaactccaaacatgggcgactactacgcgatgatggccatggctgaaagagggatatcattcgatggcgctgaccaggggctgatcaacatgcattttcgaggcaactacaaccgcattagcttcacctacaacgtcacgccctccgcacattatcaatacatacctgcctatcggcactttcagtcaagtatcaacatggtacattttattggttcggataaaccgtggttcaaagggcgatactctagcattggacattctccattcgacgaaatgacggggagatggtgggcagtatatgatagacattaccgcgtgtcggaaccccaactccggatctctacatcctcaaactcctcagtcacgaacaatactactcctcagtcaaatccagaattgatacaatatctaaccaggggggaataccagcccgcttctaccaatcttggacctaacagtaagcctcagagtgaagagcgatatgaccatgagcatcatttctatcatgatccggttcattctcaggggccagagtctcatgcactagctcatcatcaagacgacccccattctcaggtgcacgaccaccatcgtcaccaacaacatgagcaaaatgatactcacagtcatgaacccccattgcttggagccatcatgcttccgccgcccgaaccctccagttttgtttctagcgatgtggtttcgtctctgaacaaagttgagggcactccagctgaggctcgcgaagagcagattcacacgcaagaagcacccgctcctgaagctgaggtcgagcagaagcccccgccatttcaaccaagcatgtccaattgggatgcgcaaaggcatgctcctccgtcggattcgaagcctgaagctgcaaactttcccgccactatatacgagatgtcccagagtgttgccccattcgttgctccgaaacgataccctagtcctcccaaagacatgtggtatgaggttcctaaagaagctccagctgcctcttctgcgccgccaagagccattttcccttgggaagccaatcagccaaaacctactcgcgtgttcgtcgatgaagagccccagatatcgcacgagccagaaagaagagattcagatgcaatctctggtgagcagagtcaaagttcggaatcgcaagcgtcaactgagttgtcgatggtagatacgagcgaacaaaagagcgagccagtcaccccaatcaccccgactatccaaatcacaccatcagatccttggacctctttcacgcgaactaatgcatgggatgacgtgccggagattgaacgatacgttgattccatgcagaagcacaaacgttcaaagagtctcaagtccaaggctcctggtatgattgcgataccaagtccgggtgatggtattgatgagctttcgcggcaacggcggggcagcaaattgaccgatttcccgagtgaagtcgagcgccctagcttgcctgtcactcccgcccccatccgtcggccgaacttctggagtggtggctccagactcaaaggcgacgataacgttccaagccaggatgagtgggtatgtgtgcatggacagagatggcttccaagcgactgtctttgcgacttaactaacgtactacgtgttcacaaggatcctgtggcacaactacagaaacttgctaagcaacaaagcgatgcgatattacagaaattgggtggtagcaatcgagacagtgatgacttgccgtctcggcctatgccatttgggtccgagggcatggtctctcctacttatgtggcacgaactgcaccggtgttgagtccgcgtccggtaaaagggaatgcaagcagtgctgtgctgaaccttgtcacggactcggatgcaacacccagagcatctccacaacaggccacgacacgaatagcgcctgccacatctacgactgctagccaacagtcgacgactgcgaaatcatagtagataataggatggtagaatgaaaagatggcttcatggtcgaggaatacatgatcaaggtcatgtctctgcgtgtcgacaagacagcagcgctatttttccggtgggtttgcgggcatttccaggtgttgtttgtttccataggcattgtagtgctaatgggaggataagtgtgtctttacgcgatatgttcaagaggcatgagcgaagactgcgaatgttaaaatcgggaaatatgtattctataccacacatgtgttaattatcggtgacttcattagcgatatttctatttccctaaaggcatactaccatgctataagtgtatctattctattcattacatattatcgagcgagacttagttgtagatcatgttcactggttatggaatacgaaatcgcagatagtgtgttttcgagggatcaaagatatgca

SEQ ID NO: 24167 - DNA, 798 bp, Muscodor strobelii
  misc_feature: SGI cDNA ID NO. 568236
  misc_feature: Encodes the peptide sequence at SEQ ID NO 24168
atggctgtgccgggaggaggggaggaggatgtgtatgctacagttggtctccccctattgctgagcgacacatacttgcctggcgcgttggtgttggctcactctctacgcgatgccgctacaaccaagaagctcgccgtcctggtcaccctcgacagcgtgtccgccgaagcgattaccgaacttagatctctctatgactatgtcatccccgtacctcgaatccgcaattcccacccagccaaccttgagctgatgaatcgaactgatcttcactcggcattcacgaaaatcaacctttggaaacagacccagtttcgcaagatcgtctacatagacgcggatgtggtggcataccgagctcccgacgagctgttttcgattgctcatccattctcagcagcgccagatatcggctggcccgatctgttcaacactggcgtcatggttttaactccaaacatgggcgactactacgcgatgatggccatggctgaaagagggatatcattcgatggcgctgaccaggggctgatcaacatgcattttcgaggcaactacaaccgcattagcttcacctacaacgtcacgccctccgcacattatcaatacatacctgcctatcggcactttcagtcaagtatcaacatggtacattttattggttcggataaaccgtggttcaaagggcgatactctagcattggacattctccattcgacgaaatgacggggagatggtgggcagtatatgatagacattaccgcgtgtcggtgagtcctccgacgcaagtctga

SEQ ID NO: 24168 - protein, 265 aa, Muscodor strobelii
  misc_feature: SGI Peptide ID NO. 568236
  misc_feature (16)..(231): Pfam Id: PF01501 Pfam Desc: Glycosyl transferase family 8
  misc_feature (7)..(257): NCBI GI: 145609295 Blast Desc: MGG_07493 [Magnaporthe grisea 70-15] gi|145016683|gb|EDK01113.1| MGG_07493 [Magnaporthe grisea 70-15]
  misc_feature (1)..(256): NCBI GI: 256728486 Blast Desc: NECHADRAFT_123235 [Nectria haematococca mpVI 77-13-4]
  misc_feature (7)..(264): NCBI GI: 116199209 Blast Desc: CHGG_07760 [Chaetomium globosum CBS 148.51] gi|88179039|gb|EAQ86507.1| CHGG_07760 [Chaetomium globosum CBS 148.51]
  misc_feature (3)..(255): NCBI GI: 171692835 Blast Desc: protein product [Podospora anserina] gi|170946366|emb|CAP73167.1| protein product [Podospora anserina]
  misc_feature (9)..(264): NCBI GI: 46110000 Blast Desc: FG01882.1 [Gibberella zeae PH-1]
  misc_feature (1)..(256): NCBI GI: 85100693 Blast Desc: glycogenin [Neurospora crassa OR74A] gi|28922549|gb|EAA31777.1| glycogenin [Neurospora crassa OR74A] gi|28949936|emb|CAD70922.1| related to glycogenin-2 beta crassa]
  misc_feature (1)..(256): NCBI GI: 45594294 Blast Desc: glycogenin [Neurospora crassa]
  misc_feature (9)..(260): NCBI GI: 156051812 Blast Desc: SS1G_07313 [Sclerotinia sclerotiorum 1980] gi|154705091|gb|EDO04830.1| SS1G_07313 [Sclerotinia sclerotiorum 1980]
  misc_feature (64)..(257): NCBI GI: 261360823 Blast Desc: glycogenin-2 [Verticillium albo-atrum VaMs.102]
  misc_feature (5)..(257): NCBI GI: 238838359 Blast Desc: glycogenin [Microsporum canis CBS 113480]
  misc_feature (19)..(254): SWISSPROT Homolog: EC 2.4.1.186 Glycogenin glucosyltransferase
MAVPGGGEEDVYATVGLPLLLSDTYLPGALVLAHSLRDAATTKKLAVLVTLDSVSAEAITELRSLYDYVIPVPRIRNSHPANLELMNRTDLHSAFTKINLWKQTQFRKIVYIDADVVAYRAPDELFSIAHPFSAAPDIGWPDLFNTGVMVLTPNMGDYYAMMAMAERGISFDGADQGLINMHFRGNYNRISFTYNVTPSAHYQYIPAYRHFQSSINMVHFIGSDKPWFKGRYSSIGHSPFDEMTGRWWAVYDRHYRVSVSPPTQV

SEQ ID NO: 24169 - DNA, 4171 bp, Muscodor strobelii; identical to SEQ ID NO: 24166
  misc_feature: SGI EST ID NO. CUFF.57189.0
  misc_feature: Variant of the nucleotide sequence at SEQ ID NO 24167

SEQ ID NO: 24170 - DNA, 240 bp, Muscodor strobelii
  misc_feature: SGI cDNA ID NO. 568237
  misc_feature: Elevated expression when VOC is produced
  misc_feature: Encodes the peptide sequence at SEQ ID NO 24171
atgaccgccaaaaacaacatcccgaagacggatggtaacgagaacagtaacagcacacgaagtcaaactaaagaagaagtttcgtatgccaaccagcaatatgtgcaaagcgacggcagcctctacgaccgacttaatgcagcctcgcagtatggcaaaaccgagcagcagatccgaaatgagcacgttacaagagccagaaacgctattcgcaagtttgacgaacagttcaacaagtag

SEQ ID NO: 24171 - protein, 79 aa, Muscodor strobelii
  misc_feature: SGI Peptide ID NO. 568237
  misc_feature: Useful for introducing or modulating the production of volatile compounds
MTAKNNIPKTDGNENSNSTRSQTKEEVSYANQQYVQSDGSLYDRLNAASQYGKTEQQIRNEHVTRARNAIRKFDEQFNK

SEQ ID NO: 24172 - DNA, 1191 bp, Muscodor strobelii
  misc_feature: SGI EST ID NO. CUFF.56995.0
  misc_feature: Variant of the nucleotide sequence at SEQ ID NO 24170
tcagctccttatgcatgcgccctgattggagataggaggcagtcacttcgcttatagtaataagagcgctggcaaaattgtcgttggtagtgtttcagaaaaaccgtttacagctgctatctcaacaactacgatacttatcgacagaatccattcaccttcatcgctgcaacaaaacaagattgccgctgaaactctttgtaaccgtccttaggcatgaatctacgttcattttgatgctacggacattacatgtcgatagcgatttatgcgatataagcgtatagtcaggtattgaagctggatgggaatatgagcaatgccaaggtctaagtcgatcacacgatacgaccattgcacacaacgattatgtgagttcaaatggaccaagcaccaaggataggtccgagtgatcaaagcctcagcaatgaagagcatgatagttcggtgaaagggttattttaactacaacacagggaccagttccgatagtggccagatagaactcaggttttgtcacaggatactgtgataaacctcaggttttgtcaaagatggctgatgacgcgccaaatctccatcaaacacagtctgagcgaatgtattaagagcgagtccaagcaaacataaataggagatcaaatggccggaagttcgaagatgaccaaaacagcagtgtactcacctccatctaatcactgagatatcaaaaattcacatcctctgactgtcagtgagtctgcgactcgggcaaacaaaatgaccgccaaaaacaacatcccgaagacggatggtaacgagaacagtaacagcacacgaagtcaaactaaagaagaagtttcgtatgccaaccagcaatatgtgcaaagcgacggcagcctctacgaccgacttaatgcagcctcgcagtatggcaaaaccgagcagcagatccgaaatgagcacgttacaagagccagaaacgctattcgcaagtttgacgaacagttcaacaagtagggctagggtcagccgatgaaacggttcgacttaagacatgtgttcaaagtagtgagggtggtttgaagcctcgtaactttttcctaatcttattagtgtcattggattacacactcgcttggtttgcttgcttttctagatggaccgtattctgatattctgccgtggaactatcgctgtatgattcactcg

SEQ ID NO: 24173 - DNA, 2550 bp, Muscodor strobelii
  misc_feature: SGI cDNA ID NO. 568238
  misc_feature: Encodes the peptide sequence at SEQ ID NO 24174
gcctcgcagcgacgagacgactcttccgcctcggactcgcacggcgacgagaacgccgaggccggcacgctcgtgcccatccacgagaacgccccctacgtcgaggagcagccgccggacgactggtacaacgaccctagccagggcccgcgcatgcgcaccggcgagaacatcgtcaccctcctgttccgcgtctccgaggacaacgcgcgccgcaacgcctacgtccaccgcggctgccagtgcaactcgtgcggcatggtccccatccgcggcttccgctaccgctgcgccaactgcgccgacttcgacctgtgcgaggtctgcgaggcccagaacctgcacaacaagtcccacatcttctacaaggtcaaggtccccgcgccccccttcgcgccccgccacgtccagcccgtctggtatcccggcgaccccgacaccgccctgcggaacctccccaagccgctgctcgacaagtggtctcaggagacgcccttcgacaggatggagctggacgcgctgtgggagcagtggaccttcatggccaacaccgagtggcgcgacgaccccaactctctggggctggccatggaccggaagacgttcgagcgctgtctggtgccgtctggcggctataggtatgccgcccccaatctcatccacgatcgcatgtttgctttctacgataccaatcgcgacgacctcattggctttgaggagttcgtccatggtgtatcctacaaaaagcagaggacgaagcttaggaggatattccaaggctacgacgtcgatggagacggctttgttagccgtcgcgactttctgcgcatgtttcgcgcctactacgtcatttacaagcaatggcatcacgatctcttggacgggctggatgatagtatggggaccaacacggaggcccagcagctagtcaacagcagacagcccctgagcagcgtgttcggcagagagggcagagtccccgctgctgatcatggcaggcccatggacggcaagatcttccggtccggccaagatgccgaagtacatgacggccggggagctgttagcgaagaccggccggatacctcgaaccgcgaagatatcctacgcgaactgtttgttccggctagcaatccgagccacttcaccgagtctttcggctcttcgtcacgaacagattatcggggagcgctcaaccgagatatggcctattggtctgggattctgaacccgcctcggaactcagtcgaactcacctctctgatatctggtgatcagactcagctcaacgatcttatcgactccctacgccgccaagagcctggagattttctggccgatgatccggagtcagcttcatctgacgaggacgaaagcaaccctgaccagcacttcgatgaagaaggtgaacctattcgaccagcagtggcagacgatcccgacacatttgtcagtcctgatgcgagaggattcgtaaataccctaccagtcgaggtccaattccagtcccagccagaaaacgcgactgttcctccgcagcgccttaacatggacaagaagaagcgtctcatcgcccggaaacagctatttgagaggtggaaaagacgacaattctacgtggacgaagaagagggtggcttaccaccccaaggttggcgccaggatcaggatatcttaaataacacccagggtacaactgagcccatgaagtccgctcagcccatattatcttcaagatcgcggtcttcatctaaggttcgatttgccgaggacaccgatgaatttgaaactagatcgaatgtttctacctcttcgcggagtgtacccgagcgatggggtggtatggagatcccagacgcagaacgggatgcgggcaaggaaattttgtatcaagtcacacaacaagctttaaacgagctacttgacgagttgttcaaaaagaaggaagacctggccgtcagggcggctgagacaaaggagcaacgtgaaaaatatcgtcacgttttagatactatggagctcaatgacgaagatgacaagtctgaaacagactccctggcgccgtctaagagtggcggctcgccagacaaagggacaccgcctgcgcagaagagcttggaggacttgttggctactagtggttataccatcaactctcctgaagtcgacaccgatctgccccgagttggcccgaataatgtaccagcgtctgtggagcatcgcgatccgactatgcctcaatttcggcccaacatccatgatatacggactaacggtcactccaaggaaccattacttgacggcccggagacctttcccgaggtagattcaaatactggaggcccagacttgtccgatcatgtcccgcactcaacattggtcacttggaaacgactagatcttgccgagcgagaagcggcggatcgtgggggatggggtcgcttgagctacgatgagttcgaacagatctacagagaacacgaactggccgacagtcggaagaatcgacttgactacttaggtagttggatcgatttctgcattccttag

SEQ ID NO: 24174 - protein, 849 aa, Muscodor strobelii
  misc_feature: SGI Peptide ID NO. 568238
  misc_feature (253)..(281): Pfam Id: PF00036 Pfam Desc: EF hand
  misc_feature (76)..(119): Pfam Id: PF00569 Pfam Desc: Zinc finger, ZZ type
  misc_feature (76)..(116): Pfam Id: PF00569 Pfam Desc: Zinc finger, ZZ type
  misc_feature (14)..(849): NCBI GI: 261355396 Blast Desc: EF hand domain-containing protein [Verticillium albo-atrum VaMs.102]
  misc_feature (41)..(845): NCBI GI: 145611100 Blast Desc: MGG_00654 [Magnaporthe grisea 70-15] gi|145018431|gb|EDK02710.1| MGG_00654 [Magnaporthe grisea 70-15]
  misc_feature (15)..(849): NCBI GI: 256735549 Blast Desc: NECHADRAFT_30712 [Nectria haematococca mpVI 77-13-4]
  misc_feature (2)..(849): NCBI GI: 171695212 Blast Desc: protein product [Podospora anserina] gi|170947848|emb|CAP60012.1| protein product [Podospora anserina]
  misc_feature (17)..(849): NCBI GI: 46135751 Blast Desc: FG09391.1 [Gibberella zeae PH-1]
  misc_feature (40)..(849): NCBI GI: 85111260 Blast Desc: NCU02115 [Neurospora crassa OR74A] gi|28925594|gb|EAA34616.1| NCU02115 [Neurospora crassa OR74A]
  misc_feature (53)..(742): NCBI GI: 156035541 Blast Desc: SS1G_12974 [Sclerotinia sclerotiorum 1980] gi|154698379|gb|EDN98117.1| SS1G_12974 [Sclerotinia sclerotiorum 1980]
  misc_feature (53)..(742): NCBI GI: 154312479 Blast Desc: BC1G_05842 [Botryotinia fuckeliana B05.10] gi|150849943|gb|EDN25136.1| BC1G_05842 [Botryotinia fuckeliana B05.10]
  misc_feature (34)..(723): NCBI GI: 119468322 Blast Desc: EF hand domain protein [Neosartorya fischeri NRRL 181] gi|119406002|gb|EAW15953.1| EF hand domain protein [Neosartorya fischeri NRRL 181]
  misc_feature (55)..(723): NCBI GI: 159124183 Blast Desc: EF hand domain protein [Aspergillus fumigatus A1163]
ASQRRDDSSASDSHGDENAEAGTLVPIHENAPYVEEQPPDDWYNDPSQGPRMRTGENIVTLLFRVSEDNARRNAYVHRGCQCNSCGMVPIRGFRYRCANCADFDLCEVCEAQNLHNKSHIFYKVKVPAPPFAPRHVQPVWYPGDPDTALRNLPKPLLDKWSQETPFDRMELDALWEQWTFMANTEWRDDPNSLGLAMDRKTFERCLVPSGGYRYAAPNLIHDRMFAFYDTNRDDLIGFEEFVHGVSYKKQRTKLRRIFQGYDVDGDGFVSRRDFLRMFRAYYVIYKQWHHDLLDGLDDSMGTNTEAQQLVNSRQPLSSVFGREGRVPAADHGRPMDGKIFRSGQDAEVHDGRGAVSEDRPDTSNREDILRELFVPASNPSHFTESFGSSSRTDYRGALNRDMAYWSGILNPPRNSVELTSLISGDQTQLNDLIDSLRRQEPGDFLADDPESASSDEDESNPDQHFDEEGEPIRPAVADDPDTFVSPDARGFVNTLPVEVQFQSQPENATVPPQRLNMDKKKRLIARKQLFERWKRRQFYVDEEEGGLPPQGWRQDQDILNNTQGTTEPMKSAQPILSSRSRSSSKVRFAEDTDEFETRSNVSTSSRSVPERWGGMEIPDAERDAGKEILYQVTQQALNELLDELFKKKEDLAVRAAETKEQREKYRHVLDTMELNDEDDKSETDSLAPSKSGGSPDKGTPPAQKSLEDLLATSGYTINSPEVDTDLPRVGPNNVPASVEHRDPTMPQFRPNIHDIRTNGHSKEPLLDGPETFPEVDSNTGGPDLSDHVPHSTLVTWKRLDLAEREAADRGGWGRLSYDEFEQIYREHELADSRKNRLDYLGSWIDFCIP

SEQ ID NO: 24175 - DNA, 3069 bp, Muscodor strobelii
  misc_feature: SGI EST ID NO. CUFF.57018.0
  misc_feature: Variant of the nucleotide sequence at SEQ ID NO 24173
cgcagcgacgagacgactcttccgcctcggactcgcacggcgacgagaacgccgaggccggcacgctcgtgcccatccacgagaacgccccctacgtcgaggagcagccgccggacgactggtacaacgaccctagccagggcccgcgcatgcgcaccggcgagaacatcgtcaccctcctgttccgcgtctccgaggacaacgcgcgccgcaacgcctacgtccaccgcggctgccagtgcaactcgtgcggcatggtccccatccgcggcttccgctaccgctgcgccaactgcgccgacttcgacctgtgcgaggtctgcgaggcccagaacctgcacaacaagtcccacatcttctacaaggtcaaggtccccgcgccccccttcgcgccccgccacgtccagcccgtctggtatcccggcgaccccgacaccgccctgcggaacctccccaagccgctgctcgacaagtggtctcaggagacgcccttcgacaggatggagctggacgcgctgtgggagcagtggaccttcatggccaacaccgagtggcgcgacgaccccaactctctggggctggccatggaccggaagacgttcgagcgctgtctggtgccgtctggcggctataggtatgccgcccccaatctcatccacgatcgcatgtttgctttctacgataccaatcgcgacgacctcattggctttgaggagttcgtccatggtgtatcctacaaaaagcagaggacgaagcttaggaggatattccaaggctacgacgtcgatggagacggctttgttagccgtcgcgactttctgcgcatgtttcgcgcctactacgtcatttacaagcaatggcatcacgatctcttggacgggctggatgatagtatggggaccaacacggaggcccagcagctagtcaacagcagacagcccctgagcagcgtgttcggcagagagggcagagtccccgctgctgatcatggcaggcccatggacggcaagatcttccggtccggccaagatgccgaagtacatgacggccggggagctgttagcgaagaccggccggatacctcgaaccgcgaagatatcctacgcgaactgtttgttccggctagcaatccgagccacttcaccgagtctttcggctcttcgtcacgaacagattatcggggagcgctcaaccgagatatggcctattggtctgggattctgaacccgcctcggaactcagtcgaactcacctctctgatatctggtgatcagactcagctcaacgatcttatcgactccctacgccgccaagagcctggagattttctggccgatgatccggagtcagcttcatctgacgaggacgaaagcaaccctgaccagcacttcgatgaagaaggtgaacctattcgaccagcagtggcagacgatcccgacacatttgtcagtcctgatgcgagaggattcgtaaataccctaccagtcgaggtccaattccagtcccagccagaaaacgcgactgttcctccgcagcgccttaacatggacaagaagaagcgtctcatcgcccggaaacagctatttgagaggtggaaaagacgacaattctacgtggacgaagaagagggtggcttaccaccccaaggttggcgccaggatcaggatatcttaaataacacccagggtacaactgagcccatgaagtccgctcagcccatattatcttcaagatcgcggtcttcatctaaggttcgatttgccgaggacaccgatgaatttgaaactagatcgaatgtttctacctcttcgcggagtgtacccgagcgatggggtggtatggagatcccagacgcagaacgggatgcgggcaaggaaattttgtatcaagtcacacaacaagctttaaacgagctacttgacgagttgttcaaaaagaaggaagacctggccgtcagggcggctgagacaaaggagcaacgtgaaaaatatcgtcacgttttagatactatggagctcaatgacgaagatgacaagtctgaaacagactccctggcgccgtctaagagtggcggctcgccagacaaagggacaccgcctgcgcagaagagcttggaggacttgttggctactagtggttataccatcaactctcctgaagtcgacaccgatctgccccgagttggcccgaataatgtaccagcgtctgtggagcatcgcgatccgactatgcctcaatttcggcccaacatccatgatatacggactaacggtcactccaaggaaccattacttgacggcccggagacctttcccgaggtagattcaaatactggaggcccagacttgtccgatcatgtcccgcactcaacattggtcacttggaaacgactagatcttgccgagcgagaagcggcggatcgtgggggatggggtcgcttgagctacgatgagttcgaacagatctacagagaacacgaactggccgacagtcggaagaatcgacttgactacttaggtagttggatcgatttctgcattccttagtatggtaagcaggccgtcccggttgaacaaggcgatcagccagaggtctcggaggactcagagagcccccatatctcagcgcacatggcggacatagaagactccgagagtgatgagagtcttcttgtccctttatggcaataaataggaaccaatgcggtcgccagcttcttaagagttcgtatctatttcatacgtgtctggggtagtgatgcagagcggcatagaaaacttatgctcttgtattatttttatataactattcatctgcaaaagcctggcgaatgtaattcattacgaaatggcagtatagtaccctcgcgtcagcatacacttcgttgggttgtacagttgcatgtcaaagtcggcgtgcaatcaagccgaattgttaagcagtgttcaaaaagtggccgatataagcttatactcttgcagtagctgcagcaacttgctccccgaacctcagccagcggttcgtgctgacagtaagtacatttcgctaatattgagttatggaatgaaa

SEQ ID NO: 24176 - DNA, 1029 bp, Muscodor strobelii
  misc_feature: SGI cDNA ID NO. 568239
  misc_feature: Encodes the peptide sequence at SEQ ID NO 24177
atgaaggaagccattgttgagaaaggcccgaaggtcacaatcgtcgactcgccaatccccaaggctgaggccgaccaggtggtgatcaaggtaatcgtgagcggatcgaacccgaaggattggaaagtccccttttggatggacagcaagatcaaccaaggcgatgacatcgcgggtttcgttcacgaagttggcgagaatgtgaccgaattccatgtcggcgaccgcgtgggcgctttccaccagatgttgagccctcacggctcgtatgccgaatatgctgttgcgtggcagcatactacttttcaaatccccaagaagacatcttttgaagaggctgccgcgatccccttagcatatatgacatcggccataggtctctatcaaaaactagagcttccccagccttggaacccagcaaccaagcccatcccactcgtagtctacggcgccgcctccgcagtcggcgcatacgccatccagctcgcagtccgaagcaacatccacccgcttatctgcgtagcgggatcctcctcagcacacgtcgaatcgctcatcgaccgcagcaaaggagataccatcgtcgactaccgcgtcggtgccgaccaactagtcgaagatctcaagaaagccgcgaacggcgcgcccttgttgtatgcgttcgacgctgtctcggatcatgggagttatcagaatctgggaaaggttcttgctgatggggcgataatgacgcttgtgctaccgggtaaagattatagtgagattccggagaggattactcataatactacgagtgtgggcgctgcgcataaggaggagaaagatttcgcaatggtgtattttcgatatgcggcgaggggattgcaggagggttggtttaaaccccagccgcaggaggttgttcctgggggcttggggggtgtgcagaaggcgctgaaggatttgatggatgggaaggtgaatgctgttaagtatgtttttaggattgctgatacggagggtgctgggcagagtgattcgcggttgtga

SEQ ID NO: 24177 - protein, 342 aa, Muscodor strobelii
  misc_feature: SGI Peptide ID NO. 568239
  misc_feature (24)..(104): Pfam Id: PF08240 Pfam Desc: Alcohol dehydrogenase GroES-like domain
  misc_feature (57)..(104): Pfam Id: PF08240 Pfam Desc: Alcohol dehydrogenase GroES-like domain
  misc_feature (1)..(331): NCBI GI: 169594922 Blast Desc: SNOG_00192 [Phaeosphaeria nodorum SN15] gi|160700972|gb|EAT91687.2| SNOG_00192 [Phaeosphaeria nodorum SN15]
  misc_feature (1)..(331): NCBI GI: 189208532 Blast Desc: conserved [Pyrenophora tritici-repentis Pt-1C-BFP] gi|187976692|gb|EDU43318.1| conserved [Pyrenophora tritici-repentis Pt-1C-BFP]
  misc_feature (1)..(332): NCBI GI: 242806407 Blast Desc: quinone oxidoreductase, [Talaromyces stipitatus ATCC 10500] gi|218715362|gb|EED14784.1| quinone oxidoreductase, [Talaromyces stipitatus ATCC 10500]
  misc_feature (1)..(334): NCBI GI: 256720805 Blast Desc: NECHADRAFT_50006 [Nectria haematococca mpVI 77-13-4]
  misc_feature (1)..(339): NCBI GI: 171680004 Blast Desc: protein product [Podospora anserina] gi|170939628|emb|CAP64855.1| protein product [Podospora anserina]
  misc_feature (4)..(339): NCBI GI: 164425656 Blast Desc: NCU06080 [Neurospora crassa OR74A] gi|157071011|gb|EAA30306.2| conserved [Neurospora crassa OR74A]
  misc_feature (1)..(334): NCBI GI: 67538368 Blast Desc: AN5354.2 [Aspergillus nidulans FGSC A4] gi|40743324|gb|EAA62514.1| AN5354.2 [Aspergillus nidulans FGSC A4] gi|259485203|tpe|CBF82048.1| TPA: quinone oxidoreductase, A4]
  misc_feature (1)..(324): NCBI GI: 145602362 Blast Desc: MGG_04975 [Magnaporthe grisea 70-15] gi|145010787|gb|EDJ95443.1| MGG_04975 [Magnaporthe grisea 70-15]
  misc_feature (1)..(334): NCBI GI: 169782746 Blast Desc: [Aspergillus oryzae RIB40] gi|83774579|dbj|BAE64702.1| protein product [Aspergillus oryzae]
  misc_feature (1)..(334): NCBI GI: 238492393 Blast Desc: quinone oxidoreductase, [Aspergillus flavus NRRL3357] gi|220695927|gb|EED52269.1| quinone oxidoreductase, [Aspergillus flavus NRRL3357]
MKEAIVEKGPKVTIVDSPIPKAEADQVVIKVIVSGSNPKDWKVPFWMDSKINQGDDIAGFVHEVGENVTEFHVGDRVGAFHQMLSPHGSYAEYAVAWQHTTFQIPKKTSFEEAAAIPLAYMTSAIGLYQKLELPQPWNPATKPIPLVVYGAASAVGAYAIQLAVRSNIHPLICVAGSSSAHVESLIDRSKGDTIVDYRVGADQLVEDLKKAANGAPLLYAFDAVSDHGSYQNLGKVLADGAIMTLVLPGKDYSEIPERITHNTTSVGAAHKEEKDFAMVYFRYAARGLQEGWFKPQPQEVVPGGLGGVQKALKDLMDGKVNAVKYVFRIADTEGAGQSDSRL

SEQ ID NO: 24178 - DNA, 1582 bp, Muscodor strobelii
  misc_feature: SGI EST ID NO. CUFF.57015.0
  misc_feature: Variant of the nucleotide sequence at SEQ ID NO 24176
gttttcatctagtgacgcaatttcagcaacggtgctcatcatgactttattcctacgttgagatttcctctttcggtatatcatgcaacattgggatgtggaggtgcggcaatgaatgaatccccgcatgctttcccgatgatgtatacagcctaccgggttagtggctggctatatatttccacgtgccgcgagatcaattgagtttgattattgagtgctggattaatcgatgtttaacatcgagtttcaattgggaagctttatcttgattcagaagaaaagtaccacatatcaataactcacaccacacaaccagcagtcatgaaggaagccattgttgagaaaggtactcatactttcagcgccaaatcaaatgatgaggctcgagatatcataaaataacattcaacaggcccgaaggtcacaatcgtcgactcgccaatccccaaggctgaggccgaccaggtggtgatcaaggtaatcgtgagcggatcgaacccgaaggattggaaagtccccttttggatggacagcaagatcaaccaaggcgatgacatcgcgggtttcgttcacgaagttggcgagaatgtgaccgaattccatgtcggcgaccgcgtgggcgctttccaccagatgttgagccctcacggctcgtatgccgaatatgctgttgcgtggcagcatactacttttcaaatccccaagaagacatcttttgaagaggctgccgcgatccccttagcatatatgacatcggccataggtctctatcaaaaactagagcttccccagccttggaacccagcaaccaagcccatcccactcgtagtctacggcgccgcctccgcagtcggcgcatacgccatccagctcgcagtccgaagcaacatccacccgcttatctgcgtagcgggatcctcctcagcacacgtcgaatcgctcatcgaccgcagcaaaggagataccatcgtcgactaccgcgtcggtgccgaccaactagtcgaagatctcaagaaagccgcgaacggcgcgcccttgttgtatgcgttcgacgctgtctcggatcatgggagttatcagaatctgggaaaggttcttgctgatggggcgataatgacgcttgtgctaccgggtaaagattatagtgagattccggagaggattactcataatactacgagtgtgggcgctgcgcataaggaggagaaagatttcgcaatggtgtattttcgatatgcggcgaggggattgcaggagggttggtttaaaccccagccgcaggaggttgttcctgggggcttggggggtgtgcagaaggcgctgaaggatttgatggatgggaaggtgaatgctgttaagtatgtttttaggattgctgatacggagggtgctgggcagagtgattcgcggttgtgaattgttgagtctctgatagtatgagaggtacacttcgcggaggtatatagcgaagcaaaggatgatggtatcataaattgtgaatgaaatggatatgttacgctggtgactcgcactccgtcatgtcggaactgtagctgtcagatacttggcgatgtaaaaa

SEQ ID NO: 24179 - DNA, 576 bp, Muscodor strobelii
  misc_feature: SGI cDNA ID NO. 568240
  misc_feature: Elevated expression when VOC is produced
  misc_feature: Encodes the peptide sequence at SEQ ID NO 24180
atgcccaaactctcgagcagtaatggtctaggcccagctcaaatcggaatggcgcttagcgacgacggtacttgtgttaacatatttcgggccggcattgtcatgtctgttaccgaagacgggtgtgcttcatatctgccagctacttcgtgggatgagttcgaatttcatgatgatcaagacttctccattgccgaaggcgacgccatttccatcaaaatgttcatatactctcccgacaatgatgggatttttacgtctggcgaagttactttcgagaatgctcgcacaaaatcagtacttcgggtccctctgagtgaccaaggagcgctctgtggcacggacgcagtatgggaagttcaggatttctcttccgacggcgacaaattctctacattgccgaattttggccaactgaagttcgataattgttatgcattggacataaacggcaagaagtttacacccgcactgactaatgaagcgataacttttggtagtgatacggacatcgcagtttgtaacatcgaggggaaagacatggaccaagtcgcttgcaagtttattggttcatag

SEQ ID NO: 24180 - protein, 191 aa, Muscodor strobelii
  misc_feature: SGI Peptide ID NO. 568240
  misc_feature (25)..(160): NCBI GI: 154321167 Blast Desc: BC1G_01458 [Botryotinia fuckeliana B05.10] gi|150851996|gb|EDN27188.1| BC1G_01458 [Botryotinia fuckeliana B05.10]
  misc_feature (39)..(146): NCBI GI: 131056 Blast Desc: PRTA_ASPNG RecName: Full=Aspergillopepsin-2; AltName: Full=Aspergillopepsin II; AltName: Full=Acid protease A; AltName: Full=Proctase A; Contains: RecName: Full=Aspergillopepsin-2 light
  misc_feature (39)..(146): NCBI GI: 145228381 Blast Desc: PRTA_ASPNG RecName: Full=Aspergillopepsin-2; AltName: Full=Aspergillopepsin II; AltName: Full=Acid protease A; AltName: Full=Proctase A; Contains: RecName: Full=Aspergillopepsin-2 light
  misc_feature (39)..(146): NCBI GI: 85543951 Blast Desc: PRTA_ASPNG RecName: Full=Aspergillopepsin-2; AltName: Full=Aspergillopepsin II; AltName: Full=Acid protease A; AltName: Full=Proctase A; Contains: RecName: Full=Aspergillopepsin-2 light
  misc_feature (1)..(151): NCBI GI: 169604590 Blast Desc: SNOG_05309 [Phaeosphaeria nodorum SN15] gi|111066580|gb|EAT87700.1| SNOG_05309 [Phaeosphaeria nodorum SN15]
  misc_feature (71)..(190): NCBI GI: 256723595 Blast Desc: NECHADRAFT_86610 [Nectria haematococca mpVI 77-13-4]
  misc_feature (28)..(143): NCBI GI: 242761195 Blast Desc: conserved [Talaromyces stipitatus ATCC 10500] gi|218723329|gb|EED22746.1| conserved [Talaromyces stipitatus ATCC 10500]
  misc_feature (28)..(181): NCBI GI: 212530358 Blast Desc: aspergillopepsin-2 precursor, [Penicillium marneffei ATCC 18224] gi|210074734|gb|EEA28821.1| aspergillopepsin-2 precursor, [Penicillium marneffei ATCC 18224]
  misc_feature (28)..(154): NCBI GI: 242827410 Blast Desc: aspergillopepsin-2 precursor, [Talaromyces stipitatus ATCC 10500] gi|218711985|gb|EED11414.1| aspergillopepsin-2 precursor, [Talaromyces stipitatus ATCC 10500]
  misc_feature: Useful for introducing or modulating the production of volatile compounds
MPKLSSSNGLGPAQIGMALSDDGTCVNIFRAGIVMSVTEDGCASYLPATSWDEFEFHDDQDFSIAEGDAISIKMFIYSPDNDGIFTSGEVTFENARTKSVLRVPLSDQGALCGTDAVWEVQDFSSDGDKFSTLPNFGQLKFDNCYALDINGKKFTPALTNEAITFGSDTDIAVCNIEGKDMDQVACKFIGS

SEQ ID NO: 24181 - DNA, 948 bp, Muscodor strobelii
  misc_feature: SGI EST ID NO. CUFF.57021.0
  misc_feature: Variant of the nucleotide sequence at SEQ ID NO 24179
tgagaatatgagggctgctattttaactatattttctcttttcgccactgctgcacttggtattgcagttcctacctcggggcgaactccaagccgggatggcaattctgaccagaacaaaccgctttatctttctaaaagagatagcgacgatagcgacattgatcatttcgccggcgccgaaactccaggattaggaataacaaatgtctcgactgatatcattatgcccaaactctcgagcagtaatggtctaggcccagctcaaatcggaatggcgcttagcgacgacggtacttgtgttaacatatttcgggccggcattgtcatgtctgttaccgaagacgggtgtgcttcatatctgccagctacttcgtgggatgagttcgaatttcatgatgatcaagacttctccattgccgaaggcgacgccatttccatcaaaatgttcatatactctcccgacaatgatgggatttttacgtctggcgaagttactttcgagaatgctcgcacaaaatcagtacttcgggtccctctgagtgaccaaggagcgctctgtggcacggacgcagtatgggaagttcaggatttctcttccgacggcgacaaattctctacattgccgaattttggccaactgaagttcgataattgttatgcattggacataaacggcaagaagtttacacccgcactgactaatgaagcgataacttttggtagtgatacggacatcgcagtttgtaacatcgaggggaaagacatggaccaagtcgcttgcaagtttattggttcatagagagatgacacggttgagaagggctgcgaccgaggatttataaataaatgtctgggcattgcttgcgaatataataatgtgatactaggatagcgctttggggaaagtaggttgtattaggcacctgaaaataatagaccacaatc

SEQ ID NO: 24182 - DNA, 744 bp, Muscodor strobelii
  misc_feature: SGI cDNA ID NO. 568241
  misc_feature: Elevated expression when VOC is produced
  misc_feature: Encodes the peptide sequence at SEQ ID NO 24183
atgaaattcttccctcccgcagcaataagcttatgcactgcgactgaactggctgccgcaatacctggacttggtagcgactctacctcagagactctttctagttccgccagagctctatatcacgtcgagcgaggcaatggcgattctagtgccggtggctttgtggatatcgtcggactgagaggaatctctgccatggtcacaatacctactctcttccctagcgagaattcaggtccagctcaacttattctagggttgggtaacgagttctttgccggcttcatgatgtcaatcaccgagagcggcaaaacttcctacgaacctttcgccagatggggcgatgcgccaagtgtgagcatcgatgtccgggaacgcgacaagatcaatgtcgcgatgtctgtctcactagacaactcgagagagcccacaaagggagcagcttgtttcgaaaatttgagtagggacacaggaaagacagtttgcgtaccttttcttaatcaaccatcgctgttcgacaccagggcgacttggtcaattgtcactgaagaagattctgtcacgttgcctccatacgatcaggtccgttttgagaatgcagttgcgtttgacgagcgagaatgtatattcagaccgaagtatctggtgaatatctcctcgcgtggcacaaacctgactgattgcagtctagttggggctgatgacgatcaagtggtatgcgactacatcggtccaggttga

SEQ ID NO: 24183 - protein, 247 aa, Muscodor strobelii
  misc_feature: SGI Peptide ID NO. 568241
  misc_feature: Useful for introducing or modulating the production of volatile compounds
MKFFPPAAISLCTATELAAAIPGLGSDSTSETLSSSARALYHVERGNGDSSAGGFVDIVGLRGISAMVTIPTLFPSENSGPAQLILGLGNEFFAGFMMSITESGKTSYEPFARWGDAPSVSIDVRERDKINVAMSVSLDNSREPTKGAACFENLSRDTGKTVCVPFLNQPSLFDTRATWSIVTEEDSVTLPPYDQVRFENAVAFDERECIFRPKYLVNISSRGTNLTDCSLVGADDDQVVCDYIGPG

SEQ ID NO: 24184 - DNA, 1257 bp, Muscodor strobelii
  misc_feature: SGI EST ID NO. CUFF.57027.0
  misc_feature: Variant of the nucleotide sequence at SEQ ID NO 24182
cttacatccgatgttgtaatgaaccagtcctagttgttgcgtttgtgcagattttcctccgtgaatactactctcgtactccgttcgaactacacaccatcgtggacttgtctcaaggccgaacttaccaacttccaaggcgtctagaacttataatgccagcttatgttctttctactaagattcagtcctttctttagctcgcgatgaaattcttccctcccgcagcaataagcttatgcactgcgactgaactggctgccgcaatacctggacttggtagcgactctacctcagagactctttctagttccgccagagctctatatcacgtcgagcgaggcaatggcgattctagtgccggtggctttgtggatatcgtcggactgagaggaatctctgccatggtcacaatacctactctcttccctagcgagaattcaggtccagctcaacttattctagggttgggtaacgagttctttgccggcttcatgatgtcaatcaccgagagcggcaaaacttcctacgaacctttcgccagatggggcgatgcgccaagtgtgagcatcgatgtccgggaacgcgacaagatcaatgtcgcgatgtctgtctcactagacaactcgagagagcccacaaagggagcagcttgtttcgaaaatttgagtagggacacaggaaagacagtttgcgtaccttttcttaatcaaccatcgctgttcgacaccagggcgacttggtcaattgtcactgaagaagattctgtcacgttgcctccatacgatcaggtccgttttgagaatgcagttgcgtttgacgagcgagaatgtatattcagaccgaagtatctggtgaatatctcctcgcgtggcacaaacctgactgattgcagtctagttggggctgatgacgatcaagtggtatgcgactacatcggtccaggttgatctattcattctgaatgtcagagcggagtgtcttgtacaaggagtgcagctttgcaggagtagctctacgacatcgaatctcgctgtgacgaaaacatgagaaattgtaactttgagagagaagacaggaactaagtcattcatgaccttgtaaagctcaaagaaatggacgcagttcaaataatctatggcgaggaaagatgtacacaattatgtgagcacaggtcgcaaatattcaaattggctcataaacaattgtttgtaacatacggtctccgcaaatccgacacacatcaatacatgtccg

SEQ ID NO: 24185 - DNA, 468 bp, Muscodor strobelii
  misc_feature: SGI cDNA ID NO. 568242
  misc_feature: Elevated expression when VOC is produced
  misc_feature: Encodes the peptide sequence at SEQ ID NO 24186
atgggtattgattcgaacggtgacccgttctatataccttatactttctgggatgaacttgaactccaccagagccaagatttcagcatcaaagaaggggataccatcagaattacgctctcaattgattcgtttaaacagagtgggttattcgttgatggtggggttgtttttgagaatctttgcaacgacactactcctcttgacgttgtgttgtttgacaagcccccagtgtgcgggactggcgcattttgggacattgtcaatgagactgatggcgatgacaaacttctcccgttacctgacctcgagaagatatcatttgaaaattgcgttgcgagcgacaccgatggattcctgttcaaaccccagaaggttgaaaatatctttcctcctgcaagcgcgaacttgacagattgcagtatccctacagagggtcgaattgtttgtggctttactggtccttaa

SEQ ID NO: 24186 - protein, 155 aa, Muscodor strobelii
  misc_feature: SGI Peptide ID NO. 568242
  misc_feature (19)..(49): Pfam Id: PF07933 Pfam Desc: Domain of function (DUF1681)
  misc_feature: Useful for introducing or modulating the production of volatile compounds
MGIDSNGDPFYIPYTFWDELELHQSQDFSIKEGDTIRITLSIDSFKQSGLFVDGGVVFENLCNDTTPLDVVLFDKPPVCGTGAFWDIVNETDGDDKLLPLPDLEKISFENCVASDTDGFLFKPQKVENIFPPASANLTDCSIPTEGRIVCGFTGP

SEQ ID NO: 24187 - DNA, 1701 bp, Muscodor strobelii
  misc_feature: SGI EST ID NO. CUFF.57093.0
  misc_feature: Variant of the nucleotide sequence at SEQ ID NO 24185
catcagaattacgctctcaattgattcgtttaaacagagtgggttattcgttgatggtggggttgtttttgagaatctttgcaacgacactactcctcttgacgttgtgttgtttgacaagcccccagtgtgcgggactggcgcattttgggacattgtcaatgagactgatggcgatgacaaacttctcccgttacctgacctcgagaagatatcatttgaaaattgcgttgcgagcgacaccgatggattcctgttcaaaccccagaaggttgaaaatatctttcctcctgcaagcgcgaacttgacagattgcagtatccctacagagggtcgaattgtttgtggctttactggtccttaagagtgcatcaaggggggaaacgagttgcgcagtggttcatttgcatgctttggcactttgtagagtccggcgaaccgtctttgcatttgtattgtattatacaacattcggattgtctagttatcacttatcgacggacaggtcttactttcaacctcaaaaggacatcctcatcttgagcaagtctttttctatgatatctggtttcttagcaaatacctcttccatgtcccacattgcagtcaggtatcgacctgccagccactcctgacgcacactcgtcaaaaatgcaatcgtgtcccctccaagagccggtgtacacttaagccaagctatatagcatgtcagatacgatacaaatttgaatcctgagcggaagagggtaccttgagttgcttctggcagcctgctggctagatcggtcgcaacgctgtcaacggcatcagtctacatctcacgaacattgaaagggtgcttacccgccaggatgtatggaataagctagcaagccctagagaataccgtcagtgctctgagtcttaccaactgtgcttctttgtacgaacctgatcagcatactcggccatcagaaactcaacaagccgcagcagcgcaaatttgctgatctgatacccgctaccacccttgtgaaagtgcagagcgccagtcgacgagatcacaataattgtcttgtcacctcccttcaacatcagaggcaggaacattttagcgacaagatacgccccgcgcaagttgacctccatgctcgtccaccaatcaacttcgtccccatctaggattttctcatatcgtgcgagataccctgcgttttcgaccaagatatcaagccttccgaatcgtgcttctacatcctgtgcagcacgcttcacgctcgcgctatcggtgacgtccagctcaatggcaatgacttcaggaagttcatcacctcgtccttctctcttaaagccatttttataatcatctgtaactgcttgtttaattttttctatcgcttctgcaacgctaggatccgttgtccggcgagacgtgatcgcgatgtgagatgcacctgccctggcataggatgtagcaattcccagtccgatgcctttcgtgccgccggtaattaacacggatttcccggtgcaatctgatcgctttataggatctatgtaagcgtatgtgtcataacgagttgtctttgtgaattcagcgccccaattgggaggaacgggagggtatgtggatgatgacagtgtattctgaagttgtttgaccgtgtccatttttcgaggcaataaagatattgagtttcgaagcattacattttaatcgag

SEQ ID NO: 24188 - DNA, 972 bp, Muscodor strobelii
  misc_feature: SGI cDNA ID NO. 568243
  misc_feature: Reduced expression when VOC is produced
  misc_feature: Encodes the peptide sequence at SEQ ID NO 24189
atggacacggtcaaacaacttcagaatacactgtcatcatccacataccctcccgttcctcccaattggggcgctgaattcacaaagacaactcgttatgacacatacgcttacatagatcctataaagcgatcagattgcaccgggaaatccgtgttaattaccggcggcacgaaaggcatcggactgggaattgctacatcctatgccagggcaggtgcatctcacatcgcgatcacgtctcgccggacaacggatcctagcgttgcagaagcgatagaaaaaattaaacaagcagttacagatgattataaaaatggctttaagagagaaggacgaggtgatgaacttcctgaagtcattgccattgagctggacgtcaccgatagcgcgagcgtgaagcgtgctgcacaggatgtagaagcacgattcggaaggcttgatatcttggtcgaaaacgcagggtatctcgcacgatatgagaaaatcctagatggggacgaagttgattggtggacgagcatggaggtcaacttgcgcggggcgtatcttgtcgctaaaatgttcctgcctctgatgttgaagggaggtgacaagacaattattgtgatctcgtcgactggcgctctgcactttcacaagggtggtagcgggtatcagatcagcaaatttgcgctgctgcggcttgttgagtttctgatggccgagtatgctgatcagggcttgctagcttattccatacatcctggcggcgttgcgaccgatctagccagcaggctgccagaagcaactcaagcttggcttaagtgtacaccggctcttggaggggacacgattgcatttttgacgagtgtgcgtcaggagtggctggcaggtcgatacctgactgcaatgtgggacatggaagaggtatttgctaagaaaccagatatcatagaaaaagacttgctcaagatgaggatgtccttttga

SEQ ID NO: 24189 - protein, 323 aa, Muscodor strobelii
  misc_feature: SGI Peptide ID NO. 568243
  misc_feature (50)..(238): Pfam Id: PF00106 Pfam Desc: short chain dehydrogenase
  misc_feature (51)..(255): Pfam Id: PF08659 Pfam Desc: KR domain
  misc_feature (50)..(99): Pfam Id: PF00106 Pfam Desc: short chain dehydrogenase
  misc_feature (119)..(238): Pfam Id: PF00106 Pfam Desc: short chain dehydrogenase
  misc_feature (51)..(148): Pfam Id: PF08659 Pfam Desc: KR domain
  misc_feature (16)..(323): NCBI GI: 156056737 Blast Desc: SS1G_04099 [Sclerotinia sclerotiorum 1980] gi|154701885|gb|EDO01624.1| SS1G_04099 [Sclerotinia sclerotiorum 1980]
  misc_feature (20)..(323): NCBI GI: 171681435 Blast Desc: protein product [Podospora anserina] gi|170940676|emb|CAP65904.1| protein product [Podospora anserina]
  misc_feature (21)..(323): NCBI GI: 154322737 Blast Desc: BC1G_00711 [Botryotinia fuckeliana B05.10] gi|150848045|gb|EDN23238.1| BC1G_00711 [Botryotinia fuckeliana B05.10]
  misc_feature (11)..(313): NCBI GI: 240111298 Blast Desc: oxidoreductase,short chain dehydrogenase, [Coccidioides posadasii C735 delta SOWgp]
  misc_feature (1)..(305): NCBI GI: 119189277 Blast Desc: CIMG_04686 [Coccidioides immitis RS]
  misc_feature (17)..(321): NCBI GI: 212533777 Blast Desc: oxidoreductase, short chain dehydrogenase/reductase family, [Penicillium marneffei ATCC 18224] gi|210072409|gb|EEA26498.1| oxidoreductase, short chain family,
  misc_feature (27)..(321): NCBI GI: 242778830 Blast Desc: oxidoreductase, short chain dehydrogenase/reductase family, [Talaromyces stipitatus ATCC 10500] gi|218722937|gb|EED22355.1| oxidoreductase, short chain family,
  misc_feature (41)..(321): NCBI GI: 168830921 Blast Desc: CtnE [Monascus aurantiacus]
  misc_feature (22)..(321): NCBI GI: 46127635 Blast Desc: FG08195.1 [Gibberella zeae PH-1]
  misc_feature (24)..(321): NCBI GI: 212529264 Blast Desc: conserved [Penicillium marneffei ATCC 18224] gi|210074187|gb|EEA28274.1| conserved [Penicillium marneffei ATCC 18224]
  misc_feature (125)..(295): SWISSPROT Homolog: EC 1.1.1.100 3-oxoacyl-[acyl-carrier-protein] reductase
  misc_feature: Useful for introducing or modulating the production of volatile compounds
MDTVKQLQNTLSSSTYPPVPPNWGAEFTKTTRYDTYAYIDPIKRSDCTGKSVLITGGTKGIGLGIATSYARAGASHIAITSRRTTDPSVAEAIEKIKQAVTDDYKNGFKREGRGDELPEVIAIELDVTDSASVKRAAQDVEARFGRLDILVENAGYLARYEKILDGDEVDWWTSMEVNLRGAYLVAKMFLPLMLKGGDKTIIVISSTGALHFHKGGSGYQISKFALLRLVEFLMAEYADQGLLAYSIHPGGVATDLASRLPEATQAWLKCTPALGGDTIAFLTSVRQEWLAGRYLTAMWDMEEVFAKKPDIIEKDLLKMRMSF

SEQ ID NO: 24190 - DNA, 1588 bp, Muscodor strobelii
  misc_feature: SGI EST ID NO. CUFF.57094.1
  misc_feature: Variant of the nucleotide sequence at SEQ ID NO 24188
ctcgattaaaatgtaatgcttcgaaactcaatatctttattgcctcgaaaaatggacacggtcaaacaacttcagaatacactgtcatcatccacataccctcccgttcctcccaattggggcgctgaattcacaaagacaactcgttatgacacatacgcttacatagatcctataaagcgatcagattgcaccgggaaatccgtgttaattaccggcggcacgaaaggcatcggactgggaattgctacatcctatgccagggcaggtgcatctcacatcgcgatcacgtctcgccggacaacggatcctagcgttgcagaagcgatagaaaaaattaaacaagcagttacagatgattataaaaatggctttaagagagaaggacgaggtgatgaacttcctgaagtcattgccattgagctggacgtcaccgatagcgcgagcgtgaagcgtgctgcacaggatgtagaagcacgattcggaaggcttgatatcttggtcgaaaacgcagggtatctcgcacgatatgagaaaatcctagatggggacgaagttgattggtggacgagcatggaggtcaacttgcgcggggcgtatcttgtcgctaaaatgttcctgcctctgatgttgaagggaggtgacaagacaattattgtgatctcgtcgactggcgctctgcactttcacaagggtggtagcgggtatcagatcagcaaatttgcgctgctgcggcttgttgagtttctgatggccgagtatgctgatcagggcttgctagcttattccatacatcctggcggcgttgcgaccgatctagccagcaggctgccagaagcaactcaagcttggcttaagtgtacaccggctcttggaggggacacgattgcatttttgacgagtgtgcgtcaggagtggctggcaggtcgatacctgactgcaatgtgggacatggaagaggtatttgctaagaaaccagatatcatagaaaaagacttgctcaagatgaggatgtccttttgaggttgaaagtaagacctgtccgtcgataagtgataactagacaatccgaatgttgtataatacaatacaaatgcaaagacggttcgccggactctacaaagtgccaaagcatgcaaatgaaccactgcgcaactcgtttccccccttgatgcactcttaaggaccagtaaagccacaaacaattcgaccctctgtagggatactgcaatctgtcaagttcgcgcttgcaggaggaaagatattttcaaccttctggggtttgaacaggaatccatcggtgtcgctcgcaacgcaattttcaaatgatatcttctcgaggtcaggtaacgggagaagtttgtcatcgccatcagtctcattgacaatgtcccaaaatgcgccagtcccgcacactgggggcttgtcaaacaacacaacgtcaagaggagtagtgtcgttgcaaagattctcaaaaacaaccccaccatcaacgaataacccactctgtttaaacgaatcaattgactgttttcatgttagctgatttttacgagagattttcatgatactaacgagcgtaattctg

SEQ ID NO: 24191 - DNA, 1026 bp, Muscodor strobelii
  misc_feature: SGI cDNA ID NO. 568244
  misc_feature: Encodes the peptide sequence at SEQ ID NO 24192
atggacacggtcaaacaacttcagaatacactgtcatcatccacataccctcccgttcctcccaattggggcgctgaattcacaaagacaactcgttatgacacatacgcttacatagatcctataaagcgatcagattgcaccgggaaatccgtgttaattaccggcggcacgaaaggcatcggactgggaattgctacatcctatgccagggcaggtgcatctcacatcgcgatcacgtctcgccggacaacggatcctagcgttgcagaagcgatagaaaaaattaaacaagcagttacagatgattataaaaatggctttaagagagaaggacgaggtgatgaacttcctgaagtcattgccattgagctggacgtcaccgatagcgcgagcgtgaagcgtgctgcacaggatgtagaagcacgattcggaaggcttgatatcttggtcgaaaacgcagggtatctcgcacgatatgagaaaatcctagatggggacgaagttgattggtggacgagcatggaggtcaacttgcgcggggcgtatcttgtcgctaaaatgttcctgcctctgatgttgaagggaggtgacaagacaattattgtgatctcgtcgactggcgctctgcactttcacaagggtggtagcgggtatcagatcagcaaatttgcgctgctgcggcttgttgagtttctgatggccgagtatgctgatcagggcttgctagcttattccatacatcctggcggcgttgcgaccgatctagccagcaggctgccagaagcaactcaaggtaccctcttccgctcaggattcaaatttgtatcgtatctgacatgctatatagcttggcttaagtgtacaccggctcttggaggggacacgattgcatttttgacgagtgtgcgtcaggagtggctggcaggtcgatacctgactgcaatgtgggacatggaagaggtatttgctaagaaaccagatatcatagaaaaagacttgctcaagatgaggatgtccttttga

SEQ ID NO: 24192 - protein, 341 aa, Muscodor strobelii
  misc_feature: SGI Peptide ID NO. 568244
  misc_feature (50)..(238): Pfam Id: PF00106 Pfam Desc: short chain dehydrogenase
  misc_feature (51)..(255): Pfam Id: PF08659 Pfam Desc: KR domain
  misc_feature (50)..(99): Pfam Id: PF00106 Pfam Desc: short chain dehydrogenase
  misc_feature (119)..(238): Pfam Id: PF00106 Pfam Desc: short chain dehydrogenase
  misc_feature (51)..(148): Pfam Id: PF08659 Pfam Desc: KR domain
  misc_feature (16)..(341): NCBI GI: 156056737 Blast Desc: SS1G_04099 [Sclerotinia sclerotiorum 1980] gi|154701885|gb|EDO01624.1| SS1G_04099 [Sclerotinia sclerotiorum 1980]
  misc_feature (11)..(331): NCBI GI: 240111298 Blast Desc: oxidoreductase,short chain dehydrogenase, [Coccidioides posadasii C735 delta SOWgp]
  misc_feature (20)..(341): NCBI GI: 171681435 Blast Desc: protein product [Podospora anserina] gi|170940676|emb|CAP65904.1| protein product [Podospora anserina]
  misc_feature (21)..(341): NCBI GI: 154322737 Blast Desc: BC1G_00711 [Botryotinia fuckeliana B05.10] gi|150848045|gb|EDN23238.1| BC1G_00711 [Botryotinia fuckeliana B05.10]
  misc_feature (1)..(323): NCBI GI: 119189277 Blast Desc: CIMG_04686 [Coccidioides immitis RS]
  misc_feature (17)..(339): NCBI GI: 212533777 Blast Desc: oxidoreductase, short chain dehydrogenase/reductase family, [Penicillium marneffei ATCC 18224] gi|210072409|gb|EEA26498.1| oxidoreductase, short chain family,
  misc_feature (27)..(339): NCBI GI: 242778830 Blast Desc: oxidoreductase, short chain dehydrogenase/reductase family, [Talaromyces stipitatus ATCC 10500] gi|218722937|gb|EED22355.1| oxidoreductase, short chain family,
  misc_feature (15)..(261): NCBI GI: 154323800 Blast Desc: BC1G_00299 [Botryotinia fuckeliana B05.10] gi|150842528|gb|EDN17721.1| BC1G_00299 [Botryotinia fuckeliana B05.10]
  misc_feature (41)..(339): NCBI GI: 168830921 Blast Desc: CtnE [Monascus aurantiacus]
  misc_feature (22)..(339): NCBI GI: 46127635 Blast Desc: FG08195.1 [Gibberella zeae PH-1]
MDTVKQLQNTLSSSTYPPVPPNWGAEFTKTTRYDTYAYIDPIKRSDCTGKSVLITGGTKGIGLGIATSYARAGASHIAITSRRTTDPSVAEAIEKIKQAVTDDYKNGFKREGRGDELPEVIAIELDVTDSASVKRAAQDVEARFGRLDILVENAGYLARYEKILDGDEVDWWTSMEVNLRGAYLVAKMFLPLMLKGGDKTIIVISSTGALHFHKGGSGYQISKFALLRLVEFLMAEYADQGLLAYSIHPGGVATDLASRLPEATQGTLFRSGFKFVSYLTCYIAWLKCTPALGGDTIAFLTSVRQEWLAGRYLTAMWDMEEVFAKKPDIIEKDLLKMRMSF

SEQ ID NO: 24193 - DNA, 1588 bp, Muscodor strobelii; identical to SEQ ID NO: 24190
  misc_feature: SGI EST ID NO. CUFF.57094.1
  misc_feature: Variant of the nucleotide sequence at SEQ ID NO 24191

SEQ ID NO: 24194 - DNA, 477 bp, Muscodor strobelii
  misc_feature: SGI cDNA ID NO. 568245
  misc_feature: Elevated expression when VOC is produced
  misc_feature: Encodes the peptide sequence at SEQ ID NO 24195
atggcatcagcgcaagtctgtcccgtcgtcggcacgaccaattcaacactgcctcccactcaccctgaaattgatctctccaagcctggtcagacgtgtcccgtcgtcggtgccaagacagagcatcacggcaaccttcacaaacacccatctggcgtcgaacaccctgccaccgtctcgtcaaccggcatcgctgatgcacaaaagtgcccggcactgagtggcgtcgtttctgaaccgaagagtcaagcaatggatgacaaagtttgtccagttgtcggcccggtcacgactgtcttaccgcccgatcacccaagcactgcgggcaaagctgatggtgccgagtgtcctgtaacgaaggccaaggttggccatcataaagacaaagttattgagcatcctaacgtacaagccactgagggtgaaattgcgaatgacgtctgccctgtcacgggacagaaaggcgcaaggcattaa

SEQ ID NO: 24195 - protein, 158 aa, Muscodor strobelii
  misc_feature: SGI Peptide ID NO. 568245
  misc_feature (5)..(153): NCBI GI: 85093337 Blast Desc: NCU08130 [Neurospora crassa OR74A] gi|28921121|gb|EAA30437.1| [Neurospora crassa OR74A]
  misc_feature (7)..(156): NCBI GI: 171678667 Blast Desc: protein product [Podospora anserina] gi|170937403|emb|CAP62061.1| protein product [Podospora anserina]
  misc_feature (1)..(154): NCBI GI: 116204245 Blast Desc: CHGG_10006 [Chaetomium globosum CBS 148.51] gi|88176134|gb|EAQ83602.1| CHGG_10006 [Chaetomium globosum CBS 148.51]
  misc_feature (7)..(154): NCBI GI: 189191836 Blast Desc: conserved [Pyrenophora tritici-repentis Pt-1C-BFP] gi|187973863|gb|EDU41362.1| conserved [Pyrenophora tritici-repentis Pt-1C-BFP]
  misc_feature (38)..(153): NCBI GI: 169600755 Blast Desc: SNOG_03226 [Phaeosphaeria nodorum SN15] gi|160705507|gb|EAT89957.2| SNOG_03226 [Phaeosphaeria nodorum SN15]
  misc_feature (6)..(71): NCBI GI: 169600755 Blast Desc: SNOG_03226 [Phaeosphaeria nodorum SN15] gi|160705507|gb|EAT89957.2| SNOG_03226 [Phaeosphaeria nodorum SN15]
  misc_feature (5)..(50): NCBI GI: 171678667 Blast Desc: protein product [Podospora anserina] gi|170937403|emb|CAP62061.1| protein product [Podospora anserina]
  misc_feature: Useful for introducing or modulating the production of volatile compounds
MASAQVCPVVGTTNSTLPPTHPEIDLSKPGQTCPVVGAKTEHHGNLHKHPSGVEHPATVSSTGIADAQKCPALSGVVSEPKSQAMDDKVCPVVGPVTTVLPPDHPSTAGKADGAECPVTKAKVGHHKDKVIEHPNVQATEGEIANDVCPVTGQKGARH

SEQ ID NO: 24196 - DNA, 1157 bp, Muscodor strobelii
  misc_feature: SGI EST ID NO. CUFF.57030.0
  misc_feature: Variant of the nucleotide sequence at SEQ ID NO 24194
aatgtacaggaaataagccgcaggcacattcttctagatatgacgagtcctgcctcgagtacctttttcgacaacaggagctcgaccatgcctgtcattccttcgaggcagtaagttctttgttctcgtatgtgtacgccgtagggaaccggattcatctaaggcaaactgaaggctctctcatagcttatattcttgtcctcttcctcctctcatcacatcaactacaatcttccccattgtaccaaaccacgcatcccgatacacagcttcatcacttcagagatagacatcaaagacattcctcagatacccataaccacattcaacatggcatcagcgcaagtctgtcccgtcgtcggcacgaccaattcaacactgcctcccactcaccctgaaattgatctctccaagcctggtcagacgtgtcccgtcgtcggtgccaagacagagcatcacggcaaccttcacaaacacccatctggcgtcgaacaccctgccaccgtctcgtcaaccggcatcgctgatgcacaaaagtgcccggcactgagtggcgtcgtttctgaaccgaagagtcaagcaatggatgacaaagtttgtccagttgtcggcccggtcacgactgtcttaccgcccgatcacccaagcactgcgggcaaagctgatggtgccgagtgtcctgtaacgaaggccaaggttggccatcataaagacaaagttattgagcatcctaacgtacaagccactgagggtgaaattgcgaatgacgtctgccctgtcacgggacagaaaggcgcaaggcattaaacaaatgacgggccaatcaatccaattgtatgatgagcgacatcggggttcagtttgatattatgaagtgtatcttgttcatccttgccttgcggatggttcggactcgactcatgaatgagacatacgtagctaacccagacccctatgaaatctacgaatgaaacaacctagatcctagaagcactcgtcgaccaagatttgatatgcttggcaagcactactgattatgtatcttaatgtgacaggatgatgctttgttcacgatttagcattatattagtagtttcctttccttcgctagaggcaacaaccctgcttttaattgacgtagacatcggcctccaaat

SEQ ID NO: 24197 - DNA, 3177 bp, Muscodor strobelii
  misc_feature: SGI cDNA ID NO. 568246
  misc_feature: Reduced expression when VOC is produced
  misc_feature: Encodes the peptide sequence at SEQ ID NO 24198
atggctcgcaaggaagttgattcgcgcatcccgactttaatacgaaacatccaccagactcggcagagaggattgttcgtcatcgtcggtgaccactcgaaggatgtcattgcgaagctgtactacattgccagccaactcaatctgaagttgaacaaaagcatattatgggcctaccgaaaagaactcggcggcttcaccagccaccgaaagaagcgggagatgaagatcaagaaggaaataagacgaggcattcgagaacccaacaccgaagaccctttcgagttattcatttccctccatgatatccgctacacctactatcgcgagaccgagaagatccttggaaataccttcggcatgtgtatcttgcaggacttcgaaggcatcaccccgaatctccttgctcggactatcgaaacagtcgaaggaggcgggctctgtatccttctcttgaatggaatccataatctcaagcagctttacacgttgtccatggacgtacattctagattccgcacggaggcacatcaagatgttgttccccgctttaatgagcgtttcctgctttcccttgggggatgccagaactgtcttgtcatcgacgacgaactcaatgttcttccgatatccggagctcggggtgtagtgccgctaccgccgcccgatctcgatgaggccaaaaccccagaactcgactcgataaaagagtcgttacaggagacgccgccgattggaccacttgttaaccttgctcgcagtgtttcacaggctaaggctactctcacattcatcgatgccattactgataaacggcttcgaagcaccgttgccttgactgctgcgcgtggccgaggaaagtcagcagctctgggagtggcggttgctgctgctgtggcgcatggctactccaacatcttcatcacatcgccttcaccagaaaatttgaagacgttgttccagtttgtcttcaaggggtttgatgctctgggatatcaagaccacaccgactactcgattattcaatccacaaaccctgatttccaaaaggctgtggttcgcgtcaatataacaagatcacatcgccagacgatacagtacatcagaccccaagatgcgcatacgttagggcaagcggagctactggtgatcgatgaggcagctgctatccccctacctctggtgaagaagctgatcggaaactatttggtcttcatggcctcgacaatcaatggatatgagggcaccggacgttccttatctttgaaactcttgaaggatatgcgagaccagtcgagagcaggcgcaactacggatgacacagagcttgtcgatcgatcaacaggcaagagttcaaaagcatcacatgaccacttccaaggcggtcgatctcttcgagaaatcacactcgacgagccgattcgttactcccagggcgatggagtcgagaagtggttgaacaatctacttgtcctcgatgtctccacgcaggggaacaagttcagttcgagcgggagccctgaccctgcaacatgcaaccttttaaaaatcaaccgagataccctgtttagttttcatcccgctgcagagaagtatttgcaacagatcgttggactttacgttgcaagtcactacaagaatacgcctgacgatcttcagctccttagtgatgcacctgctcacgagctgtacgtattaactgcacccactgattctaaccgcttaccagaaccactttgcgtaatacaagttgcattggagggtcaaatcagcagacagagcgtcttgaacagtctcagccgaggatcaagacctgcaggtgatttgataccctggttggtcagccagcaatttcaggatgagttcttcggacagctttcaggagcacgggttgtccgaatcgctacccatcctgattacatcaggcaaggttacggagccaaggcactttcggatctacaatctttctacgaaggaaagtttgcgagcctgtctgagaaccctcaagacgaagaaacgttggaaagagttaccgaagccgagctggagaatggaacattgcaggacgagattcgcgttcggaaggtccttccgccattgttttcgaagctgacagatgtcacgccccctctgcttgactacatcggtgtaagttatggccttactcaggagctgcacaagttctggaagcgccattcttatgcgcctgtctacttgagacaaacggcaaacgacttaaccggtgagcacacatgcgttatgctcaggactttgtcgaacggcggtggtcaggcctggctgggagcctatgccaacgatttccagtctcgattcctgtccctgctttcgtatcagttccggaactttaaagccgtcaccgcattgagtatccacgagggtgccaatgcaggtgctcggctggacccggcataccaaattgttcctctgaataaagagtcactcgatcttcttttcaccccgttcgatcttaagcggctggctgcatacgcaaataacagtcttgattggcacgttatcttggatttgatcccaaacattgcgattccatattttcgaggtcgtcttgacgctgtcaagctaaccggcgtacaaaaggcgatgctgcttgcggttggactccagcggaaggacattgatactatcgcaactgagctcactctcgagccctcacaggctctcgccatgttcattaaagtcatcaagaaatttgccactcacttcgaaagcctcatctcaggtgctattgaagctagtcttccaagagctgacacaattggtgtcagtgttgctaatgcgactggcgtccatgatgacgaaattgttgataaaaagttccggccgcttgagacgtccctagaagatgagctagaagaagggggagacgaagcactaaaggaaatacggcgcaagcagcgcgagctcattgattccttgcctcttgaccaatacgaagttgaaggaaatgcgcccgcttgggaggaggcggaaaagcaggtgaagaatgctacgaagcgcggcgaatcgggtgcaacagtcagtgtgaagtccagtaaagttaagagaaaggccggtaccactgcagccgaggtctatgaagaagcatttggagaaaagccacataagaaggcaaagaagcagaagaaaagcagtcactag

SEQ ID NO: 24198 - protein, 1058 aa, Muscodor strobelii
  misc_feature: SGI Peptide ID NO. 568246
  misc_feature (108)..(202): Pfam Id: PF08351 Pfam Desc: Domain of function (DUF1726)
  misc_feature (277)..(493): Pfam Id: PF05127 Pfam Desc: ATPase (DUF699)
  misc_feature (1)..(1056): NCBI GI: 239609376 Blast Desc: nucleolar ATPase Kre33 [Ajellomyces dermatitidis ER-3]
  misc_feature (1)..(1048): NCBI GI: 145229155 Blast Desc: An01g04590 [Aspergillus niger] gi|134054986|emb|CAK36994.1| protein product [Aspergillus niger]
  misc_feature (1)..(1056): NCBI GI: 261188440 Blast Desc: nucleolar ATPase Kre33 [Ajellomyces dermatitidis SLH14081] gi|239593235|gb|EEQ75816.1| nucleolar ATPase Kre33 [Ajellomyces dermatitidis SLH14081]
  misc_feature (1)..(1052): NCBI GI: 119496727 Blast Desc: nucleolar ATPase Kre33, [Neosartorya fischeri NRRL 181] gi|119413299|gb|EAW23240.1| nucleolar ATPase Kre33, [Neosartorya fischeri NRRL 181]
  misc_feature (1)..(1052): NCBI GI: 159130753 Blast Desc: nucleolar ATPase Kre33, [Aspergillus fumigatus A1163]
  misc_feature (1)..(1052): NCBI GI: 70990862 Blast Desc: nucleolar ATPase Kre33 [Aspergillus fumigatus Af293] gi|66847912|gb|EAL88242.1| nucleolar ATPase Kre33, [Aspergillus fumigatus Af293]
  misc_feature (1)..(1052): NCBI GI: 67515931 Blast Desc: AN0247.2 [Aspergillus nidulans FGSC A4] gi|40746964|gb|EAA66120.1| AN0247.2 [Aspergillus nidulans FGSC A4] gi|259489535|tpe|CBF89885.1| TPA: nucleolar ATPase Kre33, A4]
  misc_feature (1)..(1052): NCBI GI: 169770983 Blast Desc: [Aspergillus oryzae RIB40] gi|238486528|ref|XP_002374502.1| nucleolar ATPase Kre33, [Aspergillus flavus NRRL3357] gi|83767820|dbj|BAE57959.1| protein
  misc_feature (1)..(990): NCBI GI: 258565963 Blast Desc: UREG_06693 [Uncinocarpus reesii 1704] gi|237907427|gb|EEP81828.1| UREG_06693 [Uncinocarpus reesii 1704]
  misc_feature (1)..(1052): NCBI GI: 225562969 Blast Desc: killer toxin resistant protein [Ajellomyces capsulatus G186AR]
  misc_feature: Useful for introducing or modulating the production of volatile compounds
MARKEVDSRIPTLIRNIHQTRQRGLFVIVGDHSKDVIAKLYYIASQLNLKLNKSILWAYRKELGGFTSHRKKREMKIKKEIRRGIREPNTEDPFELFISLHDIRYTYYRETEKILGNTFGMCILQDFEGITPNLLARTIETVEGGGLCILLLNGIHNLKQLYTLSMDVHSRFRTEAHQDVVPRFNERFLLSLGGCQNCLVIDDELNVLPISGARGVVPLPPPDLDEAKTPELDSIKESLQETPPIGPLVNLARSVSQAKATLTFIDAITDKRLRSTVALTAARGRGKSAALGVAVAAAVAHGYSNIFITSPSPENLKTLFQFVFKGFDALGYQDHTDYSIIQSTNPDFQKAVVRVNITRSHRQTIQYIRPQDAHTLGQAELLVIDEAAAIPLPLVKKLIGNYLVFMASTINGYEGTGRSLSLKLLKDMRDQSRAGATTDDTELVDRSTGKSSKASHDHFQGGRSLREITLDEPIRYSQGDGVEKWLNNLLVLDVSTQGNKFSSSGSPDPATCNLLKINRDTLFSFHPAAEKYLQQIVGLYVASHYKNTPDDLQLLSDAPAHELYVLTAPTDSNRLPEPLCVIQVALEGQISRQSVLNSLSRGSRPAGDLIPWLVSQQFQDEFFGQLSGARVVRIATHPDYIRQGYGAKALSDLQSFYEGKFASLSENPQDEETLERVTEAELENGTLQDEIRVRKVLPPLFSKLTDVTPPLLDYIGVSYGLTQELHKFWKRHSYAPVYLRQTANDLTGEHTCVMLRTLSNGGGQAWLGAYANDFQSRFLSLLSYQFRNFKAVTALSIHEGANAGARLDPAYQIVPLNKESLDLLFTPFDLKRLAAYANNSLDWHVILDLIPNIAIPYFRGRLDAVKLTGVQKAMLLAVGLQRKDIDTIATELTLEPSQALAMFIKVIKKFATHFESLISGAIEASLPRADTIGVSVANATGVHDDEIVDKKFRPLETSLEDELEEGGDEALKEIRRKQRELIDSLPLDQYEVEGNAPAWEEAEKQVKNATKRGESGATVSVKSSKVKRKAGTTAAEVYEEAFGEKPHKKAKKQKKSSH

SEQ ID NO: 24199 - DNA, 3486 bp, Muscodor strobelii
  misc_feature: SGI EST ID NO. CUFF.57033.0
  misc_feature: Variant of the nucleotide sequence at SEQ ID NO 24197
ccaatttccaagagagtctgccgagctgccacgccaccgcagctttccaaacatggctcgcaaggaagttgattcgcgcatcccgactttaatacgaaacatccaccagactcggcagagaggattgttcgtcatcgtcggtgaccactcgaaggatgtcattgcgaagctgtactacattgccagccaactcaatctgaagttgaacaaaagcatattatgggcctaccgaaaagaactcggcggcttcaccagccaccgaaagaagcgggagatgaagatcaagaaggaaataagacgaggcattcgagaacccaacaccgaagaccctttcgagttattcatttccctccatgatatccgctacacctactatcgcgagaccgagaagatccttggaaataccttcggcatgtgtatcttgcaggacttcgaaggcatcaccccgaatctccttgctcggactatcgaaacagtcgaaggaggcgggctctgtatccttctcttgaatggaatccataatctcaagcagctttacacgttgtccatggacgtacattctagattccgcacggaggcacatcaagatgttgttccccgctttaatgagcgtttcctgctttcccttgggggatgccagaactgtcttgtcatcgacgacgaactcaatgttcttccgatatccggagctcggggtgtagtgccgctaccgccgcccgatctcgatgaggccaaaaccccagaactcgactcgataaaagagtcgttacaggagacgccgccgattggaccacttgttaaccttgctcgcagtgtttcacaggctaaggctactctcacattcatcgatgccattactgataaacggcttcgaagcaccgttgccttgactgctgcgcgtggccgaggaaagtcagcagctctgggagtggcggttgctgctgctgtggcgcatggctactccaacatcttcatcacatcgccttcaccagaaaatttgaagacgttgttccagtttgtcttcaaggggtttgatgctctgggatatcaagaccacaccgactactcgattattcaatccacaaaccctgatttccaaaaggctgtggttcgcgtcaatataacaagatcacatcgccagacgatacagtacatcagaccccaagatgcgcatacgttagggcaagcggagctactggtgatcgatgaggcagctgctatccccctacctctggtgaagaagctgatcggaaactatttggtcttcatggcctcgacaatcaatggatatgagggcaccggacgttccttatctttgaaactcttgaaggatatgcgagaccagtcgagagcaggcgcaactacggatgacacagagcttgtcgatcgatcaacaggcaagagttcaaaagcatcacatgaccacttccaaggcggtcgatctcttcgagaaatcacactcgacgagccgattcgttactcccagggcgatggagtcgagaagtggttgaacaatctacttgtcctcgatgtctccacgcaggggaacaagttcagttcgagcgggagccctgaccctgcaacatgcaaccttttaaaaatcaaccgagataccctgtttagttttcatcccgctgcagagaagtatttgcaacagatcgttggactttacgttgcaagtcactacaagaatacgcctgacgatcttcagctccttagtgatgcacctgctcacgagctgtacgtattaactgcacccactgattctaaccgcttaccagaaccactttgcgtaatacaagttgcattggagggtcaaatcagcagacagagcgtcttgaacagtctcagccgaggatcaagacctgcaggtgatttgataccctggttggtcagccagcaatttcaggatgagttcttcggacagctttcaggagcacgggttgtccgaatcgctacccatcctgattacatcaggcaaggttacggagccaaggcactttcggatctacaatctttctacgaaggaaagtttgcgagcctgtctgagaaccctcaagacgaagaaacgttggaaagagttaccgaagccgagctggagaatggaacattgcaggacgagattcgcgttcggaaggtccttccgccattgttttcgaagctgacagatgtcacgccccctctgcttgactacatcggtgtaagttatggccttactcaggagctgcacaagttctggaagcgccattcttatgcgcctgtctacttgagacaaacggcaaacgacttaaccggtgagcacacatgcgttatgctcaggactttgtcgaacggcggtggtcaggcctggctgggagcctatgccaacgatttccagtctcgattcctgtccctgctttcgtatcagttccggaactttaaagccgtcaccgcattgagtatccacgagggtgccaatgcaggtgctcggctggacccggcataccaaattgttcctctgaataaagagtcactcgatcttcttttcaccccgttcgatcttaagcggctggctgcatacgcaaataacagtcttgattggcacgttatcttggatttgatcccaaacattgcgattccatattttcgaggtcgtcttgacgctgtcaagctaaccggcgtacaaaaggcgatgctgcttgcggttggactccagcggaaggacattgatactatcgcaactgagctcactctcgagccctcacaggctctcgccatgttcattaaagtcatcaagaaatttgccactcacttcgaaagcctcatctcaggtgctattgaagctagtcttccaagagctgacacaattggtgtcagtgttgctaatgcgactggcgtccatgatgacgaaattgttgataaaaagttccggccgcttgagacgtccctagaagatgagctagaagaagggggagacgaagcactaaaggaaatacggcgcaagcagcgcgagctcattgattccttgcctcttgaccaatacgaagttgaaggaaatgcgcccgcttgggaggaggcggaaaagcaggtgaagaatgctacgaagcgcggcgaatcgggtgcaacagtcagtgtgaagtccagtaaagttaagagaaaggccggtaccactgcagccgaggtctatgaagaagcatttggagaaaagccacataagaaggcaaagaagcagaagaaaagcagtcactagaactttatacctgaactcgctgttgtaaatacttgagcattatctggtgttgggcgttacggaaaaaggtcgatctgcctacgggctggtatctatcatacttcaatatcaaagccttgtctgcttcaagctggtcaaacgactcctgtctcttcgatgtgtgataacacatttagtgctgaactgtagccattggtctcaagacctgagtaaatgcgataaaatgtagatagagatacaatgcaattgcacattcg

SEQ ID NO: 24200 - DNA, 963 bp, Muscodor strobelii
  misc_feature: SGI cDNA ID NO. 568247
  misc_feature: Encodes the peptide sequence at SEQ ID NO 24201
atggacaaggcacccaccgcctttcttcagactctgagctatgcaaagcttgccagcaaagataaagatgagctagcaatacttttggatgcttgtacgaatcaaggcttcttttacctcgatcttgcagaatccaatgcctctcaagcactagaggatcggctccaagcattgtccctgacaaaggactggtttgaccgccccactgaggagaagatgaaattgcgacaggactctgtcaccaaaggatacaagcctgttggtacactgtccggcgttgtgaaggacaggaaagacggatttgagaacatcaaggtcagtaaatgtatgcctcgtgatgacctcatcattggcgcggatattctgcccgttgggctgaacgaacacttatcactcttcaaagaggacctagagctgtctcatcaagtgacgaaccaggttctttcatgcctctcggacctactcgaccccaagacacgcttcgaagactatcatagaggtgtcaagccctcacagtcgacgatgatgtatttcagatacgcaaagcaagaccccgaggttaatgctggcgtcggacataatatgcatactgacttggggaccttaaccctcctctactgtgagcaatggggactacaagtttacaatcaggcgactgagacgtgggcctatgttgtcccgaagccaggaaagtacgtggtcaatgtcggcgacgcgctccgattcttgtccggcaacaagctcctcagtgcgcttcatcgcgttgttcctgtgcccgggcatgaaaacgagtataggtactcgtcagcctacttcctccgtccagaaaacgaagcacaatttaaaaccagtgaggacactactgtgtcagctttggattggcatgatcgtaaatacgatatcttcaaagcggctcacgtcgaccaggaaaaaacacaatacttactggtgggatcggcgtaa

SEQ ID NO: 24201 - protein, 320 aa, Muscodor strobelii
  misc_feature: SGI Peptide ID NO. 568247
  misc_feature (171)..(275): Pfam Id: PF03171 Pfam Desc: 2OG-Fe(II) oxygenase superfamily
  misc_feature (190)..(275): Pfam Id: PF03171 Pfam Desc: 2OG-Fe(II) oxygenase superfamily
  misc_feature (1)..(318): NCBI GI: 238507652 Blast Desc: gibberellin 20-oxidase family protein [Aspergillus flavus NRRL3357] gi|220688546|gb|EED44898.1| gibberellin 20-oxidase family protein [Aspergillus flavus NRRL3357]
  misc_feature (1)..(318): NCBI GI: 169785100 Blast Desc: [Aspergillus oryzae RIB40] gi|83775758|dbj|BAE65878.1| protein product [Aspergillus oryzae]
  misc_feature (6)..(320): NCBI GI: 46127407 Blast Desc: FG08081.1 [Gibberella zeae PH-1]
  misc_feature (7)..(318): NCBI GI: 121704112 Blast Desc: 2OG-Fe(II) oxygenase family oxidoreductase, [Aspergillus clavatus NRRL 1] gi|119398464|gb|EAW08894.1| 2OG-Fe(II) oxygenase family oxidoreductase, [Aspergillus clavatus
  misc_feature (2)..(320): NCBI GI: 256721279 Blast Desc: NECHADRAFT_44669 [Nectria haematococca mpVI 77-13-4]
  misc_feature (7)..(309): NCBI GI: 256721263 Blast Desc: NECHADRAFT_44650 [Nectria haematococca mpVI 77-13-4]
  misc_feature (3)..(302): NCBI GI: 169608552 Blast Desc: SNOG_07358 [Phaeosphaeria nodorum SN15] gi|111063704|gb|EAT84824.1| SNOG_07358 [Phaeosphaeria nodorum SN15]
  misc_feature (3)..(302): NCBI GI: 39940200 Blast Desc: MGG_05140 [Magnaporthe grisea 70-15] gi|145010603|gb|EDJ95259.1| MGG_05140 [Magnaporthe grisea 70-15]
  misc_feature (5)..(302): NCBI GI: 261358031 Blast Desc: conserved [Verticillium albo-atrum VaMs.102]
  misc_feature (3)..(285): NCBI GI: 189202228 Blast Desc: conserved [Pyrenophora tritici-repentis Pt-1C-BFP] gi|187984549|gb|EDU50037.1| conserved [Pyrenophora tritici-repentis Pt-1C-BFP]
  misc_feature (21)..(305): SWISSPROT Homolog: EC 1.14.11.15 Gibberellin 3-beta-dioxygenase
MDKAPTAFLQTLSYAKLASKDKDELAILLDACTNQGFFYLDLAESNASQALEDRLQALSLTKDWFDRPTEEKMKLRQDSVTKGYKPVGTLSGVVKDRKDGFENIKVSKCMPRDDLIIGADILPVGLNEHLSLFKEDLELSHQVTNQVLSCLSDLLDPKTRFEDYHRGVKPSQSTMMYFRYAKQDPEVNAGVGHNMHTDLGTLTLLYCEQWGLQVYNQATETWAYVVPKPGKYVVNVGDALRFLSGNKLLSALHRVVPVPGHENEYRYSSAYFLRPENEAQFKTSEDTTVSALDWHDRKYDIFKAAHVDQEKTQYLLVGSA

SEQ ID NO: 24202 - DNA, 293 bp, Muscodor strobelii
  misc_feature: SGI EST ID NO. CUFF.57040.0
  misc_feature: Variant of the nucleotide sequence at SEQ ID NO 24200
ggacaaggcacccaccgcctttcttcagactctgagctatgcaaagcttgccagcaaagataaagatgagctagcaatacttttggatgcttgtacgaatcaaggcttcttttacctcgatcttgcagaatccaatgcctctcaagcactagaggatcggctccaagcattgtccctgacaaaggactggtttgaccgccccactgaggagaagatgaaattgcgacaggactctgtcaccaaaggatacaagcctgttggtacactgtccggcgttgtgaaggacaggaaag

SEQ ID NO: 24203 - DNA, 1026 bp, Muscodor strobelii
  misc_feature: SGI cDNA ID NO. 568248
  misc_feature: Encodes the peptide sequence at SEQ ID NO 24204
atgccaggcatcacattcgaccaaagacctatctttttagtgacacaccctcgcgcgtgttccacggcctttgagagagtttttctcacaagagcagaagatatagagtgcgtccacgagccgttctcagatgcctaccattggggccccgagaagttgacagaaagatacgaaaatgtcgaggctctgagagcagaaaaggggttagaggactacacgtatcgagccgcattagatgcaattgacgacgctcgatcgcagggtaaaagagtatttgtgaaggacatgggtaaatgcctcttgcctctacatggcgatacaccttggatcgcgccgtctcttcgaagcaaatcaagatgcaattccttgatgatgcgagagtatgcaggcactggcattcctaacccgacggttctcccgctgcaacagcttgccaagttccaatacactttccttatacgcaacccgcgaaagaccatccccagtctctatgaatgttcaaccccgcccaaatcgctgacaacgggctggcatgggtttaaggccgctgatgcaggatacaaggacatgcgccgtctattcgagtattttgtgcaagtcggacttattggtccgaatacgacggacgagatttgcgtggtggatgcagaggatctcttggaatatccagaggacataatcagccaatactgcgcgttagtcgatgtcccctttgactcatctatgcttcgctggggttcagaatgtgaacaaaagcgtgccaaggatttgttcaagaattgggcgccgttccacgatgtggttctcaaaagcacgtcgcttgaatcgcgtcggccagtacgtgtacccctgttttgcatttgtccccctgcttccccgagtcctacgacgcctgatgccgacttgaagaaatggacgcaaaaatacggcagtgaaggagcaaagatcattcagcagaatatcgaagataatatggagcactatctgtttctaaaacagttcgcccttgcgccgagtagaacatga

SEQ ID NO: 24204 - protein, 341 aa, Muscodor strobelii
  misc_feature: SGI Peptide ID NO. 568248
  misc_feature (4)..(336): NCBI GI: 169598354 Blast Desc: SNOG_01979 [Phaeosphaeria nodorum SN15] gi|160704380|gb|EAT90191.2| SNOG_01979 [Phaeosphaeria nodorum SN15]
  misc_feature (9)..(336): NCBI GI: 189208680 Blast Desc: conserved [Pyrenophora tritici-repentis Pt-1C-BFP] gi|187976766|gb|EDU43392.1| conserved [Pyrenophora tritici-repentis Pt-1C-BFP]
  misc_feature (8)..(336): NCBI GI: 171686564 Blast Desc: protein product [Podospora anserina] gi|170943243|emb|CAP68896.1| protein product [Podospora anserina]
  misc_feature (96)..(336): NCBI GI: 238507656 Blast Desc: conserved [Aspergillus flavus NRRL3357] gi|220688548|gb|EED44900.1| conserved [Aspergillus flavus NRRL3357]
  misc_feature (8)..(336): NCBI GI: 226284378 Blast Desc: conserved [Paracoccidioides brasiliensis Pb01]
  misc_feature (8)..(336): NCBI GI: 238484241 Blast Desc: conserved [Aspergillus flavus NRRL3357] gi|220701409|gb|EED57747.1| conserved [Aspergillus flavus NRRL3357]
  misc_feature (9)..(336): NCBI GI: 242777912 Blast Desc: conserved [Talaromyces stipitatus ATCC 10500] gi|218722748|gb|EED22166.1| conserved [Talaromyces stipitatus ATCC 10500]
  misc_feature (8)..(336): NCBI GI: 226288960 Blast Desc: conserved [Paracoccidioides brasiliensis Pb18]
  misc_feature (9)..(336): NCBI GI: 256729716 Blast Desc: [Nectria haematococca mpVI 77-13-4]
  misc_feature (8)..(336): NCBI GI: 115492569 Blast Desc: conserved [Aspergillus terreus NIH2624] gi|114197772|gb|EAU39472.1| conserved [Aspergillus terreus NIH2624]
MPGITFDQRPIFLVTHPRACSTAFERVFLTRAEDIECVHEPFSDAYHWGPEKLTERYENVEALRAEKGLEDYTYRAALDAIDDARSQGKRVFVKDMGKCLLPLHGDTPWIAPSLRSKSRCNSLMMREYAGTGIPNPTVLPLQQLAKFQYTFLIRNPRKTIPSLYECSTPPKSLTTGWHGFKAADAGYKDMRRLFEYFVQVGLIGPNTTDEICVVDAEDLLEYPEDIISQYCALVDVPFDSSMLRWGSECEQKRAKDLFKNWAPFHDVVLKSTSLESRRPVRVPLFCICPPASPSPTTPDADLKKWTQKYGSEGAKIIQQNIEDNMEHYLFLKQFALAPSRT

SEQ ID NO: 24205 - DNA, 2928 bp, Muscodor strobelii
  misc_feature: SGI cDNA ID NO. 568249
  misc_feature: Encodes the peptide sequence at SEQ ID NO 24206
atgcggtggaactacttcacccttgatgactgggctgaatttggtgatcttgagaccgaatatgccagattcacttacactctgtcgcgatatcccgagagaggtgctccacgctcctgcgcaagtggtctgagacagcttctttctgattcgagtgtcctgtctggttggtataagtatgaagcagagttccagaatcatgcagacgtagctctggaatatgtctgtcgaaagcagcgcagtcaaacctctagacaggaatgggccacgaaacagaattacgtgactgttccggttgactacgatgtcagcgaagatgcgtcgacgctatccttgggcctttggaacagggcgctgtctgaaatgactctagacctcaaggatcacagtcgagttcgcgcagcagtgttcctgcggattttcgcgttcctaaaagacccgatatacggatttcggaagccattcaaggagcaaataatcatcttcctgaagctgatcgacgcatttctcgaaaaatattcgagtggtgagctgtcactagatgatctcaagcgcgtcgttgctcaggcagcacaagaatctgcgtatctcgttggccccctgttgaagaacgttgccgttgtacacctcaaggcgcatcatcaactcacctacgtaaacgtgcagctggacctcctcgcccgtgcagaatggtcggtgccatcacacgtcttagaagttgccgaagaaatggtccaggcagttgcagccaacaacggaagggcatgccctctcgtacccatcctcgtgaccgttcgacccagtttcgctagaggagaacgggacttggtccccatcatcgatgggaatcaccgagcaactgccgtgatgatgctccgatttttcgcggtccaacctcgactttctgaccgcctgaacatgcaagaacgtcttagaggctactgcgtcggccgcaaactaggcaagaaatgggaaatcgacctcatggatgtcctagacgaattttacaccgagcatcatcgccaactccgcgaaaagctctcatcaacggaacttttgtcgcgattcgcgacggtggagtctatcccagcactattcgtgcaggaagaagactttcacacaatatgtaagcagcgatcagaagggaaggtgaagccggtactgttgcatccgtttcatcaaacgctattcaacgatgacagcttgccttttgccctgccgcaaaaagctgggcagacgcatgggaggcctgaggtctttcggcttttgccactcacgccatttggggatgccggtgagatcaacaggactgcgaggaactttgaagccaaggttagagagagtatgaatggactcgcgaagggtagcgtcgatgcagaggcaaggtcgaaggatagaagcgaggtgaaggccaaggacgtaattgtcaacaaaaacgaggatacatcacttgagcccgaaaaggcctgttcgaagcctgtgcgccaggttgcagcggacgatgaatgcgagccatccgaggaagatctgaaaacgctacgtcgcgtaagcgacaagattccgttttcaatcttcctcgttgtcgtcgctgaggtggcagagcgcttcacgtatcgctctttgacgggtccgctgcagaactatattcagaatccgcttcacggatttcggccaggtgcacttggcaaggggcaatctgttgctactgcgatagggttcttcttccagttgtggtgttatctaacccctttattaggtgggtttgtggcagatacctacctcgggcgcttcaagaccatatttcttggcacaagcactgccctcatcggtgttgccatattatttgtgacttcattgcctagtctcttggagcgtggttctgggtttccaggtttactagttggtctcatcataattggccttggagctgggggcatcaaaagcaatgtcggaccattggtagctgaacagtatgccggcaagaaagccctgtgggtggaactcaaggttggcttttggcttgtgttcttactaggactgtctgtttatgcatttgcggtctttgtattgatacttggccgcaacaagtacagtacgacacatgatgaaactcagtattgtctggcactgctaacagagcgtatagtcacccatcgaccggaagggtctatcgttgcgcgagccgcccaggctctttggatcggactgaagaatggcagggatatggacaaagctaaaccttcgtatcagaatcaacagggacaatctaatatcccctgggatgatcgatttgtagacgaactgaaagttgctatcgcggcgtgtcgaatattgtcggtatttcttgccgccgaaatgaacacactgggtctgccgaatgactttctcgctggaagcattaatccaatcagtatcctcattcttttgccgttcttcgaccgaattctatatcccactttgcgacggtggggtatgtcgttcctcccagtgactcggatcacatgtggatttgtagtaatgtccggggcgatcgcattagctgctggtcttcagtctcttgtctacaagtcacctcctcactcggtcaacttcttttcaattctccctatctacgtcctcacaggactttctgaaatcttagcatttctcagtagtatggaatatgcatacacaaaggcgccgaagtcaatgaagagtttgatcgcgtctattaatctactctcggcagcggtaggatccgcacttggcttggcgctatcacccacgtccaactatgcacatgttcttgttcagttcgccagtttgagcggggtcatgttcattctagccactgggttttacgttgtgttttccaagtacaataaagcagaggctgctatgaataaaatggaaagggacgcgaatgacgagcggcaagatgtggcgtaa

SEQ ID NO: 24206 - protein, 975 aa, Muscodor strobelii
  misc_feature: SGI Peptide ID NO. 568249
  misc_feature (597)..(909): Pfam Id: PF00854 Pfam Desc: POT family
  misc_feature (597)..(658): Pfam Id: PF00854 Pfam Desc: POT family
  misc_feature (786)..(909): Pfam Id: PF00854 Pfam Desc: POT family
  misc_feature (498)..(973): NCBI GI: 238507662 Blast Desc: oligopeptide transporter, [Aspergillus flavus NRRL3357] gi|220688551|gb|EED44903.1| oligopeptide transporter, [Aspergillus flavus NRRL3357]
  misc_feature (1)..(467): NCBI GI: 169785094 Blast Desc: [Aspergillus oryzae RIB40] gi|83775755|dbj|BAE65875.1| protein product [Aspergillus oryzae]
  misc_feature (1)..(467): NCBI GI: 238507660 Blast Desc: conserved [Aspergillus flavus NRRL3357] gi|220688550|gb|EED44902.1| conserved [Aspergillus flavus NRRL3357]
  misc_feature (500)..(970): NCBI GI: 119466979 Blast Desc: oligopeptide transporter [Neosartorya fischeri NRRL 181] gi|119405448|gb|EAW15399.1| oligopeptide transporter [Neosartorya fischeri NRRL 181]
  misc_feature (499)..(972): NCBI GI: 238492263 Blast Desc: POT peptide transporter, [Aspergillus flavus NRRL3357] gi|220695862|gb|EED52204.1| POT peptide transporter, [Aspergillus flavus NRRL3357]
  misc_feature (502)..(963): NCBI GI: 121703451 Blast Desc: oligopeptide transporter [Aspergillus clavatus NRRL 1] gi|119398133|gb|EAW08564.1| oligopeptide transporter [Aspergillus clavatus NRRL 1]
  misc_feature (502)..(969): NCBI GI: 119497489 Blast Desc: oligopeptide transporter [Neosartorya fischeri NRRL 181] gi|119413665|gb|EAW23606.1| oligopeptide transporter [Neosartorya fischeri NRRL 181]
  misc_feature (501)..(970): NCBI GI: 70990096 Blast Desc: POT peptide transporter [Aspergillus fumigatus Af293] gi|66847529|gb|EAL87859.1| POT peptide transporter, [Aspergillus fumigatus Af293]
  misc_feature (459)..(975): NCBI GI: 255955245 Blast Desc: Pc21g13580 [Penicillium chrysogenum Wisconsin 54-1255] gi|211590086|emb|CAP96255.1| Pc21g13580 [Penicillium chrysogenum Wisconsin 54-1255]
  misc_feature (501)..(969): NCBI GI: 67525901 Blast Desc: AN3408.2 [Aspergillus nidulans FGSC A4] gi|40744196|gb|EAA63376.1| AN3408.2 [Aspergillus nidulans FGSC A4] gi|259485604|tpe|CBF82768.1| TPA: MFS peptide transporter A4]
MRWNYFTLDDWAEFGDLETEYARFTYTLSRYPERGAPRSCASGLRQLLSDSSVLSGWYKYEAEFQNHADVALEYVCRKQRSQTSRQEWATKQNYVTVPVDYDVSEDASTLSLGLWNRALSEMTLDLKDHSRVRAAVFLRIFAFLKDPIYGFRKPFKEQIIIFLKLIDAFLEKYSSGELSLDDLKRVVAQAAQESAYLVGPLLKNVAVVHLKAHHQLTYVNVQLDLLARAEWSVPSHVLEVAEEMVQAVAANNGRACPLVPILVTVRPSFARGERDLVPIIDGNHRATAVMMLRFFAVQPRLSDRLNMQERLRGYCVGRKLGKKWEIDLMDVLDEFYTEHHRQLREKLSSTELLSRFATVESIPALFVQEEDFHTICKQRSEGKVKPVLLHPFHQTLFNDDSLPFALPQKAGQTHGRPEVFRLLPLTPFGDAGEINRTARNFEAKVRESMNGLAKGSVDAEARSKDRSEVKAKDVIVNKNEDTSLEPEKACSKPVRQVAADDECEPSEEDLKTLRRVSDKIPFSIFLVVVAEVAERFTYRSLTGPLQNYIQNPLHGFRPGALGKGQSVATAIGFFFQLWCYLTPLLGGFVADTYLGRFKTIFLGTSTALIGVAILFVTSLPSLLERGSGFPGLLVGLIIIGLGAGGIKSNVGPLVAEQYAGKKALWVELKVGFWLVFLLGLSVYAFAVFVLILGRNKYSTTHDETQYCLALLTERIVTHRPEGSIVARAAQALWIGLKNGRDMDKAKPSYQNQQGQSNIPWDDRFVDELKVAIAACRILSVFLAAEMNTLGLPNDFLAGSINPISILILLPFFDRILYPTLRRWGMSFLPVTRITCGFVVMSGAIALAAGLQSLVYKSPPHSVNFFSILPIYVLTGLSEILAFLSSMEYAYTKAPKSMKSLIASINLLSAAVGSALGLALSPTSNYAHVLVQFASLSGVMFILATGFYVVFSKYNKAEAAMNKMERDANDERQDVA

SEQ ID NO: 24207 - DNA, 962 bp, Muscodor strobelii
  misc_feature: SGI EST ID NO. CUFF.57049.0
  misc_feature: Variant of the nucleotide sequence at SEQ ID NO 24205
tccaagtaggatcatttagctatccgagatcgaggtttcgagagttttgctagtagggtctaacctcatcttctctgactgcctatgtactcttgaatatcctatgttgcactctccgttgtattgcatgcacgtgacgtgacttacaactacttggccacgatatcaccagttgtatgacatgtcagacaaaaacgaggatacatcacttgagcccgaaaaggcctgttcgaagcctgtgcgccaggttgcagcggacgatgaatgcgagccatccgaggaagatctgaaaacgctacgtcgcgtaagcgacaagattccgttttcaatcttcctcgttgtcgtcgctgaggtggcagagcgcttcacgtatcgctctttgacgggtccgctgcagaactatattcagaatccgcttcacggatttcggccaggtgcacttggcaaggtcagtcgatctcttatatgtcatgaacattcagctgacgaactgactttgaacataggggcaatctgttgctactgcgatagggttcttcttccagttgtggtgttatctaacccctttattaggtgggtttgtggcagatacctacctcgggcgcttcaagaccatatttcttggcacaagcactgccctcatcggtgttgccatattatttgtgacttcattgcctagtctcttggagcgtggttctgggtttccaggtttactagttggtctcatcataattggccttggagctgggggcatcaaaagcaatgtcggaccattggtagctgaacagtatgccggcaagaaagccctggtacgcactacgaacgatggtgagcgtgtgatagtcgatccggacatcaccgtacagacaattttcaaccgctattactggtatgattcatgatcttggtcatgcgacataagctgagatattcagggttatgaatattggatccgcatcggg

SEQ ID NO: 24208 - DNA, 1518 bp, Muscodor strobelii
  misc_feature: SGI cDNA ID NO. 568250
  misc_feature: Encodes the peptide sequence at SEQ ID NO 24209
atggatcatggctcctcaggcgcttgtccaacggcgattttagagcatcaaaatgccttgcgctgggatcttgatcgaggctcgcccgaattcttcctatcatcatggtctccaagacaccgggcgtctaaagaaaggttggccaagttcgtcggtgcggattatgacgaacttcttctcacgccaggctcaactctcggattgaacatcgtgacccaaagccagcaatttcagcctggcgatgagcttctcacgacgaatcatgcatatagctctgtgacgatgcttctgaagcacgtcgccaatcgcgatggagcgaaggtcgtcatcgccaacttgccctttcccgtcgcttcccctaatgatatcgtcgcaagcatcatgacatgcgtcacagagaacacaaagttcgctatcatcgatcacatcgtgagccgtacaggcctggtattccccatcaaacgcatcgtagcagagctcgcagcccgcggcatcgataccctcgtagacggtgctcatgggcctggacaagttcaagtcgatctccacgacatcgggtcagcgtattacacaaccagctgtcataaatggatgtgtgcacctcgcggcgtgggtttcatgtacgtacgccgcgaccgcatctcaaagctgaagcctctcatcatcgcacgatcaggccactggcgagatacaaacggcgctggctattcatggcttgaacacacattcgaatggaatggctgccacgatccctcaggcgtacacagtatgccaaagatcatcgacttcctggagactgcgctacctgggggtcacgccgcaatggtgaaacggaaccatgatctcgccgttgaagcacgaacacgagtcctcgagattctaggcatcgacaaaccatgcccagacgacatgatcgctaatatggtcacgttcccactcccggattccgtacttcccaatgctcttggaatcctcccaatatgcaaaaatctatgggaaagggagcgcgcagagatccagtgctatcactggccggcatacccgaagcgcatctttcggttcagtgttcagctacacaacagccttgagcagttcatttggctggccggaaagatcaaggaagagctcaagaatgagagtgagcttgccgcttcgttgggtgctaacgagccttcggagcaacccgctgtcaactcacttgcggccgaaggagtccatgagaagccagtagcagcagaggtaccaatccgacaggagaaggccaaagcgactccttttgaatctaaaatccagaacggcgcgccggatgttcaaaaccaaaacaagtctcccgtcacggacagctccacgggtaacactagcactaccgagaaagtgaagtccaaggatgacttccacaagttgataaggaagctcaggagggctctaacgaagatgagtcgcaagaacagtaccccgaattcgaccataaagactctgggcagaggacacaagttggcttcagatcagtcatcttaa

SEQ ID NO: 24209 - protein, 505 aa, Muscodor strobelii
  misc_feature: SGI Peptide ID NO. 568250
  misc_feature (2)..(368): Pfam Id: PF00266 Pfam Desc: Aminotransferase class-V
  misc_feature (45)..(220): Pfam Id: PF00266 Pfam Desc: Aminotransferase class-V
  misc_feature (1)..(389): NCBI GI: 238507658 Blast Desc: cysteine desulfurylase, [Aspergillus flavus NRRL3357] gi|220688549|gb|EED44901.1| cysteine desulfurylase, [Aspergillus flavus NRRL3357]
  misc_feature (1)..(389): NCBI GI: 169785096 Blast Desc: [Aspergillus oryzae RIB40] gi|83775756|dbj|BAE65876.1| protein product [Aspergillus oryzae]
  misc_feature (1)..(379): NCBI GI: 223935046 Blast Desc: aminotransferase class V [bacterium Ellin514] gi|223896499|gb|EEF62941.1| aminotransferase class V [bacterium Ellin514]
  misc_feature (1)..(374): NCBI GI: 119492072 Blast Desc: isopenicillin n epimerase protein [Lyngbya sp. PCC 8106] gi|119453282|gb|EAW34447.1| isopenicillin n epimerase protein [Lyngbya sp. PCC 8106]
  misc_feature (1)..(385): NCBI GI: 83746356 Blast Desc: Isopenicillin N epimerase [Ralstonia solanacearum UW551] gi|207744694|ref|YP_002261086.1| aminotransferase, class v; protein [Ralstonia solanacearum IPO1609] Isopenicillin N class
  misc_feature (1)..(379): NCBI GI: 218439884 Blast Desc: aminotransferase class V [Cyanothece sp. PCC 7424] gi|218172612|gb|ACK71345.1| aminotransferase class V [Cyanothece sp. PCC 7424]
  misc_feature (1)..(377): NCBI GI: 196257127 Blast Desc: aminotransferase class V [Cyanothece sp. PCC 7822] gi|196202522|gb|EDX97340.1| aminotransferase class V [Cyanothece sp. PCC 7822]
  misc_feature (1)..(380): NCBI GI: 17548917 Blast Desc: isopenicillin N epimerase protein [Ralstonia solanacearum GMI1000] gi|17431167|emb|CAD17847.1| aminotransferase, class v; protein [Ralstonia solanacearum
  misc_feature (1)..(365): NCBI GI: 220906158 Blast Desc: aminotransferase class V [Cyanothece sp. PCC 7425] gi|219862769|gb|ACL43108.1| aminotransferase class V [Cyanothece sp. PCC 7425]
  misc_feature (1)..(377): NCBI GI: 108759751 Blast Desc: isopenicillin N epimerase [Myxococcus xanthus DK 1622] gi|108463631|gb|ABF88816.1| isopenicillin N epimerase [Myxococcus xanthus DK 1622]
  misc_feature (1)..(372): SWISSPROT Homolog: EC 5.1.1.17 Isopenicillin-N epimerase
MDHGSSGACPTAILEHQNALRWDLDRGSPEFFLSSWSPRHRASKERLAKFVGADYDELLLTPGSTLGLNIVTQSQQFQPGDELLTTNHAYSSVTMLLKHVANRDGAKVVIANLPFPVASPNDIVASIMTCVTENTKFAIIDHIVSRTGLVFPIKRIVAELAARGIDTLVDGAHGPGQVQVDLHDIGSAYYTTSCHKWMCAPRGVGFMYVRRDRISKLKPLIIARSGHWRDTNGAGYSWLEHTFEWNGCHDPSGVHSMPKIIDFLETALPGGHAAMVKRNHDLAVEARTRVLEILGIDKPCPDDMIANMVTFPLPDSVLPNALGILPICKNLWERERAEIQCYHWPAYPKRIFRFSVQLHNSLEQFIWLAGKIKEELKNESELAASLGANEPSEQPAVNSLAAEGVHEKPVAAEVPIRQEKAKATPFESKIQNGAPDVQNQNKSPVTDSSTGNTSTTEKVKSKDDFHKLIRKLRRALTKMSRKNSTPNSTIKTLGRGHKLASDQSS

SEQ ID NO: 24210 - DNA, 510 bp, Muscodor strobelii
  misc_feature: SGI EST ID NO. CUFF.57063.0
  misc_feature: Variant of the nucleotide sequence at SEQ ID NO 24208
ctcaaagctgaagcctctcatcatcgcacgatcaggccactggcgagatacaaacggcgctggctattcatggcttgaacacacattcgaatggaatggctgccacgatccctcaggcgtacacagtatgccaaagatcatcgacttcctggagactgcgctacctgggggtcacgccgcaatggtgaaacggaaccatgatctcgccgttgaagcacgaacacgagtcctcgagattctaggcatcgacaaaccatgcccagacgacatgatcgctaatatggtcacgttcccactcccggattccgtacttcccaatgctcttggaatcctcccaatatgcaaaaatctatgggaaagggagcgcgcagagatccagtgctatcactggccggcatacccgaagcgcatctttcggttcagtgttcagctacacaacagccttgagcagttcatttggctggccggaaagatcaaggaagagctcaagaatgagagtgagcttgccgc

SEQ ID NO: 24211 - DNA, 831 bp, Muscodor strobelii
  misc_feature: SGI cDNA ID NO. 568251
  misc_feature: Encodes the peptide sequence at SEQ ID NO 24212
atggccgaaataaaatcaccaaatagtgggcctttggtcatcggaaccggtctaccgcgaactggcacaacttcactacatcaagccctagtcacactcggattcgggccttgctcccactttcgcggcgattttgtcgaagacaaatttccttggccgacaagtaaattatggggacgagcatgctatgcgctcgatcgcaaagaacgacagaaaattatacatgagatcttcgttagcagaggctggaggtcatgcactgactatccctcgtcgcttttcgttgaggatctggttgagctgtatcccaatgcaaagtttgttcactgcgaacggtcatctgcacagctatggcgagattccgtaaacgagtctattggccggacgcaagactttgatctctggtttcctgcgctgatgttgccctttttcactttcaacttgcgtcccatcctaaatgctcttcaagcccgtaccatgcgcgtattcggcgccggcatttggtcttctcaagatgacgttaaactgtaccacgctcacaacgattgggttaagcgagtcgtccccaaagacaagcttttgatcttcaatccaaaggacgggtatcctgttttgtgcgagttcctcggagttcccgttcccaaggatgagcaagggaatgatctcaagtatccgcatgcaaatgaccgtgagtcaatggctcaggggttcaaatggtttaagatactgggttacacaaattgggccattgccatcgccggaatgacgtttgcactcaatcgatttggatatgtcgacctatcgcaggtgtcaaagtatttaaaatattga

SEQ ID NO: 24212 - protein, 276 aa, Muscodor strobelii
  misc_feature: SGI Peptide ID NO. 568251
  misc_feature (13)..(244): NCBI GI: 115401960 Blast Desc: conserved [Aspergillus terreus NIH2624] gi|114190509|gb|EAU32209.1| conserved [Aspergillus terreus NIH2624]
  misc_feature (13)..(244): NCBI GI: 119501485 Blast Desc: NFIA_044210 [Neosartorya fischeri NRRL 181] gi|119415665|gb|EAW25602.1| conserved [Neosartorya fischeri NRRL 181]
  misc_feature (13)..(248): NCBI GI: 188501559 Blast Desc: TPR repeat containing protein-like protein [Adineta vaga]
  misc_feature (13)..(253): NCBI GI: 67904442 Blast Desc: AN9208.2 [Aspergillus nidulans FGSC A4] gi|40742309|gb|EAA61499.1| AN9208.2 [Aspergillus nidulans FGSC A4] gi|259485362|tpe|CBF82322.1| TPA: conserved [Aspergillus FGSC
  misc_feature (2)..(250): NCBI GI: 238497233 Blast Desc: NAD dependent epimerase/dehydratase, [Aspergillus flavus NRRL3357] gi|220694732|gb|EED51076.1| NAD dependent epimerase/dehydratase, [Aspergillus flavus NRRL3357]
  misc_feature (7)..(267): NCBI GI: 145246676 Blast Desc: An12g05170 [Aspergillus niger] gi|134080308|emb|CAK46230.1| protein product [Aspergillus niger]
  misc_feature (2)..(250): NCBI GI: 169774259 Blast Desc: [Aspergillus oryzae RIB40] gi|83769460|dbj|BAE59595.1| protein product [Aspergillus oryzae]
  misc_feature (2)..(262): NCBI GI: 255941500 Blast Desc: Pc16g12200 [Penicillium chrysogenum Wisconsin 54-1255] gi|211586142|emb|CAP93890.1| Pc16g12200 [Penicillium chrysogenum Wisconsin 54-1255]
  misc_feature (13)..(259): NCBI GI: 119505561 Blast Desc: MGP2080_04545 [marine gamma proteobacterium HTCC2080] gi|119458670|gb|EAW39773.1| MGP2080_04545 [marine gamma proteobacterium HTCC2080]
  misc_feature (13)..(244): NCBI GI: 134102394 Blast Desc: SACE_5947 [Saccharopolyspora erythraea NRRL 2338] gi|133915017|emb|CAM05130.1| [Saccharopolyspora erythraea NRRL 2338]
MAEIKSPNSGPLVIGTGLPRTGTTSLHQALVTLGFGPCSHFRGDFVEDKFPWPTSKLWGRACYALDRKERQKIIHEIFVSRGWRSCTDYPSSLFVEDLVELYPNAKFVHCERSSAQLWRDSVNESIGRTQDFDLWFPALMLPFFTFNLRPILNALQARTMRVFGAGIWSSQDDVKLYHAHNDWVKRVVPKDKLLIFNPKDGYPVLCEFLGVPVPKDEQGNDLKYPHANDRESMAQGFKWFKILGYTNWAIAIAGMTFALNRFGYVDLSQVSKYLKY

SEQ ID NO: 24213 - DNA, 1006 bp, Muscodor strobelii
  misc_feature: SGI EST ID NO. CUFF.57073.0
  misc_feature: Variant of the nucleotide sequence at SEQ ID NO 24211
gagactttgcccgatgttgcaatctgatcaacaaattgcgcaatcggtaactactactcacagctaagatggccgaaataaaatcaccaaatagtgggcctttggtcatcggaaccggtctaccgcgaactggcacaacttcactacatcaagccctagtcacactcggattcgggccttgctcccactttcgcggcgattttgtcgaagacaaatttccttggccgacaagtaaattatggggacgagcatgctatgcgctcgatcgcaaagaacgacagaaaattatacatgagatcttcgttagcagaggctggaggtcatgcactgactatccctcgtcgcttttcgttgaggatctggttgagctgtatcccaatgcaaagtttgttcactgcgaacggtcatctgcacagctatggcgagattccgtaaacgagtctattggccggacgcaagactttgatctctggtttcctgcgctgatgttgccctttttcactttcaacttgcgtcccatcctaaatgctcttcaagcccgtaccatgcgcgtattcggcgccggcatttggtcttctcaagatgacgttaaactgtaccacgctcacaacgattgggttaagcgagtcgtccccaaagacaagcttttgatcttcaatccaaaggacgggtatcctgttttgtgcgagttcctcggagttcccgttcccaaggatgagcaagggaatgatctcaagtatccgcatgcaaatgaccgtgagtcaatggctcaggggttcaaatggtttaagatactgggttacacaaattgggccattgccatcgccggaatgacgtttgcactcaatcgatttggatatgtcgacctatcgcaggtgtcaaagtatttaaaatattgatatcgattattgacgactatcaattagcgttgtacaactttgtatcgtagcttcagttaaataggtgacgagagctctctactacactaaataaacttcctcactct

SEQ ID NO: 24214 - DNA, 621 bp, Muscodor strobelii
  misc_feature: SGI cDNA ID NO. 568252
  misc_feature: Elevated expression when VOC is produced
  misc_feature: Encodes the peptide sequence at SEQ ID NO 24215
atgatcaaatggcgatcaaaccaggaccgaagcgccaagcacgacctctattccgtagcagcggaagcaatggtcggtgacccccgaggtgcggttttggacagtgaaatatggttcgaggcactgttcttcttcccagcagagataggaggcgaatctgtctcaacgacaaccagcagtctattcttctacttatcacggaaccttgactgctaccgtaagcttaaagacgagattcggaaaaccttcgatagcgacaacgaaatccgagggggacttaaactcgccagctgcaagtatctgcgtgcgtgtattgatgaagcattgcgcctagcgcccccaggaccagggatcatgtggagggaaagggcgtcaacagatgatcgacgtcaaccattcatcattgatggtcatgtcattccggatggtactctatttggagcgaatatctacaccttacatcacgatgaagagtacttccccgacccgttctgctttcggcccgagcgctggttaagctcttgtacttcagaaagcgacatgaagaaaatgcaggaagcgtttgtcccattctcgatggggtctcgcgggtgcgcgggcaaagcgatggcgtgtaagtga

SEQ ID NO: 24215 - protein, 206 aa, Muscodor strobelii
  misc_feature: SGI Peptide ID NO. 568252
  misc_feature (55)..(204): Pfam Id: PF00067 Pfam Desc: Cytochrome P450
  misc_feature (1)..(204): NCBI GI: 156056276 Blast Desc: SS1G_05490 [Sclerotinia sclerotiorum 1980] gi|154703274|gb|EDO03013.1| SS1G_05490 [Sclerotinia sclerotiorum 1980]
  misc_feature (1)..(204): NCBI GI: 156060449 Blast Desc: SS1G_02363 [Sclerotinia sclerotiorum 1980] gi|154699771|gb|EDN99509.1| SS1G_02363 [Sclerotinia sclerotiorum 1980]
  misc_feature (8)..(205): NCBI GI: 121712150 Blast Desc: benzoate 4-monooxygenase cytochrome P450 [Aspergillus clavatus NRRL 1] gi|119401842|gb|EAW12264.1| benzoate 4-monooxygenase cytochrome P450 [Aspergillus clavatus NRRL 1]
  misc_feature (1)..(204): NCBI GI: 145241738 Blast Desc: An09g02000 [Aspergillus niger] gi|134078055|emb|CAK40138.1| protein product [Aspergillus niger]
  misc_feature (1)..(204): NCBI GI: 255954725 Blast Desc: Pc21g10830 [Penicillium chrysogenum Wisconsin 54-1255] gi|211589826|emb|CAP95980.1| Pc21g10830 [Penicillium chrysogenum Wisconsin 54-1255]
  misc_feature (1)..(184): NCBI GI: 169610055 Blast Desc: SNOG_08121 [Phaeosphaeria nodorum SN15] gi|160701972|gb|EAT84397.2| SNOG_08121 [Phaeosphaeria nodorum SN15]
  misc_feature (48)..(204): NCBI GI: 145256217 Blast Desc: An10g00660 [Aspergillus niger CBS 513.88] gi|134078632|emb|CAK40505.1| protein product [Aspergillus niger]
  misc_feature (1)..(204): NCBI GI: 169611945 Blast Desc: SNOG_09088 [Phaeosphaeria nodorum SN15] gi|160702403|gb|EAT83280.2| SNOG_09088 [Phaeosphaeria nodorum SN15]
  misc_feature (36)..(204): NCBI GI: 171678814 Blast Desc: protein product [Podospora anserina] gi|170937477|emb|CAP62135.1| protein product [Podospora anserina]
  misc_feature (3)..(204): NCBI GI: 270269263 Blast Desc: APS7 [Fusarium incarnatum]
  misc_feature (50)..(204): SWISSPROT Homolog: EC 1.14.15.3 Alkane 1-monooxygenase
  misc_feature: Useful for introducing or modulating the production of volatile compounds
MIKWRSNQDRSAKHDLYSVAAEAMVGDPRGAVLDSEIWFEALFFFPAEIGGESVSTTTSSLFFYLSRNLDCYRKLKDEIRKTFDSDNEIRGGLKLASCKYLRACIDEALRLAPPGPGIMWRERASTDDRRQPFIIDGHVIPDGTLFGANIYTLHHDEEYFPDPFCFRPERWLSSCTSESDMKKMQEAFVPFSMGSRGCAGKAMACK

SEQ ID NO: 24216 - DNA, 1282 bp, Muscodor strobelii
  misc_feature: SGI EST ID NO. CUFF.57162.1
  misc_feature: Variant of the nucleotide sequence at SEQ ID NO 24214
gaaattttgatagaatcctacaaacatcaaatcttggccttttcgattatcactaaatggctctcaaataccctattgcggccgtcgtgatctacttctttgtcatatggacgtacaacatatttttccatccgttatgcaactaccctggccctttagtcgctcggatatccaatatatatggcgcatatcatgctttgctgcgccggcttcatcttgttactaatcaaaatcatctccgatacggcaaagtcgtccgacaggggcccaaccggcttgttttcagctctactcaagccttccgagacatctacaacaatgatcgagttcaaaaatcaaaagcagcttatggagttggccgggttggtcatattgacagtgtattcagttcaatagacaaggctgtccacgctcgaaagcgcaagttgacggccgtggacctttcggagcgaacaaaatttctcacctacgatattgttggccatttatcgttcggatatcccctaaatcttcaaacccaaaggcacaatcgagatgttgccgatgctatccgcaaagggaatcaccgtttaaattgctttatgcaatggcctattataatcagcccactggtggagttcctggtgtttcggtcctccatgctgttggacaaaagcagctattaccacattgtgcaaaatatgatcaaatggcgatcaaaccaggaccgaagcgccaagcacgacctctattccgtagcagcggaagcaatggtcggtgacccccgaggtgcggttttggacagtgaaatatggttcgaggcactgttcttcttcccagcaggaggcgaatctgtctcaacgacaaccagcagtctattcttctacttatcacggaaccttgactgctaccgtaagcttaaagacgagattcggaaaaccttcgatagcgacaacgaaatccgagggggacttaaactcgccagctgcaagtatctgcgtgcgtgtattgatgaagcattgcgcctagcgcccccaggaccagggatcatgtggagggaaagggcgtcaacagatgatcgacgtcaaccattcatcattgatggtcatgtcattccggatggtactctatttggagcgaatatctacaccttacatcacgatgaagagtacttccccgacccgttctgctttcggcccgagcgctggttaagctcttgtacttcagaaagcgacatgaagaaaatgcaggaagcgtttgtcccattctcgatggggtctcgcgggtgcgcgggcaaagcgat

SEQ ID NO: 24217 - DNA, 762 bp, Muscodor strobelii
  misc_feature: SGI cDNA ID NO. 568253
  misc_feature: Encodes the peptide sequence at SEQ ID NO 24218
atgtgcacatcatcgtccacctcctcagccccggtcgcctaccctcacgaagagcaatcgatgaagatgaccatgcacggcgtctcgctcccagagcgatggcctactgaagctcttcaagaacaagagccatgtatcgcgacggccatccaccgagtacaagactcgaagggccacgcaatcaatcaagataataccgatgtgaagggcacagagcctactgtgtttcccggtacatctcacaccccccatcacaccaatagattcgttcaagttgatgacatcggtcgtcggtgtttgttgcctccccctggcctatcatctccaatttcttctcaggcagaaagcctcgattctgctgcaatttctgatacatcattcacgcctcctcctgtccatcaactcctccgattcgacaaggccggccgtcggtttcttgcacccccagttcatcccccgaccgagccgtactttgctcgtaagggtctacctcagacgccagctgcgggattcagcggcatctcattagcattgagccaggaatctcgaatggcccacgtgctaagatgtcgagtttgcactctatcaaattctaacatcgaggagaaccatttacctaaatacaatgttgctgagcccgagttacccaagagacaccagactaagaccagctcagagagccaagcatcgtactatggtccgctttggcaggcagaagaggatctcgtctacaacactcgcattcctatcagcactttttag

SEQ ID NO: 24218 - protein, 253 aa, Muscodor strobelii
  misc_feature: SGI Peptide ID NO. 568253
MCTSSSTSSAPVAYPHEEQSMKMTMHGVSLPERWPTEALQEQEPCIATAIHRVQDSKGHAINQDNTDVKGTEPTVFPGTSHTPHHTNRFVQVDDIGRRCLLPPPGLSSPISSQAESLDSAAISDTSFTPPPVHQLLRFDKAGRRFLAPPVHPPTEPYFARKGLPQTPAAGFSGISLALSQESRMAHVLRCRVCTLSNSNIEENHLPKYNVAEPELPKRHQTKTSSESQASYYGPLWQAEEDLVYNTRIPISTF

SEQ ID NO: 24219 - DNA, 1494 bp, Muscodor strobelii
  misc_feature: SGI cDNA ID NO. 568255
  misc_feature: Encodes the peptide sequence at SEQ ID NO 24220
atgggcgaaaacgatcatgacgtagagccagtagtccatcattacacaaatgagacccagtactcagtgttcagtatctgggagaaacgaaccattacagcgatcatcggcttttcaatggtgttctcgccattgaccgcgaacatttattttcctagcgttgttcagatacgtcgcgatcttaacgtgtcaggcgaactcgtcgatcttacgatcactgtctatttaattattcaaggagcctcgcctgcattcttcggctccgccgcggatggcaagctggtgttcatactcatgttttccgtttacgtcgtggcaaaccttgcattggctctgcagaacaattacgttgctcttcttgtgctacgcatgctacagagcttagggtgctctgccactattgctatttcatacggtgttatcgcagatgtatcaacgccggctgagcgtggtactatgcagggcgtggccatcactgccgcgaatgttgggccagtcttgggtccagtgattggaggtgctttggcgcgccatgctgaatggcactgggtcttctggtttctgctgattgcaggaagcatagtgttatccttcatcgtgtgtttccttccagagacagcacgacgactcgttggaaacggaatgacactacccccaagatggcaacgacccctcgtatctaccctttttaatattcaaatccctcaagcaggcaatgtcttagccaagatacaacagccggctgcgtcggctcgtcatgcactgaatcctctactgtccatatacattttattccatagagattcattcgtgattctgcttgttagcggtgtcttttatcttacttattactgcgttcaggcgtcaattacggatatcttcgaggaatcttacggctataacgagtcagttatcggggcctgctacctcgctattggcgccggtgtcatcatagggggatatgctaatgaaaagttgatgaattataattataaacacaaggctcggaatattgggcacataatagacaaggtgaagggggacgacgtcagcaaatttcccattgagcaagcaagaacacgatctatggcgctgttgaatggtgcgcatgtgttcatccttgcggcgtacggttggcttttgcgggagcgagtgcatgtcagcggcccgttgattcttcaatttgctcttggcgctatccagacctgtattgttcagacatttaatactcttctcgtggatatatttccacgtaccccgagcactgcagctgctgccggcaacatcgtccgttgtggacttgcagctgcgggcatagcagggttgaaacctttaatgtctgtaatgggtaaaggttggtacttcacaatgttggcggccatctcgtttgtagtaggctggctaggaacgtttttcacctctaaatttggcatgggctggagattggagcgattgagagcaccagaaaccatgtctaattgtacagagaaataa

SEQ ID NO: 24220 - protein, 497 aa, Muscodor strobelii
  misc_feature: SGI Peptide ID NO. 568255
  misc_feature (36)..(439): Pfam Id: PF07690 Pfam Desc: Major Facilitator Superfamily
  misc_feature (4)..(485): NCBI GI: 156031347 Blast Desc: SS1G_14095 [Sclerotinia sclerotiorum 1980] gi|154699497|gb|EDN99235.1| SS1G_14095 [Sclerotinia sclerotiorum 1980]
  misc_feature (7)..(485): NCBI GI: 255947864 Blast Desc: Pc22g06710 [Penicillium chrysogenum Wisconsin 54-1255] gi|211591716|emb|CAP97959.1| Pc22g06710 [Penicillium chrysogenum Wisconsin 54-1255]
  misc_feature (7)..(484): NCBI GI: 212543579 Blast Desc: conserved [Penicillium marneffei ATCC 18224] gi|210066851|gb|EEA20944.1| conserved [Penicillium marneffei ATCC 18224]
  misc_feature (16)..(485): NCBI GI: 119500304 Blast Desc: MFS transporter, [Neosartorya fischeri NRRL 181] gi|119415074|gb|EAW25012.1| MFS transporter, [Neosartorya fischeri NRRL 181]
  misc_feature (2)..(461): NCBI GI: 242787158 Blast Desc: florfenicol exporter, [Talaromyces stipitatus ATCC 10500] gi|218721094|gb|EED20513.1| florfenicol exporter, [Talaromyces stipitatus ATCC 10500]
  misc_feature (18)..(493): NCBI GI: 255950382 Blast Desc: Pc22g20580 [Penicillium chrysogenum Wisconsin 54-1255] gi|211592975|emb|CAP99346.1| Pc22g20580 [Penicillium chrysogenum Wisconsin 54-1255]
  misc_feature (17)..(485): NCBI GI: 121707893 Blast Desc: MFS transporter, [Aspergillus clavatus NRRL 1] gi|119400118|gb|EAW10544.1| MFS transporter, [Aspergillus clavatus NRRL 1]
  misc_feature (16)..(485): NCBI GI: 70993750 Blast Desc: MFS transporter [Aspergillus fumigatus Af293] gi|66849356|gb|EAL89684.1| MFS transporter, [Aspergillus fumigatus Af293] gi|159125356|gb|EDP50473.1| MFS transporter,
  misc_feature (4)..(484): NCBI GI: 171676988 Blast Desc: protein product [Podospora anserina] gi|170936561|emb|CAP61221.1| protein product [Podospora anserina]
  misc_feature (8)..(494): NCBI GI: 259480685 Blast Desc: TPA: MFS transporter, (AFU_orthologue; AFUA_5G01520) [Aspergillus nidulans FGSC A4]
MGENDHDVEPVVHHYTNETQYSVFSIWEKRTITAIIGFSMVFSPLTANIYFPSVVQIRRDLNVSGELVDLTITVYLIIQGASPAFFGSAADGKLVFILMFSVYVVANLALALQNNYVALLVLRMLQSLGCSATIAISYGVIADVSTPAERGTMQGVAITAANVGPVLGPVIGGALARHAEWHWVFWFLLIAGSIVLSFIVCFLPETARRLVGNGMTLPPRWQRPLVSTLFNIQIPQAGNVLAKIQQPAASARHALNPLLSIYILFHRDSFVILLVSGVFYLTYYCVQASITDIFEESYGYNESVIGACYLAIGAGVIIGGYANEKLMNYNYKHKARNIGHIIDKVKGDDVSKFPIEQARTRSMALLNGAHVFILAAYGWLLRERVHVSGPLILQFALGAIQTCIVQTFNTLLVDIFPRTPSTAAAAGNIVRCGLAAAGIAGLKPLMSVMGKGWYFTMLAAISFVVGWLGTFFTSKFGMGWRLERLRAPETMSNCTEK

SEQ ID NO: 24221 - DNA, 2734 bp, Muscodor strobelii
  misc_feature: SGI EST ID NO. CUFF.57116.0
  misc_feature: Variant of the nucleotide sequence at SEQ ID NO 24219
tcgtgctaacctttttgtagtaagtgatctgaattatcagatatcgcaaaccagtcctttgtcctaaggtcccgggccgcgcggcgaaatatcgtaaaaaataactaacgcgacacctttctgggtaccagatttacggtcggaggctggtgttcatactcatgttttccgtttacgtcgtggcaaaccttgcattggctctgcagaacaattacgttgctcttcttgtgctacgcatgctacagagcttagggtgctctgccactattgctatttcatacggtgttatcgcagatgtatcaacgccggctgagcgtggtactatgcagggcgtggccatcactgccgcgaatgttgggccagtcttgggtccagtgattggaggtgctttggcgcgccatgctgaatggcactgggtcttctggtttctgctgattgcaggaagcatagtgttatccttcatcgtgtgtttccttccagagacagcacgacgactcgttggaaacggaatgacactacccccaagatggcaacgacccctcgtatctaccctttttaatattcaaatccctcaagcaggcaatgtcttagccaagatacaacagccggctgcgtcggctcgtcatgcactgaatcctctactgtccatatacattttattccatagagattcattcgtgattctgcttgttagcggtgtcttttatcttacttattactgcgttcaggcgtcaattacggatatcttcgaggaatcttacggctataacgagtcagttatcggggcctgctacctcgctattggcgccggtgtcatcatagggggatatgctaatgaaaagttgatgaattataattataaacacaaggctcggaatattgggcacataatagacaaggtgaagggggacgacgtcagcaaatttcccattgagcaagcaagaacacgatctatggcgctgttgaatggtgcgcatgtgttcatccttgcggcgtacggttggcttttgcgggagcgagtgcatgtcagcggcccgttgattcttcaatttgctcttggcgctatccagacctgtattgttcagacatttaatactcttctcgtggatatatttccacgtaccccgagcactgcagctgctgccggcaacatcgtccgttgtggacttgcagctgcgggcatagcagggttgaaacctttaatgtctgtaatgggtaaaggttggtacttcacaatgttggcggccatctcgtttgtagtaggctggctaggaacgtttttcacctctaaatttggcatgggctggagattggagcgattgagagcaccagaaaccatgtctaattgtacagagaaataattggcttcaacctctttccatagtttgttctccactgatcgcattctgcccattaaattgatataatacattaatcgactcacgacaccgacatacttattctcaagacctcttctgaaatggactctccgtgacaacccaatctgcaaaggttttcattcctggatggatctttctcaattcggcgatgtcagccccgaagccgtcagtccgaaaccatctgaacatcatcctcatctcgctgctgaccgcctggatgaaggaacccaagaagctgtaagtcatagggatgttctgcccagtcttgtccttgactaccctatttgcctcgccgtaagccaactcatcacccgcgagactgacggcacgattgcgccagatatctggctgcatgaaggttttcgccgcgaagactcctatgtcactcgccgcgatcacctgcagcggcttggtaccaagagacgagctccatatagtcgcgaagatcttgccgaagaaattcggctggaagttgtccatgaaggccacgggtcgcaaaatcgtccaggccatgtcggtattcttagcaatgtcgacgaggtggtgctcgatctcatgtttggtacggaagtgcggcacatcggtcggcttgtcgtagctggcggtgccaccccggtccgcgctgctgtagacgaacatcttgacgttgttcttcagcgccacatcggctagtgctttgccttgtcggacctcgggagatttgtcgaacagaccaccgaagacgctctagtagctctggcatcaatatgcggagcgcgcaaggaaacgagggatccagcattcagtatgttaaaaacgtacctgaacgctgaatacaccccatatgggggcttttgtgacacttttgacatctctaaagatctcttccggtttctcgagatcaccggttatgaatttgacttttggcgacttgtgcgctagtctcttggctgagctcgattgagggttacgagatacggcgagaatctcgaagtctgcattggcttttagtagggcctgtatcagggcgcctccttgatttccagttgcaccggtaactaggatcgcacgtgatgtcgacatttttgtactgaaaggtctctgtcttctcaaatatttcgtgtaatgttgcgagtgaataagctaggcttttcgatgggtgatacgacggtatctttgctgttacatttcaaccggcctgactgacgaggacgcatatttatacatacgcttcacttaatagaatacttgaaacgccttgcgaccaatacgtctacttaaatttttgctatcaaattcatcggatcgatgatgcaactccgagcctgcagggcactcacaatgttagaagtcgg

SEQ ID NO: 24222 - DNA, 801 bp, Muscodor strobelii
  misc_feature: SGI cDNA ID NO. 568256
  misc_feature: Elevated expression when VOC is produced
  misc_feature: Encodes the peptide sequence at SEQ ID NO 24223
atggctttaggcgaactcgaagggagcaaatcccttttcgcagccctaccgttaaatgtccctaagccagtcgcagccggtgcgctggcgaaagacgcaaagaaacacttctatcttgccgaatttcgcgacatgacggacgagatgcctggcgcaaccgactttgtgtcgctaatcgcgaagctgcaccaaactacagagtctcccactggcaaattcgggtttcacattaccacgtatgggggagataaccccttggacacgacttggtgcgactcgtgggaacaattcttcacgcgaatgatgaagcaggtgatggaccgggaaagagacattcatggtcccgatgaagagttggataaactgagcccgatgatcatcgaccgtgtgattcctaaatcgttacggcccatggaatcagctggaaggaaaataaaaccagttctgattcatggagatctctggcacgggaacgtcgcagtagacaacgacactaaggagccacttttgtacgacccttgtgcattctatgcgcacagcgaattcgagtttgcaccgtggagagcagcacgatatcaaacaaatcgccatcatgttcacgcctattttgagattgctcaaataaccgaaccatcagaggacctggatgatcgacttgctctgtacgctttgcgattagacctcatggtttcgatttgctggcctaacaacaaacgaacaagacagcttgccgttgaggagatgaagcgactcacggagaagttttgctccggggagccagatgaaggtgtctatctatga

SEQ ID NO: 24223 - protein, 266 aa, Muscodor strobelii
  misc_feature: SGI Peptide ID NO. 568256
  misc_feature (146)..(177): Pfam Id: PF03881 Pfam Desc: Fructosamine kinase
  misc_feature (1)..(242): NCBI GI: 238503680 Blast Desc: conserved [Aspergillus flavus NRRL3357] gi|220690543|gb|EED46892.1| conserved [Aspergillus flavus NRRL3357]
  misc_feature (1)..(251): NCBI GI: 169765035 Blast Desc: [Aspergillus oryzae RIB40] gi|83764843|dbj|BAE54987.1| protein product [Aspergillus oryzae]
  misc_feature (1)..(241): NCBI GI: 171679237 Blast Desc: protein product [Podospora anserina] gi|170939244|emb|CAP64472.1| protein product [Podospora anserina]
  misc_feature (4)..(227): NCBI GI: 145605954 Blast Desc: MGG_11859 [Magnaporthe grisea 70-15] gi|145013692|gb|EDJ98333.1| MGG_11859 [Magnaporthe grisea 70-15]
  misc_feature (1)..(224): NCBI GI: 255946231 Blast Desc: Pc20g14050 [Penicillium chrysogenum Wisconsin 54-1255] gi|211588618|emb|CAP86734.1| Pc20g14050 [Penicillium chrysogenum Wisconsin 54-1255]
  misc_feature (1)..(224): NCBI GI: 145256231 Blast Desc: An10g00710 [Aspergillus niger CBS 513.88] gi|134078637|emb|CAK40510.1| protein product [Aspergillus niger]
  misc_feature (4)..(228): NCBI GI: 116179188 Blast Desc: CHGG_00222 [Chaetomium globosum CBS 148.51] gi|88184519|gb|EAQ91987.1| CHGG_00222 [Chaetomium globosum CBS 148.51]
  misc_feature (13)..(248): NCBI GI: 116205173 Blast Desc: CHGG_10470 [Chaetomium globosum CBS 148.51] gi|88176598|gb|EAQ84066.1| CHGG_10470 [Chaetomium globosum CBS 148.51]
  misc_feature (4)..(258): NCBI GI: 240108761 Blast Desc: conserved [Coccidioides posadasii C735 delta SOWgp]
  misc_feature (1)..(224): NCBI GI: 115385086 Blast Desc: conserved [Aspergillus terreus NIH2624] gi|114196782|gb|EAU38482.1| conserved [Aspergillus terreus NIH2624]
  misc_feature: Useful for introducing or modulating the production of volatile compounds
MALGELEGSKSLFAALPLNVPKPVAAGALAKDAKKHFYLAEFRDMTDEMPGATDFVSLIAKLHQTTESPTGKFGFHITTYGGDNPLDTTWCDSWEQFFTRMMKQVMDRERDIHGPDEELDKLSPMIIDRVIPKSLRPMESAGRKIKPVLIHGDLWHGNVAVDNDTKEPLLYDPCAFYAHSEFEFAPWRAARYQTNRHHVHAYFEIAQITEPSEDLDDRLALYALRLDLMVSICWPNNKRTRQLAVEEMKRLTEKFCSGEPDEGVYL

SEQ ID NO: 24224 - DNA, 1394 bp, Muscodor strobelii
  misc_feature: SGI EST ID NO. CUFF.57119.0
  misc_feature: Variant of the nucleotide sequence at SEQ ID NO 24222
ccaacatggtacaaatcgattctgaattcaatccgccaacagtacctgaggaggaagcatatgagggaaccgaattggatgataatgtcagacaaggtgggaacattgtatatgggcacatagatatctctcgtcgaacgtgaaagtcaaatgttctctaacggatcgagatagtactccccagaggaacaacaataaaatgggttgcgactcgcagcgcaagcttctgggctatcaatagtaaggttgacacagagctctctaacgggaagactcaatcatactttctcaaagtaaaatacctgcgaagaatagttgtctacatgctgagcctactataaggtctacactggagaaagagccaaggaaatggctttaggcgaactcgaagggagcaaatcccttttcgcagccctaccgttaaatgtccctaagccagtcgcagccggtgcgctggcgaaagacgcaaagaaacacttctatcttgccgaatttcgcgacatgacggacgagatgcctggcgcaaccgactttgtgtcgctaatcgcgaagctgcaccaaactacagagtctcccactggcaaattcgggtttcacattaccacgtatgggggagataaccccttggacacgacttggtgcgactcgtgggaacaattcttcacgcgaatgatgaagcaggtgatggaccgggaaagagacattcatggtcccgatgaagagttggataaactgagcccgatgatcatcgaccgtgtgattcctaaatcgttacggcccatggaatcagctggaaggaaaataaaaccagttctgattcatggagatctctggcacgggaacgtcgcagtagacaacgacactaaggagccacttttgtacgacccttgtgcattctatgcgcacagcgaattcgagtttgcaccgtggagagcagcacgatatcaaacaaatcgccatcatgttcacgcctattttgagattgctcaaataaccgaaccatcagaggacctggatgatcgacttgctctgtacgctttgcgattagacctcatggtttcgatttgctggcctaacaacaaacgaacaagacagcttgccgttgaggagatgaagcgactcacggagaagttttgctccggggagccagatgaaggtgtctatctatgaggtttagcgttgcacttaaatggctattttttatgttttccacaaactgagaatgggtagttacttaaaggtgtctttgcttgttcacagcggaaatttgtgtaagcgataaaagatctaaatgcggaatttgttcaaagtaagtcgcgcaagtcaggtccctggggaagacttgtcagatatgtacctcaataggaaacagtagaaaatctagtgcattgagc

SEQ ID NO: 24225 - DNA, 909 bp, Muscodor strobelii
  misc_feature: SGI cDNA ID NO. 568257
  misc_feature: Encodes the peptide sequence at SEQ ID NO 24226
atggtacaaatcgattctgaattcaatccgccaacagtacctgaggaggaagcatatgagggaaccgaattggatgataatgtctacactggagaaagagccaaggaaatggctttaggcgaactcgaagggagcaaatcccttttcgcagccctaccgttaaatgtccctaagccagtcgcagccggtgcgctggcgaaagacgcaaagaaacacttctatcttgccgaatttcgcgacatgacggacgagatgcctggcgcaaccgactttgtgtcgctaatcgcgaagctgcaccaaactacagagtctcccactggcaaattcgggtttcacattaccacgtatgggggagataaccccttggacacgacttggtgcgactcgtgggaacaattcttcacgcgaatgatgaagcaggtgatggaccgggaaagagacattcatggtcccgatgaagagttggataaactgagcccgatgatcatcgaccgtgtgattcctaaatcgttacggcccatggaatcagctggaaggaaaataaaaccagttctgattcatggagatctctggcacgggaacgtcgcagtagacaacgacactaaggagccacttttgtacgacccttgtgcattctatgcgcacagcgaattcgagtttgcaccgtggagagcagcacgatatcaaacaaatcgccatcatgttcacgcctattttgagattgctcaaataaccgaaccatcagaggacctggatgatcgacttgctctgtacgctttgcgattagacctcatggtttcgatttgctggcctaacaacaaacgaacaagacagcttgccgttgaggagatgaagcgactcacggagaagttttgctccggggagccagatgaaggtgtctatctatga

SEQ ID NO: 24226 - protein, 302 aa, Muscodor strobelii
  misc_feature: SGI Peptide ID NO. 568257
  misc_feature (15)..(258): Pfam Id: PF01636 Pfam Desc: Phosphotransferase enzyme family
  misc_feature (3)..(257): Pfam Id: PF03881 Pfam Desc: Fructosamine kinase
  misc_feature (182)..(213): Pfam Id: PF03881 Pfam Desc: Fructosamine kinase
  misc_feature (28)..(278): NCBI GI: 238503680 Blast Desc: conserved [Aspergillus flavus NRRL3357] gi|220690543|gb|EED46892.1| conserved [Aspergillus flavus NRRL3357]
  misc_feature (28)..(287): NCBI GI: 169765035 Blast Desc: [Aspergillus oryzae RIB40] gi|83764843|dbj|BAE54987.1| protein product [Aspergillus oryzae]
  misc_feature (28)..(263): NCBI GI: 145605954 Blast Desc: MGG_11859 [Magnaporthe grisea 70-15] gi|145013692|gb|EDJ98333.1| MGG_11859 [Magnaporthe grisea 70-15]
  misc_feature (32)..(260): NCBI GI: 255946231 Blast Desc: Pc20g14050 [Penicillium chrysogenum Wisconsin 54-1255] gi|211588618|emb|CAP86734.1| Pc20g14050 [Penicillium chrysogenum Wisconsin 54-1255]
  misc_feature (30)..(260): NCBI GI: 145256231 Blast Desc: An10g00710 [Aspergillus niger CBS 513.88] gi|134078637|emb|CAK40510.1| protein product [Aspergillus niger]
  misc_feature (37)..(277): NCBI GI: 171679237 Blast Desc: protein product [Podospora anserina] gi|170939244|emb|CAP64472.1| protein product [Podospora anserina]
  misc_feature (28)..(264): NCBI GI: 116179188 Blast Desc: CHGG_00222 [Chaetomium globosum CBS 148.51] gi|88184519|gb|EAQ91987.1| CHGG_00222 [Chaetomium globosum CBS 148.51]
  misc_feature (30)..(284): NCBI GI: 116205173 Blast Desc: CHGG_10470 [Chaetomium globosum CBS 148.51] gi|88176598|gb|EAQ84066.1| CHGG_10470 [Chaetomium globosum CBS 148.51]
  misc_feature (40)..(294): NCBI GI: 240108761 Blast Desc: conserved [Coccidioides posadasii C735 delta SOWgp]
  misc_feature (28)..(260): NCBI GI: 115385086 Blast Desc: conserved [Aspergillus terreus NIH2624] gi|114196782|gb|EAU38482.1| conserved [Aspergillus terreus NIH2624]
MVQIDSEFNPPTVPEEEAYEGTELDDNVYTGERAKEMALGELEGSKSLFAALPLNVPKPVAAGALAKDAKKHFYLAEFRDMTDEMPGATDFVSLIAKLHQTTESPTGKFGFHITTYGGDNPLDTTWCDSWEQFFTRMMKQVMDRERDIHGPDEELDKLSPMIIDRVIPKSLRPMESAGRKIKPVLIHGDLWHGNVAVDNDTKEPLLYDPCAFYAHSEFEFAPWRAARYQTNRHHVHAYFEIAQITEPSEDLDDRLALYALRLDLMVSICWPNNKRTRQLAVEEMKRLTEKFCSGEPDEGVYL

SEQ ID NO: 24227 - DNA, 1394 bp, Muscodor strobelii; identical to SEQ ID NO: 24224
  misc_feature: SGI EST ID NO. CUFF.57119.0
  misc_feature: Variant of the nucleotide sequence at SEQ ID NO 24225

SEQ ID NO: 24228 - DNA, 1857 bp, Muscodor strobelii
  misc_feature: SGI cDNA ID NO. 568258
  misc_feature: Elevated expression when VOC is produced
  misc_feature: Encodes the peptide sequence at SEQ ID NO 24229
atgggtcaagaaactgtcggtgttttgattgcagcgctcatcgcaacgttcgctgccggggaagcgcattacacggcctggctacaacggcaatggaaacgtaatcactaccagaaacgagtacctagtgagccgaccaagagcggcaagggcttttatgcagcgagtattacgctgaggctctctgcggagcgtgtgaaggatgcgtatgattgcggggtagatatgctaggcgaatctttcgcggttggagatgccgtaacctgccacatagtacgagagggccttgaaagcctcaaggcatgtattgatgcatttgagcgtgctactagcatgaacgatgtgccgttagatcttacgggtgtgctgcgtgtgtcaactgcagtgcaacaatctgtaatcgcagctctacacaagcaatataagcgagtagctatcagtcgtttggtacctcgaggatcgaagaaaaaacaagacttggtgcatcctgaacatgtcgagattaccgtgcaagagatcggagactccaagaaagaagaagacgatgctgagcaaatggcaaatacactcctcccatgtatcacacctctgccggctctgaacttcgattattcatcgccggacggtgttcctccctcataccccaccactgccggcagccgtggagtcgaagacccaccactcaacccagaaacggaccaatttcacaccgactatggccgggttacaaatggtctcagtgtaaccatgccatatccacccgtcccaacatctccaccgaagaccgtccttgtcacgggggctggtggctatatcggcctcaacgtcagtagggcctttgtgcgcgcaggatggcaagtatacggtcttgttcgacgtcctgaagctgctacgaagctactgtctgaggagatcatccccgtactaggttctatctcttcggactcggatttcgtagacagtctcttagcaaatgtttcggcgcccttcgacgtcgtagtctcgtgtacagagtcatttccgttcaacgagcattgggagcacctcctgagcatcttcacgaaagtcgcaaagcacgctcagcaacacaatgtcaagaccctggtattaatgagttcggggtgtaaagactacggacaaacactcacacacggcgacccaaatctagccccccacaccgaaatctcacccctagaaccccaatccttcatcaaagaacgcagcgaaagcaccatgaagatattcacccactcctctctcttcgacgctgccgtaatccgtccaacacccttatacggatacggaagctcattctacggcatactcttcgactccttttcgcgtttccacacaagccccgacgccacaacagaaaccgaagtcgttatcccgggaaaccccaataacatcatccacgggtgtcacatcgcagattgtgctgcagcctatctctcgctcgccgcacaccccaatcgctcagagattgccggacaatgtttcaacatctctgccgcccgatacgagaccgtgggcgaagtcgttgaggcgttggccgcggaatatggaattaagggtaaactcgtctttagctctgaaagaggagatggtgtgccggtagataaggagcttcagcccattgcctcgatgtccgacatctcacaatgggtcggcagttcgaaaattcgtgagttgacgggttggaaggatactatgatgggcttcacgcaaaatttacatgcgtatagactcgcgtacgaagtggcagaggcaactggtgatcatggagttgctaaggtgaagaacttggttaacagctttttgagtgctggggttaactttaagcgggatcaaaagtga

SEQ ID NO: 24229 - protein, 618 aa, Muscodor strobelii
  misc_feature: SGI Peptide ID NO. 568258
  misc_feature (263)..(503): Pfam Id: PF01370 Pfam Desc: NAD dependent epimerase/dehydratase family
  misc_feature (261)..(303): Pfam Id: PF00106 Pfam Desc: short chain dehydrogenase
  misc_feature (263)..(334): Pfam Id: PF01370 Pfam Desc: NAD dependent epimerase/dehydratase family
  misc_feature (263)..(300): Pfam Id: PF05368 Pfam Desc: NmrA-like family
  misc_feature (261)..(603): NCBI GI: 256721917 Blast Desc: NECHADRAFT_36933 [Nectria haematococca mpVI 77-13-4]
  misc_feature (262)..(606): NCBI GI: 238487904 Blast Desc: NAD dependent epimerase/dehydratase, [Aspergillus flavus NRRL3357] gi|220700069|gb|EED56408.1| NAD dependent epimerase/dehydratase, [Aspergillus flavus NRRL3357]
  misc_feature (260)..(599): NCBI GI: 67538478 Blast Desc: AN5409.2 [Aspergillus nidulans FGSC A4] gi|40743379|gb|EAA62569.1| AN5409.2 [Aspergillus nidulans FGSC A4] gi|259485146|tpe|CBF81958.1| TPA: conserved [Aspergillus FGSC
  misc_feature (262)..(606): NCBI GI: 169769769 Blast Desc: [Aspergillus oryzae RIB40] gi|83767213|dbj|BAE57352.1| protein product [Aspergillus oryzae]
  misc_feature (258)..(599): NCBI GI: 242796636 Blast Desc: TSTA_125620 [Talaromyces stipitatus ATCC 10500] gi|218719428|gb|EED18848.1| TSTA_125620 [Talaromyces stipitatus ATCC 10500]
  misc_feature (261)..(608): NCBI GI: 256722376 Blast Desc: NECHADRAFT_62328 [Nectria haematococca mpVI 77-13-4]
  misc_feature (260)..(602): NCBI GI: 242794128 Blast Desc: NAD dependent epimerase/dehydratase, [Talaromyces stipitatus ATCC 10500] gi|218718897|gb|EED18317.1| NAD dependent epimerase/dehydratase, [Talaromyces stipitatus ATCC 10500]
  misc_feature (262)..(600): NCBI GI: 171678323 Blast Desc: protein product [Podospora anserina] gi|170937231|emb|CAP61888.1| protein product [Podospora anserina]
  misc_feature (262)..(577): NCBI GI: 284091613 Blast Desc: [Naegleria gruberi]
  misc_feature (263)..(589): NCBI GI: 116204497 Blast Desc: CHGG_10132 [Chaetomium globosum CBS 148.51] gi|88176260|gb|EAQ83728.1| CHGG_10132 [Chaetomium globosum CBS 148.51]
  misc_feature: Useful for introducing or modulating the production of volatile compounds
MGQETVGVLIAALIATFAAGEAHYTAWLQRQWKRNHYQKRVPSEPTKSGKGFYAASITLRLSAERVKDAYDCGVDMLGESFAVGDAVTCHIVREGLESLKACIDAFERATSMNDVPLDLTGVLRVSTAVQQSVIAALHKQYKRVAISRLVPRGSKKKQDLVHPEHVEITVQEIGDSKKEEDDAEQMANTLLPCITPLPALNFDYSSPDGVPPSYPTTAGSRGVEDPPLNPETDQFHTDYGRVTNGLSVTMPYPPVPTSPPKTVLVTGAGGYIGLNVSRAFVRAGWQVYGLVRRPEAATKLLSEEIIPVLGSISSDSDFVDSLLANVSAPFDVVVSCTESFPFNEHWEHLLSIFTKVAKHAQQHNVKTLVLMSSGCKDYGQTLTHGDPNLAPHTEISPLEPQSFIKERSESTMKIFTHSSLFDAAVIRPTPLYGYGSSFYGILFDSFSRFHTSPDATTETEVVIPGNPNNIIHGCHIADCAAAYLSLAAHPNRSEIAGQCFNISAARYETVGEVVEALAAEYGIKGKLVFSSERGDGVPVDKELQPIASMSDISQWVGSSKIRELTGWKDTMMGFTQNLHAYRLAYEVAEATGDHGVAKVKNLVNSFLSAGVNFKRDQK

SEQ ID NO: 24230 - DNA, 3378 bp, Muscodor strobelii
  misc_feature: SGI EST ID NO. CUFF.57268.0
  misc_feature: Variant of the nucleotide sequence at SEQ ID NO 24228
gtggtctaaatgaagcggtaggagccattgattgtgtcaaagagtaaacccagaggaataagtcttcaagatatgcaatgccacaagccacttcaaggccggagcaattacacgccgacttccaggtacgatggggtcgataagagcctgttagccttacaaaaggttgatataaaaggagagaggaccccttcaagtcaacacatctgaacgatgggacaatatcgatggaccaacctggaatgagtaaccatgccatatccacccgtcccaacatctccaccgaagaccgtccttgtcacgggggctggtggctatatcggcctcaacgtcagtagggcctttgtgcgcgcaggatggcaagtatacggtcttgttcgacgtcctgaagctgctacgaagctactgtctgaggagatcatccccgtactaggttctatctcttcggactcggatttcgtagacagtctcttagcaaatgtttcggcgcccttcgacgtcgtagtctcgtgtacagagtcatttccgttcaacgagcattgggagcacctcctgagcatcttcacgaaagtcgcaaagcacgctcagcaacacaatgtcaagaccctggtattaatgagttcggggtgtaaagactacggacaaacactcacacacggcgacccaaatctagccccccacaccgaaatctcacccctagaaccccaatccttcatcaaagaacgcagcgaaagcaccatgaagatattcacccactcctctctcttcgacgctgccgtaatccgtccaacacccttatacggatacggaagctcattctacggcatactcttcgactccttttcgcgtttccacacaagccccgacgccacaacagaaaccgaagtcgttatcccgggaaaccccaataacatcatccacgggtgtcacatcgcagattgtgctgcagcctatctctcgctcgccgcacaccccaatcgctcagagattgccggacaatgtttcaacatctctgccgcccgatacgagaccgtgggcgaagtcgttgaggcgttggccgcggaatatggaattaagggtaaactcgtctttagctctgaaagaggagatggtgtgccggtagataaggagcttcagcccattgcctcgatgtccgacatctcacaatgggtcggcagttcgaaaattcgtgagttgacgggttggaaggatactatgatgggcttcacgcaaaatttacatgcgtatagactcgcgtacgaagtggcagaggcaactggtgatcatggagttgctaaggtgaagaacttggttaacagctttttgagtgctggggttaactttaagcgggatcaaaagtgaggtttgttacaagacaaggacgatcacgttggtaaattaagcgtcttaaacaaatagttgtgtttgtgtcgttttcgagggaatgatgagtattgatactatgacagactatggcagactatggatatataaaagcattacacattacgcaatgacgggaatgagaaatcatgaaattcgtccgaaaattgtttgccgaatacaatgcgcctcgcaactcaagacccaagggtatagctaatggcgtgacgggggtgaagggtaactgtcatcagtgaagatcgatcaccgtgcgagaacattgacatggtgcattagacattggttgtgggaccagtagcagtagggtttccagcaccagatacattggtattgccgacatttccgccaacgttcgagccaggcccttctggttgaacgccgttactttcgccggcgtgaggatacttctcacgggtgtggtggggctgacgcacatggagaccaagagtcgtcggatcggtcctgcggtggccccatagaagaagcgcaccgaagaccggcttggcgcagatatcgagaatgccgtaaaagatagactcagcatcggggtgaatcacattaccaccctcgctcaaaccccacgcaatggggtagagaaaccaaaggaagataagccagacgccgcacatcatgtatgtcttctttgggtcgccgccaagagcattggcatgtcgtcgaccatcgacaagaagttcgtaagcaatgaagaagagagccgccatgccgaaggtgtagaaaccccatttatatagagtccgggtgagggcgccgatgagaccacaggcgatcatgatctcgtctgccacaagggttgcggcgatagtgggccatgggacaccggcagtgagaagaaggtcgaggagcagcaatggcgtggtgaggacccagtcgatatatctagcatagaagatctctcgagttccagcacccctgacttgagagctatatttccgaacgaactccacctgaatgggaacttggccaagatttgaacccatggcgaagtatgcaatagttgcgatagctgtaaggcccgccgtgatatagtgaaaaattcggtgagactgtggtttgcgcatggcaagccccatgacgagaatggtcgaaacgcccatgatggatgcgacagtatagtaccaatcggaaccacggttattaatctgtagatcggcctgtggaccgactacagaattgatattgagggcctggtttccaggagacgaacgagccacgtgagacattatgacgggtgaacaatacgttcaacattaacaagttacaatgaaaattgctatcagagtcaagctacacggagtagtctaagtgagcgcaggaggagaagttaacgttcaacgagggagggggaggtcagtatttgaagaggcatgttgccagtctgggaaattaagccatttctcaccttggagcaagagatgacttcatcgtctagaaatgcaaccgtcaaaggtgctaaaccataatcatgactcaatgagcttccggtgtctatagctcacgtgaacgattatatctgctgcatcgatatcggtactggagctctcgcgctggtagtccgagatcgcgatcttacgcggaggtcacagatgtttcgcgattccggagctgcgggcgaacgtcaacacgcagaccaaactcgatggtcagcgaagcacaacccagatcgtggtttgaaatgcgatatgctatttgcacgatttcaccagggcaaagtgggcagacgcaactggtccgcggcgcagggatcatgcttgataaatttctcattgccgtaaccaagaaacggcaatttcggaatgcaacgctgacccagagataattagctattcgactggagcacttttgcgctatggtgttttgatggtgtggtgattcattgttgccaagtaaagcttaataagctagtgagaggttgtcagtatgtccctgatatagtcatgatatcatgcattggag

SEQ ID NO: 24231 - DNA, 969 bp, Muscodor strobelii
  misc_feature: SGI cDNA ID NO. 568259
  misc_feature: Encodes the peptide sequence at SEQ ID NO 24232
atgtctcacgtggctcgttcgtctcctggaaaccaggccctcaatatcaattctgtagtcggtccacaggccgatctacagattaataaccgtggttccgattggtactatactgtcgcatccatcatgggcgtttcgaccattctcgtcatggggcttgccatgcgcaaaccacagtctcaccgaatttttcactatatcacggcgggccttacagctatcgcaactattgcatacttcgccatgggttcaaatcttggccaagttcccattcaggtggagttcgttcggaaatatagctctcaagtcaggggtgctggaactcgagagatcttctatgctagatatatcgactgggtcctcaccacgccattgctgctcctcgaccttcttctcactgccggtgtcccatggcccactatcgccgcaacccttgtggcagacgagatcatgatcgcctgtggtctcatcggcgccctcacccggactctatataaatggggtttctacaccttcggcatggcggctctcttcttcattgcttacgaacttcttgtcgatggtcgacgacatgccaatgctcttggcggcgacccaaagaagacatacatgatgtgcggcgtctggcttatcttcctttggtttctctaccccattgcgtggggtttgagcgagggtggtaatgtgattcaccccgatgctgagtctatcttttacggcattctcgatatctgcgccaagccggtcttcggtgcgcttcttctatggggccaccgcaggaccgatccgacgactcttggtctccatgtgcgtcagccccaccacacccgtgagaagtatcctcacgccggcgaaagtaacggcgttcaaccagaagggcctggctcgaacgttggcggaaatgtcggcaataccaatgtatctggtgctggaaaccctactgctactggtcccacaaccaatgtctaa

SEQ ID NO: 24232 - protein, 322 aa, Muscodor strobelii
  misc_feature: SGI Peptide ID NO. 568259
  misc_feature (33)..(272): Pfam Id: PF01036 Pfam Desc: Bacteriorhodopsin
  misc_feature (33)..(255): Pfam Id: PF01036 Pfam Desc: Bacteriorhodopsin
  misc_feature (10)..(287): NCBI GI: 39955533 Blast Desc: MGG_09015 [Magnaporthe grisea 70-15] gi|149209375|ref|XP_001522062.1| MGCH7_ch7g179 [Magnaporthe grisea 70-15] gi|86196134|gb|EAQ70772.1| MGCH7_ch7g179 grisea
  misc_feature (11)..(322): NCBI GI: 39725407 Blast Desc: opsin-like protein [Gibberella fujikuroi]
  misc_feature (10)..(275): NCBI GI: 169595214 Blast Desc: SNOG_00341 [Phaeosphaeria nodorum SN15] gi|111070716|gb|EAT91836.1| SNOG_00341 [Phaeosphaeria nodorum SN15]
  misc_feature (11)..(297): NCBI GI: 256723692 Blast Desc: [Nectria haematococca mpVI 77-13-4]
  misc_feature (11)..(306): NCBI GI: 46114444 Blast Desc: FG03064.1 [Gibberella zeae PH-1]
  misc_feature (15)..(295): NCBI GI: 224809196 Blast Desc: opsin-like protein [Bipolaris oryzae]
  misc_feature (10)..(228): NCBI GI: 261353921 Blast Desc: FDD123 [Verticillium albo-atrum VaMs.102]
  misc_feature (10)..(321): NCBI GI: 154293534 Blast Desc: BC1G_13906 [Botryotinia fuckeliana B05.10] gi|150845287|gb|EDN20480.1| BC1G_13906 [Botryotinia fuckeliana B05.10]
  misc_feature (11)..(317): NCBI GI: 156057217 Blast Desc: SS1G_04339 [Sclerotinia sclerotiorum 1980] gi|154702125|gb|EDO01864.1| SS1G_04339 [Sclerotinia sclerotiorum 1980]
  misc_feature (1)..(272): NCBI GI: 189202720 Blast Desc: archaerhodopsin-2 precursor [Pyrenophora tritici-repentis Pt-1C-BFP] gi|187984795|gb|EDU50283.1| archaerhodopsin-2 precursor [Pyrenophora tritici-repentis
MSHVARSSPGNQALNINSVVGPQADLQINNRGSDWYYTVASIMGVSTILVMGLAMRKPQSHRIFHYITAGLTAIATIAYFAMGSNLGQVPIQVEFVRKYSSQVRGAGTREIFYARYIDWVLTTPLLLLDLLLTAGVPWPTIAATLVADEIMIACGLIGALTRTLYKWGFYTFGMAALFFIAYELLVDGRRHANALGGDPKKTYMMCGVWLIFLWFLYPIAWGLSEGGNVIHPDAESIFYGILDICAKPVFGALLLWGHRRTDPTTLGLHVRQPHHTREKYPHAGESNGVQPEGPGSNVGGNVGNTNVSGAGNPTATGPTTNV

SEQ ID NO: 24233 - DNA, 5393 bp, Muscodor strobelii
  misc_feature: SGI EST ID NO. CUFF.57269.1
  misc_feature: Variant of the nucleotide sequence at SEQ ID NO 24231
gagaaacatcgtcaacggccaatcgtcacgcccaagctgaatttcttcagcttcactcatcactctgcctcctgctttgctctcgtcgctgggaacatccttgctccatacataagattaaccattacttagatattaatgctccaatactaccgctgtcctaacatcacattacctatcttccctcgtccacagctctcccattggcataaaaaacagccacgtattgctgcgatccagaataatacgggcgggtataatctcaacatcaactgcataaacaaatctgcatcatcctactttgcacatgtacccatgtcatccactagcatcgtcatgaagcttgtcgttatctccgcatacgaatgtatccctagccgacaatcttctcaattgaatctcgaatccgcgacaatggactcgacttgtccagctcacaaatcttggtctccgcacggatagcactgaaagctctctgtccacggatgtcgtcttcggagaaccacgcaccatgtagtccataggggacgcgctgtggcagccgcaccttggccacaacttccttcatattcttggcattgatcacccagagctcactgactgcatcttcgtcgcactcgccagtttcattcagctgtgactcgtcaaagacgtacgtgagcagccacccgtcatcttcagactcgccattatctcgtggcacgaaccgcggctcttgcgcataccacccctcgggcatctggaacagcttgattgggtcgtccacatcatcactagccatcacctgtggtatggttcgcgtgtctacgcagcctttgatttgctgcggcggatgagaagttccgcgcgaaatcaactctgtaacatccattttcacgatgtaatcaatcttggctgcttttccaagcgctgctgaatagtaggatgaggatccagtgctgcaaccgtatataaagcgtgccgctgtcatggcgtgctgagacgacatcgtcggaaactcaaacggtatcgccgataacgcccactggtggcgaatggccggcttctcattcaagccttcggctaccaatgggaaattgtagtagtacagacgacattgctcttcttcggcatattcgggtggtactggcttccgaatcggtggcgacagtgctccggcactgtacaccaccgacgccgatgtgagacgacaagccagcaggtggactgacgtctctgttgtcggcgatgcagcagttttggtctcccagcaatttgcagtgtgaaatatcacacacggattcgtctcaaaccattgtactttgtcgggctcgtagcgcgggaatacgccatatcgcgatcttcctgccgaatcgaatgacaccactggcttgccagttatactatgcatgggattgagcgatagtggtagatcgagaattaccgtgtgatgcgccgcaactccgaaatcatgcatcatcttcggtgaactcaccccgggaattgggacgttgaactgcggtttgggtttggcaccccctaagctatctttctgtcctggcggcacgatggagtaaaacacatatggcttgataaacacgccatgaaatgcaataagctctttagtgactggatcgactcgcgggtggcctgtcgtccactccttcataaaactcatcaaaccctcaccaccaaaccccgacccttcgcccacgctaggctcattttctgccttgctcccattgtaccacccgatagtctctaaactaggaagcaggaacctcatgggaggaccgctttcgcatgtggctagagctctgccgtcatggtaaactagcccggtattggcgacgctgatcttcttcactgcccgtcgagaaccaggaaagttagataaaatgaccaggaatattgtgcggaaaaccactaccatgatcaccaggaaggatccgcgaaccaacgacgcaatactcgggagcaaaggccttcgaagattttgattatctttcgcgtttaggaagacatccgttaggatatactggttcacaaagtgtggttcgaccgccaaccccttttcgccaactcgcttgaaaagcacaccgctgagcatcccgtcgccatcaaaccaatgcgcgtcccgtcccaggtcttcgtttgtgagcggattacctccgttgcggacatactggccgccagccaattctcgcggtataacttcgtcgcatgcacatcgagtgagtgctcttgtacgcttgataggagcgaaattccccgccaaatatcttcgtgattctcttagtaaattgtccaagtgtcacgcgaagggatgaaactcacggatgaggtagtcgaagctggtcttccattttattgctattgtcaagcgcagcttcaacgatatgctacactcgcgaatgagcagcaaagagctgttgagacctatgagttaagcgacacagggcgcttttgccattcatcaaggccgttcaaggctgaaagccagattctggaaacgccaacaacttctcgcttgtcataaaccttgggcccctctccaaccaaattgatcccgtagctcgaaaacaactgagtcccgcaggtttagtagatccgagaaagcgagcaggcgaaaagtaaacccgacaacgctgatggtgagcatgctcccaaggcatcagaaacggagactgggaaaacgctggtcagacatcactattggatcgccatgaacttaaattgaatacctccgcttattaagctttacttggcaacaatgaatcaccacaccatcaaaacaccatagcgcaaaagtgctccagtcgaatagctaattatctctgggtcagcgttgcattccgaaattgccgtttcttggttacggcaatgagaaatttatcaagcatgatccctgcgccgcggaccagttgcgtctgcccactttgccctggtgaaatcgtgcaaatagcatatcgcatttcaaaccacgatctgggttgtgcttcgctgaccatcgagtttggtctgcgtgttgacgttcgcccgcagctccggaatcgcgaaacatctgtgacctccgcgtaagatcgcgatctcggactaccagcgcgagagctccagtaccgatatcgatgcagcagatataatcgttcacgtgagctatagacaccggaagctcattgagtcatgattatggtttagcacctttgacggttgcatttctagacgatgaagtcatctcttgctccaaggtgagaaatggcttaatttcccagactggcaacatgcctcttcaaatactgacctccccctccctcgttgaacgttaacttctcctcctgcgctcacttagactactccgtgtagcttgactctgatagcaattttcattgtaacttgttaatgttgaacgtattgttcacccgtcataatgtctcacgtggctcgttcgtctcctggaaaccaggccctcaatatcaattctgtagtcggtccacaggccgatctacagattaataaccgtggttccgattggtactatactgtcgcatccatcatgggcgtttcgaccattctcgtcatggggcttgccatgcgcaaaccacagtctcaccgaatttttcactatatcacggcgggccttacagctatcgcaactattgcatacttcgccatgggttcaaatcttggccaagttcccattcaggtggagttcgttcggaaatatagctctcaagtcaggggtgctggaactcgagagatcttctatgctagatatatcgactgggtcctcaccacgccattgctgctcctcgaccttcttctcactgccggtgtcccatggcccactatcgccgcaacccttgtggcagacgagatcatgatcgcctgtggtctcatcggcgccctcacccggactctatataaatggggtttctacaccttcggcatggcggctctcttcttcattgcttacgaacttcttgtcgatggtcgacgacatgccaatgctcttggcggcgacccaaagaagacatacatgatgtgcggcgtctggcttatcttcctttggtttctctaccccattgcgtggggtttgagcgagggtggtaatgtgattcaccccgatgctgagtctatcttttacggcattctcgatatctgcgccaagccggtcttcggtgcgcttcttctatggggccaccgcaggaccgatccgacgactcttggtctccatgtgcgtcagccccaccacacccgtgagaagtatcctcacgccggcgaaagtaacggcgttcaaccagaagggcctggctcgaacgttggcggaaatgtcggcaataccaatgtatctggtgctggaaaccctactgctactggtcccacaaccaatgtctaatgcaccatgtcaatgttctcgcacggtgatcgatcttcactgatgacagttacccttcacccccgtcacgccattagctatacccttgggtcttgagttgcgaggcgcattgtattcggcaaacaattttcggacgaatttcatgatttctcattcccgtcattgcgtaatgtgtaatgcttttatatatccatagtctgccatagtctgtcatagtatcaatactcatcattccctcgaaaacgacacaaacacaactatttgtttaagacgcttaatttaccaacgtgatcgtccttgtcttgtaacaaacctcacttttgatcccgcttaaagttaaccccagcactcaaaaagctgttaaccaagttcttcaccttagcaactccatgatcaccagttgcctctgccacttcgtacgcgagtctatacgcatgtaaattttgcgtgaagcccatcatagtatccttccaacccgtcaactcacgaattttcgaactgccgacccattgtgagatgtcggacatcgaggcaatgggctgaagctccttatctaccggcacaccatctcctctttcagagctaaagacgagtttacccttaattccatattccgcggccaacgcctcaacgacttcgcccacggtctcgtatcgggcggcagagatgttgaaacattgtccggcaatctctgagcgattggggtgtgcggcgagcgagagataggctgcagcacaatctgcgatgtgacacccgtggatgatgttattggggtttcccgggataacgacttcggtttctgttgtggcgtcggggcttgtgtggaaacgcgaaaaggagtcgaagagtatgccgtagaatgagcttccgtatccgtataagggtgttggacggattacggcagcgtcgaagagagaggagtgggtgaatatcttcatggtgctttcgctgcgttctttgatgaaggattggggttctaggggtgagatttcggtgtggggggctagatttgggtcgc

SEQ ID NO: 24234 - DNA, 1917 bp, Muscodor strobelii
  misc_feature: SGI cDNA ID NO. 568260
  misc_feature: Encodes the peptide sequence at SEQ ID NO 24235
atggaagaccagcttcgactacctcatccatatttggcggggaatttcgctcctatcaagcgtacaagagcactcactcgatgtgcatgcgacgaagttataccgcgagaattggctggcggccagtatgtccgcaacggaggtaatccgctcacaaacgaagacctgggacgggacgcgcattggtttgatggcgacgggatgctcagcggtgtgcttttcaagcgagttggcgaaaaggggttggcggtcgaaccacactttgtgaaccagtatatcctaacggatgtcttcctaaacgcgaaagataatcaaaatcttcgaaggcctttgctcccgagtattgcgtcgttggttcgcggatccttcctggtgatcatggtagtggttttccgcacaatattcctggtcattttatctaactttcctggttctcgacgggcagtgaagaagatcagcgtcgccaataccgggctagtttaccatgacggcagagctctagccacatgcgaaagcggtcctcccatgaggttcctgcttcctagtttagagactatcgggtggtacaatgggagcaaggcagaaaatgagcctagcgtgggcgaagggtcggggtttggtggtgagggtttgatgagttttatgaaggagtggacgacaggccacccgcgagtcgatccagtcactaaagagcttattgcatttcatggcgtgtttatcaagccatatgtgttttactccatcgtgccgccaggacagaaagatagcttagggggtgccaaacccaaaccgcagttcaacgtcccaattcccggggtgagttcaccgaagatgatgcatgatttcggagttgcggcgcatcacacggtaattctcgatctaccactatcgctcaatcccatgcatagtataactggcaagccagtggtgtcattcgattcggcaggaagatcgcgatatggcgtattcccgcgctacgagcccgacaaagtacaatggtttgagacgaatccgtgtgtgatatttcacactgcaaattgctgggagaccaaaactgctgcatcgccgacaacagagacgtcagtccacctgctggcttgtcgtctcacatcggcgtcggtggtgtacagtgccggagcactgtcgccaccgattcggaagccagtaccacccgaatatgccgaagaagagcaatgtcgtctgtactactacaatttcccattggtagccgaaggcttgaatgagaagccggccattcgccaccagtgggcgttatcggcgataccgtttgagtttccgacgatgtcgtctcagcacgccatgacagcggcacgctttatatacggttgcagcactggatcctcatcctactattcagcagcgcttggaaaagcagccaagattgattacatcgtgaaaatggatgttacagagttgatttcgcgcggaacttctcatccgccgcagcaaatcaaaggctgcgtagacacgcgaaccataccacaggtgatggctagtgatgatgtggacgacccaatcaagctgttccagatgcccgaggggtggtatgcgcaagagccgcggttcgtgccacgagataatggcgagtctgaagatgacgggtggctgctcacgtacgtctttgacgagtcacagctgaatgaaactggcgagtgcgacgaagatgcagtcagtgagctctgggtgatcaatgccaagaatatgaaggaagttgtggccaaggtgcggctgccacagcgcgtcccctatggactacatggtgcgtggttctccgaagacgacatccgtggacagagagctttcagtgctatccgtgcggagaccaagatttgtgagctggacaagtcgagtccattgtcgcggattcgagattcaattgagaagattgtcggctag

SEQ ID NO: 24235 - protein, 638 aa, Muscodor strobelii
  misc_feature: SGI Peptide ID NO. 568260
  misc_feature (1)..(599): Pfam Id: PF03055 Pfam Desc: Retinal pigment epithelial membrane protein
  misc_feature (515)..(599): Pfam Id: PF03055 Pfam Desc: Retinal pigment epithelial membrane protein
  misc_feature (154)..(349): Pfam Id: PF03055 Pfam Desc: Retinal pigment epithelial membrane protein
  misc_feature (1)..(75): Pfam Id: PF03055 Pfam Desc: Retinal pigment epithelial membrane protein
  misc_feature (5)..(612): NCBI GI: 156057223 Blast Desc: SS1G_04342 [Sclerotinia sclerotiorum 1980] gi|154702128|gb|EDO01867.1| SS1G_04342 [Sclerotinia sclerotiorum 1980]
  misc_feature (9)..(638): NCBI GI: 58696313 Blast Desc: carotenoid oxygenase [Gibberella fujikuroi]
  misc_feature (9)..(613): NCBI GI: 46114450 Blast Desc: FG03067.1 [Gibberella zeae PH-1]
  misc_feature (9)..(613): NCBI GI: 169595212 Blast Desc: SNOG_00340 [Phaeosphaeria nodorum SN15] gi|160701041|gb|EAT91835.2| SNOG_00340 [Phaeosphaeria nodorum SN15]
  misc_feature (26)..(613): NCBI GI: 256723767 Blast Desc: NECHADRAFT_52046 [Nectria haematococca mpVI 77-13-4]
  misc_feature (2)..(631): NCBI GI: 171684269 Blast Desc: protein product [Podospora anserina] gi|170942095|emb|CAP67747.1| protein product [Podospora anserina]
  misc_feature (5)..(448): NCBI GI: 154293540 Blast Desc: BC1G_13909 [Botryotinia fuckeliana B05.10] gi|150845290|gb|EDN20483.1| BC1G_13909 [Botryotinia fuckeliana B05.10]
  misc_feature (9)..(627): NCBI GI: 71004892 Blast Desc: UM00965.1 [Ustilago maydis 521] gi|46096493|gb|EAK81726.1| UM00965.1 [Ustilago maydis 521]
  misc_feature (9)..(624): NCBI GI: 145245841 Blast Desc: An12g00880 [Aspergillus niger] gi|134079886|emb|CAK41018.1| protein product [Aspergillus niger]
  misc_feature (9)..(613): NCBI GI: 169780112 Blast Desc: [Aspergillus oryzae RIB40] gi|83773260|dbj|BAE63387.1| protein product [Aspergillus oryzae]
  misc_feature (8)..(377): SWISSPROT Homolog: EC 1.13.11.51 9-cis-epoxycarotenoid dioxygenase
MEDQLRLPHPYLAGNFAPIKRTRALTRCACDEVIPRELAGGQYVRNGGNPLTNEDLGRDAHWFDGDGMLSGVLFKRVGEKGLAVEPHFVNQYILTDVFLNAKDNQNLRRPLLPSIASLVRGSFLVIMVVVFRTIFLVILSNFPGSRRAVKKISVANTGLVYHDGRALATCESGPPMRFLLPSLETIGWYNGSKAENEPSVGEGSGFGGEGLMSFMKEWTTGHPRVDPVTKELIAFHGVFIKPYVFYSIVPPGQKDSLGGAKPKPQFNVPIPGVSSPKMMHDFGVAAHHTVILDLPLSLNPMHSITGKPVVSFDSAGRSRYGVFPRYEPDKVQWFETNPCVIFHTANCWETKTAASPTTETSVHLLACRLTSASVVYSAGALSPPIRKPVPPEYAEEEQCRLYYYNFPLVAEGLNEKPAIRHQWALSAIPFEFPTMSSQHAMTAARFIYGCSTGSSSYYSAALGKAAKIDYIVKMDVTELISRGTSHPPQQIKGCVDTRTIPQVMASDDVDDPIKLFQMPEGWYAQEPRFVPRDNGESEDDGWLLTYVFDESQLNETGECDEDAVSELWVINAKNMKEVVAKVRLPQRVPYGLHGAWFSEDDIRGQRAFSAIRAETKICELDKSSPLSRIRDSIEKIVG

SEQ ID NO: 24236 - DNA, 2160 bp, Muscodor strobelii
  misc_feature: SGI cDNA ID NO. 568261
  misc_feature: Encodes the peptide sequence at SEQ ID NO 24237
atggagttgattccgtattcctcgagggaggagggccaaatcgtgctgcggcatcgcgatgccctcgtcgtccgtgacccgtcctcccagcgcctgcaggtccgcggcgccacgcccaccgaatgtccgacctgccaccgcccgctgcgctcctcgtcccccgagcgccattacgacatccccgcccgccgcgactcctgggtcgatccccagtacttccgcatgctccaggatggccaccacgacccagacgaccacggccatcgcagcccgcccgcctctcccgtccgtcgcctgacccagcctaccctcccgagcgtggccatcgaggccgtggacgacgccgagttcgtcacgagtgctcctgcaccccaggaaggcgcccggattagacgggatgcttttagtcccaactacttcgatactttctttgtcgaggagagggagcttggccgtggcggcaagggtgtcgtgctgctagtccgtcacgagatagacggctgtgctctcggccactttgcttgcaagagagtcccggtcggcgacgatcatgcttggctcgagaaggttcttgtagaagtcaagattcttgccaatctgtcgcacccgaatctggtgtcataccgccacgtctggctcgaggatgtccagattcaccgcttcgggcccagcgtcgcatgcgccttcatcctacaacaatactgcaacggtggcgacctactgcgctatatcgtaggcgaccagccacagcagacgaccaaagagcagttgaaagctcagctgcgtcgccggtccaagggacaaggagaacgtccgtctagcttagcgtccacccagcgactcttgacgctcgaggagatatattcactatttaaagacgtcacctcgggacttgtctctcttcatggctctagttacatacatcgagatctaaaacccagcaactgcctactgcatcatgagaatggcaaagtcacgtgcctgattagtgattttggtgaggtccagcccagtaattctgttcggaagtcctcgggtacgaccggaaccatatcttattgtgctcccgaagtgttgaagctggattctcgtggccagttcggcaacttcacggtcaaatcagacgtcttctctctgggcatgatcctctacttcctttgcttcgggcgccttccatatagcaacgcgaatgtggtccaagaagaattggaggatatcgaccagctccgcgctgaaatcgctggctggaagggcttccaagatgaaagacggctgagaccagatctgccacccaggctttaccagttgcttaagaagatgctagctctggatccagctgagcgcccaaacgcgtccgaggtcttgggcatactgaatcatgaatctgcacatggcggcttgcgctccgcatccagaaccacgagcccttcgatgaatatccccaatcgaagaatacagaatctcgactcccctatgccgccaagcacaccccagtccgagtctgctgttcctccagacgaatacacgacacaccgggctgtcccggcgcctttcttagccggttctcctcaacctacaccgtccaacagtctccagaagtatcaatcgcctagcagccctcgacatcgatcccaagccatggttttgtcgcgaagtcaagatcgactcccctctccgactcggaaccacttatcgaggtcaccgaatcgaaacccctccccgacagcgcagactccgttgttgatgccaccgcctaccacccccttaggtgttgtcagacatcaagcttttcttttccagcatcgcgttactcatttctaccttacttatggtgcttcaattgcatttttgctgagatttggcttgttttccgtgaaagctgcatcactagctcgagtctgctggccatacatggttagtcttggcattagcatacccctattggcggctgcgggcctggatctcgctctctcgtccggagagactcgtacctctgatgacagagatcgtcgcaggcatgttccccaggggcctaccggatggcgctgggattggaaagcaagcctcgctctgctcgtattacattttgcggccctttggacggtatcgatatggggccatctatgtgcagacaggcgggacggttgggttgacctctga

SEQ ID NO: 24237 - protein, 719 aa, Muscodor strobelii
  misc_feature: SGI Peptide ID NO. 568261
  misc_feature (144)..(458): Pfam Id: PF00069 Pfam Desc: Protein kinase domain
  misc_feature (193)..(458): Pfam Id: PF07714 Pfam Desc: Protein tyrosine kinase
  misc_feature (1)..(686): NCBI GI: 39974307 Blast Desc: MGG_00700 [Magnaporthe grisea 70-15] gi|145018366|gb|EDK02645.1| MGG_00700 [Magnaporthe grisea 70-15]
  misc_feature (1)..(497): NCBI GI: 261355427 Blast Desc: calcium-dependent protein kinase [Verticillium albo-atrum VaMs.102]
  misc_feature (17)..(590): NCBI GI: 116203845 Blast Desc: CHGG_09806 [Chaetomium globosum CBS 148.51] gi|88175934|gb|EAQ83402.1| CHGG_09806 [Chaetomium globosum CBS 148.51]
  misc_feature (17)..(713): NCBI GI: 85092839 Blast Desc: NCU08177 [Neurospora crassa OR74A] gi|28921012|gb|EAA30334.1| conserved [Neurospora crassa OR74A]
  misc_feature (66)..(710): NCBI GI: 256724690 Blast Desc: NECHADRAFT_96018 [Nectria haematococca mpVI 77-13-4]
  misc_feature (1)..(600): NCBI GI: 171680008 Blast Desc: protein product [Podospora anserina] gi|170939630|emb|CAP64857.1| protein product [Podospora anserina]
  misc_feature (17)..(712): NCBI GI: 154321936 Blast Desc: BC1G_01115 [Botryotinia fuckeliana B05.10] gi|150850362|gb|EDN25555.1| BC1G_01115 [Botryotinia fuckeliana B05.10]
  misc_feature (1)..(716): NCBI GI: 46126285 Blast Desc: FG07520.1 [Gibberella zeae PH-1]
  misc_feature (1)..(601): NCBI GI: 156061003 Blast Desc: SS1G_02644 [Sclerotinia sclerotiorum 1980] gi|154700048|gb|EDN99786.1| SS1G_02644 [Sclerotinia sclerotiorum 1980]
  misc_feature (1)..(659): NCBI GI: 261204181 Blast Desc: protein kinase [Ajellomyces dermatitidis SLH14081] gi|239587089|gb|EEQ69732.1| protein kinase [Ajellomyces dermatitidis SLH14081]
MELIPYSSREEGQIVLRHRDALVVRDPSSQRLQVRGATPTECPTCHRPLRSSSPERHYDIPARRDSWVDPQYFRMLQDGHHDPDDHGHRSPPASPVRRLTQPTLPSVAIEAVDDAEFVTSAPAPQEGARIRRDAFSPNYFDTFFVEERELGRGGKGVVLLVRHEIDGCALGHFACKRVPVGDDHAWLEKVLVEVKILANLSHPNLVSYRHVWLEDVQIHRFGPSVACAFILQQYCNGGDLLRYIVGDQPQQTTKEQLKAQLRRRSKGQGERPSSLASTQRLLTLEEIYSLFKDVTSGLVSLHGSSYIHRDLKPSNCLLHHENGKVTCLISDFGEVQPSNSVRKSSGTTGTISYCAPEVLKLDSRGQFGNFTVKSDVFSLGMILYFLCFGRLPYSNANVVQEELEDIDQLRAEIAGWKGFQDERRLRPDLPPRLYQLLKKMLALDPAERPNASEVLGILNHESAHGGLRSASRTTSPSMNIPNRRIQNLDSPMPPSTPQSESAVPPDEYTTHRAVPAPFLAGSPQPTPSNSLQKYQSPSSPRHRSQAMVLSRSQDRLPSPTRNHLSRSPNRNPSPTAQTPLLMPPPTTPLGVVRHQAFLFQHRVTHFYLTYGASIAFLLRFGLFSVKAASLARVCWPYMVSLGISIPLLAAAGLDLALSSGETRTSDDRDRRRHVPQGPTGWRWDWKASLALLVLHFAALWTVSIWGHLCADRRDGWVDL

SEQ ID NO: 24238 - DNA, 2957 bp, Muscodor strobelii
  misc_feature: SGI EST ID NO. CUFF.57127.0
  misc_feature: Variant of the nucleotide sequence at SEQ ID NO 24236
cgacattccaccgcctgacagcggcgttcctctgtctctttgtctgcgtcaacgatactaattcacacgcatcagtctcacaaccaatgctctatatataacggggccgacatgaacgggtttcctctgcggcctctctcacggcatcgcgcgaaacagagctgatctagcgctgcctgtgcgatggagttgattccgtattcctcgagggaggagggccaaatcgtgctgcggcatcgcgatgccctcgtcgtccgtgacccgtcctcccagcgcctgcaggtccgcggcgccacgcccaccgaatgtccgacctgccaccgcccgctgcgctcctcgtcccccgagcgccattacgacatccccgcccgccgcgactcctgggtcgatccccagtacttccgcatgctccaggatggccaccacgacccagacgaccacggccatcgcagcccgcccgcctctcccgtccgtcgcctgacccagcctaccctcccgagcgtggccatcgaggccgtggacgacgccgagttcgtcacgagtgctcctgcaccccaggaaggcgcccggattagacgggatgcttttagtcccaactacttcgatactttctttgtcgaggagagggagcttggccgtggcggcaagggtgtcgtgctgctagtccgtcacgagatagacggctgtgctctcggccactttgcttgcaagagagtcccggtcggcgacgatcatgcttggctcgagaaggttcttgtagaagtcaagattcttgccaatctgtcgcacccgaatctggtgtcataccgccacgtctggctcgaggatgtccagattcaccgcttcgggcccagcgtcgcatgcgccttcatcctacaacaatactgcaacggtggcgacctactgcgctatatcgtaggcgaccagccacagcagacgaccaaagagcagttgaaagctcagctgcgtcgccggtccaagggacaaggagaacgtccgtctagcttagcgtccacccagcgactcttgacgctcgaggagatatattcactatttaaagacgtcacctcgggacttgtctctcttcatggctctagttacatacatcgagatctaaaacccagcaactgcctactgcatcatgagaatggcaaagtcacgtgcctgattagtgattttggtgaggtccagcccagtaattctgttcggaagtcctcgggtacgaccggaaccatatcttattgtgctcccgaagtgttgaagctggattctcgtggccagttcggcaacttcacggtcaaatcagacgtcttctctctgggcatgatcctctacttcctttgcttcgggcgccttccatatagcaacgcgaatgtggtccaagaagaattggaggatatcgaccagctccgcgctgaaatcgctggctggaagggcttccaagatgaaagacggctgagaccagatctgccacccaggctttaccagttgcttaagaagatgctagctctggatccagctgagcgcccaaacgcgtccgaggtcttgggcatactgaatcatgaatctgcacatggcggcttgcgctccgcatccagaaccacgagcccttcgatgaatatccccaatcgaagaatacagaatctcgactcccctatgccgccaagcacaccccagtccgagtctgctgttcctccagacgaatacacgacacaccgggctgtcccggcgcctttcttagccggttctcctcaacctacaccgtccaacagtctccagaagtatcaatcgcctagcagccctcgacatcgatcccaagccatggttttgtcgcgaagtcaagatcgactcccctctccgactcggaaccacttatcgaggtcaccgaatcgaaacccctccccgacagcgcagactccgttgttgatgccaccgcctaccacccccttaggtgttgtcagacatcaagcttttcttttccagcatcgcgttactcatttctaccttacttatggtgcttcaattgcatttttgctgagatttggcttgttttccgtgaaagctgcatcactagctcgagtctgctggccatacatggttagtcttggcattagcatacccctattggcggctgcgggcctggatctcgctctctcgtccggagagactcgtacctctgatgacagagatcgtcgcaggcatgttccccaggggcctaccggatggcgctgggattggaaagcaagcctcgctctgctcgtattacattttgcggccctttggacggtatcgatatggggccatctatgtgcagacaggcgggacggttgggttgacctctgattccacatctcagaatagatatacagcacggtgttaaaggtaacaccagcgatattgaactcctatattccctagacacaccaacctacactcgtttgtgtacggagggaacccatcaattcgccgcaaggatggaatacatcctttgtgaccagcccagctccatcagccccatctacgagcaacggtacgtgaggtcttcgctgtttgaccgaaatttggtagatggttcgatggagattttaacttccaaagactttcgttcttgatacgacaaacttcgatggcatgtatcaagggtaagaaacctgtcgtctgccccagaatattcgcccttctaaataccttgcatcagtctgtgctgtgtagggaggctgagaggggggagacgaattgtggagatgttgtttcgcctctctccccacagtccggcaatgtgaccagcattatggtagcactgttgacgaatataaatcagcagaatactttctgactgatcgataggctccgcctctacatcggttgacaagaaagattgtatatacattagaaccagtttgacctaagcgaagtaatgaatcacgacttgacatgatttacacgatgaatacgat

SEQ ID NO: 24239 - DNA, 1881 bp, Muscodor strobelii
  misc_feature: SGI cDNA ID NO. 568262
  misc_feature: Encodes the peptide sequence at SEQ ID NO 24240
atggcggagaatgtggaaggcaagcgggagtcgcttgcgtcgtctagctttgatcgatatggaacggagactctatcgggcgacacatcacttttcagaaagtggcagaagatttttcgatggaaaacgacaacaggcacacgactcttcaaggcttggagactaaggcctcataaggtaccctcgcgatcactagaatctgagattgttctacgatcacgaaacccatctcctgctcgccgctcttacgacagcgagttaaggagtcctacaatcatggctggcatcattgcagaaactgtagcgggtcgctgggatcctgtgaagacaccccctacaatgagtttgaacgatctaccagactcttctcggctctctgtaccagaagttccagttgcaatgcagcagcccaagtctgaatgcagtatagactatcccatcccacgaaacgaggctcttgagcatcaagcaacgtgtcaagtaacaaacccagaagcagttgactgtgacataacttttgacaagactcacgaggccggtcgcgaggatatggatgcatccggtaacagccgagatcctaaactggagtccagtcacgggcccggtgatgatgataccgacattgcgtcaatcatcgttgaatatccttccgattccattttctccggaggagagagtgtatatttctctacaaagtatcatgataccctaaatccgctcatgtttaagagcgcaaggacgacactagaaaggttacggccagatttagagcccgtaataggaagactcgacaggacaacaagcaggatgggctctggctctcgcataagcctcgtcgcccttgagcttcgtatggctggcaagaaagaagagggcagcatgaatattactttacgaccctcagtctggattttgtgtcacgatagttcgatgcgcaaagctattaaacgtcggctggatcaactcgtctggcttacttcagattactacgtacctgtctatgtccgaagcgccatgagacttgctgctcaagatatcgagtcgacagttactgggctagatttcaatcatgggacattgttttgggaagatacgttagacgagccgattcagagacgagttcatgtacatgtggaggattgtgggacaccacgaaatcacggggtgcgatgttgcatcaccattacacagggcgataatgagaaagttttgcaccaacgtctttgtcgcattggaggctgtattgttgtggagcttcctaccggacctcagctcgctgccttaactactggccatggtctacttgagtactggatacaccgaaatctgcaggataactccggtgcatccaatacagaaggatcggaagtcgacggagaagaggtcctagtatctgacgtcgaatgccaatttaagcagacaaaaaccgacgcagctcctcgaaatgtcaaaggcgaggttggatctgtcaccacttggaaacctgtggccctatttccaaataatatcaacttcttatctcaagcttgtcctacaagcggggactctttcgtagtctctgcaaaccagattcatgcggattttcttttactctctcccagtactccaattatgagtcaaaacagattatctacaacggcgagaatttcggaggccgtgattgtcgattcacatttcctagatgtgactatgtgctcgatcgaaacctcagcggtcatcatgagcaatgaatctgatgcacaaaaaaaggtggtgatatatccaggcacagtccctttcttcgtcaatggcgtggtatttcagacgaaaaaagtgagactacccaaatttgcgggtaagtatcatgatcttcaagcaatgtacgatgcatcaagccgctga

SEQ ID NO: 24240 - protein, 626 aa, Muscodor strobelii
  misc_feature: SGI Peptide ID NO. 568262
MAENVEGKRESLASSSFDRYGTETLSGDTSLFRKWQKIFRWKTTTGTRLFKAWRLRPHKVPSRSLESEIVLRSRNPSPARRSYDSELRSPTIMAGIIAETVAGRWDPVKTPPTMSLNDLPDSSRLSVPEVPVAMQQPKSECSIDYPIPRNEALEHQATCQVTNPEAVDCDITFDKTHEAGREDMDASGNSRDPKLESSHGPGDDDTDIASIIVEYPSDSIFSGGESVYFSTKYHDTLNPLMFKSARTTLERLRPDLEPVIGRLDRTTSRMGSGSRISLVALELRMAGKKEEGSMNITLRPSVWILCHDSSMRKAIKRRLDQLVWLTSDYYVPVYVRSAMRLAAQDIESTVTGLDFNHGTLFWEDTLDEPIQRRVHVHVEDCGTPRNHGVRCCITITQGDNEKVLHQRLCRIGGCIVVELPTGPQLAALTTGHGLLEYWIHRNLQDNSGASNTEGSEVDGEEVLVSDVECQFKQTKTDAAPRNVKGEVGSVTTWKPVALFPNNINFLSQACPTSGDSFVVSANQIHADFLLLSPSTPIMSQNRLSTTARISEAVIVDSHFLDVTMCSIETSAVIMSNESDAQKKVVIYPGTVPFFVNGVVFQTKKVRLPKFAGKYHDLQAMYDASSR

SEQ ID NO: 24241 - DNA, 3229 bp, Muscodor strobelii
  misc_feature: SGI EST ID NO. CUFF.57254.0
  misc_feature: Variant of the nucleotide sequence at SEQ ID NO 24239
ttttaatttgtctttcgatgttttcccctttagccgttcggcggcggcgatcctcgagtcctggcgatttcgcccgtcaatacaaggttgccttgtgccctgagtccaaaaaatgcgaccaattgcctaagagaaagatgttcaaggcgaatctccgccaagagacccatacacgatcgtctgaagtaacttacattgaaacgaagaaataactaaaactgtaaatgacaattctcgagacttatcttgaagcctttagtaacggtaaccgcaatggcggagaatgtggaaggcaagcgggagtcgcttgcgtcgtctagctttgatcgatatggaacggagactctatcgggcgacacatcacttttcagaaagtggcagaagatttttcgatggaaaacgacaacaggcacacgactcttcaaggcttggagactaaggcctcataaggtaccctcgcgatcactagaatctgagattgttctacgatcacgaaacccatctcctgctcgccgctcttacgacagcgagttaaggagtcctacaatcatggctggcatcattgcagaaactgtagcgggtcgctgggatcctgtgaagacaccccctacaatgagtttgaacgatctaccagactcttctcggctctctgtaccagaagttccagttgcaatgcagcagcccaagtctgaatgcagtatagactatcccatcccacgaaacgaggctcttgagcatcaagcaacgtgtcaagtaacaaacccagaagcagttgactgtgacataacttttgacaagactcacgaggccggtcgcgaggatatggatgcatccggtaacagccgagatcctaaactggagtccagtcacgggcccggtgatgatgataccgacattgcgtcaatcatcgttgaatatccttccgattccattttctccggaggagagagtgtatatttctctacaaagtatcatgataccctaaatccgctcatgtttaagagcgcaaggacgacactagaaaggttacggccagatttagagcccgtaataggaagactcgacaggacaacaagcaggatgggctctggctctcgcataagcctcgtcgcccttgagcttcgtatggctggcaagaaagaagagggcagcatgaatattactttacgaccctcagtctggattttgtgtcacgatagttcgatgcgcaaagctattaaacgtcggctggatcaactcgtctggcttacttcagattactacgtacctgtctatgtccgaagcgccatgagacttgctgctcaagatatcgagtcgacagttactgggctagatttcaatcatgggacattgttttgggaagatacgttagacgagccgattcagagacgagttcatgtacatgtggaggattgtgggacaccacgaaatcacggggtgcgatgttgcatcaccattacacagggcgataatgagaaagttttgcaccaacgtctttgtcgcattggaggctgtattgttgtggagcttcctaccggacctcagctcgctgccttaactactggccatggtctacttgagtactggatacaccgaaatctgcaggataactccggtgcatccaatacagaaggatcggaagtcgacggagaagaggtcctagtatctgacgtcgaatgccaatttaagcagacaaaaaccgacgcagctcctcgaaatgtcaaaggcgaggttggatctgtcaccacttggaaacctgtggccctatttccaaataatatcaacttcttatctcaagcttgtcctacaagcggggactctttcgtagtctctgcaaaccagattcatgcggattttcttttactctctcccagtactccaattatgagtcaaaacagattatctacaacggcgagaatttcggaggccgtgattgtcgattcacatttcctagatgtgactatgtgctcgatcgaaacctcagcggtcatcatgagcaatgaatctgatgcacaaaaaaaggtggtgatatatccaggcacagtccctttcttcgtcaatggcgtggtatttcagacgaaaaaagtgagactacccaaatttgcgggtctttctggctgttggattgcacacggtcgatttctatgtggagccatcattgctatctacgaaggggagccattcgccttgatgttgactgcagaacagcttttttctgacatcaaaactttttcttctggaatatcatctgtgagagttgctgccgatctcagtgataccattcaattcataatgcaggatactcagagcgacacgtttagtatcaggaagttcagcccttccgaactcagtccggataaatcaatccgggatagtctttcgcagacagagtccttcaggccgaccaggcacacgtccctgcgtctagaaaagcgggtgaccgttcttgtgcaccggctccggactcggtacacaagtatatttaaggatcgtaaaacacaccgtcaatagtaaggatttcttctacgaataattcataagttgcttaacactcaggatctcggataactggctgagggtagatatcaaactaccattatccatgtcagcatcctcatctaacaagattaagagtctgacataattgtctcctcaagtcttttaaacttatatcaaaagtggaacctgcatgttcttataccaagaactatatacacaaccatttactaccaagccgatttttacattctcaatttacaaaagaggaaatttaaaggcctttgctcggctctctcggaaactgcaacctatttgataatggaatgtcaattgagccagttaaatataagattcggaggcacatagtgtgctcaatatccaaccgtgtcactgagaatcgcggttatcacggaaatacatgatcttaccacattgacgttaccataataccgcaatggtcctcattcatctcctgttgcaaattgaccattgttgatcaagtcactaagggcctgatcctccttaaagtaaacggccaggtcgtctcgctcccccagcagtagatccaatgccattcgcccaaagaccgtttcgcctgcagggttaaggtgtgtgtaatcattagaagccagattgtaatatgaagcgtttttcgcgccgatagcgttgatgtaatttgtactttttgttgtcagatccagataatttataccaacagtatcggccgccg

SEQ ID NO: 24242 - DNA, 747 bp, Muscodor strobelii
  misc_feature: SGI cDNA ID NO. 568263
  misc_feature: Encodes the peptide sequence at SEQ ID NO 24243
atgaaatcgaacaatcttatctgcctcttgtccttcgcaattggcttagcctttgcagaacctcaaatacgagctgcacagcctgcctactacttcctaatcggagactccaccgttgcaataaacggaggctggggaaatgggctcttatcgtatttgaaagaaaaagctgaaggcgagaatggagctgtaagcgggacgaccactgtttcctggaagtcaagcggacgttgggagaatctcttaaaggcaatcgatgcaaaaaagggtagccacgagccaattgtcactcttcaattcggtcacaacgatcaaaaagtcctcactctcgatcagtacgaagccaatctggtgaatatgacctctgagatcaagcgggcgggtggaacaccgatcataatcactccgttaactcgccgtacgttcgtaaatggcgcagtgagagaggactttgtggaatggcgggcacgagcaattgcggcggccgatactgttggtataaattatctggatctgacaacaaaaagtacaaattacatcaacgctatcggcgcgaaaaacgcttcatattacaatctggcttctaatgattacacacaccttaaccctgcaggcgaaacggtctttgggcgaatggcattggatctactgctgggggagcgagacgacctggccgtttactttaaggaggatcaggcccttagtgacttgatcaacaatggtcaatttgcaacaggagatgaatga

SEQ ID NO: 24243 - protein, 248 aa, Muscodor strobelii
  misc_feature: SGI Peptide ID NO. 568263
  misc_feature (31)..(213): Pfam Id: PF00657 Pfam Desc: GDSL-like Lipase/Acylhydrolase
  misc_feature (8)..(248): NCBI GI: 46139531 Blast Desc: FG11280.1 [Gibberella zeae PH-1]
  misc_feature (19)..(248): NCBI GI: 238500415 Blast Desc: conserved [Aspergillus flavus NRRL3357] gi|220693195|gb|EED49541.1| conserved [Aspergillus flavus NRRL3357]
  misc_feature (19)..(248): NCBI GI: 169779743 Blast Desc: [Aspergillus oryzae RIB40] gi|83773075|dbj|BAE63203.1| protein product [Aspergillus oryzae]
  misc_feature (24)..(248): NCBI GI: 256731911 Blast Desc: NECHADRAFT_41392 [Nectria haematococca mpVI 77-13-4]
  misc_feature (1)..(248): NCBI GI: 261361056 Blast Desc: acetylesterase [Verticillium albo-atrum VaMs.102]
  misc_feature (23)..(246): NCBI GI: 27924025 Blast Desc: esterase [Fusarium sporotrichioides]
  misc_feature (23)..(248): NCBI GI: 46115376 Blast Desc: FG03530.1 [Gibberella zeae PH-1] gi|28202138|gb|AAO34675.1| acetylesterase [Gibberella zeae]
  misc_feature (23)..(248): NCBI GI: 29126011 Blast Desc: rhamnogalacturonan acetyltransferase [Gibberella zeae]
  misc_feature (30)..(243): NCBI GI: 39950241 Blast Desc: MGG_01195 [Magnaporthe grisea 70-15] gi|145021008|gb|EDK05137.1| MGG_01195 [Magnaporthe grisea 70-15]
  misc_feature (19)..(244): NCBI GI: 116208394 Blast Desc: CHGG_03490 [Chaetomium globosum CBS 148.51] gi|88184087|gb|EAQ91555.1| CHGG_03490 [Chaetomium globosum CBS 148.51]
MKSNNLICLLSFAIGLAFAEPQIRAAQPAYYFLIGDSTVAINGGWGNGLLSYLKEKAEGENGAVSGTTTVSWKSSGRWENLLKAIDAKKGSHEPIVTLQFGHNDQKVLTLDQYEANLVNMTSEIKRAGGTPIIITPLTRRTFVNGAVREDFVEWRARAIAAADTVGINYLDLTTKSTNYINAIGAKNASYYNLASNDYTHLNPAGETVFGRMALDLLLGERDDLAVYFKEDQALSDLINNGQFATGDE

SEQ ID NO: 24244 - DNA, 1359 bp, Muscodor strobelii
  misc_feature: SGI EST ID NO. CUFF.57255.2
  misc_feature: Variant of the nucleotide sequence at SEQ ID NO 24242
ctcttaaaggcaatcgatgcaaaaaagggtagccacgagccaattgtcactcttcaattcggtcacaacgatcaaaaagtcctcactctcgatcagtacgaagccaatctggtgaatatgacctctgagatcaagcgggcgggtggaacaccgatcataatcactccgttaactcgccgtacgttcgtaaatggcgcagtgagagaggactttgtggaatggcgggcacgagcaattgcggcggccgatactgttggtataaattatctggatctgacaacaaaaagtacaaattacatcaacgctatcggcgcgaaaaacgcttcatattacaatctggcttctaatgattacacacaccttaaccctgcaggcgaaacggtctttgggcgaatggcattggatctactgctgggggagcgagacgacctggccgtttactttaaggaggatcaggcccttagtgacttgatcaacaatggtcaatttgcaacaggagatgaatgaggaccattgcggtattatggtaacgtcaatgtggtaagatcatgtatttccgtgataaccgcgattctcagtgacacggttggatattgagcacactatgtgcctccgaatcttatatttaactggctcaattgacattccattatcaaataggttgcagtttccgagagagccgagcaaaggcctttaaatttcctcttttgtaaattgagaatgtaaaaatcggcttggtagtaaatggttgtgtatatagttcttggtataagaacatgcaggttccacttttgatataagtttaaaagacttgaggagacaattatgtcagactcttaatcttgttagatgaggatgctgacatggataatggtagtttgatatctaccctcagccagttatccgagatcctgagtgttaagcaacttatgaattattcgtagaagaaatccttactattgacggtgtgttttacgatccttaaatatacttgtgtaccgagtccggagccggtgcacaagaacggtcacccgcttttctagacgcagggacgtgtgcctggtcggcctgaaggactctgtctgcgaaagactatcccggattgatttatccggactgagttcggaagggctgaacttcctgatactaaacgtgtcgctctgagtatcctgcattatgaattgaatggtatcactgagatcggcagcaactctcacagatgatattccagaagaaaaagttttgatgtcagaaaaaagctgttctgcagtcaacatcaaggcgaatggctccccttcgtagatagcaatgatggctccacatagaaatcgaccgtgtgcaatccaacagccagaaaga

SEQ ID NO: 24245 - DNA, 960 bp, Muscodor strobelii
  misc_feature: SGI cDNA ID NO. 568264
  misc_feature: Encodes the peptide sequence at SEQ ID NO 24246
atggcggacatgccaattctcaagggaaaggcacagttcattatcccgtcaattcctgaaccatgttttactttctataaggttgtaggtgatctttctgccggcactcctccggtggtggtggttcatggtggacccggagccgggcatgagtatctgctaacattcggtgcgctttggcgtcaatatcgaattcctgttgttttctacgatcagataggatgtgcatcatctacacatcttcgggaaaaggccggagacgagtctttttggcaggaacagctcttccaagacgagttggataacctcgtagatcatttaaatctacgtcgagatcctggcttccaccttcttggccaaagctggggaggtatgctcggtgccgcattcgcggctcgtcgtcccacaggcttgcggaggctcattttagctagcgggcttgccagtaaggaattggccgaccgcggggttgatgtgctgaaaagtcaaatgccgccagccctgcagcaggcgctcaatgaagctgaaaagaggaatgagtttgatggtactgcctataaaactgccatgaatttctatcaccggaatttcgtctgtcgagctgatccctttccaccgcccgaaatgctgccatcgctgaaaaatgtaactgaggacaccacagtctatcgaactatgtacggtccctcgccgttgataatcaatggctcattgaaaacgtggactattgttccaaagctcgcaaatatcacggtcccgacactcgtctacaacggcgaatacgatacttcccatgacgtcgcccaagttccattcttcgagctcattccccgagtgcgttggttcacatttcccggttccggtcatatgtgccacttggaggatggcggattacgggaaaaggttctgaagatggttggggactttctctctgaagacgactcttttcggtcgccctaa

SEQ ID NO: 24246 - protein, 319 aa, Muscodor strobelii
  misc_feature: SGI Peptide ID NO. 568264
  misc_feature (65)..(305): Pfam Id: PF00561 Pfam Desc: alpha/beta hydrolase fold
  misc_feature (8)..(312): NCBI GI: 156036178 Blast Desc: SS1G_12775 [Sclerotinia sclerotiorum 1980] gi|154698183|gb|EDN97921.1| SS1G_12775 [Sclerotinia sclerotiorum 1980]
  misc_feature (4)..(310): NCBI GI: 154314339 Blast Desc: BC1G_05263 [Botryotinia fuckeliana B05.10] gi|150848908|gb|EDN24101.1| BC1G_05263 [Botryotinia fuckeliana B05.10]
  misc_feature (1)..(310): NCBI GI: 145252800 Blast Desc: An16g06070 [Aspergillus niger] gi|134083468|emb|CAK46945.1| protein product [Aspergillus niger]
  misc_feature (24)..(315): NCBI GI: 13470803 Blast Desc: proline iminopeptidase [Mesorhizobium loti MAFF303099] gi|14021546|dbj|BAB48158.1| proline iminopeptidase [Mesorhizobium loti MAFF303099]
  misc_feature (24)..(315): NCBI GI: 260459253 Blast Desc: proline-specific peptidase [Mesorhizobium opportunistum WSM2075] gi|259034807|gb|EEW36063.1| proline-specific peptidase [Mesorhizobium opportunistum WSM2075]
  misc_feature (17)..(314): NCBI GI: 254406800 Blast Desc: proline imino-peptidase [Streptomyces sviceus ATCC 29083] gi|197716230|gb|EDY60264.1| proline imino-peptidase [Streptomyces sviceus ATCC 29083]
  misc_feature (17)..(314): NCBI GI: 271963655 Blast Desc: Prolyl aminopeptidase [Streptosporangium roseum DSM 43021] gi|270506830|gb|ACZ85108.1| Prolyl aminopeptidase [Streptosporangium roseum DSM 43021]
  misc_feature (24)..(310): NCBI GI: 145595300 Blast Desc: proline-specific peptidase [Salinispora tropica CNB-440] gi|145304637|gb|ABP55219.1| proline-specific peptidase [Salinispora tropica CNB-440]
  misc_feature (1)..(310): NCBI GI: 256781407 Blast Desc: proline-specific peptidase [Streptomyces hygroscopicus ATCC 53653]
  misc_feature (1)..(310): NCBI GI: 226973364 Blast Desc: L-amino acid amidase/proline iminopeptidase [Streptomyces sp. MP39-85]
  misc_feature (66)..(311): SWISSPROT Homolog: EC 3.4.11.5 Prolyl aminopeptidase
MADMPILKGKAQFIIPSIPEPCFTFYKVVGDLSAGTPPVVVVHGGPGAGHEYLLTFGALWRQYRIPVVFYDQIGCASSTHLREKAGDESFWQEQLFQDELDNLVDHLNLRRDPGFHLLGQSWGGMLGAAFAARRPTGLRRLILASGLASKELADRGVDVLKSQMPPALQQALNEAEKRNEFDGTAYKTAMNFYHRNFVCRADPFPPPEMLPSLKNVTEDTTVYRTMYGPSPLIINGSLKTWTIVPKLANITVPTLVYNGEYDTSHDVAQVPFFELIPRVRWFTFPGSGHMCHLEDGGLREKVLKMVGDFLSEDDSFRSP

SEQ ID NO: 24247 - DNA, 1264 bp, Muscodor strobelii
  misc_feature: SGI EST ID NO. CUFF.57168.0
  misc_feature: Variant of the nucleotide sequence at SEQ ID NO 24245
cttacccacctttgcttgctgtctttcctttaaagcacttctagaaccgaaacatggcggacatgccaattctcaagggaaaggcacagttcattatcccgtcaattcctgaaccatgttttactttctataaggttgtaggtgatctttctgccggcactcctccggtggtggtggttcatggtggacccggagccgggcatgagtatctgctaacattcggtgcgctttggcgtcaatatcgaattcctgttgttttctacgatcagataggatgtgcatcatctacacatcttcgggaaaaggccggagacgagtctttttggcaggaacagctcttccaagacgagttggataacctcgtagatcatttaaatctacgtcgagatcctggcttccaccttcttggccaaagctggggaggtatgctcggtgccgcattcgcggctcgtcgtcccacaggcttgcggaggctcattttagctagcgggcttgccagtaaggaattggccgaccgcggggttgatgtgctgaaaagtcaaatgccgccagccctgcagcaggcgctcaatgaagctgaaaagaggaatgagtttgatggtactgcctataaaactgccatgaatttctatcaccggaatttcgtctgtcgagctgatccctttccaccgcccgaaatgctgccatcgctgaaaaatgtaactgaggacaccacagtctatcgaactatgtacggtccctcgccgttgataatcaatggctcattgaaaacgtggactattgttccaaagctcgcaaatatcacggtcccgacactcgtctacaacggcgaatacgatacttcccatgacgtcgcccaagttccattcttcgagctcattccccgagtgcgttggttcacatttcccggttccggtcatatgtgccacttggaggatggcggattacgggaaaaggttctgaagatggttggggactttctctctgaagacgactcttttcggtcgccctaagcacaagtatcgagacggtcgctttcgattagctttcattgtgcggaaattacgtttagaatcctctctcgtgttaacaaaatactactactttgggccgaacaactcttaacgcgatgatacagagacatgttgaattttatgattaaaagcaggacggtgcgaattggaccggctatgcgtttgcccagaacatcttcggtgcagtgctgtgaggtgctccaatttccccgatagtgtggacggagaat

SEQ ID NO: 24248 - DNA, 1092 bp, Muscodor strobelii
  misc_feature: SGI cDNA ID NO. 568265
  misc_feature: Encodes the peptide sequence at SEQ ID NO 24249
atgtcgatttcgaccaacatagctgtttgctttgacatcggagccctatacaatgcctcggttgttgtatatgatccctatacagcctccatagtcagcacacttgaattccccaacatcacaagaactgttccattccacattggtggtgttgcatgggatccttatagcggtaaccgcctcgcacgccgaatcggaagaccgggaaagaacgaaagcagtgatcagattaccattcttgttgactccgcacctgcgcacgaaacagccggtcgcaatgtatcaggggacaattatatcattcggtgggacgccgaagcgcgaagagctctctggtctgtgaacttaaccaccacaacgaagggtcgatatggcggtcctcaagacattgagcacgacagtcgaggaaatatctatgtaatgggcacataccctggtacattattacgagtgtctagagacggaagcgctgttgatgaatggtatgtcccgccatcttcgaataatgggacgattgaacatgcgataatcggctatactggacttgcggcagtagacggagacactctgctcgtcgccgacgcgcgcaataacagtgctgacggcggtgctctccttcgcttcaatatgtctgccccaaaaggcattccaatacctgtgcccgtcataccttcttcacatccgatcaaccaatcctcatctactctgatccatcccggagatgctatatacttgccaccaaagtataataacagcgttctattgataacggaacacgatgcgggtctttcggtcctacgctcggataatcgatgggaaagcgccgtgcttcttggacggatccccaaccctgctaatatctcagcagccggtggtgttgtaacggcggctgtcgagattgaaggcagtgtattcatggtcgaagagtggtttacggatgccttggttcccgggaccacggccgggaatagaacaatgtttcctctcgttgatattacaactcaactcgaggcattggtaacagcctcccgttccctttatcgggaaaggagactagcgaacaacaaagttcttgggattaactacagctga

SEQ ID NO: 24249 - protein, 363 aa, Muscodor strobelii
  misc_feature: SGI Peptide ID NO. 568265
  misc_feature (16)..(340): NCBI GI: 261354620 Blast Desc: TRI14 [Verticillium albo-atrum VaMs.102]
  misc_feature (13)..(340): NCBI GI: 169772201 Blast Desc: [Aspergillus oryzae RIB40] gi|83768429|dbj|BAE58568.1| protein product [Aspergillus oryzae]
  misc_feature (15)..(340): NCBI GI: 256732389 Blast Desc: NECHADRAFT_80906 [Nectria haematococca mpVI 77-13-4]
  misc_feature (31)..(340): NCBI GI: 171684707 Blast Desc: protein product [Podospora anserina] gi|170942314|emb|CAP67966.1| protein product [Podospora anserina]
  misc_feature (13)..(340): NCBI GI: 242763564 Blast Desc: conserved [Talaromyces stipitatus ATCC 10500] gi|218723796|gb|EED23213.1| conserved [Talaromyces stipitatus ATCC 10500]
  misc_feature (77)..(340): NCBI GI: 238485174 Blast Desc: conserved [Aspergillus flavus NRRL3357] gi|220698704|gb|EED55043.1| conserved [Aspergillus flavus NRRL3357]
  misc_feature (13)..(340): NCBI GI: 12044398 Blast Desc: AF327522_1 TRI14 [Stachybotrys chartarum]
  misc_feature (13)..(340): NCBI GI: 269856268 Blast Desc: [Fusarium sp. NRRL 13405]
  misc_feature (13)..(340): NCBI GI: 12034952 Blast Desc: AF326571_1 TRI14 [Fusarium sporotrichioides] gi|15054402|gb|AAK77936.1| TRI14 [Fusarium sporotrichioides] gi|23957823|gb|AAN40835.1| [Fusarium sporotrichioides]
  misc_feature (13)..(337): NCBI GI: 164425084 Blast Desc: NCU06479 [Neurospora crassa OR74A] gi|157070783|gb|EAA27883.2| [Neurospora crassa OR74A]
MSISTNIAVCFDIGALYNASVVVYDPYTASIVSTLEFPNITRTVPFHIGGVAWDPYSGNRLARRIGRPGKNESSDQITILVDSAPAHETAGRNVSGDNYIIRWDAEARRALWSVNLTTTTKGRYGGPQDIEHDSRGNIYVMGTYPGTLLRVSRDGSAVDEWYVPPSSNNGTIEHAIIGYTGLAAVDGDTLLVADARNNSADGGALLRFNMSAPKGIPIPVPVIPSSHPINQSSSTLIHPGDAIYLPPKYNNSVLLITEHDAGLSVLRSDNRWESAVLLGRIPNPANISAAGGVVTAAVEIEGSVFMVEEWFTDALVPGTTAGNRTMFPLVDITTQLEALVTASRSLYRERRLANNKVLGINYS

SEQ ID NO: 24250 - DNA, 804 bp, Muscodor strobelii
  misc_feature: SGI cDNA ID NO. 568266
  misc_feature: Elevated expression when VOC is produced
  misc_feature: Encodes the peptide sequence at SEQ ID NO 24251
atgagattcactactgctctctcttttttggccgtaattggtgtttcttcggcaattccaccacatggctacccagcaacgaaatacccaacaacaacgctagctggcctcgaggtcattgatacccagctagtccgtgacgtacgtaagcttgttgaagggttcaacgagctgcaaccatatctctacaagcatgtcatgcgaacatggttgtggggtgtcgccgccatgaacgccaacgagactctcaagagaatgatcgatcccgaactgcaggctgtcggtagtatgatgcatgatatgggttgggacatgcggcctaactctccgtatgtcacgttagaccaacgatttgaagctgactccgggctcgccgccatgaacttcgtcaagaatcacccaggaggtcgcgactgggatgaaattcgtctggaaagaatgtatgacggtatcgcattgcaaatcgagcgcagtctgtcggcgaataagaacgtccaaagtcagttcatcgttcagtgcgtcgcgtgggaaatacccggaccgcgcgatcctcgaatcccgcaaaaggactatgatagcatcctcgctaagttcccaaatcactacgcttcaagaggaaccaacgagacatttacgtggtttgcttcacataaacctgctggaacatacgataatgctatggagactttcggtgtcgagaacgtagtgggttacaatagcactggcaaacgcctatacgacaagatcactttgaatgcagcactcgaagccgctaagtatcccaacacaactatttatgattag

SEQ ID NO: 24251 - protein, 267 aa, Muscodor strobelii
  misc_feature: SGI Peptide ID NO. 568266
  misc_feature (1)..(250): NCBI GI: 116200323 Blast Desc: CHGG_08317 [Chaetomium globosum CBS 148.51] gi|88179596|gb|EAQ87064.1| CHGG_08317 [Chaetomium globosum CBS 148.51]
  misc_feature (28)..(252): NCBI GI: 171681192 Blast Desc: protein product [Podospora anserina] gi|170940554|emb|CAP65782.1| protein product [Podospora anserina]
  misc_feature (27)..(252): NCBI GI: 256721693 Blast Desc: NECHADRAFT_44823 [Nectria haematococca mpVI 77-13-4]
  misc_feature (34)..(249): NCBI GI: 116202473 Blast Desc: CHGG_09121 [Chaetomium globosum CBS 148.51] gi|88177639|gb|EAQ85107.1| CHGG_09121 [Chaetomium globosum CBS 148.51]
  misc_feature (25)..(247): NCBI GI: 171693093 Blast Desc: protein product [Podospora anserina] gi|170946495|emb|CAP73296.1| protein product [Podospora anserina]
  misc_feature (33)..(223): NCBI GI: 116204295 Blast Desc: CHGG_10031 [Chaetomium globosum CBS 148.51] gi|88176159|gb|EAQ83627.1| CHGG_10031 [Chaetomium globosum CBS 148.51]
  misc_feature (31)..(240): NCBI GI: 13471098 Blast Desc: mlr0982 [Mesorhizobium loti MAFF303099] gi|14021842|dbj|BAB48453.1| mlr0982 [Mesorhizobium loti MAFF303099]
  misc_feature (73)..(171): NCBI GI: 116178824 Blast Desc: CHGG_00040 [Chaetomium globosum CBS 148.51] gi|88184337|gb|EAQ91805.1| CHGG_00040 [Chaetomium globosum CBS 148.51]
  misc_feature (33)..(240): NCBI GI: 260460254 Blast Desc: conserved [Mesorhizobium opportunistum WSM2075] gi|259033899|gb|EEW35158.1| conserved [Mesorhizobium opportunistum WSM2075]
  misc_feature (31)..(227): NCBI GI: 242795716 Blast Desc: conserved [Talaromyces stipitatus ATCC 10500] gi|218719237|gb|EED18657.1| conserved [Talaromyces stipitatus ATCC 10500]
  misc_feature: Useful for introducing or modulating the production of volatile compounds
MRFTTALSFLAVIGVSSAIPPHGYPATKYPTTTLAGLEVIDTQLVRDVRKLVEGFNELQPYLYKHVMRTWLWGVAAMNANETLKRMIDPELQAVGSMMHDMGWDMRPNSPYVTLDQRFEADSGLAAMNFVKNHPGGRDWDEIRLERMYDGIALQIERSLSANKNVQSQFIVQCVAWEIPGPRDPRIPQKDYDSILAKFPNHYASRGTNETFTWFASHKPAGTYDNAMETFGVENVVGYNSTGKRLYDKITLNAALEAAKYPNTTIYD

SEQ ID NO: 24252 - DNA, 915 bp, Muscodor strobelii
  misc_feature: SGI EST ID NO. CUFF.57179.0
  misc_feature: Variant of the nucleotide sequence at SEQ ID NO 24250
agtgttttaagatagtgtgaagacaactcaaaatgagattcactactgctctctcttttttggccgtaattggtgtttcttcggcaattccaccacatggctacccagcaacgaaatacccaacaacaacgctagctggcctcgaggtcattgatacccagctagtccgtgacgtacgtaagcttgttgaagggttcaacgagctgcaaccatatctctacaagcatgtcatgcgaacatggttgtggggtgtcgccgccatgaacgccaacgagactctcaagagaatgatcgatcccgaactgcaggctgtcggtagtatgatgcatgatatgggttgggacatgcggcctaactctccgtatgtcacgttagaccaacgatttgaagctgactccgggctcgccgccatgaacttcgtcaagaatcacccaggaggtcgcgactgggatgaaattcgtctggaaagaatgtatgacggtatcgcattgcaaatcgagcgcagtctgtcggcgaataagaacgtccaaagtcagttcatcgttcagtgcgtcgcgtgggaaatacccggaccgcgcgatcctcgaatcccgcaaaaggactatgatagcatcctcgctaagttcccaaatcactacgcttcaagaggaaccaacgagacatttacgtggtttgcttcacataaacctgctggaacatacgataatgctatggagactttcggtgtcgagaacgtagtgggttacaatagcactggcaaacgcctatacgacaagatcactttgaatgcagcactcgaagccgctaagtatcccaacacaactatttatgattaggagatagtccagcgtaaacgttttcatgcgtaataaaaatgaagacctccagtcataattaatagaatatactcaaccc

SEQ ID NO: 24253 - DNA, 1137 bp, Muscodor strobelii
  misc_feature: SGI cDNA ID NO. 568267
  misc_feature: Elevated expression when VOC is produced
  misc_feature: Encodes the peptide sequence at SEQ ID NO 24254
atgaattccaagacccttctcgccaccactctgttggccgctgttgaggcgcgctttggccaggaacagactcctgtttccttcattacggctctcagcaactttggtgacccaggagttgccgctactctcgccggcgctgttccaggcgttctcctcgctgcagctgacccctgcaacaagttgacacttgctgaccagatcgtcaccgaacttggtaacgatccagctgttattgcaggcgcgcagcagattgtggccgcagaacagaactttaaccccttcgtggttagtgtacctaacatctgcggcgatgctagtcttcccgctaccgaagctctacgcggtatcgtgcctctaatcgatcctgctgttactggttccgatgtcgagaacgccaactcggcctcgtctctcactagccctctcgacgctactggcctctcggttgcagatgtcatgatcgccgccggtttcagcaacttcactgtcaatggcgcagctgcaggaggcgcaggcaatgccgattctggatccaattctggtgccgcagactcaactacctctgcagtcgcatccgccacctccgcggcgcaagtgatgacgatgaccacagtcgtaaaatgcggtactgcagttgctactgcgacagtgacctcgactgccgctgccgttgccaccgaaacgccggctgcctcatcaggaaatgctgctgcggctgctggtgcaggcgctgtcagcgatcccgtcactggtacatttgctggtttccaagcctcttctctcggtctggacttcggaacatgcacacccaccgtcaagttcgaggaatctctcaacggtcgcaaagccggagaattcaccttccaggcgcaagacccggtcgtcaacaagggccaacaggaagctcttaatcccaacatcatctttaaccgcatctgcgatcaacttgtgaatgtatgtggtgttgagagtggtagcgatgcccacacactctgcaagagcacccaggcgactcttggagctggacccaaagatcagaccacggctgatgcatggaacactgctctcggatttgagggcactgatatcaaccctgacaatgctcctcaggctggcctcgtcggccacacctaa

SEQ ID NO: 24254 - protein, 378 aa, Muscodor strobelii
  misc_feature: SGI Peptide ID NO. 568267
  misc_feature (1)..(378): NCBI GI: 156035821 Blast Desc: SS1G_13115 [Sclerotinia sclerotiorum 1980] gi|154698519|gb|EDN98257.1| SS1G_13115 [Sclerotinia sclerotiorum 1980]
  misc_feature (1)..(378): NCBI GI: 212544270 Blast Desc: conserved [Penicillium marneffei ATCC 18224] gi|210065258|gb|EEA19352.1| conserved [Penicillium marneffei ATCC 18224]
  misc_feature (3)..(167): NCBI GI: 256734836 Blast Desc: NECHADRAFT_75503 [Nectria haematococca mpVI 77-13-4]
  misc_feature (1)..(220): NCBI GI: 85092508 Blast Desc: NCU06079 [Neurospora crassa OR74A] gi|28920845|gb|EAA30191.1| conserved [Neurospora crassa OR74A]
  misc_feature (1)..(168): NCBI GI: 154312565 Blast Desc: BC1G_05885 [Botryotinia fuckeliana B05.10] gi|150849986|gb|EDN25179.1| BC1G_05885 [Botryotinia fuckeliana B05.10]
  misc_feature (1)..(163): NCBI GI: 242811953 Blast Desc: TSTA_098780 [Talaromyces stipitatus ATCC 10500] gi|218714198|gb|EED13621.1| TSTA_098780 [Talaromyces stipitatus ATCC 10500]
  misc_feature (1)..(167): NCBI GI: 116203813 Blast Desc: CHGG_09790 [Chaetomium globosum CBS 148.51] gi|88175918|gb|EAQ83386.1| CHGG_09790 [Chaetomium globosum CBS 148.51]
  misc_feature (3)..(163): NCBI GI: 39943026 Blast Desc: MGG_03593 [Magnaporthe grisea 70-15] gi|145009839|gb|EDJ94495.1| MGG_03593 [Magnaporthe grisea 70-15]
  misc_feature (1)..(163): NCBI GI: 171680000 Blast Desc: protein product [Podospora anserina] gi|170939626|emb|CAP64853.1| protein product [Podospora anserina]
  misc_feature (3)..(169): NCBI GI: 46135749 Blast Desc: FG09390.1 [Gibberella zeae PH-1]
  misc_feature: Useful for introducing or modulating the production of volatile compounds
MNSKTLLATTLLAAVEARFGQEQTPVSFITALSNFGDPGVAATLAGAVPGVLLAAADPCNKLTLADQIVTELGNDPAVIAGAQQIVAAEQNFNPFVVSVPNICGDASLPATEALRGIVPLIDPAVTGSDVENANSASSLTSPLDATGLSVADVMIAAGFSNFTVNGAAAGGAGNADSGSNSGAADSTTSAVASATSAAQVMTMTTVVKCGTAVATATVTSTAAAVATETPAASSGNAAAAAGAGAVSDPVTGTFAGFQASSLGLDFGTCTPTVKFEESLNGRKAGEFTFQAQDPVVNKGQQEALNPNIIFNRICDQLVNVCGVESGSDAHTLCKSTQATLGAGPKDQTTADAWNTALGFEGTDINPDNAPQAGLVGHT

SEQ ID NO: 24255 - DNA, 2205 bp, Muscodor strobelii
  misc_feature: SGI EST ID NO. CUFF.57185.0
  misc_feature: Variant of the nucleotide sequence at SEQ ID NO 24253
cttgacccaaataagcaatcaactcgcttcttcgcatttcgcagagcctcatcgctcgcacatgggtaagacagtccctgctgccgtggatccgatattgcgcctcggcatccttgtgaggcatgcaatacgtatatactacgaatattagtgcccctgaaccaaatctgtgccagattgcgctcctcgactagacttctaatgtcggtccatgatatatggttgagcaaccgaggtgagaggggctcaagagcgggaacccgggatcgcataccgcttctcgttaccagaggcgcgcagcaacgtgcgttctgggtttcgtactcaacgaccctgtagcacatcccatgctcactcgatacaatactcgtataggcgagaccactcgtctcgacccatagggtgggcctcaaggctgacctcttgggagatgagacgaacggtctggttttcaatgtttactatctagagtgcattgtctcatcgtaccttcatctaaacttggcatgcagtatgatcgaccgagggggcttcgtccgggcttgccgccgactcagaaaatcctagggacgatgaccctcgtcatctagtatgagtcgcaattgcaactccaccgccgtgtatatcatgacggcttcgtctcttcgtttgttgtcttcctttcttcttcaacccagtccgttctttctttgacatccagcttcttggctcagtagttctgtgaactcattcagttcttcacgttcttttcgaacttattaaccttcattcaaacaccgcccggccggtttcgatctttcgatttttaagccaaaagcaacatctaaaccgtcttaaccaacttttcaaataccgccatcatgaattccaagacccttctcgccaccactctgttggccgctgttgaggcgcgctttggccaggaacagactcctgtttccttcattacggctctcagcaactttggtgacccaggagttgccgctactctcgccggcgctgttccaggcgttctcctcgctgcagctgacccctgcaacaagttgacacttgctgaccagatcgtcaccgaacttggtaacgatccagctgttattgcaggcgcgcagcagattgtggccgcagaacagaactttaaccccttcgtggttagtgtacctaacatctgcggcgatgctagtcttcccgctaccgaagctctacgcggtatcgtgcctctaatcgatcctgctgttactggttccgatgtcgagaacgccaactcggcctcgtctctcactagccctctcgacgctactggcctctcggttgcagatgtcatgatcgccgccggtttcagcaacttcactgtcaatggcgcagctgcaggaggcgcaggcaatgccgattctggatccaattctggtgccgcagactcaactacctctgcagtcgcatccgccacctccgcggcgcaagtgatgacgatgaccacagtcgtaaaatgcggtactgcagttgctactgcgacagtgacctcgactgccgctgccgttgccaccgaaacgccggctgcctcatcaggaaatgctgctgcggctgctggtgcaggcgctgtcagcgatcccgtcactggtacatttgctggtttccaagcctcttctctcggtctggacttcggaacatgcacacccaccgtcaagttcgaggaatctctcaacggtcgcaaagccggagaattcaccttccaggcgcaagacccggtcgtcaacaagggccaacaggaagctcttaatcccaacatcatctttaaccgcatctgcgatcaacttgtgaatgtatgtggtgttgagagtggtagcgatgcccacacactctgcaagagcacccaggcgactcttggagctggacccaaagatcagaccacggctgatgcatggaacactgctctcggatttgagggcactgatatcaaccctgacaatgctcctcaggctggcctcgtcggccacacctaaatagggatgcatagtaggttgtatgatggtgtagatatgggttagaggaaaaggggagtgaacagattgaatacttgtatttattatgagatatgttgtatttaccgcgatggctcactaccatcacttcgtttagagatccgatgcacagcgaagggcgttcaatgggggctgggttccagagtcgaaagaatatatccaattctct

SEQ ID NO: 24256 - DNA, 2901 bp, Muscodor strobelii
  misc_feature: SGI cDNA ID NO. 568268
  misc_feature: Reduced expression when VOC is produced
  misc_feature: Encodes the peptide sequence at SEQ ID NO 24257
atgttgaagaagtggaacagccagattcgccgtaaccgcagcggcagcggcccgtcgtcgtccgccaacatgagctatcatcagatgatccccgtcgtcagctcctcctccagtagcggggctggcaccttcgctcccaatcaacgcctgcccgggtcctggccctccatgagccaatatgccctgcccgctctctcgaccgatgcttctaccgccaccacaccgtcctacgccacaccctcatacgacaccgatgactcagatgtgcaggagatcccggagctgccccaactcgacaccccacgaggcaacatccccgagaacgaacgtcttcccagccccgatgctcttagcagacctctcatgccccatcagcgcatcgccctcacctggctcgcccgccaggagaaaggccctcacaaaggtgccatcctcgccgacgacatgggcttgggcaagaccatgcaggccctggctctgatcctcgagcgcccttcgaccaacactgcccgcaagacgacactcgtctgtgccccaaccagtttgcttgcgcagtgggagaacgagatccgagacaaaatcaaggcctcgcaccagttgtctgtcctcaaactccatggccgcaagaaagtcggcatgactgtcgccaagatgctcgagtacgatattgtcttgaccacgtatggtacccttgcgtgggagtacacccgggtccacgaaaagaagacttttaatggcgtcttgcttctccagtcccacgctgtcttccatcgtgtcattctcgacgaggcgcacaacatcaagaagcccagtgggaaggcatccctcggtgcttcccaccttcgctccacatatcgcctgtgtatgacgggcacgcctctgatgaatcgtaaactcgagctatatcccctcatacgtttcttgcgagtcgccaagtatgaagagcagttcaacttcaaggcgctgagtgagaatgcgctccgtaacgttctgaaggatctcttgttgcgacgaacagagaagtcaaaggttgatggaaagcccatctttactcttccgaagctcaccatcgttaccgaggaagctgagttcagcaacgaccaagctcagttctaccaagcgctagagcaacgaacgcaactcgagatgaacatgtatatcaagcagggtaaccctacacgtatctacatgcatgccctgctcttgcttctccgccttcgacaggcctgcgatcatcccttcctgctcaacgatctcacgatccctcaaggcattgatatgacgcccagcgacatggtcaagttggcccgcaagctacacccgggtgtcgtgaaaaatatcgagacacgtcatcatcttggtttcacttgcccggattgtaagaaaaggacgacaaatcctgtcatcgtatatccctgtggacatcatgtatgcagtgactgtatttcagcgatggccgccaacagggaaacacatcaaaggcgtgaagatgacgatgatgacgacaacaagggagccatgattggaggctgccctggaaatgattgtactactgggatggactcaaagcatctcatatgctatcaacagttcaaggaggtttatctctacgataacgacgaagaggaccagtacaaaagtcaggacgagaaagaagaccggtctgatgctgacaggcatggcaatctcaagggctttgtcgttgctgatgacgaaatcgaggaggagcagaccgaagacgaagcagagaccggttccagacgttcccgccaggaagactcggacgtacctaagctttcggtcgtcaaagaagaggttgagactgagtcgaacacttatgatcctttcgggtcatatcatatcaaaggagagaccaaggctgagctcggaagcgactatgctcttgagtctgatcgtgtcaaagaagagatgaagcatgagtcagacactgacgatacctttggatctaagtctgctaaatatgccgatggagtcatcgaggagacgccgaccgagtctggcgccgatagtgacgactcattgccttccatcagccagattattcttcaggtcggcaagaaagacaacaacaagcgcaatcatgaatacctcagtgactcttctgaacagagtatgagagacgcacaacagaaacgagccaggctggggaagactagcaggcgtaacccactctctgactctgacgatgagtctgttggcgtgcattctggtcctagcgtcaagaatagacttaagcccaagcccaaaccctacagtccgaagaagatcgatgccagtgctgcaacattacagcgaaagtacttccagacccttagaaaggactgggagccgagctctaaaaccgacaaagcaatggagattctggagatgattcgccgcgagtatcctgacgagaaaacaattgtcttttctcagtttacgtcgtttcttgacctaatggagatcccaatccagaatgctcggttcaactactgtcggtttgatggcagcatgacggcccaggcccgcaacgagtccgtcgagaaattcatgtacagccgcaacatgaaggtcatgctgatcagtctaaaagccggcaacgctggcttgaatctctacgctgccactcgagtcatcatgcttgatccgttttggaacccctccgtcgaggatcaagcaattgcccgtgcccatcgcttaggccagacgaagccagtgacagcttaccgcatcctggtcaagaacacggtcgaggatcgcatcctcgagctgcaagagaaaaagcgcggtatcgtacaggaagtattaggcgcagaggcggctggcaccgccaccggcctttcgatgcaccagatcatgaatctgttcggcagcttcaccagaaacaacgacagctactaa

SEQ ID NO: 24257 - protein, 966 aa, Muscodor strobelii
  misc_feature: SGI Peptide ID NO. 568268
  misc_feature (823)..(901): Pfam Id: PF00271 Pfam Desc: Helicase conserved C-terminal domain
  misc_feature (124)..(416): Pfam Id: PF00176 Pfam Desc: SNF2 family N-terminal domain
  misc_feature (90)..(582): NCBI GI: 171683845 Blast Desc: protein product [Podospora anserina] gi|170941883|emb|CAP67535.1| protein product [Podospora anserina]
  misc_feature (105)..(585): NCBI GI: 156040810 Blast Desc: SS1G_11383 [Sclerotinia sclerotiorum 1980] gi|154695767|gb|EDN95505.1| SS1G_11383 [Sclerotinia sclerotiorum 1980]
  misc_feature (75)..(547): NCBI GI: 242772478 Blast Desc: SWI/SNF family DNA-dependent ATPase Ris1, [Talaromyces stipitatus ATCC 10500] gi|218721662|gb|EED21080.1| SWI/SNF family DNA-dependent ATPase Ris1, [Talaromyces stipitatus ATCC 10500]
  misc_feature (33)..(594): NCBI GI: 240111875 Blast Desc: SNF2 family N-terminal domain containing protein [Coccidioides posadasii C735 delta SOWgp]
  misc_feature (75)..(591): NCBI GI: 238487276 Blast Desc: SWI/SNF family DNA-dependent ATPase Ris1, [Aspergillus flavus NRRL3357] gi|220699755|gb|EED56094.1| SWI/SNF family DNA-dependent ATPase Ris1, [Aspergillus flavus NRRL3357]
  misc_feature (75)..(590): NCBI GI: 169770325 Blast Desc: [Aspergillus oryzae RIB40] gi|83767491|dbj|BAE57630.1| protein product [Aspergillus oryzae]
  misc_feature (15)..(572): NCBI GI: 115390074 Blast Desc: conserved [Aspergillus terreus NIH2624] gi|114194938|gb|EAU36638.1| conserved [Aspergillus terreus NIH2624]
  misc_feature (101)..(578): NCBI GI: 256734115 Blast Desc: NECHADRAFT_105989 [Nectria haematococca mpVI 77-13-4]
  misc_feature (49)..(544): NCBI GI: 121700232 Blast Desc: SWI/SNF family DNA-dependent ATPase Ris1, [Aspergillus clavatus NRRL 1] gi|119396523|gb|EAW06955.1| SWI/SNF family DNA-dependent ATPase Ris1, [Aspergillus clavatus NRRL 1]
  misc_feature (90)..(548): NCBI GI: 70992713 Blast Desc: SWI/SNF family DNA-dependent ATPase Ris1 [Aspergillus fumigatus Af293] gi|66848838|gb|EAL89167.1| SWI/SNF family DNA-dependent ATPase Ris1, [Aspergillus fumigatus Af293]
  misc_feature: Useful for introducing or modulating the production of volatile compounds
MLKKWNSQIRRNRSGSGPSSSANMSYHQMIPVVSSSSSSGAGTFAPNQRLPGSWPSMSQYALPALSTDASTATTPSYATPSYDTDDSDVQEIPELPQLDTPRGNIPENERLPSPDALSRPLMPHQRIALTWLARQEKGPHKGAILADDMGLGKTMQALALILERPSTNTARKTTLVCAPTSLLAQWENEIRDKIKASHQLSVLKLHGRKKVGMTVAKMLEYDIVLTTYGTLAWEYTRVHEKKTFNGVLLLQSHAVFHRVILDEAHNIKKPSGKASLGASHLRSTYRLCMTGTPLMNRKLELYPLIRFLRVAKYEEQFNFKALSENALRNVLKDLLLRRTEKSKVDGKPIFTLPKLTIVTEEAEFSNDQAQFYQALEQRTQLEMNMYIKQGNPTRIYMHALLLLLRLRQACDHPFLLNDLTIPQGIDMTPSDMVKLARKLHPGVVKNIETRHHLGFTCPDCKKRTTNPVIVYPCGHHVCSDCISAMAANRETHQRREDDDDDDNKGAMIGGCPGNDCTTGMDSKHLICYQQFKEVYLYDNDEEDQYKSQDEKEDRSDADRHGNLKGFVVADDEIEEEQTEDEAETGSRRSRQEDSDVPKLSVVKEEVETESNTYDPFGSYHIKGETKAELGSDYALESDRVKEEMKHESDTDDTFGSKSAKYADGVIEETPTESGADSDDSLPSISQIILQVGKKDNNKRNHEYLSDSSEQSMRDAQQKRARLGKTSRRNPLSDSDDESVGVHSGPSVKNRLKPKPKPYSPKKIDASAATLQRKYFQTLRKDWEPSSKTDKAMEILEMIRREYPDEKTIVFSQFTSFLDLMEIPIQNARFNYCRFDGSMTAQARNESVEKFMYSRNMKVMLISLKAGNAGLNLYAATRVIMLDPFWNPSVEDQAIARAHRLGQTKPVTAYRILVKNTVEDRILELQEKKRGIVQEVLGAEAAGTATGLSMHQIMNLFGSFTRNNDSY

SEQ ID NO: 24258 - DNA, 4619 bp, Muscodor strobelii
  misc_feature: SGI EST ID NO. CUFF.57335.1
  misc_feature: Variant of the nucleotide sequence at SEQ ID NO 24256
gtaaggaggggcacacctgcagttgccgacgaccctgaagaattatgaatccttgccattatcattagcgtgctttacttttttagtctgttcacttcagcatcaaagatgggatgagaagcgacgcgggtaactacatgtctacattagataggtgtttgtacattcaatatgctcactcatagccaaggcaactacgacgtggccgagggcagaggaggaagcagcgccatggtcggattctctatttaaaggccatagcctcatggtgattctcttcgccgtctgtctcccatccctttcctcccaccccacaaaattacatcatcgcatttagcacaacgcatctttgcgccgactccattagagagtgcagcatctaccccaaaggtacctacaacttcaattttcctaattcacctgaacaaccgtcgccgcgcacctggcctcacgtcaggctgctgcgttgctgcgcctacctgcagcaattgccttgacaattgccttaggggcgcaaacctggagcctcgccgttctttctgcgcacacatctgtctgcattcaataaactctctttgtttcctactgcaggcctgccacagccttcgccgtctgtcacttccctcctcttgcaccattccacagacaacaggttcgccgccagcaaccctcctgtcatccgaaccctctattcctatctatgtagggacctcggcctaacctctcgtgttgccaactgtcctcacctatcggcgtcctctcttcctaatcctgccgccgacctcctaaccctcactcattgccgaccctgcatctctcttgcaagcgtcgacttaaatctttggaggccttgcacgccctgatcatctgatcgggtgtggcaactgtaactacaagtggaacagccagattcgccgtaaccgcagcggcagcggcccgtcgtcgtccgccaacatgagctatcatcagatgatccccgtcgtcagctcctcctccagtagcggggctggcaccttcgctcccaatcaacgcctgcccgggtcctggccctccatgagccaatatgccctgcccgctctctcgaccgatgcttctaccgccaccacaccgtcctacgccacaccctcatacgacaccgatgactcagatgtgcaggagatcccggagctgccccaactcgacaccccacgaggcaacatccccgagaacgaacgtcttcccagccccgatgctcttagcagacctctcatgccccatcagcgcatcgccctcacctggctcgcccgccaggagaaaggccctcacaaaggtgccatcctcgccgacgacatgggcttgggcaagaccatgcaggccctggctctgatcctcgagcgcccttcgaccaacactgcccgcaagacgacactcgtctgtgccccaaccagtttgcttgcgcagtgggagaacgagatccgagacaaaatcaaggcctcgcaccagttgtctgtcctcaaactccatggccgcaagaaagtcggcatgactgtcgccaagatgctcgagtacgatattgtcttgaccacgtatggtacccttgcgtgggagtacacccgggtccacgaaaagaagacttttaatggcgtcttgcttctccagtcccacgctgtcttccatcgtgtcattctcgacgaggcgcacaacatcaagaagcccagtgggaaggcatccctcggtgcttcccaccttcgctccacatatcgcctgtgtatgacgggcacgcctctgatgaatcgtaaactcgagctatatcccctcatacgtttcttgcgagtcgccaagtatgaagagcagttcaacttcaaggcgctgagtgagaatgcgctccgtaacgttctgaaggatctcttgttgcgacgaacagagaagtcaaaggttgatggaaagcccatctttactcttccgaagctcaccatcgttaccgaggaagctgagttcagcaacgaccaagctcagttctaccaagcgctagagcaacgaacgcaactcgagatgaacatgtatatcaagcagggtaaccctacacgtatctacatgcatgccctgctcttgcttctccgccttcgacaggcctgcgatcatcccttcctgctcaacgatctcacgatccctcaaggcattgatatgacgcccagcgacatggtcaagttggcccgcaagctacacccgggtgtcgtgaaaaatatcgagacacgtcatcatcttggtttcacttgcccggattgtaagaaaaggacgacaaatcctgtcatcgtatatccctgtggacatcatgtatgcagtgactgtatttcagcgatggccgccaacagggaaacacatcaaaggcgtgaagatgacgatgatgacgacaacaagggagccatgattggaggctgccctggaaatgattgtactactgggatggactcaaagcatctcatatgctatcaacagttcaaggaggtttatctctacgataacgacgaagaggaccagtacaaaagtcaggacgagaaagaagaccggtctgatgctgacaggcatggcaatctcaagggctttgtcgttgctgatgacgaaatcgaggaggagcagaccgaagacgaagcagagaccggttccagacgttcccgccaggaagactcggacgtacctaagctttcggtcgtcaaagaagaggttgagactgagtcgaacacttatgatcctttcgggtcatatcatatcaaaggagagaccaaggctgagctcggaagcgactatgctcttgagtctgatcgtgtcaaagaagagatgaagcatgagtcagacactgacgatacctttggatctaagtctgctaaatatgccgatggagtcatcgaggagacgccgaccgagtctggcgccgatagtgacgactcattgccttccatcagccagattattcttcaggtcggcaagaaagacaacaacaagcgcaatcatgaatacctcagtgactcttctgaacagagtatgagagacgcacaacagaaacgagccaggctggggaagactagcaggcgtaacccactctctgactctgacgatgagtctgttggcgtgcattctggtcctagcgtcaagaatagacttaagcccaagcccaaaccctacagtccgaagaagatcgatgccagtgctgcaacattacagcgaaagtacttccagacccttagaaaggactgggagccgagctctaaaaccgacaaagcaatggagattctggagatgattcgccgcgagtatcctgacgagaaaacaattgtcttttctcagtttacgtcgtttcttgacctaatggagatcccaatccagaatgctcggttcaactactgtcggtttgatggcagcatgacggcccaggcccgcaacgagtccgtcgagaaattcatgtacagccgcaacatgaaggtcatgctgatcagtctaaaagccggcaacgctggcttgaatctctacgctgccactcgagtcatcatgcttgatccgttttggaacccctccgtcgaggatcaagcaattgcccgtgcccatcgcttaggccagacgaagccagtgacagcttaccgcatcctggtcaagaacacggtcgaggatcgcatcctcgagctgcaagagaaaaagcgcggtatcgtacaggaagtattaggcgcagaggcggctggcaccgccaccggcctttcgatgcaccagatcatgaatctgttcggcagcttcaccagaaacaacgacagctactaaaaaccaacttggaatgctttggccgcctcttttactgaaatttgctttttatgacggcgttgagggacaggagttcaggaacacgtgataccccggaacttcgacggttggccacggtgatggtccgatatatgatctagctacctacacggacgtagcagagcattgctggagattgctttgctattccacgatagttgcattcagggcaggcgtttgagggggaaggacgtctatttatctcggtcctgaccgtgatgatgcatcagggtgtgatgtcgtcatatacaaaaatacggctacgcatggttgcaaaagggctagggctcttgctacgttgtaaaatagagagacagtcaggcagtcagaccctcacgggcagaatgacatcgctttaccaggtagctcaagtagccagtgtcgctaggcagcaacactaaaaagagagacactacaaaattttcatctccccaaaagagtagtatcttgatgtcccttgaatgacattgccttgttttgtgaagatatatggtgtggctacttagtcttgaatcgatatttgtattgtaattggagatgagcattggaaactaggcggcgcagatacgcaagattcgtagccgtcctttggcgaaatgatggccggcaaaagttgaaagagctatggtagggaatcttgaatatcgaagcatgatgcacccttatattgaaattggaggacatagtgtaattggttacaattgctgaattgatcttgtttgactctgtcagactgccctgtagataaccaacggctcgaagtgcaagactgagtactgcactgcgtcaatttg

SEQ ID NO: 24259 - DNA, 1536 bp, Muscodor strobelii
  misc_feature: SGI cDNA ID NO. 568269
  misc_feature: Encodes the peptide sequence at SEQ ID NO 24260
atgtcgagtgacgaggagaggggtcacataacgacctccggcgatgagaagcatggcgatctgtacgacgatacgtatgtgtcaaatgagactggcattttggctgccttgcggagattcgaggcgaggatggacaagaagctgggtgtcgaatccgaggctatagaacgcaagcggccagaggataaacaccccgtcccttggcacgaacagctgagcatggctctgttgtgggcatcaggcacaatgaacacctcgtgcttcgctaccgggttcctcggttgggaattcggtctgtcgctcaaacaagccatcctcatcagcattttcgcgtcaatcttgggcggcgccgtgactggcttctccgcgatcttcggggctgtgacaggcctgcgccagatcagtgtctcccgctatgcctttggctggtggccaaataaaatcgttgccttcctcaatgctgtcgtgcaaattggctgggctgccgtcgcatgtatcactggtggtttggctctgactgctgttgccgacggacatctgtccctggtcgtcggcatcatcatcctggctatcgttgctacggtgatctctgtagtcggcctgagggcaatcttggtctacgagcgctacgcctggattatcttcttcactattttcctgatctttttcggcgaaacgggtcgctatgcggacaataagacaccaaccgaattgaccggcctcgaccttcggggaacggttctcagcctcattgccattatctacggtagctctgcctcctggtgtacgatggcaagtgattattatgtccattaccccgtgaacgtctctcgcacaaaggtgttcttcatgacaacgtttggtatcgctatccccacctcgatcggcctcgtagctggctgcgtcgtcgcttcggcgctcaacaacagacctgactggtccgagacatacgagcacgatggcgttggtttcctaatccagaccatgctctaccctcgcggattcgccaagttcatcttgacgctgcttgtgctgtccggcatcaatgtgaacgtcatctcaatctacagctctgctatatcatgccaacagtttgcgcgtccctttgccaaggtcccccgtttcatgtggacgctgctctgcttcgtcatcatccttgctctcgcgcttggcggtcgcgctcagctgaatgtatacctgcagaactttctgtcgcttctcggctactggtccacacagtacttcatcatcctcttcgccgagcacatgatcttccgcaaggcaaactttgacaattacgacctggaggcttggaacgatcccgagcgcctgccccacggaatcgctgcgctagttgctttcctgtttggtgttggggggtggctcatcggtatggtggagacatggttcactggtcctgttggtggctccatcggtgcttatggtggtgatgttgccaatgagattactctggctgtcactttcatcgtatttgtgcctgcgagatacttggagcttaagtattttggcaagtaa

SEQ ID NO: 24260 - protein, 511 aa, Muscodor strobelii
  misc_feature: SGI Peptide ID NO. 568269
  misc_feature (65)..(472): Pfam Id: PF02133 Pfam Desc: Permease for cytosine/purines, uracil, thiamine, allantoin
  misc_feature (65)..(314): Pfam Id: PF02133 Pfam Desc: Permease for cytosine/purines, uracil, thiamine, allantoin
  misc_feature (3)..(511): NCBI GI: 169609044 Blast Desc: SNOG_07607 [Phaeosphaeria nodorum SN15] gi|160701770|gb|EAT85073.2| SNOG_07607 [Phaeosphaeria nodorum SN15]
  misc_feature (1)..(511): NCBI GI: 242805464 Blast Desc: nucleoside transporter, [Talaromyces stipitatus ATCC 10500] gi|218715160|gb|EED14582.1| nucleoside transporter, [Talaromyces stipitatus ATCC 10500]
  misc_feature (27)..(511): NCBI GI: 212545671 Blast Desc: nucleoside transporter, [Penicillium marneffei ATCC 18224] gi|210064509|gb|EEA18604.1| nucleoside transporter, [Penicillium marneffei ATCC 18224]
  misc_feature (30)..(511): NCBI GI: 46127635 Blast Desc: FG08195.1 [Gibberella zeae PH-1]
  misc_feature (2)..(501): NCBI GI: 67901960 Blast Desc: AN7967.2 [Aspergillus nidulans FGSC A4] gi|40740431|gb|EAA59621.1| AN7967.2 [Aspergillus nidulans FGSC A4] gi|259480716|tpe|CBF73614.1| TPA: nucleoside transporter, A4]
  misc_feature (4)..(511): NCBI GI: 189204482 Blast Desc: purine-cytosine permease FCY21 [Pyrenophora tritici-repentis Pt-1C-BFP] gi|187985675|gb|EDU51163.1| purine-cytosine permease FCY21 [Pyrenophora tritici-repentis
  misc_feature (4)..(511): NCBI GI: 164655019 Blast Desc: MGL_4202 [Malassezia globosa CBS 7966] gi|159102523|gb|EDP41427.1| MGL_4202 [Malassezia globosa CBS 7966]
  misc_feature (37)..(511): NCBI GI: 164654960 Blast Desc: MGL_4254 [Malassezia globosa CBS 7966] gi|159102492|gb|EDP41399.1| MGL_4254 [Malassezia globosa CBS 7966]
  misc_feature (13)..(511): NCBI GI: 169770011 Blast Desc: [Aspergillus oryzae RIB40] gi|83767334|dbj|BAE57473.1| protein product [Aspergillus oryzae]
  misc_feature (13)..(511): NCBI GI: 238487648 Blast Desc: nucleoside transporter, [Aspergillus flavus NRRL3357] gi|220699941|gb|EED56280.1| nucleoside transporter, [Aspergillus flavus NRRL3357]
MSSDEERGHITTSGDEKHGDLYDDTYVSNETGILAALRRFEARMDKKLGVESEAIERKRPEDKHPVPWHEQLSMALLWASGTMNTSCFATGFLGWEFGLSLKQAILISIFASILGGAVTGFSAIFGAVTGLRQISVSRYAFGWWPNKIVAFLNAVVQIGWAAVACITGGLALTAVADGHLSLVVGIIILAIVATVISVVGLRAILVYERYAWIIFFTIFLIFFGETGRYADNKTPTELTGLDLRGTVLSLIAIIYGSSASWCTMASDYYVHYPVNVSRTKVFFMTTFGIAIPTSIGLVAGCVVASALNNRPDWSETYEHDGVGFLIQTMLYPRGFAKFILTLLVLSGINVNVISIYSSAISCQQFARPFAKVPRFMWTLLCFVIILALALGGRAQLNVYLQNFLSLLGYWSTQYFIILFAEHMIFRKANFDNYDLEAWNDPERLPHGIAALVAFLFGVGGWLIGMVETWFTGPVGGSIGAYGGDVANEITLAVTFIVFVPARYLELKYFGK

SEQ ID NO: 24261 - DNA, 1952 bp, Muscodor strobelii
  misc_feature: SGI EST ID NO. CUFF.57191.0
  misc_feature: Variant of the nucleotide sequence at SEQ ID NO 24259
ctcgaaaatcatccacttggagctagatacgatgacccttctgaaaaggtgggctaactagttgagcaggggaaagcttctcataaatagacgaattcccaacgtcgcaagccaagacgggagcgcaatcttggcttttctttggttgtgtgcacgacatcttagttcccctccaagaaactctcaaccccaccattgccaagattcagtttctctggtcagatttctctcaaccgccaattattgcctctgccagcttttcaggtcacacatcttcggcgcgcaccagcactgtttcacaagatgtcgagtgacgaggagaggggtcacataacgacctccggcgatgagaagcatggcgatctgtacgacgatacgtatgtgtcaaatgagactggcattttggctgccttgcggagattcgaggcgaggatggacaagaagctgggtgtcgaatccgaggctatagaacgcaagcggccagaggataaacaccccgtcccttggcacgaacagctgagcatggctctgttgtgggcatcaggcacaatgaacacctcgtgcttcgctaccgggttcctcggttgggaattcggtctgtcgctcaaacaagccatcctcatcagcattttcgcgtcaatcttgggcggcgccgtgactggcttctccgcgatcttcggggctgtgacaggcctgcgccagatcagtgtctcccgctatgcctttggctggtggccaaataaaatcgttgccttcctcaatgctgtcgtgcaaattggctgggctgccgtcgcatgtatcactggtggtttggctctgactgctgttgccgacggacatctgtccctggtcgtcggcatcatcatcctggctatcgttgctacggtgatctctgtagtcggcctgagggcaatcttggtctacgagcgctacgcctggattatcttcttcactattttcctgatctttttcggcgaaacgggtcgctatgcggacaataagacaccaaccgaattgaccggcctcgaccttcggggaacggttctcagcctcattgccattatctacggtagctctgcctcctggtgtacgatggcaagtgattattatgtccattaccccgtgaacgtctctcgcacaaaggtgttcttcatgacaacgtttggtatcgctatccccacctcgatcggcctcgtagctggctgcgtcgtcgcttcggcgctcaacaacagacctgactggtccgagacatacgagcacgatggcgttggtttcctaatccagaccatgctctaccctcgcggattcgccaagttcatcttgacgctgcttgtgctgtccggcatcaatgtgaacgtcatctcaatctacagctctgctatatcatgccaacagtttgcgcgtccctttgccaaggtcccccgtttcatgtggacgctgctctgcttcgtcatcatccttgctctcgcgcttggcggtcgcgctcagctgaatgtatacctgcagaactttctgtcgcttctcggctactggtccacacagtacttcatcatcctcttcgccgagcacatgatcttccgcaaggcaaactttgacaattacgacctggaggcttggaacgatcccgagcgcctgccccacggaatcgctgcgctagttgctttcctgtttggtgttggggggtggctcatcggtatggtggagacatggttcactggtcctgttggtggctccatcggtgcttatggtggtgatgttgccaatgagattactctggctgtcactttcatcgtatttgtgcctgcgagatacttggagcttaagtattttggcaagtaaatacagcatagatagaacgctgagggctggggagaactagtatctatttagacttggatagaacttaagaagtaacttctaaatgacagttaattaccattaatgtataacgg

SEQ ID NO: 24262 - DNA, 747 bp, Muscodor strobelii
  misc_feature: SGI cDNA ID NO. 568270
  misc_feature: Encodes the peptide sequence at SEQ ID NO 24263
atggcaagtgattattatgtccattaccccgtgaacgtctctcgcacaaaggtgttcttcatgacaacgtttggtatcgctatccccacctcgatcggcctcgtagctggctgcgtcgtcgcttcggcgctcaacaacagacctgactggtccgagacatacgagcacgatggcgttggtttcctaatccagaccatgctctaccctcgcggattcgccaagttcatcttgacgctgcttgtgctgtccggcatcaatgtgaacgtcatctcaatctacagctctgctatatcatgccaacagtttgcgcgtccctttgccaaggtcccccgtttcatgtggacgctgctctgcttcgtcatcatccttgctctcgcgcttggcggtcgcgctcagctgaatgtatacctgcagaactttctgtcgcttctcggctactggtccacacagtacttcatcatcctcttcgccgagcacatgatcttccgcaaggcaaactttgacaattacgacctggaggcttggaacgatcccgagcgcctgccccacggaatcgctgcgctagttgctttcctgtttggtgttggggggtggctcatcggtatggtggagacatggttcactggtcctgttggtggctccatcggtgcttatggtggtgatgttgccaatgagattactctggctgtcactttcatcgtatttgtgcctgcgagatacttggagcttaagtattttggcaagtaa

SEQ ID NO: 24263 - protein, 248 aa, Muscodor strobelii
  misc_feature: SGI Peptide ID NO. 568270
  misc_feature (1)..(248): NCBI GI: 169609044 Blast Desc: SNOG_07607 [Phaeosphaeria nodorum SN15] gi|160701770|gb|EAT85073.2| SNOG_07607 [Phaeosphaeria nodorum SN15]
  misc_feature (1)..(248): NCBI GI: 242805464 Blast Desc: nucleoside transporter, [Talaromyces stipitatus ATCC 10500] gi|218715160|gb|EED14582.1| nucleoside transporter, [Talaromyces stipitatus ATCC 10500]
  misc_feature (1)..(248): NCBI GI: 212545671 Blast Desc: nucleoside transporter, [Penicillium marneffei ATCC 18224] gi|210064509|gb|EEA18604.1| nucleoside transporter, [Penicillium marneffei ATCC 18224]
  misc_feature (1)..(238): NCBI GI: 67901960 Blast Desc: AN7967.2 [Aspergillus nidulans FGSC A4] gi|40740431|gb|EAA59621.1| AN7967.2 [Aspergillus nidulans FGSC A4] gi|259480716|tpe|CBF73614.1| TPA: nucleoside transporter, A4]
  misc_feature (1)..(248): NCBI GI: 46127635 Blast Desc: FG08195.1 [Gibberella zeae PH-1]
  misc_feature (1)..(248): NCBI GI: 189204482 Blast Desc: purine-cytosine permease FCY21 [Pyrenophora tritici-repentis Pt-1C-BFP] gi|187985675|gb|EDU51163.1| purine-cytosine permease FCY21 [Pyrenophora tritici-repentis
  misc_feature (1)..(248): NCBI GI: 164655019 Blast Desc: MGL_4202 [Malassezia globosa CBS 7966] gi|159102523|gb|EDP41427.1| MGL_4202 [Malassezia globosa CBS 7966]
  misc_feature (1)..(248): NCBI GI: 164654960 Blast Desc: MGL_4254 [Malassezia globosa CBS 7966] gi|159102492|gb|EDP41399.1| MGL_4254 [Malassezia globosa CBS 7966]
  misc_feature (4)..(248): NCBI GI: 238487648 Blast Desc: nucleoside transporter, [Aspergillus flavus NRRL3357] gi|220699941|gb|EED56280.1| nucleoside transporter, [Aspergillus flavus NRRL3357]
  misc_feature (4)..(248): NCBI GI: 169770011 Blast Desc: [Aspergillus oryzae RIB40] gi|83767334|dbj|BAE57473.1| protein product [Aspergillus oryzae]
MASDYYVHYPVNVSRTKVFFMTTFGIAIPTSIGLVAGCVVASALNNRPDWSETYEHDGVGFLIQTMLYPRGFAKFILTLLVLSGINVNVISIYSSAISCQQFARPFAKVPRFMWTLLCFVIILALALGGRAQLNVYLQNFLSLLGYWSTQYFIILFAEHMIFRKANFDNYDLEAWNDPERLPHGIAALVAFLFGVGGWLIGMVETWFTGPVGGSIGAYGGDVANEITLAVTFIVFVPARYLELKYFGK

SEQ ID NO: 24264 - DNA, 1952 bp, Muscodor strobelii; identical to SEQ ID NO: 24261
  misc_feature: SGI EST ID NO. CUFF.57191.0
  misc_feature: Variant of the nucleotide sequence at SEQ ID NO 24262

SEQ ID NO: 24265 - DNA, 2994 bp, Muscodor strobelii
  misc_feature: SGI cDNA ID NO. 568271
  misc_feature: Encodes the peptide sequence at SEQ ID NO 24266
atggcggcaacgctgagcggcacgcagcgagtgcgatcccccttcttcccacgtgccgatgccgcggtgctgtcgtcaaaacagtacggccctccgccaacccgtccgacttctatctggcccgtcttcgacacggagaacatcggcaagcccatcacgccgtggcaccgcgagacccaagccgagtacttccctcccaagaccggagagtatgccccttcctctatcccagagaaaccgggccaatgcctcgccgaccgctatcttcgcgctacgctggcacacaacgaacacctacgcctgtcgatgctgtggtactacacccgcgacatcttcgaccaacacgagtttctctgtgggctacaggagaaacttgcagtcgcgcaggagtcttcgggttgggagtacgtcgtcattggcctccttgatatccatgtctacatccgccttgccacccttggccttccactggccatcttgccccgtggagagactatctgtgctcataccatctcgcagccacccggttctgtgttcctgatgccaaatatgatggaagactggaggttctcggagtgcccctatgtggagtccgggggcctggttgcctacgccggtgtgcccctcagaatgcagaacgagactggcgagactgttggtcttggctcgctgtgtgtggcctctggcacggcgaagccacctttgacaaaagctcagcagagcacgcttagccgtgttgctgactgggtagtatcagatattatccagtgtgctcgcgcaaggcgccagcaggagcgacagagaatgggcaaactgatttcgatggcgcagatcgaggtggatgaagccattgccgaggatccagtcttccgaatcctcgaaactgcatacccaggtgccactgtcagccttcagtcgtctaagctctcctttatcgaagtggaggggagaggtccaatcctatcttccgaactggaagacggtatatgggaagatgtcaactatctggatgagtttatcgcaaactcgaatcacctagatttcccttgcgaccgcgttgtgcgcgtcatctctgccaaatgtgacagtgtctcgggtccatctcttttggtcattggctcgaaggattttcgacttgtcttcgatgatattgatgcttggttcgtccaggcttgtgccaccatgctctcgcaaatatggcacaagcggctccttgctgaagccatgcgagcaaaggagaaattcctcaggggcttctcacatcaacttcgtacccccatccatggcatccttggctccgctgaactcctcgcggaggagttgaagccaaataatctccgcgccaaggccgaccaagtgtcagaaatactgcaatcgatcccatccgatcgacctggcgaacattccatctatctcgatactatcaagacagccggtcgcgacttaatttcaatcgtgaacaatatgatcactctcaataaatgggccgatgttgcgataaaggctcgaaactatgccgcaatgtccgtcgcggccatcgaaaatgacttggtccaggaggtagagagaacactatcagatgattcgcggtacaaagcctctgtcctttttgaccatgatttgccagctacttatgatagcctacgaatagacgctggtcttctccgcgacggccttctgcctctgattttcaacgctgtccagaacacgcctgaaggtattgtcactgtgacgatgtcgttacggccggacagtaaagaatttgttgtagatgtgagggatacgggtcgaggcattcatcctgatgaccaacaacgcatctttgagccttacgaaaagatcgaccagcactcaactggcgccggacttggattaacgcttgctgtgaaatttgcaagcctcttgcatggctccatcagtttagtgtcctcggaacctggacgcggatcgcatttcagagccatattccacgaagttgactgcctccacgcagccttcccgcagcgtcagctagtgtcgaagtttgaacatctaccatccaaaatttgcataacccagtccgacacggatcgcacttgctcgtttcaccttggtcaatttctgatgcgccagggttttacgttagtcgacaacgatacggaagacagttttgcagttttagaactcaaatccgacttgaagcagtttcgaacactgatctcacaaatgttgccaaatcgcataattatttgtatcattccgatagcaggcgtcgagccggtctttgaagcaccgcaaaacgtcatttgcatccgtggccccttttcggctgcgagcctgagcccggtgctccaagaagcagacgagatggctaggaagatcaaagcctcgacagatctcgccagccatgtgaagcaattatcgacaatgacattactagatgagaagacgagactacaagatcatacacctccatctaacgggagtatttcccccaactccgacgtagctacgatcactccgcctcggtcgccgcaattatccggcgcaaatgacgcgagtatgagtattcccatattccctagcgttgctaccaccaccaaacctttggctttacttgtggatgataataatattaatcttcgcattatgcaaatgtattgccaaaagcgaggattggcgtacgtttgtgcgatggatggtcggtcggctgtcgagcagttcacgaaacagcaaaccatgttcttcaacggcgaaggtccgcctattcatctaatcctgatggacctgcagatgcccgtgtgtgatggcatcactgctaccaaagagatacgactcctagagaaacagaacaattggggaagaagcgtggtgttcatcgtgacaggtcaagattcaccaacagacaaaacggacgctcaagacgctgatgccgatgactactatgtgaagcctgtcgcagtcaagactctcgatcgcggagtcaagcgttacttcccgttgtttgcatcataa

SEQ ID NO: 24266 - protein, 997 aa, Muscodor strobelii
  misc_feature: SGI Peptide ID NO. 568271
  misc_feature (550)..(659): Pfam Id: PF02518 Pfam Desc: Histidine kinase-, DNA gyrase B-, and HSP90-like ATPase
  misc_feature (411)..(498): Pfam Id: PF00512 Pfam Desc: His Kinase A (phosphoacceptor) domain
  misc_feature (862)..(989): Pfam Id: PF00072 Pfam Desc: Response regulator receiver domain
  misc_feature (15)..(995): NCBI GI: 256721549 Blast Desc: NECHADRAFT_37376 [Nectria haematococca mpVI 77-13-4]
  misc_feature (15)..(993): NCBI GI: 39726369 Blast Desc: histidine kinase HHK3p [Gibberella moniliformis]
  misc_feature (15)..(993): NCBI GI: 46126491 Blast Desc: FG07623.1 [Gibberella zeae PH-1]
  misc_feature (6)..(993): NCBI GI: 39656319 Blast Desc: histidine kinase HHK3p [Cochliobolus heterostrophus]
  misc_feature (103)..(493): NCBI GI: 261361683 Blast Desc: histidine kinase [Verticillium albo-atrum VaMs.102]
  misc_feature (15)..(571): NCBI GI: 189191070 Blast Desc: conserved [Pyrenophora tritici-repentis Pt-1C-BFP] gi|187973480|gb|EDU40979.1| conserved [Pyrenophora tritici-repentis Pt-1C-BFP]
  misc_feature (670)..(993): NCBI GI: 189191070 Blast Desc: conserved [Pyrenophora tritici-repentis Pt-1C-BFP] gi|187973480|gb|EDU40979.1| conserved [Pyrenophora tritici-repentis Pt-1C-BFP]
  misc_feature (470)..(659): NCBI GI: 169606718 Blast Desc: SNOG_06407 [Phaeosphaeria nodorum SN15] gi|160707063|gb|EAT86238.2| SNOG_06407 [Phaeosphaeria nodorum SN15]
  misc_feature (759)..(993): NCBI GI: 169606718 Blast Desc: SNOG_06407 [Phaeosphaeria nodorum SN15] gi|160707063|gb|EAT86238.2| SNOG_06407 [Phaeosphaeria nodorum SN15]
  misc_feature (378)..(986): NCBI GI: 169596977 Blast Desc: SNOG_01265 [Phaeosphaeria nodorum SN15] gi|160707415|gb|EAT90914.2| SNOG_01265 [Phaeosphaeria nodorum SN15]
MAATLSGTQRVRSPFFPRADAAVLSSKQYGPPPTRPTSIWPVFDTENIGKPITPWHRETQAEYFPPKTGEYAPSSIPEKPGQCLADRYLRATLAHNEHLRLSMLWYYTRDIFDQHEFLCGLQEKLAVAQESSGWEYVVIGLLDIHVYIRLATLGLPLAILPRGETICAHTISQPPGSVFLMPNMMEDWRFSECPYVESGGLVAYAGVPLRMQNETGETVGLGSLCVASGTAKPPLTKAQQSTLSRVADWVVSDIIQCARARRQQERQRMGKLISMAQIEVDEAIAEDPVFRILETAYPGATVSLQSSKLSFIEVEGRGPILSSELEDGIWEDVNYLDEFIANSNHLDFPCDRVVRVISAKCDSVSGPSLLVIGSKDFRLVFDDIDAWFVQACATMLSQIWHKRLLAEAMRAKEKFLRGFSHQLRTPIHGILGSAELLAEELKPNNLRAKADQVSEILQSIPSDRPGEHSIYLDTIKTAGRDLISIVNNMITLNKWADVAIKARNYAAMSVAAIENDLVQEVERTLSDDSRYKASVLFDHDLPATYDSLRIDAGLLRDGLLPLIFNAVQNTPEGIVTVTMSLRPDSKEFVVDVRDTGRGIHPDDQQRIFEPYEKIDQHSTGAGLGLTLAVKFASLLHGSISLVSSEPGRGSHFRAIFHEVDCLHAAFPQRQLVSKFEHLPSKICITQSDTDRTCSFHLGQFLMRQGFTLVDNDTEDSFAVLELKSDLKQFRTLISQMLPNRIIICIIPIAGVEPVFEAPQNVICIRGPFSAASLSPVLQEADEMARKIKASTDLASHVKQLSTMTLLDEKTRLQDHTPPSNGSISPNSDVATITPPRSPQLSGANDASMSIPIFPSVATTTKPLALLVDDNNINLRIMQMYCQKRGLAYVCAMDGRSAVEQFTKQQTMFFNGEGPPIHLILMDLQMPVCDGITATKEIRLLEKQNNWGRSVVFIVTGQDSPTDKTDAQDADADDYYVKPVAVKTLDRGVKRYFPLFAS

SEQ ID NO: 24267 - DNA, 4364 bp, Muscodor strobelii
  misc_feature: SGI EST ID NO. CUFF.57197.0
  misc_feature: Variant of the nucleotide sequence at SEQ ID NO 24265
cacgacagcaagccgaggggatcgtgggcgacgccagccgtcagtcgctatggtcgcaacctcggtgtgaccaccagtgcttgactgcgcttgaccggccatgctagagcaaaatggctagtggctggccccaggacccttcgtccccataggaaaacgaggctcaactacctgcacaaagcatctacatgtccagggtttatcagaacgtgcacagaattcatctcctgtgcagcctacgatacgacgtgtcacagtcatctggatgaattaggtatgtcctggcagccgtgctctcagcgtcactattaggtacgctatacccgccagctgcagtctctcgttcctgtgcatccgggtgctcgagggttcgtttgcatcgctatcgttccatcgctgtcactgtcgccgtggtataggccactcgtggaatccaaagaatggcggcaacgctgagcggcacgcagcgagtgcgatcccccttcttcccacgtgccgatgccgcggtgctgtcgtcaaaacagtacggccctccgccaacccgtccgacttctatctggcccgtcttcgacacggagaacatcggcaagcccatcacgccgtggcaccgcgagacccaagccgagtacttccctcccaagaccggagagtatgccccttcctctatcccagagaaaccgggccaatgcctcgccgaccgctatcttcgcgctacgctggcacacaacgaacacctacgcctgtcgatgctgtggtactacacccgcgacatcttcgaccaacacgagtttctctgtgggctacaggagaaacttgcagtcgcgcaggagtcttcgggttgggagtacgtcgtcattggcctccttgatatccatgtctacatccgccttgccacccttggccttccactggccatcttgccccgtggagagactatctgtgctcataccatctcgcagccacccggttctgtgttcctgatgccaaatatgatggaagactggaggttctcggagtgcccctatgtggagtccgggggcctggttgcctacgccggtgtgcccctcagaatgcagaacgagactggcgagactgttggtcttggctcgctgtgtgtggcctctggcacggcgaagccacctttgacaaaagctcagcagagcacgcttagccgtgttgctgactgggtagtatcagatattatccagtgtgctcgcgcaaggcgccagcaggagcgacagagaatgggcaaactgatttcgatggcgcagatcgaggtggatgaagccattgccgaggatccagtcttccgaatcctcgaaactgcatacccaggtgccactgtcagccttcagtcgtctaagctctcctttatcgaagtggaggggagaggtccaatcctatcttccgaactggaagacggtatatgggaagatgtcaactatctggatgagtttatcgcaaactcgaatcacctagatttcccttgcgaccgcgttgtgcgcgtcatctctgccaaatgtgacagtgtctcgggtccatctcttttggtcattggctcgaaggattttcgacttgtcttcgatgatattgatgcttggttcgtccaggcttgtgccaccatgctctcgcaaatatggcacaagcggctccttgctgaagccatgcgagcaaaggagaaattcctcaggggcttctcacatcaacttcgtacccccatccatggcatccttggctccgctgaactcctcgcggaggagttgaagccaaataatctccgcgccaaggccgaccaagtgtcagaaatactgcaatcgatcccatccgatcgacctggcgaacattccatctatctcgatactatcaagacagccggtcgcgacttaatttcaatcgtgaacaatatgatcactctcaataaatgggccgatgttgcgataaaggctcgaaactatgccgcaatgtccgtcgcggccatcgaaaatgacttggtccaggaggtagagagaacactatcagatgattcgcggtacaaagcctctgtcctttttgaccatgatttgccagctacttatgatagcctacgaatagacgctggtcttctccgcgacggccttctgcctctgattttcaacgctgtccagaacacgcctgaaggtattgtcactgtgacgatgtcgttacggccggacagtaaagaatttgttgtagatgtgagggatacgggtcgaggcattcatcctgatgaccaacaacgcatctttgagccttacgaaaagatcgaccagcactcaactggcgccggacttggattaacgcttgctgtgaaatttgcaagcctcttgcatggctccatcagtttagtgtcctcggaacctggacgcggatcgcatttcagagccatattccacgaagttgactgcctccacgcagccttcccgcagcgtcagctagtgtcgaagtttgaacatctaccatccaaaatttgcataacccagtccgacacggatcgcacttgctcgtttcaccttggtcaatttctgatgcgccagggttttacgttagtcgacaacgatacggaagacagttttgcagttttagaactcaaatccgacttgaagcagtttcgaacactgatctcacaaatgttgccaaatcgcataattatttgtatcattccgatagcaggcgtcgagccggtctttgaagcaccgcaaaacgtcatttgcatccgtggccccttttcggctgcgagcctgagcccggtgctccaagaagcagacgagatggctaggaagatcaaagcctcgacagatctcgccagccatgtgaagcaattatcgacaatgacattactagatgagaagacgagactacaagatcatacacctccatctaacgggagtatttcccccaactccgacgtagctacgatcactccgcctcggtcgccgcaattatccggcgcaaatgacgcgagtatgagtattcccatattccctagcgttgctaccaccaccaaacctttggctttacttgtggatgataataatattaatcttcgcattatgcaaatgtattgccaaaagcgaggattggcgtacgtttgtgcgatggatggtcggtcggctgtcgagcagttcacgaaacagcaaaccatgttcttcaacggcgaaggtccgcctattcatctaatcctgatggacctgcagatgcccgtgtgtgatggcatcactgctaccaaagagatacgactcctagagaaacagaacaattggggaagaagcgtggtgttcatcgtgacaggtcaagattcaccaacagacaaaacggacgctcaagacgctgatgccgatgactactatgtgaagcctgtcgcagtcaagactctcgatcgcggagtcaagcgttacttcccgttgtttgcatcataatcgtggaggatcgtgctgccttacgaagaacattgacttcatgccatactgtcttttgaaaacctgacgagttcattcccctgattgtcagtcttgctcgtttacagaaatttcatgcatgatgcgagcatgatgcgaagcaggacgtcggcattactatcaatcaggcgcattccaacaacgccgcctttgccattcgcgtcactacgcccggaaaccctccttgcacgcattgtaccatataaaggttattttcagagggaaagtttcggagggatcaggttgtggagactctgaggactttagatttttgggggcgttccggaacgggaagaaaagctatcgaccaccaatttactgagaagctttgagtttccggtattggatgttgtcaaagatcatggcgttataaggagaatacgcgacgaatgatgagatacatatactaatgcgtacacgattgatcaattatctggcatttacgtgagatatctttgacctttctgctctctttttcgtcatcacttaatttctatgcagtcgtgtttgcgcatagtattcttgtgcactcgctgttaccatgtcccctctagagcatcgtcgctcgaacttcattctatctcgcttcagacgcgttgtctcacagtgccaataccgaccacaaacacgacaattcccacatcgtcaattccaacatactggtcagggttttccattttctctagatgtctcaattccggcacctcgtatggggggtttcgatctctccccctcctcaagggaaagggaggattgcgcgccagatttattcgcgcgctcatgaaaaggcaacgtcagcgtgatggatatcttgtcctgattcacaaacatccacgtagaaaggaagctagatgcaacataattggccaatatcacaatacaatagagcgg

SEQ ID NO: 24268 - DNA, 4431 bp, Muscodor strobelii
  misc_feature: SGI cDNA ID NO. 568272
  misc_feature: Encodes the peptide sequence at SEQ ID NO 24269
atgagcatggcgacatgtcccagcgattttacctttgggccaattgtgtccaattgtcgcggaggtgttgatgatttcaccatcaacttcgagaacatcgtcttatcgtcaataccatcgtcgctctttatacttttagcccttatcagactttggtatctttccaagtcaaagaggataccaagccgctcaacatttcgactattgaaacttctcattgcgacgctttatgccgcacttcagctctctatactagtcagcggctcacggactgcagctgagaaatcgttgacgacgcccgcgcgatcagtgtcattcgtagcatctgctttgatactacccttgaccgtgttagaagacacacgttcccgaagaccgtcgtttctacttagcacatatctgttttttactattctcttcgacaccgtgcaagtaaggacgcaatggcttgcgtcgatcgggttcaatcaaattctggtctcgaggttatacactacagcactggcaaccaagctggtgcttttagtcttagagaatgctccaaagccaacaaaaactaaccaatgccctgaagaaaccgcgggaatcttcagcctcgctacctatgcatggctgaataacaccttcttgaaggggtacaatagtatcctgtcattgaatgatctttcaacattagacagacaagttgcaacgcggcggctcgacgaaaagctatcaagcctccttgtatccggtccaaactctgactacacgaaaaatttctatcttgctaaaacacttggccgcgctctcgtaggcgcattacttctaccgattcttccgcgactagcattagtcggatttaggatatctcagcccctactactaaacagtcttctaagttacctggatgcaccttcctcagaggaggacttgccacaacggaagaatatcggatatggactcatcggggcgacaattttcatctacttcggcatagccacttcaacagcactatactggtactgccacgaaaggtttatctcaatgacgcgcggtgcactcgttgcggcaatataccggaaactcacccaacttcgttccgtcgacgtcaacgactcagcagctataacgttgatgagcacagacatagagcgtatccgcgtcggatttctcaacctccatgaattctgggcgagttcaatcgaagtagcgctcgcaagctggctattatacaccgaactcggtattgtcttcatcgcgccgttgatcgtagtcattggctgtgtcgcttgcgcctccgtcctcaatatctacacgggcccgcgacagaaacaatggatggaacgcatccaagtcagagttgcggagactgcgcgtatgcttgcgatcttgaaacagctgaggatatcggccctttctcagccggtggaggagtcaacacaaaagctgcgcgttgatgagctggacgtcgcgtctgcctataagagactttatgtgtctaacatggcgtttgggtttgcaccaattgctctctgtcctctaattacctttgccattgctgcacgtaacttagatgcgagcacaatcttcacttctttagcttatatcgttctcttggcagatccattacaggtcttgttcggagaaattccttatctcgtaactgcatttacgtgtcttgataggatacaggaatttctgtcacagtcaactcagactgaaagccgtcgttttatatctgaactttcgttaccgaatcgtgaagcaagtacgcccgagacgtatcccctcatcaaagtcgagaatgctacagtcggatggatcaaggaacacccaataatcaaggacgtcaatctacagatcccaacatctagtctcacgatggtgatcggcccagtaggctgtggaaaatcaactttgtgcaaagcactgctatcagaaattcctttcatagaaggcggaataaacatcaacatcgccgcagatcaattccgccccgcgttctgcgatcagacgccgtacatacatcaaggcagtgtccgtgataacatcattggatcgttgcccttcaacagcaaatcgtacaacgaggttctcgctgcgacattgatggatgaggacttgaaggccttcccgtacggtgatctaaccgttataggtggcaacgggacgaccttgagtggtggacagaaacaacgcgtggcgatcgctcgagctgtctatcatgatgcaaatttctatatttttgatgactcgatgagcggtctagatcccaagactgaatctcatttattcaataacgtgtttggtcctacaggggttttgcaacgccggggggctacagtaatcttggtaactcacaacccaagactcttatcacatgccacacatattgtttcacttggaattgatgggagtgtcgagtacgagggagactatgccgggtttgccgcgacaaacatcgacgtgaaacacggattgacgagcgaacccatccaaaccgacgatgagattgccatccttgataggagtcaagatttggacaagaaagaactcgctgaaggcacacatcagccggcttatgacagtttcctgtcagaaaaggacagaatgaccggggactctacagtctatcgctattatctagaaagcttgggaaagctctcgatattcgctttcttattattcggtgttggttggggcttcttcttcaactttggcagtgtctggctcgagttctggtctgccgatacgcaccatactcgctcccgagcttattatatcggactatatgcaatatggcagactggcatgttggcctctgtcgtactctgcttctggatatcgtacacggtgatggtccggatctctggtgcggccttacacaaaactgctctaagtaccatcgttcatgcgccactgagcttcatcacgaatacagacatcggtatcatcacaaatttgttctctcaggatatgacgctcgttgataatgagctgccgatggctgtcacgaatcttgctctcgatagtttcaatgccttgggaatggctgctgttatcgcgacatcatcgccttatatcgtgattttctatcctttcattgtaggcgtactttacctggtacagactggctacttgcgcaccgcccgacaactgcgacttttagatctcgaagccaaaagtcccctatatactcagttcctagacacgagccgaggcctcccgaccattcgttcatttggctggaccgccaagatgacggaaatgataatggacaaactcgatacatctcaaaagcctgcttacctcctggcgatggcccaacgatggctgttctttgtactccagtgtattgtcgctgttcttgcgattctagtggttacgctagcaatacaactgaactcacgcactgctgggtttaccggtcccagtgtcgtggccctaatgtcctttggagacatcttaaattttatcatcagatggtggacccagcttgagacctcaattggtgcggtgaccaggttgaagaagttgagtgatagggtaccgtcggaaagttatagtgacgacgaaataagtcatttaccacatgattggccccatgaaggcagaatcgacatcaggagtgtttcggcgtcatattatgaagctgatgaggcgggaccaaactcatgggcctcaagttcggagaagccaccacatcttgttctcgatgatgtctcgatcttaattggcgccggtgagaaagtcgccatatgtggtagaagtggaagtggcaaatcgacactaatcctgcttctgctccggatgctggaccctattccgcaatgctcgaagagtatcaccattgatggtattggcctgcattcggttgaaagaggagtgactcgcgatcgaatcatcgccatgtctcaagacccagtcttcttacctggtgaaataagcatcaaaaagcaactggatcccttcgatctatcgacagaggaagagtgccatgcggtcttgtgtctagtaggacttgagaatctggtttctggcataagcggagtccagacaaaacttcacgcagacagtatgtcctcagggcagaggcagctctttaatctagcaagaacagtgttgcgagcacgagcgagagctcgctctatatcacaccattctaaggaggacgagacaggcgaaacatcaaagggaatcttgctcctcgatgaagtcagttcgagtgttgatagagaaacagaacgcactatgctgcgtattattatgaccgagtttagaaactatacagtagttatggtggctcatcgcttggacttagcgatggcgtttgatagagttctagtcatggatggcggcagggtgatcgaggatggggaacccaaaatcctagctgaggatggacggagctattatggtcaattgtggaaggcttcggaacatgattaa

SEQ ID NO: 24269 - protein, 1476 aa, Muscodor strobelii
  misc_feature: SGI Peptide ID NO. 568272
  misc_feature (882)..(1154): Pfam Id: PF00664 Pfam Desc: ABC transporter transmembrane region
  misc_feature (618)..(796): Pfam Id: PF00005 Pfam Desc: ABC transporter
  misc_feature (1242)..(1447): Pfam Id: PF00005 Pfam Desc: ABC transporter
  misc_feature (25)..(1472): NCBI GI: 242784226 Blast Desc: ABC multidrug transporter, [Talaromyces stipitatus ATCC 10500] gi|218720491|gb|EED19910.1| ABC multidrug transporter, [Talaromyces stipitatus ATCC 10500]
  misc_feature (63)..(1476): NCBI GI: 238841995 Blast Desc: Fum19p [Microsporum canis CBS 113480]
  misc_feature (1)..(1476): NCBI GI: 145229613 Blast Desc: An01g06920 [Aspergillus niger] gi|134055223|emb|CAK43810.1| protein product [Aspergillus niger]
  misc_feature (3)..(1470): NCBI GI: 261354780 Blast Desc: canalicular multispecific organic anion transporter 1 [Verticillium albo-atrum VaMs.102]
  misc_feature (25)..(1472): NCBI GI: 212527610 Blast Desc: ABC multidrug transporter, [Penicillium marneffei ATCC 18224] gi|210073360|gb|EEA27447.1| ABC multidrug transporter, [Penicillium marneffei ATCC 18224]
  misc_feature (25)..(1473): NCBI GI: 145244955 Blast Desc: An11g07780 [Aspergillus niger] gi|134079440|emb|CAK45972.1| protein product [Aspergillus niger]
  misc_feature (1)..(1475): NCBI GI: 46138961 Blast Desc: FG10995.1 [Gibberella zeae PH-1]
  misc_feature (112)..(1473): NCBI GI: 238498088 Blast Desc: ABC multidrug transporter, [Aspergillus flavus NRRL3357] gi|220693553|gb|EED49898.1| ABC multidrug transporter, [Aspergillus flavus NRRL3357]
  misc_feature (4)..(1470): NCBI GI: 46127861 Blast Desc: FG08308.1 [Gibberella zeae PH-1]
  misc_feature (25)..(1468): NCBI GI: 119494834 Blast Desc: ABC transporter, [Neosartorya fischeri NRRL 181] gi|119412382|gb|EAW22323.1| ABC transporter, [Neosartorya fischeri NRRL 181]
  misc_feature (345)..(1474): SWISSPROT Homolog: EC 3.6.3.44 Xenobiotic-transporting ATPase
MSMATCPSDFTFGPIVSNCRGGVDDFTINFENIVLSSIPSSLFILLALIRLWYLSKSKRIPSRSTFRLLKLLIATLYAALQLSILVSGSRTAAEKSLTTPARSVSFVASALILPLTVLEDTRSRRPSFLLSTYLFFTILFDTVQVRTQWLASIGFNQILVSRLYTTALATKLVLLVLENAPKPTKTNQCPEETAGIFSLATYAWLNNTFLKGYNSILSLNDLSTLDRQVATRRLDEKLSSLLVSGPNSDYTKNFYLAKTLGRALVGALLLPILPRLALVGFRISQPLLLNSLLSYLDAPSSEEDLPQRKNIGYGLIGATIFIYFGIATSTALYWYCHERFISMTRGALVAAIYRKLTQLRSVDVNDSAAITLMSTDIERIRVGFLNLHEFWASSIEVALASWLLYTELGIVFIAPLIVVIGCVACASVLNIYTGPRQKQWMERIQVRVAETARMLAILKQLRISALSQPVEESTQKLRVDELDVASAYKRLYVSNMAFGFAPIALCPLITFAIAARNLDASTIFTSLAYIVLLADPLQVLFGEIPYLVTAFTCLDRIQEFLSQSTQTESRRFISELSLPNREASTPETYPLIKVENATVGWIKEHPIIKDVNLQIPTSSLTMVIGPVGCGKSTLCKALLSEIPFIEGGININIAADQFRPAFCDQTPYIHQGSVRDNIIGSLPFNSKSYNEVLAATLMDEDLKAFPYGDLTVIGGNGTTLSGGQKQRVAIARAVYHDANFYIFDDSMSGLDPKTESHLFNNVFGPTGVLQRRGATVILVTHNPRLLSHATHIVSLGIDGSVEYEGDYAGFAATNIDVKHGLTSEPIQTDDEIAILDRSQDLDKKELAEGTHQPAYDSFLSEKDRMTGDSTVYRYYLESLGKLSIFAFLLFGVGWGFFFNFGSVWLEFWSADTHHTRSRAYYIGLYAIWQTGMLASVVLCFWISYTVMVRISGAALHKTALSTIVHAPLSFITNTDIGIITNLFSQDMTLVDNELPMAVTNLALDSFNALGMAAVIATSSPYIVIFYPFIVGVLYLVQTGYLRTARQLRLLDLEAKSPLYTQFLDTSRGLPTIRSFGWTAKMTEMIMDKLDTSQKPAYLLAMAQRWLFFVLQCIVAVLAILVVTLAIQLNSRTAGFTGPSVVALMSFGDILNFIIRWWTQLETSIGAVTRLKKLSDRVPSESYSDDEISHLPHDWPHEGRIDIRSVSASYYEADEAGPNSWASSSEKPPHLVLDDVSILIGAGEKVAICGRSGSGKSTLILLLLRMLDPIPQCSKSITIDGIGLHSVERGVTRDRIIAMSQDPVFLPGEISIKKQLDPFDLSTEEECHAVLCLVGLENLVSGISGVQTKLHADSMSSGQRQLFNLARTVLRARARARSISHHSKEDETGETSKGILLLDEVSSSVDRETERTMLRIIMTEFRNYTVVMVAHRLDLAMAFDRVLVMDGGRVIEDGEPKILAEDGRSYYGQLWKASEHD

SEQ ID NO: 24270 - DNA, 2835 bp, Muscodor strobelii
  misc_feature: SGI cDNA ID NO. 568273
  misc_feature: Encodes the peptide sequence at SEQ ID NO 24271
atgagcacatctggaagcactggaaccccgaaactggtcgtgacagagcattcgcaactggcatcatttgtgcaatatctgacaaccccactcggcttcaaatctcagacccgcacgttccagttcgcatcttacgcattcgatcccatcatcggtgatatcttcctcacgcttgcgataggagggacggtctgtatcccctccgaggatgagcgtaggaatgatattgttggggcaatgcgccgtatgagagtcagccttgcaaagttcaccccctcccttcttggctctttacaagacttaacaatggagagcgttccgactttgaaaacagtagtactgggaggggaaacggcattgcccgctgtgatagagaaatgggcagataaggtggatctcaaactcatatatggctgtacagaatgtacgataagctttattgttgatgatgcgagtgtgcggcccgtggcgctgggcgagattggtcgagcggttggtagccaggcgtgggtgatagacccagatgaccctaacgggttgataacggatagaaacatcggagagcttctggttggaggcccgttagtttctcgcggatataaaaatggaccgtctccgccaaatacgaagtatatccaacctccgacatggttcaagggcatgttgggacatggatgtcgcttctaccgaacgggagacttggttcgacgattggagaacggaaatctctcgtatgttggaagagttgataaccaggtaaaggttcgagggcagagactagaactcgaggaagcagagcatcatcttcgccaagcactcgctcagttgtcggatactccccgagtgaaagatgtcatgatagacgcagcgtgccccgccggatcggcatcgaagcaattatatgcttatctattgctggaagataaaaccaatcttacctgtctggctttagatgagagcggtgggccgactgtcgaattatcatcaaatacacaagatggatttagagagctgatctcgcagctggagcatattctgaaatcgactgtaccgtctttcatgatcccgacaatatggattccaatagaggagatgccgtacacgttgtctagaaaaagggacagacaacgactacgaagggctgtccaaaatctgcctatacaaatgttgaaatcctttgtcagaggcaattcgcgatcgtctcacgatagcgatctagaaatttccatgactgaacaggagattttgatccagaagctatgggctcaagtactaggcatggatgctgagacaattcgcataaccgacaacttctttcaccttggaggtgattcattactcgcacttaggctggtgtctatagcgagacaaatagggcagcacctgaccgtagatgacattttctcgacccctattctccgagatcttgcgaagaagatctcgccctcgatgccggctactcagcttacccctttctctcttttagacaaggcacatcgtctctccatacacaatgatgcatctcagcagtgcaatgttgctctaaatgagattgaagacatattccctttatatcccatgcaggaacactatatcactggatatccagagcttaacagagatattgaagggccgtgggattggcaacaacagattgttttttcactctctgatggtttcgacattccacatttcaaaactgcatggtgtcgtgttgtggaacgacattctcaacttcgaacccgtgtggtgcagactcaatatggtatttttcaggtgatgcttgataagaattgcagcccgacttggcgagacgctgatgatttggatgcatatgttcatgaagacaatgtcgcacgaatgacatttggagatgaactcttgcgcctagccatcgccacgaaggatcagaaacgatatttcgttctcaccatgcagcatctcatctatgatgcatattcgcgcgacctactattcaatagattacaagcagaatattttacgccatcagagtcaacctttcgtaaatcatcaccacagatgaacgaattcatcaacttcatcgtaaatgccgacagaacacctgctcttaaattttggtcatcctacttgaagggcactgtaactcagcctctgctctctgcgcctgttggtggtcatcctgtgatagagctgcatgagcaccaaacgacaatggtgaaaccgacgatggcgatgctcgcagactatactatggccaccatcattgaagttggcaccgctcttgctattgcgcaattactcaattctactgatgtgatcttcaactcggatcgtgccgggcgcaatctacctgtggacggaatacaagatttgattgcccctacaacactgtttcttcctgtgcgcgtgcacatcgaaagcacacagactgtatatgagttgctgtgtacacaccaggccaactccatcgcgatgctcccttttgaatacatcgactggctcgagctacgggaattggatcatttcaagggcatcttacagaactctgtgaatttgaacatcaacccttccactgcatccgaaaatctaggggagaaaatgggacttcgggtcgttgaaacgcatgagactcgtgatgaccctttcagcatctgcgtatctatcggcgataaaacgattgagttgatgatctactacgacactgctttcatctctcatgacttagtcaaacgtctagcattgaacttgaaggagtcttttttacatgtgtcggaagctgaaaagaatagaggaatagtcgtaggcgatgttctagatcacatcgggggagtttctctcgatcaattagactga

SEQ ID NO: 24271 - protein, 944 aa, Muscodor strobelii
  misc_feature: SGI Peptide ID NO. 568273
  misc_feature (1)..(287): Pfam Id: PF00501 Pfam Desc: AMP-binding enzyme
  misc_feature (518)..(800): Pfam Id: PF00668 Pfam Desc: Condensation domain
  misc_feature (415)..(480): Pfam Id: PF00550 Pfam Desc: Phosphopantetheine attachment site
  misc_feature (3)..(271): Pfam Id: PF00501 Pfam Desc: AMP-binding enzyme
  misc_feature (3)..(881): NCBI GI: 145234641 Blast Desc: An03g00650 [Aspergillus niger] gi|134057641|emb|CAK38040.1| protein product [Aspergillus niger]
  misc_feature (3)..(906): NCBI GI: 238492173 Blast Desc: nonribosomal peptide synthase, [Aspergillus flavus NRRL3357] gi|220695817|gb|EED52159.1| nonribosomal peptide synthase, [Aspergillus flavus NRRL3357]
  misc_feature (3)..(906): NCBI GI: 169782552 Blast Desc: [Aspergillus oryzae RIB40] gi|83774482|dbj|BAE64605.1| protein product [Aspergillus oryzae]
  misc_feature (3)..(924): NCBI GI: 255954717 Blast Desc: Pc21g10790 [Penicillium chrysogenum Wisconsin 54-1255] gi|211589822|emb|CAP95976.1| Pc21g10790 [Penicillium chrysogenum Wisconsin 54-1255]
  misc_feature (3)..(906): NCBI GI: 46110867 Blast Desc: FG02315.1 [Gibberella zeae PH-1]
  misc_feature (3)..(906): NCBI GI: 256720559 Blast Desc: NECHADRAFT_44426 [Nectria haematococca mpVI 77-13-4]
  misc_feature (3)..(935): NCBI GI: 67540132 Blast Desc: AN6236.2 [Aspergillus nidulans FGSC A4] gi|40739430|gb|EAA58620.1| AN6236.2 [Aspergillus nidulans FGSC A4] gi|259479556|tpe|CBF69887.1| TPA: siderophore synthetase FGSC
  misc_feature (3)..(825): NCBI GI: 258572364 Blast Desc: UREG_04461 [Uncinocarpus reesii 1704] gi|237905214|gb|EEP79615.1| UREG_04461 [Uncinocarpus reesii 1704]
  misc_feature (3)..(931): NCBI GI: 240108806 Blast Desc: nonribosomal peptide synthetase, [Coccidioides posadasii C735 delta SOWgp]
  misc_feature (3)..(880): NCBI GI: 46127663 Blast Desc: FG08209.1 [Gibberella zeae PH-1]
  misc_feature (3)..(705): SWISSPROT Homolog: EC 5.1.1.11 Phenylalanine racemase (ATP-hydrolyzing)
MSTSGSTGTPKLVVTEHSQLASFVQYLTTPLGFKSQTRTFQFASYAFDPIIGDIFLTLAIGGTVCIPSEDERRNDIVGAMRRMRVSLAKFTPSLLGSLQDLTMESVPTLKTVVLGGETALPAVIEKWADKVDLKLIYGCTECTISFIVDDASVRPVALGEIGRAVGSQAWVIDPDDPNGLITDRNIGELLVGGPLVSRGYKNGPSPPNTKYIQPPTWFKGMLGHGCRFYRTGDLVRRLENGNLSYVGRVDNQVKVRGQRLELEEAEHHLRQALAQLSDTPRVKDVMIDAACPAGSASKQLYAYLLLEDKTNLTCLALDESGGPTVELSSNTQDGFRELISQLEHILKSTVPSFMIPTIWIPIEEMPYTLSRKRDRQRLRRAVQNLPIQMLKSFVRGNSRSSHDSDLEISMTEQEILIQKLWAQVLGMDAETIRITDNFFHLGGDSLLALRLVSIARQIGQHLTVDDIFSTPILRDLAKKISPSMPATQLTPFSLLDKAHRLSIHNDASQQCNVALNEIEDIFPLYPMQEHYITGYPELNRDIEGPWDWQQQIVFSLSDGFDIPHFKTAWCRVVERHSQLRTRVVQTQYGIFQVMLDKNCSPTWRDADDLDAYVHEDNVARMTFGDELLRLAIATKDQKRYFVLTMQHLIYDAYSRDLLFNRLQAEYFTPSESTFRKSSPQMNEFINFIVNADRTPALKFWSSYLKGTVTQPLLSAPVGGHPVIELHEHQTTMVKPTMAMLADYTMATIIEVGTALAIAQLLNSTDVIFNSDRAGRNLPVDGIQDLIAPTTLFLPVRVHIESTQTVYELLCTHQANSIAMLPFEYIDWLELRELDHFKGILQNSVNLNINPSTASENLGEKMGLRVVETHETRDDPFSICVSIGDKTIELMIYYDTAFISHDLVKRLALNLKESFLHVSEAEKNRGIVVGDVLDHIGGVSLDQLD

SEQ ID NO: 24272 - DNA, 833 bp, Muscodor strobelii
  misc_feature: SGI EST ID NO. CUFF.57230.0
  misc_feature: Variant of the nucleotide sequence at SEQ ID NO 24270
caaatctcagacccgcacgttccagttcgcatcttacgcattcgatcccatcatcggtgatatcttcctcacgcttgcgataggagggacggtctgtatcccctccgaggatgagcgtaggaatgatattgttggggcaatgcgccgtatgagagtcagccttgcaaagttcaccccctcccttcttggctctttacaagacttaacaatggagagcgttccgactttgaaaacagtagtactgggaggggaaacggcattgcccgctgtgatagagaaatgggcagataaggtggatctcaaactcatatatggctgtacagaatgtacgataagctttattgttgatgatgcgagtgtgcggcccgtggcgctgggcgagattggtcgagcggttggtagccaggcgtgggtgatagacccagatgaccctaacgggttgataacggatagaaacatcggagagcttctggttggaggcccgttagtttctcgcggatataaaaatggaccgtctccgccaaatacgaagtatatccaacctccgacatggttcaagggcatgttgggacatggatgtcgcttctaccgaacgggagacttggttcgacgattggagaacggaaatctctcgtatgttggaagagttgataaccaggtaaaggttcgagggcagagactagaactcgaggaagcagagcatcatcttcgccaagcactcgctcagttgtcggatactccccgagtgaaagatgtcatgatagacgcagcgtgccccgccggatcggcatcgaagcaattatatgcttatctattgctggaagataaaacca

SEQ ID NO: 24273 - DNA, 840 bp, Muscodor strobelii
  misc_feature: SGI cDNA ID NO. 568274
  misc_feature: Encodes the peptide sequence at SEQ ID NO 24274
atggcgagcctttcatatgacgtcatcgtcagttcggcgccatttacgattttcgtgggacctcaccgcaagaagttcacaatacataaggaactacttgcagctatgtcgaagcccttgagcgcacttgtagcaggagggatgaaagaatctcgcgatgggtgcgccgaatggcccgaaattgatgaagaaacattcattcgattctgcgagtttgcttacaccggagactacaaagttgcggagccaaagcccattgacaaagtggagggaagccatactgatgatgccaaaaacaaatctttcgacggagatagttgcatcgccacgtatgagccgcagccttcaccatgttccaagtgcgagaaacgaacgaagcaaccaacgaggaaagacagacttgcgtcgaaattccttgatcgtacatatcatgtccctgatgtcgaactcagtgagaaggaggagacagcatcagccaccgattctgacgatttcagctataaagatgagttcttatctattgcacgtttgtatgtcgtcggcgactactacgacattgatcgactgcggattttaagtcttgagaaattacacaaatctcttaaagagttccagcaacttgaggacgtagatctcgaagatctctctgcgttggccatttacacctatgaaaatacagtcgagaagcctaccaacaaggatggccttcgagacttggtgtgttcattcatcgtatgccacgcgaagctaatgtggcacaaccctcgcttccaagcggcgttggaatgtgtcgaattctcgcgggatataattggacttctactgagccgaggcgagtaa

SEQ ID NO: 24274 - protein, 279 aa, Muscodor strobelii
  misc_feature: SGI Peptide ID NO. 568274
  misc_feature (9)..(277): NCBI GI: 238842159 Blast Desc: conserved [Microsporum canis CBS 113480]
  misc_feature (5)..(262): NCBI GI: 115492757 Blast Desc: [Aspergillus terreus NIH2624] gi|114197866|gb|EAU39566.1| [Aspergillus terreus NIH2624]
  misc_feature (10)..(86): NCBI GI: 256727614 Blast Desc: NECHADRAFT_76623 [Nectria haematococca mpVI 77-13-4]
  misc_feature (42)..(274): NCBI GI: 169596330 Blast Desc: SNOG_00922 [Phaeosphaeria nodorum SN15] gi|111071297|gb|EAT92417.1| SNOG_00922 [Phaeosphaeria nodorum SN15]
  misc_feature (15)..(261): NCBI GI: 154280072 Blast Desc: [Ajellomyces capsulatus NAm1] gi|150412792|gb|EDN08179.1| [Ajellomyces capsulatus NAm1]
  misc_feature (5)..(120): NCBI GI: 258573019 Blast Desc: [Uncinocarpus reesii 1704] gi|237900957|gb|EEP75358.1| [Uncinocarpus reesii 1704]
  misc_feature (6)..(275): NCBI GI: 119178916 Blast Desc: [Coccidioides immitis RS]
  misc_feature (9)..(243): NCBI GI: 238842007 Blast Desc: conserved [Microsporum canis CBS 113480]
  misc_feature (28)..(277): NCBI GI: 116201273 Blast Desc: [Chaetomium globosum CBS 148.51] gi|88177039|gb|EAQ84507.1| [Chaetomium globosum CBS 148.51]
  misc_feature (6)..(257): NCBI GI: 240272832 Blast Desc: conserved [Ajellomyces capsulatus H143]
MASLSYDVIVSSAPFTIFVGPHRKKFTIHKELLAAMSKPLSALVAGGMKESRDGCAEWPEIDEETFIRFCEFAYTGDYKVAEPKPIDKVEGSHTDDAKNKSFDGDSCIATYEPQPSPCSKCEKRTKQPTRKDRLASKFLDRTYHVPDVELSEKEETASATDSDDFSYKDEFLSIARLYVVGDYYDIDRLRILSLEKLHKSLKEFQQLEDVDLEDLSALAIYTYENTVEKPTNKDGLRDLVCSFIVCHAKLMWHNPRFQAALECVEFSRDIIGLLLSRGE

SEQ ID NO: 24275 - DNA, 939 bp, Muscodor strobelii
  misc_feature: SGI cDNA ID NO. 568275
  misc_feature: Elevated expression when VOC is produced
  misc_feature: Encodes the peptide sequence at SEQ ID NO 24276
atggcgaccctttcatacgaactgattgccgcatcaacaccatttacgatcctcgtcggacctgatcggaaaaagttcgtaatgcataaagagctccttgcatcaatgtcaaagaagctagacacactcgtgaacgggaagatggtcgaggctcgcgacggcttggtcgattggggagatgttgatgagcgaacgtttgtttgtttcttcgagtatgcatatacaggaaactacaccatctctcaacgtccaaaaaccgacgtaaatcaagatgacatttcacagtctcatgacaatgatcagaatcgagatcatggcatcgttgatgctatcactggtccaattgaagaacctgcacctgaacctgaacccaatgaaccagtagacgaagaaccagcgtactggggagtccgggcgccagaaccacctcctgttgaggagaatacaaccatgaaatgtccaaaatgcaggagagtcgtgccggtgccagtgccaacgccatcggcaaaaaccaagctttggttgaagttcatcaatctcgactatcctggaccatcgtccaaagggaatacaatcccaaccagtggctcgatttgcacggatcttaatgaaaccatactatctcacgcacgcatatacgtcctagccgacttccacctcattgacaagctcaagcagttgagcctgaagaagttacatcaatgcctgaaagatttcgaaatgactagtgaaggagcagagacgattgcatctttagcggcatactgctatgataacactgccgacgagcccaaagatggtctgcgatggctactttgcctttatctcgcatgtgaaattgagcagatgtgggaaaatgcttcttttcgggaagccttaaatgtatcacgcgatttagcgagagacgtcattgaacagatgctcaacagacttgattga

SEQ ID NO: 24276 - protein, 312 aa, Muscodor strobelii
  misc_feature: SGI Peptide ID NO. 568275
  misc_feature (9)..(312): NCBI GI: 238842159 Blast Desc: conserved [Microsporum canis CBS 113480]
  misc_feature (6)..(309): NCBI GI: 119178916 Blast Desc: [Coccidioides immitis RS]
  misc_feature (15)..(293): NCBI GI: 154280072 Blast Desc: [Ajellomyces capsulatus NAm1] gi|150412792|gb|EDN08179.1| [Ajellomyces capsulatus NAm1]
  misc_feature (5)..(311): NCBI GI: 154314343 Blast Desc: [Botryotinia fuckeliana B05.10] gi|150848910|gb|EDN24103.1| [Botryotinia fuckeliana B05.10]
  misc_feature (6)..(308): NCBI GI: 242813686 Blast Desc: TSTA_102080 [Talaromyces stipitatus ATCC 10500] gi|218714555|gb|EED13978.1| TSTA_102080 [Talaromyces stipitatus ATCC 10500]
  misc_feature (6)..(283): NCBI GI: 240272832 Blast Desc: conserved [Ajellomyces capsulatus H143]
  misc_feature (4)..(308): NCBI GI: 212541026 Blast Desc: PMAA_058390 [Penicillium marneffei ATCC 18224] gi|210067967|gb|EEA22059.1| PMAA_058390 [Penicillium marneffei ATCC 18224]
  misc_feature (12)..(303): NCBI GI: 238842007 Blast Desc: conserved [Microsporum canis CBS 113480]
  misc_feature (6)..(79): NCBI GI: 256727614 Blast Desc: NECHADRAFT_76623 [Nectria haematococca mpVI 77-13-4]
  misc_feature (43)..(302): NCBI GI: 169596330 Blast Desc: SNOG_00922 [Phaeosphaeria nodorum SN15] gi|111071297|gb|EAT92417.1| SNOG_00922 [Phaeosphaeria nodorum SN15]
  misc_feature: Useful for introducing or modulating the production of volatile compounds
MATLSYELIAASTPFTILVGPDRKKFVMHKELLASMSKKLDTLVNGKMVEARDGLVDWGDVDERTFVCFFEYAYTGNYTISQRPKTDVNQDDISQSHDNDQNRDHGIVDAITGPIEEPAPEPEPNEPVDEEPAYWGVRAPEPPPVEENTTMKCPKCRRVVPVPVPTPSAKTKLWLKFINLDYPGPSSKGNTIPTSGSICTDLNETILSHARIYVLADFHLIDKLKQLSLKKLHQCLKDFEMTSEGAETIASLAAYCYDNTADEPKDGLRWLLCLYLACEIEQMWENASFREALNVSRDLARDVIEQMLNRLD

SEQ ID NO: 24277 - DNA, 1438 bp, Muscodor strobelii
  misc_feature: SGI EST ID NO. CUFF.57242.0
  misc_feature: Variant of the nucleotide sequence at SEQ ID NO 24275
catatttcctccgatatgacacagtcgtctctagtgtgatcgcacgcaatactctagccagttgcactgcactaattgccatccggaatcacgatggcgaccctttcatacgaactgattgccgcatcaacaccatttacgatcctcgtcggacctgatcggaaaaagttcgtaatgcataaagagctccttgcatcaatgtcaaagaagctagacacactcgtgaacgggaagatggtcgaggctcgcgacggcttggtcgattggggagatgttgatgagcgaacgtttgtttgtttcttcgagtatgcatatacaggaaactacaccatctctcaacgtccaaaaaccgacgtaaatcaagatgacatttcacagtctcatgacaatgatcagaatcgagatcatggcatcgttgatgctatcactggtccaattgaagaacctgcacctgaacctgaacccaatgaaccagtagacgaagaaccagcgtactggggagtccgggcgccagaaccacctcctgttgaggagaatacaaccatgaaatgtccaaaatgcaggagagtcgtgccggtgccagtgccaacgccatcggcaaaaaccaagctttggttgaagttcatcaatctcgactatcctggaccatcgtccaaagggaatacaatcccaaccagtggctcgatttgcacggatcttaatgaaaccatactatctcacgcacgcatatacgtcctagccgacttccacctcattgacaagctcaagcagttgagcctgaagaagttacatcaatgcctgaaagatttcgaaatgactagtgaaggagcagagacgattgcatctttagcggcatactgctatgataacactgccgacgagcccaaagatggtctgcgatggctactttgcctttatctcgcatgtgaaattgagcagatgtgggaaaatgcttcttttcgggaagccttaaatgtatcacgcgatttagcgagagacgtcattgaacagatgctcaacagacttgattgaagtccatttctacctgcatgagcaacaatggagcgacaggattgccaagcaggagaggaggattaacgaaagagacatagttttcaagattatgatgtattaggagtctactacttaggaaattatctaaaattaagtctatcatatagaaatgcgcccgtcccaaacccaaacagtatttatacctctatgctcgaccggaagaattataaaaatcaaaataggagaatagggcacttctcagaagctcctgcccagaagtgaagaataaacggacaaaggaaactttcctcacatgtagacgacctgccacctgttgttgttcccgactgaattgccaacaggagtattaccgtgcgaacccttacttgccagctcatcgacaggcaagaactcatgctcatcc

SEQ ID NO: 24278 - DNA, 1524 bp, Muscodor strobelii
  misc_feature: SGI cDNA ID NO. 568276
  misc_feature: Encodes the peptide sequence at SEQ ID NO 24279
atgtcgtctaacctcctggttcaaggctcgcaatccgttgcgcagctcacggtgcatcatgttccaaacacgggaatatgtatcattgatctgcccgccgcggcggcggaattagatctttgctccagtatagagatccggattcaagaacaggatatcattgatcagcatccggactcgatttgtatcacacctacccgcccccacgatccagagacttccacagtcacaattgagaaaccgacttcgactattcctcccaaactaccggtgcatactgggcgcccaccctggtggccgcagggagggtggtctgcgccgcctgctgtacagagtgatccacccgtccaagtcccggtcaaagaacagccgcctacgccgaagtccactactactattacttcgcgtattcccattggtccatcccatgtgcctggtgggcaagggggcaatggcggtaatggcgggaacggaggtaatggtggcagtggtgggaatggaggaaacggtggtaacggcggtgacggcggaaatgggagcggcggcggcgatggaggcgatggaggcaacggtggaaatggcggaaatggcggccatacgatacctggtcaccctgggtctcccggcggcaacggagggaagggcggagacggtggcaatggaggtgatggcggttccgggaccccaggtcatccttcaaacccaggtggaaaaggcggtgatggcggcaacggaggtaacggaggtgatggaggcaatggtggatatgagacgtcagattttccatcacctcctgttgcagtccccacgcccattgtcaagctgccggaaccctcaacatctcgacctccagttgttgactcaaccccctccggtcacccaaaaccaccttatggcggttcgatccctatcccgcctcctggtccagtggagcccgtcatcgaacatcctccttcgcatccaattactagcagccctggcttctgtgaatctacatacacgagcattgacgtcactgagatccctggtgtggacaagcagtcctacaataaatacctcgatctcctcggtctcggttcactcgtcgacagtcttcttggaggaatcttgggaggtggaactcgcgaagcatacaagtcgacgaaagccaagcatgaactcgtacatcaatatcgtgttcgatgcgatgttccgatacctgatggcccagaacctgtcttccctgggtttccaggcgagacaacgactgttcatgatggacacaaggggtgtctcgagcagtgcgagcgagaagctattgcgaaagctgatcagggattattgatggagtgtcttggcgttgcttacagagccaagactgagggtcttgatgatggtgagggtgagtgtaggatgtggtgtggtgataaggatgagcatgagttcttgcctgtcgatgagctggcaagtaagggttcgcacggtaatactcctgttggcaattcagtcgggaacaacaacaggtggcaggtcgtctacatgtga

SEQ ID NO: 24279 - protein, 507 aa, Muscodor strobelii
  misc_feature: SGI Peptide ID NO. 568276
MSSNLLVQGSQSVAQLTVHHVPNTGICIIDLPAAAAELDLCSSIEIRIQEQDIIDQHPDSICITPTRPHDPETSTVTIEKPTSTIPPKLPVHTGRPPWWPQGGWSAPPAVQSDPPVQVPVKEQPPTPKSTTTITSRIPIGPSHVPGGQGGNGGNGGNGGNGGSGGNGGNGGNGGDGGNGSGGGDGGDGGNGGNGGNGGHTIPGHPGSPGGNGGKGGDGGNGGDGGSGTPGHPSNPGGKGGDGGNGGNGGDGGNGGYETSDFPSPPVAVPTPIVKLPEPSTSRPPVVDSTPSGHPKPPYGGSIPIPPPGPVEPVIEHPPSHPITSSPGFCESTYTSIDVTEIPGVDKQSYNKYLDLLGLGSLVDSLLGGILGGGTREAYKSTKAKHELVHQYRVRCDVPIPDGPEPVFPGFPGETTTVHDGHKGCLEQCEREAIAKADQGLLMECLGVAYRAKTEGLDDGEGECRMWCGDKDEHEFLPVDELASKGSHGNTPVGNSVGNNNRWQVVYM

SEQ ID NO: 24280 - DNA, 1854 bp, Muscodor strobelii
  misc_feature: SGI cDNA ID NO. 568277
  misc_feature: Reduced expression when VOC is produced
  misc_feature: Encodes the peptide sequence at SEQ ID NO 24281
atgtcaacgatccagcaactaaagaatttcattcggcatggcaagcaggccagagccaacaactacgacgattcttccaagaggaatgatcattcacctccagcaccacagaaagtcatggcacatgccacagagccaggcttaggtgccaacaacatgcccaaccctggccaacctatcccagacgcctactctgtacaacctggcgatatgcagaaccgtgcagcgcaagctgatggtgttgcagctcatcacgctgaggctaatcagcatgtccgctctcacgatgactctagggccaacgatgctcacttggccaagctggtgcaagaagagaacgagagcaggagcaagttccccaagtaccctggcttggaacgatggcagttgctggagaagatgggcgacggtgctttcagcaatgtgtatcgagcaaaggaccttactggagatgctggcgagtgcgccatcaaagtagtccgaaagttcgaaatgaacaatatgcagggccagaaacatctacatccggatttcaaaaaggtcccaaaagctgcagagcgtgccaacattttgaaagaagtacaaatcatgcgtcaattagatcatcccaatattattagactggttgatttcaccgagtctcgccagtactactacattattctcgagctagcacctggtggcgaactgtttcatcaaatcgtacgccttacatatttcagtgaagaactttctcggcacgtcattgtacaggttgccaaggcattagaatatctgcatgaagaatgcggcgttgtccaccgtgatatcaagccggagaacatcttgtttagacctattcctttcgtaccatctaaggtgcccaagcctaaacaaccaggagacgaagataaagtagatgaaggcgagtttgttccaggcgtcgggtcgggtggcattggccaaatcaaaatcgccgacttcggattatcgaagattgtatgggacaagcaaactatgacaccgtgtggtactgtcgggtacaccgctcccgaaatagttaaggatgagaggtactcgaaatccgtcgacatgtgggcacttggttgtgtgctatacaccttgctatgtggtttccccccgttctatgacgagagtatcgaagttcttacggagaaggtggcgaaaggacaatacacattcctctcaccgtggtgggatgacatttcaaagtctgcgcaagatctgatcagtcatctgttgacagtagatccggataagcgctacacaatcagagagttcttaaatcatccttggattgctggatccggcccaacaccacgcgacgaaaagaaacagcaatatggcgacagtcttcgtgcttttgattcttcacgactgatggacggcgaacggcgcatggatttccgatcccctggcgccgtgaacctgagagagatcttcgatgttggttactcagttcatcggcaggaggaggaggcgaagcgcagaaagcaggtgggcgctaaagctgcaggtgttgccccgtcccgcttaaccgaactcaacgaagagtcatcggatgatgatggcaagactgagaactacgcacataagtctgatgcttctcagcttgaacaaagtatgcgtaacacaaacttgggtaaggaccaagagcgaggtagagagcgtgggaggcacgaggagaagcaggcgcgcggatatggccagcatagtgccgctgttgcccaagccgctcgtcagcaggttagagaccggcagaagcagcgaggagcctttgagctcaacatggacggcgcaacactcctgggccgacgagctcacaaacctgcaactagcgtcggcgggttctag

SEQ ID NO: 24281 - protein, 617 aa, Muscodor strobelii
  misc_feature: SGI Peptide ID NO. 568277
  misc_feature (128)..(433): Pfam Id: PF00069 Pfam Desc: Protein kinase domain
  misc_feature (128)..(270): Pfam Id: PF07714 Pfam Desc: Protein tyrosine kinase
  misc_feature (314)..(391): Pfam Id: PF07714 Pfam Desc: Protein tyrosine kinase
  misc_feature (1)..(615): NCBI GI: 171695656 Blast Desc: protein product [Podospora anserina] gi|170948070|emb|CAP60234.1| protein product [Podospora anserina]
  misc_feature (1)..(613): NCBI GI: 85091957 Blast Desc: NCU09212 [Neurospora crassa OR74A] gi|28920557|gb|EAA29920.1| NCU09212 [Neurospora crassa OR74A] gi|29150105|emb|CAD79666.1| related to serine/threonine-protein
  misc_feature (1)..(615): NCBI GI: 145604396 Blast Desc: MGG_08547 [Magnaporthe grisea 70-15] gi|145012395|gb|EDJ97051.1| MGG_08547 [Magnaporthe grisea 70-15]
  misc_feature (1)..(615): NCBI GI: 116181318 Blast Desc: CHGG_01287 [Chaetomium globosum CBS 148.51] gi|88185584|gb|EAQ93052.1| CHGG_01287 [Chaetomium globosum CBS 148.51]
  misc_feature (1)..(609): NCBI GI: 256735502 Blast Desc: [Nectria haematococca mpVI 77-13-4]
  misc_feature (1)..(609): NCBI GI: 46107806 Blast Desc: FG00786.1 [Gibberella zeae PH-1]
  misc_feature (1)..(609): NCBI GI: 67532074 Blast Desc: AN4483.2 [Aspergillus nidulans FGSC A4] gi|40741636|gb|EAA60826.1| AN4483.2 [Aspergillus nidulans FGSC A4]
  misc_feature (1)..(609): NCBI GI: 259482694 Blast Desc: TPA: calcium/calmodulin-dependent protein kinase, (Eurofung) [Aspergillus nidulans FGSC A4]
  misc_feature (1)..(609): NCBI GI: 159128896 Blast Desc: calcium/calmodulin-dependent protein kinase, [Aspergillus fumigatus A1163]
  misc_feature (1)..(609): NCBI GI: 70989269 Blast Desc: calcium/calmodulin-dependent protein kinase [Aspergillus fumigatus Af293] gi|66847115|gb|EAL87446.1| calcium/calmodulin-dependent protein kinase, [Aspergillus Af293]
  misc_feature (99)..(547): SWISSPROT Homolog: EC 2.7.11.1 Non-specific serine/threonine protein kinase
  misc_feature: Useful for introducing or modulating the production of volatile compounds
MSTIQQLKNFIRHGKQARANNYDDSSKRNDHSPPAPQKVMAHATEPGLGANNMPNPGQPIPDAYSVQPGDMQNRAAQADGVAAHHAEANQHVRSHDDSRANDAHLAKLVQEENESRSKFPKYPGLERWQLLEKMGDGAFSNVYRAKDLTGDAGECAIKVVRKFEMNNMQGQKHLHPDFKKVPKAAERANILKEVQIMRQLDHPNIIRLVDFTESRQYYYIILELAPGGELFHQIVRLTYFSEELSRHVIVQVAKALEYLHEECGVVHRDIKPENILFRPIPFVPSKVPKPKQPGDEDKVDEGEFVPGVGSGGIGQIKIADFGLSKIVWDKQTMTPCGTVGYTAPEIVKDERYSKSVDMWALGCVLYTLLCGFPPFYDESIEVLTEKVAKGQYTFLSPWWDDISKSAQDLISHLLTVDPDKRYTIREFLNHPWIAGSGPTPRDEKKQQYGDSLRAFDSSRLMDGERRMDFRSPGAVNLREIFDVGYSVHRQEEEAKRRKQVGAKAAGVAPSRLTELNEESSDDDGKTENYAHKSDASQLEQSMRNTNLGKDQERGRERGRHEEKQARGYGQHSAAVAQAARQQVRDRQKQRGAFELNMDGATLLGRRAHKPATSVGGF

SEQ ID NO: 24282 - DNA, 3192 bp, Muscodor strobelii
  misc_feature: SGI EST ID NO. CUFF.57633.4
  misc_feature: Variant of the nucleotide sequence at SEQ ID NO 24280
gaacgcagctgtgattaaaaggacggtgatgagcagtacacagctactgctgctgagccctgggcagcgagtatgcctgctaggttgctcctgggcctgtacgcagttccctggaaggcgctggaggcaacgacatcatcagcccgaacccgtccatctctattccggtccagatcgcttgacgcttaggcgcccactaaactgcaccactgacgccctgtgtcaggccttgctcgcccaacacgtaaacaacccagtcaatccgcgggcacttcccactttccctccccccaatttctaatccccttccaagaagaacccggccaagaaccctcccgccaacatcaccagtgttgtcgccctcttctacttctctacggatctcattactctcgtagcccatagatacccttctaagccctcttgttgcttcaagattcttctcttgatcttcgtacgtcgttgcaatcaactgtgtttcccggacccgaatatatacctgatcaggtagcgtgctccaaccggctactgccgcaaagttacattatcaacgatatctcaaccgtcagtgactattcagccacattcttgctcaaccgaagaaagaggaacagccgagcatatcgacgcatttgtttttgagttcgtcattgtaccttctcatcgcaaacgctgccttgtcgcctgtgacagtcgcccgtcctacctgtggttaggaatcccgtcgccttgctctcgagaaggattacttcagcctcagcggcttcctcgacttctcgacgcatccctgggccgacacagttgagtgacgtcgtcgaaacaggatgtcaacgatccagcaactaaagaatttcattcggcatggtgcgcactttacttgcagtccttacatatcgcatcactttttttactcgcattcttgcacacgaaatctagctcgtgttgcacgccttctttcttccctgccgctccttatctctttccctctccaactgacgtgacctcccggctgcgtgtcataccgatctaccaacaccccggcccatgtttgccctggcccactgacatcatccgactgactgttccaacaggcaagcaggccagagccaacaactacgacgattcttccaagaggaatgatcattcacctccagcaccacagaaagtcatggcacatgccacagagccaggcttaggtgccaacaacatgcccaaccctggccaacctatcccagacgcctactctgtacaacctggcgatatgcagaaccgtgcagcgcaagctgatggtgttgcagctcatcacgctgaggctaatcagcatgtccgctctcacgatgactctagggccaacgatgctcacttggccaagctggtgcaagaagagaacgagagcaggagcaagttccccaagtaccctggcttggaacgatggcagttgctggagaagatgggcgacggtgctttcagcaatgtgtatcgagcaaaggaccttactggagatgctggcgagtgcgccatcaaagtagtccgaaagttcgaaatgaacaatatgcagcgtgccaacattttgaaagaagtacaaatcatgcgtcaattagatcatcccaatattattagactggttgatttcaccgagtctcgccagtactactacattattctcgagctagcacctggtggcgaactgtttcatcaaatcgtacgccttacatatttcagtgaagaactttctcggcacgtcattgtacaggttgccaaggcattagaatatctgcatgaagaatgcggcgttgtccaccgtgatatcaagccggagaacatcttgtttagacctattcctttcgtaccatctaaggtgcccaagcctaaacaaccaggagacgaagataaagtagatgaaggcgagtttgttccaggcgtcgggtcgggtggcattggccaaatcaaaatcgccgacttcggattatcgaagattgtatgggacaagcaaactatgacaccgtgtggtactgtcgggtacaccgctcccgaaatagttaaggatgagaggtactcgaaatccgtcgacatgtgggcacttggttgtgtgctatacaccttgctatgtggtttccccccgttctatgacgagagtatcgaagttcttacggagaaggtggcgaaaggacaatacacattcctctcaccgtggtgggatgacatttcaaagtctgcgcaagatctgatcagtcatctgttgacagtagatccggataagcgctacacaatcagagagttcttaaatcatccttggattgctggatccggcccaacaccacgcgacgaaaagaaacagcaatatggcgacagtcttcgtgcttttgattcttcacgactgatggacggcgaacggcgcatggatttccgatcccctggcgccgtgaacctgagagagatcttcgatgttggttactcagttcatcggcaggaggaggaggcgaagcgcagaaagcaggtgggcgctaaagctgcaggtgttgccccgtcccgcttaaccgaactcaacgaagagtcatcggatgatgatggcaagactgagaactacgcacataagtctgatgcttctcagcttgaacaaagtatgcgtaacacaaacttgggtaaggaccaagagcgaggtagagagcgtgggaggcacgaggagaagcaggcgcgcggatatggccagcatagtgccgctgttgcccaagccgctcgtcagcaggttagagaccggcagaagcagcgaggagcctttgagctcaacatggacggcgcaacactcctgggccgacgagctcacaaacctgcaactagcgtcggcgggttctaggaggccccgtgatgtcctttgagaatcaatttatagtatttgcataaggaccatggctagtatgcttatgggagaccttgaggagttcggggcgcatcgttgtgacgcggctattaggctgccacccgggcatgtagctcggttcatgaagggtttggggcatggagtattggtttgtaagagcacatcgtggagttgttgtcagtctaggtctgatgccattacaccattatttacgtgtaagcgcatggcgtttcgggtgaacagtgttcgagatgactagcgagctagtccacccattaattgattggattcaatctaatttcatcattcctgtg

SEQ ID NO: 24283 - DNA, 1803 bp, Muscodor strobelii
  misc_feature: SGI cDNA ID NO. 568278
  misc_feature: Reduced expression when VOC is produced
  misc_feature: Encodes the peptide sequence at SEQ ID NO 24284
atgtcaacgatccagcaactaaagaatttcattcggcatggcaagcaggccagagccaacaactacgacgattcttccaagaggaatgatcattcacctccagcaccacagaaagtcatggcacatgccacagagccaggcttaggtgccaacaacatgcccaaccctggccaacctatcccagacgcctactctgtacaacctggcgatatgcagaaccgtgcagcgcaagctgatggtgttgcagctcatcacgctgaggctaatcagcatgtccgctctcacgatgactctagggccaacgatgctcacttggccaagctggtgcaagaagagaacgagagcaggagcaagttccccaagtaccctggcttggaacgatggcagttgctggagaagatgggcgacggtgctttcagcaatgtgtatcgagcaaaggaccttactggagatgctggcgagtgcgccatcaaagtagtccgaaagttcgaaatgaacaatatgcagcgtgccaacattttgaaagaagtacaaatcatgcgtcaattagatcatcccaatattattagactggttgatttcaccgagtctcgccagtactactacattattctcgagctagcacctggtggcgaactgtttcatcaaatcgtacgccttacatatttcagtgaagaactttctcggcacgtcattgtacaggttgccaaggcattagaatatctgcatgaagaatgcggcgttgtccaccgtgatatcaagccggagaacatcttgtttagacctattcctttcgtaccatctaaggtgcccaagcctaaacaaccaggagacgaagataaagtagatgaaggcgagtttgttccaggcgtcgggtcgggtggcattggccaaatcaaaatcgccgacttcggattatcgaagattgtatgggacaagcaaactatgacaccgtgtggtactgtcgggtacaccgctcccgaaatagttaaggatgagaggtactcgaaatccgtcgacatgtgggcacttggttgtgtgctatacaccttgctatgtggtttccccccgttctatgacgagagtatcgaagttcttacggagaaggtggcgaaaggacaatacacattcctctcaccgtggtgggatgacatttcaaagtctgcgcaagatctgatcagtcatctgttgacagtagatccggataagcgctacacaatcagagagttcttaaatcatccttggattgctggatccggcccaacaccacgcgacgaaaagaaacagcaatatggcgacagtcttcgtgcttttgattcttcacgactgatggacggcgaacggcgcatggatttccgatcccctggcgccgtgaacctgagagagatcttcgatgttggttactcagttcatcggcaggaggaggaggcgaagcgcagaaagcaggtgggcgctaaagctgcaggtgttgccccgtcccgcttaaccgaactcaacgaagagtcatcggatgatgatggcaagactgagaactacgcacataagtctgatgcttctcagcttgaacaaagtatgcgtaacacaaacttgggtaaggaccaagagcgaggtagagagcgtgggaggcacgaggagaagcaggcgcgcggatatggccagcatagtgccgctgttgcccaagccgctcgtcagcaggttagagaccggcagaagcagcgaggagcctttgagctcaacatggacggcgcaacactcctgggccgacgagctcacaaacctgcaactagcgtcggcgggttctag

SEQ ID NO: 24284 - protein, 600 aa, Muscodor strobelii
  misc_feature: SGI Peptide ID NO. 568278
  misc_feature (128)..(416): Pfam Id: PF00069 Pfam Desc: Protein kinase domain
  misc_feature (128)..(253): Pfam Id: PF07714 Pfam Desc: Protein tyrosine kinase
  misc_feature (297)..(374): Pfam Id: PF07714 Pfam Desc: Protein tyrosine kinase
  misc_feature (1)..(596): NCBI GI: 85091957 Blast Desc: NCU09212 [Neurospora crassa OR74A] gi|28920557|gb|EAA29920.1| NCU09212 [Neurospora crassa OR74A] gi|29150105|emb|CAD79666.1| related to serine/threonine-protein
  misc_feature (1)..(598): NCBI GI: 145604396 Blast Desc: MGG_08547 [Magnaporthe grisea 70-15] gi|145012395|gb|EDJ97051.1| MGG_08547 [Magnaporthe grisea 70-15]
  misc_feature (1)..(598): NCBI GI: 171695656 Blast Desc: protein product [Podospora anserina] gi|170948070|emb|CAP60234.1| protein product [Podospora anserina]
  misc_feature (1)..(598): NCBI GI: 116181318 Blast Desc: CHGG_01287 [Chaetomium globosum CBS 148.51] gi|88185584|gb|EAQ93052.1| CHGG_01287 [Chaetomium globosum CBS 148.51]
  misc_feature (1)..(592): NCBI GI: 256735502 Blast Desc: [Nectria haematococca mpVI 77-13-4]
  misc_feature (1)..(592): NCBI GI: 46107806 Blast Desc: FG00786.1 [Gibberella zeae PH-1]
  misc_feature (1)..(592): NCBI GI: 121710430 Blast Desc: calcium/calmodulin-dependent protein kinase, [Aspergillus clavatus NRRL 1] gi|119400981|gb|EAW11405.1| calcium/calmodulin-dependent protein kinase, [Aspergillus NRRL 1]
  misc_feature (1)..(592): NCBI GI: 169779017 Blast Desc: [Aspergillus oryzae RIB40] gi|83772712|dbj|BAE62840.1| protein product [Aspergillus oryzae]
  misc_feature (1)..(592): NCBI GI: 189209409 Blast Desc: calcium/calmodulin-dependent protein kinase type 2 [Pyrenophora tritici-repentis Pt-1C-BFP] gi|187977130|gb|EDU43756.1| calcium/calmodulin-dependent protein
  misc_feature (1)..(592): NCBI GI: 156054710 Blast Desc: SS1G_06203 [Sclerotinia sclerotiorum 1980] gi|154703983|gb|EDO03722.1| SS1G_06203 [Sclerotinia sclerotiorum 1980]
  misc_feature (99)..(530): SWISSPROT Homolog: EC 2.7.11.1 Non-specific serine/threonine protein kinase
  misc_feature: Useful for introducing or modulating the production of volatile compounds
MSTIQQLKNFIRHGKQARANNYDDSSKRNDHSPPAPQKVMAHATEPGLGANNMPNPGQPIPDAYSVQPGDMQNRAAQADGVAAHHAEANQHVRSHDDSRANDAHLAKLVQEENESRSKFPKYPGLERWQLLEKMGDGAFSNVYRAKDLTGDAGECAIKVVRKFEMNNMQRANILKEVQIMRQLDHPNIIRLVDFTESRQYYYIILELAPGGELFHQIVRLTYFSEELSRHVIVQVAKALEYLHEECGVVHRDIKPENILFRPIPFVPSKVPKPKQPGDEDKVDEGEFVPGVGSGGIGQIKIADFGLSKIVWDKQTMTPCGTVGYTAPEIVKDERYSKSVDMWALGCVLYTLLCGFPPFYDESIEVLTEKVAKGQYTFLSPWWDDISKSAQDLISHLLTVDPDKRYTIREFLNHPWIAGSGPTPRDEKKQQYGDSLRAFDSSRLMDGERRMDFRSPGAVNLREIFDVGYSVHRQEEEAKRRKQVGAKAAGVAPSRLTELNEESSDDDGKTENYAHKSDASQLEQSMRNTNLGKDQERGRERGRHEEKQARGYGQHSAAVAQAARQQVRDRQKQRGAFELNMDGATLLGRRAHKPATSVGGF

SEQ ID NO: 24285 - DNA, 3192 bp, Muscodor strobelii; identical to SEQ ID NO: 24282
  misc_feature: SGI EST ID NO. CUFF.57633.4
  misc_feature: Variant of the nucleotide sequence at SEQ ID NO 24283

SEQ ID NO: 24286 - DNA, 1338 bp, Muscodor strobelii
  misc_feature: SGI cDNA ID NO. 568279
  misc_feature: Encodes the peptide sequence at SEQ ID NO 24287
atggaaaaccggaatacaagcatcccagatgactgggagcacgtagatgacgacactttctctgtccggtctctaccagcgtccgatgatgagctgctcaacccgtccccaccttccgagtcgagacccacgagtcctaccgtagatgcgtcttctgatactctgcgtgacttgcagtattcaccgcataattcacagcctcaacttgaccatctagaaaatgtcgaccaaaacgagaaacatggcaacgcggacaccgatgatatttcgtgtgtcagagacacgaccagtacaggaaccgacaatggcaagcttaaacaagtcctcgctacggcaatcaatcctcagatcctagagtccaatgccctctccgttcaaattcaacttcaaaggatggctacagacatcacccattataccctaaaggggggaaggcttgatgatgatatctacaatcagattcaaagtctatgttgggtgatgtatgatagtgtggcggaactgaaggacatactccactcctattcggaatactgcaaatcacaagaacgatctatcacgcttcccatcgatcctgggctgtacgaatggttgggcggcctcttggaggagctcataaacctcaaaaaatcaataaatgagccggtctcattctccaagtctcttccgtacttgaaaaagcatcgggagagcttaagcagctacaacacccagatcgaggtgttcttaccggtgatgcaaattgacttcgctgaatttcatactgctggtctgtatatgttggagagcaacaataagaaattcgctaccgtgcgcccagaacgtacctcatcgacggatgaacgctttgggcatagtcatctagcacctggaaataagatctctcacttacgacgggaactgtacaacttgagagatgcgatatgttcttacctcgaagaagctaacggctgtctgaagctggtgatatccaacacagtcgatcgcgcagctttacaaaccgtcacatcaagctatggcgatatcagaaaaaccctggaaataatgctgtcaaatcacgcttcggattggattgactacagtacggcgggtggattaacatacccggaattttgtcaattggatccggacaccattcgtttgatcatccctcagcttcacgaggtcaagaacgacctcttcctcgcagcgcagaaagctcgagaatgtcgttacatgaatgaccctgatggtcatatagaagatgagggtgtgattctgcgagactcaaccattgacatatcatgcaacatcgcggagatgctgctctcccttttccgtctcaggcaagaagcatag

SEQ ID NO: 24287 - protein, 445 aa, Muscodor strobelii
  misc_feature: SGI Peptide ID NO. 568279
  misc_feature (2)..(393): NCBI GI: 256722627 Blast Desc: NECHADRAFT_101756 [Nectria haematococca mpVI 77-13-4]
MENRNTSIPDDWEHVDDDTFSVRSLPASDDELLNPSPPSESRPTSPTVDASSDTLRDLQYSPHNSQPQLDHLENVDQNEKHGNADTDDISCVRDTTSTGTDNGKLKQVLATAINPQILESNALSVQIQLQRMATDITHYTLKGGRLDDDIYNQIQSLCWVMYDSVAELKDILHSYSEYCKSQERSITLPIDPGLYEWLGGLLEELINLKKSINEPVSFSKSLPYLKKHRESLSSYNTQIEVFLPVMQIDFAEFHTAGLYMLESNNKKFATVRPERTSSTDERFGHSHLAPGNKISHLRRELYNLRDAICSYLEEANGCLKLVISNTVDRAALQTVTSSYGDIRKTLEIMLSNHASDWIDYSTAGGLTYPEFCQLDPDTIRLIIPQLHEVKNDLFLAAQKARECRYMNDPDGHIEDEGVILRDSTIDISCNIAEMLLSLFRLRQEA

SEQ ID NO: 24288 - DNA, 2084 bp, Muscodor strobelii
  misc_feature: SGI EST ID NO. CUFF.57276.0
  misc_feature: Variant of the nucleotide sequence at SEQ ID NO 24286
cacggctgcctggtgacggaggcaaggcggctctgcttcaacttacgaattaactccctcccactgataagctatctggcttctaccgatgcgtctgtctaacctgccggcccaacttaccagaaaaagagttggcgaagataaattttgacttcacagctcaacagttgatgccctacaatcaaacacgcaagcactagattttctggtgcgtgtactatcagcactccaataacaattccattttaacccctcctactcagtgatctctcaaaaaccaccgtctcagcctcatatttacttcctctctcccacctcgcagctcccggctagccttgcccacgccctaccatcaaatacgtcaattgggtattagcagtcagtcggtgagtcacggattcagctctgattgatgtgccggtagatcacactcgctatctgccggcgcgatccctctcatcgccatggaaaaccggaatacaagcatcccagatgactgggagcacgtagatgacgacactttctctgtccggtctctaccagcgtccgatgatgagctgctcaacccgtccccaccttccgagtcgagacccacgagtcctaccgtagatgcgtcttctgatactctgcgtgacttgcagtattcaccgcataattcacagcctcaacttgaccatctagaaaatgtcgaccaaaacgagaaacatggcaacgcggacaccgatgatatttcgtgtgtcagagacacgaccagtacaggaaccgacaatggcaagcttaaacaagtcctcgctacggcaatcaatcctcagatcctagagtccaatgccctctccgttcaaattcaacttcaaaggatggctacagacatcacccattataccctaaaggggggaaggcttgatgatgatatctacaatcagattcaaagtctatgttgggtgatgtatgatagtgtggcggaactgaaggacatactccactcctattcggaatactgcaaatcacaagaacgatctatcacgcttcccatcgatcctgggctgtacgaatggttgggcggcctcttggaggagctcataaacctcaaaaaatcaataaatgagccggtctcattctccaagtctcttccgtacttgaaaaagcatcgggagagcttaagcagctacaacacccagatcgaggtgttcttaccggtgatgcaaattgacttcgctgaatttcatactgctggtctgtatatgttggagagcaacaataagaaattcgctaccgtgcgcccagaacgtacctcatcgacggatgaacgctttgggcatagtcatctagcacctggaaataagatctctcacttacgacgggaactgtacaacttgagagatgcgatatgttcttacctcgaagaagctaacggctgtctgaagctggtgatatccaacacagtcgatcgcgcagctttacaaaccgtcacatcaagctatggcgatatcagaaaaaccctggaaataatgctgtcaaatcacgcttcggattggattgactacagtacggcgggtggattaacatacccggaattttgtcaattggatccggacaccattcgtttgatcatccctcagcttcacgaggtcaagaacgacctcttcctcgcagcgcagaaagctcgagaatgtcgttacatgaatgaccctgatggtcatatagaagatgagggtgtgattctgcgagactcaaccattgacatatcatgcaacatcgcggagatgctgctctcccttttccgtctcaggcaagaagcatagttgagttcaggtcgttcgttgcctctagctcatggacgctgagaacactggctaagagatttacgattgttgtatgatggtgttagcatttgttgtattagcgtcgtgtaagggtagcgtaggtaaggtatagtttgcacggcatcagattctgcgcgcttttctctcggtaaattagctggcaatactaggtttagcatgaatgacgaacatttcaacgaagccagaactgttaagttctttctaattttctcttcctgctatacagagaatcgttgcgag

SEQ ID NO: 24289 - DNA, 786 bp, Muscodor strobelii
  misc_feature: SGI cDNA ID NO. 568280
  misc_feature: Encodes the peptide sequence at SEQ ID NO 24290
atggaaaaccggaatacaagcatcccagatgactgggagcacgtagatgacgacactttctctgtccggtctctaccagcgtccgatgatgagctgctcaacccgtccccaccttccgagtcgagacccacgagtcctaccgtagatgcgtcttctgatactctgcgtgacttgcagtattcaccgcataattcacagcctcaacttgaccatctagaaaatgtcgaccaaaacgagaaacatggcaacgcggacaccgatgatatttcgtgtgtcagagacacgaccagtacaggaaccgacaatggcaagcttaaacaagtcctcgctacggcaatcaatcctcagatcctagagtccaatgccctctccgttcaaattcaacttcaaaggatggctacagacatcacccattataccctaaaggggggaaggcttgatgatgatatctacaatcagattcaaagtctatgttgggtgatgtatgatagtgtggcggaactgaaggacatactccactcctattcggaatactgcaaatcacaagaacgatctatcacgcttcccatcgatcctgggctgtacgaatggttgggcggcctcttggaggagctcataaacctcaaaaaatcaataaatgagccggtctcattctccaagtctcttccgtacttgaaaaagcatcgggagagcttaagcagctacaacacccagatcgaggtgttcttaccggtgatgcaaatgtacgtcaattttatacctgagatgtgttccaatctgatctaa

SEQ ID NO: 24290 - protein, 261 aa, Muscodor strobelii
  misc_feature: SGI Peptide ID NO. 568280
MENRNTSIPDDWEHVDDDTFSVRSLPASDDELLNPSPPSESRPTSPTVDASSDTLRDLQYSPHNSQPQLDHLENVDQNEKHGNADTDDISCVRDTTSTGTDNGKLKQVLATAINPQILESNALSVQIQLQRMATDITHYTLKGGRLDDDIYNQIQSLCWVMYDSVAELKDILHSYSEYCKSQERSITLPIDPGLYEWLGGLLEELINLKKSINEPVSFSKSLPYLKKHRESLSSYNTQIEVFLPVMQMYVNFIPEMCSNLI

SEQ ID NO: 24291 - DNA, 2084 bp, Muscodor strobelii; identical to SEQ ID NO: 24288
  misc_feature: SGI EST ID NO. CUFF.57276.0
  misc_feature: Variant of the nucleotide sequence at SEQ ID NO 24289

SEQ ID NO: 24292 - DNA, 486 bp, Muscodor strobelii
  misc_feature: SGI cDNA ID NO. 568281
  misc_feature: Reduced expression when VOC is produced
  misc_feature: Encodes the peptide sequence at SEQ ID NO 24293
atgctacttcagaaagccatagctaccgcgacactcatcgcttccgcttgtgccgcaaatgactttgtcttgagctttacgtggacaggccctcaagtctgtaaaagctatccatgcccatactccttcgatgtctcaagcccagctttcttatcaagcgacggaacggaagtaatcccaaatttcagtggatcttgctcaggcactgttgatcacccgctacaagcttgcacattggccccgacagagggaaacccgtatcaggcgttgtcggggaatttcagctcatttgagacgagcggcgtggggaatggactgattgctgtgcagctgacttggtttgacaataagtcgttcattaatcgaactttgactacttcgacagctttccagggaacacagtgggatgtgaaccttggagaaaacccgaacggtactcccgcaaagaaatcaacaatgttgagatcgcgcaggcggatgatgtag

SEQ ID NO: 24293 - protein, 161 aa, Muscodor strobelii
  misc_feature: SGI Peptide ID NO. 568281
  misc_feature: Useful for introducing or modulating the production of volatile compounds
MLLQKAIATATLIASACAANDFVLSFTWTGPQVCKSYPCPYSFDVSSPAFLSSDGTEVIPNFSGSCSGTVDHPLQACTLAPTEGNPYQALSGNFSSFETSGVGNGLIAVQLTWFDNKSFINRTLTTSTAFQGTQWDVNLGENPNGTPAKKSTMLRSRRRMM

SEQ ID NO: 24294 - DNA, 972 bp, Muscodor strobelii
  misc_feature: SGI EST ID NO. CUFF.57282.0
  misc_feature: Variant of the nucleotide sequence at SEQ ID NO 24292
atttatagcatactgtgcaaccatggtgcatgcaggtgcgatctgcaatgcgacccagctccaaattgcctgccgtcatctagaattagctaggcttcatcggaatccgaaaatctctttgatcatttaaacaactacgaggctgcagccattgaggttcaatcgttgtctatatgctctgtcttatttctccgtcaactcagtttctgtcacgattgcctatcaaagtgcacaataatcgacacgacatcacgacgattgatacccacgatgctacttcagaaagccatagctaccgcgacactcatcgcttccgcttgtgccgcaaatgactttgtcttgagctttacgtggacaggccctcaagtctgtaaaagctatccatgcccatactccttcgatgtctcaagcccagctttcttatcaagcgacggaacggaagtaatcccaaatttcagtggatcttgctcaggcactgttgatcacccgctacaagcttgcacattggccccgacagagggaaacccgtatcaggcgttgtcggggaatttcagctcatttgagacgagcggcgtggggaatggactgattgctgtgcagctgacttggtttgacaataagtcgttcattaatcgaactttgactacttcgacagctttccagggaacacagtgggatgtgaaccttggagaaaacccgaacggtactcccgcaaagaaatcaacaatgttgagatcgcgcaggcggatgatgtaggatgcagacctagggagactctgaagcagcaggacatagttcatggggtggtgacaacaaacgatgtcacaaaatgaaatcgttgggcctgttattgggtagagggacagaaacacattggtaccgatacatttcctcgggcgcgcatcaataaacggtcaattacgactcagaaagtaatttagctataataattcataatccgtggcattacat

SEQ ID NO: 24295 - DNA, 804 bp, Muscodor strobelii
  misc_feature: SGI cDNA ID NO. 568282
  misc_feature: Encodes the peptide sequence at SEQ ID NO 24296
atgcctggagctactggagacccatacatgctgaacgctgagggagagtgggagcgcagacgcctgaacgagcagttctacttcatccacgatgtgatgaacgatgacctcttgcccccacacattgccgaagaagtctacgccaacccgaacgtcaagattgtggagctcgcaaccggctccggtgtttggcttgaggacatggcgaagacgcttccggagaccgccgaactagtcggccttgactacaacgctgacaacttccccaagacgcacgccaaaaatgtcagcttcgacgttggcaacttcttggagcctttccccgagaaatactggggcaagttcgacgttgtgcacttccgcatctgtgttatgggaatgaaaatcggatacggccccactatgataaagcatgcccagaagcttctgaagcccggcggttggttcacctggaccgatctccagccgatgaacgcgtatgccgagcctccgagtgaggctgtccaccgcttcaacaagctcttctatgccatgtgcaacaaaattggacttgaccgaggaatcccattgtccattcccaagtggactagagaaggtgggctggtggatgtcgggtctaccagctaccacattaacggagataacgataagccctggaagcagggtgactgggtcgagagacaacagacatgggctctcggcgcactgaccgccatatcgaagagcatcttcgcccacggcggtggtgaaggcctcaagactgaagaagatctcgatgagctgttggcccaaatggtttgttga

SEQ ID NO: 24296 - protein, 267 aa, Muscodor strobelii
  misc_feature: SGI Peptide ID NO. 568282
  misc_feature (55)..(149): Pfam Id: PF08242 Pfam Desc: Methyltransferase domain
  misc_feature (1)..(184): NCBI GI: 255932929 Blast Desc: Pc12g11160 [Penicillium chrysogenum Wisconsin 54-1255] gi|211582554|emb|CAP80743.1| Pc12g11160 [Penicillium chrysogenum Wisconsin 54-1255]
  misc_feature (1)..(154): NCBI GI: 226286195 Blast Desc: conserved [Paracoccidioides brasiliensis Pb01]
  misc_feature (1)..(154): NCBI GI: 226291659 Blast Desc: conserved [Paracoccidioides brasiliensis Pb18]
  misc_feature (1)..(248): NCBI GI: 70989441 Blast Desc: LaeA-like methyltransferase [Aspergillus fumigatus Af293] gi|66847201|gb|EAL87532.1| LaeA-like methyltransferase, [Aspergillus fumigatus Af293]
  misc_feature (1)..(239): NCBI GI: 159128978 Blast Desc: LaeA-like methyltransferase, [Aspergillus fumigatus A1163]
  misc_feature (1)..(248): NCBI GI: 119480077 Blast Desc: LaeA-like methyltransferase, [Neosartorya fischeri NRRL 181] gi|119408221|gb|EAW18170.1| LaeA-like methyltransferase, [Neosartorya fischeri NRRL 181]
  misc_feature (21)..(158): NCBI GI: 170940319 Blast Desc: protein product [Podospora anserina]
  misc_feature (4)..(154): NCBI GI: 70998775 Blast Desc: conserved [Aspergillus fumigatus Af293] gi|66851746|gb|EAL92071.1| conserved [Aspergillus fumigatus Af293] gi|159127128|gb|EDP52243.1| conserved [Aspergillus A1163]
  misc_feature (9)..(158): NCBI GI: 154312154 Blast Desc: BC1G_06110 [Botryotinia fuckeliana B05.10] gi|150850073|gb|EDN25266.1| BC1G_06110 [Botryotinia fuckeliana B05.10]
  misc_feature (4)..(167): NCBI GI: 238839097 Blast Desc: conserved [Microsporum canis CBS 113480]
MPGATGDPYMLNAEGEWERRRLNEQFYFIHDVMNDDLLPPHIAEEVYANPNVKIVELATGSGVWLEDMAKTLPETAELVGLDYNADNFPKTHAKNVSFDVGNFLEPFPEKYWGKFDVVHFRICVMGMKIGYGPTMIKHAQKLLKPGGWFTWTDLQPMNAYAEPPSEAVHRFNKLFYAMCNKIGLDRGIPLSIPKWTREGGLVDVGSTSYHINGDNDKPWKQGDWVERQQTWALGALTAISKSIFAHGGGEGLKTEEDLDELLAQMVC

SEQ ID NO: 24297 - DNA, 1880 bp, Muscodor strobelii
  misc_feature: SGI EST ID NO. CUFF.57286.0
  misc_feature: Variant of the nucleotide sequence at SEQ ID NO 24295
cttatacgtacaggtttcatgtcgagtcttgacgaaacgacaaaaccaagacccaagtttcaaaacaatgaatgcattgagtaaaaatgaccggattttggtctgtaaggactttcaaagctagtggtaccgaaacaggataagcctacggaagtatttcattcttgcgatatacatatctccctatcgagcctaccacccaagcagtcaagtcctacggggcatctggtatgaccactgatagattgtactagcacctgattgaatcagatcacatacttatcatagtcgaatcggaagatccacgggtttcattgctcccgatgttcgcatcgccgtcgccgtcccttgaggggaacgtcggacgacgggtggtgcagcttggtcttgactgcgtgtgtagtcgtcctgtaggcccacctaacggacctgatgttcaacttctgcgcggatgacatctagtataaaggactcgtagatcccggcgacagaataagcttaattttacgctatcaacacaaccaaacacactaacaaagcatcaaacatcaacaacatcaacaaccgacaaaatgcctggagctactggagacccatacatgctgaacgctgagggagagtgggagcgcagacgcctgaacgagcagttctacttcatccacgatgtgatgaacgatgacctcttgcccccacacattgccgaagaagtctacgccaacccgaacgtcaagattgtggagctcgcaaccggctccggtgtttggcttgaggacatggcgaagacgcttccggagaccgccgaactagtcggccttgactacaacgctgacaacttccccaagacgcacgccaaaaatgtcagcttcgacgttggcaacttcttggagcctttccccgagaaatactggggcaagttcgacgttgtgcacttccgcatctgtgttatgggaatgaaaatcggatacggccccactatgataaagcatgcccagaagcttctgaagcccggcggttggttcacctggaccgatctccagccgatgaacgcgtatgccgagcctccgagtgaggctgtccaccgcttcaacaagctcttctatgccatgtgcaacaaaattggacttgaccgaggaatcccattgtccattcccaagtggactagagaaggtgggctggtggatgtcgggtctaccagctaccacattaacggagataacgataagccctggaagcagggtgactgggtcgagagacaacagacatgggctctcggcgcactgaccgccatatcgaagagcatcttcgcccacggcggtggtgaaggcctcaagactgaagaagatctcgatgagctgttggcccaaatggtttgttgaatttcccgaatatcgaattcgttgcgcttcttccgaaagctcctatgctgacgttcttgcagtaagcaaaataaccctatagcaaaactactatgaaagatacttccccaacggataatctcgttcgagatgttatcaaggtattagtgtacacttagagacgtttgctaacatccacatagtaagaaggatcttagcggcgatacgaagttcaacttgcatgtactccgggtctggggtcgccttccggcttagatgggatgatttacgatgcatgatatgggagtaaagagggttataggatatttagagggagtttttcaatttcaaaggactaaaacatgaatcagtgtttctgacacagtgacaatggaaatcggtgatcggtgatggttatgtgactacagcattgagcaatcctttcgttcaataggcaaggccaaagtaagcgactagcttgtctgtgcaagttgagaaagaatcaaatttcaccgaaagttcgaa

SEQ ID NO: 24298 - DNA, 825 bp, Muscodor strobelii
  misc_feature: SGI cDNA ID NO. 568283
  misc_feature: Reduced expression when VOC is produced
  misc_feature: Encodes the peptide sequence at SEQ ID NO 24299
atgcccgatgtagcagcagatctagctgcgcttcaagcgcaggtcgcaaagctacagtcacagcttgcacatgcccgtcaaacagcattcaattcatcacaaaccgagaatgacgcaaggttagcatggctcaaagacgaacatcatcgcgcaatgcagcgctgcgcgactgaaatcataaatctcggccacgatgacatgatctccgaggcagagcgcagtatggaaaagcatcgcgtcttccacaccgatgcaatgcgtgaggcagacgagagactagctgctgcgcaaggcgcgatcgaggaacatcggatattccatgctgctgcgatgaaagaggctgatgagcgacttgctatggccgacgacagtatgattgaacatcggaagttccatgccgaggccatgcgcgaagcagatgagcgcttggccgctgcacaaggagctattgaagaacatcgcaagttccatgctgcggctatgaaagaggcagatgaacgattagcggctgcagatgatagtatggtcgagcacagaaaatttcacgtgcaagctatgcgtgaagccgatgagaggcttgcagctgctcagggcgcgatagaagaacatagaaaatttcatgccgctgctatgagggaagctgatgagagattagacgctgcggatgatagtatgattgagcaccgcaagtttcatgcacaagcgatgagagaagcggacgaaagattgggcagagcggatgatgcaatggttgagcataggaagttccataccttagctatgcaggaggcggataggcgacttgctggaacggcaattgcataa

SEQ ID NO: 24299 - protein, 274 aa, Muscodor strobelii
  misc_feature: SGI Peptide ID NO. 568283
  misc_feature: Useful for introducing or modulating the production of volatile compounds
MPDVAADLAALQAQVAKLQSQLAHARQTAFNSSQTENDARLAWLKDEHHRAMQRCATEIINLGHDDMISEAERSMEKHRVFHTDAMREADERLAAAQGAIEEHRIFHAAAMKEADERLAMADDSMIEHRKFHAEAMREADERLAAAQGAIEEHRKFHAAAMKEADERLAAADDSMVEHRKFHVQAMREADERLAAAQGAIEEHRKFHAAAMREADERLDAADDSMIEHRKFHAQAMREADERLGRADDAMVEHRKFHTLAMQEADRRLAGTAIA

SEQ ID NO: 24300 - DNA, 994 bp, Muscodor strobelii
  misc_feature: SGI EST ID NO. CUFF.57294.0
  misc_feature: Variant of the nucleotide sequence at SEQ ID NO 24298
ttcattttcattaaattgaattgcttcaatcttttattaagaagaaagccttgctgaaaggtcctcgaagctcacgttgacgatgcccgatgtagcagcagatctagctgcgcttcaagcgcaggtcgcaaagctacagtcacagcttgcacatgcccgtcaaacagcattcaattcatcacaaaccgagaatgacgcaaggttagcatggctcaaagacgaacatcatcgcgcaatgcagcgctgcgcgactgaaatcataaatctcggccacgatgacatgatctccgaggcagagcgcagtatggaaaagcatcgcgtcttccacaccgatgcaatgcgtgaggcagacgagagactagctgctgcgcaaggcgcgatcgaggaacatcggatattccatgctgctgcgatgaaagaggctgatgagcgacttgctatggccgacgacagtatgattgaacatcggaagttccatgccgaggccatgcgcgaagcagatgagcgcttggccgctgcacaaggagctattgaagaacatcgcaagttccatgctgcggctatgaaagaggcagatgaacgattagcggctgcagatgatagtatggtcgagcacagaaaatttcacgtgcaagctatgcgtgaagccgatgagaggcttgcagctgctcagggcgcgatagaagaacatagaaaatttcatgccgctgctatgagggaagctgatgagagattagacgctgcggatgatagtatgattgagcaccgcaagtttcatgcacaagcgatgagagaagcggacgaaagattgggcagagcggatgatgcaatggttgagcataggaagttccataccttagctatgcaggaggcggataggcgacttgctggaacggcaattgcataagaagtagtgtattgtatctgggaattggcgttccggttgggtaatatcaagatatcactgttaacgaagctcatttaatgacagact

SEQ ID NO: 24301 - DNA, 1278 bp, Muscodor strobelii
  misc_feature: SGI cDNA ID NO. 568284
  misc_feature: Encodes the peptide sequence at SEQ ID NO 24302
atggcggactctactacatcctactcgtgcctgatttgcgagaaaccagccgacaagaaatgcggtcgatgcaagaccactgcctactgctcttcccgatgccagaaactcgacttcagtattcacaagcttctctgcaaacaatttgctgaaatcgacatgatttcacggcccaccgaacatcatatccttgcgtttcttttccctgtggaccaagaaagaccaaaacttatctggctctcttcgatttggaaagcatccggtaaaatgaaggcatctgatgagcaccagcaagcggtaccagatgtgcccgcctttctcgggaatgatacccaaatacgcggtcagccccttgtccagaacgacgtgttatcaagacgtctcacagaccagctcatcattaattggcgcagcacattcaatcaggatggctcacagctcaactcaagcattgcaacgatcccaggcttcgattccattcgtgcccaatggcgtggccctatcatggcatatagtatgtctgggttggacgcacgggcgaccaagtttagagatgtcgacatggacgactttcgccatgttgcagattggctcacttcttttaagtccatgcaattgcaacttaaccatggcctgctaccaactaatggtctattaccaccgatgccgttctgtcatgatgacgacgccgtcccaacgatcaagggcgtaagaatcaactgcgttggagaccgaaccatattcaacaagccagaatttgaccaagtctgtctcgtcccgagccaccacatcttcacaagacccgacaactcagccgtaggagataaggtcgagcttcccattattatggcagcctgcgtccctcatccagcatgggcaacatcgattgccgtagagccatttacgagagaaaatccatatagtctttcggtcgcaaagtaccttattgccaaccaccggggcctaacacccggaatttatttcaggggtaacgaccctcaacaacgcccaacggagctctcaggaaccacaatcgtagtgcgcaaagacaagaagccattaactatagagcatatgatgtgtctctgcgcgtattcttgggaactcgagagatctgtgcgttccaaaaggctctcgaaccctaaccacaatttcacagtcgatgaagtgctgtctgaggtctcgccaaactcattcgccgcgttttggactgagtggtgcaatgacaagacgaaaggaggtgccaagcttgatacgacgtcgccttacaacatctga

SEQ ID NO: 24302 - protein, 425 aa, Muscodor strobelii
  misc_feature: SGI Peptide ID NO. 568284
  misc_feature (10)..(46): Pfam Id: PF01753 Pfam Desc: MYND finger
  misc_feature (1)..(279): NCBI GI: 169600037 Blast Desc: SNOG_02848 [Phaeosphaeria nodorum SN15] gi|160705367|gb|EAT89579.2| SNOG_02848 [Phaeosphaeria nodorum SN15]
  misc_feature (10)..(405): NCBI GI: 115399660 Blast Desc: [Aspergillus terreus NIH2624] gi|114191106|gb|EAU32806.1| [Aspergillus terreus NIH2624]
  misc_feature (1)..(421): NCBI GI: 169600053 Blast Desc: SNOG_02856 [Phaeosphaeria nodorum SN15] gi|111068467|gb|EAT89587.1| SNOG_02856 [Phaeosphaeria nodorum SN15]
  misc_feature (10)..(201): NCBI GI: 212538595 Blast Desc: PMAA_098760 [Penicillium marneffei ATCC 18224] gi|210069195|gb|EEA23286.1| PMAA_098760 [Penicillium marneffei ATCC 18224]
  misc_feature (10)..(411): NCBI GI: 145230487 Blast Desc: An01g11400 [Aspergillus niger] gi|134055670|emb|CAK44044.1| protein product [Aspergillus niger]
  misc_feature (5)..(204): NCBI GI: 156061057 Blast Desc: [Sclerotinia sclerotiorum 1980] gi|154700075|gb|EDN99813.1| [Sclerotinia sclerotiorum 1980]
  misc_feature (36)..(423): NCBI GI: 169602325 Blast Desc: SNOG_04159 [Phaeosphaeria nodorum SN15] gi|160706143|gb|EAT87919.2| SNOG_04159 [Phaeosphaeria nodorum SN15]
  misc_feature (10)..(202): NCBI GI: 170091180 Blast Desc: [Laccaria bicolor S238N-H82] gi|164648305|gb|EDR12548.1| [Laccaria bicolor S238N-H82]
  misc_feature (12)..(214): NCBI GI: 170092048 Blast Desc: [Laccaria bicolor S238N-H82] gi|164648739|gb|EDR12982.1| [Laccaria bicolor S238N-H82]
  misc_feature (10)..(202): NCBI GI: 154313667 Blast Desc: [Botryotinia fuckeliana B05.10] gi|150849265|gb|EDN24458.1| [Botryotinia fuckeliana B05.10]
MADSTTSYSCLICEKPADKKCGRCKTTAYCSSRCQKLDFSIHKLLCKQFAEIDMISRPTEHHILAFLFPVDQERPKLIWLSSIWKASGKMKASDEHQQAVPDVPAFLGNDTQIRGQPLVQNDVLSRRLTDQLIINWRSTFNQDGSQLNSSIATIPGFDSIRAQWRGPIMAYSMSGLDARATKFRDVDMDDFRHVADWLTSFKSMQLQLNHGLLPTNGLLPPMPFCHDDDAVPTIKGVRINCVGDRTIFNKPEFDQVCLVPSHHIFTRPDNSAVGDKVELPIIMAACVPHPAWATSIAVEPFTRENPYSLSVAKYLIANHRGLTPGIYFRGNDPQQRPTELSGTTIVVRKDKKPLTIEHMMCLCAYSWELERSVRSKRLSNPNHNFTVDEVLSEVSPNSFAAFWTEWCNDKTKGGAKLDTTSPYNI

SEQ ID NO: 24303 - DNA, 791 bp, Muscodor strobelii
  misc_feature: SGI EST ID NO. CUFF.57303.0
  misc_feature: Variant of the nucleotide sequence at SEQ ID NO 24301
gttgttttgcaaagttctattcatatctcgcgccttgtctttcgttcaagagcgctccttgcgcttctccctccacagaaattggaagccgttcagctcccaaatcatcgcgtctccttcgtcgttgcgtttgggcaccgcaaaacacagtacgctagacaagcacaactgaaggcagctacgtcatggcggactctactacatcctactcgtgcctgatttgcgagaaaccagccgacaagaaatgcggtcgatgcaagaccactgcctactgctcttcccgatgccagaaactcgacttcagtattcacaagcttctctgcaaacaatttgctgaaatcgacatgatttcacggcccaccgaacatcatatccttgcgtttcttttccctgtggaccaagaaagaccaaaacttatctggctctcttcgatttggaaagcatccggtaaaatgaaggcatctgatgagcaccagcaagcggtaccagatgtgcccgcctttctcgggaatgatacccaaatacgcggtcagccccttgtccagaacgacgtgttatcaagacgtctcacagaccagctcatcattaattggcgcagcacattcaatcaggatggctcacagctcaactcaagcattgcaacgatcccaggcttcgattccattcgtgcccaatggcgtggccctatcatggcatatagtatgtctgggttggacgcacgggcgaccaagtttagagatgtcgacatggacgactttcgccatgttgcagattggctcacttcttttaag

SEQ ID NO: 24304 - DNA, 1005 bp, Muscodor strobelii
  misc_feature: SGI cDNA ID NO. 568285
  misc_feature: Reduced expression when VOC is produced
  misc_feature: Encodes the peptide sequence at SEQ ID NO 24305
atggcatcggcagcgggcgccttacagcgcctctccaagttcgctggaccggtgcttctaccagcgatcgcatatggggcctacaagggcaatgctgccggcgcaattcagtcattttttacgggaccaggcagaacgagtcgcatcatcgcattacttgttgtctggtggaactggaagagtctgcctttagcatggacggcccgcgtcttcaacgcaatgatctcacatttcctaattcgacgtttccacacccacggccctgacaagctcttccaccccgtcgtgaccgaaacgcacgtcaccctgctcgaggtcgactacaacatccacaagtccaactcaacatacttcgccgatctcgacgtgagccgctcccaccttgtctcacacctctttgctaaaggctgccgtgccttgggcagcaattcctcgacaaagctcgtcatggatccatccgacccctcacgtccagcgaaggggaaattcggcgttatgctaggtggcgtgcagtgcagcttcaagaaggagatacagccttaccagaaatatgaaatgtggtcaagggtgctaagttgggatcgaaaatggatgtacatcgtcacgcatttcgtcgaaaagggtgcatccaaacctcggaaagatggcgtggagccattggactggcagaagaagatctatgcttctgccgtgagcaaatatgttttcaaaatcggccgtttgacaatccaccccgctgttgttattggagccagcgacatgctgcccgagcgcccgggcggttgggtcgcggaagagaatggtttcacgacccagcctaccgccaatggacacaccaatggacacacggctgaggacaccaccgaaacatgggactggaagcgcacggaagcggagcgtgtgaaaggactggaatatgcagtgcatctagcttcgctggatggtttactaagccgttttgaccctgaggaaaccggtgctctgggaaagtttgcgctaggttga

SEQ ID NO: 24305 - protein, 334 aa, Muscodor strobelii
  misc_feature: SGI Peptide ID NO. 568285
  misc_feature (25)..(334): NCBI GI: 240276954 Blast Desc: capsule polysaccharide biosynthesis protein [Ajellomyces capsulatus H143]
  misc_feature (1)..(331): NCBI GI: 256731826 Blast Desc: NECHADRAFT_41621 [Nectria haematococca mpVI 77-13-4]
  misc_feature (1)..(332): NCBI GI: 46137387 Blast Desc: FG10209.1 [Gibberella zeae PH-1]
  misc_feature (7)..(334): NCBI GI: 85090354 Blast Desc: NCU09852 [Neurospora crassa OR74A] gi|28919734|gb|EAA29140.1| conserved [Neurospora crassa OR74A]
  misc_feature (7)..(334): NCBI GI: 171694459 Blast Desc: protein product [Podospora anserina] gi|170947178|emb|CAP73983.1| protein product [Podospora anserina]
  misc_feature (24)..(331): NCBI GI: 156056218 Blast Desc: SS1G_05461 [Sclerotinia sclerotiorum 1980] gi|154703245|gb|EDO02984.1| SS1G_05461 [Sclerotinia sclerotiorum 1980]
  misc_feature (35)..(329): NCBI GI: 256721259 Blast Desc: NECHADRAFT_44608 [Nectria haematococca mpVI 77-13-4]
  misc_feature (22)..(331): NCBI GI: 154312226 Blast Desc: BC1G_06146 [Botryotinia fuckeliana B05.10] gi|150850109|gb|EDN25302.1| BC1G_06146 [Botryotinia fuckeliana B05.10]
  misc_feature (1)..(332): NCBI GI: 39975193 Blast Desc: MGG_00257 [Magnaporthe grisea 70-15] gi|145018875|gb|EDK03154.1| MGG_00257 [Magnaporthe grisea 70-15]
  misc_feature (86)..(334): NCBI GI: 116197571 Blast Desc: CHGG_06941 [Chaetomium globosum CBS 148.51] gi|88178220|gb|EAQ85688.1| CHGG_06941 [Chaetomium globosum CBS 148.51]
  misc_feature: Useful for introducing or modulating the production of volatile compounds
MASAAGALQRLSKFAGPVLLPAIAYGAYKGNAAGAIQSFFTGPGRTSRIIALLVVWWNWKSLPLAWTARVFNAMISHFLIRRFHTHGPDKLFHPVVTETHVTLLEVDYNIHKSNSTYFADLDVSRSHLVSHLFAKGCRALGSNSSTKLVMDPSDPSRPAKGKFGVMLGGVQCSFKKEIQPYQKYEMWSRVLSWDRKWMYIVTHFVEKGASKPRKDGVEPLDWQKKIYASAVSKYVFKIGRLTIHPAVVIGASDMLPERPGGWVAEENGFTTQPTANGHTNGHTAEDTTETWDWKRTEAERVKGLEYAVHLASLDGLLSRFDPEETGALGKFALG

SEQ ID NO: 24306 - DNA, 2874 bp, Muscodor strobelii
  misc_feature: SGI EST ID NO. CUFF.57359.0
  misc_feature: Variant of the nucleotide sequence at SEQ ID NO 24304
tgtgtatcgggtccccccttcccccaacgggataaacccacaaattgagtgaacagaagatgaaatttagtagcggtatgttttgcgtgcagctatctcaatggcttgaaggtcttctggatgtcggagataagaaagaaggtcggaatgagggaatgagttccacaatcgcgatgcctcggctcgtgccaattattcggcgcaagaatgtggcttactcagggtcctcatcaattattttcaatgagtgttcgcctacctgctattagcggcctaccatcttacctaagtctttcaaacattgttcgcggaagctctatgttataggcttcttagtaatttgttctacccaagaccgtgcttgagagtcctagcggtcggtgtcgacgccatacgcttctagaagtaaacccctccgtctgcatgccgcttgcgccgaacagcaacctcctcgcgaagtgtaccagcacggccctgtgccatctgcgcgccgtgccgctctgggcagtcgctcttttaatactagccctgagcgccatctggtcccgaatccgcgccgccggtccctcaagatccaacagccttcggcccgcgaaagcaagggggtgacgtctgcataaagacctgacaatggcatcggcagcgggcgccttacagcgcctctccaagttcgctggaccggtgcttctaccagcgatcgcatatggggcctacaagggcaatgctgccggcgcaattcagtcattttttacgggaccaggcagaacgagtcgcatcatcgcattacttgttgtctggtggaactggaagagtctgcctttagcatggacggcccgcgtcttcaacgcaatgatctcacatttcctaattcgacgtttccacacccacggccctgacaagctcttccaccccgtcgtgaccgaaacgcacgtcaccctgctcgaggtcgactacaacatccacaagtccaactcaacatacttcgccgatctcgacgtgagccgctcccaccttgtctcacacctctttgctaaaggctgccgtgccttgggcagcaattcctcgacaaagctcgtcatggatccatccgacccctcacgtccagcgaaggggaaattcggcgttatgctaggtggcgtgcagtgcagcttcaagaaggagatacagccttaccagaaatatgaaatgtggtcaagggtgctaagttgggatcgaaaatggatgtacatcgtcacgcatttcgtcgaaaagggtgcatccaaacctcggaaagatggcgtggagccattggactggcagaagaagatctatgcttctgccgtgagcaaatatgttttcaaaatcggccgtttgacaatccaccccgctgttgttattggagccagcgacatgctgcccgagcgcccgggcggttgggtcgcggaagagaatggtttcacgacccagcctaccgccaatggacacaccaatggacacacggctgaggacaccaccgaaacatgggactggaagcgcacggaagcggagcgtgtgaaaggactggaatatgcagtgcatctagcttcgctggatggtttactaagccgttttgaccctgaggaaaccggtgctctgggaaagtttgcgctaggttgacgttccctgactccacagcgttataagcataacaatagacaacgaggaacatcaacgccatgttctagacatcgaaggcacataagatcatcacattagagcttgtacaacaggcatatacccatatagatcatttggaagacattctcggtttttgattatttagagtctagaatctagagtcttatgcaatagaacaactctattgtacaggtcattggagctttaatcactgctcatgaagaaaatgctggatatcaatgccaaacgccttgtgtcatgtgtttttctccatccttcccgtatcacagttgcaccattatcaccatgttcccgtcgtcgatgtgtcggattacttagagtgcaagagcgaacatggcaccgaccatgcccagaccggcagcagcgtgaccagcggcaccgggtgtttccgtagcggatggagcactggttgttgaggacagaaagctgctgatagccgatccagcttcaccggttgcgctcgtcaaggcagagcctgcagcaccagtggcacttgtgaaggctgagccacccgctccggtagcgctggtgatagcagaaccggcatcgcccgtgacactggtgtagagagagctgacgtccgaaccgatagatgagatggcagaacctgcagctcccgtggcgctagtgaatgcggaaccagcattgccggtgaaagatgtgaagtcgccagccaaactagtagcgccacccaccaagctagaaatgccatcaccaaccccgtcagcgatcgaggaaaagatatcgagctgggcggtggcggaagccacgaaaatggaaagagcggcggtcttgatctgcatcttgatgggtgtcgtgaaaatattatttggtgatgaagcgtgttttggcctattgtttcggtctagacgagtaaggcaattgtttaggtgtgaggatggcagatgaggctggtgaaggatagacgaatgagtattgaatagattattgatgttgatgccgaggagataggaggctgttataaagaaatgagatgaaagcccaagttggcgatgatcatcgacgttacactaggtgatgttaaggtgacgacaaggtctaacatcacagccccctgagccccatgctccgtcatagccctgcgatgcgcctttgaaattgctcccaattgcggacaagagtcaggaaatggcgaagatgaagctctacccacttgcccaagtgggacgggtaaga

SEQ ID NO: 24307 - DNA, 489 bp, Muscodor strobelii
  misc_feature: SGI cDNA ID NO. 568286
  misc_feature: Encodes the peptide sequence at SEQ ID NO 24308
atgcagatcaagaccgccgctctttccattttcgtggcttccgccaccgcccagctcgatatcttttcctcgatcgctgacggggttggtgatggcatttctagcttggtgggtggcgctactagtttggctggcgacttcacatctttcaccggcaatgctggttccgcattcactagcgccacgggagctgcaggttctgccatctcatctatcggttcggacgtcagctctctctacaccagtgtcacgggcgatgccggttctgctatcaccagcgctaccggagcgggtggctcagccttcacaagtgccactggtgctgcaggctctgccttgacgagcgcaaccggtgaagctggatcggctatcagcagctttctgtcctcaacaaccagtgctccatccgctacggaaacacccggtgccgctggtcacgctgctgccggtctgggcatggtcggtgccatgttcgctcttgcactctaa

SEQ ID NO: 24308 - protein, 162 aa, Muscodor strobelii
  misc_feature: SGI Peptide ID NO. 568286
MQIKTAALSIFVASATAQLDIFSSIADGVGDGISSLVGGATSLAGDFTSFTGNAGSAFTSATGAAGSAISSIGSDVSSLYTSVTGDAGSAITSATGAGGSAFTSATGAAGSALTSATGEAGSAISSFLSSTTSAPSATETPGAAGHAAAGLGMVGAMFALAL

SEQ ID NO: 24309 - DNA, 1308 bp, Muscodor strobelii
  misc_feature: SGI cDNA ID NO. 568287
  misc_feature: Reduced expression when VOC is produced
  misc_feature: Encodes the peptide sequence at SEQ ID NO 24310
atgctaccagcgcaatgggtgtgtaggcgctgcatcacggctctggccaggccgtcggaccggccattcattcgctttgctagcacagcttcgccaaatactttaccacccattttgatcgaccgcgcacggaacatcgcccaggagcatgaccaacttgctgcttctctcgaatcaagctttgatgtcaagatagcgaagaaagttggcgagttgtcacgcgttgcagatgcctggaaagaatgggatgccgcccagtcctctataaaggagctgacagctctgctccattccaaagacgcaacgagagatgaagaattgcaagatctagcgcgagacgaacttgcctcaacaaatgacagtctggagaggctctccactgccctctcggcctctcttacaccccgcgatccctttgccgacatgccctgtatgctcgagatccgacctggtcccggtggtatggagagccgatactttggtgacgccgtcttccgtatgtatcggcaatactgctcccgagtaggcatacgcgcccaagttgtcaagtatgaaataacagatggagctgagacctcgggcggcggcgcaaatgaggcaccactacaagaagctatcttggaaattcaggagcatggcgcctacgacaagtttcgcggcgaagcaggcatgcatagagtccagcggattccgtcgaccgagaaaagcgggcgcacacataccagcgctgtcgctgtctgggttctaccctcgttcccggagcacagtaccgatcagcaagacttcaatgatccggagagtctcttctacgtaaaccctacagaagtacgagaggacaagatgcgcgcaagtggtgcaggcggacagcacgttaataagacagaaagtgctattcgcctcacccacgagcctacaggtattacagtatcgatgcaggattctaggtcgcagcatcgcaatcgagagtctgcctggacgctgctgagatcccgtctggcccaaaagcgaagggaggagagagaagaagccgctgcggcattgaggaacagtgtgctcagcaaagacaaaatcacccgcggcgacaagatccgaacgtataattacagtcaggatcgatgctcagatcacagaagtggaattgacgtccacaacttaccggatgtcctcgaaggcggcgaaacattggacaaggtactcagcagcacaagggattggctgatcaagcgcgatattgaagctatgattgccgaccaggaggctgctgcagtcctcagcgctgcggatgagaaaaagaagtcgaagcgatag

SEQ ID NO: 24310 - protein, 435 aa, Muscodor strobelii
  misc_feature: SGI Peptide ID NO. 568287
  misc_feature (96)..(221): Pfam Id: PF03462 Pfam Desc: PCRF domain
  misc_feature (262)..(377): Pfam Id: PF00472 Pfam Desc: Peptidyl-tRNA hydrolase domain
  misc_feature (96)..(174): Pfam Id: PF03462 Pfam Desc: PCRF domain
  misc_feature (271)..(377): Pfam Id: PF00472 Pfam Desc: Peptidyl-tRNA hydrolase domain
  misc_feature (1)..(420): NCBI GI: 46117472 Blast Desc: FG04578.1 [Gibberella zeae PH-1]
  misc_feature (21)..(426): NCBI GI: 226493092 Blast Desc: LOC100273305 [Zea mays] gi|194703328|gb|ACF85748.1| [Zea mays]
  misc_feature (34)..(419): NCBI GI: 116198067 Blast Desc: CHGG_07189 [Chaetomium globosum CBS 148.51] gi|88178468|gb|EAQ85936.1| CHGG_07189 [Chaetomium globosum CBS 148.51]
  misc_feature (1)..(422): NCBI GI: 28950278 Blast Desc: related to translation releasing factor RF-1, mitochondrial [Neurospora crassa]
  misc_feature (1)..(412): NCBI GI: 171693921 Blast Desc: protein product [Podospora anserina] gi|170946909|emb|CAP73713.1| protein product [Podospora anserina]
  misc_feature (21)..(422): NCBI GI: 164424709 Blast Desc: NCU06721 [Neurospora crassa OR74A] gi|157070629|gb|EAA31665.2| NCU06721 [Neurospora crassa OR74A]
  misc_feature (35)..(415): NCBI GI: 39961534 Blast Desc: MGG_09539 [Magnaporthe grisea 70-15] gi|145011042|gb|EDJ95698.1| MGG_09539 [Magnaporthe grisea 70-15]
  misc_feature (35)..(415): NCBI GI: 256729357 Blast Desc: NECHADRAFT_84223 [Nectria haematococca mpVI 77-13-4]
  misc_feature (23)..(421): NCBI GI: 156055958 Blast Desc: SS1G_05331 [Sclerotinia sclerotiorum 1980] gi|154703115|gb|EDO02854.1| SS1G_05331 [Sclerotinia sclerotiorum 1980]
  misc_feature (1)..(419): NCBI GI: 226284000 Blast Desc: peptide chain release factor 1 [Paracoccidioides brasiliensis Pb01]
  misc_feature: Useful for introducing or modulating the production of volatile compounds
MLPAQWVCRRCITALARPSDRPFIRFASTASPNTLPPILIDRARNIAQEHDQLAASLESSFDVKIAKKVGELSRVADAWKEWDAAQSSIKELTALLHSKDATRDEELQDLARDELASTNDSLERLSTALSASLTPRDPFADMPCMLEIRPGPGGMESRYFGDAVFRMYRQYCSRVGIRAQVVKYEITDGAETSGGGANEAPLQEAILEIQEHGAYDKFRGEAGMHRVQRIPSTEKSGRTHTSAVAVWVLPSFPEHSTDQQDFNDPESLFYVNPTEVREDKMRASGAGGQHVNKTESAIRLTHEPTGITVSMQDSRSQHRNRESAWTLLRSRLAQKRREEREEAAAALRNSVLSKDKITRGDKIRTYNYSQDRCSDHRSGIDVHNLPDVLEGGETLDKVLSSTRDWLIKRDIEAMIADQEAAAVLSAADEKKKSKR

SEQ ID NO: 24311 - DNA, 1756 bp, Muscodor strobelii
  misc_feature: SGI EST ID NO. CUFF.57322.0
  misc_feature: Variant of the nucleotide sequence at SEQ ID NO 24309
gatcggtcctgcacaggagtagtaatccctgcgtatcacggtcgtctttcccagactaatcacccgaatatttcagacgatacaaactataaacaatgagattgggatcaggaccatcaactttttacagttttagtaccaattatctggactgcattatgttttgagaaaaagttactagctggtaccttttccaggcgagatgaagtgacgggtgaacgtagaccacagtgtcttggcatgctctctaattggcggcagctggcatatgctcgcatccagctgctccaactccggcgcaaaatgtctctaatgatgcgagacttgcactttcttgaccaaagtcgatgatgctaccagcgcaatgggtgtgtaggcgctgcatcacggctctggccaggccgtcggaccggccattcattcgctttgctagcacagcttcgccaaatactttaccacccattttgatcgaccgcgcacggaacatcgcccaggagcatgaccaacttgctgcttctctcgaatcaagctttgatgtcaagatagcgaagaaagttggcgagttgtcacgcgttgcagatgcctggaaagaatgggatgccgcccagtcctctataaaggagctgacagctctgctccattccaaagacgcaacgagagatgaagaattgcaagatctagcgcgagacgaacttgcctcaacaaatgacagtctggagaggctctccactgccctctcggcctctcttacaccccgcgatccctttgccgacatgccctgtatgctcgagatccgacctggtcccggtggtatggagagccgatactttggtgacgccgtcttccgtatgtatcggcaatactgctcccgagtaggcatacgcgcccaagttgtcaagtatgaaataacagatggagctgagacctcgggcggcggcgcaaatgaggcaccactacaagaagctatcttggaaattcaggagcatggcgcctacgacaagtttcgcggcgaagcaggcatgcatagagtccagcggattccgtcgaccgagaaaagcgggcgcacacataccagcgctgtcgctgtctgggttctaccctcgttcccggagcacagtaccgatcagcaagacttcaatgatccggagagtctcttctacgtaaaccctacagaagtacgagaggacaagatgcgcgcaagtggtgcaggcggacagcacgttaataagacagaaagtgctattcgcctcacccacgagcctacaggtattacagtatcgatgcaggattctaggtcgcagcatcgcaatcgagagtctgcctggacgctgctgagatcccgtctggcccaaaagcgaagggaggagagagaagaagccgctgcggcattgaggaacagtgtgctcagcaaagacaaaatcacccgcggcgacaagatccgaacgtataattacagtcaggatcgatgctcagatcacagaagtggaattgacgtccacaacttaccggatgtcctcgaaggcggcgaaacattggacaaggtactcagcagcacaagggattggctgatcaagcgcgatattgaagctatgattgccgaccaggaggctgctgcagtcctcagcgctgcggatgagaaaaagaagtcgaagcgataggccaatcccttacgcctatacactactttgtaaatcatgtaaaacatgtaacagaatatatagagaatacccaaagcacgatagatttggttcccaat

SEQ ID NO: 24312 - DNA, 1686 bp, Muscodor strobelii
  misc_feature: SGI cDNA ID NO. 568288
  misc_feature: Encodes the peptide sequence at SEQ ID NO 24313
atgcgtttttctaccatcgtcaccagcttggcctccgtggctgtcgttgccgaagctgctagctcgcgaagctggcagcacgttggcaagaggcagcataacaaggttgagaagagacatcctgatgctcaagtcaccaatcagtacttgaagaagaggaagacggcaaagactcaatttttgaccgacaagaccgccgactacctcgtcaatggcacaggcattcctgacgtcgatttcgacgttggcgagtcgtactcgggttatctttccatcgccgatgatccagatgccgcagagcaacttttcttttggtacttcccttccagcgagcatccttccaaggagattctactctggcttaacggaggtcccgggtgctcttcattcgaaggtcttctccaggagaacggcccgttccaatggcaatacggaacgctcaagcctgtgcccaacccttgggcctggaaccgactcgtcaacactatctggcttgagcagcctattggcactggtttctcgaccggcacacccactgcgacaagcgaagaagatgtagcagcgcagctccttggcttctggaagaacttcatcgacttgttcgagatgcagggctacaaagtgtacgtcgcaggtgaatcttacgctggagcctacattccttacatatccgccgcgatgttggacaagaacgacacaacatactacgacatgaacggcatgctgatctatgaccccgtgatcggcaacggaatcgttcaagatgcgctgacaaccgtaccctttgtcgatttccacgccaacttgttccccttcaaccagtctttcagcgaaaagatccacaagcaacacgttgaatgtggtttccaggaatatatggacacttatctccagttccctcctcccggccctcagccctctaactactcagacaccgtcagcgatgaatgcgccagtgtttggggcgtcgtcacggacgagatccttagcccaaacccctgcttcgatgtatatcaagttgctacaacttgtcccctgctgtgggatgttctcggcttcccgggctctatcacctactctcctgagggttccggacctctttactttgaccgaaccgatgtcaaggaagcgatccacgccaatgtctccaagacctggactgagtgctctgagatcaacgttttcgttaatggcgaagataactcggccccaacgatcgagaaggtcatcccgcaagtcgttgacgctacgcagaacgtgatcatcgcccacggggtcttggacatgattcttctcgtgaacggcactctgctctccatccagaacatgacctggggcggccaactcggattccagtccttacctaaggagcccttctttgtgccctaccacaaggactctacagctagcgatatttactatgagactgatatgcttgccctcagttccatcgctggtgctggtgtcatgggaaccacgcacgaagagcgtggtttaaccttcgtcaccattgacatgtctggccacatggtccctcaatatgcgccatcggccggattccgtcatcttgagaagctgcttggtcgcattgatagcttgagctcgacgaagcctttctccatctatcctaatgctactcagccttcaaactgtagtttgggcgccggcactggaaccagattttga

SEQ ID NO: 24313 - protein, 561 aa, Muscodor strobelii
  misc_feature: SGI Peptide ID NO. 568288
  misc_feature (76)..(528): Pfam Id: PF00450 Pfam Desc: Serine carboxypeptidase
  misc_feature (76)..(520): Pfam Id: PF00450 Pfam Desc: Serine carboxypeptidase
  misc_feature (1)..(558): NCBI GI: 156056194 Blast Desc: SS1G_05449 [Sclerotinia sclerotiorum 1980] gi|154703233|gb|EDO02972.1| SS1G_05449 [Sclerotinia sclerotiorum 1980]
  misc_feature (1)..(557): NCBI GI: 28950277 Blast Desc: SERINE-TYPE CARBOXYPEPTIDASE F PRECURSOR [Neurospora crassa]
  misc_feature (1)..(558): NCBI GI: 154310457 Blast Desc: BC1G_07149 [Botryotinia fuckeliana B05.10] gi|150851480|gb|EDN26673.1| BC1G_07149 [Botryotinia fuckeliana B05.10]
  misc_feature (20)..(557): NCBI GI: 164424711 Blast Desc: carboxypeptidase cpdS precursor [Neurospora crassa OR74A] gi|157070630|gb|EAA31664.2| carboxypeptidase cpdS precursor [Neurospora crassa OR74A]
  misc_feature (16)..(558): NCBI GI: 116198069 Blast Desc: CHGG_07190 [Chaetomium globosum CBS 148.51] gi|88178469|gb|EAQ85937.1| CHGG_07190 [Chaetomium globosum CBS 148.51]
  misc_feature (17)..(559): NCBI GI: 39961523 Blast Desc: MGG_09538 [Magnaporthe grisea 70-15] gi|145011041|gb|EDJ95697.1| MGG_09538 [Magnaporthe grisea 70-15]
  misc_feature (1)..(534): NCBI GI: 238845272 Blast Desc: carboxypeptidase cpdS [Microsporum canis CBS 113480]
  misc_feature (1)..(545): NCBI GI: 71006740 Blast Desc: UM01888.1 [Ustilago maydis 521] gi|46097536|gb|EAK82769.1| UM01888.1 [Ustilago maydis 521]
  misc_feature (57)..(534): NCBI GI: 119195819 Blast Desc: CIMG_02284 [Coccidioides immitis RS]
  misc_feature (57)..(534): NCBI GI: 240110519 Blast Desc: carboxypeptidase cpdS precursor, [Coccidioides posadasii C735 delta SOWgp]
  misc_feature (64)..(527): SWISSPROT Homolog: EC 3.4.16.6 Carboxypeptidase D
MRFSTIVTSLASVAVVAEAASSRSWQHVGKRQHNKVEKRHPDAQVTNQYLKKRKTAKTQFLTDKTADYLVNGTGIPDVDFDVGESYSGYLSIADDPDAAEQLFFWYFPSSEHPSKEILLWLNGGPGCSSFEGLLQENGPFQWQYGTLKPVPNPWAWNRLVNTIWLEQPIGTGFSTGTPTATSEEDVAAQLLGFWKNFIDLFEMQGYKVYVAGESYAGAYIPYISAAMLDKNDTTYYDMNGMLIYDPVIGNGIVQDALTTVPFVDFHANLFPFNQSFSEKIHKQHVECGFQEYMDTYLQFPPPGPQPSNYSDTVSDECASVWGVVTDEILSPNPCFDVYQVATTCPLLWDVLGFPGSITYSPEGSGPLYFDRTDVKEAIHANVSKTWTECSEINVFVNGEDNSAPTIEKVIPQVVDATQNVIIAHGVLDMILLVNGTLLSIQNMTWGGQLGFQSLPKEPFFVPYHKDSTASDIYYETDMLALSSIAGAGVMGTTHEERGLTFVTIDMSGHMVPQYAPSAGFRHLEKLLGRIDSLSSTKPFSIYPNATQPSNCSLGAGTGTRF

SEQ ID NO: 24314 - DNA, 2093 bp, Muscodor strobelii
  misc_feature: SGI EST ID NO. CUFF.57331.0
  misc_feature: Variant of the nucleotide sequence at SEQ ID NO 24312
atcgtttgttattaccccacgcgtccagtcaagcggatcaaagataacgaaagacaggaaggatcccggttatcctgtaattcaatgtgtctatcatgtcctctatgcaagtaaataaaatgaaggtagcaccagacgatggagctcttgatctctctcgtgcttctacccccagcttcattgcgcagtctcccgcattgcccagagtctcggcgtgcagtgctagtctgatccacggtattgggacaggaaagagtagatttgtgtccattgattaatccaattgatcgcgaactcgctccaaaatgcgtttttctaccatcgtcaccagcttggcctccgtggctgtcgttgccgaagctgctagctcgcgaagctggcagcacgttggcaagaggcagcataacaaggttgagaagagacatcctgatgctcaagtcaccaatcagtacttgaagaagaggaagacggcaaagactcaatttttgaccgacaagaccgccgactacctcgtcaatggcacaggcattcctgacgtcgatttcgacgttggcgagtcgtactcgggttatctttccatcgccgatgatccagatgccgcagagcaacttttcttttggtacttcccttccagcgagcatccttccaaggagattctactctggcttaacggaggtcccgggtgctcttcattcgaaggtcttctccaggagaacggcccgttccaatggcaatacggaacgctcaagcctgtgcccaacccttgggcctggaaccgactcgtcaacactatctggcttgagcagcctattggcactggtttctcgaccggcacacccactgcgacaagcgaagaagatgtagcagcgcagctccttggcttctggaagaacttcatcgacttgttcgagatgcagggctacaaagtgtacgtcgcaggtgaatcttacgctggagcctacattccttacatatccgccgcgatgttggacaagaacgacacaacatactacgacatgaacggcatgctgatctatgaccccgtgatcggcaacggaatcgttcaagatgcgctgacaaccgtaccctttgtcgatttccacgccaacttgttccccttcaaccagtctttcagcgaaaagatccacaagcaacacgttgaatgtggtttccaggaatatatggacacttatctccagttccctcctcccggccctcagccctctaactactcagacaccgtcagcgatgaatgcgccagtgtttggggcgtcgtcacggacgagatccttagcccaaacccctgcttcgatgtatatcaagttgctacaacttgtcccctgctgtgggatgttctcggcttcccgggctctatcacctactctcctgagggttccggacctctttactttgaccgaaccgatgtcaaggaagcgatccacgccaatgtctccaagacctggactgagtgctctgagatcaacgttttcgttaatggcgaagataactcggccccaacgatcgagaaggtcatcccgcaagtcgttgacgctacgcagaacgtgatcatcgcccacggggtcttggacatgattcttctcgtgaacggcactctgctctccatccagaacatgacctggggcggccaactcggattccagtccttacctaaggagcccttctttgtgccctaccacaaggactctacagctagcgatatttactatgagactgatatgcttgccctcagttccatcgctggtgctggtgtcatgggaaccacgcacgaagagcgtggtttaaccttcgtcaccattgacatgtctggccacatggtccctcaatatgcgccatcggccggattccgtcatcttgagaagctgcttggtcgcattgatagcttgagctcgacgaagcctttctccatctatcctaatgctactcagccttcaaactgtagtttgggcgccggcactggaaccagattttgattagctagtaatggatatagcagtgggatgacttgctctctagtctaatagtacagaatctattaggtcagtatttaagaggttgaattagcctaattataa

SEQ ID NO: 24315 - DNA, 555 bp, Muscodor strobelii
  misc_feature: SGI cDNA ID NO. 568289
  misc_feature: Encodes the peptide sequence at SEQ ID NO 24316
atgttcttcagcgccacatctctcttcacacacgccacgctagctctagccgtgagcgccgccgcggtaggcctttccacaaccgccaaggagagctcaaacgtcatggtcctgtctgagcctgtggaaggtggattcctcgagttctacgcaccccgcaacggtatcaactccacctcaacatcagactctgtcaccaatgtccgtcgtcaatcgtgccccaatgcgagttatagctgctggagtagggaccaagggctgcagacaacatgcttggatctgcgcagaatcctccagacatacggaaacagctacctaacgggtcacgcggctgtatgctacgtcaatgaccccaaaacaaaccgctgctgtatgcaatggagttcgggtgcctttgtgggaactttcccagacctgctgaatgcctgggctgccattgataagttttgccttgttgacaactacctcgtgggcggtgaagtgaatgcttatccaattggtaatacttgtggcaaaatatgcctgggtaaccaggactctggttgccagggataa

SEQ ID NO: 24316 - protein, 184 aa, Muscodor strobelii
  misc_feature: SGI Peptide ID NO. 568289
MFFSATSLFTHATLALAVSAAAVGLSTTAKESSNVMVLSEPVEGGFLEFYAPRNGINSTSTSDSVTNVRRQSCPNASYSCWSRDQGLQTTCLDLRRILQTYGNSYLTGHAAVCYVNDPKTNRCCMQWSSGAFVGTFPDLLNAWAAIDKFCLVDNYLVGGEVNAYPIGNTCGKICLGNQDSGCQG

SEQ ID NO: 24317 - DNA, 164 bp, Muscodor strobelii
  misc_feature: SGI EST ID NO. CUFF.57341.0
  misc_feature: Variant of the nucleotide sequence at SEQ ID NO 24315
agcgccgccgcggtaggcctttccacaaccgccaaggagagctcaaacgtcatggtcctgtctgagcctgtggaaggtggattcctcgagttctacgcaccccgcaacggtatcaactccacctcaacatcagactctgtcaccaatgtccgtcgtcaatcgtg

SEQ ID NO: 24318 - DNA, 939 bp, Muscodor strobelii
  misc_feature: SGI cDNA ID NO. 568290
  misc_feature: Encodes the peptide sequence at SEQ ID NO 24319
atgagatctgcagtatcagccttagccctcttggccggcgtcactaatgcgatacctgctccagctgagcttggccttttcaatagccgtacggttgagaagcgtgccgctgtcacagatgcctgcacggtcgggtattgtacattaaatggagggacgactggtggtgcaggtggtacaacgacgacagtcaccgacttggcatccttcacagccgcagtgcaggccaccggcccagctatcattctcctcgatgctcagttgaccggtctgactggcatcggtctcacaatcctcggccagtcaaacgtcatcattcgaaatctgaagagctccaaagttcttgcagactatggtgatatagtgacagtgcagaagtcctctaatatctggatcgactcttgtgacttttccagtgatctagaccacgacaaggactattatgacggactgattgatattgtgcatgcctcggaatgggtaactgttagtaacaattatttgcacgaccattggaagggcggtttggttggccactccagtgataatgccgctgaggatactggacatcttcacgtcacatactacggcaactggtgggacaataataatagccgaacaccaatgtatcgatttggacaagggcacgtcttcaactcgtacatcaccaatgggggtgacacatgcatcaacacccgtgattacgcgcagatgctgatcgagagcaccgtgtttgagactgatccaaagaaagctatattcactgacgacaacaatggcgcaggctatgctgtcgtgaatgacgtcgatcttggtggtagccagaacctcgccccagtgggcaatctcacttccgtcccttattcgtacactttacttgggtcggctaacactaaagcctccgtaatggccaacgctggtgcgaaactgaatttctag

SEQ ID NO: 24319 - protein, 312 aa, Muscodor strobelii
  misc_feature: SGI Peptide ID NO. 568290
  misc_feature (77)..(245): Pfam Id: PF00544 Pfam Desc: Pectate lyase
  misc_feature (91)..(245): Pfam Id: PF00544 Pfam Desc: Pectate lyase
  misc_feature (19)..(312): NCBI GI: 5453416 Blast Desc: AF156985_1 pectate lyase 2 [Colletotrichum gloeosporioides f. sp. malvae]
  misc_feature (8)..(312): NCBI GI: 256728451 Blast Desc: polysaccharide lyase family 1 [Nectria haematococca mpVI 77-13-4]
  misc_feature (8)..(312): NCBI GI: 46139297 Blast Desc: FG11163.1 [Gibberella zeae PH-1]
  misc_feature (5)..(312): NCBI GI: 145256261 Blast Desc: pectate lyase plyA-Aspergillus niger [Aspergillus niger CBS 513.88] gi|134078650|emb|CAK40523.1| pectate lyase plyA-Aspergillus niger
  misc_feature (5)..(312): NCBI GI: 13171023 Blast Desc: pectate lyase A [Aspergillus niger]
  misc_feature (15)..(310): NCBI GI: 46116132 Blast Desc: FG03908.1 [Gibberella zeae PH-1]
  misc_feature (9)..(310): NCBI GI: 169783612 Blast Desc: [Aspergillus oryzae RIB40] gi|238493445|ref|XP_002377959.1| pectate lyase precursor, [Aspergillus flavus NRRL3357] gi|83775012|dbj|BAE65135.1| protein
  misc_feature (3)..(312): NCBI GI: 261359301 Blast Desc: pectate lyase B [Verticillium albo-atrum VaMs.102]
  misc_feature (6)..(310): NCBI GI: 67516919 Blast Desc: PEL_EMENI Pectate lyase precursor [Aspergillus nidulans FGSC A4] gi|3914273|sp|Q00645.1|PELA_EMENI RecName: Full=Pectate lyase; Flags: Precursor gi|452482|gb|AAA80568.1| A4]
  misc_feature (1)..(312): NCBI GI: 154323139 Blast Desc: BC1G_00912 [Botryotinia fuckeliana B05.10] gi|150848246|gb|EDN23439.1| BC1G_00912 [Botryotinia fuckeliana B05.10]
  misc_feature (14)..(310): SWISSPROT Homolog: EC 4.2.2.2 Pectate lyase
MRSAVSALALLAGVTNAIPAPAELGLFNSRTVEKRAAVTDACTVGYCTLNGGTTGGAGGTTTTVTDLASFTAAVQATGPAIILLDAQLTGLTGIGLTILGQSNVIIRNLKSSKVLADYGDIVTVQKSSNIWIDSCDFSSDLDHDKDYYDGLIDIVHASEWVTVSNNYLHDHWKGGLVGHSSDNAAEDTGHLHVTYYGNWWDNNNSRTPMYRFGQGHVFNSYITNGGDTCINTRDYAQMLIESTVFETDPKKAIFTDDNNGAGYAVVNDVDLGGSQNLAPVGNLTSVPYSYTLLGSANTKASVMANAGAKLNF

SEQ ID NO: 24320 - DNA, 1317 bp, Muscodor strobelii
  misc_feature: SGI cDNA ID NO. 568291
  misc_feature: Elevated expression when VOC is produced
  misc_feature: Encodes the peptide sequence at SEQ ID NO 24321
atggctaccacccagccagaaggggacaccagacctcgcgagccaccagagccacgcctacaacccgcccaatttgttgacctcgataatcagttctacgatggcacacacacctccataggtatctgtgagccttggataacgctcgagcgccggcacaataagttgctcattgcagctcgctttaatcttgagacgacaatactgggatatcattccaggaaaagagatggccatcagtcatttttccaagacattagccttcgatacaacaaactgtgcgccaatgagaaggttttcgctgaaccagagtcagacccaactcaagcgttcaccttgacaaagaatacatcttcacaaacctcaacaggagctactataactgcgggtcaaataccatcagcgaatgtctcctttacactaaacagatctaatcagctgaacgtagagtataaagttgactcctggagtataagtgcccataataccagtaacggttatcagtggtgttggactgggacacatgaggataccaaactacttactcgagacttgacacaaactgtcaaacgtcacgtgatggtgaaaagagtcgtgcctatacaaacagctgttagttctcgatataataaagaagacgatgacctatgtcaattactaggagacaagttcaaatttgacttcacagtccaagtcagagtaaaacgtcgaattggtcgactgcatcgtctgttcatcttcagttccaataaagtcaaggctaaacgtcacattcatgtcaatacaggatcctttacgctccaaccgtcatgtatatgggacctcggagatagtattggatgtgactctaaagatagtaagtgcaaagaagctgaaagaaccgacaagccacagaccattgattattataagcaagaaactccaaaacacttctatcttccaacaggggacacaatcgatattgagtccgcgcgtcgggaagccaagaaggaagctgagaaagagggtggaaagtgggaccaggtacatcatggagaactacatagagatgattctggtggtccgattttttccctcccttatgaagggtttcaaactaaaagcaacagggaaaaggagaacaaagaagagttacaaaacatgcgggaagaggagaacagaaacgggttaagaaccatcggagaagaggagaacggagaggagccaaagaacatcaaaaagaacgaaagaaggagtagttgggcaatgaggaacgcgcgagttaatgacgaatacgaggaaacgaaggaaaagaaactgtcgcacagacagggctga

SEQ ID NO: 24321 - protein, 438 aa, Muscodor strobelii
  misc_feature: SGI Peptide ID NO. 568291
  misc_feature (20)..(385): NCBI GI: 242774428 Blast Desc: TSTA_087080 [Talaromyces stipitatus ATCC 10500] gi|218722057|gb|EED21475.1| TSTA_087080 [Talaromyces stipitatus ATCC 10500]
  misc_feature: Useful for introducing or modulating the production of volatile compounds
MATTQPEGDTRPREPPEPRLQPAQFVDLDNQFYDGTHTSIGICEPWITLERRHNKLLIAARFNLETTILGYHSRKRDGHQSFFQDISLRYNKLCANEKVFAEPESDPTQAFTLTKNTSSQTSTGATITAGQIPSANVSFTLNRSNQLNVEYKVDSWSISAHNTSNGYQWCWTGTHEDTKLLTRDLTQTVKRHVMVKRVVPIQTAVSSRYNKEDDDLCQLLGDKFKFDFTVQVRVKRRIGRLHRLFIFSSNKVKAKRHIHVNTGSFTLQPSCIWDLGDSIGCDSKDSKCKEAERTDKPQTIDYYKQETPKHFYLPTGDTIDIESARREAKKEAEKEGGKWDQVHHGELHRDDSGGPIFSLPYEGFQTKSNREKENKEELQNMREEENRNGLRTIGEEENGEEPKNIKKNERRSSWAMRNARVNDEYEETKEKKLSHRQG

SEQ ID NO: 24322 - DNA, 2676 bp, Muscodor strobelii
  misc_feature: SGI EST ID NO. CUFF.57398.0
  misc_feature: Variant of the nucleotide sequence at SEQ ID NO 24320
cacgattccgcgtaattggacttgagggcagcttgagatgcaatgagagtagcaagagatgttcgattcatagaagctagacgcctttgtggcaatttgaacatttataagtaagaaaaaatctagaaagattgactcacgtccctagaatattcagcatgaaatccaactcggtctcagcttccttaatatcctcaaggatccgagagacctttctcttatctattgttgcccacttcaaccttttacggagttctcgctccgctacggtcggtggattcaaaatgctctgaatgttggtcaaggtactgtagtttagttgcaaaccaacactaaatagcgcagtgctatttcagcggctgtcagctttgctttatcttcgcctcttcagtacataaatgcagatcaagcacaccacaaaattcggcgattgaaatcggatactgagttacacaaacagacgcactactcgctttgcgacatttggatctggaacttgcttactactcgggcgggaagagcatcgtggcctcggatgcgcttaattcgttactcaggttttgaagcatctgaatgcgagattgaagacgttccagcctcgcgacgagatccacgagctccgccggcgcctgcataacagattggatcaaacgtttcgctgtcctgctggccttcatggcaaggctagacagctctgctatcgccgcggctgaccccacggcctccatttcaataatgagacgctttcaagagaaattttggagcttcagattagatgtcgccatttcatagctacaccgatttgagtccaaggagtcgataaggatggctatgtggcgatgtgaccttggtattggggctgtgctaacctgcatagatatatgcatacctaccaagctctgactggtgaggataagaaaaatctctctgatgcccaaagatcgcattttgatgcctgcatatgtacagcagccacacattccggcactagctgtaggtatttggattattgcttcgtacaaaagtaaaaagagaagcttgctagagccccgcacacgatatcccctccctctgctattccccccgacttgtcatcgattatcttgcggtttacctggattgccgacttttttctatcctttcaagattgtatgttgaatgatccaatcctatggctgagaaaagtaagaaatatgtagagcctgagtcgaaaaaggccatggctaccacccagccagaaggggacaccagacctcgcgagccaccagagccacgcctacaacccgcccaatttgttgacctcgataatcagttctacgatggcacacacacctccataggtatctgtgagccttggataacgctcgagcgccggcacaataagttgctcattgcagctcgctttaatcttgagacgacaatactgggatatcattccaggaaaagagatggccatcagtcatttttccaagacattagccttcgatacaacaaactgtgcgccaatgagaaggttttcgctgaaccagagtcagacccaactcaagcgttcaccttgacaaagaatacatcttcacaaacctcaacaggagctactataactgcgggtcaaataccatcagcgaatgtctcctttacactaaacagatctaatcagctgaacgtagagtataaagttgactcctggagtataagtgcccataataccagtaacggttatcagtggtgttggactgggacacatgaggataccaaactacttactcgagacttgacacaaactgtcaaacgtcacgtgatggtgaaaagagtcgtgcctatacaaacagctgttagttctcgatataataaagaagacgatgacctatgtcaattactaggagacaagttcaaatttgacttcacagtccaagtcagagtaaaacgtcgaattggtcgactgcatcgtctgttcatcttcagttccaataaagtcaaggctaaacgtcacattcatgtcaatacaggatcctttacgctccaaccgtcatgtatatgggacctcggagatagtattggatgtgactctaaagatacaagaaactccaaaacacttctatcttccaacaggggacacaatcgatattgagtccgcgcgtcgggaagccaagaaggaagctgagaaagagggtggaaagtgggaccaggtacatcatggagaactacatagagatgattctggtggtccgattttttccctcccttatgaagggtttcaaactaaaagcaacagggaaaaggagaacaaagaagagttacaaaacatgcgggaagaggagaacagaaacgggttaagaaccatcggagaagaggagaacggagaggagccaaagaacatcaaaaagaacgaaagaaggagtagttgggcaatgaggaacgcgcgagttaatgacgaatacgaggaaacgaaggaaaagaaactgtcgcacagacagggctgacacatttgcagctgatatagccagcctacgaggtactgatgtaaggcctaaagcagcgattgcatgccagcgttagtatgttgtgatacaccagatatgtacagcaatgggggccatttttgtgtatggaaagaagcactgattttagccatagcgaggagaatcatgacccttatagtgtgttagtccttatccg

SEQ ID NO: 24323 - DNA, 2145 bp, Muscodor strobelii
  misc_feature: SGI cDNA ID NO. 568292
  misc_feature: Encodes the peptide sequence at SEQ ID NO 24324
atggaggccgtggggtcagccgcggcgatagcagagctgtctagccttgccatgaaggccagcaggacagcgaaacgtttgatccaatctgttatgcaggcgccggcggagctcgtggatctcgtcgcgaggctggaacgtcttcaatctcgcattcagatgcttcaaaacctgagtaacgaattaagcgcatccgaggccacgatgctcttcccgcccgagtacactgcgctatttagtgttggtttgcaactaaactacagtaccttgaccaacattcagagcattttgaatccaccgaccgtagcggagcgagaactccgtaaaaggttgaagtgggcaacaatagataagagaaaggtctctcggatccttgaggatattaaggaagctgagaccgagttggatttcatgctgaatattctagggacgcgtctagcttctatgaatcgaacatctcttgctactctcattgcatctcaagctgccctcaagtccaattacgcggaatcgtggcaagaaatcaaggctctgatccgtgacgagtttgcatcgttaccagacctgcttgaaagtggccaaggaagcgtaaacgattccacggacggcgagggaggtctgcttgaacatgttgtcaatagccaccctgatcctacaaagggctgtgagaaagtgcagctgataagattcctattggaacgaggttgtaaccccagcgtttcactgactcgaggtcgaaatgatttcgaagcaccagccatcttgagcgcatttgatcgcggcgatctcgagattgtctcgttgatagaatcgtatggaggcagcctcttacaatttgagttcaatccaggaacattcttcggaggtgtctttggtacacaacaagagttctccgagaaggtacataagcttcgcagtattggcttctctgattggaaggtagaatctccttctgaccatcttctatacggtgcgtgcggtgctttggctttggaagagttgttgtttgctcttgagatcgttggcttagacccaaacctccgtgcttctcgaccaggcttcaccccactctggattgcaacagaaaaacactggttcgagggcgtcgctattcttattgaatacggcgttgatcttgacacagccagtcatgcatcactcggaacgagcacatacatgggccaaaccaattatgctacacactattttctatgccatggagcagatcagcgtcttgagggccgagaacccatcgcatggtacaatatctgggatgccgccttccaaccggtttatgaataccgggctaagcattggcagtatatgcatcttgaaggaaccatagcgcatctgcttttacacgatgccgatccatttaccttatttgtctctgattatcataatgaatacaggtcttacggcaaactatatgagcaggataggtggtatgacatcgcaaaccaaatccgcgcttcggaagtagcgagagcctggagttatccgctcgattttggggcgtattggaatcactacgctggattcgcagaggaactggaattcgaggctttcgatatagtgagttttgaggatctagaagacagtaggtcactggaagacaactttgtatggtccgatgacggattgatatatccagccttggaaaatcacgatctaacaactgaccaaagatatccgggcgaccattgggctagtgcccaaggcaaagaacataagttctggtgcgtgaaatatcaaaatagcggtgaagatgagcttaatgaggatttttttcgaagagcaacacaattctttcatcacaccaactcaaacgaaggccgcagacatctttctcgctttccgttagtgcgagcattttgtgatgcgcttcaacacgcaggctatcgtgcgcagatggatgacgatggcgatatctggtacgaatgcgaggatggtgatagatactatgacgctagggattaccagcccgagacagaatcagcgacaccttggacagagttttgtcccatatgtcgacagcctgagtggtatgggttgggaccaatggtcagaaaggcggatgaggcgaagcgcgcattacacgactacagagcgaaggtcaaggcagcgaagcgggggttctattga

SEQ ID NO: 24324 - protein, 714 aa, Muscodor strobelii
  misc_feature: SGI Peptide ID NO. 568292
  misc_feature (341)..(714): NCBI GI: 171691460 Blast Desc: protein product [Podospora anserina] gi|170945678|emb|CAP71791.1| protein product [Podospora anserina]
  misc_feature (1)..(175): NCBI GI: 256726357 Blast Desc: [Nectria haematococca mpVI 77-13-4]
MEAVGSAAAIAELSSLAMKASRTAKRLIQSVMQAPAELVDLVARLERLQSRIQMLQNLSNELSASEATMLFPPEYTALFSVGLQLNYSTLTNIQSILNPPTVAERELRKRLKWATIDKRKVSRILEDIKEAETELDFMLNILGTRLASMNRTSLATLIASQAALKSNYAESWQEIKALIRDEFASLPDLLESGQGSVNDSTDGEGGLLEHVVNSHPDPTKGCEKVQLIRFLLERGCNPSVSLTRGRNDFEAPAILSAFDRGDLEIVSLIESYGGSLLQFEFNPGTFFGGVFGTQQEFSEKVHKLRSIGFSDWKVESPSDHLLYGACGALALEELLFALEIVGLDPNLRASRPGFTPLWIATEKHWFEGVAILIEYGVDLDTASHASLGTSTYMGQTNYATHYFLCHGADQRLEGREPIAWYNIWDAAFQPVYEYRAKHWQYMHLEGTIAHLLLHDADPFTLFVSDYHNEYRSYGKLYEQDRWYDIANQIRASEVARAWSYPLDFGAYWNHYAGFAEELEFEAFDIVSFEDLEDSRSLEDNFVWSDDGLIYPALENHDLTTDQRYPGDHWASAQGKEHKFWCVKYQNSGEDELNEDFFRRATQFFHHTNSNEGRRHLSRFPLVRAFCDALQHAGYRAQMDDDGDIWYECEDGDRYYDARDYQPETESATPWTEFCPICRQPEWYGLGPMVRKADEAKRALHDYRAKVKAAKRGFY

SEQ ID NO: 24325 - DNA, 3830 bp, Muscodor strobelii
  misc_feature: SGI EST ID NO. CUFF.57397.1
  misc_feature: Variant of the nucleotide sequence at SEQ ID NO 24323
accgttactggtattatgggcacttatactccaggagtcaactttatactctacgttcagctgattagatctgtttagtgtaaaggagacattcgctgatggtatttgacccgcagttatagtagctcctgttgaggtttgtgaagatgtattctttgtcaaggtgaacgcttgagttgggtctgactctggttcagcgaaaaccttctcattggcgcacagtttgttgtatcgaaggctaatgtcttggaaaaatgactgatggccatctctatgattgtgttaaagagcgccagacaccaagctgtgcaacatttatgcaaaccttttcctggaatgatatcccagtattgtcgtctcaagattaaagcgagctgcaatgagcaacttattgtgccggcgctcgagcgttatccaaggctcacagatacctatggaggtgtgtgtgccatcgtagaactgattatcgaggtcaacaaattgggcgggttgtaggcgtggctctggtggctcgcgaggtctggtgtccccttctggctgggtggtagccatggcctttttcgactcaggctctacatatttcttacttttctcagccataggattggatcattcaacatacaatcttgaaaggatagaaaaaagtcggcaatccaggtaaaccgcaagataatcgatgacaagtcggggggaatagcagagggaggggatatcgtgtgcggggctctagcaagcttctctttttacttttgtacgaagcaataatccaaatacctacagctagtgccggaatgtgtggctgctgtacatatgcaggcatcaaaatgcgatctttgggcatcagagagatttttcttatcctcaccagtcagagcttggtaggtatgcatatatctatgcaggttagcacagccccaataccaaggtcacatcgccacatagccatccttatcgactccttggactcaaatcggtgtagctatgaaatggcgacatctaatctgaagctccaaaatttctcttgaaagcgtctcattattgaaatggaggccgtggggtcagccgcggcgatagcagagctgtctagccttgccatgaaggccagcaggacagcgaaacgtttgatccaatctgttatgcaggcgccggcggagctcgtggatctcgtcgcgaggctggaacgtcttcaatctcgcattcagatgcttcaaaacctgagtaacgaattaagcgcatccgaggccacgatgctcttcccgcccgagtacactgcgctatttagtgttggtttgcaactaaactacagtaccttgaccaacattcagagcattttgaatccaccgaccgtagcggagcgagaactccgtaaaaggttgaagtgggcaacaatagataagagaaaggtctctcggatccttgaggatattaaggaagctgagaccgagttggatttcatgctgaatattctagggacgtgagtcaatctttctagattttttcttacttataaatgttcaaattgccacaaaggcgtctagcttctatgaatcgaacatctcttgctactctcattgcatctcaagctgccctcaagtccaattacgcggaatcgtggcaagaaatcaaggctctgatccgtgacgagtttgcatcgttaccagaaatgaaaagtgttatgatgccacctcctcgatcgaaactagtggtggcagatgaagtagcaacatatcatgaatcgaatgtccagatgacacttatggagtataacgaacacaaaacaattctcagctactcgcaatcatggggcaattctcacaactctcaggcgagcgtaaaggaaactgccataggcatttctgcctcattgaagtgcaaacgatatcgtcgccaggctagagtgaatatacatgtgaaatttgaattttttttcacccggattttatatttcgagatacgagcacggcaatttcttcttggcccatggcttggtgcaccgtggttagattgttcgataactgtcctaaatatacgctcgcatgattcgccaatatttgaagcgtgccgcgatcgggacttttggagagtcaaggacctgcttgaaagtggccaaggaagcgtaaacgattccacggacggcgagggaggtctgcttgaacatgttgtcaatagccaccctgatcctacaaagggctgtgagaaagtgcagctgataagattcctattggaacgaggttgtaaccccagcgtttcactgactcgaggtcgaaatgatttcgaagcaccagccatcttgagcgcatttgatcgcggcgatctcgagattgtctcgttgatagaatcgtatggaggcagcctcttacaatttgagttcaatccaggaacattcttcggaggtgtctttggtacacaacaagagttctccgagaaggtacataagcttcgcagtattggcttctctgattggaaggtagaatctccttctgaccatcttctatacggtgcgtgcggtgctttggctttggaagagttgttgtttgctcttgagatcgttggcttagacccaaacctccgtgcttctcgaccaggcttcaccccactctggattgcaacagaaaaacactggttcgagggcgtcgctattcttattgaatacggcgttgatcttgacacagccagtcatgcatcactcggaacgagcacatacatgggccaaaccaattatgctacacactattttctatgccatggagcagatcagcgtcttgagggccgagaacccatcgcatggtacaatatctgggatgccgccttccaaccggtttatgaataccgggctaagcattggcagtatatgcatcttgaaggaaccatagcgcatctgcttttacacgatgccgatccatttaccttatttgtctctgattatcataatgaatacaggtcttacggcaaactatatgagcaggataggtggtatgacatcgcaaaccaaatccgcgcttcggaagtagcgagagcctggagttatccgctcgattttggggcgtattggaatcactacgctggattcgcagaggaactggaattcgaggctttcgatatagtgagttttgaggatctagaagacaatatccgggcgaccattgggctagtgcccaaggcaaagaacataagttctggtgcgtgaaatatcaaaatagcggtgaagatgagcttaatgaggatttttttcgaagagcaacacaattctttcatcacaccaactcaaacgaaggccgcagacatctttctcgctttccgttagtgcgagcattttgtgatgcgcttcaacacgcaggctatcgtgcgcagatggatgacgatggcgatatctggtacgaatgcgaggatggtgatagatactatgacgctagggattaccagcccgagacagaatcagcgacaccttggacagagttttgtcccatatgtcgacagcctgagtggtatgggttgggaccaatggtcagaaaggcggatgaggcgaagcgcgcattacacgactacagagcgaaggtcaaggcagcgaagcgggggttctattgatttgatcaaaggctggctaatcgcatgttatttcttgcacgaatttatgaggaaatataatgtcacgagttcgtaagtatcctagctttatagtttggtgtatcagtcccatatcgttcctccggcagacttctattgtcttgtaccctggtggaaggaagtttcgatggaataagcgatataccgcaccagtgtagtggacagtgagtgatggactctgagtatactagctcggaataaacgat

SEQ ID NO: 24326 - DNA, 456 bp, Muscodor strobelii
  misc_feature: SGI cDNA ID NO. 568293
  misc_feature: Encodes the peptide sequence at SEQ ID NO 24327
atgatgaaactactagctattccggctctcctcgcttgcgttggcctagccgcgcctcttgactcaagggcaatttctttcgaattcacgaacgttcccaccggcctcaatcttacgatcggtactgaatttaccttcacgtgggacccccaggactcaagcgaaacaattcaactcgccgtagcggcttgggaccccacaccgttcgcctacggctataacccatacactggacacacagtgcccgagtactacgagggtggctatacgcttgctgataatgtgccgctctcggctggtagctacacttggactgttcagaccataaccgccactcaaggatcgggatcagtactcaaaggacccagagccgagtataacttccaggcggtaccagagaaggattatagtccttttttcttctcgaacaagttccatgtcctggactctgcgtag

SEQ ID NO: 24327 - protein, 151 aa, Muscodor strobelii
  misc_feature: SGI Peptide ID NO. 568293
MMKLLAIPALLACVGLAAPLDSRAISFEFTNVPTGLNLTIGTEFTFTWDPQDSSETIQLAVAAWDPTPFAYGYNPYTGHTVPEYYEGGYTLADNVPLSAGSYTWTVQTITATQGSGSVLKGPRAEYNFQAVPEKDYSPFFFSNKFHVLDSA

SEQ ID NO: 24328 - DNA, 1230 bp, Muscodor strobelii
  misc_feature: SGI cDNA ID NO. 568294
  misc_feature: Encodes the peptide sequence at SEQ ID NO 24329
atgatatacgagtccggggataaagccaaagtccaagaccttaacgcactccgacggagcgcgggcaaggacgtcatatctcgcttgttagcgacgatcaatgttgaggcactgcgacaacgcgcagtgaccttgcgagatggaacgaagtgcactgtcaatcttccatcggccgatgaatcatacttcaactttgacatcgttggtggctgtaactaccatggctcgatcgaatttgccgacggcacgacctggttggcaaggttccgactcccgaatcacaacgcgcctccacggcttgagcgcaacttcgataggcgcagcgagtttgcgacatatcgtttccttagtcaaactgctgtccctgtccctctggtgtacgactgtgctgatgacgacgactctgcaaaccctgtcggtgctgggtacatccttctggagaagatagccggaaagcctttggattggtatgaagcaaccgaggcacagaaagaacgattctcttctcagttagcaaacatctttgtcgagttggcaaattatcctgtgcaaggattgggacgtctgcagctctgctcgacgagcggagaacctgaaaccggaccagcctttttcgaatacgattcgaatgggaacccgatatccttaggcccattcggttcttccgacgattactacacggctttgatacaacgaaatatccggctgatcaaaaacaaggagattgcagcatctgcacctcttgaccagtaccttgtctacagaactctgcttgactctctcccaccaaacgattcgggtccttttttccttcagcatattgactcgagagatgcaaactttttagtagatgacgattacaatatcactgggattatcgactgggaactggctatcactgcttcaaaaggctcagcgttccagtcgcctcttttgatgtacaatctaggcgaactctatcaccaaggtctctcaacaccaagcgaggatgaacggcgcttttccaatattctactaaagaagaaaggagggggcgaacttgcttctttggctgagagaaagttgtattttagatttgatcaggtcattgagtctgattccggggactgggaggaatttatcagaaggttcagtggctggtggaaagccgccaatggggtgaatacatttaattgggatatatggtacgagaatgcccttaagaagtatggcgatggaggtttgcgataa

SEQ ID NO: 24329 - protein, 409 aa, Muscodor strobelii
  misc_feature: SGI Peptide ID NO. 568294
  misc_feature (19)..(405): NCBI GI: 225562332 Blast Desc: conserved [Ajellomyces capsulatus G186AR]
  misc_feature (19)..(403): NCBI GI: 255934768 Blast Desc: Pc12g16130 [Penicillium chrysogenum Wisconsin 54-1255] gi|211583030|emb|CAP81240.1| Pc12g16130 [Penicillium chrysogenum Wisconsin 54-1255]
  misc_feature (26)..(403): NCBI GI: 170103777 Blast Desc: [Laccaria bicolor S238N-H82] gi|164641984|gb|EDR06242.1| [Laccaria bicolor S238N-H82]
  misc_feature (21)..(403): NCBI GI: 255946898 Blast Desc: Pc22g01720 [Penicillium chrysogenum Wisconsin 54-1255] gi|211591233|emb|CAP97460.1| Pc22g01720 [Penicillium chrysogenum Wisconsin 54-1255]
  misc_feature (68)..(405): NCBI GI: 240281170 Blast Desc: conserved [Ajellomyces capsulatus H143]
  misc_feature (68)..(405): NCBI GI: 115400407 Blast Desc: conserved [Aspergillus terreus NIH2624] gi|114191458|gb|EAU33158.1| conserved [Aspergillus terreus NIH2624]
  misc_feature (19)..(409): NCBI GI: 238842658 Blast Desc: conserved [Microsporum canis CBS 113480]
  misc_feature (71)..(409): NCBI GI: 256723780 Blast Desc: NECHADRAFT_37196 [Nectria haematococca mpVI 77-13-4]
  misc_feature (30)..(405): NCBI GI: 170940295 Blast Desc: protein product [Podospora anserina]
  misc_feature (67)..(405): NCBI GI: 225561139 Blast Desc: conserved [Ajellomyces capsulatus G186AR]
MIYESGDKAKVQDLNALRRSAGKDVISRLLATINVEALRQRAVTLRDGTKCTVNLPSADESYFNFDIVGGCNYHGSIEFADGTTWLARFRLPNHNAPPRLERNFDRRSEFATYRFLSQTAVPVPLVYDCADDDDSANPVGAGYILLEKIAGKPLDWYEATEAQKERFSSQLANIFVELANYPVQGLGRLQLCSTSGEPETGPAFFEYDSNGNPISLGPFGSSDDYYTALIQRNIRLIKNKEIAASAPLDQYLVYRTLLDSLPPNDSGPFFLQHIDSRDANFLVDDDYNITGIIDWELAITASKGSAFQSPLLMYNLGELYHQGLSTPSEDERRFSNILLKKKGGGELASLAERKLYFRFDQVIESDSGDWEEFIRRFSGWWKAANGVNTFNWDIWYENALKKYGDGGLR

SEQ ID NO: 24330 - DNA, 1010 bp, Muscodor strobelii
  misc_feature: SGI EST ID NO. CUFF.57354.0
  misc_feature: Variant of the nucleotide sequence at SEQ ID NO 24328
ggggtaggggcaattgtcagtttgtctgtatactcctcacctccgggatttcacttctgcaattttagagatcaaacaacagtcgattcaatcacagcatgaagtggtcctgcgcatctcgcccttgcggccaaccagccttgaggacacttcaaagacagtgcgaagtttgtcacctgcatttctgcgcacagcacgtggcgtcgttgcatacttgtcctacgccagaggatatcagcatgatatacgagtccggggataaagccaaagtccaagaccttaacgcactccgacggagcgcgggcaaggacgtcatatctcgcttgttagcgacgatcaatgttgaggcactgcgacaacgcgcagtgaccttgcgagatggaacgaagtgcactgtcaatcttccatcggccgatgaatcatacttcaactttgacatcgttggtggctgtaactaccatggctcgatcgaatttgccgacggcacgacctggttggcaaggttccgactcccgaatcacaacgcgcctccacggcttgagcgcaacttcgataggcgcagcgagtttgcgacatatcgtttccttagtcaaactgctgtccctgtccctctggtgtacgactgtgctgatgacgacgactctgcaaaccctgtcggtgctgggtacatccttctggagaagatagccggaaagcctttggattggtatgaagcaaccgaggcacagaaagaacgattctcttctcagttagcaaacatctttgtcgagttggcaaattatcctgtgcaaggattgggacgtctgcagctctgctcgacgagcggagaacctgaaaccggaccagcctttttcgaatacgattcgaatgggaacccgatatccttaggcccattcggttcttccgacgattactacacggctttgatacaacgaaatatccggctgatcaaaaacaaggagattgcagcatctgcacctcttgaccagtaccttgtctacagaactctg

SEQ ID NO: 24331 - DNA, 4215 bp, Muscodor strobelii
  misc_feature: SGI cDNA ID NO. 568295
  misc_feature: Encodes the peptide sequence at SEQ ID NO 24332
atggcccaacacgatgccacaggttggcctctggcccaagcgggctcgtcgttggaagagcctaacgcagtgagtactgatggtggctttcccggccatataggccacaacccagggtcgtatattgaaagcccacccaaccatgtgaaccaatatagtcatcaatatggcttccctgctgggatcgattcgtatggtcaggcagcacagggacatggccacttcggtggtcaacatcacccctactccaatatggcctttgcggttgataatcagccaacgttctcgcatgacatgaagcccatgggagcctctaatcttgttggcgaatcaaatcttgagcgccaacaaccgggacaccaatatggccatgagcatctggatctgcaatctcagcagtacccaaatcgagaatactatcccgagtctcaacaccactttgcttcgaacggctttggtcatcatacgaactggccagaatcagcagagatctatgaacagatcactggcccatatcagatgaacgaggcagctaactaccaagcacagactcagagtggacaataccaacctgcgacgagccaaactcatgacacaaataactacccagctcagactgttggttctgtggtgtctgcttcaacgcaaagtcatacaccggcgaaagtgacacccgtgccgcttcccatcgatccacggactagtagagtgtttcaggcgcaagcaatctcggggccatctccgttgcttggctcagcagctcctagtgtaccgagccccgagccagcaaagctttcaggagcaaatttgtttttgcgcaaacgagatccgcccagtggggattggaaatggcttgaaggagtccctaatcttttcatcggtaccaaatcagaacctcgttgggaagtaggtcgattttccaagagatatgtcgccggcaaaagcaagaatggaggtcctgtcttacgaggtcgcccaaatttgccttgtgaagttcttagagacagtctggagcctcttcaggaaatcgagtccaccttactggaacagttggaggccatgaagaattacccaggagttgagaaggaaaaggagcggatcgaagcagaaattgaagatgtgcggcgaaaaatgaaagctttgaaggctccaacaaggactggcagaagatccagtgtcagtgacagtgaatcgagtgatgaagaggatccagaggaagccgaagctcgaagggtggatgcggaagctcgagggattctggccacgccaacacggcctgcggatgctttgaagggcatcgagtgggatgttgtcaagatcgtccggaaggagcacaacactcaaacactcaccccccaagctgaaaatgaagactccacatctaagctgatcggccaaagagtcgcagaatttggtaaatatgtcgtcgaactctctggccaggcgcgaactctcagggagcagaaggcaaaagcacccaaggccaaatctgcccagcttcaagcttctattgaccaaaagtacgactacatccgagctgcactgaaggctgcttctgtctacgcagatgctgagactctgagaaacatgggtaaacatgtccgattgatgtcatctctccaatccgtcttgaatcgacaattcatagcaaagagctattccggtcctgtttctttggctattctcatcttcttgtctcaagcaagttggatggatacagcaatttttgagcaagtcaaactttcacaaatcctggagaagtaccgtaatgaactagaccagaagggcaaggatcttgccactgagatcgctgaaaacgccaaagaagctagtggaaaggacgatgctgccaagtcgaaggtatcatctcaagctaagcccaaggctctagaggccaccaaagccatcaagcctatctctactccaaaaactactcccatccccagcaagagtgcgcttcccgccagtgtcaaaacttctacaaatttgatgaagtccgtcccggctcaatcttcaagcaatgctgcagcagatgcctccaggaaagaaaccaaagcctacactggtttagtctctgccagaaaagccagcaatggaggtgcaaaagccactatcgggctttcgccttccaagagactcagagatgatgatggtgactctcgtgctgcaaagaaagttgcgacggagaccagtgtatcttccttgagcaacaccagaatggcttcaagtttgagtgcggcaaacctgccagcttccacagccagtagcggacagaatcgacccaagccttccggttctacagtcctcaacaaagctcgaaccgtctctaagccacagccaagacgcgtggagacgcaatcatctggatcatcaaagatcggtggattacttgccgatatcgagaagcctgctgaggtcaaaccaaaacctcagaaggagcctatgaaagcacctgagacggaggcagaaaaagcacgtagattgcgtaaggagtcacgacgtggtcgcactgtcacctggaagccggacgatgaacttgaacagataagattcttcgagcatgatgcagcagaagatgagggccgtgccagcaatttcacccgagacgcacgtgacaatcgtcaggagggtcagatgctcaagcaaatgcagcagagaagtatgcaagaaggaaatgatggggatgacgacgacgaggatggaatccccgaggagacttctcttcgcccatgggtcaccccgcaacttatcgacttctcgtgcctgagccagagccgacgaaacaagaactacactactcgtggtggcgaccgcccaattgagtcagcggagaagaaggttatggaggagtatgagaatcgagaactgatgactatttatacgaccccgtcagagatacctcccaccccgagatctcccactaccaagagcgcttccgagccgtacattcctccgaaggtgcgacactgggcagcgaccgaccagaagactggagaaattcaacgacgctggatggaatggatgaatagaggacctaagggttccctcccatacataatctcacgattgcctgtttctacaaacagcaccggcgcttccactactattccgcgcttgatgacaaaggaagagcgagacatcatggttcttgatatgctccagtccagtgcgatgaagaactatgttgatccggatccaaatcctgcacctgtgcaacacaagccctgcgatgacccagtgcagcagaaggcttgggaaaccttgggagctattgtgaaacagctcaaggacgtgccgactccaccagttgaaccgccgaaatggctccagtctgatcctcgtcgtagagatgagtggattgccggaaacagggccgatgtggccgccaagaagaagaaggaagctcaagaagcagcgcatgatcagtggtattcacagcttactggcaagcctggcttatacagcaacgggcaggccaatgcatctacgtaccaagctcagattcctgttcagcaacgacaagcacaagtcccgcagcatgctgctcagacgagtgcctttacttatccatctcaggttccatctcagcagtaccaggcacaggcacaggcacaggcacagcctcaggcctaccacccgcagcaagtccctgttgatgcaatcttacagcaagttgccgctatacagaaccctcaggctgcccagaacgccgccgctactcattctcagccgacgcccgccccggctcagccaggtcttaacttggaaagcgttttagctgccctgggccagtctgcgcagcaacccactgcacagacccagtcgtctcagccttccacggaagcctccaactactggcaagcttggagtgcctacagtgctgcgaatccgggccattcgtatggtgctcagcagactcagcaatatggtaatacataccagacccaagcttacggtgctcagcatacgcaacatcacgacggcgccagtggcgaagactcgtacggcgcacaaggaggatatcaaccacaaggacagaaccgcgataatactgatcgcggaggtcgcaaagatttcaatcgtggcgctaaggacttcaacaaaggaatcaaccgcgcactcatcggcaccaaagcgtgcacgttctgggcccagggtaaatgcgccaagggcgacaattgtacattccgccacgaccccaacgacctcaaataa

SEQ ID NO: 24332 - protein, 1404 aa, Muscodor strobelii
  misc_feature: SGI Peptide ID NO. 568295
  misc_feature (1375)..(1400): Pfam Id: PF00642 Pfam Desc: Zinc finger C-x8-C-x5-C-x3-H type (and similar)
  misc_feature (425)..(1138): NCBI GI: 145602662 Blast Desc: MGG_09553 [Magnaporthe grisea 70-15] gi|145011056|gb|EDJ95712.1| MGG_09553 [Magnaporthe grisea 70-15]
  misc_feature (424)..(1124): NCBI GI: 261353578 Blast Desc: conserved [Verticillium albo-atrum VaMs.102]
  misc_feature (710)..(1139): NCBI GI: 256732250 Blast Desc: [Nectria haematococca mpVI 77-13-4]
  misc_feature (424)..(1012): NCBI GI: 242822319 Blast Desc: conserved [Talaromyces stipitatus ATCC 10500] gi|218712783|gb|EED12208.1| conserved [Talaromyces stipitatus ATCC 10500]
  misc_feature (536)..(975): NCBI GI: 255938297 Blast Desc: Pc13g15240 [Penicillium chrysogenum Wisconsin 54-1255] gi|211584539|emb|CAP92593.1| Pc13g15240 [Penicillium chrysogenum Wisconsin 54-1255]
  misc_feature (423)..(984): NCBI GI: 226285565 Blast Desc: conserved [Paracoccidioides brasiliensis Pb01]
  misc_feature (371)..(981): NCBI GI: 121706244 Blast Desc: C-x8-C-x5-C-x3-H type zinc finger protein [Aspergillus clavatus NRRL 1] gi|119399531|gb|EAW09959.1| C-x8-C-x5-C-x3-H type zinc finger protein [Aspergillus clavatus NRRL 1]
  misc_feature (838)..(1124): NCBI GI: 156055202 Blast Desc: SS1G_04952 [Sclerotinia sclerotiorum 1980] gi|154702737|gb|EDO02476.1| SS1G_04952 [Sclerotinia sclerotiorum 1980]
  misc_feature (694)..(966): NCBI GI: 238841552 Blast Desc: C-x8-C-x5-C-x3-H type zinc finger protein [Microsporum canis CBS 113480]
  misc_feature (797)..(984): NCBI GI: 225554978 Blast Desc: C-x8-C-x5-C-x3-H zinc finger protein [Ajellomyces capsulatus G186AR]
MAQHDATGWPLAQAGSSLEEPNAVSTDGGFPGHIGHNPGSYIESPPNHVNQYSHQYGFPAGIDSYGQAAQGHGHFGGQHHPYSNMAFAVDNQPTFSHDMKPMGASNLVGESNLERQQPGHQYGHEHLDLQSQQYPNREYYPESQHHFASNGFGHHTNWPESAEIYEQITGPYQMNEAANYQAQTQSGQYQPATSQTHDTNNYPAQTVGSVVSASTQSHTPAKVTPVPLPIDPRTSRVFQAQAISGPSPLLGSAAPSVPSPEPAKLSGANLFLRKRDPPSGDWKWLEGVPNLFIGTKSEPRWEVGRFSKRYVAGKSKNGGPVLRGRPNLPCEVLRDSLEPLQEIESTLLEQLEAMKNYPGVEKEKERIEAEIEDVRRKMKALKAPTRTGRRSSVSDSESSDEEDPEEAEARRVDAEARGILATPTRPADALKGIEWDVVKIVRKEHNTQTLTPQAENEDSTSKLIGQRVAEFGKYVVELSGQARTLREQKAKAPKAKSAQLQASIDQKYDYIRAALKAASVYADAETLRNMGKHVRLMSSLQSVLNRQFIAKSYSGPVSLAILIFLSQASWMDTAIFEQVKLSQILEKYRNELDQKGKDLATEIAENAKEASGKDDAAKSKVSSQAKPKALEATKAIKPISTPKTTPIPSKSALPASVKTSTNLMKSVPAQSSSNAAADASRKETKAYTGLVSARKASNGGAKATIGLSPSKRLRDDDGDSRAAKKVATETSVSSLSNTRMASSLSAANLPASTASSGQNRPKPSGSTVLNKARTVSKPQPRRVETQSSGSSKIGGLLADIEKPAEVKPKPQKEPMKAPETEAEKARRLRKESRRGRTVTWKPDDELEQIRFFEHDAAEDEGRASNFTRDARDNRQEGQMLKQMQQRSMQEGNDGDDDDEDGIPEETSLRPWVTPQLIDFSCLSQSRRNKNYTTRGGDRPIESAEKKVMEEYENRELMTIYTTPSEIPPTPRSPTTKSASEPYIPPKVRHWAATDQKTGEIQRRWMEWMNRGPKGSLPYIISRLPVSTNSTGASTTIPRLMTKEERDIMVLDMLQSSAMKNYVDPDPNPAPVQHKPCDDPVQQKAWETLGAIVKQLKDVPTPPVEPPKWLQSDPRRRDEWIAGNRADVAAKKKKEAQEAAHDQWYSQLTGKPGLYSNGQANASTYQAQIPVQQRQAQVPQHAAQTSAFTYPSQVPSQQYQAQAQAQAQPQAYHPQQVPVDAILQQVAAIQNPQAAQNAAATHSQPTPAPAQPGLNLESVLAALGQSAQQPTAQTQSSQPSTEASNYWQAWSAYSAANPGHSYGAQQTQQYGNTYQTQAYGAQHTQHHDGASGEDSYGAQGGYQPQGQNRDNTDRGGRKDFNRGAKDFNKGINRALIGTKACTFWAQGKCAKGDNCTFRHDPNDLK

SEQ ID NO: 24333 - DNA, 4829 bp, Muscodor strobelii
  misc_feature: SGI EST ID NO. CUFF.57357.0
  misc_feature: Variant of the nucleotide sequence at SEQ ID NO 24331
cgctaacattttcgatagatcacgttgccctctccattgacaggtcgtaaagattctggatatggcccaacacgatgccacaggttggcctctggcccaagcgggctcgtcgttggaagagcctaacgcagtgagtactgatggtggctttcccggccatataggccacaacccagggtcgtatattgaaagcccacccaaccatgtgaaccaatatagtcatcaatatggcttccctgctgggatcgattcgtatggtcaggcagcacagggacatggccacttcggtggtcaacatcacccctactccaatatggcctttgcggttgataatcagccaacgttctcgcatgacatgaagcccatgggagcctctaatcttgttggcgaatcaaatcttgagcgccaacaaccgggacaccaatatggccatgagcatctggatctgcaatctcagcagtacccaaatcgagaatactatcccgagtctcaacaccactttgcttcgaacggctttggtcatcatacgaactggccagaatcagcagagatctatgaacagatcactggcccatatcagatgaacgaggcagctaactaccaagcacagactcagagtggacaataccaacctgcgacgagccaaactcatgacacaaataactacccagctcagactgttggttctgtggtgtctgcttcaacgcaaagtcatacaccggcgaaagtgacacccgtgccgcttcccatcgatccacggactagtagagtgtttcaggcgcaagcaatctcggggccatctccgttgcttggctcagcagctcctagtgtaccgagccccgagccagcaaagctttcaggagcaaatttgtttttgcgcaaacgagatccgcccagtggggattggaaatggcttgaaggagtccctaatcttttcatcggtaccaaatcagaacctcgttgggaagtaggtcgattttccaagagatatgtcgccggcaaaagcaagaatggaggtcctgtcttacgaggtcgcccaaatttgccttgtgaagttcttagagacagtctggagcctcttcaggaaatcgagtccaccttactggaacagttggaggccatgaagaattacccaggagttgagaaggaaaaggagcggatcgaagcagaaattgaagatgtgcggcgaaaaatgaaagctttgaaggctccaacaaggactggcagaagatccagtgtcagtgacagtgaatcgagtgatgaagaggatccagaggaagccgaagctcgaagggtggatgcggaagctcgagggattctggccacgccaacacggcctgcggatgctttgaagggcatcgagtgggatgttgtcaagatcgtccggaaggagcacaacactcaaacactcaccccccaagctgaaaatgaagactccacatctaagctgatcggccaaagagtcgcagaatttggtaaatatgtcgtcgaactctctggccaggcgcgaactctcagggagcagaaggcaaaagcacccaaggccaaatctgcccagcttcaagcttctattgaccaaaagtacgactacatccgagctgcactgaaggctgcttctgtctacgcagatgctgagactctgagaaacatgggtaaacatgtccgattgatgtcatctctccaatccgtcttgaatcgacaattcatagcaaagagctattccggtcctgtttctttggctattctcatcttcttgtctcaagcaagttggatggatacagcaatttttgagcaagtcaaactttcacaaatcctggagaagtaccgtaatgaactagaccagaagggcaaggatcttgccactgagatcgctgaaaacgccaaagaagctagtggaaaggacgatgctgccaagtcgaaggtatcatctcaagctaagcccaaggctctagaggccaccaaagccatcaagcctatctctactccaaaaactactcccatccccagcaagagtgcgcttcccgccagtgtcaaaacttctacaaatttgatgaagtccgtcccggctcaatcttcaagcaatgctgcagcagatgcctccaggaaagaaaccaaagcctacactggtttagtctctgccagaaaagccagcaatggaggtgcaaaagccactatcgggctttcgccttccaagagactcagagatgatgatggtgactctcgtgctgcaaagaaagttgcgacggagaccagtgtatcttccttgagcaacaccagaatggcttcaagtttgagtgcggcaaacctgccagcttccacagccagtagcggacagaatcgacccaagccttccggttctacagtcctcaacaaagctcgaaccgtctctaagccacagccaagacgcgtggagacgcaatcatctggatcatcaaagatcggtggattacttgccgatatcgagaagcctgctgaggtcaaaccaaaacctcagaaggagcctatgaaagcacctgagacggaggcagaaaaagcacgtagattgcgtaaggagtcacgacgtggtcgcactgtcacctggaagccggacgatgaacttgaacagataagattcttcgagcatgatgcagcagaagatgagggccgtgccagcaatttcacccgagacgcacgtgacaatcgtcaggagggtcagatgctcaagcaaatgcagcagagaagtatgcaagaaggaaatgatggggatgacgacgacgaggatggaatccccgaggagacttctcttcgcccatgggtcaccccgcaacttatcgacttctcgtgcctgagccagagccgacgaaacaagaactacactactcgtggtggcgaccgcccaattgagtcagcggagaagaaggttatggaggagtatgagaatcgagaactgatgactatttatacgaccccgtcagagatacctcccaccccgagatctcccactaccaagagcgcttccgagccgtacattcctccgaaggtgcgacactgggcagcgaccgaccagaagactggagaaattcaacgacgctggatggaatggatgaatagaggacctaagggttccctcccatacataatctcacgattgcctgtttctacaaacagcaccggcgcttccactactattccgcgcttgatgacaaaggaagagcgagacatcatggttcttgatatgctccagtccagtgcgatgaagaactatgttgatccggatccaaatcctgcacctgtgcaacacaagccctgcgatgacccagtgcagcagaaggcttgggaaaccttgggagctattgtgaaacagctcaaggacgtgccgactccaccagttgaaccgccgaaatggctccagtctgatcctcgtcgtagagatgagtggattgccggaaacagggccgatgtggccgccaagaagaagaaggaagctcaagaagcagcgcatgatcagtggtattcacagcttactggcaagcctggcttatacagcaacgggcaggccaatgcatctacgtaccaagctcagattcctgttcagcaacgacaagcacaagtcccgcagcatgctgctcagacgagtgcctttacttatccatctcaggttccatctcagcagtaccaggcacaggcacaggcacaggcacagcctcaggcctaccacccgcagcaagtccctgttgatgcaatcttacagcaagttgccgctatacagaaccctcaggctgcccagaacgccgccgctactcattctcagccgacgcccgccccggctcagccaggtcttaacttggaaagcgttttagctgccctgggccagtctgcgcagcaacccactgcacagacccagtcgtctcagccttccacggaagcctccaactactggcaagcttggagtgcctacagtgctgcgaatccgggccattcgtatggtgctcagcagactcagcaatatggtaatacataccagacccaagcttacggtgctcagcatacgcaacatcacgacggcgccagtggcgaagactcgtacggcgcacaaggaggatatcaaccacaaggacagaaccgcgataatactgatcgcggaggtcgcaaagatttcaatcgtggcgctaaggacttcaacaaaggaatcaaccgcgcactcatcggcaccaaagcgtgcacgttctgggcccagggtaaatgcgccaagggcgacaattgtacattccgccacgaccccaacgacctcaaataagtggaggttccgttgaatcaacgatggcctgtaataccttttttctttggggcctgcaatttctttcatacgcatcagttgagtttaggggtatcaatgcatcaaggcgggataatgcatggaaaggcctggcgtttggcatgatgggacacgacacctcagcattgcatggaagggaaagggactgtgttgatttcgcctctaagaggctatgtaagatacatttgacaaaatccggggtggatcgcgcgtgcgatggtacaaaaacttggggaggattgcggatgatagagagaaaggttctagtagaccgaggattccgaggatgccgaggatgaggactgcgaaaatgaacgatggtgtgagagctggagcgattgtgtataataggggaagaatgaaaatcccgaaaaacaaaactgccgtgtgttatgatgtgaatgttgtgttgtctcctagcttgcttgtatggcccacgacgctacgacttatactcgtagtctcgtttcttcctccctccccttacctgtctctcttttacctcctaccgccc

SEQ ID NO: 24334 - DNA, 759 bp, Muscodor strobelii
  misc_feature: SGI cDNA ID NO. 568296
  misc_feature: Encodes the peptide sequence at SEQ ID NO 24335
atggagggtccggaacggcttgaggccgagttgggactcttgcttgccatgtaccccgaatccctcagctattcccccaaggcgcgcgagctgagatattcacatcttaacgaggagtccgactcaaaagctccggctacaatagttctacgactaccagattcgtacccactcaagggattccccgaagtaattcttgctacgggtcatcacaaagaagacttacgatcagacaccaaagccgcctttcagtctatcgcgacctcgactggcgaagaagtccttgacgcgctcctacttgcttttcaagatattgtatcatctcaaaacaaagcatcgaagactgcggttagccaggcggagcatcacgaatcagagggaacggcttcgctacccagcaacaagactatcatcgtctggcttcaccatcttcttgccacaggtaagcgcaagctcgccctgaatccatcgacgggaggttctgaaatatcggggatcacgaaacctgggtacccgggtgttatgatcttctctggcgagagaagcgttgtcgacgcgcatgtatctgagttgcggaatcagaggtggcaggcatttcagatccgacttgatagtgatgatctcaagaccgaggatgagcggtggcagtttggtcatggggctgggatccgcgaagttgagtctatgagcgagattacgcaggctatcgtcaatgagaagcatagggagacatttctcgaggcaattggtattaaatga

SEQ ID NO: 24335 - protein, 252 aa, Muscodor strobelii
  misc_feature: SGI Peptide ID NO. 568296
  misc_feature (2)..(106): Pfam Id: PF05773 Pfam Desc: RWD domain
  misc_feature (3)..(252): NCBI GI: 189202280 Blast Desc: conserved [Pyrenophora tritici-repentis Pt-1C-BFP] gi|187984575|gb|EDU50063.1| conserved [Pyrenophora tritici-repentis Pt-1C-BFP]
  misc_feature (4)..(252): NCBI GI: 169595084 Blast Desc: SNOG_00275 [Phaeosphaeria nodorum SN15] gi|111070650|gb|EAT91770.1| SNOG_00275 [Phaeosphaeria nodorum SN15]
  misc_feature (89)..(202): NCBI GI: 256089441 Blast Desc: [Schistosoma mansoni] gi|238666430|emb|CAZ37057.1| expressed protein [Schistosoma mansoni]
  misc_feature (40)..(202): NCBI GI: 156390817 Blast Desc: [Nematostella vectensis] gi|156222560|gb|EDO43403.1| [Nematostella vectensis]
  misc_feature (138)..(205): NCBI GI: 71003782 Blast Desc: UM00410.1 [Ustilago maydis 521] gi|46095559|gb|EAK80792.1| UM00410.1 [Ustilago maydis 521]
  misc_feature (138)..(202): NCBI GI: 255089695 Blast Desc: [Micromonas sp. RCC299] gi|226522042|gb|ACO68027.1| [Micromonas sp. RCC299]
  misc_feature (135)..(202): NCBI GI: 164662014 Blast Desc: MGL_0722 [Malassezia globosa CBS 7966] gi|159106031|gb|EDP44915.1| MGL_0722 [Malassezia globosa CBS 7966]
  misc_feature (36)..(202): NCBI GI: 221057650 Blast Desc: , conserved [Plasmodium knowlesi strain H] gi|194247338|emb|CAQ40738.1| , conserved [Plasmodium knowlesi strain H]
  misc_feature (35)..(202): NCBI GI: 156101299 Blast Desc: [Plasmodium vivax SaI-1] gi|148805217|gb|EDL46616.1| , conserved [Plasmodium vivax]
  misc_feature (142)..(251): NCBI GI: 169845685 Blast Desc: CC1G_00741 [Coprinopsis cinerea okayama7#130] gi|116509627|gb|EAU92522.1| CC1G_00741 [Coprinopsis cinerea okayama7#130]
MEGPERLEAELGLLLAMYPESLSYSPKARELRYSHLNEESDSKAPATIVLRLPDSYPLKGFPEVILATGHHKEDLRSDTKAAFQSIATSTGEEVLDALLLAFQDIVSSQNKASKTAVSQAEHHESEGTASLPSNKTIIVWLHHLLATGKRKLALNPSTGGSEISGITKPGYPGVMIFSGERSVVDAHVSELRNQRWQAFQIRLDSDDLKTEDERWQFGHGAGIREVESMSEITQAIVNEKHRETFLEAIGIK

SEQ ID NO: 24336 - DNA, 1961 bp, Muscodor strobelii
  misc_feature: SGI EST ID NO. CUFF.57365.0
  misc_feature: Variant of the nucleotide sequence at SEQ ID NO 24334
ggactatatctagtctacgagatatataagaatcatacagataaacgcatttcgaatcgtatttatcatggcaccgcctgggttaatgtttgtggtttcacatccgcgcgatctttcaaagacacctgatgacttatacaatcgcttctacaacgaagagcacttgcctgatctcctggccgcaggaccacccaaatttgcgcttcggtacaaaaatgtagacacccagtccgcgatgccgtacatagcgctgtattccgtcgatgacagtgctttcattggttcgcccgagctgctcaagctcatgaaagacggcaaacgcagcaagatacttcaatgcgacgacatcttcgacttggtccacttcgagatgaagccttacgaaaagatccacacatacgaggcctacgggcatggaaacgatagcggtcttgagcgaggccacacgttaatctgcgtcgcgatagaaccggccgagggacaggaagacgacttagatgcctggtatcgaaagcagcatctagatatgctaggaatgtgtcgaggctatcgcaggtgcacgcgctataggaggaaagatggccagcctccaaggtttgttgcgctgcacgagtgggactgtgaacctgaggatattcccatggatcagcttgctcaattgagagccacggaatggagtaaggcgattaggagtcgcgtgaaggttatggaacgggacgttttcacgctgatacaggcccaaggagatacggaattaaagctttgaatgagatactgagatcatggccagataggagaagtatgcggcattgtctgcgtcatcctgcgtcgaaggccgattacattaaaagccaacaatgacagtgtgttatatgtagtgaaaataatctggaaacatcatgtatgcccgtgcagaaaagtaacgcaggatgaagtgcattagcattgaacctattgcattacgtcatgccatttaataccaatcgtcaactaccgaattggcattgcaaatccacgagtccaaacattagcaaaggtcaacgcattctagctgccatcgcgaaaaggtgggagagtatcgaagaagaagaatggagggtccggaacggcttgaggccgagttgggactcttgcttgccatgtaccccgaatccctcagctattcccccaaggcgcgcgagctgagatattcacatcttaacgaggagtccgactcaaaagctccggctacaatagttctacgactaccagattcgtacccactcaagggattccccgaagtaattcttgctacgggtcatcacaaagaagacttacgatcagacaccaaagccgcctttcagtctatcgcgacctcgactggcgaagaagtccttgacgcgctcctacttgcttttcaagatattgtatcatctcaaaacaaagcatcgaagactgcggttagccaggcggagcatcacgaatcagagggaacggcttcgctacccagcaacaagactatcatcgtctggcttcaccatcttcttgccacaggtaagcgcaagctcgccctgaatccatcgacgggaggttctgaaatatcggggatcacgaaacctgggtacccgggtgttatgatcttctctggcgagagaagcgttgtcgacgcgcatgtatctgagttgcggaatcagaggtggcaggcatttcagatccgacttgatagtgatgatctcaagaccgaggatgagcggtggcagtttggtcatggggctgggatccgcgaagttgagtctatgagcgagattacgcaggctatcgtcaatgagaagcatagggagacatttctcgaggcaattggtattaaatgagaaaatgtcttcatcacgacactgcgacttgcggttgatttacctcttagtgaagtacttcatataggtaggtagtgattgctcagatatgcataacccaatgtggtaagg

SEQ ID NO: 24337 - DNA, 699 bp, Muscodor strobelii
  misc_feature: SGI cDNA ID NO. 568297
  misc_feature: Encodes the peptide sequence at SEQ ID NO 24338
atggcaccgcctgggttaatgtttgtggtttcacatccgcgcgatctttcaaagacacctgatgacttatacaatcgcttctacaacgaagagcacttgcctgatctcctggccgcaggaccacccaaatttgcgcttcggtacaaaaatgtagacacccagtccgcgatgccgtacatagcgctgtattccgtcgatgacagtgctttcattggttcgcccgagctgctcaagctcatgaaagacggcaaacgcagcaagatacttcaatgcgacgacatcttcgacttggtccacttcgagatgaagccttacgaaaagatccacacatacgaggcctacgggcatggaaacgatagcggtcttgagcgaggccacacgttaatctgcgtcgcgatagaaccggccgagggacaggaagacgacttagatgcctggtatcgaaagcagcatctagatatgctaggaatgtgtcgaggctatcgcaggtgcacgcgctataggaggaaagatggccagcctccaaggtttgttgcgctgcacgagtgggactgtgaacctgaggatattcccatggatcagcttgctcaattgagagccacggaatggagtaaggcgattaggagtcgcgtgaaggttatggaacgggacgttttcacgctgatacaggcccaaggagatacggaattaaagctttga

SEQ ID NO: 24338 - protein, 232 aa, Muscodor strobelii
  misc_feature: SGI Peptide ID NO. 568297
  misc_feature (1)..(226): NCBI GI: 261358017 Blast Desc: conserved [Verticillium albo-atrum VaMs.102]
  misc_feature (1)..(226): NCBI GI: 121699974 Blast Desc: alpha/beta hydrolase, [Aspergillus clavatus NRRL 1] gi|119396394|gb|EAW06826.1| alpha/beta hydrolase, [Aspergillus clavatus NRRL 1]
  misc_feature (1)..(183): NCBI GI: 115397185 Blast Desc: conserved [Aspergillus terreus NIH2624] gi|114192375|gb|EAU34075.1| conserved [Aspergillus terreus NIH2624]
  misc_feature (1)..(219): NCBI GI: 119472087 Blast Desc: alpha/beta hydrolase, [Neosartorya fischeri NRRL 181] gi|119406426|gb|EAW16377.1| alpha/beta hydrolase, [Neosartorya fischeri NRRL 181]
  misc_feature (4)..(228): NCBI GI: 169626583 Blast Desc: SNOG_16591 [Phaeosphaeria nodorum SN15] gi|111071532|gb|EAT92624.1| SNOG_16591 [Phaeosphaeria nodorum SN15]
  misc_feature (1)..(219): NCBI GI: 70992383 Blast Desc: alpha/beta hydrolase [Aspergillus fumigatus Af293] gi|66848673|gb|EAL89002.1| alpha/beta hydrolase, [Aspergillus fumigatus Af293]
  misc_feature (1)..(219): NCBI GI: 159124611 Blast Desc: alpha/beta hydrolase, [Aspergillus fumigatus A1163]
  misc_feature (1)..(211): NCBI GI: 156061271 Blast Desc: SS1G_02778 [Sclerotinia sclerotiorum 1980] gi|154700182|gb|EDN99920.1| SS1G_02778 [Sclerotinia sclerotiorum 1980]
  misc_feature (1)..(223): NCBI GI: 242217040 Blast Desc: [Postia placenta Mad-698-R] gi|220726553|gb|EED80499.1| [Postia placenta Mad-698-R]
  misc_feature (1)..(185): NCBI GI: 169773005 Blast Desc: [Aspergillus oryzae RIB40] gi|83768832|dbj|BAE58969.1| protein product [Aspergillus oryzae]
MAPPGLMFVVSHPRDLSKTPDDLYNRFYNEEHLPDLLAAGPPKFALRYKNVDTQSAMPYIALYSVDDSAFIGSPELLKLMKDGKRSKILQCDDIFDLVHFEMKPYEKIHTYEAYGHGNDSGLERGHTLICVAIEPAEGQEDDLDAWYRKQHLDMLGMCRGYRRCTRYRRKDGQPPRFVALHEWDCEPEDIPMDQLAQLRATEWSKAIRSRVKVMERDVFTLIQAQGDTELKL

SEQ ID NO: 24339 - DNA, 1961 bp, Muscodor strobelii; identical to SEQ ID NO: 24336
  misc_feature: SGI EST ID NO. CUFF.57365.0
  misc_feature: Variant of the nucleotide sequence at SEQ ID NO 24337

SEQ ID NO: 24340 - DNA, 2109 bp, Muscodor strobelii
  misc_feature: SGI cDNA ID NO. 568298
  misc_feature: Encodes the peptide sequence at SEQ ID NO 24341
atggcgtctctccgcgaccgccagatcgcatccctcaagaagctgctcaacctcaaccacacgctcgaggaggcgcaggaagcccacgccaacagcctcgcgcccgccggctccatcctcaccgaagagggcgagcccatctggaaggtccttgtcttcgacgacctcggccgcgatgtcatcagcagcgtcttgcgcgtgagcgacctgcgctctatgggcgtcaccatgcacatgcacctctccggcgctcgacaccccatacccgatgtccccgtcgtatatctcgtcgaaccgacctccaagtccctagacagcataaccggtgacttacagaagggcctctattctcccgcctacgtcaacttcctctcctccataccacgcccgcttctcgaagatttcgcgtcccaaaccgccactgctggcacctccgagcacattgcccagctattcgaccaatacctcaatttcatagtcgctgagcccgatctcttcagcctcggcatgcagaaagagcatacgtattgggccctcaacagcgcaaagaccaaggacgacgagttggattatgttgtcgaccgtattgttagcggactgtttagcgtcatagtcactatgggtgtcatcccgataataaggtgtcccaagggagctgcagccgatatgatcgccggcaagcttgaccgaaagctacgagatcacatcttaaactcgaaagacaacctcttcaacgcaagaccagcttcttctgccggcacgcccgcctcaagaccggtgctaataattttggatcgcaatgtcgatttaaaccccatgctatcacattcttggacctatcaatctctcgtctacgatgtcctcgacatgaaactgaaccgaataaccatcgagacccctattgacgaagagaaccctgcaaagggggtgacgaagaaggcatacgatctcacagctgctgatttcttctgggaaaagaatgccgcgttgccattcccccaagtggcagaagatatcgatgctgagcttacgcgatacaaagaagacgcagccgaaatcacgaaaaagactggtgcgtcatcaatagaagacctacaaaacgacaccagcgcaagcgcacagcacctcaaggccgccatcacattgttaccagagctgcgggagaggaaagcggtattagacatgcacatgaatattctagccgctcttctgtccggcatcaagaaccggcaactggacaactatttccaaatggaagagaacgtcatgaaacaaaccaaagctcaggtgctcgagatcattaaagacgatgccaagggccaagacccgttagacaagctacggttgttcatcatatggttcctcagcactgagcaggaagtcagtagggcagactggactcagttcgaggaagctctcacggcggcccaagtcgacagcacttgcttggcctatatcagacaagtccgcgcaaccaccaaaatgacccaactagccacaatcaacaacccctcacaacctgcctcccaaggctcagatctcttcggccgcttctcatcactctccactcgtctcacagaccgcctgaaagaaacaggcgtaggcgtaccaacgaacctcgcctcaaacttcgacaccctaataggaggaatcaaaaacttcctccccgcaaaccgcgacctaacagtcacgaaaatcgtagaatccatcatggagccccagaccgcctccacctcagcaatcgcaaaaacagagaactacttgtacttcgacccgcgctccgccaacgcccgaggcacaatgcctccaccatccgctgtccgagccggagcaaattccacacctggttcccttccaggctcctcgttaagtgtacaaggtcccggaacaggagcgagtttcggacagagaagacaaggctatacggacgcgattgtgttcacagttggaggcgggagtatggacgaatatggaaatttgcaggaatgggtacagcggacgagcgaaggcaggagtaagaagagagtcgtgtatgggtctacggaactcttaaatgctagggagtttatcaaagaggaacttgagcggttggggagcgaagttgcttga

SEQ ID NO: 24341 - protein, 702 aa, Muscodor strobelii
  misc_feature: SGI Peptide ID NO. 568298
  misc_feature (48)..(693): Pfam Id: PF00995 Pfam Desc: Sec1 family
  misc_feature (48)..(490): Pfam Id: PF00995 Pfam Desc: Sec1 family
  misc_feature (636)..(693): Pfam Id: PF00995 Pfam Desc: Sec1 family
  misc_feature (3)..(702): NCBI GI: 46137659 Blast Desc: FG10345.1 [Gibberella zeae PH-1]
  misc_feature (3)..(702): NCBI GI: 256731867 Blast Desc: [Nectria haematococca mpVI 77-13-4]
  misc_feature (3)..(702): NCBI GI: 154292139 Blast Desc: SNARE docking complex subunit [Botryotinia fuckeliana B05.10] gi|150846242|gb|EDN21435.1| SNARE docking complex subunit [Botryotinia fuckeliana B05.10]
  misc_feature (3)..(700): NCBI GI: 156055204 Blast Desc: SS1G_04953 [Sclerotinia sclerotiorum 1980] gi|154702738|gb|EDO02477.1| SS1G_04953 [Sclerotinia sclerotiorum 1980]
  misc_feature (3)..(702): NCBI GI: 171694285 Blast Desc: protein product [Podospora anserina] gi|170947091|emb|CAP73896.1| protein product [Podospora anserina]
  misc_feature (3)..(700): NCBI GI: 145242174 Blast Desc: An09g04170 [Aspergillus niger] gi|134078278|emb|CAK96859.1| protein product [Aspergillus niger]
  misc_feature (3)..(700): NCBI GI: 70998945 Blast Desc: Golgi transport protein Sly1 [Aspergillus fumigatus Af293] gi|66851831|gb|EAL92156.1| Golgi transport protein Sly1, [Aspergillus fumigatus Af293] gi|159127212|gb|EDP52327.1| Golgi
  misc_feature (3)..(700): NCBI GI: 121706242 Blast Desc: Golgi transport protein Sly1, [Aspergillus clavatus NRRL 1] gi|119399530|gb|EAW09958.1| Golgi transport protein Sly1, [Aspergillus clavatus NRRL 1]
  misc_feature (3)..(700): NCBI GI: 119490496 Blast Desc: Golgi transport protein Sly1, [Neosartorya fischeri NRRL 181] gi|119411194|gb|EAW21137.1| Golgi transport protein Sly1, [Neosartorya fischeri NRRL 181]
  misc_feature (3)..(702): NCBI GI: 261353577 Blast Desc: SEC1 family transport protein SLY1 [Verticillium albo-atrum VaMs.102]
MASLRDRQIASLKKLLNLNHTLEEAQEAHANSLAPAGSILTEEGEPIWKVLVFDDLGRDVISSVLRVSDLRSMGVTMHMHLSGARHPIPDVPVVYLVEPTSKSLDSITGDLQKGLYSPAYVNFLSSIPRPLLEDFASQTATAGTSEHIAQLFDQYLNFIVAEPDLFSLGMQKEHTYWALNSAKTKDDELDYVVDRIVSGLFSVIVTMGVIPIIRCPKGAAADMIAGKLDRKLRDHILNSKDNLFNARPASSAGTPASRPVLIILDRNVDLNPMLSHSWTYQSLVYDVLDMKLNRITIETPIDEENPAKGVTKKAYDLTAADFFWEKNAALPFPQVAEDIDAELTRYKEDAAEITKKTGASSIEDLQNDTSASAQHLKAAITLLPELRERKAVLDMHMNILAALLSGIKNRQLDNYFQMEENVMKQTKAQVLEIIKDDAKGQDPLDKLRLFIIWFLSTEQEVSRADWTQFEEALTAAQVDSTCLAYIRQVRATTKMTQLATINNPSQPASQGSDLFGRFSSLSTRLTDRLKETGVGVPTNLASNFDTLIGGIKNFLPANRDLTVTKIVESIMEPQTASTSAIAKTENYLYFDPRSANARGTMPPPSAVRAGANSTPGSLPGSSLSVQGPGTGASFGQRRQGYTDAIVFTVGGGSMDEYGNLQEWVQRTSEGRSKKRVVYGSTELLNAREFIKEELERLGSEVA

SEQ ID NO: 24342 - DNA, 2582 bp, Muscodor strobelii
  misc_feature: SGI EST ID NO. CUFF.57553.0
  misc_feature: Variant of the nucleotide sequence at SEQ ID NO 24340
cagacacgttgatgacccaccacgaattccatgcatgcaggtacgccactactgcttgttgggaactccagctattgcctgccgtgatgtgcaattgatcagatcaacgacttgctaaagtgcacgatatcctctttgcccatgggacggcttcactagacacacaccgctcataccatggcgtctctccgcgaccgccagatcgcatccctcaagaagctgctcaacctcaaccacacgctcgaggaggcgcaggaagcccacgccaacagcctcgcgcccgccggctccatcctcaccgaagagggcgagcccatctggaaggtccttgtcttcgacgacctcggccgcgatgtcatcagcagcgtcttgcgcgtgagcgacctgcgctctatgggcgtcaccatgcacatgtacgatataccttactcttaccatccaccgctgacatctctcgatgcaggcacctctccggcgctcgacaccccatacccgatgtccccgtcgtatatctcgtcgaaccgacctccaagtccctagacagcataaccggtgacttacagaagggcctctattctcccgcctacgtcaacttcctctcctccataccacgcccgcttctcgaagatttcgcgtcccaaaccgccactgctggcacctccgagcacattgcccagctattcgaccaatacctcaatttcatagtcgctgagcccgatctcttcagcctcggcatgcagaaagagcatacgtattgggccctcaacagcgcaaagaccaaggacgacgagttggattatgttgtcgaccgtattgttagcggactgtttagcgtcatagtcactatgggtgtcatcccgataataaggtgtcccaagggagctgcagccgatatgatcgccggcaagcttgaccgaaagctacgagatcacatcttaaactcgaaagacaacctcttcaacgcaagaccagcttcttctgccggcacgcccgcctcaagaccggtgctaataattttggatcgcaatgtcgatttaaaccccatgctatcacattcttggacctatcaatctctcgtctacgatgtcctcgacatgaaactgaaccgaataaccatcgagacccctattgacgaagagaaccctgcaaagggggtgacgaagaaggcatacgatctcacagctgctgatttcttctgggaaaagaatgccgcgttgccattcccccaagtggcagaagatatcgatgctgagcttacgcgatacaaagaagacgcagccgaaatcacgaaaaagactggtgcgtcatcaatagaagacctacaaaacgacaccagcgcaagcgcacagcacctcaaggccgccatcacattgttaccagagctgcgggagaggaaagcggtattagacatgcacatgaatattctagccgctcttctgtccggcatcaagaaccggcaactggacaactatttccaaatggaagagaacgtcatgaaacaaaccaaagctcaggtgctcgagatcattaaagacgatgccaagggccaagacccgttagacaagctacggttgttcatcatatggttcctcagcactgagcaggaagtcagtagggcagactggactcagttcgaggaagctctcacggcggcccaagtcgacagcacttgcttggcctatatcagacaagtccgcgcaaccaccaaaatgacccaactagccacaatcaacaacccctcacaacctgcctcccaaggctcagatctcttcggccgcttctcatcactctccactcgtctcacagaccgcctgaaagaaacaggcgtaggcgtaccaacgaacctcgcctcaaacttcgacaccctaataggaggaatcaaaaacttcctccccgcaaaccgcgacctaacagtcacgaaaatcgtagaatccatcatggagccccagaccgcctccacctcagcaatcgcaaaaacagagaactacttgtacttcgacccgcgctccgccaacgcccgaggcacaatgcctccaccatccgctgtccgagccggagcaaattccacacctggttcccttccaggctcctcgttaagtgtacaaggtcccggaacaggagcgagtttcggacagagaagacaaggctatacggacgcgattgtgttcacagttggaggcgggagtatggacgaatatggaaatttgcaggaatgggtacagcggacgagcgaaggcaggagtaagaagagagtcgtgtatgggtctacggaactcttaaatgctagggagtttatcaaagaggaacttgagcggttggggagcgaagttgcttgatgtggtgggaggggagatatcattagacttacctaggttaagaccagggaatttgaaaaagagaatggggtattgataccgttatttcgtactcatggcattttgttggtgtaatgagtagcacatcccatacctcttatgtacttggagagaaagtggaaggtgcagatactagacacaagtccctgccttctttgtcctcccaaattgaatcccatccgagttcccttagggaaatatccgaat

SEQ ID NO: 24343 - DNA, 1098 bp, Muscodor strobelii
  misc_feature: SGI cDNA ID NO. 568299
  misc_feature: Encodes the peptide sequence at SEQ ID NO 24344
atgcttggtcaggtcaccgggacattctggataacgactggcgtatctgtcgacgctgctgacgatgagggtttgacattcgttcatatgagaacgttgggcacgaccaacgctagtgcaacgagtcatatgcgagacatcgatacacttatctggtcaatgtctatgcttcgcgtcatgtccgatgcaacaaattccacagcggcctggtcagatctcccagtacaggctgcagagtgcgtgttgtactactgtgttaataattatactatcacggtgagtgaaggagagcttctggtgacaagtgacagggtttcgggtgcttcgcgactggaaaactcatggcagcctcaatatgctcaaacagctcaaaataacctgacaaatgctactgtcccgctgaacagcacattagaggaaagcatcgcctttaatgacatatattcggctgtctctcgaactgatcttacgctttcatctccgaccggtaatctttttaatatctcacgtattgctgttaacagcatcagctcgtttctccaaaacactttcgcgtttgcccccgagcagtcggaccattctttaccaaacggcaacaacgacagctacaatggcatatacttctttatagatgatattgcattctcaatcttttcaccctcaatcatgtcagcgcttggaaacagtagcgattggaaccgtacgttcgaaacgatcgctttgagtatgagcaacgctattctgtctggcgctgacgatgacttcaatggtcaatcaagtaccgttatcggacaaaaggggactatcattgtcacctacagaattgtgtggccttggatcgcgttacacgtcttccttttcgccatgggtctcatcttcttaattgcaacaatcatgcaaacttcacagaacgatcagccaatatctgtgtggaagacgagcagtctagcgacactaagccgcgggaaagccgtggatgatattctgacgggcacacaaacggtgaaggagatgaataaaagagctgcaatgagttgtgtgagattatttacgacatcaagagccacaacttcggcggcagaggatataccttcgtga

SEQ ID NO: 24344 - protein, 365 aa, Muscodor strobelii
  misc_feature: SGI Peptide ID NO. 568299
  misc_feature (28)..(363): NCBI GI: 156059576 Blast Desc: SS1G_03800 [Sclerotinia sclerotiorum 1980] gi|154701587|gb|EDO01326.1| SS1G_03800 [Sclerotinia sclerotiorum 1980]
  misc_feature (28)..(252): NCBI GI: 154292808 Blast Desc: BC1G_14311 [Botryotinia fuckeliana B05.10] gi|150845792|gb|EDN20985.1| BC1G_14311 [Botryotinia fuckeliana B05.10]
  misc_feature (30)..(349): NCBI GI: 256728341 Blast Desc: [Nectria haematococca mpVI 77-13-4]
  misc_feature (35)..(345): NCBI GI: 46135647 Blast Desc: FG09346.1 [Gibberella zeae PH-1]
  misc_feature (37)..(320): NCBI GI: 256728432 Blast Desc: NECHADRAFT_53935 [Nectria haematococca mpVI 77-13-4]
  misc_feature (35)..(321): NCBI GI: 256725830 Blast Desc: NECHADRAFT_94612 [Nectria haematococca mpVI 77-13-4]
  misc_feature (57)..(326): NCBI GI: 145236391 Blast Desc: An06g00150 [Aspergillus niger] gi|134075297|emb|CAK44931.1| protein product [Aspergillus niger]
MLGQVTGTFWITTGVSVDAADDEGLTFVHMRTLGTTNASATSHMRDIDTLIWSMSMLRVMSDATNSTAAWSDLPVQAAECVLYYCVNNYTITVSEGELLVTSDRVSGASRLENSWQPQYAQTAQNNLTNATVPLNSTLEESIAFNDIYSAVSRTDLTLSSPTGNLFNISRIAVNSISSFLQNTFAFAPEQSDHSLPNGNNDSYNGIYFFIDDIAFSIFSPSIMSALGNSSDWNRTFETIALSMSNAILSGADDDFNGQSSTVIGQKGTIIVTYRIVWPWIALHVFLFAMGLIFLIATIMQTSQNDQPISVWKTSSLATLSRGKAVDDILTGTQTVKEMNKRAAMSCVRLFTTSRATTSAAEDIPS

SEQ ID NO: 24345 - DNA, 164 bp, Muscodor strobelii
  misc_feature: SGI EST ID NO. CUFF.57374.0
  misc_feature: Variant of the nucleotide sequence at SEQ ID NO 24343
cggcggcagaggatataccttcgtgagaggatttatagtgttttgatgcttatccggaacacgcaggcgagtaacaaaaatactgtgacccatccacctagtatccctacgacagcaactattcgtcgctatcaccacttaatagttaccatttaaaaacaatc

SEQ ID NO: 24346 - DNA, 2706 bp, Muscodor strobelii
  misc_feature: SGI cDNA ID NO. 568300
  misc_feature: Encodes the peptide sequence at SEQ ID NO 24347
atggataatgggcggatacacccgcagagggcccattctccgggacatcctctgcagggcggatatcagttggacgacgttccttacaacagctacggcgcacacccagcacaagccagtcatagccatctcgacatgcctcacactggcgaccccggcagatacaccccgagtgacaacctaccactcaacgctgctcattccacagaaagctttggacacagtccttatggccaccagcagggctataattcggagtattctgtaaacccagaggcacatcacgattcttattacaaccaaccatatgagccccatactgctacaacccccctgaacgaccatcagggagccttcgaccacgatgaatatgatcagagaccaatgttgcagcaaaatgatccatacgcccaaggccaagcacaggaaccataccgcgacgagccacaaccccagcagcagaacaatgttcccctaaagaggtggaagacggtgaagcaggttctgctatacaatggtaacttggttctcgattgccctgtgccaccacgtctcctagatcagctcccgcacggcgagcgcgacgaattcacccacatgcgttattccgcggcgacgtgcgatcctaataacttctacgacgaacggtttactctgcgccagaaactcttcagcaaaccacgacacaccgagctctttatcgtcgtcactatgtacaacgaagatgacattctattcgccagaactatgatcggtgtgctgaagaacgttgagtacatgtgtagtcgaaaagagagcaaaacctggggccccgatgcgtggaagaagatagtcgtctgtgtcgtaagcgacggccgtgctaaaatcaatccacgaacgagggcgctcctagcgggtatgggtgtatatcaggagggcattgcgaaacaacaggttaatggcaaagacgtcactgctcatatctacgaatatactacccaggtcggcatgcagatcaagaataacgtggtacagcttattccgaagaaacagcccgttcagatgttgttctgcttgaaggaaaagaatcagaagaagatcaattcacacaggtggttcttctcggctttcggccgtgttctcaaccccaacatctgcgttcttatcgatgccggtaccagacctggcggtaactccatctaccacctctggaaggcattcgacctggaacctagctgtgctggtgcttgcggcgagatcaaggctatgttgggcacgggcggtaaatacctcctgaacccggtggtggcggcccagaacttcgagtataagatgagcaacattctcgacaaacccctggagtccgcatttggcttcatttccgtcttgcctggtgccttttcagcatatcgatacatcgctttgcagaacgacaagaacggccaaggtccgctcgagaagtacttcaagggtgagacgcttcatggcgcaggtgctggtgttttcactgcgaacatgtatcttgccgaggacagaatcctctgtttcgaactagtcaccaagcgcaactgtcattgggtcttgtcttatgtcaagtcggcaacgggcgagacagatgtccctgacaccatcaccgagttcatcctgcagcgtcgtcgttggttgaacggttcattcttcgcctcgatctacgccattgcccacttctacgaattcttccggtctgatcactctttcattcgcaagctggccttcttcattgaattcgtgttccagactgttagccagatctttgcttggttcgccattggtaacttcttcctgatttttaagattctgacgaatagtcttggcgataagacacttctgggtaatgtgggcactattctcggtgtcgtatttgagtggttctatggtgtcactctcgtcgcttgcttcgtcttatcgcttggtaatcgccctgctggttccggaaaactgtacactggtatggttatcttctggagcacaatcatggtataccttacctttgcgaccgtcttcatctccgttagggccgttcaaagccagatcgcgaaaggatttagtatatccgccatcttccagaacgaggtcttcttctccctggtcgtctctctgctctcaacatacggagtctggcttattgcgtcgcttctcatgtttgatccgtggcatatgcttacgtcgtttgtgcaatacatcatcctcacgccgacatacgtcaatgtgttgaatgtctacgcgttttgcaacacgcatgatatttcgtggggaacgaagggtgatgataaagcggaggaactgccaaaggtcgataccaaggatggcaagggtaagaccgacttgccggacgaaggagatctgaatgcgcagtatgaaaaggaactcgcggtcttcagacagaaacaggtcgtggtcaagaaggcaaagagcgaggcgcaacttgcggaggaccagatggattattatcggtggattcgttcactcgtcgtgttgatctggatcattacgaatttcggactcgttgctttggttttgagtactgcgggtgtggaagatttgtcgagcagccagacggaacaggataatacggagcgcacgacgttgtatactacgattattctgtggagtgttgtgggactgagtgcttttaagtttattggtgcgctttggtttttggtcgttagattgtttaggggtgtataa

SEQ ID NO: 24347 - protein, 901 aa, Muscodor strobelii
  misc_feature: SGI Peptide ID NO. 568300
  misc_feature (238)..(400): Pfam Id: PF01644 Pfam Desc: Chitin synthase
  misc_feature (160)..(237): Pfam Id: PF08407 Pfam Desc: Chitin synthase N-terminal
  misc_feature (208)..(686): Pfam Id: PF03142 Pfam Desc: Chitin synthase
  misc_feature (9)..(901): NCBI GI: 19068022 Blast Desc: chitin synthase A [Glomerella graminicola]
  misc_feature (5)..(901): NCBI GI: 85101947 Blast Desc: chitin synthase 2 [Neurospora crassa OR74A] gi|51854826|sp|P30588.2|CHS3_NEUCR RecName: Full=Chitin synthase 3; AltName: Full=Chitin-UDP acetyl-glucosaminyl transferase 3 3 2
  misc_feature (5)..(901): NCBI GI: 6002698 Blast Desc: AF127086_1 chitin synthase 3 [Neurospora crassa]
  misc_feature (3)..(901): NCBI GI: 145602658 Blast Desc: MGG_09551 [Magnaporthe grisea 70-15] gi|145011054|gb|EDJ95710.1| MGG_09551 [Magnaporthe grisea 70-15]
  misc_feature (7)..(901): NCBI GI: 262069066 Blast Desc: chitin synthase 1 [Gibberella moniliformis]
  misc_feature (7)..(901): NCBI GI: 50429183 Blast Desc: chitin synthase class I [Fusarium oxysporum f. sp. lycopersici]
  misc_feature (7)..(901): NCBI GI: 171694283 Blast Desc: protein product [Podospora anserina] gi|170947090|emb|CAP73895.1| protein product [Podospora anserina]
  misc_feature (18)..(901): NCBI GI: 261353576 Blast Desc: chitin synthase [Verticillium albo-atrum VaMs.102]
  misc_feature (15)..(901): NCBI GI: 46137623 Blast Desc: FG10327.1 [Gibberella zeae PH-1]
  misc_feature (8)..(901): NCBI GI: 256731854 Blast Desc: glycosyltransferase family 2 [Nectria haematococca mpVI 77-13-4]
  misc_feature (5)..(901): SWISSPROT Homolog: EC 2.4.1.16 Chitin synthase
MDNGRIHPQRAHSPGHPLQGGYQLDDVPYNSYGAHPAQASHSHLDMPHTGDPGRYTPSDNLPLNAAHSTESFGHSPYGHQQGYNSEYSVNPEAHHDSYYNQPYEPHTATTPLNDHQGAFDHDEYDQRPMLQQNDPYAQGQAQEPYRDEPQPQQQNNVPLKRWKTVKQVLLYNGNLVLDCPVPPRLLDQLPHGERDEFTHMRYSAATCDPNNFYDERFTLRQKLFSKPRHTELFIVVTMYNEDDILFARTMIGVLKNVEYMCSRKESKTWGPDAWKKIVVCVVSDGRAKINPRTRALLAGMGVYQEGIAKQQVNGKDVTAHIYEYTTQVGMQIKNNVVQLIPKKQPVQMLFCLKEKNQKKINSHRWFFSAFGRVLNPNICVLIDAGTRPGGNSIYHLWKAFDLEPSCAGACGEIKAMLGTGGKYLLNPVVAAQNFEYKMSNILDKPLESAFGFISVLPGAFSAYRYIALQNDKNGQGPLEKYFKGETLHGAGAGVFTANMYLAEDRILCFELVTKRNCHWVLSYVKSATGETDVPDTITEFILQRRRWLNGSFFASIYAIAHFYEFFRSDHSFIRKLAFFIEFVFQTVSQIFAWFAIGNFFLIFKILTNSLGDKTLLGNVGTILGVVFEWFYGVTLVACFVLSLGNRPAGSGKLYTGMVIFWSTIMVYLTFATVFISVRAVQSQIAKGFSISAIFQNEVFFSLVVSLLSTYGVWLIASLLMFDPWHMLTSFVQYIILTPTYVNVLNVYAFCNTHDISWGTKGDDKAEELPKVDTKDGKGKTDLPDEGDLNAQYEKELAVFRQKQVVVKKAKSEAQLAEDQMDYYRWIRSLVVLIWIITNFGLVALVLSTAGVEDLSSSQTEQDNTERTTLYTTIILWSVVGLSAFKFIGALWFLVVRLFRGV

SEQ ID NO: 24348 - DNA, 3332 bp, Muscodor strobelii
  misc_feature: SGI EST ID NO. CUFF.57630.0
  misc_feature: Variant of the nucleotide sequence at SEQ ID NO 24346
ttgcgcctcggctgcgtgtgtcgtcattgtctccaacgctctctctcgtgtctttttgccggcttctcaactcagcccctctctccattgtatctatctttacattgccactagtgcccgatcgtgtgtaagaggtagtcgggtcttacaggcagcttggaagccttgtgtatcctagggacatacaagtcaagaagcttagcaacacttgcgcatacacatatgaactttgatatcctttccgagcttacgcctctctaaacctactatacaccggctacagaacacgagcaccttattcgttccacccatctaactcttctgcgcacacttagacgacgattattacgatcccacgatggataatgggcggatacacccgcagagggcccattctccgggacatcctctgcagggcggatatcagttggacgacgttccttacaacagctacggcgcacacccagcacaagccagtcatagccatctcgacatgcctcacactggcgaccccggcagatacaccccgagtgacaacctaccactcaacgctgctcattccacagaaagctttggacacagtccttatggccaccagcagggctataattcggagtattctgtaaacccagaggcacatcacgattcttattacaaccaaccatatgagccccatactgctacaacccccctgaacgaccatcagggagccttcgaccacgatgaatatgatcagagaccaatgttgcagcaaaatgatccatacgcccaaggccaagcacaggaaccataccgcgacgagccacaaccccagcagcagaacaatgttcccctaaagaggtggaagacggtgaagcaggttctgctatacaatggtaacttggttctcgattgccctgtgccaccacgtctcctagatcagctcccgcacggcgagcgcgacgaattcacccacatgcgttattccgcggcgacgtgcgatcctaataacttctacgacgaacggtttactctgcgccagaaactcttcagcaaaccacgacacaccgagctctttatcgtcgtcactatgtacaacgaagatgacattctattcgccagaactatgatcggtgtgctgaagaacgttgagtacatgtgtagtcgaaaagagagcaaaacctggggccccgatgcgtggaagaagatagtcgtctgtgtcgtaagcgacggccgtgctaaaatcaatccacgaacgagggcgctcctagcgggtatgggtgtatatcaggagggcattgcgaaacaacaggttaatggcaaagacgtcactgctcatatctacgaatatactacccaggtcggcatgcagatcaagaataacgtggtacagcttattccgaagaaacagcccgttcagatgttgttctgcttgaaggaaaagaatcagaagaagatcaattcacacaggtggttcttctcggctttcggccgtgttctcaaccccaacatctgcgttcttatcgatgccggtaccagacctggcggtaactccatctaccacctctggaaggcattcgacctggaacctagctgtgctggtgcttgcggcgagatcaaggctatgttgggcacgggcggtaaatacctcctgaacccggtggtggcggcccagaacttcgagtataagatgagcaacattctcgacaaacccctggagtccgcatttggcttcatttccgtcttgcctggtgccttttcagcatatcgatacatcgctttgcagaacgacaagaacggccaaggtccgctcgagaagtacttcaagggtgagacgcttcatggcgcaggtgctggtgttttcactgcgaacatgtatcttgccgaggacagaatcctctgtttcgaactagtcaccaagcgcaactgtcattgggtcttgtcttatgtcaagtcggcaacgggcgagacagatgtccctgacaccatcaccgagttcatcctgcagcgtcgtcgttggttgaacggttcattcttcgcctcgatctacgccattgcccacttctacgaattcttccggtctgatcactctttcattcgcaagctggccttcttcattgaattcgtgttccagactgttagccagatctttgcttggttcgccattggtaacttcttcctgatttttaagattctgacgaatagtcttggcgataagacacttctgggtaatgtgggcactattctcggtgtcgtatttgagtggttctatggtgtcactctcgtcgcttgcttcgtcttatcgcttggtaatcgccctgctggttccggaaaactgtacactggtatggttatcttctggagcacaatcatggtataccttacctttgcgaccgtcttcatctccgttagggccgttcaaagccagatcgcgaaaggatttagtatatccgccatcttccagaacgaggtcttcttctccctggtcgtctctctgctctcaacatacggagtctggcttattgcgtcgcttctcatgtttgatccgtggcatatgcttacgtcgtttgtgcaatacatcatcctcacgccgacatacgtcaatgtgttgaatgtctacgcgttttgcaacacgcatgatatttcgtggggaacgaagggtgatgataaagcggaggaactgccaaaggtcgataccaaggatggcaagggtaagaccgacttgccggacgaaggagatctgaatgcgcagtatgaaaaggaactcgcggtcttcagacagaaacaggtcgtggtcaagaaggcaaagagcgaggcgcaacttgcggaggaccagatggattattatcggtggattcgttcactcgtcgtgttgatctggatcattacgaatttcggactcgttgctttggttttgagtactgcgggtgtggaagatttgtcgagcagccagacggaacaggataatacggagcgcacgacgttgtatactacgattattctgtggagtgttgtgggactgagtgcttttaagtttattggtgcgctttggtttttggtcgttagattgtttaggggtgtataaggagtgggagagatgagtttatgtggtgtttttatgagtttgcttttggtagaggactgtgtccctaccttgttcggttggttcttattggctttgagatgaactggctatgagaactggctataataccccctgatgagctgtagtggaatgaaagataggattatgaagtgtacctcagatttgtggatcagttgcttgattaggagacgattgtatgaaagagagagggtataatgattggaaaattgtcacgattgaacttcat

SEQ ID NO: 24349 - DNA, 801 bp, Muscodor strobelii
  misc_feature: SGI cDNA ID NO. 568301
  misc_feature: Reduced expression when VOC is produced
  misc_feature: Encodes the peptide sequence at SEQ ID NO 24350
atgctgcagtatatatctcaccagcatgacactcaccacatccggacgaggcaaaactctatcgacgccgtcgcagcagcgatgagcgatggcaaagctcaccttctcctcgcctgctcaggcagtgtagctaccatcaaactacccaatatgatccaagctttgtccaaatacccatcagaccgtctctccatcagagttgtcttgacgccctctgcttcgaggttcttagcaggtcaatcccctgagcaacctaccgtgtctgcacttagtgatatgccgaatgttaatgcttatgtcgacgccgatgaatggaaaaccccctgggttagaggagctagtatcctgcacattgagctgcgaagatgggcagatgtgctggttatcgcacccctgagtgcaaacactatggcgaagatcgttggtggattctccgatagtcttttgacgagtgttgttcgcgcttgggatccctggggtgaattagatgcaggtgcggtgaacaaacgagctaagaagcgtcgcatcatcgttgcgccagccatgaacacagcgatgtggcgccaccccgtgacaggcaaacagctccgtgtactggaggaagaatggggtgtccagaaatctcaagacggaacagatggcgaatcccattctcaatcaacaagcgatgagggcgatggctggtttgaagtccttcgacctcagagtaaggctcttgcatgtggtgatgttggaagtggtgccatgatcgagtggacggaggtcgttgctgttattgaggagagacttggcttggaatag

SEQ ID NO: 24350 - protein, 266 aa, Muscodor strobelii
  misc_feature: SGI Peptide ID NO. 568301
  misc_feature (33)..(181): Pfam Id: PF02441 Pfam Desc: Flavoprotein
  misc_feature (33)..(158): Pfam Id: PF02441 Pfam Desc: Flavoprotein
  misc_feature (1)..(266): NCBI GI: 154288924 Blast Desc: BC1G_16316 [Botryotinia fuckeliana B05.10] gi|154300926|ref|XP_001550877.1| BC1G_10601 [Botryotinia fuckeliana B05.10] gi|150852546|gb|EDN27738.1| BC1G_16316 B05.10]
  misc_feature (1)..(259): NCBI GI: 156043087 Blast Desc: SS1G_10546 [Sclerotinia sclerotiorum 1980] gi|154694934|gb|EDN94672.1| SS1G_10546 [Sclerotinia sclerotiorum 1980]
  misc_feature (16)..(265): NCBI GI: 169771851 Blast Desc: [Aspergillus oryzae RIB40] gi|83768254|dbj|BAE58393.1| protein product [Aspergillus oryzae]
  misc_feature (19)..(265): NCBI GI: 242781356 Blast Desc: flavoprotein, [Talaromyces stipitatus ATCC 10500] gi|218719931|gb|EED19350.1| flavoprotein, [Talaromyces stipitatus ATCC 10500]
  misc_feature (22)..(265): NCBI GI: 255938951 Blast Desc: Pc15g00170 [Penicillium chrysogenum Wisconsin 54-1255] gi|211584867|emb|CAP82903.1| Pc15g00170 [Penicillium chrysogenum Wisconsin 54-1255]
  misc_feature (16)..(265): NCBI GI: 238485546 Blast Desc: flavoprotein, [Aspergillus flavus NRRL3357] gi|220698890|gb|EED55229.1| flavoprotein, [Aspergillus flavus NRRL3357]
  misc_feature (18)..(265): NCBI GI: 212526610 Blast Desc: flavoprotein, [Penicillium marneffei ATCC 18224] gi|210072860|gb|EEA26947.1| flavoprotein, [Penicillium marneffei ATCC 18224]
  misc_feature (19)..(265): NCBI GI: 145602648 Blast Desc: MGG_09544 [Magnaporthe grisea 70-15] gi|145011047|gb|EDJ95703.1| MGG_09544 [Magnaporthe grisea 70-15]
  misc_feature (18)..(263): NCBI GI: 256729548 Blast Desc: NECHADRAFT_47384 [Nectria haematococca mpVI 77-13-4]
  misc_feature (10)..(265): NCBI GI: 115386150 Blast Desc: phosphopantothenoylcysteine decarboxylase [Aspergillus terreus NIH2624] gi|114190614|gb|EAU32314.1| phosphopantothenoylcysteine decarboxylase [Aspergillus terreus
  misc_feature (28)..(266): SWISSPROT Homolog: EC 2.1.1.45 Thymidylate synthase
  misc_feature: Useful for introducing or modulating the production of volatile compounds
MLQYISHQHDTHHIRTRQNSIDAVAAAMSDGKAHLLLACSGSVATIKLPNMIQALSKYPSDRLSIRVVLTPSASRFLAGQSPEQPTVSALSDMPNVNAYVDADEWKTPWVRGASILHIELRRWADVLVIAPLSANTMAKIVGGFSDSLLTSVVRAWDPWGELDAGAVNKRAKKRRIIVAPAMNTAMWRHPVTGKQLRVLEEEWGVQKSQDGTDGESHSQSTSDEGDGWFEVLRPQSKALACGDVGSGAMIEWTEVVAVIEERLGLE

SEQ ID NO: 24351 - DNA, 1500 bp, Muscodor strobelii
  misc_feature: SGI EST ID NO. CUFF.57828.1
  misc_feature: Variant of the nucleotide sequence at SEQ ID NO 24349
cacaaacacaaactctcaattctcgtataagagctcctcttggcccgcacggctcaaacaagacaactccaacttccccaatctcgaagaaaacaaaacaaagcaacaacaattgcacaaactaacatcacagagtcaccgtcacaatgctgcagtatatatctcaccagcatgacactcaccacatccggacgaggcaaaactctatcgacgccgtcgcagcagcgatgagcgatggcaaagctcaccttctcctcgcctgctcaggcagtgtagctaccatcaaactacccaatatgatccaagctttgtccaaatacccatcagaccgtctctccatcagagttgtcttgacgccctctgcttcgaggttcttagcaggtcaatcccctgagcaacctaccgtgtctgcacttagtgatatgccgaatgttaatgctgtgggtgagcatgtcctcactgtttgactttgattgttcgtcttgcttcagcgtgctgatgcttggtagtacgtgatactcgcctcgtgacttgcactgtaaagccacgacagccatacgatcgttatgaatgaattatatgcttatgcgtaaaagtatgtcgacgccgatgaatggaaaaccccctgggttagaggagctagtatcctgcacattgagctgcgaagatgggcagatgtgctggttatcgcacccctgagtgcaaacactatggcgaagatcgttggtggattctccgatagtcttttgacgagtgttgttcgcgcttgggatccctggggtgaattagatgcaggtgcggtgaacaaacgagctaagaagcgtcgcatcatcgttgcgccagccatgaacacagcgatgtggcgccaccccgtgacaggcaaacagctccgtgtactggaggaagaatggggtgtccagaaatctcaagacggaacagatggcgaatcccattctcaatcaacaagcgatgagggcgatggctggtttgaagtccttcgacctcagagtaaggctcttgcatgtggtgatgttggaagtggtgccatgatcgagtggacggaggtcgttgctgttattgaggagagacttggcttggaataggtatgctctgcacttccactaatggatgttcatattggtggtttggcttgcttgactctgttatggccatcttcgaactcaaggacaaacacgtctatcgcttcttgtaactctaacatgggacacgaaaaaggcatacgaggtgtatgttaagctggaatatactaataacccgtcactaactcctgttgataaaacttgtcgcctggtaaaaaaaaatggctatagatatcgcgtggaactctgatttgctgtggactatctaatctaagatatagtctgctgtggagagtcattgaactgattaactatatattgctgcgagtacaatctgctccagcacaagtcttcatcaacaatcgatcacacatcgacgcccagtattgatacaatttac

SEQ ID NO: 24352 - DNA, 489 bp, Muscodor strobelii
  misc_feature: SGI cDNA ID NO. 568302
  misc_feature: Reduced expression when VOC is produced
  misc_feature: Encodes the peptide sequence at SEQ ID NO 24353
atgctctctagacctctatttgcagcgagcctgcgacaagcagggcgccccgtcgccagacaggccttccgaccggctcctttcctcacagctttccagcaacgtctgctatccgaccacacaaagcaagccatcgagaaggccgttggctctgcaccagttgttctattcatgaagggaaccccggagacgccacaatgcggattttcccgggccaccatccaaatcctcggcctgcagggcgtcgacccggcaaagttcgcggctttcaacgtacttgaagacgcggagctccgagcaggcatcaaggagttctccgactggcctaccatcccgcagctctatctcgagaaggaatttgtcggcggctgcgatatcctcgtctccatgcaccaggacggatcactcgccaaaatgctcgaggaaaagggcgtactggcaccggctgatggtgctcctcccgctggcgatgccccccctgccgcttga

SEQ ID NO: 24353 - protein, 162 aa, Muscodor strobelii
  misc_feature: SGI Peptide ID NO. 568302
  misc_feature (54)..(121): Pfam Id: PF00462 Pfam Desc: Glutaredoxin
  misc_feature (1)..(150): NCBI GI: 85099869 Blast Desc: monothiol glutaredoxin-5, mitochondrial precursor [Neurospora crassa OR74A] gi|28922389|gb|EAA31624.1| monothiol glutaredoxin-5, mitochondrial precursor [Neurospora crassa OR74A]
  misc_feature (1)..(151): NCBI GI: 169603862 Blast Desc: SNOG_04939 [Phaeosphaeria nodorum SN15] gi|111066210|gb|EAT87330.1| SNOG_04939 [Phaeosphaeria nodorum SN15]
  misc_feature (1)..(151): NCBI GI: 226281506 Blast Desc: monothiol glutaredoxin-5 [Paracoccidioides brasiliensis Pb01]
  misc_feature (26)..(154): NCBI GI: 189196320 Blast Desc: monothiol glutaredoxin-5, mitochondrial precursor [Pyrenophora tritici-repentis Pt-1C-BFP] gi|187980377|gb|EDU47003.1| monothiol glutaredoxin-5, precursor
  misc_feature (16)..(151): NCBI GI: 225678850 Blast Desc: monothiol glutaredoxin-5 [Paracoccidioides brasiliensis Pb03]
  misc_feature (16)..(151): NCBI GI: 226293684 Blast Desc: monothiol glutaredoxin-5 [Paracoccidioides brasiliensis Pb18]
  misc_feature (1)..(150): NCBI GI: 240275949 Blast Desc: monothiol glutaredoxin-5 [Ajellomyces capsulatus H143]
  misc_feature (28)..(147): NCBI GI: 171693909 Blast Desc: protein product [Podospora anserina] gi|170946903|emb|CAP73707.1| protein product [Podospora anserina]
  misc_feature (1)..(146): NCBI GI: 256729365 Blast Desc: [Nectria haematococca mpVI 77-13-4]
  misc_feature (1)..(150): NCBI GI: 225563356 Blast Desc: monothiol glutaredoxin-5 [Ajellomyces capsulatus G186AR]
  misc_feature: Useful for introducing or modulating the production of volatile compounds
MLSRPLFAASLRQAGRPVARQAFRPAPFLTAFQQRLLSDHTKQAIEKAVGSAPVVLFMKGTPETPQCGFSRATIQILGLQGVDPAKFAAFNVLEDAELRAGIKEFSDWPTIPQLYLEKEFVGGCDILVSMHQDGSLAKMLEEKGVLAPADGAPPAGDAPPAA

SEQ ID NO: 24354 - DNA, 996 bp, Muscodor strobelii
  misc_feature: SGI EST ID NO. CUFF.57900.1
  misc_feature: Variant of the nucleotide sequence at SEQ ID NO 24352
atgaccgtggtccgatatcgattttctgattagcaattgtcaacaatccattccacaccacgccacaatgctctctagacctctatttgcagcggtaagttctcttgatgtgcctccatgctcatacatcacgaaccgacattaatccgtcatctacagagcctgcgacaagcagggcgccccgtcgccagacaggccttccgaccggctcctttcctcacagctttccagcaacgtctgctatccgaccacacaaagcaagccatcgagaaggccgttggctctgcaccagttgttctattcatgaagggaaccccggagacgccacaatgcggattttcccgggccaccatccaaatcctcggcctgcagggcgtcgacccggcaaagttcgcggctttcaacgtacttgaagacgcggagctccgagcaggcatcaaggagttctccgactggcctaccatcccgcagctctatctcgagaaggaatttgtcggcggctgcgatatcctcgtctccatgcaccaggacggatcactcgccaaaatgctcgaggaaaagggcgtactggcaccggctgatggtgctcctcccgctggcgatgccccccctgccgcttgagatggacaattcggaacgaagcgcaagcaatggcctgtacgatacacaatagaatacacttgtataaataggaaatgcctaacgacatagcataacggtgttttcgaatttgactcaacatcaagacataacagcccagcatgacgagctagatccttacaaattagacatggtagtgaaagttatgcggacatgatctgcaaatgatcatgcaacattgttaatattacacggagccacaacggcaagagaccaggtcctcaatctccttttgctctgcatacgcattgattagtaaatgaaagcgaagtgctcaaggacattagagatatagagatggaattgcagcgttgcgcttttgcctatgtgcagttc

SEQ ID NO: 24355 - DNA, 1851 bp, Muscodor strobelii
  misc_feature: SGI cDNA ID NO. 568303
  misc_feature: Reduced expression when VOC is produced
  misc_feature: Encodes the peptide sequence at SEQ ID NO 24356
atgcccctcacgacaccttccgtattcccgccggcgtcaaacgctttccagaagtttgcaagccggcgcagcgttgtccacagtacgaagggtattgttgcgtgtactcaaccattggcggcgaaatgtggtattcaaatactcgatgctggaggaaactgtgttgatgcagccgtcgccgttgccgctggtctcaacatgaccgagccttgctcaacaggcataggcggtgacatgttctgtctattctacgatgctaaaacgaagaagatatcagcactcaatgggtccgggcggtcaggtgccaagtacaccttagacagaataagagaatctctcaagattccagacggagaaacaggcaagatacctatggacagcgtgcatgctgtctcagtgcctggcgcaccagcaggatggtgtgattcagtttcacggtttggaagtggcaaaatgaatatggagcagatcctggctccagctatcgaccttggtgaaaaggggtttcctgtctctgagggtgttgcgtttttttgggatcgctccgaaccgcaaattcgtcgcgcatctccaaatgggagcgagatgctaaaggtcgatccgtcagcgcaagatggtgtgcgagctccgcgcgctggggaggtcatgaagaatccaaacttggcccggacgttccgtgctcttgcaacagaagggaaaccaggcttttacaaaggccgcatcgcggaggaactcgtcaaagttgtgcaagatcttggcggacatctcgaacttgacgatcttgcacaccacctggaagtggggactgagcccgtggatgccatctccgtcaaatttaggggtcagaatgtaggacagaaacttaacgagcatatcaccggagaaagcgaagacaaagatctcggcctcgaagtctgggaacatccacctaacggtcaaggtatcgtggcactaatggcactcggcattctcgaggctctcgaaaaggaggggctgatcccaacctggggtccagaagacttcaacacggctccttacctccacgccatcatcgagtcactgcgtatcggcttcgcagacgcaagttggtacgtgaccgatccaaacgttgtgcgtgtccccgttgccgagctactctcccctgagtatctcacttcgcgcgccaagtccctattttctccgtctcgcgcaggcggcatgcccgaacatggatttccatctccagctcaccaagccagcgacacggtctacttcgcagtatcagatagtgagggaaacgccgtctcgttcatcaatagtaattatgggggcttcggtacctgcatcatacccaagggttgtggcttcacgctgcagaaccgcgctgcgaatttcagcttggatccgaccggtaaacatcctaatgtcatggcgccgaggaagagaccgtatcacactatcattccggctgctgcaacaaacttgcatgatgggagtctacactctgttttcggtgttatggggggcttcatgcagccgcagggtcatgtgcaggttcttcttgggcagattgtgggtgggttgaatccgcagcaggcgcttgacgcaccaagagtgtgtattggagcgggtatgccggagggcggaaaggtgatcgatacaaaggtctttgttgaggagggtatgccggaggatactatcgaagggttgaagaagctgggacacgacgtgcagattgtcacagatatggggagggcgcagtttgggagagggcagatcattagatggacgctggatccgattgagaaggactttggggtttggtctgctggcagtgatcccaggggcgacggtgcagcttatcctcagtga

SEQ ID NO: 24356 - protein, 616 aa, Muscodor strobelii
  misc_feature: SGI Peptide ID NO. 568303
  misc_feature (45)..(611): Pfam Id: PF01019 Pfam Desc: Gamma-glutamyltranspeptidase
  misc_feature (1)..(615): NCBI GI: 85102187 Blast Desc: NCU04130 [Neurospora crassa OR74A] gi|16944421|emb|CAC28776.2| related to lincomycin-condensing protein lmbA [Neurospora crassa] gi|28922829|gb|EAA32050.1|
  misc_feature (1)..(615): NCBI GI: 171693907 Blast Desc: protein product [Podospora anserina] gi|170946902|emb|CAP73706.1| protein product [Podospora anserina]
  misc_feature (1)..(616): NCBI GI: 256729550 Blast Desc: [Nectria haematococca mpVI 77-13-4]
  misc_feature (1)..(615): NCBI GI: 145602646 Blast Desc: MGG_09541 [Magnaporthe grisea 70-15] gi|145011044|gb|EDJ95700.1| MGG_09541 [Magnaporthe grisea 70-15]
  misc_feature (1)..(615): NCBI GI: 261353573 Blast Desc: gamma-glutamyltranspeptidase [Verticillium albo-atrum VaMs.102]
  misc_feature (7)..(616): NCBI GI: 46117444 Blast Desc: FG04564.1 [Gibberella zeae PH-1]
  misc_feature (7)..(615): NCBI GI: 189191192 Blast Desc: acylase ACY 1 [Pyrenophora tritici-repentis Pt-1C-BFP] gi|187973541|gb|EDU41040.1| acylase ACY 1 [Pyrenophora tritici-repentis Pt-1C-BFP]
  misc_feature (1)..(615): NCBI GI: 115389828 Blast Desc: conserved [Aspergillus terreus NIH2624] gi|114194815|gb|EAU36515.1| conserved [Aspergillus terreus NIH2624]
  misc_feature (1)..(615): NCBI GI: 145230101 Blast Desc: An01g09390 [Aspergillus niger] gi|134055474|emb|CAK43989.1| protein product [Aspergillus niger]
  misc_feature (1)..(615): NCBI GI: 239606695 Blast Desc: gamma-glutamyltranspeptidase [Ajellomyces dermatitidis ER-3]
  misc_feature (23)..(613): SWISSPROT Homolog: EC 2.3.2.2 Gamma-glutamyltransferase
  misc_feature: Useful for introducing or modulating the production of volatile compounds
MPLTTPSVFPPASNAFQKFASRRSVVHSTKGIVACTQPLAAKCGIQILDAGGNCVDAAVAVAAGLNMTEPCSTGIGGDMFCLFYDAKTKKISALNGSGRSGAKYTLDRIRESLKIPDGETGKIPMDSVHAVSVPGAPAGWCDSVSRFGSGKMNMEQILAPAIDLGEKGFPVSEGVAFFWDRSEPQIRRASPNGSEMLKVDPSAQDGVRAPRAGEVMKNPNLARTFRALATEGKPGFYKGRIAEELVKVVQDLGGHLELDDLAHHLEVGTEPVDAISVKFRGQNVGQKLNEHITGESEDKDLGLEVWEHPPNGQGIVALMALGILEALEKEGLIPTWGPEDFNTAPYLHAIIESLRIGFADASWYVTDPNVVRVPVAELLSPEYLTSRAKSLFSPSRAGGMPEHGFPSPAHQASDTVYFAVSDSEGNAVSFINSNYGGFGTCIIPKGCGFTLQNRAANFSLDPTGKHPNVMAPRKRPYHTIIPAAATNLHDGSLHSVFGVMGGFMQPQGHVQVLLGQIVGGLNPQQALDAPRVCIGAGMPEGGKVIDTKVFVEEGMPEDTIEGLKKLGHDVQIVTDMGRAQFGRGQIIRWTLDPIEKDFGVWSAGSDPRGDGAAYPQ

SEQ ID NO: 24357 - DNA, 2319 bp, Muscodor strobelii
  misc_feature: SGI EST ID NO. CUFF.58036.1
  misc_feature: Variant of the nucleotide sequence at SEQ ID NO 24355
gttttcattactttacttaattcttgacgttcggtactagatctgtaagttaagttcatacttactttaatcgacaactcagagctgaaccagagtcaacatagccttgtgtagcgttctgacatcactgctgaccgcgacttatacctcggatctatcatcatgcccctcacgacaccttccgtattcccgccggcgtcaaacgctttccagaagtttgcaagccggcgcagcgttgtccacagtacgaagggtattgttgcgtgtactcaaccattggcggcgaaatgtggtattcaaatactcgatgctggaggaaactgtgttgatgcagccgtcgccgttgccgctggtctcaacatgaccgagccttgctcaacaggcataggcggtgacatgttctgtctattctacgatgctaaaacgaagaagatatcagcactcaatgggtccgggcggtcaggtgccaagtacaccttagacagaataagagaatctctcaagattccagacggagaaacaggcaagatacctatggacagcgtgcatgctgtctcagtgcctggcgcaccagcaggatggtgtgattcagtttcacggtttggaagtggcaaaatgaatatggagcagatcctggctccagctatcgaccttggtgaaaaggggtttcctgtctctgagggtgttgcgtttttttgggatcgctccgaaccgcaaattcgtcgcgcatctccaaatgggagcgagatgctaaaggtcgatccgtcagcgcaagatggtgtgcgagctccgcgcgctggggaggtcatgaagaatccaaacttggcccggacgttccgtgctcttgcaacagaagggaaaccaggcttttacaaaggccgcatcgcggaggaactcgtcaaagttgtgcaagatcttggcggacatctcgaacttgacgatcttgcacaccacctggaagtggggactgagcccgtggatgccatctccgtcaaatttaggggtcagaatgtaggacagaaacttaacgagcatatcaccggagaaagcgaagacaaagatctcggcctcgaagtctgggaacatccacctaacggtcaaggtatcgtggcactaatggcactcggcattctcgaggctctcgaaaaggaggggctgatcccaacctggggtccagaagacttcaacacggctccttacctccacgccatcatcgagtcactgcgtatcggcttcgcagacgcaagttggtacgtgaccgatccaaacgttgtgcgtgtccccgttgccgagctactctcccctgagtatctcacttcgcgcgccaagtccctattttctccgtctcgcgcaggcggcatgcccgaacatggatttccatctccagctcaccaagccagcgacacggtctacttcgcagtatcagatagtgagggaaacgccgtctcgttcatcaatagtaattatgggggcttcggtacctgcatcatacccaagggttgtggcttcacgctgcagaaccgcgctgcgaatttcagcttggatccgaccggtaaacatcctaatgtcatggcgccgaggaagagaccgtatcacactatcattccggctgctgcaacaaacttgcatgatgggagtctacactctgttttcggtgttatggggggcttcatgcagccgcagggtcatgtgcaggttcttcttgggcagattgtgggtgggttgaatccgcagcaggcgcttgacgcaccaagagtgtgtattggagcgggtatgccggagggcggaaaggtgatcgatacaaaggtctttgttgaggagggtatgccggaggatactatcgaagggttgaagaagctgggacacgacgtgcagattgtcacagatatggggagggcgcagtttgggagagggcagatcattagatggacgctggatccgattgagaaggactttggggtttggtctgctggcagtgatcccaggggcgacggtgcagcttatcctcagtgagaagctcgaaaatagaagacctacaggaggggtctatcgctagattggtgtagctaccgaatagacaagcaagtgccagcagccaatcgcgacgcgacggtactccacgcgattgctgtatatagggatcgataatggtcagcccctcgacgttcccagatgggcgggtgaccaccgaggccaccaccaattctggtcaagttagtcaggttgaaacgcagtcagactacgtttcaggtaaagtctgagtgcagagaacaccggttcgaaccgaggcattacccttttgcaattttttacccagca

SEQ ID NO: 24358 - DNA, 1209 bp, Muscodor strobelii
  misc_feature: SGI cDNA ID NO. 568304
  misc_feature: Encodes the peptide sequence at SEQ ID NO 24359
atggacatccgcgacgcgggcacggatcccctggaccaaatcccagctttgaaccctccgcctggtgtagagtcgaacttcgacaatccgtattcgcgagcacagatcggaaagatttttcttggaatcacctacggattaatggtcatatttctggccctacggatttatactcgcctttggatcgcaggaaatcggaaacttgggacggatgattatctctcacttgttgcaggagccagtatcacggcatatacagctctctcttattccttatttggtgacccgattggtccacaccaatggaacgtccgtctaagccacttcagtgatagttttctcgagcgaaccttggcttctttagtcctctttagcgtcagctcgctcttcgtcaagcttgcactactagtgttatatctccgtgtttttgctccggatatcaggacacgatggatgatatggggcgggatcgcgacagtaactttgttctatgttatcgcgattatcgtcaacataagattttgtcttccgatctcgatgacaacgcctgtgcctgatccagacgagtgggaaaagaagctggcggcgagcacttgtacacagcccgtatacaatctgaacgctgctataggcgtattcggcgtcctctctgatttatacattcttctcatcccgattagtatggttatcaaacttcagatacctaaaagccgaaagtatggtatattaggtatcttcttaacaggcttgctggcgactgcactttcgataacaagcttggtctatcggtttgcgcagctgcactcgtacgatttcacctgggattcagtgcctagctatactctccgtgctgctgaggtcaatatcggactaatctgcagctgccttccaattgtatttgttgtctttaagagagccatgcgcgcattaccatgggcctcaacaaggaaaagcacagcaactccggattctcgaactcctagtcatctagtctactcggacgacgtgggaaggagcaacgaggcactcgacccaaccaaagctttagtaaagcctcttggtcctgctgcgttcatcaacctgggtacttttggtaatcaaaacggctcgcccacgcccagtagacacgagagatctacgtatgccgaagtcgcctctattgcctcgacggaatctgactatggaaacagaaggatgggagctggatga

SEQ ID NO: 24359 - protein, 402 aa, Muscodor strobelii
  misc_feature: SGI Peptide ID NO. 568304
  misc_feature (11)..(304): NCBI GI: 145252774 Blast Desc: An16g05920 [Aspergillus niger] gi|134083454|emb|CAK46932.1| protein product [Aspergillus niger]
  misc_feature (1)..(308): NCBI GI: 70990186 Blast Desc: plasma membrane protein Pth11-like [Aspergillus fumigatus Af293] gi|66847574|gb|EAL87904.1| plasma membrane protein Pth11-like, [Aspergillus fumigatus Af293]
  misc_feature (1)..(308): NCBI GI: 159130422 Blast Desc: plasma membrane protein Pth11-like, [Aspergillus fumigatus A1163]
  misc_feature (14)..(326): NCBI GI: 242818275 Blast Desc: conserved [Talaromyces stipitatus ATCC 10500] gi|218713549|gb|EED12973.1| conserved [Talaromyces stipitatus ATCC 10500]
  misc_feature (15)..(297): NCBI GI: 169777825 Blast Desc: [Aspergillus oryzae RIB40] gi|83772115|dbj|BAE62245.1| protein product [Aspergillus oryzae]
  misc_feature (15)..(329): NCBI GI: 145229771 Blast Desc: An01g07700 [Aspergillus niger] gi|134055305|emb|CAK43867.1| protein product [Aspergillus niger]
  misc_feature (19)..(328): NCBI GI: 242761452 Blast Desc: conserved [Talaromyces stipitatus ATCC 10500] gi|218723378|gb|EED22795.1| conserved [Talaromyces stipitatus ATCC 10500]
  misc_feature (11)..(398): NCBI GI: 145242916 Blast Desc: An11g00060 [Aspergillus niger] gi|134078677|emb|CAK48239.1| protein product [Aspergillus niger]
  misc_feature (1)..(318): NCBI GI: 171678517 Blast Desc: protein product [Podospora anserina] gi|170937328|emb|CAP61986.1| protein product [Podospora anserina]
  misc_feature (16)..(311): NCBI GI: 156057637 Blast Desc: SS1G_04550 [Sclerotinia sclerotiorum 1980] gi|154702335|gb|EDO02074.1| SS1G_04550 [Sclerotinia sclerotiorum 1980]
MDIRDAGTDPLDQIPALNPPPGVESNFDNPYSRAQIGKIFLGITYGLMVIFLALRIYTRLWIAGNRKLGTDDYLSLVAGASITAYTALSYSLFGDPIGPHQWNVRLSHFSDSFLERTLASLVLFSVSSLFVKLALLVLYLRVFAPDIRTRWMIWGGIATVTLFYVIAIIVNIRFCLPISMTTPVPDPDEWEKKLAASTCTQPVYNLNAAIGVFGVLSDLYILLIPISMVIKLQIPKSRKYGILGIFLTGLLATALSITSLVYRFAQLHSYDFTWDSVPSYTLRAAEVNIGLICSCLPIVFVVFKRAMRALPWASTRKSTATPDSRTPSHLVYSDDVGRSNEALDPTKALVKPLGPAAFINLGTFGNQNGSPTPSRHERSTYAEVASIASTESDYGNRRMGAG

SEQ ID NO: 24360 - DNA, 2319 bp, Muscodor strobelii
  misc_feature: SGI EST ID NO. CUFF.57410.0
  misc_feature: Variant of the nucleotide sequence at SEQ ID NO 24358
gcttgttccaagaacgaagattttgcttctctttgcatcttaaatggcgtttcggccatcttgatgacaccggatttccactgaccaaacgggcgaatattcgaatgaagtgagaacacgcttgcgctcatgttcctcaaaatggacatccgcgacgcgggcacggatcccctggaccaaatcccagctttgaaccctccgcctggtgtagagtcgaacttcgacaatccgtattcgcgagcacagatcggaaagatttttcttggaatcacctacggattaatggtcatatttctggccctacggatttatactcgcctttggatcgcaggaaatcggaaacttgggacggatgattatctctcacttgttgcaggagccagtatcacggcatatacagctctctcttattcctgtatgttaatagacgtactaagttcaaatattttgttgtgaaaatcgtactgatgcccccagtatttggtgacccgattggtccacaccaatggaacgtccgtctaagccacttcagtgatagttttctcgagcgaaccttggcttctttagtcctctttagcgtcagctcgctcttcgtcaagcttgcactactagtgttatatctccgtgtttttgctccggatatcaggacacgatggatgatatggggcgggatcgcgacagtaactttgttctatgttatcgcgattatcgtcaacataagattttgtcttccgatctcgatgacaacgcctgtgcctgatccagacgagtgggaaaagaagctggcggcgagcacttgtacacagcccgtatacaatctgaacgctgctataggcgtattcggcgtcctctctgatttatacattcttctcatcccgattagtatggttatcaaacttcagatacctaaaagccgaaagtatggtatattaggtatcttcttaacaggcttgctggcgactgcactttcgataacaagcttggtctatcggtttgcgcagctgcactcgtacgatttcacctgggattcagtgcctagctatactctccgtgctgctgaggtcaatatcggactaatctgcagctgccttccaattgtatttgttgtctttaagagagccatgcgcgcattaccatgggcctcaacaaggaaaagcacagcaactccggattctcgaactcctagtcatctagtctactcggacgacgtgggaaggagcaacgaggcactcgacccaaccaaagctttagtaaagcctcttggtcctgctgcgttcatcaacctgggtacttttggtaatcaaaacggctcgcccacgcccagtagacacgagagatctacgtatgccgaagtcgcctctattgcctcgacggaatctgactatggaaacagaaggatgggagctggatgaaaaactcaacgtcatatttcagcacacagacgactaaacgaaactatgattcgacggccggcacgcatgaacgcttgagcaacccacaatcgagccaagacgtgtccaatattgccacaccgaactaatgggcatgctacagcgtggagaagttgatggcgacatatactggtgaaatctaccactccttacggccagtgaatgctttcttcgaatattcgcttccaacttagggtcgcagtcctatggacttctcagcgaaggtgccaatcgacagttggaggctgtcagcaaggagtgattgatcttcgctacggattcaagcgataagagctcgcgagtcacgacagaggagaaatgacttcggcatcgacgttgatataaacttgcgcccaggcgcacaataggaagtcgacgatccccgaaacgccacccggcagagacggcttaccacactcgccacgcttcgcaacaaataccccggattgagcaaagctttaagagtttgttaacactgacaccaagtcctatcggccacaattatcggaaccaacattaagtgttatcttgtacatgggtcgtgcatcgatggcgtgatgaggcacaacctagaattgtgagaggctgcttttacgagggactcggattgatgacttgacgccgcttcacgcataaccataagaactacatgaaatgaatagatgaatgaacgaagacgctactgcgatatttaccaatgcaaatgagtgcgaattggcatcattaacatcaaacaaaaattcgctgcctccaaacttcaagcgtaacgagatagcacagatgaaccatcgcttgaatctagaccacctcctattgctatttctgttacgctagtgaagtatgttggtcggagacgccttgagtgcat

SEQ ID NO: 24361 - DNA, 624 bp, Muscodor strobelii
  misc_feature: SGI cDNA ID NO. 568305
  misc_feature: Reduced expression when VOC is produced
  misc_feature: Encodes the peptide sequence at SEQ ID NO 24362
atgtctctcgcacccgcggatcttccccaaaacgaggcgaaatgcatagcaccgatagccgtaccaactcacggtcccggaggtaacttctcggtcgcttgctccacgatagtcgccgcgaaacctcttgcttgcatcgagaaggtgcttgaccttccagattatgagaattggaacaaattcgtgaccaaggccagccttgtggagccgggacagacagattctctcgccgaagagttgaagactatagcttcccggcccggacatgctgcccccggcgccaaggtgaaattcgacgccctcatgtcgcccggctcatcgccatacaaagtcgatcttgaagtcacatttcttgaagcattcgaaacagttgaagggggctcaacacgcaagggatatcgtgtcgcttggaaagctaccggcatgccccacctattgcttcattccgagcgcgtgcaagagttcgtcgaggtcgctggtgcagacggaagcatcgaaacgagatacagttgttgggagacatttgctgggtggttgacgtatgttctgcctcgcaagcagcttgagaatgggtttgagagatggatgaacagtttgaagaaagttgcggaggaatcgaagtga

SEQ ID NO: 24362 - protein, 207 aa, Muscodor strobelii
  misc_feature: SGI Peptide ID NO. 568305
  misc_feature (5)..(204): NCBI GI: 171684431 Blast Desc: protein product [Podospora anserina] gi|170942176|emb|CAP67828.1| protein product [Podospora anserina]
  misc_feature (18)..(204): NCBI GI: 116193213 Blast Desc: CHGG_06324 [Chaetomium globosum CBS 148.51] gi|88182237|gb|EAQ89705.1| CHGG_06324 [Chaetomium globosum CBS 148.51]
  misc_feature (18)..(204): NCBI GI: 39941282 Blast Desc: [Magnaporthe grisea 70-15] gi|145022219|gb|EDK06239.1| [Magnaporthe grisea 70-15]
  misc_feature (130)..(204): NCBI GI: 164427833 Blast Desc: NCU02652 [Neurospora crassa OR74A] gi|38567169|emb|CAE76462.1| [Neurospora crassa] gi|157071903|gb|EAA36189.2| [Neurospora crassa OR74A]
  misc_feature (21)..(207): NCBI GI: 169855064 Blast Desc: [Coprinopsis cinerea okayama7#130] gi|116504710|gb|EAU87605.1| [Coprinopsis cinerea okayama7#130]
  misc_feature (32)..(207): NCBI GI: 238484619 Blast Desc: conserved [Aspergillus flavus NRRL3357] gi|220701598|gb|EED57936.1| conserved [Aspergillus flavus NRRL3357]
  misc_feature (49)..(204): NCBI GI: 71000058 Blast Desc: conserved [Aspergillus fumigatus Af293] gi|66852383|gb|EAL92708.1| conserved [Aspergillus fumigatus Af293] gi|159127754|gb|EDP52869.1| conserved [Aspergillus A1163]
  misc_feature (30)..(200): NCBI GI: 119492264 Blast Desc: NFIA_068430 [Neosartorya fischeri NRRL 181] gi|119411731|gb|EAW21674.1| conserved [Neosartorya fischeri NRRL 181]
  misc_feature (30)..(205): NCBI GI: 115384836 Blast Desc: [Aspergillus terreus NIH2624] gi|114196657|gb|EAU38357.1| [Aspergillus terreus NIH2624]
  misc_feature (30)..(205): NCBI GI: 121705252 Blast Desc: conserved [Aspergillus clavatus NRRL 1] gi|119399035|gb|EAW09463.1| conserved [Aspergillus clavatus NRRL 1]
  misc_feature: Useful for introducing or modulating the production of volatile compounds
MSLAPADLPQNEAKCIAPIAVPTHGPGGNFSVACSTIVAAKPLACIEKVLDLPDYENWNKFVTKASLVEPGQTDSLAEELKTIASRPGHAAPGAKVKFDALMSPGSSPYKVDLEVTFLEAFETVEGGSTRKGYRVAWKATGMPHLLLHSERVQEFVEVAGADGSIETRYSCWETFAGWLTYVLPRKQLENGFERWMNSLKKVAEESK

SEQ ID NO: 24363 - DNA, 1346 bp, Muscodor strobelii
  misc_feature: SGI EST ID NO. CUFF.57413.0
  misc_feature: Variant of the nucleotide sequence at SEQ ID NO 24361
tgaaatactctcaacatggcacaattgatcgacatcacgttataacagcaaaaaacagccaactaacggccaactataaacttgagattgaatttatggtctttgaaccccagttctaccctcttcagttcttactcagctttctatatgaccttgaccgtggcccgaatgaataacacacccagctcatcgtcgtagggctgtcaattagcccccacatcatcatcaccaccatgtctctcgcacccgcggatcttccccaaaacgaggcgaaatgcatagcaccgatagccgtaccaactcacggtcccggaggtaacttctcggtcgcttgctccacgatagtcgccgcgaaacctcttgcttgcatcgagaaggtgcttgaccttccagattatgagaattggaacaaattcgtgaccaaggccagccttgtggagccgggacagacagattctctcgccgaagagttgaagactatagcttcccggcccggacatgctgcccccggcgccaaggtgaaattcgacgccctcatgtcgcccggctcatcgccatacaaagtcgatcttgaagtcacatttcttgaagcattcgaaacagttgaagggggctcaacacgcaagggatatcgtgtcgcttggaaagctaccggcatgccccacctattgcttcattccgagcgcgtgcaagagttcgtcgaggtcgctggtgcagacggaagcatcgaaacgagatacagttgttgggagacatttgctgggtggttgacgtatgttctgcctcgcaagcagcttgagaatgggtttgagagatggatgaacagtttgaagaaagttgcggaggaatcgaagtgagaggggaccgaactcatgttcaatgcattttcttggtacatattatttatcttcatcctgcggccttagcctagatggcactacggccaaattcatgttcgacaatttttccatgagacctacagctcgtgagattgctttcactctcgtgtcttcaccacgtgggaatgagcgtcacaacccattctcaaacattcagaagacgatacaagttggcaagaaaccggcaaaagctaattgaccatcttggtgcggcgtatccacaccactcaccgcacatgtttttgaatcatctagagcattctgcacacttactaggacgatgcttatagaagacttggttcaatctgtgagacttcttatcctttttttttagcacatgcacattgtcgaatgcagtaccggattccacaagtacgcaactagctgctcctactgtcgtcaagcattcgtaatatttttgaacactcagttctatttatatagttg

SEQ ID NO: 24364 - DNA, 1431 bp, Muscodor strobelii
  misc_feature: SGI cDNA ID NO. 568306
  misc_feature: Encodes the peptide sequence at SEQ ID NO 24365
atgtcccaaccaatgcatccaaaggcttcatcgtcggcttcaactccacatgaagctattacatacgacccaaatgatgtgtgccatttctggtacaaacgtgaaaagatctgcgtgaattattggcccaaaacccatgaacctggtctacggagaattggtacagagatcttgaatggcctaaagcatgactatgctattcatcgactgcttcgcaaaggagttcaccttgcacagcgatacctatccatagactccgtccagcaagagttgactggctccctgatggaacgtactgaactccgtaagcagagagtaatacatacgtacgtggcccaattctggacgattcttggtattggaaatccaaacggtctcgaaggtcgatttgtcaaggttggatatggtgttatgcagcatgaggaaaatctttgtgagactcttctccacccgggggttcaaacctcccacgatcatcttagggagaacttagagcacttgctctgggacacagtaatattcaacaaaaagcttctggagagcttcctggcggcgccgtacgatacacaagataagatgcagcaaagctatgtgcccattgaatactacgccgctcatgagtttgacaataagactgaagttcttttaccgttttactctgatgaatggattattaacatgggtctagttatcggccttctacacggctgggcgcaaattatgtatcgcgattggcattatcactggaatgacacgaggccaaagactttatgggatactttgaaaatctgtcagaacgcgagattattcgctgatagatttctcgagaagctttggtgcggctctgtggctttctatgaggtgtctgagcctctaccaggactcgatgcgaatcatcctgctggacatcctgcgattcgatactccaatgggatcaatcaaatctcattttgtgataccttcctccacagcattatcagggaaatattgggcctggacccggccgtgaacgataatgagtacagagcactggatcctatgcaaaacccgatgttttatgttcaaaagcatgctcacgtaccgcactatattggtggagacatgctgaagtattttccaaaggggaatgaatgggtcaatataacgatacaccaagaccagaaaatacagacggcaacggcacaggcaccggcaattcttccaaatgagcagcagcaacatatccacatggcgccgccaccacaggcgctcaacggccagtctgatatcaatcaggcgccagggccaccgattacgagatttccacctagcagccagggacaatcctaccatgcacagacagccactcacccaacgatcaggcaaggacctgaatacggtggcgtacaaaaagaaaagcgcggacgaccgagtaatgctgatagatcgtga

SEQ ID NO: 24365 - protein, 476 aa, Muscodor strobelii
  misc_feature: SGI Peptide ID NO. 568306
MSQPMHPKASSSASTPHEAITYDPNDVCHFWYKREKICVNYWPKTHEPGLRRIGTEILNGLKHDYAIHRLLRKGVHLAQRYLSIDSVQQELTGSLMERTELRKQRVIHTYVAQFWTILGIGNPNGLEGRFVKVGYGVMQHEENLCETLLHPGVQTSHDHLRENLEHLLWDTVIFNKKLLESFLAAPYDTQDKMQQSYVPIEYYAAHEFDNKTEVLLPFYSDEWIINMGLVIGLLHGWAQIMYRDWHYHWNDTRPKTLWDTLKICQNARLFADRFLEKLWCGSVAFYEVSEPLPGLDANHPAGHPAIRYSNGINQISFCDTFLHSIIREILGLDPAVNDNEYRALDPMQNPMFYVQKHAHVPHYIGGDMLKYFPKGNEWVNITIHQDQKIQTATAQAPAILPNEQQQHIHMAPPPQALNGQSDINQAPGPPITRFPPSSQGQSYHAQTATHPTIRQGPEYGGVQKEKRGRPSNADRS

SEQ ID NO: 24366 - DNA, 762 bp, Muscodor strobelii
  misc_feature: SGI cDNA ID NO. 568307
  misc_feature: Reduced expression when VOC is produced
  misc_feature: Encodes the peptide sequence at SEQ ID NO 24367
atggtcctcacgcgcaccaccaatcaccaatactctcacccctttcccaccgtcactctcgccttcttcctgcgctactactcgcccaaactcaatccgttctccagccatgtcctctccaccgacactatctcttcccatgtcgattccgccaccggtcgcctgcacaccacccgcctgcacttgaagcggtcgcgtatgcccaatgccgttgtcaagcttctacctaccagcgtcaccggtggcggcggggacaagtctagctacgtcctcgagaccagtgttgtcgacatgaaggagggttggatgaagaccgagagcaagaacctcaacttcacaggtgtcttgagcgttcttgagcagcaacactactccgtcactcctcccgatgctcaggcctccgattccgctcccgttcccgtgcccaccagcgggtcgctctcggccaacacctttgtcactaccaccttttcctaccgatcctctcttgggaacaagaagcaggaccgagctacccaggacgccgagactacggatgaaaccggacctcgacgcattggtagttggatctcggggtggggggccaatcgcattcaacgcagcatcgagtccattgcttccactaagaccgaggatcagctcaccaagtcccgcgatgggatgggcatagtgctcgaacgtctgcgaaacaacagcgttgtctctgtcttgagagagctgcgacgtgcgcgagagtccagcgcggcttcccttgagcattaa

SEQ ID NO: 24367 - protein, 253 aa, Muscodor strobelii
  misc_feature: SGI Peptide ID NO. 568307
  misc_feature (16)..(178): Pfam Id: PF04707 Pfam Desc: PRELI-like family
  misc_feature (16)..(126): Pfam Id: PF04707 Pfam Desc: PRELI-like family
  misc_feature (1)..(249): NCBI GI: 46137587 Blast Desc: FG10309.1 [Gibberella zeae PH-1]
  misc_feature (1)..(250): NCBI GI: 171693925 Blast Desc: protein product [Podospora anserina] gi|170946911|emb|CAP73715.1| protein product [Podospora anserina]
  misc_feature (1)..(251): NCBI GI: 39961513 Blast Desc: MGG_09537 [Magnaporthe grisea 70-15] gi|145011040|gb|EDJ95696.1| MGG_09537 [Magnaporthe grisea 70-15]
  misc_feature (1)..(245): NCBI GI: 85100088 Blast Desc: NCU06719 [Neurospora crassa OR74A] gi|28922430|gb|EAA31663.1| conserved [Neurospora crassa OR74A] gi|28950276|emb|CAD71244.1| conserved [Neurospora crassa]
  misc_feature (6)..(253): NCBI GI: 119191153 Blast Desc: CIMG_05624 [Coccidioides immitis RS]
  misc_feature (6)..(253): NCBI GI: 240107458 Blast Desc: PRELI/MSF1 domain containing protein [Coccidioides posadasii C735 delta SOWgp]
  misc_feature (1)..(253): NCBI GI: 156056192 Blast Desc: SS1G_05448 [Sclerotinia sclerotiorum 1980] gi|154703232|gb|EDO02971.1| SS1G_05448 [Sclerotinia sclerotiorum 1980]
  misc_feature (11)..(249): NCBI GI: 238845891 Blast Desc: MSF1 domain-containing protein [Microsporum canis CBS 113480]
  misc_feature (6)..(246): NCBI GI: 154270726 Blast Desc: MSF1 domain protein [Ajellomyces capsulatus NAm1] gi|150409791|gb|EDN05231.1| MSF1 domain protein [Ajellomyces capsulatus NAm1]
  misc_feature (6)..(246): NCBI GI: 258564829 Blast Desc: conserved [Uncinocarpus reesii 1704] gi|237906860|gb|EEP81261.1| conserved [Uncinocarpus reesii 1704]
  misc_feature: Useful for introducing or modulating the production of volatile compounds
MVLTRTTNHQYSHPFPTVTLAFFLRYYSPKLNPFSSHVLSTDTISSHVDSATGRLHTTRLHLKRSRMPNAVVKLLPTSVTGGGGDKSSYVLETSVVDMKEGWMKTESKNLNFTGVLSVLEQQHYSVTPPDAQASDSAPVPVPTSGSLSANTFVTTTFSYRSSLGNKKQDRATQDAETTDETGPRRIGSWISGWGANRIQRSIESIASTKTEDQLTKSRDGMGIVLERLRNNSVVSVLRELRRARESSAASLEH

SEQ ID NO: 24368 - DNA, 1507 bp, Muscodor strobelii
  misc_feature: SGI EST ID NO. CUFF.57431.0
  misc_feature: Variant of the nucleotide sequence at SEQ ID NO 24366
cgtgctgccgcatgtgtcgtcgacgtcgttccaagacgtgagcacatacatcacaccactcgagcatctcatcgtcaacactgctatttcatttcatctacacagtacggagtggtgatctcctccactcctcacctgaaatacaacgcgtgacgctctgcatcgataggcatttggatgcatcatgagcttctccccgttgtagagaggcacgcgcaattcggttccctttaacagcccacgttcaatacatttacatctttacccaacactgtgaatcacctgaccgaccgttgttcacaaatactacgatctaaaaactgcctcgcaatctaccgccatataccgaagccatcatatcgttagcaaacgccgaagaatccaccaatccgccaagatggtcctcacgcgcaccaccaatcaccaatactctcacccctttcccaccgtcactctcgccttcttcctgcgctactactcgcccaaactcaatccgttctccagccatgtcctctccaccgacactatctcttcccatgtcgattccgccaccggtcgcctgcacaccacccgcctgcacttgaagcggtcgcgtatgcccaatgccgttgtcaagcttctacctaccagcgtcaccggtggcggcggggacaagtctagctacgtcctcgagaccagtgttgtcgacatgaaggagggttggatgaagaccgagagcaagaacctcaacttcacaggtgtcttgagcgttcttgagcagcaacactactccgtcactcctcccgatgctcaggcctccgattccgctcccgttcccgtgcccaccagcgggtcgctctcggccaacacctttgtcactaccaccttttcctaccgatcctctcttgggaacaagaagcaggaccgagctacccaggacgccgagactacggatgaaaccggacctcgacgcattggtagttggatctcggggtggggggccaatcgcattcaacgcagcatcgagtccattgcttccactaagaccgaggatcagctcaccaagtcccgcgatgggatgggcatagtgctcgaacgtctgcgaaacaacagcgttgtctctgtcttgagagagctgcgacgtgcgcgagagtccagcgcggcttcccttgagcattaacggatggcgatcgcggaatctgtaacatccgctgtaatatatctttgacctttggcgacccgggttcagcaaggcgttggttcacatgatttgcttgggaaaaggcaaacggcttgatggaaagggcaaaaagtaggcacgtttggatcatcgcatccaaaggttttcacatgtatatccgacccggagcgagcataagggtctatcgctctcacgctcattacccctctcatgtatgaatacgctcttatctattgttatagtcctcttcgtacctggacagggcgatgaggacgcaaatgtataaatgacgatgaaaatgaaattaaaatcatattaggactacta

SEQ ID NO: 24369 - DNA, 948 bp, Muscodor strobelii
  misc_feature: SGI cDNA ID NO. 568308
  misc_feature: Encodes the peptide sequence at SEQ ID NO 24370
atggcttcaccatcccttgacccacagtctctttttgatgtcaaaggcctcgtggctgttgtgacaggaggaggaagtggcattggcctcatgatcgcacaagcgctagaagcaaacggtgcaatcgtttacatcatcggacgacgtaaggagagcttagagaaagctgccgcgactgctgtacgtgtgaataacgtgtccttcgtcatcgatcacaaccctattgtctttttcacatacacgataaaactaataatggacaagaaacatagcaacatccgccccatagtcggcgatgtaacatccaagtcctcgctcgcagcagcagcatccagcatcggctcagaaataggttatatagacctcctagtcgcaaactctgggatctcaggtccttcactcaaagggttagccaaagatgccgatctttcaacattccagaactatctcgcgtcttgggatactgatgctttcaacgacacatacgccgtcaatgtgacaggggtattcaactcagtcgttgcgttcctgtctctcctcgatgctggcaataagagagaaggacgtggcaagcagagcagccaggtcattgctacaagcagtatcggcgccttcaatcgagtacccttagcgggctttgcgtacggtagttcaaagactgccgttgttcatatgatgaaacaattcgctacaaccctagtcccatatggtattcggagtaatgtcatagcgccaggattctatccgagcgagatgactgtcaacacgatgcagcgaggcaaagaagagggctggccgaaatccatggttcctgagcaaagagcgggagatacagaggacatggctggaacggtgctgtttctagctagcaaagctggagcttacatcaacggaaacgtgctggtcactgacggcggaagactgggagtcttgccatcagcatattag

SEQ ID NO: 24370 - protein, 315 aa, Muscodor strobelii
  misc_feature: SGI Peptide ID NO. 568308
  misc_feature (17)..(234): Pfam Id: PF00106 Pfam Desc: short chain dehydrogenase
  misc_feature (1)..(315): NCBI GI: 256722810 Blast Desc: NECHADRAFT_97506 [Nectria haematococca mpVI 77-13-4]
  misc_feature (6)..(315): NCBI GI: 189205264 Blast Desc: short chain dehydrogenase/reductase [Pyrenophora tritici-repentis Pt-1C-BFP] gi|187986066|gb|EDU51554.1| short chain dehydrogenase/reductase [Pyrenophora tritici-repentis
  misc_feature (5)..(315): NCBI GI: 169614674 Blast Desc: SNOG_10483 [Phaeosphaeria nodorum SN15] gi|111060757|gb|EAT81877.1| SNOG_10483 [Phaeosphaeria nodorum SN15]
  misc_feature (6)..(315): NCBI GI: 261355119 Blast Desc: conserved [Verticillium albo-atrum VaMs.102]
  misc_feature (1)..(315): NCBI GI: 154312001 Blast Desc: BC1G_06034 [Botryotinia fuckeliana B05.10] gi|150850684|gb|EDN25877.1| BC1G_06034 [Botryotinia fuckeliana B05.10]
  misc_feature (3)..(315): NCBI GI: 169765484 Blast Desc: [Aspergillus oryzae RIB40] gi|83765068|dbj|BAE55211.1| protein product [Aspergillus oryzae]
  misc_feature (3)..(315): NCBI GI: 256729314 Blast Desc: NECHADRAFT_95809 [Nectria haematococca mpVI 77-13-4]
  misc_feature (3)..(314): NCBI GI: 256724230 Blast Desc: NECHADRAFT_64691 [Nectria haematococca mpVI 77-13-4]
  misc_feature (1)..(311): NCBI GI: 156060395 Blast Desc: SS1G_02336 [Sclerotinia sclerotiorum 1980] gi|154699744|gb|EDN99482.1| SS1G_02336 [Sclerotinia sclerotiorum 1980]
  misc_feature (5)..(310): NCBI GI: 145247098 Blast Desc: An12g07490 [Aspergillus niger] gi|134080526|emb|CAK46373.1| protein product [Aspergillus niger]
  misc_feature (12)..(306): SWISSPROT Homolog: EC 1.1.1.100 3-oxoacyl-[acyl-carrier-protein] reductase
MASPSLDPQSLFDVKGLVAVVTGGGSGIGLMIAQALEANGAIVYIIGRRKESLEKAAATAVRVNNVSFVIDHNPIVFFTYTIKLIMDKKHSNIRPIVGDVTSKSSLAAAASSIGSEIGYIDLLVANSGISGPSLKGLAKDADLSTFQNYLASWDTDAFNDTYAVNVTGVFNSVVAFLSLLDAGNKREGRGKQSSQVIATSSIGAFNRVPLAGFAYGSSKTAVVHMMKQFATTLVPYGIRSNVIAPGFYPSEMTVNTMQRGKEEGWPKSMVPEQRAGDTEDMAGTVLFLASKAGAYINGNVLVTDGGRLGVLPSAY

SEQ ID NO: 24371 - DNA, 978 bp, Muscodor strobelii
  misc_feature: SGI EST ID NO. CUFF.57440.0
  misc_feature: Variant of the nucleotide sequence at SEQ ID NO 24369
cggcgatgtaacatccaagtcctcgctcgcagcagcagcatccagcatcggctcagaaataggttatatagacctcctagtcgcaaactctgggatctcaggtccttcactcaaagggttagccaaagatgccgatctttcaacattccagaactatctcgcgtcttgggatactgatgctttcaacgacacatacgccgtcaatgtgacaggggtattcaactcagtcgttgcgttcctgtctctcctcgatgctggcaataagagagaaggacgtggcaagcagagcagccaggtcattgctacaagcagtatcggcgccttcaatcgagtacccttagcgggctttgcgtacggtagttcaaagactgccgttgttcatatgatgaaacaattcgctacaaccctagtcccatatggtattcggagtaatgtcatagcgccaggattctatccgagcgagatgactgtcaacacgatgcagcgaggcaaagaagagggctggccgaaatccatggttcctgagcaaagagcgggagatacagaggacatggctggaacggtgctgtttctagctagcaaagctggagcttacatcaacggaaacgtgctggtcactgacggcggaagactgggagtcttgccatcagcatattagaacaagaatttattacaattcttgggctcaatagaattttgacttagttcgagctcgtctacaatccatctgtggctcaaaacaaagcatgcgctttacaccttctccgcggcacccctacttttgccagatagacaaatcgacctatggccatatttcagaaattccgctgctcagatggtagtcctaacccaggcacgagaccaccattcaacggacaatctagaattgaatgcacacccaagcccggagttgtaaccgcattcttgtatacttgtctcagtctcgtttattcgcgcaattgcctagcattatttcag

SEQ ID NO: 24372 - DNA, 798 bp, Muscodor strobelii
  misc_feature: SGI cDNA ID NO. 568309
  misc_feature: Encodes the peptide sequence at SEQ ID NO 24373
atgcagttcctcactacactgctccttggcctcacagccacagttctcggcagtcccacaccgagaccatcatccatcaaagtcaacgtcacctctccattgtatggcatccctcaccccttatacaacacaaccgtaccctacagatgcagagcagtcggagaggattgcgtcagcatgtcctcagactcaacgacagaccagcaaatctcagtgaagattacatgtgttgtcagcgatagaggcagatcgagaggtcaagtagtcccattccagattgaaccttgctcgccaggcacgatgtgccagctaggacacgaatttgaccctgatcgtctaccacatgacgatcctgagctccctcatgaaccagaagatcccgagattcgcggcgacgatgattctgtctctgactccgattggggccttgatgatgatgacgacaatgattgggatgattgggacgattgggacggcgatgatgatgacgacgacgacgacgacggggatgacgacgatggcgacgcagatgatgatggtgacgacgatgacgatgatgacgatggtgacgacgatgatgatgatggggatgacgacgatgacgatgatgacggtgacgatgacgatgaggataatgtcgcttcgcacttcatcaagttaggaggagagaaacaagttgagatcgagattcctgtagaggcttggactcgagggattgcccgtcctcctctcgtgccatcccgcgccatgtgcgtcaatcatacccagtgggaagatgttggtctcggaccggcctga

SEQ ID NO: 24373 - protein, 265 aa, Muscodor strobelii
  misc_feature: SGI Peptide ID NO. 568309
MQFLTTLLLGLTATVLGSPTPRPSSIKVNVTSPLYGIPHPLYNTTVPYRCRAVGEDCVSMSSDSTTDQQISVKITCVVSDRGRSRGQVVPFQIEPCSPGTMCQLGHEFDPDRLPHDDPELPHEPEDPEIRGDDDSVSDSDWGLDDDDDNDWDDWDDWDGDDDDDDDDDGDDDDGDADDDGDDDDDDDDGDDDDDDGDDDDDDDDGDDDDEDNVASHFIKLGGEKQVEIEIPVEAWTRGIARPPLVPSRAMCVNHTQWEDVGLGPA

SEQ ID NO: 24374 - DNA, 1223 bp, Muscodor strobelii
  misc_feature: SGI EST ID NO. CUFF.57446.0
  misc_feature: Variant of the nucleotide sequence at SEQ ID NO 24372
gcgatgatgatgacgacgacgacgacgacggggatgacgacgatggcgacgcagatgatgatggtgacgacgatgacgatgatgacgatggtgacgacgatgatgatgatggggatgacgacgatgacgatgatgacggtgacgatgacgatgaggataatgtcgcttcgcacttcatcaagttaggaggagagaaacaagttgagatcgagattcctgtagaggcttggactcgagggattgcccgtcctcctctcgtgccatcccgcgccatgtgcgtcaatcatacccagtgggaagatgttggtctcggaccggcctgaacatcgaaacggtaatgcccactcgagagcaacagtaaccgacacatacgacctgatacatcgacagcaccttgatgagtcgaagcagcgatgatgataggatcggatggagtgatagacgatgcagggatggcaaattgtgtttacgagtatagcctagacttcatgactactaatcattaatcctctatcaaacaataatgttttgaacgcttaattattgatctcatccatgcacatgcggcgtatgtctctcacgacgtcccgagtgaagacttgaagataggccgacattcccgaatatcttttgccctctctctagacgtcaacgctgcacacggcatttattggctaagtaattcactgtagtcatacttacatacgagtagatttcagctatttcaccattgggaagtgtaccttgtgcgatcatagagtctgtctggatcacgtctttaatcttggctctacagagatgcaatgctaggttcaaagcacacagccggagctcgactaacatctcaaagaagcaggctcatatgattttcatgatccaaaacgcatagcccaattgtgccacatatcggcaggcatcaatgtagtcgtgttctctaccttctaccaacgcctctactgctccatactcttactgattccgctccaaaacgcacatctctgcgtctgttcgtctggtacattctccatcgcggtgtcattagtctgcaacctcattctcagcccctctccattcccccaagccgaccattctggtgcagtcgcatcgcgatacgtatttggatctaggtccatcacgaaactgacgtaatagttcatagtaattggtacaatcggtgcattatacgtaacataggacgtggcgtaactccccgcgtaccccgg

SEQ ID NO: 24375 - DNA, 1617 bp, Muscodor strobelii
  misc_feature: SGI cDNA ID NO. 568310
  misc_feature: Encodes the peptide sequence at SEQ ID NO 24376
atgttgcttgatactctagtagtttcattatcatgcctggctttaggcacttccgctcaatatgcggaagctcccatagtcgacttgggttatgcaaaataccgaggtttgagactagatgccggagtagaccagtttcttggtatgcgatatgctcaagcgcctgttggagacctgagatggagggcgccgcaagatccgttggtggttgatgaggttcaagctgtagatcaaggtttcaaaccgatatgcataggccatgcccaacagccaagtgccagcatggacgaagactgtctttatgtcaatgtgttcaaacccagcgcagcaaattcaacttcgaaattacctgtgtggttgtacttccagggaggcggctatgcgacgaactcagataataattttaatggaacgaaagtcatacaggagtctggaaacgaaatagtgtttgtgaattttaactatagagttagtctttatggcttcttgagtagcgagaggattagagaggatggcgatttgaatgcgggcttgttggatcagagaaaggtgcttgagtgggtaagggatcatattagtgagtttggcggagatccaaaccacgtcgtgatccacggcacatcagcaggagccgggagcatctctcaccacatgacagccttcaacggccgagatgacggcctattcgcgggtgtagcactcgaatgcgtgttctggccccgcataggaacagtatcagaagtctcctaccaattcgacgcggtcgcctcccgagcaggctacaacgggaccggcgatccgctccaattcttgcgttccgctcccctaagcgcactcacaagcgcagacatatacgacgccttcccaggctcctcaagcaccaccccagcaccctcattctacttcctgccggtgatcgacggcggtctaataacagactacacatacaacctcttcgcaaacggcagtttcatcgacgtacccatcctaataggaaacatgaacgacgaaggcgcctcattcgcaaacaacgcctcgacatcctcacaagtcgaagatctaatgaggaataatttcccgaacctcactaccgccgaagcagaccagatagtggaagagtaccccctaatgccacccctaccacagcacgatatctggttcccgtccgcatccgcggcatacggtgaatccgtcttcacatgcccaggaaacttcatcgcgtcctcaatttccaaatactactccccagacaaagtctgggactaccgatacaacgtgcaagacgacgagcaacaagccgcggggcgaggcgtcccgcacgccttcgacaaagcggcgattttcgggccggggtacgcggggagttacgccacgtcctatgttacgtataatgcaccgattgtaccaattactatgaactattacgtcagtttcgtgatggacctagatccaaatacgtatcgcgatgcgactgcaccagaatggtcggcttgggggaatggagaggggctgagaatgaggttgcagactaatgacaccgcgatggagaatgtaccagacgaacagacgcagagatgtgcgttttggagcggaatcagtaagagtatggagcagtag

SEQ ID NO: 24376 - protein, 538 aa, Muscodor strobelii
  misc_feature: SGI Peptide ID NO. 568310
  misc_feature (1)..(529): Pfam Id: PF00135 Pfam Desc: Carboxylesterase
  misc_feature (94)..(529): Pfam Id: PF00135 Pfam Desc: Carboxylesterase
  misc_feature (1)..(67): Pfam Id: PF00135 Pfam Desc: Carboxylesterase
  misc_feature (2)..(537): NCBI GI: 145248155 Blast Desc: An13g01880 [Aspergillus niger] gi|134081075|emb|CAK41587.1| protein product [Aspergillus niger]
  misc_feature (2)..(537): NCBI GI: 42405320 Blast Desc: EstA precursor [Aspergillus niger]
  misc_feature (15)..(537): NCBI GI: 51247844 Blast Desc: EstA precursor [Aspergillus niger]
  misc_feature (6)..(537): NCBI GI: 115397205 Blast Desc: ATEG_05016 [Aspergillus terreus NIH2624] gi|114192385|gb|EAU34085.1| ATEG_05016 [Aspergillus terreus NIH2624]
  misc_feature (5)..(537): NCBI GI: 145241279 Blast Desc: An08g11860 [Aspergillus niger] gi|134077818|emb|CAL00805.1| protein product [Aspergillus niger]
  misc_feature (7)..(537): NCBI GI: 115492859 Blast Desc: ATEG_00971 [Aspergillus terreus NIH2624] gi|114197917|gb|EAU39617.1| ATEG_00971 [Aspergillus terreus NIH2624]
  misc_feature (22)..(537): NCBI GI: 242779748 Blast Desc: carboxylesterase, [Talaromyces stipitatus ATCC 10500] gi|218719598|gb|EED19017.1| carboxylesterase, [Talaromyces stipitatus ATCC 10500]
  misc_feature (26)..(538): NCBI GI: 156030691 Blast Desc: SS1G_14441 [Sclerotinia sclerotiorum 1980] gi|154700832|gb|EDO00571.1| SS1G_14441 [Sclerotinia sclerotiorum 1980]
  misc_feature (25)..(536): NCBI GI: 238495044 Blast Desc: carboxylesterase, [Aspergillus flavus NRRL3357] gi|220695408|gb|EED51751.1| carboxylesterase, [Aspergillus flavus NRRL3357]
  misc_feature (25)..(536): NCBI GI: 169777815 Blast Desc: [Aspergillus oryzae RIB40] gi|83772110|dbj|BAE62240.1| protein product [Aspergillus oryzae]
  misc_feature (1)..(375): SWISSPROT Homolog: EC 3.1.1.3 Triacylglycerol lipase
MLLDTLVVSLSCLALGTSAQYAEAPIVDLGYAKYRGLRLDAGVDQFLGMRYAQAPVGDLRWRAPQDPLVVDEVQAVDQGFKPICIGHAQQPSASMDEDCLYVNVFKPSAANSTSKLPVWLYFQGGGYATNSDNNFNGTKVIQESGNEIVFVNFNYRVSLYGFLSSERIREDGDLNAGLLDQRKVLEWVRDHISEFGGDPNHVVIHGTSAGAGSISHHMTAFNGRDDGLFAGVALECVFWPRIGTVSEVSYQFDAVASRAGYNGTGDPLQFLRSAPLSALTSADIYDAFPGSSSTTPAPSFYFLPVIDGGLITDYTYNLFANGSFIDVPILIGNMNDEGASFANNASTSSQVEDLMRNNFPNLTTAEADQIVEEYPLMPPLPQHDIWFPSASAAYGESVFTCPGNFIASSISKYYSPDKVWDYRYNVQDDEQQAAGRGVPHAFDKAAIFGPGYAGSYATSYVTYNAPIVPITMNYYVSFVMDLDPNTYRDATAPEWSAWGNGEGLRMRLQTNDTAMENVPDEQTQRCAFWSGISKSMEQ

SEQ ID NO: 24377 - DNA, 724 bp, Muscodor strobelii
  misc_feature: SGI EST ID NO. CUFF.57450.0
  misc_feature: Variant of the nucleotide sequence at SEQ ID NO 24375
tcttggtatgcgatatgctcaagcgcctgttggagacctgagatggagggcgccgcaagatccgttggtggttgatgaggttcaagctgtagatcaaggtttcaaaccgatatgcataggccatgcccaacagccaagtgccagcatggacgaagactgtctttatgtcaatgtgttcaaacccagcgcagcaaattcaacttcgaaattacctgtgtggttgtacttccagggaggcggctatgcgacgaactcagataataattttaatggaacgaaagtcatacaggagtctggaaacgaaatagtgtttgtgaattttaactatagagttagtctttatggcttcttgagtagcgagaggattagagaggatggcgatttgaatgcgggcttgttggatcagagaaaggtgcttgagtgggtaagggatcatattagtgagtttggcggagatccaaaccacgtcgtgatccacggcacatcagcaggagccgggagcatctctcaccacatgacagccttcaacggccgagatgacggcctattcgcgggtgtagcactcgaatgcgtgttctggccccgcataggaacagtatcagaagtctcctaccaattcgacgcggtcgcctcccgagcaggctacaacgggaccggcgatccgctccaattcttgcgttccgctcccctaagcgcactcacaagcgcagacatatacgacgcc

SEQ ID NO: 24378 - DNA, 1611 bp, Muscodor strobelii
  misc_feature: SGI cDNA ID NO. 568311
  misc_feature: Encodes the peptide sequence at SEQ ID NO 24379
atgcctgcaccaggcgatcaacacagcggcattgccaaccccttcgaggagcctcaagcacgcatgtcagaattcaccgctgctcagatcgccacattgcagtcacggttagagaaacagctcggcccagaatacctatcatctcgttccgggccctcgggacaaaaggtgcactacatagctgccgagaagatcatcgccctcgccaacgaggttttcggcttcaatggttggtcgtctagcatacagaacatccaagtagacttcgtcgacgagaacccccagaccttcaagatctccctcggattatccgtcatcgtccgggtcacgctcaaagacggcacctatcatgaagatatcggctatggtcacatcgaaaactgcaaggggaaagctgcagccttcgagaaggcgaagaaggagggaactaccgatgcattgaaacgcgcactgaggaacttcggcaatgtgctagggaactgcatctacgataaggattaccttgccaaagtaacgaagatcaaagtcggccctaccaagttcgatgaggacaacctgtacagacatgcggaccacgcaaagaaagagacgattatcaaagtcgagcagaaggctgttgcggagtctagtacagaggccggcaatgccagtgtcatcagcacgaaaccattggaggaagaagacttcggggacttcgatatggcagacttcggtgtcaccgaagatggacatcccgatgaggttgtgctccctggttctcatgacacgccgcagaatgcggctaatggccgtggtcgacctccgatgaacggaaatagtaacggtcaaaccccccgaccacaaccgccacagtctagaccacctggtccccgacctccgcagactcctaaccaacgccctacgtcacaattccaaggtcggccgcctccgaatcatcagcaacagccccctcgcccgccgaaccacgcaaatgccgccattcagaatggcgcaaatgtgcagcgaagcgtgacatggcccgcccagcgacctcccaaccctgctagtccaaaccctaacgtacccaatgtcccagcagacggaccagcgacttttttctcagcacgcgcaatcaaagacgtacccactgatggcgacacggcgagcgtgatcaacaacggagcgaaggtcttcgatcccaaggccgagagcccaagtattcggaagacaccgggcatagaccataggagctctaagcccctctcgagaagcggtgttcacgtccagcccatcaagcgagacgcagacgggaaagtgccggggcaagtagctggttctgaagctgggggtagtggatttcagggcgcaggcgggaacccgactatgagtcaggttcgacagattggtgcgcccggtggcggtgtagggtctccgttggggaataggggccagtatcgaccgttgactatgaagagacctgctccagccccgcccgacgctaatggtgggaccggtggcgggaatggaaatgtgaacgcgccgagaaatccgctgacggaggtctcgaccaatggacctggtgctgctggtgtgcagacggggtttgatgctaagaggcagaagacggcttga

SEQ ID NO: 24379 - protein, 536 aa, Muscodor strobelii
  misc_feature: SGI Peptide ID NO. 568311
  misc_feature (28)..(181): Pfam Id: PF04098 Pfam Desc: Rad52/22 family double-strand break repair protein
  misc_feature (1)..(502): NCBI GI: 145604450 Blast Desc: MGG_08585 [Magnaporthe grisea 70-15] gi|145012445|gb|EDJ97101.1| MGG_08585 [Magnaporthe grisea 70-15]
  misc_feature (1)..(502): NCBI GI: 52783233 Blast Desc: RAD52_MAGGR RecName: Full=DNA repair and recombination protein rhm52; AltName: Full=RAD52 homolog gi|22775418|dbj|BAC11860.1| recombinational repair protein
  misc_feature (1)..(536): NCBI GI: 46137285 Blast Desc: FG10158.1 [Gibberella zeae PH-1]
  misc_feature (1)..(536): NCBI GI: 256732158 Blast Desc: NECHADRAFT_100571 [Nectria haematococca mpVI 77-13-4]
  misc_feature (1)..(503): NCBI GI: 85100991 Blast Desc: NCU04275 [Neurospora crassa OR74A] gi|52783241|sp|Q9HGI2.1|RAD52_NEUCR RecName: Full=DNA repair and recombination protein mus-11; AltName: Full=RAD52 homolog MUS11
  misc_feature (1)..(536): NCBI GI: 171694273 Blast Desc: protein product [Podospora anserina] gi|170947085|emb|CAP73890.1| protein product [Podospora anserina]
  misc_feature (1)..(534): NCBI GI: 156043271 Blast Desc: SS1G_10638 [Sclerotinia sclerotiorum 1980] gi|154695026|gb|EDN94764.1| SS1G_10638 [Sclerotinia sclerotiorum 1980]
  misc_feature (1)..(534): NCBI GI: 154316488 Blast Desc: BC1G_04175 [Botryotinia fuckeliana B05.10] gi|150845975|gb|EDN21168.1| BC1G_04175 [Botryotinia fuckeliana B05.10]
  misc_feature (13)..(534): NCBI GI: 159124956 Blast Desc: RAD52 DNA repair protein RADC [Aspergillus fumigatus A1163]
  misc_feature (1)..(532): NCBI GI: 121706659 Blast Desc: RAD52 DNA repair protein RADC [Aspergillus clavatus NRRL 1] gi|119399735|gb|EAW10161.1| RAD52 DNA repair protein RADC [Aspergillus clavatus NRRL 1]
MPAPGDQHSGIANPFEEPQARMSEFTAAQIATLQSRLEKQLGPEYLSSRSGPSGQKVHYIAAEKIIALANEVFGFNGWSSSIQNIQVDFVDENPQTFKISLGLSVIVRVTLKDGTYHEDIGYGHIENCKGKAAAFEKAKKEGTTDALKRALRNFGNVLGNCIYDKDYLAKVTKIKVGPTKFDEDNLYRHADHAKKETIIKVEQKAVAESSTEAGNASVISTKPLEEEDFGDFDMADFGVTEDGHPDEVVLPGSHDTPQNAANGRGRPPMNGNSNGQTPRPQPPQSRPPGPRPPQTPNQRPTSQFQGRPPPNHQQQPPRPPNHANAAIQNGANVQRSVTWPAQRPPNPASPNPNVPNVPADGPATFFSARAIKDVPTDGDTASVINNGAKVFDPKAESPSIRKTPGIDHRSSKPLSRSGVHVQPIKRDADGKVPGQVAGSEAGGSGFQGAGGNPTMSQVRQIGAPGGGVGSPLGNRGQYRPLTMKRPAPAPPDANGGTGGGNGNVNAPRNPLTEVSTNGPGAAGVQTGFDAKRQKTA

SEQ ID NO: 24380 - DNA, 2008 bp, Muscodor strobelii
  misc_feature: SGI EST ID NO. CUFF.57548.1
  misc_feature: Variant of the nucleotide sequence at SEQ ID NO 24378
acggcatcccactattgagacactccacacgccgcgacctcacttttgccccaatttggatgcactgagatcttgttctgaaaacatcatatcgtacactccaatgatagaattcttaagcatacaagcgtagacctagtcaccatgcctgcaccaggcgatcaacacagcggcattgccaaccccttcgaggagcctcaagcacgcatgtcagaattcaccgctgctcagatcgccacattgcagtcacggttagagaaacagctcggcccagaatacctatcatctcgttccgggccctcgggacaaaaggtgcactacatagctgccgagaagatcatcgccctcgccaacgaggttttcggcttcaatggttggtcgtctagcatacagaacatccaagtagacttcgtcgacgagaacccccagaccttcaagatctccctcggattatccgtcatcgtccgggtcacgctcaaagacggcacctatcatgaagatatcggctatggtcacatcgaaaactgcaaggggaaagctgcagccttcgagaaggcgaagaaggagggaactaccgatgcattgaaacgcgcactgaggaacttcggcaatgtgctagggaactgcatctacgataaggattaccttgccaaagtaacgaagatcaaagtcggccctaccaagttcgatgaggacaacctgtacagacatgcggaccacgcaaagaaagagacgattatcaaagtcgagcagaaggctgttgcggagtctagtacagaggccggcaatgccagtggtgtgttactgcactccgacgatattgattgggcagacgctgatcttggagatttgtagtcatcagcacgaaaccattggaggaagaagacttcggggacttcgatatggcagacttcggtgtcaccgaagatggacatcccgatgaggttgtgctccctggttctcatgacacgccgcagaatgcggctaatggccgtggtcgacctccgatgaacggaaatagtaacggtcaaaccccccgaccacaaccgccacagtctagaccacctggtccccgacctccgcagactcctaaccaacgccctacgtcacaattccaaggtcggccgcctccgaatcatcagcaacagccccctcgcccgccgaaccacgcaaatgccgccattcagaatggcgcaaatgtgcagcgaagcgtgacatggcccgcccagcgacctcccaaccctgctagtccaaaccctaacgtacccaatgtcccagcagacggaccagcgacttttttctcagcacgcgcaatcaaagacgtacccactgatggcgacacggcgagcgtgatcaacaacggagcgaaggtcttcgatcccaaggccgagagcccaagtattcggaagacaccgggcatagaccataggagctctaagcccctctcgagaagcggtgttcacgtccagcccatcaagcgagacgcagacgggaaagtgccggggcaagtagctggttctgaagctgggggtagtggatttcagggcgcaggcgggaacccgactatgagtcaggttcgacagattggtgcgcccggtggcggtgtagggtctccgttggggaataggggccagtatcgaccgttgactatgaagagacctgctccagccccgcccgacgctaatggtgggaccggtggcgggaatggaaatgtgaacgcgccgagaaatccgctgacggaggtctcgaccaatggacctggtgctgctggtgtgcagacggggtttgatgctaagaggcagaagacggcttgattagggtcgtgcggtgttggagagtttgctttgagactatacaaactgccctgtactgatatatgagcttctttacggcactgagtggcgttaggggggatgagatgggtattatttctgcgatgagcttgtacttcgattaggcttgctgggtgttaggcgtttgatgagataaaattgttgttttactgtca

SEQ ID NO: 24381 - DNA, 921 bp, Muscodor strobelii
  misc_feature: SGI cDNA ID NO. 568312
  misc_feature: Encodes the peptide sequence at SEQ ID NO 24382
atgaacgtcctgctctcgccgcagcattcttttttccatcacccacacgacccaaatcggcgatctcctactcgctccctctcgcccttccacaacatgtcgtcagccaaccgaaagagaaaagccgaggacgatggagatgagatgtcggtatcccccatgagctcgcccgccatccagacccgccagctcgccagaccgtccaagaaagtcagagccaacgatcccaccggccggccactgaccctccctcgtctcctcgaaaccctcgacgccaaccagctccgatccgtcctgcaaaccatctgcgaacgacagcccgagataggagaggaggttgtcaagagtgcaccgcgtccctccgtcgagtgtgcactacaggtcttgggagaatatcaggaccgcctgcgagctgccttcccctacggtggttccacgtccgactacacatactttcgagtcaagcacccactgcttgctctcatcgacgctcttaacgattttactccgcaatacctgccgccgaccgaatcccaggccgctgtctctttacagttcctagacggggctacgaaaattgttcacagtcttccagagtgggagagccatagctatcgccaccacaaagagagcgcttacgaagacatcgctaaggcttgggcgttggtcatcaacgaggcatcaaagaaaggggccggcttcacactacactcggacggatgggacgagactttggccaagcacaaccacgaatccggcggtcgactgcatgccgctatcagcgccatgagtgccaacgtcggatgggttggtgggccaggccatggagcagcacccaacgcccctccccagcagccctctatcctcgatcagctggttgccggcaattatgggtcccctgttcgtgtcggtccatggtag

SEQ ID NO: 24382 - protein, 306 aa, Muscodor strobelii
  misc_feature: SGI Peptide ID NO. 568312
  misc_feature (37)..(260): Pfam Id: PF08559 Pfam Desc: Cut8
  misc_feature (1)..(306): NCBI GI: 145604452 Blast Desc: MGG_08586 [Magnaporthe grisea 70-15] gi|145012446|gb|EDJ97102.1| MGG_08586 [Magnaporthe grisea 70-15]
  misc_feature (1)..(306): NCBI GI: 85100986 Blast Desc: NCU04274 [Neurospora crassa OR74A] gi|12718430|emb|CAC28737.1| related to Sts1 protein [Neurospora crassa] gi|28922602|gb|EAA31828.1| NCU04274 [Neurospora crassa
  misc_feature (1)..(306): NCBI GI: 156043269 Blast Desc: SS1G_10637 [Sclerotinia sclerotiorum 1980] gi|154695025|gb|EDN94763.1| SS1G_10637 [Sclerotinia sclerotiorum 1980]
  misc_feature (1)..(300): NCBI GI: 46137283 Blast Desc: FG10157.1 [Gibberella zeae PH-1]
  misc_feature (37)..(305): NCBI GI: 116197839 Blast Desc: CHGG_07075 [Chaetomium globosum CBS 148.51] gi|88178354|gb|EAQ85822.1| CHGG_07075 [Chaetomium globosum CBS 148.51]
  misc_feature (1)..(298): NCBI GI: 256732159 Blast Desc: [Nectria haematococca mpVI 77-13-4]
  misc_feature (26)..(306): NCBI GI: 171694271 Blast Desc: protein product [Podospora anserina] gi|170947084|emb|CAP73889.1| protein product [Podospora anserina]
  misc_feature (36)..(299): NCBI GI: 154316486 Blast Desc: BC1G_04174 [Botryotinia fuckeliana B05.10] gi|150845974|gb|EDN21167.1| BC1G_04174 [Botryotinia fuckeliana B05.10]
  misc_feature (1)..(306): NCBI GI: 189195838 Blast Desc: nuclear envelope protein Cut8 [Pyrenophora tritici-repentis Pt-1C-BFP] gi|187980136|gb|EDU46762.1| nuclear envelope protein Cut8 [Pyrenophora tritici-repentis Pt-1C-BFP]
  misc_feature (1)..(306): NCBI GI: 242766398 Blast Desc: nuclear envelope protein Cut8 [Talaromyces stipitatus ATCC 10500] gi|218724358|gb|EED23775.1| nuclear envelope protein Cut8 [Talaromyces stipitatus ATCC 10500]
MNVLLSPQHSFFHHPHDPNRRSPTRSLSPFHNMSSANRKRKAEDDGDEMSVSPMSSPAIQTRQLARPSKKVRANDPTGRPLTLPRLLETLDANQLRSVLQTICERQPEIGEEVVKSAPRPSVECALQVLGEYQDRLRAAFPYGGSTSDYTYFRVKHPLLALIDALNDFTPQYLPPTESQAAVSLQFLDGATKIVHSLPEWESHSYRHHKESAYEDIAKAWALVINEASKKGAGFTLHSDGWDETLAKHNHESGGRLHAAISAMSANVGWVGGPGHGAAPNAPPQQPSILDQLVAGNYGSPVRVGPW

SEQ ID NO: 24383 - DNA, 2096 bp, Muscodor strobelii
  misc_feature: SGI EST ID NO. CUFF.57698.1
  misc_feature: Variant of the nucleotide sequence at SEQ ID NO 24381
cacagcgaaaggccagcgcctttggctcgcagcaaatcatccaaaccaacgccatctcgcccattccctcgtgccggcccacgccttctcccctacttagggagcctgtgtcagcgagcagccaaccagccggcatcacgaacgtctagctcacagctgggccgtccgcccccgagcagatacagccagtcacaagcatcatcgttaccgagagctgctatcttcttttttctcctcctccgctgtctccaacacgacgcagtacacacaccacatacaccacacaccccagcgcccaaccaagctagccagccaaccactcttggacccccccattccacacacgtaccacaacacacgcacgcacaccacctgaccgcactttcgactgaacaacgtcgctctctgtttctccctcacctcgtcatccaacccgacacacatcccgtcatcgtcgtcgttgtcgactccgaccgagtaatcctgcgtccgcaaacgctgcatcccccgacttttgcctcttcgccgtccgtcaatctcaaatcatcgccatcagcaggggaggcaaaggcaaaggcaaagcaccgtactggaaggatgaacgtcctgctctcgccgcagcattcttttttccatcacccacacgacccaaatcggcgatctcctactcgctccctctcgcccttccacaacatgtcgtcagccaaccgaaagagaaaagccgaggacgatggagatgagatgtcggtatcccccatgagctcgcccgccatccagacccgccagctcgccagaccgtccaagaaagtcagagccaacgatcccaccggccggccactgaccctccctcgtctcctcgaaaccctcgacgccaaccagctccgatccgtcctgcaaaccatctgcgaacgacagcccgagataggagaggaggttgtcaagagtgcaccgcgtccctccgtcgagtgtgcactacaggtcttgggagaatatcaggaccgcctgcgagctgccttcccctacggtggttccacgtccgactacacatactttcgagtcaagcacccactgcttgctctcatcgacgctcttaacgattttactccgcaatacctgccgccgaccgaatcccaggccgctgtctctttacagttcctagacggggctacgaaaattgttcacagtcttccagagtgggagagccatagctatcgccaccacaaagagagcgcttacgaagacatcgctaaggcttgggcgttggtcatcaacgaggcatcaaagaaaggggccggcttcacactacactcggacggatgggacgagactttggccaagcacaaccacgaatccggcggtcgactgcatgccgctatcagcgccatgagtgccaacgtcggatgggttggtgggccaggccatggagcagcacccaacgcccctccccagcagccctctatcctcgatcagctggttgccggcaattatgggtcccctgttcgtgtcggtccatggtagagacatgtcaaactttgttacagaaagaaggattcctcaaaaagatgatattgctgtagatggcatgagagagacactgcacacttggcgcgcatcggcgagcagtttagctcgagggtaatgcatcggcgtaaggttttgcattcacgcattttacttctgtcacggcggtaatccacttgacgttgtcacggagcatagatttgggcacggagttatcactggtgtggagtttccctggcatcacactgtttctgtccgatgttcatcccggactcgatatcccccttcccatacctctgaaattacacacgtcgccggttggatgtgaggagaaggaagagacggcaaatcatgtatgcgtagcattaaacaatacatatgagcacattgctacacctacctgctaccataacgcacactgaggaggcttgtgactcgctctgctttgaacaatactactacacgactagaaaattatcaagaaaagcactaataggaaacacacaatctaatatcactacatcttcctcacagtaacaatcgaacgatctcattaattttgatcttggaaatta

SEQ ID NO: 24384 - DNA, 1167 bp, Muscodor strobelii
  misc_feature: SGI cDNA ID NO. 568313
  misc_feature: Elevated expression when VOC is produced
  misc_feature: Encodes the peptide sequence at SEQ ID NO 24385
aacattgtcggcgctggtggtaatttgacttgtcaacaagtgggcgacccggccggcaagtataaaggacatgagaccttcatgcaggcttgcaatcaagcgtggcacaaactcccacaagctaagaaggatcaactcaagggccacgttttccttggaccccaaggcaatgttaagcgtattggcccgcccaaggagttccagcccttggaacaatttgttcgaacttttgccaatggtcggacttatattggtgttggcgcttgggggcctagcgcaggaaatcccgccgacaatgagctgagcaaggcaggtgtcggtagtaaagacatcttgatcatctacagcgatggtaacgccgctcccgacccatccaaacccttcgtaagccagatagtccaggggttcgccaccttctcggccgaagctgaggtaaaggctgaggcaatcctagcagaaacccaagcggaagtcacagaaggagtcacagcagagcaaagtgaagcaagcaatggcgagaatcaggagcaagtcgtgtttgcagcggaatccgttgtctcggctatcgctgctaatgtggcactgaagccaggtattcaacttaccaaccagtcaccacgcaagaacacatactacttctacgaaaattattggaacggtgatggcaccggcggtgctaacttcgataacccactgaggcatatcgaggtcgcacccaacgcgaccgtgcacatcgacctacctctgagcttcaagggccgtgtacagcgtggcacccacctccccgcaacttggggcgaattccaagtgaaagcctccaacgacggcaaagctcatggtgatatctcgctacagcaaggttgtgatggagctgcgaccgtagctgcaactgatgggaccggtgtttctaatggtttcgtcaaagatatcgtcaagggtgctccggcgactgcgatccagaagaaacctgatggtgaacgtgcgctcgctcatactgagccaaactggaacggaccaggtaaccaagctgcgattgattatgagtatgcgcagctagggcatacaaaggcttacatcaagggcggtagtggcattcctgatgttgcgagcaagaataactgtctccacttcaccttttatgtcccttgggtatatcgggtgtgttag

SEQ ID NO: 24385 - protein, 388 aa, Muscodor strobelii
  misc_feature: SGI Peptide ID NO. 568313
  misc_feature (197)..(380): NCBI GI: 171680731 Blast Desc: protein product [Podospora anserina] gi|170939993|emb|CAP65219.1| protein product [Podospora anserina]
  misc_feature (149)..(382): NCBI GI: 212530368 Blast Desc: PMAA_036190 [Penicillium marneffei ATCC 18224] gi|210074739|gb|EEA28826.1| PMAA_036190 [Penicillium marneffei ATCC 18224]
  misc_feature: Useful for introducing or modulating the production of volatile compounds
NIVGAGGNLTCQQVGDPAGKYKGHETFMQACNQAWHKLPQAKKDQLKGHVFLGPQGNVKRIGPPKEFQPLEQFVRTFANGRTYIGVGAWGPSAGNPADNELSKAGVGSKDILIIYSDGNAAPDPSKPFVSQIVQGFATFSAEAEVKAEAILAETQAEVTEGVTAEQSEASNGENQEQVVFAAESVVSAIAANVALKPGIQLTNQSPRKNTYYFYENYWNGDGTGGANFDNPLRHIEVAPNATVHIDLPLSFKGRVQRGTHLPATWGEFQVKASNDGKAHGDISLQQGCDGAATVAATDGTGVSNGFVKDIVKGAPATAIQKKPDGERALAHTEPNWNGPGNQAAIDYEYAQLGHTKAYIKGGSGIPDVASKNNCLHFTFYVPWVYRVC

SEQ ID NO: 24386 - DNA, 1297 bp, Muscodor strobelii
  misc_feature: SGI EST ID NO. CUFF.57468.0
  misc_feature: Variant of the nucleotide sequence at SEQ ID NO 24384
tgggcgacccggccggcaagtataaaggacatgagaccttcatgcaggcttgcaatcaagcgtggcacaaactcccacaagctaagaaggatcaactcaagggccacgttttccttggaccccaaggcaatgttaagcgtattggcccgcccaaggagttccagcccttggaacaatttgttcgaacttttgccaatggtcggacttatattggtgttggcgcttgggggcctagcgcaggaaatcccgccgacaatgagctgagcaaggcaggtgtcggtagtaaagacatcttgatcatctacagcgatggtaacgccgctcccgacccatccaaacccttcgtaagccagatagtccaggggttcgccaccttctcggccgaagctgaggtaaaggctgaggcaatcctagcagaaacccaagcggaagtcacagaaggagtcacagcagagcaaagtgaagcaagcaatggcgagaatcaggagcaagtcgtgtttgcagcggaatccgttgtctcggctatcgctgctaatgtggcactgaagccaggtattcaacttaccaaccagtcaccacgcaagaacacatactacttctacgaaaattattggaacggtgatggcaccggcggtgctaacttcgataacccactgaggcatatcgaggtcgcacccaacgcgaccgtgcacatcgacctacctctgagcttcaagggccgtgtacagcgtggcacccacctccccgcaacttggggcgaattccaagtgaaagcctccaacgacggcaaagctcatggtgatatctcgctacagcaaggttgtgatggagctgcgaccgtagctgcaactgatgggaccggtgtttctaatggtttcgtcaaagatatcgtcaagggtgctccggcgactgcgatccagaagaaacctgatggtgaacgtgcgctcgctcatactgagccaaactggaacggaccaggtaaccaagctgcgattgattatgagtatgcgcagctagggcatacaaaggcttacatcaagggcggtagtggcattcctgatgttgcgagcaagaataactgtctccacttcaccttttatgtcccttgggtatatcgggtgtgttagttggaggtttagctagctcgtgcagcgagccgctggcgacgtgggaagtacgggagatatagttagggtatgggggcatgtggtgggaatagaagagtaggggcttgttcattggattacacagagcagtcgttcattaatacctatgtcgaataaacacgtattcggaa

SEQ ID NO: 24387 - DNA, 1296 bp, Muscodor strobelii
  misc_feature: SGI cDNA ID NO. 568314
  misc_feature: Encodes the peptide sequence at SEQ ID NO 24388
atgtccgcattggaccaaacattctggctgttgcagatccagtctgggtcgaacgaattcatgggccccgatcgaggttttataaagctgaaagcaagcttttgtgctattacatacgaggccgagcatggcgttctcagtctgcaccagatgcgggaccgcgcgatgcatgatagacgacggcgtcatgggtgggacaaagcattccaagtcaagtcgttgcgtgactatgacgctcgcattgtcaagtacaccgacatcctattgcgaaagcttggcgagtcggaggggagagcagtcgatgcgacgaaatggtttaactacttttcgtatgatatcatgggcgacctcgctttcgcacgttccttcaatgctcttgaagatggcgactacgagtcagaatcgcattattacattaagcttctacactcgaccaacctcaaggccgtctcgctcttgatggtaccatgggtggtccggatagtcacagcacttttaccagatcgttacaatcctcgagcgccgttcattaaatactgcaaggactgcatggatgaccgccgattacgcgagccggagaagccagacgttatctctcatatccttgaagctggtccattcttcccgcagacctctgccgcttcacgacgagcagaagaaggactcttggttggcgactcgcgactgctcgcgggaagcgacactacagccacaacgttgacgtatctcttttatgagctctgtcgcgatgcgtcccttgtgcagcgattgcgggaggaactcaaggtgtacgatattaaagacggacccaacgaagagctcggcattgtcgggttgcagaatctacccttccttaatgctgtcatcaatgagactcttcgattgcaccctccagtccctggcggtgtgcctcgcgatgttccaccagaaggcgtggagatgaacggtatattcatccctggtggtactagaattgtcgggccgatctacactatccatcgatctaagcgagccttcctccagcccaatgatttcgtgccggagaggtggactagcaagccggaaatgatcctcgacaagaatgcgttcttcccattctcttcagggcggtactcttgtatcggtaaacagctggccttgaacgaacttcggtctgtgatcaccaagctggtcctgagatttgatatttcatttgcaaagggggagacaggtcgtgcgttgctcgaggactctaaggacgtatttaccatggtcaatatgcccttgtatttgtgcttcagagatcggaaatattaa

SEQ ID NO: 24388 - protein, 431 aa, Muscodor strobelii
  misc_feature: SGI Peptide ID NO. 568314
  misc_feature (1)..(426): Pfam Id: PF00067 Pfam Desc: Cytochrome P450
  misc_feature (229)..(426): Pfam Id: PF00067 Pfam Desc: Cytochrome P450
  misc_feature (79)..(133): Pfam Id: PF00067 Pfam Desc: Cytochrome P450
  misc_feature (47)..(430): NCBI GI: 156051546 Blast Desc: SS1G_07180 [Sclerotinia sclerotiorum 1980] gi|154704958|gb|EDO04697.1| SS1G_07180 [Sclerotinia sclerotiorum 1980]
  misc_feature (39)..(430): NCBI GI: 261354521 Blast Desc: benzoate 4-monooxygenase cytochrome P450 [Verticillium albo-atrum VaMs.102]
  misc_feature (46)..(429): NCBI GI: 238502809 Blast Desc: cytochrome P450 oxidoreductase, [Aspergillus flavus NRRL3357] gi|220691448|gb|EED47796.1| cytochrome P450 oxidoreductase, [Aspergillus flavus NRRL3357]
  misc_feature (38)..(429): NCBI GI: 242777036 Blast Desc: cytochrome P450, [Talaromyces stipitatus ATCC 10500] gi|218722570|gb|EED21988.1| cytochrome P450, [Talaromyces stipitatus ATCC 10500]
  misc_feature (38)..(430): NCBI GI: 67516649 Blast Desc: AN0606.2 [Aspergillus nidulans FGSC A4] gi|40747549|gb|EAA66705.1| AN0606.2 [Aspergillus nidulans FGSC A4] gi|259489127|tpe|CBF89142.1| TPA: (Eurofung) [Aspergillus A4]
  misc_feature (38)..(429): NCBI GI: 212532971 Blast Desc: cytochrome P450, [Penicillium marneffei ATCC 18224] gi|210072006|gb|EEA26095.1| cytochrome P450, [Penicillium marneffei ATCC 18224]
  misc_feature (39)..(430): NCBI GI: 145258880 Blast Desc: An04g08440 [Aspergillus niger] gi|134074816|emb|CAK38931.1| protein product [Aspergillus niger]
  misc_feature (39)..(429): NCBI GI: 242810525 Blast Desc: cytochrome P450, [Talaromyces stipitatus ATCC 10500] gi|218716223|gb|EED15645.1| cytochrome P450, [Talaromyces stipitatus ATCC 10500]
  misc_feature (48)..(426): NCBI GI: 116203111 Blast Desc: CHGG_09440 [Chaetomium globosum CBS 148.51] gi|88177958|gb|EAQ85426.1| CHGG_09440 [Chaetomium globosum CBS 148.51]
  misc_feature (39)..(426): NCBI GI: 119189629 Blast Desc: conserved [Coccidioides immitis RS]
  misc_feature (68)..(400): SWISSPROT Homolog: EC 1.14.14.1 Unspecific monooxygenase
MSALDQTFWLLQIQSGSNEFMGPDRGFIKLKASFCAITYEAEHGVLSLHQMRDRAMHDRRRRHGWDKAFQVKSLRDYDARIVKYTDILLRKLGESEGRAVDATKWFNYFSYDIMGDLAFARSFNALEDGDYESESHYYIKLLHSTNLKAVSLLMVPWVVRIVTALLPDRYNPRAPFIKYCKDCMDDRRLREPEKPDVISHILEAGPFFPQTSAASRRAEEGLLVGDSRLLAGSDTTATTLTYLFYELCRDASLVQRLREELKVYDIKDGPNEELGIVGLQNLPFLNAVINETLRLHPPVPGGVPRDVPPEGVEMNGIFIPGGTRIVGPIYTIHRSKRAFLQPNDFVPERWTSKPEMILDKNAFFPFSSGRYSCIGKQLALNELRSVITKLVLRFDISFAKGETGRALLEDSKDVFTMVNMPLYLCFRDRKY

SEQ ID NO: 24389 - DNA, 258 bp, Muscodor strobelii
  misc_feature: SGI cDNA ID NO. 568315
  misc_feature: Encodes the peptide sequence at SEQ ID NO 24390
atggccgacaaccacacctacaaattcaacgtcaccatgagctgcggcggctgctctggcgccatcaaccgtgtgctaggcaaactcgatggcgttgagagctacgacgtatccctcgacaagcaagaggccgttgtagtagcctcgccaggcttgtcatacgacaccgtcctccgtaccatcaagaagaccggcaagaaggtcaattccggagaggccgatggcgagtcaaagagcatcgagatcactgatgcatag

SEQ ID NO: 24390 - protein, 85 aa, Muscodor strobelii
  misc_feature: SGI Peptide ID NO. 568315
  misc_feature (8)..(70): Pfam Id: PF00403 Pfam Desc: Heavy-metal-associated domain
  misc_feature (2)..(82): NCBI GI: 116199885 Blast Desc: CHGG_08098 [Chaetomium globosum CBS 148.51] gi|88179377|gb|EAQ86845.1| CHGG_08098 [Chaetomium globosum CBS 148.51]
  misc_feature (5)..(80): NCBI GI: 121702207 Blast Desc: heavy metal ion transporter, [Aspergillus clavatus NRRL 1] gi|119397511|gb|EAW07942.1| heavy metal ion transporter, [Aspergillus clavatus NRRL 1]
  misc_feature (5)..(80): NCBI GI: 225678244 Blast Desc: conserved [Paracoccidioides brasiliensis Pb03] gi|226280437|gb|EEH36003.1| PAAG_00326 [Paracoccidioides brasiliensis Pb01] gi|226290718|gb|EEH46202.1| PADG_02352 Pb18]
  misc_feature (1)..(76): NCBI GI: 154288310 Blast Desc: [Ajellomyces capsulatus NAm1] gi|150408591|gb|EDN04132.1| [Ajellomyces capsulatus NAm1]
  misc_feature (1)..(85): NCBI GI: 261357050 Blast Desc: conserved [Verticillium albo-atrum VaMs.102]
  misc_feature (4)..(80): NCBI GI: 189196794 Blast Desc: conserved [Pyrenophora tritici-repentis Pt-1C-BFP] gi|187980614|gb|EDU47240.1| conserved [Pyrenophora tritici-repentis Pt-1C-BFP]
  misc_feature (1)..(80): NCBI GI: 145239017 Blast Desc: An08g00370 [Aspergillus niger] gi|134076658|emb|CAK45189.1| protein product [Aspergillus niger]
  misc_feature (1)..(85): NCBI GI: 256729099 Blast Desc: [Nectria haematococca mpVI 77-13-4]
  misc_feature (5)..(80): NCBI GI: 119496207 Blast Desc: heavy metal ion transporter, [Neosartorya fischeri NRRL 181] gi|119413039|gb|EAW22980.1| heavy metal ion transporter, [Neosartorya fischeri NRRL 181]
  misc_feature (1)..(80): NCBI GI: 242786132 Blast Desc: iron/copper transporter Atx1, [Talaromyces stipitatus ATCC 10500] gi|218720890|gb|EED20309.1| iron/copper transporter Atx1, [Talaromyces stipitatus ATCC 10500]
MADNHTYKFNVTMSCGGCSGAINRVLGKLDGVESYDVSLDKQEAVVVASPGLSYDTVLRTIKKTGKKVNSGEADGESKSIEITDA

SEQ ID NO: 24391 - DNA, 1100 bp, Muscodor strobelii
  misc_feature: SGI EST ID NO. CUFF.57480.0
  misc_feature: Variant of the nucleotide sequence at SEQ ID NO 24389
gcaagccattggccattattaataccaccgaacctcgacctccgacgtctcctttgaccatctgtcacttttataaagcccgcctctgtccctgcacgaccaagacctagaccactgcttcctagatcgatactgtccgcgcacactctacctgtctctatttacctcgctacaaactcatcacattcacatcgtcaccatggccgacaaccacacctacaaattcaacgtcaccatgagctgcggcggctgctctggcgccatcaaccgtgtgctaggcaaactcgatggcgttgagagctacgacgtatccctcgacaagcaagaggccgttgtagtagcctcgccaggcttgtcatacgacaccgtcctccgtaccatcaagaagaccggcaagaaggtcaattccggagaggccgatggcgagtcaaagagcatcgagatcactgatgcatagagagatctaccgtctggatcatgtctacgcattaggaaccgattcgcgtggatgtgtttcgagattttgagaacgttgccatacggaggatgacgaccgatatagtgctgtttatttgatgtcttgcagagtttggagtttgggctttgggagactgggtttcaatggatattccatcattacatgcgttatgcctcatttcgaaccagatgtgtgttttgcatgctagtgacgatgctgccgaagtctaccgaacgtctgactgctttctgctaatcttcgatctcgacgaatcgcatatgtcttgttgatcgtattcgcccacaactcagtggagcgagacgaaaccaccggatatttaatattgagcgtggtatgatttatatgaagaacagatcgtcgagctctagccttgaggtaactctacacatcctaccaaacatctgaactctaccgtcagagtctactcaacgaatgacaacgtgcgcagtcaaagaaacgaattagccgataggtacattacacagacacttttgtattctcgtttagtctacgaaagacaaatcattgcacagtttaaagcaagtcactggctctcgaacccaaccaggttgccgatctcagaagccaagggtcagcccag

SEQ ID NO: 24392 - DNA, 3669 bp, Muscodor strobelii
  misc_feature: SGI cDNA ID NO. 568316
  misc_feature: Reduced expression when VOC is produced
  misc_feature: Encodes the peptide sequence at SEQ ID NO 24393
atgttgaccacaacgcacgtcgatcgtcgtcccgtgtggcagcctttagggacgcgcccggctgttgacctggctcagtcgctaccactaggtatgcctgccgacattctgatgctgggatgtggcgacgttcgcaacctcctcttcacaatccacaacggcagtgctgactctttagctcgtaacattctactcctatcactcatcatcgacgaggcagatgacgaaagccccaacagcgacaacctctgggaaatctatcataatgcctacatcaataaggagtcttttgatcttattgcagctcagagcaagaagcttctgtatctctccgccagcatggatacctggcaacagggaaaatatgggtcttcccttcgcatctgcgactcatcttcgctccgtgaacttggcgtgatgtggaaatattatgccaactcatgtgagggagccaagggagataacagtcttcgtgaggcacacaagatcgtcatcgcgtgtgccaactttaggccactccctttccagcagaccgagtacgatgcagcagcccctgcccaggagaactgcaaagatgacatcaagtggtttcgagagcatttcttcgagcatggaacaacagagctagatgcggaaacccgatcaaggtctcgcaatcccaatgttaccttccacactgtcaacgacggcggcgccatgaattattacaccaatcctgtgcgttcctatcatctccgggttgacgtgccactcgaatccgacgatgacgccttttctgccttgccccgacgccaaaagtatctcacgatcgcccgcaacgagtttaacgactgggtgacatcgtataagaagcacttccgcaaagatctctcattacgtttcttccttggcgatgcgatctctctttcctatactcttcagcacaaacgttcgacaggtcaaaatacggccaacttttatcgcgaccggcaggggttgcgtccgctggtcttggatggtcttgactataatactgacacggctccgcttgatttcgatgtcatagatacatctgatctctgcgatcatatcggcccgctcactttattgatagcgactgcgcctctacttcgcaatcgcccctccgccgtcctgtatacggagacattttcccgagatcgcttcaatggtcaacaagctctagaacagatcttgtgcggcaacacaccaaccgttgccacgcttttggatcttttccccgtcgaatattggaccaatacctcgccaatttcgctaggagattcgatgatcgatgaatggccgcagagagaagcacaaaggcccagcggaggagatggtaaaggattgcctcgattaccacatcttcaagtgtcttggaaacgctctccagcgaccatgtcggttacggagcaatatacccagtacactccgctccactttgaccctaaaccgcttgcgaacatgatccacggagtctattgctatatgtttcctggcgatgacattaatagaactgcggcaaatgtcaatcgcgagactacccgcccactcgatctcttgggctaccagcgctccagctttgcagcctttctgcatctagtaaaaacgcgggttgtcacggattgggatgccatgatgagacatacgctcgacctcatcaagaatcccgtaaatccgctgataggaatgacagtgacatacatccaagagctctatggatatcttcatgtcttcggtgttttcactaccgatctggaggcagagtggaataagatcaccgaccagatcagccacactacatcgactcaaccagcttccgcactgccgcccgctagcgacgaaagcccgctgcgcaaatggaaaagtatcccgtcagttgtttgtgtggttttagagatcccacgaggagccatcgcaagcctagtcgagcaacgactgtctcaggacgtgacgatgagttgtcgcatatctcgttctggaagccacataccgtccgagaatcgacgtgactcgttttcagcttgtcagtgggcctttggtgatctcacaacgagcggatcgagatccagcgattcttaccaaatccatctcgatgaacaagatgctggcttttggggagatcgttccatgattgcggtcttctatgtgccctcggctttgctcatagaacagccacataaagccacaatctcgtgtctgctcaaccgaatgcctacgaatatggggtccttcggtactactttacgcactttcgagagtttcttcaacacgtctctcacaaacccggcagttcatatcacaaagttcggtccgaacctgacgggactacctatcatcaccggaatccccacgaagccacccagccgtagttgctcagcggacgggatagatgctttcttggtagctgacgtagatgcggtttcgagaaatctcgtgaatttcacggctcgaatcaatatcacctcaagcgatctgggtcaggcgctcctaagtggatgcgaagtcaaagaaaccgccgtatcaccttgcgaggctgtcgtttcaattggcaggaagacttccgtatctctatttttcccaacctttgtatactcaacagagcgcaagctacgtattgctcgaaaatcgtcctggattgagctgatcgtaaaagtggctggtttttgtcattggatgcagtacgctgagtgtgcatataccatgtcattcgaatctggcaacccgataaactggactctgccgtatattaacttggacagatgtcctaagatcgcagttccggctggactgccatggctccagaagcatagtctgcgtggcttttcgacgcgtgagattgccattgtagcaaaggagagaaaggcgtggacagcaggagaggaactggctgttaaacacaaacaagccattatgcgtatgctgctaagttttgccggagggccgtcggtctcacaaaccaagcaatttggctatttcagcccaccggaagctggtaactcggacggatgccgcctattaattcgagcgagcgccttgcgcctagacttggccaatcgtacggtcgcactcgactgcgctgtcatcccaaaccaacccgggatgatcgctggcttgcctcatttattgaataagatggatcgtcaatccgccatcgatcgtattccatttcaccctgcggaactatttccctggaaacatgggttacccacgtacgtagaacgttgtcgcagctgggaccacaaggaaaactgcgactacaagatggccgattcgtttccgattgtgcctgaggtgtgggcaaacattctctgcacatgtggaaaaggaattttccctccaaacttcttcgatggggattcggtctgggagaattatctctccaagcatgccacacgcgcggttctcgaagtgcctttttacgcgccctacatgaacgggccggacagcctcgaccccatcgaggagggatgttggatgccgtcgcaggcgttcgagaatgcgaatgtttgcttcacttgcagaaaggcgcgccaggcgaatggagacgagctgatgtcgtgtggaggttgtaaacgagccaagtactgttcccgtgaatgtcagaagaagcactggaacgctcacaagttggtctgcaaggagaatcgttggttaaatactggacagtga

SEQ ID NO: 24393 - protein, 1222 aa, Muscodor strobelii
  misc_feature: SGI Peptide ID NO. 568316
  misc_feature (1170)..(1212): Pfam Id: PF01753 Pfam Desc: MYND finger
  misc_feature (11)..(1212): NCBI GI: 240282176 Blast Desc: conserved [Ajellomyces capsulatus H143]
  misc_feature (11)..(1212): NCBI GI: 225559243 Blast Desc: conserved [Ajellomyces capsulatus G186AR]
  misc_feature (1)..(1212): NCBI GI: 239614172 Blast Desc: conserved [Ajellomyces dermatitidis ER-3]
  misc_feature (1)..(1212): NCBI GI: 261204581 Blast Desc: conserved [Ajellomyces dermatitidis SLH14081] gi|239587289|gb|EEQ69932.1| conserved [Ajellomyces dermatitidis SLH14081]
  misc_feature (28)..(1212): NCBI GI: 225679992 Blast Desc: conserved [Paracoccidioides brasiliensis Pb03]
  misc_feature (1)..(1220): NCBI GI: 240108142 Blast Desc: MYND finger family protein [Coccidioides posadasii C735 delta SOWgp]
  misc_feature (1)..(1215): NCBI GI: 256732466 Blast Desc: NECHADRAFT_122473 [Nectria haematococca mpVI 77-13-4]
  misc_feature (1)..(1219): NCBI GI: 238845315 Blast Desc: conserved [Microsporum canis CBS 113480]
  misc_feature (13)..(1190): NCBI GI: 226286307 Blast Desc: conserved [Paracoccidioides brasiliensis Pb01]
  misc_feature (1)..(1213): NCBI GI: 46123869 Blast Desc: FG06312.1 [Gibberella zeae PH-1]
  misc_feature: Useful for introducing or modulating the production of volatile compounds
MLTTTHVDRRPVWQPLGTRPAVDLAQSLPLGMPADILMLGCGDVRNLLFTIHNGSADSLARNILLLSLIIDEADDESPNSDNLWEIYHNAYINKESFDLIAAQSKKLLYLSASMDTWQQGKYGSSLRICDSSSLRELGVMWKYYANSCEGAKGDNSLREAHKIVIACANFRPLPFQQTEYDAAAPAQENCKDDIKWFREHFFEHGTTELDAETRSRSRNPNVTFHTVNDGGAMNYYTNPVRSYHLRVDVPLESDDDAFSALPRRQKYLTIARNEFNDWVTSYKKHFRKDLSLRFFLGDAISLSYTLQHKRSTGQNTANFYRDRQGLRPLVLDGLDYNTDTAPLDFDVIDTSDLCDHIGPLTLLIATAPLLRNRPSAVLYTETFSRDRFNGQQALEQILCGNTPTVATLLDLFPVEYWTNTSPISLGDSMIDEWPQREAQRPSGGDGKGLPRLPHLQVSWKRSPATMSVTEQYTQYTPLHFDPKPLANMIHGVYCYMFPGDDINRTAANVNRETTRPLDLLGYQRSSFAAFLHLVKTRVVTDWDAMMRHTLDLIKNPVNPLIGMTVTYIQELYGYLHVFGVFTTDLEAEWNKITDQISHTTSTQPASALPPASDESPLRKWKSIPSVVCVVLEIPRGAIASLVEQRLSQDVTMSCRISRSGSHIPSENRRDSFSACQWAFGDLTTSGSRSSDSYQIHLDEQDAGFWGDRSMIAVFYVPSALLIEQPHKATISCLLNRMPTNMGSFGTTLRTFESFFNTSLTNPAVHITKFGPNLTGLPIITGIPTKPPSRSCSADGIDAFLVADVDAVSRNLVNFTARINITSSDLGQALLSGCEVKETAVSPCEAVVSIGRKTSVSLFFPTFVYSTERKLRIARKSSWIELIVKVAGFCHWMQYAECAYTMSFESGNPINWTLPYINLDRCPKIAVPAGLPWLQKHSLRGFSTREIAIVAKERKAWTAGEELAVKHKQAIMRMLLSFAGGPSVSQTKQFGYFSPPEAGNSDGCRLLIRASALRLDLANRTVALDCAVIPNQPGMIAGLPHLLNKMDRQSAIDRIPFHPAELFPWKHGLPTYVERCRSWDHKENCDYKMADSFPIVPEVWANILCTCGKGIFPPNFFDGDSVWENYLSKHATRAVLEVPFYAPYMNGPDSLDPIEEGCWMPSQAFENANVCFTCRKARQANGDELMSCGGCKRAKYCSRECQKKHWNAHKLVCKENRWLNTGQ

SEQ ID NO: 24394 - DNA, 1632 bp, Muscodor strobelii
  misc_feature: SGI cDNA ID NO. 568317
  misc_feature: Encodes the peptide sequence at SEQ ID NO 24395
atggcacgtcttaactttacgagctctacaacccttttgctcatcgccgcaaacataggtctctcatcgtgctctgcaaagagctgtgctgacttcattaacaaggtctccgtaccaaatgttaccgtcatcgccgggagccatgaactacagggcacggtattaccgctacctgggaccgtcgagtcttgtggtgggcccgacctcacagccgacatcacgtccgatctctgccgtgtagttctggttgtggaaaccagctcttcaagcgctgtgcaaattgaggcctggcttccggacatggaaacatggaatggacggttgctcggtacagggaatggtggtgaaggtggatgcatcgactacccaacaatccagaatggcgctcagctaggatttgcggctttcggcagcaacgcgggccataatggctcaacgggatacgactttttcctcgaccagccggaagtcatcgaggatttcggacaccgggctgtgcatattgaggcagtaatcgggaaggagatcgtgcttcaatactacggtgctgcaccctcgaggagttactatgctggctgcagtacgggtgggcgacaagggtttcaaaatgcctacctatatccaaatgacttcgacggctttgtactcggcagccctggtatcgattggttgcacatcgtctcatcaaagggaatccttgcccgtcggcttggttggccggacctcgaggcacacgagtatgttcgcccagagcagtggcccgccattgtagatgcacagatcaaagctttggatcccctagatggaatcacgaatgggattatcgatgagccaaccaagctgagatttgatcctgaaacattagtatgtggtactggtgtgctcaacgactcagtgtgcctcaccccacagcaggttgcctctgtaaggaaagcatatgagccaattgccgactcgacaggaaagatcgtctatccagctttcgagcttggatctgtcacggacgttttctctgataaccagaaggatggcactgctcaactgagctacactatcttgcaagacttctggcgtggtgccgtatacaatgacagcacctggacacctgtgaacttcaccgaaagggacatggatttcgcgatcaagatcaatcctggtggtgtaaacgctggagagacagatctatctgagttctatggaagaggggggcgaattctcagctatcacggccggaacgatgagactgtcacgtcggcattatctgaacgattctacagcggtgttcaaagctcgacaaatctgacactggcagagatgcaatccttctaccgtctcttcttcctcccagggatgcatcattgttctggcggtcttggtgcttggagtatcggaaacgcgcagcaatttccctgggatcaggccctattagaccccagacataacgtcctgtcggctctaatgaggtgggtcgaggaaaaccaagcgccggatacaatcattggaaccaaataccagggtgacatcgttggcggcgaaatcgtcgcccagagggcatattgcccgtatccacgatcaagtacatgggatagaacgaatgacgaaaagctggcgagtagctggcaatgtacttag

SEQ ID NO: 24395 - protein, 543 aa, Muscodor strobelii
  misc_feature: SGI Peptide ID NO. 568317
  misc_feature (78)..(543): Pfam Id: PF07519 Pfam Desc: Tannase and feruloyl esterase
  misc_feature (78)..(335): Pfam Id: PF07519 Pfam Desc: Tannase and feruloyl esterase
  misc_feature (390)..(542): Pfam Id: PF07519 Pfam Desc: Tannase and feruloyl esterase
  misc_feature (10)..(526): NCBI GI: 46114290 Blast Desc: FG02987.1 [Gibberella zeae PH-1]
  misc_feature (37)..(523): NCBI GI: 189200795 Blast Desc: feruloyl esterase B precursor [Pyrenophora tritici-repentis Pt-1C-BFP] gi|187983833|gb|EDU49321.1| feruloyl esterase B precursor [Pyrenophora tritici-repentis Pt-1C-BFP]
  misc_feature (14)..(543): NCBI GI: 39941236 Blast Desc: MGG_05529 [Magnaporthe grisea 70-15] gi|145022202|gb|EDK06222.1| MGG_05529 [Magnaporthe grisea 70-15]
  misc_feature (76)..(542): NCBI GI: 169594814 Blast Desc: SNOG_00136 [Phaeosphaeria nodorum SN15] gi|160700945|gb|EAT91631.2| SNOG_00136 [Phaeosphaeria nodorum SN15]
  misc_feature (27)..(542): NCBI GI: 256724592 Blast Desc: NECHADRAFT_54635 [Nectria haematococca mpVI 77-13-4]
  misc_feature (3)..(543): NCBI GI: 189197305 Blast Desc: feruloyl esterase B precursor [Pyrenophora tritici-repentis Pt-1C-BFP] gi|187980938|gb|EDU47564.1| feruloyl esterase B precursor [Pyrenophora tritici-repentis Pt-1C-BFP]
  misc_feature (29)..(542): NCBI GI: 169616296 Blast Desc: SNOG_11318 [Phaeosphaeria nodorum SN15] gi|111059906|gb|EAT81026.1| SNOG_11318 [Phaeosphaeria nodorum SN15]
  misc_feature (1)..(542): NCBI GI: 255932209 Blast Desc: Pc12g08300 [Penicillium chrysogenum Wisconsin 54-1255] gi|74271753|dbj|BAE44304.1| ferulic acid esterase [Penicillium chrysogenum] gi|211582280|emb|CAP80457.1| Pc12g08300 [Penicillium
  misc_feature (28)..(542): NCBI GI: 169769242 Blast Desc: [Aspergillus oryzae RIB40] gi|83766949|dbj|BAE57089.1| protein product [Aspergillus oryzae]
  misc_feature (28)..(542): NCBI GI: 238501692 Blast Desc: feruloyl esterase, [Aspergillus flavus NRRL3357] gi|220692317|gb|EED48664.1| feruloyl esterase, [Aspergillus flavus NRRL3357]
  misc_feature (29)..(542): SWISSPROT Homolog: EC 3.1.1.73 Feruloyl esterase
MARLNFTSSTTLLLIAANIGLSSCSAKSCADFINKVSVPNVTVIAGSHELQGTVLPLPGTVESCGGPDLTADITSDLCRVVLVVETSSSSAVQIEAWLPDMETWNGRLLGTGNGGEGGCIDYPTIQNGAQLGFAAFGSNAGHNGSTGYDFFLDQPEVIEDFGHRAVHIEAVIGKEIVLQYYGAAPSRSYYAGCSTGGRQGFQNAYLYPNDFDGFVLGSPGIDWLHIVSSKGILARRLGWPDLEAHEYVRPEQWPAIVDAQIKALDPLDGITNGIIDEPTKLRFDPETLVCGTGVLNDSVCLTPQQVASVRKAYEPIADSTGKIVYPAFELGSVTDVFSDNQKDGTAQLSYTILQDFWRGAVYNDSTWTPVNFTERDMDFAIKINPGGVNAGETDLSEFYGRGGRILSYHGRNDETVTSALSERFYSGVQSSTNLTLAEMQSFYRLFFLPGMHHCSGGLGAWSIGNAQQFPWDQALLDPRHNVLSALMRWVEENQAPDTIIGTKYQGDIVGGEIVAQRAYCPYPRSSTWDRTNDEKLASSWQCT

SEQ ID NO: 24396 - DNA, 2085 bp, Muscodor strobelii
  misc_feature: SGI EST ID NO. CUFF.57496.1
  misc_feature: Variant of the nucleotide sequence at SEQ ID NO 24394
taatgcttcccggtccccaacctacaatcaaccgtaggaggggaagttggagaagttcgtcagacctaaaaatgaagattactcgaataggaatataaagtatgacccgctaggagtcgacccccaggatttcaagaaggggaaggtctatataatcagagctatgggcataaggcggcgcaggtaggcgaagagcactcactgtcctggtgcttaaaagacgagtttagtttatgccgttcaattttccgacttgttgtcaatcggcttaccgcgcgaagcatgatctcgaaatggcacgtcttaactttacgagctctacaacccttttgctcatcgccgcaaacataggtctctcatcgtgctctgcaaagagctgtgctgacttcattaacaaggtctccgtaccaaatgttaccgtcatcgccgggagccatgaactacagggcacggtattaccgctacctgggaccgtcgagtcttgtggtgggcccgacctcacagccgacatcacgtccgatctctgccgtgtagttctggttgtggaaaccagctcttcaagcgctgtgcaaattgaggcctggcttccggacatggaaacatggaatggacggttgctcggtacagggaatggtggtgaaggtggatgcatcgactacccaacaatccagaatggcgctcagctaggatttgcggctttcggcagcaacgcgggccataatggctcaacgggatacgactttttcctcgaccagccggaagtcatcgaggatttcggacaccgggctgtgcatattgaggcagtaatcgggaaggagatcgtgcttcaatactacggtgctgcaccctcgaggagttactatgctggctgcagtacgggtgggcgacaagggtttcaaaatgcctacctatatccaaatgacttcgacggctttgtactcggcagccctggtatcgattggttgcacatcgtctcatcaaagggaatccttgcccgtcggcttggttggccggacctcgaggcacacgagtatgttcgcccagagcagtggcccgccattgtagatgcacagatcaaagctttggatcccctagatggaatcacgaatgggattatcgatgagccaaccaagctgagatttgatcctgaaacattagtatgtggtactggtgtgctcaacgactcagtgtgcctcaccccacagcaggttgcctctgtaaggaaagcatatgagccaattgccgactcgacaggaaagatcgtctatccagctttcgagcttggatctgtcacggacgttttctctgataaccagaaggatggcactgctcaactgagctacactatcttgcaagacttctggcgtggtgccgtatacaatgacagcacctggacacctgtgaacttcaccgaaagggacatggatttcgcgatcaagatcaatcctggtggtgtaaacgctggagagacagatctatctgagttctatggaagaggggggcgaattctcagctatcacggccggaacgatgagactgtcacgtcggcattatctgaacgattctacagcggtgttcaaagctcgacaaatctgacactggcagagatgcaatccttctaccgtctcttcttcctcccagggatgcatcattgttctggcggtcttggtgcttggagtatcggaaacgcgcagcaatttccctgggatcaggccctattagaccccagacataacgtcctgtcggctctaatgaggtgggtcgaggaaaaccaagcgccggatacaatcattggaaccaaataccagggtgacatcgttggcggcgaaatcgtcgcccagagggcatattgcccgtatccacgatcaagtacatgggatagaacgaatgacgaaaagctggcgagtagctggcaatgtacttagatatagatgacatgccaagtcacacagcttgcaacttaggcactgttgttctgtccttagtctacaagcgagtttcatggtgcttaagagaacttagtagcaagagattcgcgtagaattatatcgtagagcaagccaacagagttcatgtgcactgtcg

SEQ ID NO: 24397 - DNA, 405 bp, Muscodor strobelii
  misc_feature: SGI cDNA ID NO. 568318
  misc_feature: Encodes the peptide sequence at SEQ ID NO 24398
atgctttccctacccagactcaggatggcggtggagagagctatcaatgacatgacgaagcgtatcagcgagataggtatggacctgaaggacttgatctctctgatgattgtcttcaatacgtctcaaggcggcacgttggaacacaagtcggaagcgatacgacaagccatacagcggtttctgggtgctggattacaatcaatgccacttaacagtgagagtatcttggctgctatgccgacaatgggaccgcctccagctggaatgcaactgcaaaatttcagcacctcgccaaactacctagataatacgcatgcagacatgactgctccaaaccatttcggggatccggacgatttcggaatatgggatatcgagttttggaatccactgatgtcgtga

SEQ ID NO: 24398 - protein, 134 aa, Muscodor strobelii
  misc_feature: SGI Peptide ID NO. 568318
MLSLPRLRMAVERAINDMTKRISEIGMDLKDLISLMIVFNTSQGGTLEHKSEAIRQAIQRFLGAGLQSMPLNSESILAAMPTMGPPPAGMQLQNFSTSPNYLDNTHADMTAPNHFGDPDDFGIWDIEFWNPLMS

SEQ ID NO: 24399 - DNA, 3732 bp, Muscodor strobelii
  misc_feature: SGI EST ID NO. CUFF.57502.0
  misc_feature: Variant of the nucleotide sequence at SEQ ID NO 24397
attttacctgactgccgtgcatttcgttgtaccgggagaaatctccagtacctacttcgcttcattcttggcagacgactgcggagaacagtatgttttgtttgtcgcaacttgctttcagcgaatgtgcccaaatcgtaatgcgtttgtaaagaacgcaaagccctggcacttgagcccactttatgctgcttcatcccgcacccgcatctatcctgtcgctgccagcactcactcggccgagaacaccccatggagtgattgctgttgttacacatttcggttcaatgtattttcaaaggcgataatgacactctgttcgtgggtgcctcaaattcagtaattttagttcgatcaaccgtttttggatgattatggccgattttccgacatcatcgtctgcctatgacggcatgaccagccctagtactggtcagagccgcattgtgaaaaggccacgtcccgtcaaaagctgccttgagtgccgcagaagaaaattaaagtgtgaccggctcttgccatgtacgcagtgccagaagtctcagcgttcgtgtcgctatgcggcggatgtggagggaggcaacatctcagatgcttctgatggtgaggctgcggttgacagggcgccgaagcgcaatcgagcaccgtcgatactggacagccaatatagtgcgggaactgtgtcgcactcgaacccttcgatactggaagatcattctgccagaatcgaaagactggaacggatgctgatggagaaaaattcgcccatgggtgatgcgagtagcagcacaagtagcggtcattcacaatttgcgccggctcctgccttgaccctgcgtggattgtcagtcaaaggcggaacgcggactcgattttttggcccaggtagcacaagagtcctcgtaaacctgtttgacgaagccaaagaagtgatattcagccagaacgagaacagtgacatacgtcaatcttttcgcttgatccataatgtccacaaagccatgcaagaggaacatcgaaaggctgcttcaccaatcggcgtgtttgtggattcaatgacgccaatacaaaggcgcatggcagatatactacctagcaaagctgcatgcgaccagcttcttcacgtttatatgagcgaaaccgagaccatatatcgtgttgttcatatgccgtctttcatggctcaatacaggtcatattgggcagggaaccagcagcctcctgcattcctaccacagcttctggcgatgctttgtattggatatcgatttgtgagcatcgcaaaaggcctctctcataacgatagagacggaatacatatgccaacggcttgtgctctagttcgtgcctggctagatagtctcaggggtaaacaattagtggaattcagtacacttcagactgaagttctcacgttactggctcaaagaatacttaccactttgaatcaggagacctggacacatcttggcttgatagtacgaatggcaatgacgatgggcttgcatagagacccgtctgaattcgctcatacgatttcgccgttttgggcggaattacggcggagactgtggactaccataattgaagttgacgtttacatgtccatgcagtgcaaccttccgagctgtgtacgtgttggcgactacacatgccaaccaccaaggaacttgaatgacgatgaactataccccgaaatggtcgacctgcctccatcgaaacctatcgaggtagacactgactgtcgcatgcaagttttcgcggcaaacagcttgagtatccgatttaaagctgttgatatgatcaaccggatcgattcaattcgagattatcagcaaataattgatgttgccaacgcaatagaaagaatattagaggatctccgatacgtagtacccaagaagcacccagtctcaccgaaagaagtcaaacggcaatggaagacgcatgtcatacttgacatgaactgccggcggccgcttcttgcgctataccgaccgtttgcattgacaggctccgatacacctcaacaaattgtcacagggtacttgcggtcctgcatgatacttttatcgtatctagacgaccttgatcccgcctccgccgattaccagagtatttggcacatacattacgtcgtgttaaggcaagaaatatttcaagcttcattcggcgtttgctattatatgaaagaaattcatacatccgcctccaatactcgacctacgatcgcccacgaacacagtgcccgatcgggtacaacaagcgcagacctgtgtctcgctgcttgtcaaagttccgcaatgctttccctacccagactcaggatggcggtggagagagctatcaatgacatgacgaagcgtatcagcgagataggtatggacctgaaggacttgatctctctgatgattgtcttcaatacgtctcaaggcggcacgttggaacacaagtcggaagcgatacgacaagccatacagcggtttctgggtgctggattacaatcaatgccacttaacagtgagagtatcttggctgctatgccgacaatgggaccgcctccagctggaatgcaactgcaaaatttcagcacctcgccaaactacctagataatacgcatgcagacatgactgctccaaaccatttcggggatccggacgatttcggaatatgggatatcgagttttggaatccactgatgtcgtgattattcacctattccccttgtcatactttcaaacatctcttgtgctgtccttgaaccgccgtgggccagcttctggtagagattgagagattcgcggattgaatctagttcgtaataactgggctctggccaagtaaagagtcgttctcgagggcgtcgaccatgaactttgccacacttgctctcgatattttcggcaagaacccgattccagaaccatcgtccggccacgtcttcaccggtgctgcttcgtcatccgtcaaaataaccgggcgtgctagaatgaatcttacgccggcacttcgagtctcattgtcgatggaattatgggccttgacgccgtgtttcatcggactgtgagtaaagagtgcgcggaataaaaagttcatactctcccagctattgcccgccccccactggctcatgataatgattcgatcggttttgtactctttcatgatgtcgactgcgttcgcaaccgagttttccataaaccggtccggagtatcggggtccactgctgagaagggcgattctgtaatccgcctgacactcaaagctacgatgacggcagagggtggtgttggcgttgcgagaaacgctttaatgatatcctcacgcttaaaaggtgtgccttcgacgacggtaacaccagagcgtgcacttagagcaaatctagtgcgagaccgaacgagtgccacaacagtgtggccttgcgatagtgcttcttccacgacaagcgagccagatcggccgctagcgcctagaacaagtacgtgcatattgtatttcggaagaaatagggtggagtatagatatagtaaggatgatagtgtagtaacttattgttgagtgtaatagaagtatcttcagcagagatgacggagtggtttgactgacttaaggtcgaagagacagacaagatggctttggttgattgtgatgtaggatagatagagacctgcattgagagccaagtcatgcagagatatatatacggaaatgtgaacctactgaagaaacg

SEQ ID NO: 24400 - DNA, 678 bp, Muscodor strobelii
  misc_feature: SGI cDNA ID NO. 568319
  misc_feature: Encodes the peptide sequence at SEQ ID NO 24401
atgcacgtacttgttctaggcgctagcggccgatctggctcgcttgtcgtggaagaagcactatcgcaaggccacactgttgtggcactcgttcggtctcgcactagatttgctctaagtgcacgctctggtgttaccgtcgtcgaaggcacaccttttaagcgtgaggatatcattaaagcgtttctcgcaacgccaacaccaccctctgccgtcatcgtagctttgagtgtcaggcggattacagaatcgcccttctcagcagtggaccccgatactccggaccggtttatggaaaactcggttgcgaacgcagtcgacatcatgaaagagtacaaaaccgatcgaatcattatcatgagccagtggggggcgggcaatagctgggagagtatgaactttttattccgcgcactctttactcacagtccgatgaaacacggcgtcaaggcccataattccatcgacaatgagactcgaagtgccggcgtaagattcattctagcacgcccggttattttgacggatgacgaagcagcaccggtgaagacgtggccggacgatggttctggaatcgggttcttgccgaaaatatcgagagcaagtgtggcaaagttcatggtcgacgccctcgagaacgactctttacttggccagagcccagttattacgaactag

SEQ ID NO: 24401 - protein, 225 aa, Muscodor strobelii
  misc_feature: SGI Peptide ID NO. 568319
  misc_feature (3)..(85): Pfam Id: PF01370 Pfam Desc: NAD dependent epimerase/dehydratase family
  misc_feature (3)..(32): Pfam Id: PF05368 Pfam Desc: NmrA-like family
  misc_feature (1)..(225): NCBI GI: 46127479 Blast Desc: FG08117.1 [Gibberella zeae PH-1]
  misc_feature (1)..(225): NCBI GI: 256722440 Blast Desc: NECHADRAFT_34884 [Nectria haematococca mpVI 77-13-4]
  misc_feature (1)..(225): NCBI GI: 261356539 Blast Desc: NAD-dependent epimerase/dehydratase [Verticillium albo-atrum VaMs.102]
  misc_feature (1)..(225): NCBI GI: 238500439 Blast Desc: TrkA-N domain dehydrogenase, [Aspergillus flavus NRRL3357] gi|220693207|gb|EED49553.1| TrkA-N domain dehydrogenase, [Aspergillus flavus NRRL3357]
  misc_feature (1)..(225): NCBI GI: 156049713 Blast Desc: SS1G_08563 [Sclerotinia sclerotiorum 1980] gi|154692962|gb|EDN92700.1| SS1G_08563 [Sclerotinia sclerotiorum 1980]
  misc_feature (1)..(222): NCBI GI: 154309099 Blast Desc: BC1G_07444 [Botryotinia fuckeliana B05.10] gi|150852487|gb|EDN27679.1| BC1G_07444 [Botryotinia fuckeliana B05.10]
  misc_feature (1)..(225): NCBI GI: 49409610 Blast Desc: dehydrogenase [Aspergillus flavus]
  misc_feature (1)..(225): NCBI GI: 145241470 Blast Desc: An09g00570 [Aspergillus niger] gi|134077919|emb|CAL00317.1| protein product [Aspergillus niger]
  misc_feature (1)..(225): NCBI GI: 145242112 Blast Desc: An09g03860 [Aspergillus niger] gi|134078247|emb|CAK96828.1| protein product [Aspergillus niger]
  misc_feature (1)..(225): NCBI GI: 169779763 Blast Desc: [Aspergillus oryzae RIB40] gi|83773085|dbj|BAE63213.1| protein product [Aspergillus oryzae]
MHVLVLGASGRSGSLVVEEALSQGHTVVALVRSRTRFALSARSGVTVVEGTPFKREDIIKAFLATPTPPSAVIVALSVRRITESPFSAVDPDTPDRFMENSVANAVDIMKEYKTDRIIIMSQWGAGNSWESMNFLFRALFTHSPMKHGVKAHNSIDNETRSAGVRFILARPVILTDDEAAPVKTWPDDGSGIGFLPKISRASVAKFMVDALENDSLLGQSPVITN

SEQ ID NO: 24402 - DNA, 561 bp, Muscodor strobelii
  misc_feature: SGI cDNA ID NO. 568320
  misc_feature: Elevated expression when VOC is produced
  misc_feature: Encodes the peptide sequence at SEQ ID NO 24403
atgaagctaacgagaattatagccgtggggtgggctgcaaccgtagtctcgtggtacttgataggattgttcgggcgacgtcggatcttcaatgttgggctactgattttggttgttttgatgttaatcgtcggtattctcgacaccattcctggacgacccactggagtcatatgggccgaaagctctctcctactagtatggaacggcgtctacgatttgagtatcgggcctgtctgtttcgtgatcctaggcgaatgctcggcaactcgcgtccgctcaaaaacgattgccgtcgctacagctgttcaagcaatcttcggtattgtcatgacagtcgccatcccgtatctcatcaaccccgaggaagcaaatttgcagggcaagttgggcttctatttcggaggtctaggcgcgctctgtctcggttgggcatactttagaattcctgaaaccaaagacaggactttcgaagagcttgatgtgctctttgacagaaaagtgcctgcacgacaattcaagagttatcggattgaaggcctcgaacatgtagagacgtaa

SEQ ID NO: 24403 - protein, 186 aa, Muscodor strobelii
  misc_feature: SGI Peptide ID NO. 568320
  misc_feature (6)..(164): Pfam Id: PF00083 Pfam Desc: Sugar (and other) transporter
  misc_feature (7)..(179): NCBI GI: 85118751 Blast Desc: NCU01868 [Neurospora crassa OR74A] gi|28927309|gb|EAA36263.1| [Neurospora crassa OR74A] gi|38636431|emb|CAE81967.1| maltose permease [Neurospora crassa]
  misc_feature (7)..(181): NCBI GI: 283482571 Blast Desc: alpha glucoside transporter [Glomerella graminicola] gi|283482573|emb|CBA11551.1| alpha glucoside transporter [Glomerella graminicola]
  misc_feature (7)..(179): NCBI GI: 238842374 Blast Desc: maltose permease [Microsporum canis CBS 113480]
  misc_feature (7)..(179): NCBI GI: 156063368 Blast Desc: SS1G_01800 [Sclerotinia sclerotiorum 1980] gi|154697136|gb|EDN96874.1| SS1G_01800 [Sclerotinia sclerotiorum 1980]
  misc_feature (6)..(178): NCBI GI: 225559452 Blast Desc: maltose permease [Ajellomyces capsulatus G186AR]
  misc_feature (6)..(178): NCBI GI: 154274243 Blast Desc: conserved [Ajellomyces capsulatus NAm1] gi|150415581|gb|EDN10934.1| conserved [Ajellomyces capsulatus NAm1]
  misc_feature (7)..(178): NCBI GI: 240105876 Blast Desc: Sugar transporter family protein [Coccidioides posadasii C735 delta SOWgp]
  misc_feature (8)..(182): NCBI GI: 212527484 Blast Desc: maltose permease, [Penicillium marneffei ATCC 18224] gi|210073297|gb|EEA27384.1| maltose permease, [Penicillium marneffei ATCC 18224]
  misc_feature (8)..(185): NCBI GI: 146414191 Blast Desc: PGUG_05021 [Pichia guilliermondii ATCC 6260]
  misc_feature (8)..(185): NCBI GI: 190348467 Blast Desc: PGUG_05021 [Pichia guilliermondii ATCC 6260]
  misc_feature: Useful for introducing or modulating the production of volatile compounds
MKLTRIIAVGWAATVVSWYLIGLFGRRRIFNVGLLILVVLMLIVGILDTIPGRPTGVIWAESSLLLVWNGVYDLSIGPVCFVILGECSATRVRSKTIAVATAVQAIFGIVMTVAIPYLINPEEANLQGKLGFYFGGLGALCLGWAYFRIPETKDRTFEELDVLFDRKVPARQFKSYRIEGLEHVET

SEQ ID NO: 24404 - DNA, 2260 bp, Muscodor strobelii
  misc_feature: SGI EST ID NO. CUFF.57506.0
  misc_feature: Variant of the nucleotide sequence at SEQ ID NO 24402
caaggtcctgcgatgtgatagattatgcatgctcacgtgttggacagagatactcgggattgcttcattatcaaagtgtgagggtttatttaggactttgtcttcggcacatctagcaagttacagtgcgtttaggacccttgcaaattatcccctcccaaagttcccagtccccaactttcccctcattccagccactcatccaatctagcgacctatgaaaagaggcaaaatacggccgatctcgtctgcacgatacttgtataccctgcttttgagcttgcgataacgagaattggtaggtctaattgagtcctcggtgtgtctgccggcatgtatacatgtgagagaaggtttctctcggctctgataaaatgagcacgggaccctcctatgggacgttcccaaccacatcgaacgccatcgtgtcccaaaccttaccttccagcttcacagtctcttcaatagtcatgaaggcagataatgaagaggcggacgatacaaagccctcgggcggcattgcgctctctgaggctatcgagcaggaacatgcgttgagcttccgagaggcttttaaactatatccaacggcggttggctggtccgtatttgtgtcgattggtgtaatcatgctcgcgtttgacccccaaatcatcgggaacatgtttgcgatacctcagttcaaaaaggatttcggacatctgaatgcagacggagaatatgttatctcagcagcctggcaatcgggattatcactaggcaatcccattggtcaagtcatcggcgccttggtttcagcatacccaatggagctattcggtcgtaaatggacgttctttacctgtgtgttcctaactgccgggcttgtcttcatacaattcttcgctagatcgctgcaagctttgttagtaggggagctccttggggggttggtattgggatgtttcgtcgtcattgggcctacatacgcatcggaagtgtgtcctatggccttacgtggctatctgacttcgtataccaatctgtgtttcgtcactggccagctgctcggaaacggtgttacagcaggtactcaaactcttaacaaccattgggcatacagcattccatttgcgctgcagtggttttgggtactaataatcatacctgggatcttctttattccggaaagcccgtggtggttggtacgcaaaggccggtcggaagctgccagagatgctttgcgtcgtttgtcgtctaaaagggtggatattgacgctattcttgctgtgattacggcaacggacaagctcgaattggagatggaggccggcagtacgtacatggacactatcagaggagttaatctacggcgaacagaaatctcgactggtgtctatactacacaagtcctatcgggcacatacttggtcaactacggagtctactttttccagcaggcaggggtttctgacaaggacgccttcaacttgggcatcggatttttagccgtggggtgggctgcaaccgtagtctcgtggtacttgataggattgttcgggcgacgtcggatcttcaatgttgggctactgattttggttgttttgatgttaatcgtcggtattctcgacaccattcctggacgacccactggagtcatatgggccgaaagctctctcctactagtatggaacggcgtctacgatttgagtatcgggcctgtctgtttcgtgatcctaggcgaatgctcggcaactcgcgtccgctcaaaaacgattgccgtcgctacagctgttcaagcaatcttcggtattgtcatgacagtcgccatcccgtatctcatcaaccccgaggaagcaaatttgcagggcaagttgggcttctatttcggaggtctaggcgcgctctgtctcggttgggcatactttagaattcctgaaaccaaagacaggactttcgaagagcttgatgtgctctttgacagaaaagtgcctgcacgacaattcaagagttatcggattgaaggcctcgaacatgtagagacgtaaatgtccggatggccaaagtcaagatagcatagtaattccaagtttagtgatctagcctctatgcttcactatgaagattttgaagtctcgcattatggtaacaaaagctccatgtagaatgcctgggtggcgatagtgaagacaattacattaggcaggaaaaatacgttcaagataggcactgaaacgcaggaagacggtgcctaggtatgttctgtcagggtagctacggc

SEQ ID NO: 24405 - DNA, 1557 bp, Muscodor strobelii
  misc_feature: SGI cDNA ID NO. 568321
  misc_feature: Elevated expression when VOC is produced
  misc_feature: Encodes the peptide sequence at SEQ ID NO 24406
atgaaggcagataatgaagaggcggacgatacaaagccctcgggcggcattgcgctctctgaggctatcgagcaggaacatgcgttgagcttccgagaggcttttaaactatatccaacggcggttggctggtccgtatttgtgtcgattggtgtaatcatgctcgcgtttgacccccaaatcatcgggaacatgtttgcgatacctcagttcaaaaaggatttcggacatctgaatgcagacggagaatatgttatctcagcagcctggcaatcgggattatcactaggcaatcccattggtcaagtcatcggcgccttggtttcagcatacccaatggagctattcggtcgtaaatggacgttctttacctgtgtgttcctaactgccgggcttgtcttcatacaattcttcgctagatcgctgcaagctttgttagtaggggagctccttggggggttggtattgggatgtttcgtcgtcattgggcctacatacgcatcggaagtgtgtcctatggccttacgtggctatctgacttcgtataccaatctgtgtttcgtcactggccagctgctcggaaacggtgttacagcaggtactcaaactcttaacaaccattgggcatacagcattccatttgcgctgcagtggttttgggtactaataatcatacctgggatcttctttattccggaaagcccgtggtggttggtacgcaaaggccggtcggaagctgccagagatgctttgcgtcgtttgtcgtctaaaagggtggatattgacgctattcttgctgtgattacggcaacggacaagctcgaattggagatggaggccggcagtacgtacatggacactatcagaggagttaatctacggcgaacagaaatctcgactggtgtctatactacacaagtcctatcgggcacatacttggtcaactacggagtctactttttccagcaggcaggggtttctgacaaggacgccttcaacttgggcatcggatttttagccgtggggtgggctgcaaccgtagtctcgtggtacttgataggattgttcgggcgacgtcggatcttcaatgttgggctactgattttggttgttttgatgttaatcgtcggtattctcgacaccattcctggacgacccactggagtcatatgggccgaaagctctctcctactagtatggaacggcgtctacgatttgagtatcgggcctgtctgtttcgtgatcctaggcgaatgctcggcaactcgcgtccgctcaaaaacgattgccgtcgctacagctgttcaagcaatcttcggtattgtcatgacagtcgccatcccgtatctcatcaaccccgaggaagcaaatttgcagggcaagttgggcttctatttcggaggtctaggcgcgctctgtctcggttgggcatactttagaattcctgaaaccaaagacaggactttcgaagagcttgatgtgctctttgacagaaaagtgcctgcacgacaattcaagagttatcggattgaaggcctcgaacatgtagagacgtaa

SEQ ID NO: 24406 - protein, 518 aa, Muscodor strobelii
  misc_feature: SGI Peptide ID NO. 568321
  misc_feature (46)..(444): Pfam Id: PF07690 Pfam Desc: Major Facilitator Superfamily
  misc_feature (44)..(496): Pfam Id: PF00083 Pfam Desc: Sugar (and other) transporter
  misc_feature (8)..(513): NCBI GI: 283482571 Blast Desc: alpha glucoside transporter [Glomerella graminicola] gi|283482573|emb|CBA11551.1| alpha glucoside transporter [Glomerella graminicola]
  misc_feature (4)..(511): NCBI GI: 85118751 Blast Desc: NCU01868 [Neurospora crassa OR74A] gi|28927309|gb|EAA36263.1| [Neurospora crassa OR74A] gi|38636431|emb|CAE81967.1| maltose permease [Neurospora crassa]
  misc_feature (7)..(511): NCBI GI: 156063368 Blast Desc: SS1G_01800 [Sclerotinia sclerotiorum 1980] gi|154697136|gb|EDN96874.1| SS1G_01800 [Sclerotinia sclerotiorum 1980]
  misc_feature (2)..(510): NCBI GI: 225559452 Blast Desc: maltose permease [Ajellomyces capsulatus G186AR]
  misc_feature (22)..(467): NCBI GI: 154319277 Blast Desc: BC1G_02590 [Botryotinia fuckeliana B05.10] gi|150857021|gb|EDN32213.1| BC1G_02590 [Botryotinia fuckeliana B05.10]
  misc_feature (1)..(511): NCBI GI: 238842374 Blast Desc: maltose permease [Microsporum canis CBS 113480]
  misc_feature (2)..(510): NCBI GI: 154274243 Blast Desc: conserved [Ajellomyces capsulatus NAm1] gi|150415581|gb|EDN10934.1| conserved [Ajellomyces capsulatus NAm1]
  misc_feature (1)..(467): NCBI GI: 225678910 Blast Desc: maltose permease MAL61 [Paracoccidioides brasiliensis Pb03]
  misc_feature (1)..(467): NCBI GI: 226293748 Blast Desc: general alpha-glucoside permease [Paracoccidioides brasiliensis Pb18]
  misc_feature (2)..(510): NCBI GI: 240105876 Blast Desc: Sugar transporter family protein [Coccidioides posadasii C735 delta SOWgp]
  misc_feature: Useful for introducing or modulating the production of volatile compounds
MKADNEEADDTKPSGGIALSEAIEQEHALSFREAFKLYPTAVGWSVFVSIGVIMLAFDPQIIGNMFAIPQFKKDFGHLNADGEYVISAAWQSGLSLGNPIGQVIGALVSAYPMELFGRKWTFFTCVFLTAGLVFIQFFARSLQALLVGELLGGLVLGCFVVIGPTYASEVCPMALRGYLTSYTNLCFVTGQLLGNGVTAGTQTLNNHWAYSIPFALQWFWVLIIIPGIFFIPESPWWLVRKGRSEAARDALRRLSSKRVDIDAILAVITATDKLELEMEAGSTYMDTIRGVNLRRTEISTGVYTTQVLSGTYLVNYGVYFFQQAGVSDKDAFNLGIGFLAVGWAATVVSWYLIGLFGRRRIFNVGLLILVVLMLIVGILDTIPGRPTGVIWAESSLLLVWNGVYDLSIGPVCFVILGECSATRVRSKTIAVATAVQAIFGIVMTVAIPYLINPEEANLQGKLGFYFGGLGALCLGWAYFRIPETKDRTFEELDVLFDRKVPARQFKSYRIEGLEHVET

SEQ ID NO: 24407 - DNA, 2260 bp, Muscodor strobelii; identical to SEQ ID NO: 24404
  misc_feature: SGI EST ID NO. CUFF.57506.0
  misc_feature: Variant of the nucleotide sequence at SEQ ID NO 24405

SEQ ID NO: 24408 - DNA, 1023 bp, Muscodor strobelii
  misc_feature: SGI cDNA ID NO. 568322
  misc_feature: Encodes the peptide sequence at SEQ ID NO 24409
atgaaggcagataatgaagaggcggacgatacaaagccctcgggcggcattgcgctctctgaggctatcgagcaggaacatgcgttgagcttccgagaggcttttaaactatatccaacggcggttggctggtccgtatttgtgtcgattggtgtaatcatgctcgcgtttgacccccaaatcatcgggaacatgtttgcgatacctcagttcaaaaaggatttcggacatctgaatgcagacggagaatatgttatctcagcagcctggcaatcgggattatcactaggcaatcccattggtcaagtcatcggcgccttggtttcagcatacccaatggagctattcggtcgtaaatggacgttctttacctgtgtgttcctaactgccgggcttgtcttcatacaattcttcgctagatcgctgcaagctttgttagtaggggagctccttggggggttggtattgggatgtttcgtcgtcattgggcctacatacgcatcggaagtgtgtcctatggccttacgtggctatctgacttcgtataccaatctgtgtttcgtcactggccagctgctcggaaacggtgttacagcaggtactcaaactcttaacaaccattgggcatacagcattccatttgcgctgcagtggttttgggtactaataatcatacctgggatcttctttattccggaaagcccgtggtggttggtacgcaaaggccggtcggaagctgccagagatgctttgcgtcgtttgtcgtctaaaagggtggatattgacgctattcttgctgtgattacggcaacggacaagctcgaattggagatggaggccggcagtacgtacatggacactatcagaggagttaatctacggcgaacagaaatctcgactggtgtctatactacacaagtcctatcgggcacatacttggtcaactacggagtctactttttccagcaggcaggggtttctgacaaggacgccttcaacttgggcatcggatttttaggctag

SEQ ID NO: 24409 - protein, 340 aa, Muscodor strobelii
  misc_feature: SGI Peptide ID NO. 568322
  misc_feature (44)..(340): Pfam Id: PF00083 Pfam Desc: Sugar (and other) transporter
  misc_feature (46)..(235): Pfam Id: PF07690 Pfam Desc: Major Facilitator Superfamily
  misc_feature (44)..(328): Pfam Id: PF00083 Pfam Desc: Sugar (and other) transporter
  misc_feature (8)..(340): NCBI GI: 283482571 Blast Desc: alpha glucoside transporter [Glomerella graminicola] gi|283482573|emb|CBA11551.1| alpha glucoside transporter [Glomerella graminicola]
  misc_feature (19)..(340): NCBI GI: 85118751 Blast Desc: NCU01868 [Neurospora crassa OR74A] gi|28927309|gb|EAA36263.1| [Neurospora crassa OR74A] gi|38636431|emb|CAE81967.1| maltose permease [Neurospora crassa]
  misc_feature (7)..(340): NCBI GI: 156063368 Blast Desc: SS1G_01800 [Sclerotinia sclerotiorum 1980] gi|154697136|gb|EDN96874.1| SS1G_01800 [Sclerotinia sclerotiorum 1980]
  misc_feature (22)..(340): NCBI GI: 154319277 Blast Desc: BC1G_02590 [Botryotinia fuckeliana B05.10] gi|150857021|gb|EDN32213.1| BC1G_02590 [Botryotinia fuckeliana B05.10]
  misc_feature (1)..(340): NCBI GI: 225678910 Blast Desc: maltose permease MAL61 [Paracoccidioides brasiliensis Pb03]
  misc_feature (1)..(340): NCBI GI: 226293748 Blast Desc: general alpha-glucoside permease [Paracoccidioides brasiliensis Pb18]
  misc_feature (2)..(340): NCBI GI: 225559452 Blast Desc: maltose permease [Ajellomyces capsulatus G186AR]
  misc_feature (2)..(340): NCBI GI: 154274243 Blast Desc: conserved [Ajellomyces capsulatus NAm1] gi|150415581|gb|EDN10934.1| conserved [Ajellomyces capsulatus NAm1]
  misc_feature (4)..(340): NCBI GI: 261190226 Blast Desc: MFS maltose permease MalP [Ajellomyces dermatitidis SLH14081] gi|239591351|gb|EEQ73932.1| MFS maltose permease MalP [Ajellomyces dermatitidis SLH14081] gi|239606410|gb|EEQ83397.1|
  misc_feature (1)..(340): NCBI GI: 238842374 Blast Desc: maltose permease [Microsporum canis CBS 113480]
MKADNEEADDTKPSGGIALSEAIEQEHALSFREAFKLYPTAVGWSVFVSIGVIMLAFDPQIIGNMFAIPQFKKDFGHLNADGEYVISAAWQSGLSLGNPIGQVIGALVSAYPMELFGRKWTFFTCVFLTAGLVFIQFFARSLQALLVGELLGGLVLGCFVVIGPTYASEVCPMALRGYLTSYTNLCFVTGQLLGNGVTAGTQTLNNHWAYSIPFALQWFWVLIIIPGIFFIPESPWWLVRKGRSEAARDALRRLSSKRVDIDAILAVITATDKLELEMEAGSTYMDTIRGVNLRRTEISTGVYTTQVLSGTYLVNYGVYFFQQAGVSDKDAFNLGIGFLG

SEQ ID NO: 24410 - DNA, 2260 bp, Muscodor strobelii; identical to SEQ ID NO: 24404
  misc_feature: SGI EST ID NO. CUFF.57506.0
  misc_feature: Variant of the nucleotide sequence at SEQ ID NO 24408

SEQ ID NO: 24411 - DNA, 1104 bp, Muscodor strobelii
  misc_feature: SGI cDNA ID NO. 568323
  misc_feature: Encodes the peptide sequence at SEQ ID NO 24412
atgcctgatacacgaggtgcggcgcttctggcgttgtcaatcacgacgaccatcctcgcgttatcaacgtgtgtcttacggtacttcgttcgaacgcgactaaatcaacaattaagctgggaggattactctgtagggctcgcaatgctcctaggcatcattggtattagcttcaccattgtcgagagcgtcagccagaacgatttgcgaacggcgctggaatatgattatctcgcacaaccatggctgaatatgggctcgacgcttagcaaggtttcgatctgtttgttggtttggcgattagtagccggagtcggagtttggagggttgtactcgctttgcagattatatcactgctttttgtcaaccttgcgtacacatttacaacgttgctgcaatgccgaccgcttgagaagctatggaacaccgacacccctggtcaatgttggagtattagtgtgcaacaggatattggatacttccaaggagccttcgatgtctttactcagctcttcatcgctctgttccctattgttgtcatccaagatctagacgtccaacggagcatacgatttccgttttacctactcacgctcatggccatcataatcgctatgcttggtattctaagaacctacaatatctctttaatacagctggacgatcagctcatgttccaaacgattgcaactatattcgcggtgctagaacagaatctgaacatcatctccgcaaatatacttccaattgcatcgttgttttcgaagaccatccgccctataagccaagcaatcaatgacgcggctagcgcccgcgaagttgatgttgcgtcgctcatgtcaaaaagagaccaagcaagcagggcaacgcgacgccggagcgaagggtctacgttaatgattgagggaccacaacgtgagagtttcgagggcgctccgtctgctcacgaagtcagcgaagtagaggcttggccgcttggaattatcaagacggttagcgttgaagtagtgaaagaagatgcagttgcacttaaccgtgagattgatctcgctgaagctggaaggacaagcgggcaccaatcatgggatcgttacttgaagtaa

SEQ ID NO: 24412 - protein, 367 aa, Muscodor strobelii
  misc_feature: SGI Peptide ID NO. 568323
  misc_feature (24)..(262): NCBI GI: 159126994 Blast Desc: conserved [Aspergillus fumigatus A1163]
  misc_feature (24)..(262): NCBI GI: 146324207 Blast Desc: integral membrane protein [Aspergillus fumigatus Af293] gi|129558015|gb|EAL91244.2| integral membrane protein [Aspergillus fumigatus Af293]
  misc_feature (24)..(262): NCBI GI: 119477918 Blast Desc: NFIA_073250 [Neosartorya fischeri NRRL 181] gi|119407461|gb|EAW17410.1| conserved [Neosartorya fischeri NRRL 181]
  misc_feature (4)..(164): NCBI GI: 116199849 Blast Desc: CHGG_08080 [Chaetomium globosum CBS 148.51] gi|88179359|gb|EAQ86827.1| CHGG_08080 [Chaetomium globosum CBS 148.51]
  misc_feature (2)..(363): NCBI GI: 226287054 Blast Desc: integral membrane protein [Paracoccidioides brasiliensis Pb18]
  misc_feature (5)..(257): NCBI GI: 154285646 Blast Desc: [Ajellomyces capsulatus NAm1] gi|150407259|gb|EDN02800.1| [Ajellomyces capsulatus NAm1]
  misc_feature (2)..(257): NCBI GI: 225557238 Blast Desc: integral membrane protein [Ajellomyces capsulatus G186AR]
  misc_feature (2)..(259): NCBI GI: 240110851 Blast Desc: CPC735_037130 [Coccidioides posadasii C735 delta SOWgp]
  misc_feature (14)..(293): NCBI GI: 238844609 Blast Desc: integral membrane protein [Microsporum canis CBS 113480]
  misc_feature (85)..(181): NCBI GI: 171688980 Blast Desc: protein product [Podospora anserina] gi|170944452|emb|CAP70563.1| protein product [Podospora anserina]
MPDTRGAALLALSITTTILALSTCVLRYFVRTRLNQQLSWEDYSVGLAMLLGIIGISFTIVESVSQNDLRTALEYDYLAQPWLNMGSTLSKVSICLLVWRLVAGVGVWRVVLALQIISLLFVNLAYTFTTLLQCRPLEKLWNTDTPGQCWSISVQQDIGYFQGAFDVFTQLFIALFPIVVIQDLDVQRSIRFPFYLLTLMAIIIAMLGILRTYNISLIQLDDQLMFQTIATIFAVLEQNLNIISANILPIASLFSKTIRPISQAINDAASAREVDVASLMSKRDQASRATRRRSEGSTLMIEGPQRESFEGAPSAHEVSEVEAWPLGIIKTVSVEVVKEDAVALNREIDLAEAGRTSGHQSWDRYLK

SEQ ID NO: 24413 - DNA, 787 bp, Muscodor strobelii
  misc_feature: SGI EST ID NO. CUFF.57512.0
  misc_feature: Variant of the nucleotide sequence at SEQ ID NO 24411
caaaagtgacccatcacattacaacatcttttatcctctttttgatggttcccaatttgcgccttggtccgacgtatcggtgataacacaatatcttttcgaaaaacttccagaacacatgtgaagagagggtagcttggttgcgcgcgtagactgaagcgtgctggtgagatactggatgaattgacgcgagtaacaatatccaattcggggaaatccagcatactatatgatgcctgatacacgaggtgcggcgcttctggcgttgtcaatcacgacgaccatcctcgcgttatcaacgtgtgtcttacggtacttcgttcgaacgcgactaaatcaacaattaagctgggaggattactctgtagggctcgcaatgctcctaggcatcattggtattagcttcaccattgtcgagagcgtcagccagaacgatttgcgaacggcgctggaatatgattatctcgcacaaccatggctgaatatgggctcgacgcttagcaaggtttcgatctgtttgttggtttggcgattagtagccggagtcggagtttggagggttgtactcgctttgcagattatatcactgctttttgtcaaccttgcgtacacatttacaacgttgctgcaatgccgaccgcttgagaagctatggaacaccgacacccctggtcaatgttggagtattagtgtgcaacaggatattggatacttccaaggagccttcgatgtctttactcagctcttcatcgctctgttccctattgttgtcatccaagatctagac

SEQ ID NO: 24414 - DNA, 1377 bp, Muscodor strobelii
  misc_feature: SGI cDNA ID NO. 568324
  misc_feature: Encodes the peptide sequence at SEQ ID NO 24415
atgcctgctaaacaaaaggcgccggtatacgtgctcggcgtgggcatgacaaagttcatcaagccccgcggaaaggtcgactacactgagcttggtttcgaagcaggtgtgaaagctatgctcgatgcccaaatcaactatgatgatgttgagcagggtattgcatgctactgttacggtgactcgacgtgcggacagcgagtcttttaccagtttggtatgactcagatcccaatcatcaatgtgaacaacaactgctcaaccggatccaccggtctagccatggcaagaactaccatcgcctacggcggtgctgattgcattatggttgttgggtttgagaagatgatgcgtggtagtctgcagagtttcttcaatgatcgtgagaaccctactggcacgactgccatgatgatggcagagacccgcggtattaccaatgcccctggagctgcacagatgttcggaaatgcagggcgagaatatatggacaaattcggcgcaaaggcggaagacttcgcagagattggccgcatcaatcacgagcactcaactcgcaatccttactctcagttccaagacgtatacaccctagatcaaatcatgaaggcgcccatgattcatgaacctctcacaaaactccagtgctgtcccacatcagacggtggtgcggctgctgtgctggtctctcaggatttcttggatgcacggccacacctcaaggatcgggctatcctcattgctggccagtgtctcgctacagacgcacctagtctattttcgaagagctcgatcgacctgatgggtattgatatgactaagcatgcaaagaagattgccatggaagaggccgggatcacaccgagtgatgttcaggtttgcgagcttcacgattgcttttccgccaacgagatgattgtcatcgatgctctcggcttgtcagaacctggcaaggctcatgaactggtgcggagtggtggtatcacatatggtggcaaggtggtcatcaacccctctggtggtcttatttccaagggccatccattaggcgcaactggtatcgctcaatgcgctgaactcgtatggcacctgcgaggctgggccaataaccgcgcgacaccaaataccaaatatgctctgcagcataatctcggtctcggcggtgcggtagtggtcactgtttacgcacggcccgaccggagcaccgcccccaaggtagactctgctactgtcggcaagatcaacaagcttggctacaacccagccgttgaggccaaaggctttaccgctgcacagtgcaagtcagtgctcagcaagacgaaatcaagtgcatgggcactacaagacacagaaaagaaggtggaggcacgattctaa

SEQ ID NO: 24415 - protein, 458 aa, Muscodor strobelii
  misc_feature: SGI Peptide ID NO. 568324
  misc_feature (249)..(394): Pfam Id: PF02803 Pfam Desc: Thiolase, C-terminal domain
  misc_feature (280)..(353): Pfam Id: PF02803 Pfam Desc: Thiolase, C-terminal domain
  misc_feature (1)..(458): NCBI GI: 85079209 Blast Desc: nonspecific lipid-transfer protein, mitochondrial precursor [Neurospora crassa OR74A] gi|28881149|emb|CAD70319.1| sterol carrier protein [Neurospora crassa] nonspecific protein,
  misc_feature (1)..(458): NCBI GI: 154316969 Blast Desc: BC1G_03902 [Botryotinia fuckeliana B05.10] gi|150845514|gb|EDN20707.1| BC1G_03902 [Botryotinia fuckeliana B05.10]
  misc_feature (1)..(458): NCBI GI: 256729101 Blast Desc: [Nectria haematococca mpVI 77-13-4]
  misc_feature (1)..(458): NCBI GI: 46138677 Blast Desc: FG10853.1 [Gibberella zeae PH-1]
  misc_feature (1)..(458): NCBI GI: 169773949 Blast Desc: [Aspergillus oryzae RIB40] gi|238491980|ref|XP_002377227.1| sterol carrier protein, [Aspergillus flavus NRRL3357] gi|83769304|dbj|BAE59441.1| protein
  misc_feature (1)..(456): NCBI GI: 116199847 Blast Desc: conserved [Chaetomium globosum CBS 148.51] gi|88179358|gb|EAQ86826.1| conserved [Chaetomium globosum CBS 148.51]
  misc_feature (1)..(458): NCBI GI: 156043773 Blast Desc: SS1G_10890 [Sclerotinia sclerotiorum 1980] gi|154695277|gb|EDN95015.1| SS1G_10890 [Sclerotinia sclerotiorum 1980]
  misc_feature (1)..(458): NCBI GI: 121706536 Blast Desc: sterol carrier protein, [Aspergillus clavatus NRRL 1] gi|119399678|gb|EAW10104.1| sterol carrier protein, [Aspergillus clavatus NRRL 1]
  misc_feature (1)..(458): NCBI GI: 115398343 Blast Desc: nonspecific lipid-transfer protein, mitochondrial precursor [Aspergillus terreus NIH2624] gi|114192954|gb|EAU34654.1| nonspecific lipid-transfer protein,
  misc_feature (1)..(458): NCBI GI: 119501246 Blast Desc: sterol carrier protein, [Neosartorya fischeri NRRL 181] gi|119415545|gb|EAW25483.1| sterol carrier protein, [Neosartorya fischeri NRRL 181]
  misc_feature (3)..(395): SWISSPROT Homolog: EC 2.3.1.176 Propanoyl-CoA C-acyltransferase
MPAKQKAPVYVLGVGMTKFIKPRGKVDYTELGFEAGVKAMLDAQINYDDVEQGIACYCYGDSTCGQRVFYQFGMTQIPIINVNNNCSTGSTGLAMARTTIAYGGADCIMVVGFEKMMRGSLQSFFNDRENPTGTTAMMMAETRGITNAPGAAQMFGNAGREYMDKFGAKAEDFAEIGRINHEHSTRNPYSQFQDVYTLDQIMKAPMIHEPLTKLQCCPTSDGGAAAVLVSQDFLDARPHLKDRAILIAGQCLATDAPSLFSKSSIDLMGIDMTKHAKKIAMEEAGITPSDVQVCELHDCFSANEMIVIDALGLSEPGKAHELVRSGGITYGGKVVINPSGGLISKGHPLGATGIAQCAELVWHLRGWANNRATPNTKYALQHNLGLGGAVVVTVYARPDRSTAPKVDSATVGKINKLGYNPAVEAKGFTAAQCKSVLSKTKSSAWALQDTEKKVEARF

SEQ ID NO: 24416 - DNA, 3606 bp, Muscodor strobelii
  misc_feature: SGI EST ID NO. CUFF.57518.0
  misc_feature: Variant of the nucleotide sequence at SEQ ID NO 24414
gacaactcgaagtacgacgtgctcgcaggacttcgctcacaaacaaaaatcactctgtaaggtttcaacagcaaaccgctatctcacgtcgctattcgtctctcagaattcttatcattgcttgccaacatcacgccatggccgaaacgatgcgtgcggtggtaatatctgccttcggcggtcctgaagtcctccagcaccgcaccgttcctaagcccatcccaggactaaacgagatcttgattcatgtgcaagcctttggtgtgaatcacgctgagatgcatatgcgaaaaggagaatgggacgaatggaatccaatcacaggccttgagtgcgttggcaccgttgttgccttcccgtcgcctgcctcgcccgagaatgccgcgaagttccccgttggcgccaaagtcgcagctgtgatgggtgggctcggtcgaaaccgacccggcggatacgggcagtttaccacggtgtcagcatcaaatgtcatcccgctggagtccgagttggcttgggaggacttagcagccctgccggaggtctattgcacagcgtggtcgtgtcttttcgctgttctggatctgagggctggtgagcgcatactaatccgtggtgcaactagcacgattggtcaagctgcgcttcatctcgctgttgatgctggtgctgttgttacggccacaacgagacggacggaacggttccaatggctgaaaggcttgggcgccgctgaggctgtgaaagaggaggagggcttgtataggaagcatgatgatataccgccaaggaagttcgacaaaatcctcaacctcgttgggaatcgggttctcgttgagtcgattgctttaacacgcgttggaggccgaatgctacaagctgggtggttagggggtttagatccagtcacggacttcaaccctatggtccagatggaatctggagtgcatttcagtctgttccatagcaaagtactaggcacgccggagtttccgattgagaatattccgctgcaggagattgtcaagaagatcgagaaagggaagtggaatgctcaaccagcaaaggtttttgagtacgaggatatacagaatgcacatcgggcactagactctcatgatactgggggtaagatcgttgtaagacattgaatttcctgcaaacgcaacagtccagcgcgtatcgaaattgtgaacccggcttcatagataggtacttggatattgatcgatgcctgaaatatcttgtttttctcttcactcgcaccaacgcttagatgctcgtctcctgtcccgtggcacttgaaaatgtcagcggctacgaggtggcttgtaggagaccacagacggagacacggagggtcggaggtcgctgtggctgctcaagttatatgaagtgtgtggggctggcaacggtgtcccgtctggggcaatgcctcggctcttcggcggtggttgatgagccctctgcgaccaggatgcccatcctcgccaacccctcgcataatggagaaacaattccagaagaggcttatacctcgccctcgctccctcagcagcggttctgttacagatcaaattaggactgtaccgaggaatcacagaacgtcggcgctgcgaagtgcccgctaaactccatatttgctaggtcggtatttagttctggggccccggacctctagactctccaacgacatcttctattgattatacgtcgaatcctcccttctttgtgtctttttaccagtagccagcgtcagatctgtgaattcctatacccgcatcttgtgcagccctattatccaaacattagcgaagatgcctgctaaacaaaaggcgccggtatacgtgctcggcgtgggcatgacaaagttcatcaagccccgcggaaaggtcgactacactgagcttggtttcgaagcaggtgtgaaagctatgctcgatgcccaaatcaactatgatgatgttgagcagggtattgcatgctactgttacggtgactcgacgtgcggacagcgagtcttttaccagtttggtatgactcagatcccaatcatcaatgtgaacaacaactgctcaaccggatccaccggtctagccatggcaagaactaccatcgcctacggcggtgctgattgcattatggttgttgggtttgagaagatgatgcgtggtagtctgcagagtttcttcaatgatcgtgagaaccctactggcacgactgccatgatgatggcagagacccgcggtattaccaatgcccctggagctgcacagatgttcggaaatgcagggcgagaatatatggacaaattcggcgcaaaggcggaagacttcgcagagattggccgcatcaatcacgagcactcaactcgcaatccttactctcagttccaagacgtatacaccctagatcaaatcatgaaggcgcccatgattcatgaacctctcacaaaactccagtgctgtcccacatcagacggtggtgcggctgctgtgctggtctctcaggatttcttggatgcacggccacacctcaaggatcgggctatcctcattgctggccagtgtctcgctacagacgcacctagtctattttcgaagagctcgatcgacctgatgggtattgatatgactaagcatgcaaagaagattgccatggaagaggccgggatcacaccgagtgatgttcaggtttgcgagcttcacgattgcttttccgccaacgagatgattgtcatcgatgctctcggcttgtcagaacctggcaaggctcatgaactggtgcggagtggtggtatcacatatggtggcaaggtggtcatcaacccctctggtggtcttatttccaagggccatccattaggcgcaactggtatcgctcaatgcgctgaactcgtatggcacctgcgaggctgggccaataaccgcgcgacaccaaataccaaatatgctctgcagcataatctcggtctcggcggtgcggtagtggtcactgtttacgcacggcccgaccggagcaccgcccccaaggtagactctgctactgtcggcaagatcaacaagcttggctacaacccagccgttgaggccaaaggctttaccgctgcacagtgcaagtcagtgctcagcaagacgaaatcaagtgcatgggcactacaagacacagaaaagaaggtggaggcacgattctaaatgatgctcaaacgagggacgggaccttgcagtattgaaaataactagattgcgtatggcaatgtaaataatcatgaccaagttgtaacaaattaaagcggctcgatgatcatctcatatgatagcatctcttcgtttccgacatcgtccgtttttaggacatgacaaatagactacgttcaggctgtatggttccgctgcgtcttcagtgaagccatgtgcaacttagagctgctataaatattctgcaatgggcagggcgattatctaagagtcagtaatttgttccagacataagcgtcgtgatcataacatcagcggaataaccaacgatgatacagctcgagatctccaatttgggctccatccttaccaaggattgatatagggctgcagttatgtagtagtaactttc

SEQ ID NO: 24417 - DNA, 576 bp, Muscodor strobelii
  misc_feature: SGI cDNA ID NO. 568325
  misc_feature: Encodes the peptide sequence at SEQ ID NO 24418
atgggtattgatatgactaagcatgcaaagaagattgccatggaagaggccgggatcacaccgagtgatgttcaggtttgcgagcttcacgattgcttttccgccaacgagatgattgtcatcgatgctctcggcttgtcagaacctggcaaggctcatgaactggtgcggagtggtggtatcacatatggtggcaaggtggtcatcaacccctctggtggtcttatttccaagggccatccattaggcgcaactggtatcgctcaatgcgctgaactcgtatggcacctgcgaggctgggccaataaccgcgcgacaccaaataccaaatatgctctgcagcataatctcggtctcggcggtgcggtagtggtcactgtttacgcacggcccgaccggagcaccgcccccaaggtagactctgctactgtcggcaagatcaacaagcttggctacaacccagccgttgaggccaaaggctttaccgctgcacagtgcaagtcagtgctcagcaagacgaaatcaagtgcatgggcactacaagacacagaaaagaaggtggaggcacgattctaa

SEQ ID NO: 24418 - protein, 191 aa, Muscodor strobelii
  misc_feature: SGI Peptide ID NO. 568325
  misc_feature (3)..(127): Pfam Id: PF02803 Pfam Desc: Thiolase, C-terminal domain
  misc_feature (13)..(86): Pfam Id: PF02803 Pfam Desc: Thiolase, C-terminal domain
  misc_feature (1)..(191): NCBI GI: 85079209 Blast Desc: nonspecific lipid-transfer protein, mitochondrial precursor [Neurospora crassa OR74A] gi|28881149|emb|CAD70319.1| sterol carrier protein [Neurospora crassa] nonspecific protein,
  misc_feature (1)..(191): NCBI GI: 156043773 Blast Desc: SS1G_10890 [Sclerotinia sclerotiorum 1980] gi|154695277|gb|EDN95015.1| SS1G_10890 [Sclerotinia sclerotiorum 1980]
  misc_feature (1)..(191): NCBI GI: 154316969 Blast Desc: BC1G_03902 [Botryotinia fuckeliana B05.10] gi|150845514|gb|EDN20707.1| BC1G_03902 [Botryotinia fuckeliana B05.10]
  misc_feature (1)..(191): NCBI GI: 256729101 Blast Desc: [Nectria haematococca mpVI 77-13-4]
  misc_feature (1)..(191): NCBI GI: 238838728 Blast Desc: non-specific lipid-transfer protein [Microsporum canis CBS 113480]
  misc_feature (1)..(191): NCBI GI: 46138677 Blast Desc: FG10853.1 [Gibberella zeae PH-1]
  misc_feature (1)..(191): NCBI GI: 121706536 Blast Desc: sterol carrier protein, [Aspergillus clavatus NRRL 1] gi|119399678|gb|EAW10104.1| sterol carrier protein, [Aspergillus clavatus NRRL 1]
  misc_feature (1)..(191): NCBI GI: 169773949 Blast Desc: [Aspergillus oryzae RIB40] gi|238491980|ref|XP_002377227.1| sterol carrier protein, [Aspergillus flavus NRRL3357] gi|83769304|dbj|BAE59441.1| protein
  misc_feature (1)..(189): NCBI GI: 116199847 Blast Desc: conserved [Chaetomium globosum CBS 148.51] gi|88179358|gb|EAQ86826.1| conserved [Chaetomium globosum CBS 148.51]
  misc_feature (1)..(191): NCBI GI: 255949706 Blast Desc: Pc22g17070 [Penicillium chrysogenum Wisconsin 54-1255] gi|211592637|emb|CAP98995.1| Pc22g17070 [Penicillium chrysogenum Wisconsin 54-1255]
  misc_feature (1)..(188): SWISSPROT Homolog: EC 2.3.1.176 Propanoyl-CoA C-acyltransferase
MGIDMTKHAKKIAMEEAGITPSDVQVCELHDCFSANEMIVIDALGLSEPGKAHELVRSGGITYGGKVVINPSGGLISKGHPLGATGIAQCAELVWHLRGWANNRATPNTKYALQHNLGLGGAVVVTVYARPDRSTAPKVDSATVGKINKLGYNPAVEAKGFTAAQCKSVLSKTKSSAWALQDTEKKVEARF

SEQ ID NO: 24419 - DNA, 3606 bp, Muscodor strobelii; identical to SEQ ID NO: 24416
  misc_feature: SGI EST ID NO. CUFF.57518.0
  misc_feature: Variant of the nucleotide sequence at SEQ ID NO 24417

SEQ ID NO: 24420 - DNA, 1197 bp, Muscodor strobelii
  misc_feature: SGI cDNA ID NO. 568326
  misc_feature: Encodes the peptide sequence at SEQ ID NO 24421
atgtatggaatcacggttcttcagactaccaatgcaacttataaagacatcaagatgacctcgacagatgtgacacattatatcgttagcttgatagaggacaactcgaagtacgacgtgctcgcaggacttcgctcacaaacaaaaatcactctaattcttatcattgcttgccaacatcacgccatggccgaaacgatgcgtgcggtggtaatatctgccttcggcggtcctgaagtcctccagcaccgcaccgttcctaagcccatcccaggactaaacgagatcttgattcatgtgcaagcctttggtgtgaatcacgctgagatgcatatgcgaaaaggagaatgggacgaatggaatccaatcacaggccttgagtgcgttggcaccgttgttgccttcccgtcgcctgcctcgcccgagaatgccgcgaagttccccgttggcgccaaagtcgcagctgtgatgggtgggctcggtcgaaaccgacccggcggatacgggcagtttaccacggtgtcagcatcaaatgtcatcccgctggagtccgagttggcttgggaggacttagcagccctgccggaggtctattgcacagcgtggtcgtgtcttttcgctgttctggatctgagggctggtgagcgcatactaatccgtggtgcaactagcacgattggtcaagctgcgcttcatctcgctgttgatgctggtgctgttgttacggccacaacgagacggacggaacggttccaatggctgaaaggcttgggcgccgctgaggctgtgaaagaggaggagggcttgtataggaagcatgatgatataccgccaaggaagttcgacaaaatcctcaacctcgttgggaatcgggttctcgttgagtcgattgctttaacacgcgttggaggccgaatgctacaagctgggtggttagggggtttagatccagtcacggacttcaaccctatggtccagatggaatctggagtgcatttcagtctgttccatagcaaagtactaggcacgccggagtttccgattgagaatattccgctgcaggagattgtcaagaagatcgagaaagggaagtggaatgctcaaccagcaaaggtttttgagtacgaggatatacagaatgcacatcgggcactagactctcatgatactgggggtaagatcgttgtaagacattga

SEQ ID NO: 24421 - protein, 398 aa, Muscodor strobelii
  misc_feature: SGI Peptide ID NO. 568326
  misc_feature (93)..(182): Pfam Id: PF08240 Pfam Desc: Alcohol dehydrogenase GroES-like domain
  misc_feature (213)..(355): Pfam Id: PF00107 Pfam Desc: Zinc-binding dehydrogenase
  misc_feature (213)..(333): Pfam Id: PF00107 Pfam Desc: Zinc-binding dehydrogenase
  misc_feature (61)..(396): NCBI GI: 116181668 Blast Desc: CHGG_01462 [Chaetomium globosum CBS 148.51] gi|88185759|gb|EAQ93227.1| CHGG_01462 [Chaetomium globosum CBS 148.51]
  misc_feature (67)..(398): NCBI GI: 220921447 Blast Desc: Alcohol dehydrogenase zinc-binding domain protein [Methylobacterium nodulans ORS 2060] gi|219946053|gb|ACL56445.1| Alcohol dehydrogenase zinc-binding domain protein nodulans ORS
  misc_feature (65)..(396): NCBI GI: 254818420 Blast Desc: zinc-containing alcohol dehydrogenase superfamily protein [Mycobacterium intracellulare ATCC 13950]
  misc_feature (59)..(396): NCBI GI: 118471843 Blast Desc: zinc-containing alcohol dehydrogenase superfamily protein [Mycobacterium smegmatis str. MC2 155] gi|118173130|gb|ABK74026.1| zinc-containing alcohol dehydrogenase
  misc_feature (2)..(396): NCBI GI: 256725827 Blast Desc: NECHADRAFT_81934 [Nectria haematococca mpVI 77-13-4]
  misc_feature (67)..(396): NCBI GI: 170695138 Blast Desc: Alcohol dehydrogenase zinc-binding domain protein [Burkholderia graminis C4D1M] gi|170139990|gb|EDT08170.1| Alcohol dehydrogenase zinc-binding domain protein [Burkholderia graminis
  misc_feature (67)..(396): NCBI GI: 209520228 Blast Desc: Alcohol dehydrogenase zinc-binding domain protein [Burkholderia sp. H160] gi|209499344|gb|EDZ99429.1| Alcohol dehydrogenase zinc-binding domain protein [Burkholderia sp. H160]
  misc_feature (67)..(397): NCBI GI: 212636253 Blast Desc: NADPH:quinone reductase and related Zn-dependent oxidoreductase [Shewanella piezotolerans WP3] gi|212557737|gb|ACJ30191.1| NADPH:quinone reductase and related
  misc_feature (66)..(396): NCBI GI: 238502869 Blast Desc: zinc-binding oxidoreductase, [Aspergillus flavus NRRL3357] gi|220691478|gb|EED47826.1| zinc-binding oxidoreductase, [Aspergillus flavus NRRL3357]
  misc_feature (63)..(396): NCBI GI: 269795961 Blast Desc: Zn-dependent oxidoreductase, NADPH:quinone reductase [Sanguibacter keddieii DSM 10542] gi|269098146|gb|ACZ22582.1| Zn-dependent oxidoreductase, NADPH:quinone reductase keddieii DSM
  misc_feature (67)..(338): SWISSPROT Homolog: EC 1.6.5.5 NADPH:quinone reductase
MYGITVLQTTNATYKDIKMTSTDVTHYIVSLIEDNSKYDVLAGLRSQTKITLILIIACQHHAMAETMRAVVISAFGGPEVLQHRTVPKPIPGLNEILIHVQAFGVNHAEMHMRKGEWDEWNPITGLECVGTVVAFPSPASPENAAKFPVGAKVAAVMGGLGRNRPGGYGQFTTVSASNVIPLESELAWEDLAALPEVYCTAWSCLFAVLDLRAGERILIRGATSTIGQAALHLAVDAGAVVTATTRRTERFQWLKGLGAAEAVKEEEGLYRKHDDIPPRKFDKILNLVGNRVLVESIALTRVGGRMLQAGWLGGLDPVTDFNPMVQMESGVHFSLFHSKVLGTPEFPIENIPLQEIVKKIEKGKWNAQPAKVFEYEDIQNAHRALDSHDTGGKIVVRH

SEQ ID NO: 24422 - DNA, 1590 bp, Muscodor strobelii
  misc_feature: SGI cDNA ID NO. 568327
  misc_feature: Encodes the peptide sequence at SEQ ID NO 24423
atggcaccatctccggtagacggtgctggtccctccaccgccagtcaagacccttcttacgcctctcccccgcaccccacatgcggtgaagctgctcagcttgctgcagctataactgacaagcaagctgctgttgtcgatcccagccctacttctgctctcacaaccggaactcatgacactggcgctgtcctgacggccacaactgttgtgcacgggaactctgccgtcactcatcccaagatgctgttttctgagttttataagtcaactagattgccactctcacggctacgacagccgcagcagcagccgcactcgccatcggtgggggagattcaagagtatgacccagacctcatcagcaaggacagaaacaaacaaaaagaagctgtgaaacgtttcttagcttcaaatatccgcaatgattgggtattcaaatggcctattacacccgagacaaatggccgaggcaacactgccacaaaagaagatctagatgcgcctgccgagacattaccttcaaatgaaccgtctacagaggcgaccgaaacaaaagtagaacctaccgataatgaaaagacccaagatgagaatacctacagcgaggatgatggggcttccatttacagcacaatctcagaagaccacgatcattttgctccgcgattggaatggttgtcggattggtcagacaatgatgaggaatctgacgagccggtgtctccctcggcttatcgattcgaaagccctgacgcaataggctcaactgtcaaggcttctcaactagcacgtagcgcaaagcacaggagagctgtgcgtgccgagatggaatggaatactggactcgcctgctttaatgcgcgacgagatgcatggacaggcgccagaactgctcgtattcgcccgaagccaactacatcgacagtgtcgtcaccgactacgggcagaagactatccttttggagactctcgacctcagctacgcaatcatcgcccgccgactctgcacacaatcctatgcccttaaaccctgccactattcgtacctcaggtgacacggctgtgatctcttcgtcagataacgattccaaagagtcgagagccaaggaagattcgtcgagatatcccattcaaacaatattaccggtaccacctccgttgctcccgcctgcgaaccagatgcgtgcgtcaatcaccgcagcgacctattctgcaatttatgataaaatcgttcttgaggctttaatgcctgcatgtcccgtcaatcttcgagacgtgctttgctcttgtgttgttggttggaagcgggatggcgaatggccaccgaaagccgtggagataaaccccgtggttgcaatccgcagcaagaagaagaaaaaagatacgcacgcgactaattcgcggcgactgagtttcaattttctgggcagaagactgagtgcgggtggagacgtaagctcggcttcgaaacaaccacatacgtctaaagacgatgatgcaaacgcgactaatggtgtcaaaaggagcctatcaaaggttttgcgactaggacaggataagctaaacagtaacggagtcgctgcttaa

SEQ ID NO: 24423 - protein, 529 aa, Muscodor strobelii
  misc_feature: SGI Peptide ID NO. 568327
  misc_feature (82)..(519): NCBI GI: 171688742 Blast Desc: protein product [Podospora anserina] gi|170944333|emb|CAP70443.1| protein product [Podospora anserina]
  misc_feature (82)..(529): NCBI GI: 261354533 Blast Desc: conserved [Verticillium albo-atrum VaMs.102]
  misc_feature (73)..(519): NCBI GI: 46116980 Blast Desc: FG04332.1 [Gibberella zeae PH-1]
  misc_feature (82)..(449): NCBI GI: 85082772 Blast Desc: NCU01538 [Neurospora crassa OR74A] gi|18376149|emb|CAD21224.1| related to ATROPHIN-1 [Neurospora crassa] gi|28918069|gb|EAA27751.1| [Neurospora crassa OR74A]
  misc_feature (82)..(518): NCBI GI: 256729222 Blast Desc: NECHADRAFT_71298 [Nectria haematococca mpVI 77-13-4]
  misc_feature (106)..(444): NCBI GI: 145610593 Blast Desc: MGG_11440 [Magnaporthe grisea 70-15] gi|145017967|gb|EDK02246.1| MGG_11440 [Magnaporthe grisea 70-15]
  misc_feature (82)..(519): NCBI GI: 116199661 Blast Desc: CHGG_07986 [Chaetomium globosum CBS 148.51] gi|88179265|gb|EAQ86733.1| CHGG_07986 [Chaetomium globosum CBS 148.51]
  misc_feature (61)..(522): NCBI GI: 156059726 Blast Desc: SS1G_03876 [Sclerotinia sclerotiorum 1980] gi|154701662|gb|EDO01401.1| SS1G_03876 [Sclerotinia sclerotiorum 1980]
  misc_feature (116)..(518): NCBI GI: 154315804 Blast Desc: BC1G_04474 [Botryotinia fuckeliana B05.10] gi|150846870|gb|EDN22063.1| BC1G_04474 [Botryotinia fuckeliana B05.10]
  misc_feature (78)..(472): NCBI GI: 226279629 Blast Desc: conserved [Paracoccidioides brasiliensis Pb01]
MAPSPVDGAGPSTASQDPSYASPPHPTCGEAAQLAAAITDKQAAVVDPSPTSALTTGTHDTGAVLTATTVVHGNSAVTHPKMLFSEFYKSTRLPLSRLRQPQQQPHSPSVGEIQEYDPDLISKDRNKQKEAVKRFLASNIRNDWVFKWPITPETNGRGNTATKEDLDAPAETLPSNEPSTEATETKVEPTDNEKTQDENTYSEDDGASIYSTISEDHDHFAPRLEWLSDWSDNDEESDEPVSPSAYRFESPDAIGSTVKASQLARSAKHRRAVRAEMEWNTGLACFNARRDAWTGARTARIRPKPTTSTVSSPTTGRRLSFWRLSTSATQSSPADSAHNPMPLNPATIRTSGDTAVISSSDNDSKESRAKEDSSRYPIQTILPVPPPLLPPANQMRASITAATYSAIYDKIVLEALMPACPVNLRDVLCSCVVGWKRDGEWPPKAVEINPVVAIRSKKKKKDTHATNSRRLSFNFLGRRLSAGGDVSSASKQPHTSKDDDANATNGVKRSLSKVLRLGQDKLNSNGVAA

SEQ ID NO: 24424 - DNA, 2198 bp, Muscodor strobelii
  misc_feature: SGI EST ID NO. CUFF.57523.0
  misc_feature: Variant of the nucleotide sequence at SEQ ID NO 24422
cccatgcattatctgtgcttatatgcctcagcgcttgacatggctgcctatgcagcaaatttgtaggaaacgcagaattttgagacttcttttgatttcctcaagctcttttaatcctttgtgtctgtgaattactctcgtggcctcaagataaaagagatgctattctgatgtcacacatgtccctaatccccagttgcttggcctgtcagtccacccgttcccgcatagtgctaaccaaggccgagccaaggatcctagaatctcagcaagggtgatggcaccatctccggtagacggtgctggtccctccaccgccagtcaagacccttcttacgcctctcccccgcaccccacatgcggtgaagctgctcagcttgctgcagctataactgacaagcaagctgctgttgtcgatcccagccctacttctgctctcacaaccggaactcatgacactggcgctgtcctgacggccacaactgttgtgcacgggaactctgccgtcactcatcccaagatgctgttttctgagttttataagtcaactagattgccactctcacggctacgacagccgcagcagcagccgcactcgccatcggtgggggagattcaagagtatgacccagacctcatcagcaaggacagaaacaaacaaaaagaagctgtgaaacgtttcttagcttcaaatatccgcaatgattgggtattcaaatggcctattacacccgagacaaatggccgaggcaacactgccacaaaagaagatctagatgcgcctgccgagacattaccttcaaatgaaccgtctacagaggcgaccgaaacaaaagtagaacctaccgataatgaaaagacccaagatgagaatacctacagcgaggatgatggggcttccatttacagcacaatctcagaagaccacgatcattttgctccgcgattggaatggttgtcggattggtcagacaatgatgaggaatctgacgagccggtgtctccctcggcttatcgattcgaaagccctgacgcaataggctcaactgtcaaggcttctcaactagcacgtagcgcaaagcacaggagagctgtgcgtgccgagatggaatggaatactggactcgcctgctttaatgcgcgacgagatgcatggacaggcgccagaactgctcgtattcgcccgaagccaactacatcgacagtgtcgtcaccgactacgggcagaagactatccttttggagactctcgacctcagctacgcaatcatcgcccgccgactctgcacacaatcctatgcccttaaaccctgccactattcgtacctcaggtgacacggctgtgatctcttcgtcagataacgattccaaagagtcgagagccaaggaagattcgtcgagatatcccattcaaacaatattaccggtaccacctccgttgctcccgcctgcgaaccagatgcgtgcgtcaatcaccgcagcgacctattctgcaatttatgataaaatcgttcttgaggctttaatgcctgcatgtcccgtcaatcttcgagacgtgctttgctcttgtgttgttggttggaagcgggatggcgaatggccaccgaaagccgtggagataaaccccgtggttgcaatccgcagcaagaagaagaaaaaagatacgcacgcgactaattcgcggcgactgagtttcaattttctgggcagaagactgagtgcgggtggagacgtaagctcggcttcgaaacaaccacatacgtctaaagacgatgatgcaaacgcgactaatggtgtcaaaaggagcctatcaaaggttttgcgactaggacaggataagctaaacagtaacggagtcgctgcttaaggcaaagcaagatcagcgacgtcgcacacgatgcctcaagttgtaactatgttatgtggtggttctcatgtttcctgacgctatgttgaaagcggacatcttgcgagaggcgtggagttgcatttgcatccggcattatacccagcatgtttcggcgttgtggctttctggctgagagctgttcgttcctgtttaaaaataagtaaatggatcaggaagaataaagtgcgatataactcataagttctcaatcatcaacggcgttggcgttatttacatcctggtgagatcatgagatgaacagcgtgaatggaacctattccagtcttgc

SEQ ID NO: 24425 - DNA, 990 bp, Muscodor strobelii
  misc_feature: SGI cDNA ID NO. 568328
  misc_feature: Encodes the peptide sequence at SEQ ID NO 24426
atgtcaggtgtagagaaaaaggagtacaccgaagaggagcgtcaacaacgtgctgctcggaagcgagcccgcacatgctggattaccggggctagcgaagaggacaaagaacgtgctgtccgccttgcactcaaccaggtgtccggccgaaaaaagtatagctggctaaatcaagagcctgagaccccagcccagacactcggcacttcgggtgcgcttctccttgggatcgagaagggagccatcgcaaaagaactcaagatcggaaagcaccgccctaacttcaacaaggaagttgaagcaccacgtgtacaactcaacgtgaaggaattaagaggcatgggcctcaacttgactatcgaggacgcagagaaaatgatgcgagactgcgggcaaagcgaacaggatatccaagaatttcgcacccgcaatggctgcagcgatgcagcagtcgacaagccagatgagcctctcgacccagacgtcacggaggaggaagtgagagagctcgaggaaatgcttctggcatctgatatagaaccagaattgagcgagcaggagaaagaagatagagagatcgcagaaatggagatgttcctcgcttctgacgagccagagataatcgagaagactcaagagaaccaggacaactctcacactgagtctatgagcccccgcatggtgcgagccaacgcaatgaagagaaagcgaggcaacccgaccaacgaggacaacagtcacaatgcccgcgaagcggactacgatttggatgaaggcgaccgtgctgctctacgcaggcacaaacgttccgaaaaggtctctaaaaagagaaaagttaagcacgatcaagagaatgactggcgcgctgagcacgctgccaagaagaaacgaggcctcgagattgagaaacgccgtgccgaagctgctgccaagcagactcaatatttgaaggataatggctcctcgaaagattgccccatcgagctctaa

SEQ ID NO: 24426 - protein, 329 aa, Muscodor strobelii
  misc_feature: SGI Peptide ID NO. 568328
MSGVEKKEYTEEERQQRAARKRARTCWITGASEEDKERAVRLALNQVSGRKKYSWLNQEPETPAQTLGTSGALLLGIEKGAIAKELKIGKHRPNFNKEVEAPRVQLNVKELRGMGLNLTIEDAEKMMRDCGQSEQDIQEFRTRNGCSDAAVDKPDEPLDPDVTEEEVRELEEMLLASDIEPELSEQEKEDREIAEMEMFLASDEPEIIEKTQENQDNSHTESMSPRMVRANAMKRKRGNPTNEDNSHNAREADYDLDEGDRAALRRHKRSEKVSKKRKVKHDQENDWRAEHAAKKKRGLEIEKRRAEAAAKQTQYLKDNGSSKDCPIEL

SEQ ID NO: 24427 - DNA, 1269 bp, Muscodor strobelii
  misc_feature: SGI cDNA ID NO. 568329
  misc_feature: Encodes the peptide sequence at SEQ ID NO 24428
atggcgtcccgccctcgtcgcgcagccgcccaacgggctaacaaaaccattactgacatggtcgacagcgataaccatacaagtagtcggacggggaggatcatgtcatcgagagcttcgcgccgatctgagggtaagagtgccgtggcatcagtctcacacggccctccttcgtcgccctcagattctaaccagcatgttcatttaacagtcaagcttcccgccagcaagcttcgccaagctactaccagtcgctctgcccagtcaggacgggagaacgcccgagagagcttctccggcggtgagatcattgagggtaagagaaatcgatctaagaagagtagttatgtcctcgagactagtgatgacgacgacgaggatgaggacgcaccgggagaggaggacgacgaagaggatgctgaaggagaggaggacgatatgatcgatgacgacgaagaagatgcagagggcgaaatcgttgttgaagacgatactatggatctcgacccagacgatgacgatgaaggcgaggaagacgccgagggtgaagacgatgacatggaattggattccattccgccgcccgcccccgtcatcaaagtttccaagccgcctgctaagagcagcaacactgccaagcccagagctccggcaaagccttcacccgccaaaccaatgccagcccaagtcggggacagtgacgatgacgaagaactcagcgagctggaaagcgatgcggatgagattcaagataccgtcaaagtcggcggaggcgacgatgaggacgctgaaggcgaagacgaggagcttgaggatgccgaaggtgccgaagaagatgatgaccttggtagtgatgaagacgacagccaaggagaagcacccgacctgaccaagatgaccaaacgccaacgagctcgatttgaagagggtggtgagcttatgaaattatctgatgaggttcaagcgaagaagcattttactgcggaggaactctccatgcgtcgggcagagatggcccggcgcaggcgcaatctcagtgaaaaacgcaatgaggaagtcaagatggaaaccatcaataaactgcttaagaagcaggcgcccaaaattagccgcaaagcacaacttgccatggaggccactccagatgtagaagcgcaacggccggatcccatcttcgtacgctgggtaagcagcaaagaaggggtccgtgtcgctatctccgaagagatgttgagcggtccagcagggagagtcttcgtgaagaactag

SEQ ID NO: 24428 - protein, 422 aa, Muscodor strobelii
  misc_feature: SGI Peptide ID NO. 568329
  misc_feature (330)..(412): Pfam Id: PF04795 Pfam Desc: PAPA-1-like conserved region
  misc_feature (330)..(367): Pfam Id: PF04795 Pfam Desc: PAPA-1-like conserved region
  misc_feature (1)..(419): NCBI GI: 256729220 Blast Desc: NECHADRAFT_83976 [Nectria haematococca mpVI 77-13-4]
  misc_feature (1)..(419): NCBI GI: 39973543 Blast Desc: MGG_01082 [Magnaporthe grisea 70-15] gi|145017959|gb|EDK02238.1| MGG_01082 [Magnaporthe grisea 70-15]
  misc_feature (191)..(421): NCBI GI: 171688736 Blast Desc: protein product [Podospora anserina] gi|170944330|emb|CAP70440.1| protein product [Podospora anserina]
  misc_feature (271)..(419): NCBI GI: 116199657 Blast Desc: CHGG_07984 [Chaetomium globosum CBS 148.51] gi|88179263|gb|EAQ86731.1| CHGG_07984 [Chaetomium globosum CBS 148.51]
  misc_feature (280)..(419): NCBI GI: 261355113 Blast Desc: conserved [Verticillium albo-atrum VaMs.102]
  misc_feature (285)..(419): NCBI GI: 85082756 Blast Desc: NCU01534 [Neurospora crassa OR74A] gi|18376145|emb|CAD21220.1| conserved [Neurospora crassa] gi|28918065|gb|EAA27747.1| [Neurospora crassa OR74A]
  misc_feature (287)..(419): NCBI GI: 156059782 Blast Desc: SS1G_03904 [Sclerotinia sclerotiorum 1980] gi|154701690|gb|EDO01429.1| SS1G_03904 [Sclerotinia sclerotiorum 1980]
  misc_feature (56)..(419): NCBI GI: 238841876 Blast Desc: conserved [Microsporum canis CBS 113480]
  misc_feature (283)..(419): NCBI GI: 154281713 Blast Desc: [Ajellomyces capsulatus NAm1] gi|150411848|gb|EDN07236.1| [Ajellomyces capsulatus NAm1]
  misc_feature (283)..(419): NCBI GI: 225563230 Blast Desc: conserved [Ajellomyces capsulatus G186AR]
MASRPRRAAAQRANKTITDMVDSDNHTSSRTGRIMSSRASRRSEGKSAVASVSHGPPSSPSDSNQHVHLTVKLPASKLRQATTSRSAQSGRENARESFSGGEIIEGKRNRSKKSSYVLETSDDDDEDEDAPGEEDDEEDAEGEEDDMIDDDEEDAEGEIVVEDDTMDLDPDDDDEGEEDAEGEDDDMELDSIPPPAPVIKVSKPPAKSSNTAKPRAPAKPSPAKPMPAQVGDSDDDEELSELESDADEIQDTVKVGGGDDEDAEGEDEELEDAEGAEEDDDLGSDEDDSQGEAPDLTKMTKRQRARFEEGGELMKLSDEVQAKKHFTAEELSMRRAEMARRRRNLSEKRNEEVKMETINKLLKKQAPKISRKAQLAMEATPDVEAQRPDPIFVRWVSSKEGVRVAISEEMLSGPAGRVFVKN

SEQ ID NO: 24429 - DNA, 2228 bp, Muscodor strobelii
  misc_feature: SGI EST ID NO. CUFF.57609.3
  misc_feature: Variant of the nucleotide sequence at SEQ ID NO 24427
aaacaaccaacattttaggatggttgcgcaaacccaaaaatcccccaggccaggcttttccccgtggtgttcgtcaatggttcaatgggacagataggaccccgtgttgccaatgaaaccgccctgcgtacggcgtacggcatgcggctggcccagccgagcccagctgcgtctatcttcgctctctgtgttgctttgttggttgggggaactagcttctacccttccattgaatgtcgtgggcgacggtactttgcctcactagccccgcgagaaggcgagaagcagatagagtagagaggcttcccggaagggctgggttgaatggctacaaaacagattcaagtggccaaggttcctccaatccccattcagaaacacgccccaatcaagaaacatcccaagccctgcggcaacctacctcatcgattgtttgctgctgcgcgatcgtgtcacggcccatctcttttcctatcttacgctgcaggacgcaagcttaccactccggccatctctttgcgggcgctctgcacacaagccacctccaaaaataaatcccgtctacctggctcgctggcttcaagcatcaacttcatcttacatcatcgccctcagctgtgctctcacttgcatcctcaattttctgcagcccagccccatcagacagaccagccaatacatcatttgctactgattaagcaccctgtatctgttggcacggcacagtcatatttaccatggcgtcccgccctcgtcgcgcagccgcccaacgggctaacaaaaccattactgacatggtcgacagcgataaccatacaagtagtcggacggggaggatcatgtcatcgagagcttcgcgccgatctgagggtaagagtgccgtggcatcagtctcacacggccctccttcgtcgccctcagattctaaccagcatgttcatttaacagtcaagcttcccgccagcaagcttcgccaagctactaccagtcgctctgcccagtcaggacgggagaacgcccgagagagcttctccggcggtgagatcattgagggtaagagaaatcgatctaagaagagtagttatgtcctcgagactagtgatgacgacgacgaggatgaggacgcaccgggagaggaggacgacgaagaggatgctgaaggagaggaggacgatatgatcgatgacgacgaagaagatgcagagggcgaaatcgttgttgaagacgatactatggatctcgacccagacgatgacgatgaaggcgaggaagacgccgagggtgaagacgatgacatggaattggattccattccgccgcccgcccccgtcatcaaagtttccaagccgcctgctaagagcagcaacactgccaagcccagagctccggcaaagccttcacccgccaaaccaatgccagcccaagtcggggacagtgacgatgacgaagaactcagcgagctggaaagcgatgcggatgagattcaagataccgtcaaagtcggcggaggcgacgatgaggacgctgaaggcgaagacgaggagcttgaggatgccgaaggtgccgaagaagatgatgaccttggtagtgatgaagacgacagccaaggagaagcacccgacctgaccaagatgaccaaacgccaacgagctcgatttgaagagggtggtgagcttatgaaattatctgatgaggttcaagcgaagaagcattttactgcggaggaactctccatgcgtcgggcagagatggcccggcgcaggcgcaatctcagtgaaaaacgcaatgaggaagtcaagatggaaaccatcaataaactgcttaagaagcaggcgcccaaaattagccgcaaagcacaacttgccatggaggccactccagatgtagaagcgcaacggccggatcccatcttcgtacgctgggtaagcagcaaagaaggggtccgtgtcgctatctccgaagagatgttgagcggtccagcagggagagtcttcgtgaagaactaggccatttgtcagatatactcagcctcagaactatcatggaaagatagtcattaatctgaagtcatactgttaagccacggtccaccaatcctgttagagtcacatattttacacaaaagctttgtttgtctcaagtgttagtcttgagagcttcagcttgtttgcatacgtcgaccgtgtctagtgtcgagttgccgaggtaaatctagtttaccaatacca

SEQ ID NO: 24430 - DNA, 1191 bp, Muscodor strobelii
  misc_feature: SGI cDNA ID NO. 568330
  misc_feature: Encodes the peptide sequence at SEQ ID NO 24431
atggcgtcccgccctcgtcgcgcagccgcccaacgggctaacaaaaccattactgacatggtcgacagcgataaccatacaagtagtcggacggggaggatcatgtcatcgagagcttcgcgccgatctgaggtcaagcttcccgccagcaagcttcgccaagctactaccagtcgctctgcccagtcaggacgggagaacgcccgagagagcttctccggcggtgagatcattgagggtaagagaaatcgatctaagaagagtagttatgtcctcgagactagtgatgacgacgacgaggatgaggacgcaccgggagaggaggacgacgaagaggatgctgaaggagaggaggacgatatgatcgatgacgacgaagaagatgcagagggcgaaatcgttgttgaagacgatactatggatctcgacccagacgatgacgatgaaggcgaggaagacgccgagggtgaagacgatgacatggaattggattccattccgccgcccgcccccgtcatcaaagtttccaagccgcctgctaagagcagcaacactgccaagcccagagctccggcaaagccttcacccgccaaaccaatgccagcccaagtcggggacagtgacgatgacgaagaactcagcgagctggaaagcgatgcggatgagattcaagataccgtcaaagtcggcggaggcgacgatgaggacgctgaaggcgaagacgaggagcttgaggatgccgaaggtgccgaagaagatgatgaccttggtagtgatgaagacgacagccaaggagaagcacccgacctgaccaagatgaccaaacgccaacgagctcgatttgaagagggtggtgagcttatgaaattatctgatgaggttcaagcgaagaagcattttactgcggaggaactctccatgcgtcgggcagagatggcccggcgcaggcgcaatctcagtgaaaaacgcaatgaggaagtcaagatggaaaccatcaataaactgcttaagaagcaggcgcccaaaattagccgcaaagcacaacttgccatggaggccactccagatgtagaagcgcaacggccggatcccatcttcgtacgctgggtaagcagcaaagaaggggtccgtgtcgctatctccgaagagatgttgagcggtccagcagggagagtcttcgtgaagaactag

SEQ ID NO: 24431 - protein, 396 aa, Muscodor strobelii
  misc_feature: SGI Peptide ID NO. 568330
  misc_feature (304)..(386): Pfam Id: PF04795 Pfam Desc: PAPA-1-like conserved region
  misc_feature (304)..(341): Pfam Id: PF04795 Pfam Desc: PAPA-1-like conserved region
  misc_feature (1)..(393): NCBI GI: 256729220 Blast Desc: NECHADRAFT_83976 [Nectria haematococca mpVI 77-13-4]
  misc_feature (1)..(393): NCBI GI: 39973543 Blast Desc: MGG_01082 [Magnaporthe grisea 70-15] gi|145017959|gb|EDK02238.1| MGG_01082 [Magnaporthe grisea 70-15]
  misc_feature (165)..(395): NCBI GI: 171688736 Blast Desc: protein product [Podospora anserina] gi|170944330|emb|CAP70440.1| protein product [Podospora anserina]
  misc_feature (245)..(393): NCBI GI: 116199657 Blast Desc: CHGG_07984 [Chaetomium globosum CBS 148.51] gi|88179263|gb|EAQ86731.1| CHGG_07984 [Chaetomium globosum CBS 148.51]
  misc_feature (254)..(393): NCBI GI: 261355113 Blast Desc: conserved [Verticillium albo-atrum VaMs.102]
  misc_feature (259)..(393): NCBI GI: 85082756 Blast Desc: NCU01534 [Neurospora crassa OR74A] gi|18376145|emb|CAD21220.1| conserved [Neurospora crassa] gi|28918065|gb|EAA27747.1| [Neurospora crassa OR74A]
  misc_feature (261)..(393): NCBI GI: 156059782 Blast Desc: SS1G_03904 [Sclerotinia sclerotiorum 1980] gi|154701690|gb|EDO01429.1| SS1G_03904 [Sclerotinia sclerotiorum 1980]
  misc_feature (261)..(393): NCBI GI: 154315912 Blast Desc: BC1G_04528 [Botryotinia fuckeliana B05.10] gi|150846924|gb|EDN22117.1| BC1G_04528 [Botryotinia fuckeliana B05.10]
  misc_feature (38)..(393): NCBI GI: 238841876 Blast Desc: conserved [Microsporum canis CBS 113480]
  misc_feature (257)..(393): NCBI GI: 154281713 Blast Desc: [Ajellomyces capsulatus NAm1] gi|150411848|gb|EDN07236.1| [Ajellomyces capsulatus NAm1]
MASRPRRAAAQRANKTITDMVDSDNHTSSRTGRIMSSRASRRSEVKLPASKLRQATTSRSAQSGRENARESFSGGEIIEGKRNRSKKSSYVLETSDDDDEDEDAPGEEDDEEDAEGEEDDMIDDDEEDAEGEIVVEDDTMDLDPDDDDEGEEDAEGEDDDMELDSIPPPAPVIKVSKPPAKSSNTAKPRAPAKPSPAKPMPAQVGDSDDDEELSELESDADEIQDTVKVGGGDDEDAEGEDEELEDAEGAEEDDDLGSDEDDSQGEAPDLTKMTKRQRARFEEGGELMKLSDEVQAKKHFTAEELSMRRAEMARRRRNLSEKRNEEVKMETINKLLKKQAPKISRKAQLAMEATPDVEAQRPDPIFVRWVSSKEGVRVAISEEMLSGPAGRVFVKN

SEQ ID NO: 24432 - DNA, 2228 bp, Muscodor strobelii; identical to SEQ ID NO: 24429
  misc_feature: SGI EST ID NO. CUFF.57609.3
  misc_feature: Variant of the nucleotide sequence at SEQ ID NO 24430

SEQ ID NO: 24433 - DNA, 1047 bp, Muscodor strobelii
  misc_feature: SGI cDNA ID NO. 568331
  misc_feature: Reduced expression when VOC is produced
  misc_feature: Encodes the peptide sequence at SEQ ID NO 24434
atggcatcgcccaagacatcagcaatacccgagtggcagcagcagtctccggcggactcttcatctgatacaaagtcggaaaccgatgagctcagcatagagaaagcacgcctgtttctccaggatgagaccatacgagcagctagtccgcagcagaagagagaattcctcaagagcaagggatatgatgacgaacagattagccagctcgaagcagaacggaccgaggacacgccgcagtccgaagctcgtccagaagccccagatgcgactcctgctacgaatggcccatctacaccgacttccgcgtcagcctcgagccctgcggtgatcactgagaccgagacggcgcccatcattacctaccccgagtttctgacggcctctccgcgtccgccaccgctcatcaccccgtcccgcctcgccaacatcctagccgtgtccggcggcatctgggccctgctgtacggtgtcgccggtctcgttgtcaatcccatggtcgagaacctcaacagcgcccgctccgactactatgccaacgtgggtggaaagcttgacgagctgaacgagaggctagcgcgtgtcgtgagcaaagtcccctccagaccgaccagtcgggaccacagcgcagaggacgacgagagcgtaaacagcgatccgaccgagatgttccaccgcgatattggcactcagaccaccgacatccctcacttcgccgacgctggtgctgctgtggccgacgagaaaccaatcgatgcccatgcgcgacgccttgccgccctcaagctacgtctaagcgagattcgctcgacgaaagaccgcatggccactcagaccaaggaactcataacgctggttggggaggtgcgcgagggcatcgagactgcgacaaatgccccgaggtcggacttctcatcctacaatggactgagctttggccgcagcgctgagccagacgatgagttcaagaagaccaaggatgccatccgtggagtgaagggattactgcttagttctcggaatttcccagcagtgagcgcaagatag

SEQ ID NO: 24434 - protein, 348 aa, Muscodor strobelii
  misc_feature: SGI Peptide ID NO. 568331
  misc_feature (2)..(342): NCBI GI: 256729424 Blast Desc: NECHADRAFT_95697 [Nectria haematococca mpVI 77-13-4]
  misc_feature (29)..(348): NCBI GI: 46116974 Blast Desc: FG04329.1 [Gibberella zeae PH-1]
  misc_feature (2)..(346): NCBI GI: 116199659 Blast Desc: CHGG_07985 [Chaetomium globosum CBS 148.51] gi|88179264|gb|EAQ86732.1| CHGG_07985 [Chaetomium globosum CBS 148.51]
  misc_feature (26)..(343): NCBI GI: 189198672 Blast Desc: conserved [Pyrenophora tritici-repentis Pt-1C-BFP] gi|187982772|gb|EDU48260.1| conserved [Pyrenophora tritici-repentis Pt-1C-BFP]
  misc_feature (9)..(343): NCBI GI: 39973545 Blast Desc: MGG_01081 [Magnaporthe grisea 70-15] gi|145017960|gb|EDK02239.1| MGG_01081 [Magnaporthe grisea 70-15]
  misc_feature (4)..(348): NCBI GI: 146322958 Blast Desc: peroxisomal membrane anchor protein [Aspergillus fumigatus Af293] gi|129558545|gb|EAL93590.2| peroxisomal membrane anchor protein, [Aspergillus fumigatus Af293]
  misc_feature (8)..(344): NCBI GI: 67540176 Blast Desc: AN6258.2 [Aspergillus nidulans FGSC A4] gi|40739452|gb|EAA58642.1| AN6258.2 [Aspergillus nidulans FGSC A4] gi|259479531|tpe|CBF69838.1| TPA: microbody (peroxisome) FGSC
  misc_feature (4)..(344): NCBI GI: 145231668 Blast Desc: An02g01680 [Aspergillus niger] gi|134056211|emb|CAK96386.1| protein product [Aspergillus niger]
  misc_feature (4)..(348): NCBI GI: 159129685 Blast Desc: peroxisomal membrane anchor protein, [Aspergillus fumigatus A1163]
  misc_feature (5)..(344): NCBI GI: 261195260 Blast Desc: peroxin 14/17 [Ajellomyces dermatitidis SLH14081] gi|239587906|gb|EEQ70549.1| peroxin 14/17 [Ajellomyces dermatitidis SLH14081]
  misc_feature: Useful for introducing or modulating the production of volatile compounds
MASPKTSAIPEWQQQSPADSSSDTKSETDELSIEKARLFLQDETIRAASPQQKREFLKSKGYDDEQISQLEAERTEDTPQSEARPEAPDATPATNGPSTPTSASASSPAVITETETAPIITYPEFLTASPRPPPLITPSRLANILAVSGGIWALLYGVAGLVVNPMVENLNSARSDYYANVGGKLDELNERLARVVSKVPSRPTSRDHSAEDDESVNSDPTEMFHRDIGTQTTDIPHFADAGAAVADEKPIDAHARRLAALKLRLSEIRSTKDRMATQTKELITLVGEVREGIETATNAPRSDFSSYNGLSFGRSAEPDDEFKKTKDAIRGVKGLLLSSRNFPAVSAR

SEQ ID NO: 24435 - DNA, 1861 bp, Muscodor strobelii
  misc_feature: SGI EST ID NO. CUFF.57556.0
  misc_feature: Variant of the nucleotide sequence at SEQ ID NO 24433
caacatttcccattacattgttgctccaccacttgtcacgtatctatttacgttcgcaatcactctcttaagcgcagtaaagtatcgtgcaccatggcatcgcccaagacatcagcaatacccgagtggcagcagcagtctccggcggactcttcatctgatacaaagtcggaaaccgatgagctcagcatagagaaagcacgcctgtttctccaggatgagaccatacgagcagctagtccgcagcagaagagagaattcctcaagagcaagggatatgatgacgaacagattagccagctcgaagcagaacggaccgaggacacgccgcagtccgaagctcgtccagaagccccagatgcgactcctgctacgaatggcccatctacaccgacttccgcgtcagcctcgagccctgcggtgatcactgagaccgagacggcgcccatcattacctaccccgagtttctgacggcctctccgcgtccgccaccgctcatcaccccgtcccgcctcgccaacatcctagccgtgtccggcggcatctgggccctgctgtacggtgtcgccggtctcgttgtcaatcccatggtcgagaacctcaacagcgcccgctccgactactatgccaacgtgggtggaaagcttgacgagctgaacgagaggctagcgcgtgtcgtgagcaaagtcccctccagaccgaccagtcgggaccacagcgcagaggacgacgagagcgtaaacagcgatccgaccgagatgttccaccgcgatattggcactcagaccaccgacatccctcacttcgccgacgctggtgctgctgtggccgacgagaaaccaatcgatgcccatgcgcgacgccttgccgccctcaagctacgtctaagcgagattcgctcgacgaaagaccgcatggccactcagaccaaggaactcataacgctggttggggaggtgcgcgagggcatcgagactgcgacaaatgccccgaggtcggacttctcatcctacaatggactgagctttggccgcagcgctgagccagacgatgagttcaagaagaccaaggatgccatccgtggagtgaagggattactgcttagttctcggaatttcccagcagtgagcgcaagatagtacagtggtcaagtcactgctttcggaaaacaccaacgggaaggtgcgtccctttacaaagacgaacagcttgaagttccgcaacttccatcgaaatcacaaacggcgaagccgccgatttgggtccaatccaacatacagtctgcctacgcgacggtcgatacgagctataaggacgacgtcgattcgctccctgcgcccgcccctattcgaggacacattcgctttggccattgtgctcccatcaacgttcagtcagccaggcaccgtcgcttttcagtgagcgaaatatgggctctcaacagtagagaagcagtagaggattcgaagaccaagcttcaaagcgaagccggcctctttgttgacatgaacaggctctacaacactcgggcggtccctcctccgactccatccactgcacctcgtacaccaccaccacgaaaggcaaagctttgaagtatcgatgtggtttctactcagtatattgattgaatacagcgaaaactagcgttagaagtgttttgttagtgtaaattaaggatactggatagaaaacagtcaggctagagaaaaacataaggcgatacgctcgtcctataataacactcatagtcgtccgcttaattgctcgaatagctgtttgatggcgttattggatagctagtagactaatcgtagggtttaatctaagagctaagcttcaaatgaattgttacgccgg

SEQ ID NO: 24436 - DNA, 2091 bp, Muscodor strobelii
  misc_feature: SGI cDNA ID NO. 568332
  misc_feature: Encodes the peptide sequence at SEQ ID NO 24437
atgtctctaaagtaccaacctctagagaagaactctaaggaaattcgcctgctcacacttatacgtggagccaaatacgaaccgatccgatgcacaatcgcacattatcggttaggacggtactctgtgcatggagaacgtgtgtttgactgggaccgagacccaaatatcgacacaagagaacccagctggattgatcctcctgaagatggtgttgtgtgggcggattggggagacgaacctaagcctagtgatccgaatgtagaatgggttcctcagtatgaagcgctctcttacacctggggtagtccacccgacaccaagtttatcaccttaaatggtcagcaaattagagttcgagagaacttgtacatcgcacttctacgattacggagcagtatgagagatcggcgactatggatcgacgcgctctgtatagaccagagtaatcccacagagcgatccgagcaagtcttaaggatgcgagagatctatcagagagctcaacgagtagtgatatggctgggcgatgccagcgtggatagccaccttgcattccaaacgcttgaactcatcggaggcacggataagcaaagaagcgcgggccccggtcttaggggcgaatggtggggaccacagttcgacttgttttgcgggattcccagaaatgcggaaaaagatcaacttccaatgatatggtacatgaactcgctcggtttaaagtcctgggaagatattgaagaggtttcgaaatcagccctgcgcaatctactgacccgagattattggaaacgtgtttggtgcgtccaggaaataagcaatgcgcagtccggggtggtaatgtgcggtcatgactccattgactggaacgttttcgactttgttctatataataacgaaatccggaaaaatccaaacgggtttccggacttcctgttatcgactggatcttggcaaatgatcggcgagcgcatgtctacaagaaatccactgaggaattttggcttcaatactgggacgcttctggggcacttatgcgaatatcgcgatcatgacgccacagatccaagagacaagatatatgctcttcttggtctaccgacagtggaagatgacatacctatccgtcctgactacgagatgtccattgccgaagtgtactgcgatgtggttaggacaatcatcaactatagtcgagatctttccatattgacacatccccgggacgacgaacaatcagcacacggcgttccctcatgggtcccagactggtcgctgaaaacgccgaaatttagcgccaacataaatcacccccagttcaaggctgccagagactcagttgtgagaggacctgactttccagaaataacaggtgcaaggagagacaacgaaaatcgccattttcgacccgaaggacttccactcctacaatggggactcgtagagcgacctcaagagcgcacgaaatatatgatttgcgactctgaaaaagccctatggatagatgctatcttttcagatttactagtatgggttggtgagcctctttctcaatcttgcctcgacgatggcagctggaaggacatcgttcgtaggtggtgcaaccctcccctgcctccaactacgagaagtgagacattcgaaaacgtccccgcccgtatctgggtcgcgatggtgaagaatggactacgcatccccgtttcagagtcggatgaagactggtggcatgtctgtttcgaacagttccttgtctttttggggaaactcgcaccagagcgcgtgcagcggccggatcttgcgaggctgctcgaaccgccttttgaaacacagttaatggagagcctacggggctgtaaacttggaatgacacatcaggagcggtttgctttggtgccgccgtcggcatgcgaggatgatgctattgtagtggcatttggtgcagatgttccgcttgtgattaggcgacttgatactgacacctattacgtgaaactgatcggtggtgcgtacgttcctgggatgatgaccggggagatgatcgacgagttcgagaatgggtacaaggaggtgattcagattgggcttatttga

SEQ ID NO: 24437 - protein, 696 aa, Muscodor strobelii
  misc_feature: SGI Peptide ID NO. 568332
  misc_feature (94)..(271): Pfam Id: PF06985 Pfam Desc: Heterokaryon incompatibility protein (HET)
  misc_feature (94)..(184): Pfam Id: PF06985 Pfam Desc: Heterokaryon incompatibility protein (HET)
  misc_feature (4)..(459): NCBI GI: 154311024 Blast Desc: BC1G_06630 [Botryotinia fuckeliana B05.10] gi|150851034|gb|EDN26227.1| BC1G_06630 [Botryotinia fuckeliana B05.10]
  misc_feature (91)..(425): NCBI GI: 39975543 Blast Desc: MGG_00082 [Magnaporthe grisea 70-15] gi|145019080|gb|EDK03359.1| MGG_00082 [Magnaporthe grisea 70-15]
  misc_feature (1)..(404): NCBI GI: 256723241 Blast Desc: NECHADRAFT_51990 [Nectria haematococca mpVI 77-13-4]
  misc_feature (94)..(429): NCBI GI: 169622599 Blast Desc: SNOG_14524 [Phaeosphaeria nodorum SN15] gi|111056944|gb|EAT78064.1| SNOG_14524 [Phaeosphaeria nodorum SN15]
  misc_feature (92)..(429): NCBI GI: 116182272 Blast Desc: CHGG_01764 [Chaetomium globosum CBS 148.51] gi|88186061|gb|EAQ93529.1| CHGG_01764 [Chaetomium globosum CBS 148.51]
  misc_feature (92)..(428): NCBI GI: 226287224 Blast Desc: conserved [Paracoccidioides brasiliensis Pb18]
  misc_feature (92)..(428): NCBI GI: 225683598 Blast Desc: [Paracoccidioides brasiliensis Pb03]
  misc_feature (4)..(424): NCBI GI: 256724252 Blast Desc: NECHADRAFT_87550 [Nectria haematococca mpVI 77-13-4]
  misc_feature (94)..(391): NCBI GI: 238498688 Blast Desc: conserved [Aspergillus flavus NRRL3357] gi|220693853|gb|EED50198.1| conserved [Aspergillus flavus NRRL3357]
  misc_feature (92)..(429): NCBI GI: 156061203 Blast Desc: SS1G_02744 [Sclerotinia sclerotiorum 1980] gi|154700148|gb|EDN99886.1| SS1G_02744 [Sclerotinia sclerotiorum 1980]
MSLKYQPLEKNSKEIRLLTLIRGAKYEPIRCTIAHYRLGRYSVHGERVFDWDRDPNIDTREPSWIDPPEDGVVWADWGDEPKPSDPNVEWVPQYEALSYTWGSPPDTKFITLNGQQIRVRENLYIALLRLRSSMRDRRLWIDALCIDQSNPTERSEQVLRMREIYQRAQRVVIWLGDASVDSHLAFQTLELIGGTDKQRSAGPGLRGEWWGPQFDLFCGIPRNAEKDQLPMIWYMNSLGLKSWEDIEEVSKSALRNLLTRDYWKRVWCVQEISNAQSGVVMCGHDSIDWNVFDFVLYNNEIRKNPNGFPDFLLSTGSWQMIGERMSTRNPLRNFGFNTGTLLGHLCEYRDHDATDPRDKIYALLGLPTVEDDIPIRPDYEMSIAEVYCDVVRTIINYSRDLSILTHPRDDEQSAHGVPSWVPDWSLKTPKFSANINHPQFKAARDSVVRGPDFPEITGARRDNENRHFRPEGLPLLQWGLVERPQERTKYMICDSEKALWIDAIFSDLLVWVGEPLSQSCLDDGSWKDIVRRWCNPPLPPTTRSETFENVPARIWVAMVKNGLRIPVSESDEDWWHVCFEQFLVFLGKLAPERVQRPDLARLLEPPFETQLMESLRGCKLGMTHQERFALVPPSACEDDAIVVAFGADVPLVIRRLDTDTYYVKLIGGAYVPGMMTGEMIDEFENGYKEVIQIGLI

SEQ ID NO: 24438 - DNA, 4481 bp, Muscodor strobelii
  misc_feature: SGI EST ID NO. CUFF.57568.0
  misc_feature: Variant of the nucleotide sequence at SEQ ID NO 24436
agaacatctcagccgcacatgagatctgtgagacttcacctgattgaccactcctcctcccatgcgcgcgatgatggacatgagatgccgtctttctcttcggctcatgccttggcttgaaagaggtagaaactgcgtgcgtgacaatttttgatgatttttctttctcgttctttgcgctttccaacactagcctcgaattgccgaaacctgagtaatctgaatggctatgctggctggggccaagtccgaaattgcgcaaacaccatgtctctaaagtaccaacctctagagaagaactctaaggaaattcgcctgctcacacttatacgtggagccaaatacgaaccgatccgatgcacaatcgcacattatcggttaggacggtactctgtgcatggagaacgtgtgtttgactgggaccgagacccaaatatcgacacaagagaacccagctggattgatcctcctgaagatggtgttgtgtgggcggattggggagacgaacctaagcctagtgatccgaatgtagaatgggttcctcagtatgaagcgctctcttacacctggggtagtccacccgacaccaagtttatcaccttaaatggtcagcaaattagagttcgagagaacttgtacatcgcacttctacgattacggagcagtatgagagatcggcgactatggatcgacgcgctctgtatagaccagagtaatcccacagagcgatccgagcaagtcttaaggatgcgagagatctatcagagagctcaacgagtagtgatatggctgggcgatgccagcgtggatagccaccttgcattccaaacgcttgaactcatcggaggcacggataagcaaagaagcgcgggccccggtcttaggggcgaatggtggggaccacagttcgacttgttttgcgggattcccagaaatgcggaaaaagatcaacttccaatgatatggtacatgaactcgctcggtttaaagtcctgggaagatattgaagaggtttcgaaatcagccctgcgcaatctactgacccgagattattggaaacgtgtttggtgcgtccaggaaataagcaatgcgcagtccggggtggtaatgtgcggtcatgactccattgactggaacgttttcgactttgttctatataataacgaaatccggaaaaatccaaacgggtttccggacttcctgttatcgactggatcttggcaaatgatcggcgagcgcatgtctacaagaaatccactgaggaattttggcttcaatactgggacgcttctggggcacttatgcgaatatcgcgatcatgacgccacagatccaagagacaagatatatgctcttcttggtctaccgacagtggaagatgacatacctatccgtcctgactacgagatgtccattgccgaagtgtactgcgatgtggttaggacaatcatcaactatagtcgagatctttccatattgacacatccccgggacgacgaacaatcagcacacggcgttccctcatgggtcccagactggtcgctgaaaacgccgaaatttagcgccaacataaatcacccccagttcaaggctgccagagactcagttgtgagaggacctgactttccagaaataacaggtgcaaggagagacaacgaaaatcgccattttcgacccgaaggacttccactcctacaatggggactcgtagagcgacctcaagagcgcacgaaatatatgatttgcgactctgaaaaagccctatggatagatgctatcttttcagatttactagtatgggttggtgagcctctttctcaatcttgcctcgacgatggcagctggaaggacatcgttcgtaggtggtgcaaccctcccctgcctccaactacgagaagtgagacattcgaaaacgtccccgcccgtatctgggtcgcgatggtgaagaatggactacgcatccccgtttcagagtcggatgaagactggtggcatgtctgtttcgaacagttccttgtctttttggggaaactcgcaccagagcgcgtgcagcggccggatcttgcgaggctgctcgaaccgccttttgaaacacagttaatggagagcctacggggctgtaaacttggaatgacacatcaggagcggtttgctttggtgccgccgtcggcatgcgaggatgatgctattgtagtggcatttggtgcagatgttccgcttgtgattaggcgacttgatactgacacctattacgtgaaactgatcggtggtgcgtacgttcctgggatgatgaccggggagatgatcgacgagttcgagaatgggtacaaggaggtgattcagattgggcttatttgatctcttagatgcattgggcattcatcaagtctttaagagagccattggagtgtaattgatctcatgctccgaaacctcatacttgctccagcctgcaacttacgaatactatactaatcacttccgcggagaaaacaatgcagcgcataggacaaacttgtcatttataattaatctaaacaacaggaagcataagttgacgaacggagaaccaggcacacttagaggctatgacacgttcaattattgcacgttgcttcttgcattcatatgactacgaacaatgataccatttccctgtagacgccgtcctcaaatccatctaagtccaagggataatccgaccgtgcgccattgctagaatgctatcaattgaccttgagatgccgtcctagggtatagaatctattatctagatggactgctccaaaaaatgctcttttaatgaacaacggtaattcgctcgtaagcatgtaacccaaattaaaggaaatttgcctcctgactaaaagtcaataggactatttaaagtctagacactttgcgcataacactctcattgtctggcgcaacggcttgaaggtcgtccagtggggtatgatatctccgttccgaccatcgggggggtagaaggcttgcgcagatgtatgaacttgtgcttcttcgacgacataaccacgtagatagctcgcatcatgccaagaagaacaacaactatataggcgaggagcagaccggtcgagatgagcgcttgctggatgatctggttgcgcagccaatttacgacgtcgtcgacagcgccggtgatctcatcacctgtgacgctgctgggggaagccaggaagctagtcaagtcgttgtcggacgagatagactcattcgcgccaacggaaaatatatcagctggtagtaaggggaaactgacatgtgcatggtcgtgcacccaggtcagacctttctccaccgactcaaccttgagaccgagcaggcagcgaacgacttcttttgccaggctggcgaaaaccgttgagccgaagacgtcgttaataccattgtcgatttctttcatgaatgtattgagagtgttgttcactgctacagttgcattgacaactttaccgaatatgtcattgttaatctcgtcgctgtaagaagtgatcacgccatttgtgtcgtttgaccacttctctgaaacgtttgtcagagtcgatacaacttggtcagcaaatgcaccgacttctctcgcgagcgcaggagcctcgttttgaatggatttgagcaggataccttgccatatgcaagagaagtatccggccaacgcgagcgacaacacgaaaagcgcaggaagcgaagttgcataggcaacaaaccagcgagccattattctcttagcatttttcccgtcgtcccaagagaatttctcagataatgccagcccaacctttgctcggtgtggagacgagtacatatatgcatagtcgagatcgttgactttgtaatcaacgaaccaaatttgctttcgccagcgacgcttctcaagaaaatacatcggaatgcagacggcgatagcaagaagaactagtatcacgatagctgcgattttggcgtcgtacgcaagcttatataagccttcgaagaatttcgtgatggtgtcattgtctgaacaaaatgagagcgattctttctcagcaagagggaaaactgtgtcgtcgaactcccagctaccccacgtgtcattgatttcctttttgatcaaatcaaatggtatgctgatggcttggttggtcaggttcctgacatcgtcaaaatcgggtattttttgattgagagcgtccagcccaccgacaagaccgctcgtgtcgatgtcgatgtttttaactttatttgcaaaatcattgagagtgccggtaatatctggtttgtcgccaaccttgattccatctttaatctcgcctggcaattgtgatcttataaaacttggaatcttctgtattttgccgttgataacatcgataagactccaaccgtcgtcgagtattttttgcgctgtcttcgttgcgtctccgaccccacctgcgatatcgtcaataccgctattgatagcatctgttgttttctccacc

SEQ ID NO: 24439 - DNA, 2163 bp, Muscodor strobelii
  misc_feature: SGI cDNA ID NO. 568333
  misc_feature: Encodes the peptide sequence at SEQ ID NO 24440
atgtctgaccatgatggaagtccgttcgcggacagatatgcaacaacgtacggcgatccgaatattaggccccaacacgactatcatgcaaacgacgagaaacaagaaccgctccctcaatctagctcgttacaatttggagaggcgatcgacgcacacaaagtggtcgaggacaggagttcatatgataatccacagctcatcaccccatatcttggcctgcgctcaaggctgtcgcaaatttggctcaacaagtggactgtcctcatcctacttgtacttgttcagttcttatttaccatcggctctctaaacgacaatttggaccacgccaaagagaaagccttgtcagcatgtactaaagtcgaagatgttggcagcgcgtttgcctcgatgccgcattatttgtcagtgggagtcaacaaactgacagcatccagcatcacgaatgccgttcaagcgcttacggctattcttgacatgatccttactggaatcgagcagctgattctttttgtcattcatatgtatactgacacttatgtgtgcttgatttcgatggttatccacggtggactgaacgcttcagcagccgcggtggagaaaacaacagatgctatcaatagcggtattgacgatatcgcaggtggggtcggagacgcaacgaagacagcgcaaaaaatactcgacgacggttggagtcttatcgatgttatcaacggcaaaatacagaagattccaagttttataagatcacaattgccaggcgagattaaagatggaatcaaggttggcgacaaaccagatattaccggcactctcaatgattttgcaaataaagttaaaaacatcgacatcgacacgagcggtcttgtcggtgggctggacgctctcaatcaaaaaatacccgattttgacgatgtcaggaacctgaccaaccaagccatcagcataccatttgatttgatcaaaaaggaaatcaatgacacgtggggtagctgggagttcgacgacacagttttccctcttgctgagaaagaatcgctctcattttgttcagacaatgacaccatcacgaaattcttcgaaggcttatataagcttgcgtacgacgccaaaatcgcagctatcgtgatactagttcttcttgctatcgccgtctgcattccgatgtattttcttgagaagcgtcgctggcgaaagcaaatttggttcgttgattacaaagtcaacgatctcgactatgcatatatgtactcgtctccacaccgagcaaaggttgggctggcattatctgagaaattctcttgggacgacgggaaaaatgctaagagaataatggctcgctggtttgttgcctatgcaacttcgcttcctgcgcttttcgtgttgtcgctcgcgttggccggatacttctcttgcatatggcaaggtatcctgctcaaatccattcaaaacgaggctcctgcgctcgcgagagaagtcggtgcatttgctgaccaagttgtatcgactctgacaaacgtttcagagaagtggtcaaacgacacaaatggcgtgatcacttcttacagcgacgagattaacaatgacatattcggtaaagttgtcaatgcaactgtagcagtgaacaacactctcaatacattcatgaaagaaatcgacaatggtattaacgacgtcttcggctcaacggttttcgccagcctggcaaaagaagtcgttcgctgcctgctcggtctcaaggttgagtcggtggagaaaggtctgacctgggtgcacgaccatgcacatgtcagtttccccttactaccagctgatatattttccgttggcgcgaatgagtctatctcgtccgacaacgacttgactagcttcctggcttcccccagcagcgtcacaggtgatgagatcaccggcgctgtcgacgacgtcgtaaattggctgcgcaaccagatcatccagcaagcgctcatctcgaccggtctgctcctcgcctatatagttgttgttcttcttggcatgatgcgagctatctacgtggttatgtcgtcgaagaagcacaagttcatacatctgcgcaagccttctacccccccgatggtcggaacggagatatcataccccactggacgaccttcaagccgttgcgccagacaatga

SEQ ID NO: 24440 - protein, 720 aa, Muscodor strobelii
  misc_feature: SGI Peptide ID NO. 568333
  misc_feature (28)..(703): NCBI GI: 46138455 Blast Desc: FG10742.1 [Gibberella zeae PH-1]
  misc_feature (37)..(689): NCBI GI: 116205605 Blast Desc: CHGG_10686 [Chaetomium globosum CBS 148.51] gi|121776103|sp|Q2GMW8.1|PRM1_CHAGB RecName: Full=Plasma membrane fusion protein PRM1 gi|88176814|gb|EAQ84282.1| CHGG_10686 CBS
  misc_feature (38)..(703): NCBI GI: 256729179 Blast Desc: NECHADRAFT_69142 [Nectria haematococca mpVI 77-13-4]
  misc_feature (68)..(689): NCBI GI: 171677087 Blast Desc: protein product [Podospora anserina] gi|170936611|emb|CAP61270.1| protein product [Podospora anserina]
  misc_feature (59)..(679): NCBI GI: 85090178 Blast Desc: NCU09337 [Neurospora crassa OR74A] gi|74614737|sp|Q7S130.1|PRM1_NEUCR RecName: Full=Plasma membrane fusion protein prm-1 gi|28919640|gb|EAA29058.1| [Neurospora
  misc_feature (42)..(709): NCBI GI: 154299633 Blast Desc: BC1G_10779 [Botryotinia fuckeliana B05.10] gi|189037910|sp|A6SEV8.1|PRM1_BOTFB RecName: Full=Plasma membrane fusion protein prm1 gi|150857271|gb|EDN32463.1| BC1G_10779
  misc_feature (69)..(698): NCBI GI: 156030720 Blast Desc: SS1G_14299 [Sclerotinia sclerotiorum 1980] gi|189037687|sp|A7F9L8.1|PRM1_SCLS1 RecName: Full=Plasma membrane fusion protein prm1 gi|154700690|gb|EDO00429.1| SS1G_14299 1980]
  misc_feature (57)..(689): NCBI GI: 261199864 Blast Desc: plasma membrane fusion protein PRM1 [Ajellomyces dermatitidis SLH14081] gi|239594541|gb|EEQ77122.1| plasma membrane fusion protein PRM1 [Ajellomyces dermatitidis SLH14081]
  misc_feature (52)..(689): NCBI GI: 67538888 Blast Desc: AN5614.2 [Aspergillus nidulans FGSC A4] gi|74595008|sp|Q5B1G6.1|PRM1_EMENI RecName: Full=Plasma membrane fusion protein prm1 gi|40743517|gb|EAA62707.1| AN5614.2 nidulans
  misc_feature (49)..(677): NCBI GI: 238843933 Blast Desc: conserved [Microsporum canis CBS 113480]
MSDHDGSPFADRYATTYGDPNIRPQHDYHANDEKQEPLPQSSSLQFGEAIDAHKVVEDRSSYDNPQLITPYLGLRSRLSQIWLNKWTVLILLVLVQFLFTIGSLNDNLDHAKEKALSACTKVEDVGSAFASMPHYLSVGVNKLTASSITNAVQALTAILDMILTGIEQLILFVIHMYTDTYVCLISMVIHGGLNASAAAVEKTTDAINSGIDDIAGGVGDATKTAQKILDDGWSLIDVINGKIQKIPSFIRSQLPGEIKDGIKVGDKPDITGTLNDFANKVKNIDIDTSGLVGGLDALNQKIPDFDDVRNLTNQAISIPFDLIKKEINDTWGSWEFDDTVFPLAEKESLSFCSDNDTITKFFEGLYKLAYDAKIAAIVILVLLAIAVCIPMYFLEKRRWRKQIWFVDYKVNDLDYAYMYSSPHRAKVGLALSEKFSWDDGKNAKRIMARWFVAYATSLPALFVLSLALAGYFSCIWQGILLKSIQNEAPALAREVGAFADQVVSTLTNVSEKWSNDTNGVITSYSDEINNDIFGKVVNATVAVNNTLNTFMKEIDNGINDVFGSTVFASLAKEVVRCLLGLKVESVEKGLTWVHDHAHVSFPLLPADIFSVGANESISSDNDLTSFLASPSSVTGDEITGAVDDVVNWLRNQIIQQALISTGLLLAYIVVVLLGMMRAIYVVMSSKKHKFIHLRKPSTPPMVGTEISYPTGRPSSRCARQ

SEQ ID NO: 24441 - DNA, 4481 bp, Muscodor strobelii
  misc_feature: SGI EST ID NO. CUFF.57568.0
  misc_feature: Variant of the nucleotide sequence at SEQ ID NO 24439
ggtggagaaaacaacagatgctatcaatagcggtattgacgatatcgcaggtggggtcggagacgcaacgaagacagcgcaaaaaatactcgacgacggttggagtcttatcgatgttatcaacggcaaaatacagaagattccaagttttataagatcacaattgccaggcgagattaaagatggaatcaaggttggcgacaaaccagatattaccggcactctcaatgattttgcaaataaagttaaaaacatcgacatcgacacgagcggtcttgtcggtgggctggacgctctcaatcaaaaaatacccgattttgacgatgtcaggaacctgaccaaccaagccatcagcataccatttgatttgatcaaaaaggaaatcaatgacacgtggggtagctgggagttcgacgacacagttttccctcttgctgagaaagaatcgctctcattttgttcagacaatgacaccatcacgaaattcttcgaaggcttatataagcttgcgtacgacgccaaaatcgcagctatcgtgatactagttcttcttgctatcgccgtctgcattccgatgtattttcttgagaagcgtcgctggcgaaagcaaatttggttcgttgattacaaagtcaacgatctcgactatgcatatatgtactcgtctccacaccgagcaaaggttgggctggcattatctgagaaattctcttgggacgacgggaaaaatgctaagagaataatggctcgctggtttgttgcctatgcaacttcgcttcctgcgcttttcgtgttgtcgctcgcgttggccggatacttctcttgcatatggcaaggtatcctgctcaaatccattcaaaacgaggctcctgcgctcgcgagagaagtcggtgcatttgctgaccaagttgtatcgactctgacaaacgtttcagagaagtggtcaaacgacacaaatggcgtgatcacttcttacagcgacgagattaacaatgacatattcggtaaagttgtcaatgcaactgtagcagtgaacaacactctcaatacattcatgaaagaaatcgacaatggtattaacgacgtcttcggctcaacggttttcgccagcctggcaaaagaagtcgttcgctgcctgctcggtctcaaggttgagtcggtggagaaaggtctgacctgggtgcacgaccatgcacatgtcagtttccccttactaccagctgatatattttccgttggcgcgaatgagtctatctcgtccgacaacgacttgactagcttcctggcttcccccagcagcgtcacaggtgatgagatcaccggcgctgtcgacgacgtcgtaaattggctgcgcaaccagatcatccagcaagcgctcatctcgaccggtctgctcctcgcctatatagttgttgttcttcttggcatgatgcgagctatctacgtggttatgtcgtcgaagaagcacaagttcatacatctgcgcaagccttctacccccccgatggtcggaacggagatatcataccccactggacgaccttcaagccgttgcgccagacaatgagagtgttatgcgcaaagtgtctagactttaaatagtcctattgacttttagtcaggaggcaaatttcctttaatttgggttacatgcttacgagcgaattaccgttgttcattaaaagagcattttttggagcagtccatctagataatagattctataccctaggacggcatctcaaggtcaattgatagcattctagcaatggcgcacggtcggattatcccttggacttagatggatttgaggacggcgtctacagggaaatggtatcattgttcgtagtcatatgaatgcaagaagcaacgtgcaataattgaacgtgtcatagcctctaagtgtgcctggttctccgttcgtcaacttatgcttcctgttgtttagattaattataaatgacaagtttgtcctatgcgctgcattgttttctccgcggaagtgattagtatagtattcgtaagttgcaggctggagcaagtatgaggtttcggagcatgagatcaattacactccaatggctctcttaaagacttgatgaatgcccaatgcatctaagagatcaaataagcccaatctgaatcacctccttgtacccattctcgaactcgtcgatcatctccccggtcatcatcccaggaacgtacgcaccaccgatcagtttcacgtaataggtgtcagtatcaagtcgcctaatcacaagcggaacatctgcaccaaatgccactacaatagcatcatcctcgcatgccgacggcggcaccaaagcaaaccgctcctgatgtgtcattccaagtttacagccccgtaggctctccattaactgtgtttcaaaaggcggttcgagcagcctcgcaagatccggccgctgcacgcgctctggtgcgagtttccccaaaaagacaaggaactgttcgaaacagacatgccaccagtcttcatccgactctgaaacggggatgcgtagtccattcttcaccatcgcgacccagatacgggcggggacgttttcgaatgtctcacttctcgtagttggaggcaggggagggttgcaccacctacgaacgatgtccttccagctgccatcgtcgaggcaagattgagaaagaggctcaccaacccatactagtaaatctgaaaagatagcatctatccatagggctttttcagagtcgcaaatcatatatttcgtgcgctcttgaggtcgctctacgagtccccattgtaggagtggaagtccttcgggtcgaaaatggcgattttcgttgtctctccttgcacctgttatttctggaaagtcaggtcctctcacaactgagtctctggcagccttgaactgggggtgatttatgttggcgctaaatttcggcgttttcagcgaccagtctgggacccatgagggaacgccgtgtgctgattgttcgtcgtcccggggatgtgtcaatatggaaagatctcgactatagttgatgattgtcctaaccacatcgcagtacacttcggcaatggacatctcgtagtcaggacggataggtatgtcatcttccactgtcggtagaccaagaagagcatatatcttgtctcttggatctgtggcgtcatgatcgcgatattcgcataagtgccccagaagcgtcccagtattgaagccaaaattcctcagtggatttcttgtagacatgcgctcgccgatcatttgccaagatccagtcgataacaggaagtccggaaacccgtttggatttttccggatttcgttattatatagaacaaagtcgaaaacgttccagtcaatggagtcatgaccgcacattaccaccccggactgcgcattgcttatttcctggacgcaccaaacacgtttccaataatctcgggtcagtagattgcgcagggctgatttcgaaacctcttcaatatcttcccaggactttaaaccgagcgagttcatgtaccatatcattggaagttgatctttttccgcatttctgggaatcccgcaaaacaagtcgaactgtggtccccaccattcgcccctaagaccggggcccgcgcttctttgcttatccgtgcctccgatgagttcaagcgtttggaatgcaaggtggctatccacgctggcatcgcccagccatatcactactcgttgagctctctgatagatctctcgcatccttaagacttgctcggatcgctctgtgggattactctggtctatacagagcgcgtcgatccatagtcgccgatctctcatactgctccgtaatcgtagaagtgcgatgtacaagttctctcgaactctaatttgctgaccatttaaggtgataaacttggtgtcgggtggactaccccaggtgtaagagagcgcttcatactgaggaacccattctacattcggatcactaggcttaggttcgtctccccaatccgcccacacaacaccatcttcaggaggatcaatccagctgggttctcttgtgtcgatatttgggtctcggtcccagtcaaacacacgttctccatgcacagagtaccgtcctaaccgataatgtgcgattgtgcatcggatcggttcgtatttggctccacgtataagtgtgagcaggcgaatttccttagagttcttctctagaggttggtactttagagacatggtgtttgcgcaatttcggacttggccccagccagcatagccattcagattactcaggtttcggcaattcgaggctagtgttggaaagcgcaaagaacgagaaagaaaaatcatcaaaaattgtcacgcacgcagtttctacctctttcaagccaaggcatgagccgaagagaaagacggcatctcatgtccatcatcgcgcgcatgggaggaggagtggtcaatcaggtgaagtctcacagatctcatgtgcggctgagatgttct

SEQ ID NO: 24442 - DNA, 639 bp, Muscodor strobelii
  misc_feature: SGI cDNA ID NO. 568334
  misc_feature: Encodes the peptide sequence at SEQ ID NO 24443
atggctaacaccgtcgtcctcatcactggagcaagccgtggtctcggtcaaggcctgttgaagcgttttcttgctttgccaaaccatacagtaatagcagccaatcgcaaccccgcaggcgcaacatctcaagcactctatgagctgccaaggggtcccggtagcgaattgatcatcgtcaaatacgatgcagcaatcgagcaagaccactttgacattgtaaaagagctccaagaggaacactccatctcacacttcgacatcgtacttgcaaatgcagcaattgcgaagatctaccctttcgctagggaagtcaagcgcgccgacatcttagagcatgtggaggttgatattcttagcgtgatatctttattccaagctacgcgcgagctattgcagaagtcggcgaaggaacctatgtttgccatcatggggtctggtgctggttctttgagtcgccaacccttggttccaaactcagcgtatggcgcagcaaagtcaatgctgtactggtacggcatacgaatccatcacgaagaggagtggctcaacactttcgtcattgaccctggttgggttcagaccgatacgggtaattatgcagctaaccactgggggtctggagaaggcaacacttga

SEQ ID NO: 24443 - protein, 212 aa, Muscodor strobelii
  misc_feature: SGI Peptide ID NO. 568334
  misc_feature (4)..(181): Pfam Id: PF00106 Pfam Desc: short chain dehydrogenase
  misc_feature (1)..(206): NCBI GI: 121708887 Blast Desc: NADPH-dependent 1-acyl dihydroxyacetone phosphate reductase, [Aspergillus clavatus NRRL 1] gi|119400427|gb|EAW10853.1| NADPH-dependent 1-acyl phosphate NRRL
  misc_feature (1)..(209): NCBI GI: 116198605 Blast Desc: CHGG_07458 [Chaetomium globosum CBS 148.51] gi|88178737|gb|EAQ86205.1| CHGG_07458 [Chaetomium globosum CBS 148.51]
  misc_feature (1)..(209): NCBI GI: 39969327 Blast Desc: MGG_10274 [Magnaporthe grisea 70-15] gi|149211159|ref|XP_001522954.1| MGCH7_ch7g1041 [Magnaporthe grisea 70-15] gi|86196996|gb|EAQ71634.1| MGCH7_ch7g1041 grisea
  misc_feature (1)..(206): NCBI GI: 154311969 Blast Desc: BC1G_06018 [Botryotinia fuckeliana B05.10] gi|150850668|gb|EDN25861.1| BC1G_06018 [Botryotinia fuckeliana B05.10]
  misc_feature (22)..(206): NCBI GI: 116194187 Blast Desc: CHGG_06811 [Chaetomium globosum CBS 148.51] gi|88182724|gb|EAQ90192.1| CHGG_06811 [Chaetomium globosum CBS 148.51]
  misc_feature (4)..(211): NCBI GI: 171693165 Blast Desc: protein product [Podospora anserina] gi|170946531|emb|CAP73332.1| protein product [Podospora anserina]
  misc_feature (1)..(202): NCBI GI: 169625373 Blast Desc: SNOG_15959 [Phaeosphaeria nodorum SN15] gi|111055418|gb|EAT76538.1| SNOG_15959 [Phaeosphaeria nodorum SN15]
  misc_feature (1)..(206): NCBI GI: 154315483 Blast Desc: BC1G_04314 [Botryotinia fuckeliana B05.10] gi|150847254|gb|EDN22447.1| BC1G_04314 [Botryotinia fuckeliana B05.10]
  misc_feature (1)..(206): NCBI GI: 116205818 Blast Desc: CHGG_02202 [Chaetomium globosum CBS 148.51] gi|88182799|gb|EAQ90267.1| CHGG_02202 [Chaetomium globosum CBS 148.51]
  misc_feature (1)..(206): NCBI GI: 255934834 Blast Desc: Pc12g16460 [Penicillium chrysogenum Wisconsin 54-1255] gi|211583063|emb|CAP81273.1| Pc12g16460 [Penicillium chrysogenum Wisconsin 54-1255]
MANTVVLITGASRGLGQGLLKRFLALPNHTVIAANRNPAGATSQALYELPRGPGSELIIVKYDAAIEQDHFDIVKELQEEHSISHFDIVLANAAIAKIYPFAREVKRADILEHVEVDILSVISLFQATRELLQKSAKEPMFAIMGSGAGSLSRQPLVPNSAYGAAKSMLYWYGIRIHHEEEWLNTFVIDPGWVQTDTGNYAANHWGSGEGNT

SEQ ID NO: 24444 - DNA, 604 bp, Muscodor strobelii
  misc_feature: SGI EST ID NO. CUFF.57589.0
  misc_feature: Variant of the nucleotide sequence at SEQ ID NO 24442
cgatatcggaagaagtcgcaatgacaacacgaagaagagggaggtttatatgaattgttttcaagtataaaagagcttattctgcacgatgtgttctctaaagcgtcaattttctgctctcaaatcaaccttctttttcagacaactttacaagtaaaatcgtagcttagtcccgaaaatggctaacaccgtcgtcctcatcactggagcaagccgtggtctcggtcaaggcctgttgaagcgttttcttgctttgccaaaccatacagtaatagcagccaatcgcaaccccgcaggcgcaacatctcaagcactctatgagctgccaaggggtcccggtagcgaattgatcatcgtcaaatacgatgcagcaatcgagcaagaccactttgacattgtaaaagagctccaagaggaacactccatctcacacttcgacatcgtacttgcaaatgcagcaattgcgaagatctaccctttcgctagggaagtcaagcgcgccgacatcttagagcatgtggaggttgatattcttagcgtgatatctttattccaagctacgcgcgagctattgcagaagtcggcgaaggaacctatgtttgcc

SEQ ID NO: 24445 - DNA, 1080 bp, Muscodor strobelii
  misc_feature: SGI cDNA ID NO. 568335
  misc_feature: Encodes the peptide sequence at SEQ ID NO 24446
atgatgcaacaacaatactgtttgatcgacgagctccaagctttccttcttctcatcaaagatggcgtggctgacggtccccacggccctcagtacgaagagtggctcgacctacagatgcacctgtacggcgtcaatcgcacagtctcatctatcattgatagtacgcaatccgtagagaagttgagcatgcttttgcgtcgtatagccaaaaacatctccggcacttggaatgcaggagcagacctgcgcgagaaggtcagcaagaaaatcatcgttccgcaaggctcctgcagtgctacgaatagatctttgagtcttcatcgtctcttgctggacgacgaaaagttcgactccacgaacggcgaatcccccatctcgtataaagagacatacgaacgttactttgaatctaccccaattgtgcgtagcggtatgaccaagcggggagacgaagtgcgcaaactcctgcaggacctccgttcggaaatcaagcaaatgcgagtcgacattttggacgagtgcgaacggattcaaaatctaacagaaagaaaactggactggacttacgacgccaaatcatgctcagaacggatgttggccactgacctgcaggggcaattgcagcacaaacagtttgttcttcaccttttcgctagcgaactcaagacaagctcgaaagccctgaaacagctgctaggcgtgttcctaccatgtatcctaccacaagccaccgatctcaatatcaaggaaaagtcgggattcttgagcctggaaacacgacgagatgatggatacatcatgcagcttgagtcaaagctcaagctgggcgtgatcaagcaggcctttcctacagaagctcgtagcttggaactgcaagagcatgacgaagtcgtcaacactgtgaagaagctgaaagactctctaggtcttgctttagacggattgatcctggccgaaaaaaaggagacgagtatgcccttggaaaagagtgtttcttgcgtggccgatattctcttcagagcgtgccgggagcattctttccataccaaagctatgacgacatggagacaatactga

SEQ ID NO: 24446 - protein, 359 aa, Muscodor strobelii
  misc_feature: SGI Peptide ID NO. 568335
MMQQQYCLIDELQAFLLLIKDGVADGPHGPQYEEWLDLQMHLYGVNRTVSSIIDSTQSVEKLSMLLRRIAKNISGTWNAGADLREKVSKKIIVPQGSCSATNRSLSLHRLLLDDEKFDSTNGESPISYKETYERYFESTPIVRSGMTKRGDEVRKLLQDLRSEIKQMRVDILDECERIQNLTERKLDWTYDAKSCSERMLATDLQGQLQHKQFVLHLFASELKTSSKALKQLLGVFLPCILPQATDLNIKEKSGFLSLETRRDDGYIMQLESKLKLGVIKQAFPTEARSLELQEHDEVVNTVKKLKDSLGLALDGLILAEKKETSMPLEKSVSCVADILFRACREHSFHTKAMTTWRQY

SEQ ID NO: 24447 - DNA, 519 bp, Muscodor strobelii
  misc_feature: SGI EST ID NO. CUFF.57602.0
  misc_feature: Variant of the nucleotide sequence at SEQ ID NO 24445
atgttggccactgacctgcaggggcaattgcagcacaaacagtttgttcttcaccttttcgctagcgaactcaagacaagctcgaaagccctgaaacagctgctaggcgtgttcctaccatgtatcctaccacaagccaccgatctcaatatcaaggaaaagtcgggattcttgagcctggaaacacgacgagatgatggatacatcatgcagcttgagtcaaagctcaagctgggcgtgatcaagcaggcctttcctacagaagctcgtagcttggaactgcaagagcatgacgaagtcgtcaacactgtgaagaagctgaaagactctctaggtcttgctttagacggattgatcctggccgaaaaaaaggagacgagtatgcccttggaaaagagtgtttcttgcgtggccgatattctcttcagagcgtgccgggagcattctttccataccaaagctatgacgacatggagacaatactgatggctcgttgcgagagcgtccattcgttttacg

SEQ ID NO: 24448 - DNA, 345 bp, Muscodor strobelii
  misc_feature: SGI cDNA ID NO. 568336
  misc_feature: Reduced expression when VOC is produced
  misc_feature: Encodes the peptide sequence at SEQ ID NO 24449
atggcgtcacgaatgctctccaccatcctccgcccgaccgcaaccctcagcgtgagcagacaggccgtgatccagcgcagctttacgggtagtacccaggctctgaagcacaaggaaagcggaggcgagaacacagacgcagagaagcacaagcaagacctcctatccaagcacaaggatggcaagggccactggaaacccgagctagcctccgacagcgaggaggccgtcaaggcggaccgcgccggagcgagcaaggagaacatcgcggacctgcaggcacgcaccaaggccacggccgaggagacggcgaagaagggcacaagcatgcgcgatggattgtag

SEQ ID NO: 24449 - protein, 114 aa, Muscodor strobelii
  misc_feature: SGI Peptide ID NO. 568336
  misc_feature (21)..(114): NCBI GI: 256729438 Blast Desc: NECHADRAFT_84003 [Nectria haematococca mpVI 77-13-4]
  misc_feature (23)..(114): NCBI GI: 46117022 Blast Desc: FG04353.1 [Gibberella zeae PH-1]
  misc_feature (12)..(114): NCBI GI: 171688774 Blast Desc: protein product [Podospora anserina] gi|170944349|emb|CAP70459.1| protein product [Podospora anserina]
  misc_feature (38)..(114): NCBI GI: 261355474 Blast Desc: conserved [Verticillium albo-atrum VaMs.102]
  misc_feature (10)..(114): NCBI GI: 116199705 Blast Desc: CHGG_08008 [Chaetomium globosum CBS 148.51] gi|88179287|gb|EAQ86755.1| CHGG_08008 [Chaetomium globosum CBS 148.51]
  misc_feature (2)..(114): NCBI GI: 154315621 Blast Desc: [Botryotinia fuckeliana B05.10] gi|150847323|gb|EDN22516.1| [Botryotinia fuckeliana B05.10]
  misc_feature (1)..(105): NCBI GI: 145610603 Blast Desc: [Magnaporthe grisea 70-15] gi|145017974|gb|EDK02253.1| [Magnaporthe grisea 70-15]
  misc_feature (13)..(81): NCBI GI: 85078929 Blast Desc: NCU01555 [Neurospora crassa OR74A] gi|16944552|emb|CAD11339.1| [Neurospora crassa] gi|28917313|gb|EAA27022.1| NCU01555 [Neurospora crassa OR74A]
  misc_feature (6)..(105): NCBI GI: 156060245 Blast Desc: [Sclerotinia sclerotiorum 1980] gi|154699669|gb|EDN99407.1| [Sclerotinia sclerotiorum 1980]
  misc_feature (1)..(97): NCBI GI: 189189362 Blast Desc: conserved [Pyrenophora tritici-repentis Pt-1C-BFP] gi|187972626|gb|EDU40125.1| conserved [Pyrenophora tritici-repentis Pt-1C-BFP]
  misc_feature: Useful for introducing or modulating the production of volatile compounds
MASRMLSTILRPTATLSVSRQAVIQRSFTGSTQALKHKESGGENTDAEKHKQDLLSKHKDGKGHWKPELASDSEEAVKADRAGASKENIADLQARTKATAEETAKKGTSMRDGL

SEQ ID NO: 24450 - DNA, 3126 bp, Muscodor strobelii
  misc_feature: SGI EST ID NO. CUFF.57854.0
  misc_feature: Variant of the nucleotide sequence at SEQ ID NO 24448
atgagaaggtgctgggacctttgtccctcggttgcagcaaacaactcatagctcccttctcctgtgcttccgaccattaagatcctctccattgccaaatttcttgagctaggtaaggatttagacccaatctactcattcgctctccctcttaatcaacataaacaacaataacaacgttgctaacggacttcttcaagagatctaagcaaccgcccacccacaactatctacctgccagtcttcactcctcacaactcacaactcaacacacaatggcgtcacgaatgctctccaccatcctccgcccgaccgcaaccctcagcgtgagcagacaggccgtgatccagcgcagctttacgggtagtacccaggctctgaagcacaaggaaagcggaggcgagaacacagacgcagagaagcacaagcaagacctcctatccaagcacaaggatggcaagggccactggaaacccgagctagcctccgacagcgaggaggccgtcaaggcggaccgcgccggagcgagcaaggagaacatcgcggacctgcaggcacgcaccaaggccacggccgaggagacggcgaagaagggcacaagcatgcgcgatggattgtagagactgagcaagacgaccaggtggtggtttggcatggcgttgggtcaaaaagtgaacgagatgagatctcacgtttcgtcagggacagagaaaggaagcatcgcgacaagaggcacgtttgcatcatatgagcctgggaaaggaaacggaaagttgccaggctttgtaagcattagcattgtaaggctgcgcaggaagttcaatcatcatcagcattgccaattcaataattgcaggtccccgtgtacgatcttgaaaatcattaaaaatcttgctttgcaacatccttagtagaaatggaagctcttgaattcaagcttgtaagtcatgatggagaagggatcaaattacagaaagccgcaacaattctggccctgtgatgattctccaagcgcagacttggaaaacactatcgccatgcctggccacaattatctcatggtacatacgtttaggagacacgtcttacgacagatggaaatgctcgtcggagacttgtatacaggtgcagtactatgtacttgagtacccaggaaaagcagcaaaacactccaaaatgttcgatgctacccgaatgcgaggaaagcagtgcgaaatctaccgtgaaacgccgcgccaaatgcaatgatactctgtccttcttcacgctcttcgtgtctccagctctcctctcgcagcaagtttccagtgcagcttcggtagtacaggactctacttcaagatggcaataaggaggatcagaacaactatcaagacaataatggcaaccatctgcttgctctcgccggccatcttcgtgatcttgttgaccgatttcctggcacgatcgagacggccctggtggcggtccgtgttggcgtccacctcgtccataagggcgacttggtcgtcgagctcatcgccaatctgcatgctcaactcgcgctgtcgcgcaatgctggcgcccaggcgatcgagctgctcgtcctgctggttcatgatctgctggtgataggcgtggatctgctggttgttcatctctccggcctcatcgcggtagcctgccgtgtcgtccgggttatcgcggtatcggctgccgtagatctgggcttcgaggtcgggatcggcgacgttagggttgtcggagaagcggaccgtcttggatgcgttgcgaacacccttgggtctgagactggagtttgatgctccgaggggtttgtgggtggcgcggtcgaagtcatcttcgagagaggggtcgttgggatgtgtgagagtatcatttgtcgatggggaggagaagccgtggaattgtgaggtcaagtcgtcgtactgcttcttaagacccgggagagagtcggatatggtgagagagcctctgtcaatatgtcagtccgattcattcttcgattctagtctgccgagttaagttgcaataatttcgtagctacatcctgttttgtgcgtggataatatctttccgacgcagccgcagtttagggggtacgtggttgaagcttactcttcatcgccagcttcctccaacctcgtctgctcccgctccaatgcgtctaatccatccttgaactggtctagagatctggaaatgtggccatcgttggagtcaccgccgagatcgagactctgcgccctcgaccgctcgagcagcgagagcttgatgtggtccgccaagaggaatagctggttggcgttggccatagtcgatgcgattgggtagctctcgtgcaacccagtttagccgttgattccaggagtgatgcgcgatggtagatcgaatcggaaaacagatacttgacagcaaacggagatagaatacgacgacccgatatgttatcggtagacagacgccggaatgagaacaaggtgttgtaaggtatgcctcttggcgtgacgggatcccggctgcgtcacagagttgcaataggattcgattaccagccgattaccactgatctaaggcagccgcttatcccgggattaacgaggaactcagctccaatgtttgcttgatctggaaccgctggcattcggtgctacagacaatcaagcgcttggtaatgaatgaactgattccactgcagtgctggattcggtcgaacgcaggcaggcatgatacttgacatttggtgacgcgcccgcgcgggttggaagtatctgctccattatgtaggtaaccgtatcctgaatcgttttgtcgaatgtgcgtctacaagagaaaatggctatacccactgtagaggggcttccaccagacccccaatgcagccacgcgtatgccggccatccatctactagcacttccacaagttcgctcacgacgatatgggataccacattcgctcggcctagcgtcatcagacgtagtttatattgctgagagtcagcatgattgtactatttgcattaatggtaaacatatacttccctttctgacacggccagcgaaacggcgctttataactgataaacggcatctttccaatggagccgttcgtgcctattcaacgag

SEQ ID NO: 24451 - DNA, 840 bp, Muscodor strobelii
  misc_feature: SGI cDNA ID NO. 568337
  misc_feature: Encodes the peptide sequence at SEQ ID NO 24452
atggccaacgccaaccagctattcctcttggcggaccacatcaagctctcgctgctcgagcggtcgagggcgcagagtctcgatctcggcggtgactccaacgatggccacatttccagatctctagaccagttcaaggatggattagacgcattggagcgggagcagacgaggttggaggaagctggcgatgaagaaggctctctcaccatatccgactctctcccgggtcttaagaagcagtacgacgacttgacctcacaattccacggcttctcctccccatcgacaaatgatactctcacacatcccaacgacccctctctcgaagatgacttcgaccgcgccacccacaaacccctcggagcatcaaactccagtctcagacccaagggtgttcgcaacgcatccaagacggtccgcttctccgacaaccctaacgtcgccgatcccgacctcgaagcccagatctacggcagccgataccgcgataacccggacgacacggcaggctaccgcgatgaggccggagagatgaacaaccagcagatccacgcctatcaccagcagatcatgaaccagcaggacgagcagctcgatcgcctgggcgccagcattgcgcgacagcgcgagttgagcatgcagattggcgatgagctcgacgaccaagtcgcccttatggacgaggtggacgccaacacggaccgccaccagggccgtctcgatcgtgccaggaaatcggtcaacaagatcacgaagatggccggcgagagcaagcagatggttgccattattgtcttgatagttgttctgatcctccttattgccatcttgaagtag

SEQ ID NO: 24452 - protein, 279 aa, Muscodor strobelii
  misc_feature: SGI Peptide ID NO. 568337
  misc_feature (194)..(256): Pfam Id: PF05739 Pfam Desc: SNARE domain
  misc_feature (1)..(279): NCBI GI: 39977237 Blast Desc: MGG_06521 [Magnaporthe grisea 70-15] gi|145016046|gb|EDK00536.1| MGG_06521 [Magnaporthe grisea 70-15]
  misc_feature (1)..(262): NCBI GI: 261355470 Blast Desc: v-SNARE [Verticillium albo-atrum VaMs.102]
  misc_feature (1)..(263): NCBI GI: 46138425 Blast Desc: FG10727.1 [Gibberella zeae PH-1]
  misc_feature (1)..(262): NCBI GI: 256729189 Blast Desc: [Nectria haematococca mpVI 77-13-4]
  misc_feature (1)..(261): NCBI GI: 85078689 Blast Desc: NCU01575 [Neurospora crassa OR74A] gi|16416037|emb|CAB91387.2| related to syntaxin 8 [Neurospora crassa] gi|28917265|gb|EAA26976.1| conserved [Neurospora crassa
  misc_feature (1)..(263): NCBI GI: 116199729 Blast Desc: CHGG_08020 [Chaetomium globosum CBS 148.51] gi|88179299|gb|EAQ86767.1| CHGG_08020 [Chaetomium globosum CBS 148.51]
  misc_feature (2)..(262): NCBI GI: 156060235 Blast Desc: SS1G_02256 [Sclerotinia sclerotiorum 1980] gi|154699664|gb|EDN99402.1| SS1G_02256 [Sclerotinia sclerotiorum 1980]
  misc_feature (2)..(262): NCBI GI: 154315611 Blast Desc: BC1G_04378 [Botryotinia fuckeliana B05.10] gi|150847318|gb|EDN22511.1| BC1G_04378 [Botryotinia fuckeliana B05.10]
  misc_feature (1)..(263): NCBI GI: 226286437 Blast Desc: v-SNARE [Paracoccidioides brasiliensis Pb01]
  misc_feature (1)..(262): NCBI GI: 226291891 Blast Desc: conserved [Paracoccidioides brasiliensis Pb18]
MANANQLFLLADHIKLSLLERSRAQSLDLGGDSNDGHISRSLDQFKDGLDALEREQTRLEEAGDEEGSLTISDSLPGLKKQYDDLTSQFHGFSSPSTNDTLTHPNDPSLEDDFDRATHKPLGASNSSLRPKGVRNASKTVRFSDNPNVADPDLEAQIYGSRYRDNPDDTAGYRDEAGEMNNQQIHAYHQQIMNQQDEQLDRLGASIARQRELSMQIGDELDDQVALMDEVDANTDRHQGRLDRARKSVNKITKMAGESKQMVAIIVLIVVLILLIAILK

SEQ ID NO: 24453 - DNA, 3067 bp, Muscodor strobelii
  misc_feature: SGI EST ID NO. CUFF.57855.1
  misc_feature: Variant of the nucleotide sequence at SEQ ID NO 24451
ctcgttgaataggcacgaacggctccattggaaagatgccgtttatcagttataaagcgccgtttcgctggccgtgtcagaaagggaagtatatgtttaccattaatgcaaatagtacaatcatgctgactctcagcaatataaactacgtctgatgacgctaggccgagcgaatgtggtatcccatatcgtcgtgagcgaacttgtggaagtgctagtagatggatggccggcatacgcgtggctgcattgggggtctggtggaagcccctctacagtgggtatagccattttctcttgtagacgcacattcgacaaaacgattcaggatacggttacctacataatggagcagatacttccaacccgcgcgggcgcgtcaccaaatgtcaagtatcatgcctgcctgcgttcgaccgaatccagcactgcagtggaatcagttcattcattaccaagcgcttgattgtctgtagcaccgaatgccagcggttccagatcaagcaaacattggagctgagttcctcgttaatcccgggataagcggctgccttagatcagtggtaatcggctggtaatcgaatcctattgcaactctgtgacgcagccgggatcccgtcacgccaagaggcataccttacaacaccttgttctcattccggcgtctgtctaccgataacatatcgggtcgtcgtattctatctccgtttgctgtcaagtatctgttttccgattcgatctaccatcgcgcatcactcctggaatcaacggctaaactgggttgcacgagagctacccaatcgcatcgactatggccaacgccaaccagctattcctcttggcggaccacatcaagctctcgctgctcgagcggtcgagggcgcagagtctcgatctcggcggtgactccaacgatggccacatttccagatctctagaccagttcaaggatggattagacgcattggagcgggagcagacgaggttggaggaagctggcgatgaagaaggctctctcaccatatccgactctctcccgggtcttaagaagcagtacgacgacttgacctcacaattccacggcttctcctccccatcgacaaatgatactctcacacatcccaacgacccctctctcgaagatgacttcgaccgcgccacccacaaacccctcggagcatcaaactccagtctcagacccaagggtgttcgcaacgcatccaagacggtccgcttctccgacaaccctaacgtcgccgatcccgacctcgaagcccagatctacggcagccgataccgcgataacccggacgacacggcaggctaccgcgatgaggccggagagatgaacaaccagcagatccacgcctatcaccagcagatcatgaaccagcaggacgagcagctcgatcgcctgggcgccagcattgcgcgacagcgcgagttgagcatgcagattggcgatgagctcgacgaccaagtcgcccttatggacgaggtggacgccaacacggaccgccaccagggccgtctcgatcgtgccaggaaatcggtcaacaagatcacgaagatggccggcgagagcaagcagatggttgccattattgtcttgatagttgttctgatcctccttattgccatcttgaagtagagtcctgtactaccgaagctgcactggaaacttgctgcgagaggagagctggagacacgaagagcgtgaagaaggacagagtatcattgcatttggcgcggcgtttcacggtagatttcgcactgctttcctcgcattcgggtagcatcgaacattttggagtgttttgctgcttttcctgggtactcaagtacatagtactgcacctgtatacaagtctccgacgagcatttccatctgtcgtaagacgtgtctcctaaacgtatgtaccatgagataattgtggccaggcatggcgatagtgttttccaagtctgcgcttggagaatcatcacagggccagaattgttgcggctttctgtaatttgatcccttctccatcatgacttacaagcttgaattcaagagcttccatttctactaaggatgttgcaaagcaagatttttaatgattttcaagatcgtacacggggacctgcaattattgaattggcaatgctgatgatgattgaacttcctgcgcagccttacaatgctaatgcttacaaagcctggcaactttccgtttcctttcccaggctcatatgatgcaaacgtgcctcttgtcgcgatgcttcctttctctgtccctgacgaaacgtgagatctcatctcgttcactttttgacccaacgccatgccaaaccaccacctggtcgtcttgctcagtctctacaatccatcgcgcatgcttgtgcccttcttcgccgtctcctcggccgtggccttggtgcgtgcctgcaggtccgcgatgttctccttgctcgctccggcgcggtccgccttgacggcctcctcgctgtcggaggctagctcgggtttccagtggcccttgccatccttgtgcttggataggaggtcttgcttgtgcttctctgcgtctgtgttctcgcctggttcagttgtcagcttggctgtgctttgttggtataggaaaaaggtggagtgaaggtggagggaggaatgagtgaagcttacctccgctttccttgtgcttcagagcctgggtactacccgtaaagctgcgctggatcacggcctgtctgctcacgctgagggttgcggtcgggcggaggatggtggagagcattcgtgacgccattgtgtgttgagttgtgagttgtgaggagtgaagactggcaggtagatagttgtgggtgggcggttgcttagatctcttgaagaagtccgttagcaacgttgttattgttgtttatgttgattaagagggagagcgaatgagtagattgggtctaaatccttacctagctcaagaaatttggcaatggagaggatcttaatggtcggaagcacaggagaagggagctatgagttgtttgctgcaaccgagggacaaaggtcccagcaccttctcat

SEQ ID NO: 24454 - DNA, 1122 bp, Muscodor strobelii
  misc_feature: SGI cDNA ID NO. 568338
  misc_feature: Elevated expression when VOC is produced
  misc_feature: Encodes the peptide sequence at SEQ ID NO 24455
atgcctctcccaactggcgtctatcgagccgatcaagtcggctctctcctccgacccaaagatcttctcgcgctccgctccgcccccgatgtctcgcccaccgagctccgtaccctcgaagacaaatatatttcagatataatccaaaagcagctctcagtcggattacgggccatcacagatggagaatttagacgaacatggtttcacgtcgactttctcaagcatctgggtggcattgagcagcaaggccaaatgcaatctacgaatactagcatcgggggcacaatgccgcctcggttagttgtcgtcgataagatcagccatccggaagccattcaagtcaaggatttcaagtacttggaatcgcatctcgaaaaggggagtgcaacaacaaaagtctgcataccgagtcctactatgatccacttccgcaactcccgtgagacgatcaacagcgaggcctatccaactctagagcctttcttcgaggacctagcccgcgtcttccaggaagaattagccgacttgtacgcagcaggttgtcgcttcgttcaactggacgacacgaacttggcctatctctgtgacccgaagatgcgcgcagaggctgaacaacgccacggcgacgcaaacgttctggcgcgtcaatacgcttctctgattaacgcctccatctccaaacgtcccaaggacatgacaatcggcatccatctctgccgtggcaaccacagatctcaatggttcgcgcaaggggggtatgagccagtcgctgaggtcctattcaaagagctcgatgtcgatgtttacttcctagagtacgacgatgctcgatctggtgatttctcgcccctgagacatttgccagcgagcaaagtagtcgttttgggcgtcatgtcgagtaagaaagcggcacttgatgataaggcagatattatcaggagactacatgaggctgcgaaattctgccccaaggggttagaacaactgtgtttgagtcaccagtgtgggttcagttccacgtctgaggggaatgatctcagtgaagatgagcaatgggctaagttacggcttgaggtcgaaattgccaaagaggtgtggggtgaggatctttctgtctaa

SEQ ID NO: 24455 - protein, 373 aa, Muscodor strobelii
  misc_feature: SGI Peptide ID NO. 568338
  misc_feature (3)..(365): Pfam Id: PF01717 Pfam Desc: Cobalamin-independent synthase, Catalytic domain
  misc_feature (1)..(372): NCBI GI: 116204257 Blast Desc: CHGG_10012 [Chaetomium globosum CBS 148.51] gi|88176140|gb|EAQ83608.1| CHGG_10012 [Chaetomium globosum CBS 148.51]
  misc_feature (1)..(373): NCBI GI: 171678685 Blast Desc: protein product [Podospora anserina] gi|170937412|emb|CAP62070.1| protein product [Podospora anserina]
  misc_feature (1)..(369): NCBI GI: 39942006 Blast Desc: conserved [Magnaporthe grisea 70-15] gi|145022935|gb|EDK06630.1| conserved [Magnaporthe grisea 70-15]
  misc_feature (1)..(369): NCBI GI: 59803107 Blast Desc: [Magnaporthe grisea]
  misc_feature (1)..(372): NCBI GI: 169616814 Blast Desc: SNOG_11582 [Phaeosphaeria nodorum SN15] gi|111060170|gb|EAT81290.1| SNOG_11582 [Phaeosphaeria nodorum SN15]
  misc_feature (95)..(372): NCBI GI: 189196881 Blast Desc: 5-methyltetrahydropteroyltriglutamate-homocysteine methyltransferase [Pyrenophora tritici-repentis Pt-1C-BFP] gi|187980726|gb|EDU47352.1| methyltransferase [Pyrenophora
  misc_feature (98)..(372): NCBI GI: 164422536 Blast Desc: NCU10020 [Neurospora crassa OR74A] gi|157069705|gb|EAA28832.2| NCU10020 [Neurospora crassa OR74A]
  misc_feature (3)..(368): NCBI GI: 284036477 Blast Desc: Methionine synthase vitamin-B12 independent [Spirosoma linguale DSM 74] gi|283815770|gb|ADB37608.1| Methionine synthase vitamin-B12 independent [Spirosoma linguale DSM 74]
  misc_feature (9)..(368): NCBI GI: 91789244 Blast Desc: methionine synthase, vitamin-B12 independent [Polaromonas sp. JS666] gi|91698469|gb|ABE45298.1| Methionine synthase, vitamin-B12 independent [Polaromonas sp. JS666]
  misc_feature (9)..(368): NCBI GI: 239814751 Blast Desc: Methionine synthase vitamin-B12 independent [Variovorax paradoxus S110] gi|239801328|gb|ACS18395.1| Methionine synthase vitamin-B12 independent [Variovorax paradoxus
  misc_feature (13)..(240): SWISSPROT Homolog: EC 2.1.1.14 5-methyltetrahydropteroyltriglutamate--homocysteine S-methyltransferase
  misc_feature: Useful for introducing or modulating the production of volatile compounds
MPLPTGVYRADQVGSLLRPKDLLALRSAPDVSPTELRTLEDKYISDIIQKQLSVGLRAITDGEFRRTWFHVDFLKHLGGIEQQGQMQSTNTSIGGTMPPRLVVVDKISHPEAIQVKDFKYLESHLEKGSATTKVCIPSPTMIHFRNSRETINSEAYPTLEPFFEDLARVFQEELADLYAAGCRFVQLDDTNLAYLCDPKMRAEAEQRHGDANVLARQYASLINASISKRPKDMTIGIHLCRGNHRSQWFAQGGYEPVAEVLFKELDVDVYFLEYDDARSGDFSPLRHLPASKVVVLGVMSSKKAALDDKADIIRRLHEAAKFCPKGLEQLCLSHQCGFSSTSEGNDLSEDEQWAKLRLEVEIAKEVWGEDLSV

SEQ ID NO: 24456 - DNA, 1897 bp, Muscodor strobelii
  misc_feature: SGI EST ID NO. CUFF.57858.0
  misc_feature: Variant of the nucleotide sequence at SEQ ID NO 24454
agagaatggaaacgacatggaaacaaaaatagcaacgcaaaggaagacagggtgcaaccctgagcaggtgagaagcgggcgaaccaacgctgtgaacaaccgcaccacctttggcaatcctagaatcgcaaccctgattccaccccctccactacctagcttacagacgcggcacacttttgtttttcctcacttgccgtgtattcacctttccttgccgtggtatctgaatagggcgtagtgcagtggacgccgtggacccggtcccgtctatggcgctcacggaattgcttcccatattgagccgaagttgctggcgactatatgtcatcgactccgtccgcgtgggaagacagggtctgttccaggacctcggacgacgtacccctcgtcatgttactattcttacaatttggagagaatactctcgtatgatacaataggtttgtgttcgtaaagtttactttctcattatgtatttaactcgactttgtccttccgtctttctgtactttgtaccaaattgtatatgatttgatcttgtattatagcaaggaaaaagcatttctctggtctcgctaccacgctccttgctcttcattatttctcctttccgctgtttcagtgcacctcactatgcctctcccaactggcgtctatcgagccgatcaagtcggctctctcctccgacccaaagatcttctcgcgctccgctccgcccccgatgtctcgcccaccgagctccgtaccctcgaagacaaatatatttcagatataatccaaaagcagctctcagtcggattacgggccatcacagatggagaatttagacgaacatggtttcacgtcgactttctcaagcatctgggtggcattgagcagcaaggccaaatgcaatctacgaatactagcatcgggggcacaatgccgcctcggttagttgtcgtcgataagatcagccatccggaagccattcaagtcaaggatttcaagtacttggaatcgcatctcgaaaaggggagtgcaacaacaaaagtctgcataccgagtcctactatgatccacttccgcaactcccgtgagacgatcaacagcgaggcctatccaactctagagcctttcttcgaggacctagcccgcgtcttccaggaagaattagccgacttgtacgcagcaggttgtcgcttcgttcaactggacgacacgaacttggcctatctctgtgacccgaagatgcgcgcagaggctgaacaacgccacggcgacgcaaacgttctggcgcgtcaatacgcttctctgattaacgcctccatctccaaacgtcccaaggacatgacaatcggcatccatctctgccgtggcaaccacagatctcaatggttcgcgcaaggggggtatgagccagtcgctgaggtcctattcaaagagctcgatgtcgatgtttacttcctagagtacgacgatgctcgatctggtgatttctcgcccctgagacatttgccagcgagcaaagtagtcgttttgggcgtcatgtcgagtaagaaagcggcacttgatgataaggcagatattatcaggagactacatgaggctgcgaaattctgccccaaggggttagaacaactgtgtttgagtcaccagtgtgggttcagttccacgtctgaggggaatgatctcagtgaagatgagcaatgggctaagttacggcttgaggtcgaaattgccaaagaggtgtggggtgaggatctttctgtctaaaaattttgtggccagagatggccagagtaggcattgaatacttgagactgcgagtgcagatagatagaatgcgcgtgttagacgctgcaaaaatctacacgcaaagcgttgaataaatagcatgacgagcgatttgaaa

SEQ ID NO: 24457 - DNA, 1743 bp, Muscodor strobelii
  misc_feature: SGI cDNA ID NO. 568339
  misc_feature: Reduced expression when VOC is produced
  misc_feature: Encodes the peptide sequence at SEQ ID NO 24458
atggctgccaccccggacatcaacgccatcttggcggctctagccaaccaagggcgcaactcgacgcccgccatgcccggcggccagccgatgccccagtacccacccccagcgaccaacaattatcaccaacccatgccccctaccaaccagtcctcgccctatccaccacccggaggctacgctctgccccagccatccgctagtggcaactttgacttgagtgcattgcgatcctctggtgctggcggcatcgcagaggctgtggcccaggccaaggcctacgctgctgagaagggcctgacatcttatgagcgacctccccagagtgcatacccccctcaagctgcctacccaccgcatgatgctcgtgctgccgaccccagaggctaccgggggcgctcccgctctccgccctcgcgtcgtgatgcgttccgtgacaacttcaacccgtacagggacgaacgccgtgatgatcgtggtggccatgctcgtgactatggtcgtgatcgctccatgtcgcctggtcccaaccgtggccgtccgtctggcaccttctcacctcgtaggggtggcggtcgtgatcgaattgacagtgacaatgatgagacgatggaaattgagtcgagtctcgtgggcctgatcattggcagacaaggagagaaccttaagcgtgttgagtctgagactggctgccgagtccagttcatctccccttctggagaacccggtccattccgccagtgcaagatttccgggcctgcccccagacgtgccgaagctagagctgctatcaacagaatcattgaagacagtggcatgggtgccatcgcccgagctggacttgacaaaccccagcaaggcagtcgtagctctggtgcacatgccgctgccggcgtcggtggtggcgctgctgctaatgctgccactctgcgtgatggtgaagactgtctgcaaatcatggtgcctgatcgtaccgtgggcctcatcatcggccgtggtggcgagaccatccgtgatctccaggagcgtagcggatgtcatatcaacattgtcggtgaatccaagagcgtgaatggcttgcgtcctgtcaacctcatcggtccttatgctgctgctgcccaagcgaaggagttgattctggagatcgtcgagagtgacacccgtaacggcaataatcctgatgccaacaaagctgcaccccccaagatggaccacggtcgccagagtgcccaaggcggcggtaatgacaagatcaatgactcaatttatgtaccttccgaggctgttggtatgatcatcggcaagggtggtgagacaattcgcgagatgcagaacaccaccggatgcaagatcaacgtttcccagtcctcaggcccaggtgaggtggagcgcgagattggcctgatcggttctcgtgatgctatcacccgagccaagcaggctatcgaggacaaagtcgacgctgtgcgccagaagaatagtggaggtggtgatcgtcgtggcggacgtcctcaaggtggccgtcgtgattgggacaatcctaactatggctcccaaggctcgagcaaccagccgggcaacactgacgcccagccccctgctgctgcgaatggagccgccgatccatatgctgcttatggcgggtataacaactacatggctctctggtaccaggcctttgctcaacagcaggctggtggtggccaggccggcgagatgccaaagcctcctggtgcctaa

SEQ ID NO: 24458 - protein, 580 aa, Muscodor strobelii
  misc_feature: SGI Peptide ID NO. 568339
  misc_feature (420)..(483): Pfam Id: PF00013 Pfam Desc: KH domain
  misc_feature (317)..(380): Pfam Id: PF00013 Pfam Desc: KH domain
  misc_feature (202)..(265): Pfam Id: PF00013 Pfam Desc: KH domain
  misc_feature (6)..(562): NCBI GI: 46117014 Blast Desc: FG04349.1 [Gibberella zeae PH-1]
  misc_feature (34)..(561): NCBI GI: 256729435 Blast Desc: NECHADRAFT_2566 [Nectria haematococca mpVI 77-13-4]
  misc_feature (1)..(560): NCBI GI: 85091498 Blast Desc: NCU09352 [Neurospora crassa OR74A] gi|28920323|gb|EAA29695.1| conserved [Neurospora crassa OR74A]
  misc_feature (1)..(580): NCBI GI: 154310385 Blast Desc: BC1G_07112 [Botryotinia fuckeliana B05.10] gi|150851444|gb|EDN26637.1| BC1G_07112 [Botryotinia fuckeliana B05.10]
  misc_feature (5)..(580): NCBI GI: 156056018 Blast Desc: SS1G_05361 [Sclerotinia sclerotiorum 1980] gi|154703145|gb|EDO02884.1| SS1G_05361 [Sclerotinia sclerotiorum 1980]
  misc_feature (55)..(565): NCBI GI: 261355483 Blast Desc: KH domain-containing protein [Verticillium albo-atrum VaMs.102]
  misc_feature (69)..(489): NCBI GI: 171677065 Blast Desc: protein product [Podospora anserina] gi|170936600|emb|CAP61259.1| protein product [Podospora anserina]
  misc_feature (56)..(561): NCBI GI: 189200062 Blast Desc: far upstream element-binding protein 2 [Pyrenophora tritici-repentis Pt-1C-BFP] gi|187983467|gb|EDU48955.1| far upstream element-binding protein 2 [Pyrenophora tritici-repentis
  misc_feature (6)..(558): NCBI GI: 154287628 Blast Desc: [Ajellomyces capsulatus NAm1] gi|150408250|gb|EDN03791.1| [Ajellomyces capsulatus NAm1]
  misc_feature (52)..(580): NCBI GI: 119194253 Blast Desc: CIMG_01501 [Coccidioides immitis RS]
  misc_feature: Useful for introducing or modulating the production of volatile compounds
MAATPDINAILAALANQGRNSTPAMPGGQPMPQYPPPATNNYHQPMPPTNQSSPYPPPGGYALPQPSASGNFDLSALRSSGAGGIAEAVAQAKAYAAEKGLTSYERPPQSAYPPQAAYPPHDARAADPRGYRGRSRSPPSRRDAFRDNFNPYRDERRDDRGGHARDYGRDRSMSPGPNRGRPSGTFSPRRGGGRDRIDSDNDETMEIESSLVGLIIGRQGENLKRVESETGCRVQFISPSGEPGPFRQCKISGPAPRRAEARAAINRIIEDSGMGAIARAGLDKPQQGSRSSGAHAAAGVGGGAAANAATLRDGEDCLQIMVPDRTVGLIIGRGGETIRDLQERSGCHINIVGESKSVNGLRPVNLIGPYAAAAQAKELILEIVESDTRNGNNPDANKAAPPKMDHGRQSAQGGGNDKINDSIYVPSEAVGMIIGKGGETIREMQNTTGCKINVSQSSGPGEVEREIGLIGSRDAITRAKQAIEDKVDAVRQKNSGGGDRRGGRPQGGRRDWDNPNYGSQGSSNQPGNTDAQPPAAANGAADPYAAYGGYNNYMALWYQAFAQQQAGGGQAGEMPKPPGA

SEQ ID NO: 24459 - DNA, 3300 bp, Muscodor strobelii
  misc_feature: SGI EST ID NO. CUFF.57612.0
  misc_feature: Variant of the nucleotide sequence at SEQ ID NO 24457
cccatcttccccttctccttccctctccatcaccacagtccatcgcccatcgacatcctttccaatcgatgacacagtaggaacagaacgacgcgaattaaatctctcgaggaaatctctctttcctctcactgctgagaaagaggtatttacgacaactgcgcgagggcgataagtacctaggtaccaacccagcgcagctttctcccgccgctcgtggcttctgtcatctttttttcattcactgcttccattgctactgcacacggacacacagggacgagtacctagagagtgaagaagactgcattgatgcgccgtgctccgttggtcttgcagtgcattgacaggtagtccaatcaaacacctgttaccaaagaacacttgacaataggcgacttgacacgccgagtctgcgacgtcctctttgacccatctaaactgaactgacaataaaatcttgatcgctttgtgtcgctgcgtgtgcacctgcgtgatctacaactcttgggtgcggttccgtcactgcgcgcatctgccactggaggtacattgtcgccgtcttgctgcaaacacacacctgcaaccatcaatttcattatcgcctttcgccgcacagagtcctgtgcaagatagtctttgactgctgcaaccgtgtgtgttgccgtctgcatctcatctcgaaactcgcatctgcatctgcatctacatctgccatttgattcgccgcgctgcaagatttgacacgttgtgaacacaatggctgccaccccggacatcaacgccatcttggcggctctagccaaccaagggcgcaactcgacgcccgccatgcccggcggccagccgatgccccagtacccacccccagcgaccaacaattatcaccaacccatgccccctaccaaccagtcctcgccctatccaccacccggaggctacgctctgccccagccatccgctagtggcaactttgacttgagtgcattgcgatcctctggtgctggcggcatcgcagaggctgtggcccaggccaaggcctacgctgctgagaagggcctgacatcttatgagcgacctccccagagtgcatacccccctcaagctgcctacccaccgcatgatgctcgtgctgccgaccccagaggctaccgggggcgctcccgctctccgccctcgcgtcgtgatgcgttccgtgacaacttcaacccgtacagggacgaacgccgtgatgatcgtggtggccatgctcgtgactatggtcgtgatcgctccatgtcgcctggtcccaaccgtggccgtccgtctggcaccttctcacctcgtaggggtggcggtcgtgatcgaattgacagtgacaatgatgagacgatggaaattgagtcgagtctcgtgggcctgatcattggcagacaaggagagaaccttaagcgtgttgagtctgagactggctgccgagtccagttcatctccccttctggagaacccggtccattccgccagtgcaagatttccgggcctgcccccagacgtgccgaagctagagctgctatcaacagaatcattgaagacagtggcatgggtgccatcgcccgagctggacttgacaaaccccagcaaggcagtcgtagctctggtgcacatgccgctgccggcgtcggtggtggcgctgctgctaatgctgccactctgcgtgatggtgaagactgtctgcaaatcatggtgcctgatcgtaccgtgggcctcatcatcggccgtggtggcgagaccatccgtgatctccaggagcgtagcggatgtcatatcaacattgtcggtgaatccaagagcgtgaatggcttgcgtcctgtcaacctcatcggtccttatgctgctgctgcccaagcgaaggagttgattctggagatcgtcgagagtgacacccgtaacggcaataatcctgatgccaacaaagctgcaccccccaagatggaccacggtcgccagagtgcccaaggcggcggtaatgacaagatcaatgactcaatttatgtaccttccgaggctgttggtatgatcatcggcaagggtggtgagacaattcgcgagatgcagaacaccaccggatgcaagatcaacgtttcccagtcctcaggcccaggtgaggtggagcgcgagattggcctgatcggttctcgtgatgctatcacccgagccaagcaggctatcgaggacaaagtcgacgctgtgcgccagaagaatagtggaggtggtgatcgtcgtggcggacgtcctcaaggtggccgtcgtgattgggacaatcctaactatggctcccaaggctcgagcaaccagccgggcaacactgacgcccagccccctgctgctgcgaatggagccgccgatccatatgctgcttatggcgggtataacaactacatggctctctggtaccaggcctttgctcaacagcaggctggtggtggccaggccggcgagatgccaaagcctcctggtgcctaaatcggcggataaacctgatatcagacttcatgagcatgacaacaatacgagatgacatgcaaaatcggtgatgcatacttctctccaacatcatttccagcatcgcttgcggatatacccaagactcggcgtaccgaactctttcattcctgcgccgagtggtcttttgcacatacttttcattgtgggtgcacttgttctggaagagccttgcaatctattagatgcacctaaggttcaagatccaaagcgagtgaattccaaacgtccaaaataattataacaatcggcgatacccctagcttgatagacgatccagtggtatgatgttcgggaatctccttcaccacctacgtctataatgcagttgcattcagtgtgttgatagcatcacggacggagttctaggcgtttgggcgaaaacaaaagcatgttgctttctccctggactctaatacttccctttttgtgtctcatacccatcacgttgatacgagaagatttgctcaggaatgaagtggagcgtggggcagcgcggaaacacgatgaatgaggcttgcgggaaggcatttgtataagtaacggataagggaacacaaggtgaaaaggctaggtacatagggcttaatgatgctggaccctcttataatggctctcacgttctatgaagtgatcgtgatgctgtgatctgtagtgttgagttcatttatacgacaaacgactaagggtatggacttgctgtgactcgcatcgctgccgcattctgcacagcaacataatcaaacgatgacttccaag

SEQ ID NO: 24460 - DNA, 1377 bp, Muscodor strobelii
  misc_feature: SGI cDNA ID NO. 568340
  misc_feature: Encodes the peptide sequence at SEQ ID NO 24461
atggactccgaatcctcaaaccgcgtagtatcaacgcaacccgacgcacctgccgcaaactatcatggttcagattctgatacaccaaaaagtctcgatagagcacatagaccttcgcaattccaagcactcaatcaagagaaagatgccagcaggatggcgcttccgagcccaccccctgacggtggcttccgcgcctggctgcatgtgctcggaggcttcatgttgttcttcaactcctggggtctattgacaacgtttggcgtcttccagacctattacgagtccggagctctgtttaccgaatcctcaacaaacatctcctggatcggctccatcttgtctttctccatcctctttgcaggtatattcgcaggtcctatctacgatagagggcatctccgcttgctcctcgtcatcggtaccgttggcgttgtcttaggaagcatgttcctcagcctatgcacagagtggtggcaagtcctgctcgcacaaggatttttcatgggtctcggcgcaggttgcctattcatacccgttgtctcgatactcccgacatacttccgctcccgcctcgcacttgccgtcggtctagcgtcctcgggctcatcgctgggcggcgtgatctatcccatagttcttaacaatctcatcggcaaaattggcttcccctgggccgtgcgaacgataggattcattgccctcgccacgctccttatacccctctctgtcatgagattacgcttcatcccggcgaaacctcgagccgtcttcgactgggcggcgttcaccgagttcgactacgtgatgcacgtcatcgcgacaacgatctcattctttgctctcaccatcctgacattctacgtctcgtactacccacaagacctcggcatcaccgacacaagtctctcgttttacatcgtggctatcttcaacgctgggtcagtagccggacgtattatccccaacgctatttcagacaaagtgggacctttcaatatcatagcccctggaactgccataacggggattctcatgttcgccatgccgtccgcgaagtctcctgcggccgtcatcgtgttagctattctactgggattcagtagtggaatcttgctcgcagtaccgcctgtatgcttcgcgttcatcacgaaggataagtcaagacttggtacgagagttgggcaggggtacgcaattacggctcttgggctgttggctggaggaccggcaggtggcgcgattctagggaatggagagatgctgcattggcacagtctctggtatactggaggtgccacggctgttggggccggagtcttgtacggtgttatcagggtttgtagggctgggtggaagctaaatataaaggcttag

SEQ ID NO: 24461 - protein, 458 aa, Muscodor strobelii
  misc_feature: SGI Peptide ID NO. 568340
  misc_feature (69)..(413): Pfam Id: PF07690 Pfam Desc: Major Facilitator Superfamily
  misc_feature (46)..(458): NCBI GI: 256730137 Blast Desc: NECHADRAFT_45554 [Nectria haematococca mpVI 77-13-4]
  misc_feature (66)..(458): NCBI GI: 238501326 Blast Desc: MFS monocarboxylate transporter, [Aspergillus flavus NRRL3357] gi|220692134|gb|EED48481.1| MFS monocarboxylate transporter, [Aspergillus flavus NRRL3357]
  misc_feature (56)..(458): NCBI GI: 67902758 Blast Desc: AN8366.2 [Aspergillus nidulans FGSC A4] gi|40747772|gb|EAA66928.1| AN8366.2 [Aspergillus nidulans FGSC A4] gi|259484294|tpe|CBF80392.1| TPA: conserved [Aspergillus FGSC
  misc_feature (66)..(458): NCBI GI: 67516493 Blast Desc: AN0528.2 [Aspergillus nidulans FGSC A4] gi|40747471|gb|EAA66627.1| AN0528.2 [Aspergillus nidulans FGSC A4] gi|259489215|tpe|CBF89303.1| TPA: conserved [Aspergillus FGSC
  misc_feature (1)..(427): NCBI GI: 116208602 Blast Desc: CHGG_03594 [Chaetomium globosum CBS 148.51] gi|88184191|gb|EAQ91659.1| CHGG_03594 [Chaetomium globosum CBS 148.51]
  misc_feature (5)..(457): NCBI GI: 242791254 Blast Desc: monocarboxylate transporter, [Talaromyces stipitatus ATCC 10500] gi|218718308|gb|EED17728.1| monocarboxylate transporter, [Talaromyces stipitatus ATCC 10500]
  misc_feature (39)..(458): NCBI GI: 119184612 Blast Desc: CIMG_07083 [Coccidioides immitis RS]
  misc_feature (66)..(439): NCBI GI: 67901822 Blast Desc: AN7898.2 [Aspergillus nidulans FGSC A4] gi|40740362|gb|EAA59552.1| AN7898.2 [Aspergillus nidulans FGSC A4] gi|259480648|tpe|CBF73484.1| TPA: conserved [Aspergillus FGSC
  misc_feature (39)..(458): NCBI GI: 240109917 Blast Desc: Major Facilitator Superfamily protein [Coccidioides posadasii C735 delta SOWgp]
  misc_feature (22)..(458): NCBI GI: 242821889 Blast Desc: monocarboxylate transporter, [Talaromyces stipitatus ATCC 10500] gi|218712694|gb|EED12119.1| monocarboxylate transporter, [Talaromyces stipitatus ATCC 10500]
MDSESSNRVVSTQPDAPAANYHGSDSDTPKSLDRAHRPSQFQALNQEKDASRMALPSPPPDGGFRAWLHVLGGFMLFFNSWGLLTTFGVFQTYYESGALFTESSTNISWIGSILSFSILFAGIFAGPIYDRGHLRLLLVIGTVGVVLGSMFLSLCTEWWQVLLAQGFFMGLGAGCLFIPVVSILPTYFRSRLALAVGLASSGSSLGGVIYPIVLNNLIGKIGFPWAVRTIGFIALATLLIPLSVMRLRFIPAKPRAVFDWAAFTEFDYVMHVIATTISFFALTILTFYVSYYPQDLGITDTSLSFYIVAIFNAGSVAGRIIPNAISDKVGPFNIIAPGTAITGILMFAMPSAKSPAAVIVLAILLGFSSGILLAVPPVCFAFITKDKSRLGTRVGQGYAITALGLLAGGPAGGAILGNGEMLHWHSLWYTGGATAVGAGVLYGVIRVCRAGWKLNIKA

SEQ ID NO: 24462 - DNA, 609 bp, Muscodor strobelii
  misc_feature: SGI EST ID NO. CUFF.57614.0
  misc_feature: Variant of the nucleotide sequence at SEQ ID NO 24460
cgcaacccgacgcacctgccgcaaactatcatggttcagattctgatacaccaaaaagtctcgatagagcacatagaccttcgcaattccaagcactcaatcaagagaaagatgccagcaggatggcgcttccgagcccaccccctgacggtggcttccgcgcctggctgcatgtgctcggaggcttcatgttgttcttcaactcctggggtctattgacaacgtttggcgtcttccagacctattacgagtccggagctctgtttaccgaatcctcaacaaacatctcctggatcggctccatcttgtctttctccatcctctttgcaggtatattcgcaggtcctatctacgatagagggcatctccgcttgctcctcgtcatcggtaccgttggcgttgtcttaggaagcatgttcctcagcctatgcacagagtggtggcaagtcctgctcgcacaaggatttttcatgggtctcggcgcaggttgcctattcatacccgttgtctcgatactcccgacatacttccgctcccgcctcgcacttgccgtcggtctagcgtcctcgggctcatcgctgggcggcgtgatctatcccatagttctta

SEQ ID NO: 24463 - DNA, 459 bp, Muscodor strobelii
  misc_feature: SGI cDNA ID NO. 568341
  misc_feature: Encodes the peptide sequence at SEQ ID NO 24464
atggctactacaaatgtccaggccatccttcatcgccagcctgctcaccccaaggcagttggcattgtcatgtccaacggcacattcctctgcctatgcctgtcttgcggcgaggaggacgtgccagtggtgatgagaaacaccgccacggccatctcgtctcacctttcgaccaaggttcccggcagtgcgtaccgcagaggccagtttccgcgagtcctgtcgtgccccgtccagggctgcatcgctagaccgggatgcaacaacgcgctcatccgccatatgaaggccgcccaccgcgccgtgccctacggcgtcgccaacctcccgggcttcactgcccaggagcagaacgactgggacgaggtcaccgacaaagacaagaccaagaagcgctataacgaggagcttggtgacgattgcgccctcgccttggccctgtatcgcgagctcgtttag

SEQ ID NO: 24464 - protein, 152 aa, Muscodor strobelii
  misc_feature: SGI Peptide ID NO. 568341
MATTNVQAILHRQPAHPKAVGIVMSNGTFLCLCLSCGEEDVPVVMRNTATAISSHLSTKVPGSAYRRGQFPRVLSCPVQGCIARPGCNNALIRHMKAAHRAVPYGVANLPGFTAQEQNDWDEVTDKDKTKKRYNEELGDDCALALALYRELV

SEQ ID NO: 24465 - DNA, 792 bp, Muscodor strobelii
  misc_feature: SGI EST ID NO. CUFF.57617.0
  misc_feature: Variant of the nucleotide sequence at SEQ ID NO 24463
attcagaaatttcccctccacccatccatcctcaacatcacctcctaaagacaaatccacaacgacaaccatccccaccgcagccctgagcgcaattcgcaaacaactcctatcgagaatcgcaccagaagcatcgattcaatccgaaccccattcaagatggctactacaaatgtccaggccatccttcatcgccagcctgctcaccccaaggcagttggcattgtcatgtccaacggcacattcctctgcctatgcctgtcttgcggcgaggaggacgtgccagtggtgatgagaaacaccgccacggccatctcgtctcacctttcgaccaaggttcccggcagtgcgtaccgcagaggccagtttccgcgagtcctgtcgtgccccgtccagggctgcatcgctagaccgggatgcaacaacgcgctcatccgccatatgaaggccgcccaccgcgccgtgccctacggcgtcgccaacctcccgggcttcactgcccaggagcagaacgactgggacgaggtcaccgacaaagacaagaccaagaagcgctataacgaggagcttggtgacgattgcgccctcgccttggccctgtatcgcgagctcgtttaggtgtactcgtggctcttggggggagggcagtgaacatggatactcagcgaggggaggctctctagtattgcaagaggagcagtaagaataggaaaccatcagaccgcgcttagtccgccgtcgacagcatagcatgcaggtcataatcaaccaagattctgagtaatgatttcc

SEQ ID NO: 24466 - DNA, 1053 bp, Muscodor strobelii
  misc_feature: SGI cDNA ID NO. 568342
  misc_feature: Reduced expression when VOC is produced
  misc_feature: Encodes the peptide sequence at SEQ ID NO 24467
atgatgtctggaagtccaaaaggctcagttgtggtgaccgggtccaacggaggtctcggatcagccattgcgtcgcacgtcacacggacccccgacctgtcgtcaaactatcacggtgtctttgtcgtccgcaagaccgagacggcaacgaggctacgtgggattcttgattccgctccgaagacttttcgacatcatactgttgatgttgatttgacgagtcttgaatcggtgcggaatggcgcgaagaagatcaatgggttggtgaagggtggtgagatcccgccgatcagggccctgattttgagcgcgggttatcaggaacttacgaccctgacgatgacggatgatgggtttgatagtagttttcaggttaattacttgagccagttcttattggtgctgttgctgttggggagtatggataaggaaaatgggaggattgttattgtcagtgggcagaatcatgacactgaagacccgcgcaatgagatgcaaaagctctttagtgacaagaaatacgtgcccatgttccatgatacggagacgttggccaagggcaaatggagtacgcctgaggatgacccgtcggcgcttggtggtgctaggaggtatggtgctgcacatttgttggaggttatgtttatgcgcgagctacagaaaagactcgatgccgatccagctctctccaagatcagtgtgctcgggctagacccaggcgctatggcgacagacatctgcagacgcgatgggttcatgacaagagtgatcgccatgaagatcatacttccgctcttgggccctatcagtgcttatttctcgccaaatggcttcttaagatctccgtggaaatctggtggagatgctttgagagcggcgtttgatacggagacactgggccagtatccaaaggggctctatctaaatggttcggaaccattgcaacctagcaaggaaaccgacaacgaggcaaatcgagaggcgctctggagcgatagtgtaaagtatgcacatattgtcgacggggaaactgtactggggaactggcgttga

SEQ ID NO: 24467 - protein, 350 aa, Muscodor strobelii
  misc_feature: SGI Peptide ID NO. 568342
  misc_feature (5)..(350): NCBI GI: 256735183 Blast Desc: NECHADRAFT_74766 [Nectria haematococca mpVI 77-13-4]
  misc_feature (5)..(350): NCBI GI: 46108216 Blast Desc: FG00990.1 [Gibberella zeae PH-1]
  misc_feature (1)..(350): NCBI GI: 212538423 Blast Desc: short-chain dehydrogenase, [Penicillium marneffei ATCC 18224] gi|210069109|gb|EEA23200.1| short-chain dehydrogenase, [Penicillium marneffei ATCC 18224]
  misc_feature (1)..(349): NCBI GI: 242765007 Blast Desc: short-chain dehydrogenase, [Talaromyces stipitatus ATCC 10500] gi|218724083|gb|EED23500.1| short-chain dehydrogenase, [Talaromyces stipitatus ATCC 10500]
  misc_feature (7)..(348): NCBI GI: 238840352 Blast Desc: conserved [Microsporum canis CBS 113480]
  misc_feature (5)..(349): NCBI GI: 242764805 Blast Desc: short-chain dehydrogenase, [Talaromyces stipitatus ATCC 10500] gi|218724042|gb|EED23459.1| short-chain dehydrogenase, [Talaromyces stipitatus ATCC 10500]
  misc_feature (7)..(350): NCBI GI: 39942728 Blast Desc: MGG_03444 [Magnaporthe grisea 70-15] gi|145010010|gb|EDJ94666.1| MGG_03444 [Magnaporthe grisea 70-15]
  misc_feature (7)..(349): NCBI GI: 212528992 Blast Desc: short-chain dehydrogenase, [Penicillium marneffei ATCC 18224] gi|210074051|gb|EEA28138.1| short-chain dehydrogenase, [Penicillium marneffei ATCC 18224]
  misc_feature (25)..(349): NCBI GI: 154323033 Blast Desc: BC1G_00859 [Botryotinia fuckeliana B05.10] gi|150848193|gb|EDN23386.1| BC1G_00859 [Botryotinia fuckeliana B05.10]
  misc_feature (8)..(347): NCBI GI: 238842886 Blast Desc: oxidoreductase [Microsporum canis CBS 113480]
  misc_feature (8)..(244): SWISSPROT Homolog: EC 1.3.1.33 Protochlorophyllide reductase
  misc_feature: Useful for introducing or modulating the production of volatile compounds
MMSGSPKGSVVVTGSNGGLGSAIASHVTRTPDLSSNYHGVFVVRKTETATRLRGILDSAPKTFRHHTVDVDLTSLESVRNGAKKINGLVKGGEIPPIRALILSAGYQELTTLTMTDDGFDSSFQVNYLSQFLLVLLLLGSMDKENGRIVIVSGQNHDTEDPRNEMQKLFSDKKYVPMFHDTETLAKGKWSTPEDDPSALGGARRYGAAHLLEVMFMRELQKRLDADPALSKISVLGLDPGAMATDICRRDGFMTRVIAMKIILPLLGPISAYFSPNGFLRSPWKSGGDALRAAFDTETLGQYPKGLYLNGSEPLQPSKETDNEANREALWSDSVKYAHIVDGETVLGNWR

SEQ ID NO: 24468 - DNA, 1741 bp, Muscodor strobelii
  misc_feature: SGI EST ID NO. CUFF.57621.0
  misc_feature: Variant of the nucleotide sequence at SEQ ID NO 24466
gttcgactggcgagtggcagggtgaaagagctgactttgttttgattcggtgatactatctgagggaggattcaaccgaatatgttcataagggaagctcccgaggaagcaagaaactaatcatccgcacctctacttcgtacttaacttatcttagattgagatatctcacccatccacccaccactttgactcgttttaggtttgctgactcggaagagtggattacgcaatgatgtctggaagtccaaaaggctcagttgtggtgaccgggtccaacggaggtctcggatcagccattgcgtcgcacgtcacacggacccccgacctgtcgtcaaactatcacggtgtctttgtcgtccgcaagaccgagacggcaacgaggctacgtgggattcttgattccgctccgaagacttttcgacatcatactgttgatgttgatttgacgagtcttgaatcggtgcggaatggcgcgaagaagatcaatgggttggtgaagggtggtgagatcccgccgatcagggccctgattttgagcgcgggttatcaggaacttacgaccctgacgatgacggatgatgggtttgatagtagttttcaggttaattacttgagccagttcttattggtgctgttgctgttggggagtatggataaggaaaatgggaggattgttattgtcagtgggcagaatcatgacactgaagacccgcgcaatgagatgcaaaagctctttagtgacaagaaatacgtgcccatgttccatgatacggagacgttggccaagggcaaatggagtacgcctgaggatgacccgtcggcgcttggtggtgctaggaggtatggtgctgcacatttgttggaggttatgtttatgcgcgagctacagaaaagactcgatgccgatccagctctctccaagatcagtgtgctcgggctagacccaggcgctatggcgacagacatctgcagacgcgatgggttcatgacaagagtgatcgccatgaagatcatacttccgctcttgggccctatcagtgcttatttctcgccaaatggcttcttaagatctccgtggaaatctggtggagatgctttgagagcggcgtttgatacggagacactgggccagtatccaaaggggctctatctaaatggttcggaaccattgcaacctagcaaggaaaccgacaacgaggcaaatcgagaggcgctctggagcgatagtgtaaagtatgcacatattgtcgacggggaaactgtactggggaactggcgttgagcatatgtctagaggaatagttacggatcgtgcttatgagattggagagttttgtcagtgtcactgaacgagactgtcgacccaggcattcagatcagattgcttctgagttccagaccttgttcgatctctcaggccgaagttgtcattgtgtagatccagtttttgactccactatgacttggtccaggatagctcacggacactggatgttgggaccgagcgttgctattgttggctctgtgggtagcgtgtcgaaggacaactcttagtaagaacagtgacaagagtcaagtttgaaacgtggtttgaggttcatcttatgtgactgacgtggccatactaatgatatgtgttgtcagcttgatgtggggactgggtatgactggcagcttaatcctaggaagttagggtgctacatgagtcgaattattgaagaagagaaaatgctcgaat

SEQ ID NO: 24469 - DNA, 576 bp, Muscodor strobelii
  misc_feature: SGI cDNA ID NO. 568343
  misc_feature: Reduced expression when VOC is produced
  misc_feature: Encodes the peptide sequence at SEQ ID NO 24470
atgtctgcatactacagctacaaccaccaccatcaccagcccacggccgccgccccctccgtctcccacagccatcacggaggccgcaacaggcgcggcccccggttatctgtctcccagaactcccagaagcagttccgcggcgtcaagagcatgaaggagctgtccgagtccgcctccgtcgtcgccttccgatcacagttcgaagcctcccgctccttcgatctggaggacgacatggagttctgtcccaagctgttaaccgagagtgacattgtttccatcagcagtgcttcctccgaccgttcttctttgtccagcggttcccctaatgcttctcccacgcaacacccccagcaagtcgcctctaacttctctctcaactccacctcgccggcttttgtacctccgtccttccaacatcagccgtcgagcctcaagctgcaccaacctgcggctaccaggactcgcaatgccatccccatcatcaaccctgccaacggcctgaccatgtcgagcccgccgccgtctgtctcccccgccaggatgcaccaccacctcggacgccgatggtag

SEQ ID NO: 24470 - protein, 191 aa, Muscodor strobelii
  misc_feature: SGI Peptide ID NO. 568343
  misc_feature (1)..(183): NCBI GI: 256729439 Blast Desc: NECHADRAFT_8975 [Nectria haematococca mpVI 77-13-4]
  misc_feature (1)..(191): NCBI GI: 39973567 Blast Desc: MGG_01070 [Magnaporthe grisea 70-15] gi|145017973|gb|EDK02252.1| MGG_01070 [Magnaporthe grisea 70-15]
  misc_feature (1)..(185): NCBI GI: 16944555 Blast Desc: conserved [Neurospora crassa]
  misc_feature (1)..(191): NCBI GI: 116199701 Blast Desc: CHGG_08006 [Chaetomium globosum CBS 148.51] gi|88179285|gb|EAQ86753.1| CHGG_08006 [Chaetomium globosum CBS 148.51]
  misc_feature (1)..(191): NCBI GI: 171688772 Blast Desc: protein product [Podospora anserina] gi|170944348|emb|CAP70458.1| protein product [Podospora anserina]
  misc_feature (15)..(191): NCBI GI: 119191840 Blast Desc: CIMG_00297 [Coccidioides immitis RS]
  misc_feature (15)..(191): NCBI GI: 240106328 Blast Desc: CPC735_058910 [Coccidioides posadasii C735 delta SOWgp]
  misc_feature (22)..(191): NCBI GI: 258573349 Blast Desc: conserved [Uncinocarpus reesii 1704] gi|237901122|gb|EEP75523.1| conserved [Uncinocarpus reesii 1704]
  misc_feature (1)..(185): NCBI GI: 164428017 Blast Desc: NCU01559 [Neurospora crassa OR74A] gi|157071975|gb|EAA27026.2| [Neurospora crassa OR74A]
  misc_feature (22)..(191): NCBI GI: 145251247 Blast Desc: An15g06080 [Aspergillus niger] gi|134082667|emb|CAK42561.1| protein product [Aspergillus niger]
  misc_feature: Useful for introducing or modulating the production of volatile compounds
MSAYYSYNHHHHQPTAAAPSVSHSHHGGRNRRGPRLSVSQNSQKQFRGVKSMKELSESASVVAFRSQFEASRSFDLEDDMEFCPKLLTESDIVSISSASSDRSSLSSGSPNASPTQHPQQVASNFSLNSTSPAFVPPSFQHQPSSLKLHQPAATRTRNAIPIINPANGLTMSSPPPSVSPARMHHHLGRRW

SEQ ID NO: 24471 - DNA, 2464 bp, Muscodor strobelii
  misc_feature: SGI EST ID NO. CUFF.58340.1
  misc_feature: Variant of the nucleotide sequence at SEQ ID NO 24469
cgacccccgaagccccaagctgggatctctctctcccgtttctggtcctctgccagtctgtgtctgtcactcgccctcctcgaagctgtacgttgccctccctctccaggaacccttttcacgtccactattccgtttcctgtcctgtgctgttctatcgttctatcgatcctaccagcccgtgcccacttgcccaccaccgccacctcctcatttacttagatactactcccacgctgctccaacagtcgcacaccactcccgatccatccatccattcaatctacacttttcacatctcttacattcttcactgcagaattaccgttaaaaagaaaaaagaaaacaacaacacccaacgccttctttgagctctactttcatcgccatctgctcctagtctcaggccgacgaccactttcattgttgccgctgttgcactgccgaattttaaaataccgcacgacgagctcggccgcccacctcgaacgccagcccccattcacccagcccagcttggacctctctgcgtcgacccccaaccaccaacggcaaccatctcgtcccgtctcatcgaactgcattcctcacggtgaaccaacgactatccacggcgaataccaacaaccacggcgctgctcaacaccgagtcatcaccaacaaccgcatccgcctcgctgtctgatccgaatactactgtactccatctttggttatcccgcacaagtacttcataatgtctgcatactacagctacaaccaccaccatcaccagcccacggccgccgccccctccgtctcccacagccatcacggaggccgcaacaggcgcggcccccggttatctgtctcccagaactcccagaagcagttccgcggcgtcaagagcatgaaggagctgtccgagtccgcctccgtcgtcgccttccgatcacagttcgaagcctcccgctccttcgatctggaggacgacatggagttctgtcccaagctgttaaccgagagtgacattgtttccatcagcagtgcttcctccgaccgttcttctttgtccagcggttcccctaatgcttctcccacgcaacacccccagcaagtcgcctctaacttctctctcaactccacctcgccggcttttgtacctccgtccttccaacatcagccgtcgagcctcaagctgcaccaacctgcggctaccaggactcgcaatgccatccccatcatcaaccctgccaacggcctgaccatgtcgagcccgccgccgtctgtctcccccgccaggatgcaccaccacctcggacgccgatggtaggtcgtcctcgcgcttcctactcgggaagacgaggtgcatgaccccacctaccttcgtgtgtaatccgtaatcaagcgcatctttcttttgcccattcgctgtaccatcataatagctggtccatcttggcgggcaccgacacagacatctaggcatcgacatccactggatttatttcaggtcatcgcagggcttgatcttgggacagagtccttacgtcacgctaccttctccctgtataaacataattattcgacatataacgagtgctcatcgtagaaattgcctccctcgcaggcctgtatgatgggcgcatcctgcatggaagatgacgatacctttttgctttttgcgttcggtctacaacgggaaaataccagatacatgtgctcggtgttacgcctcgaaagatgggggctgttcttgggatggcatcacgaatgggcgttgcaaacaatcggcggcttttgattttcttcattccaactgcatcggtgttgacgacaacacacatcggagtcttcgggtttcatttgggagcggtacgatcaagaggtcatgatgggtcatgacacactcgataaaacaaaagaataccacttcacatatagagcgagtttttgcgacgactaggggttgggttctgcgtttggtccaagcaaggtcatggcgggtattatcctacaatggaaacggcaggggttgcaggtgtttgttttatttttactaactgggatgggttttgactattactactactgggcaatatccgggtgaatcagagaaatctccacaaagcaatgggacatgggctgtggtctttggtcgcgtgtcttggttttcacggctcaaaaggcacgagacggagttgttgggcacacggttcatccaacgcgggaaccttgcaaataaagagttgatacaattgtgtctatcatcgaaattttttgattcattctctgtactacagtggcggttattgaagagaacaaaataccgacctactacttcaacatatctgttcgtgtttttactgtgctgaatacgtgtatgattggatgggtgacttcaaacagcattcaaagtgagagacagcggccaggttacgcgagattcgagtaggctttggtaggcagaaaggaatggtttgta

SEQ ID NO: 24472 - DNA, 990 bp, Muscodor strobelii
  misc_feature: SGI cDNA ID NO. 568344
  misc_feature: Encodes the peptide sequence at SEQ ID NO 24473
atggctgctaattattgggaatcaactcaacgacgcaactggcaattttccaaagatgagttggcgatcaaaagagaagagcttgaggagagcgaggcagagttggtccggatgtatccactccccgagcagaggcatctaaatatatacttcaactatcagttaggacgtctgggcaaaagactgggtgttcgtcaacaatgccttgcgacagctcagatgtatctcaaacgcttctacaccaaagtcgagatacggcggacaaatccctatctcgttataactactgcactttatctggcctgcaagatggaggaagctccgcagcacattaggctggtagttagcgaatcccggtctttgtggcctgtagacttcctgtctgtcgacatcgcacgactcggcgaatgtgaattctggatgatatccgaaatgtccagtcagcttatcatacatcagccatacaatactgttagtagactaagggatgagatggcgatcacgctcagcaacgacgaagcgtctctcacaacgtggattattaacgatcactatatgactgatctcccccttctctatgcgcctcatatcatcgcaatgacggcaatcttattcgccctcgtcatgcggccgaatccacaggcgggtcaaccaacaggaaatatgttacaaatgcaatcaagcccaatatcacccgccgcagtggccagagacgcaatggaaactattagaggaggagggccgggacaatcgagaaacccgaataacactagcagccctaccagtcaagcaacatccatggccagaatccaacgatacgtatcgttcctagctgatagcagcaatgtcaggatagaagacatgatagagtgtagccaagagcttatttcgttttatgactgccaagaacagtataacgacaagctcacgagggagcaaatcaatcgttttgtgaaagcgagagggctcgataaggtatccagtgcttga

SEQ ID NO: 24473 - protein, 329 aa, Muscodor strobelii
  misc_feature: SGI Peptide ID NO. 568344
  misc_feature (19)..(142): Pfam Id: PF00134 Pfam Desc: Cyclin, N-terminal domain
  misc_feature (57)..(106): Pfam Id: PF00134 Pfam Desc: Cyclin, N-terminal domain
  misc_feature (1)..(325): NCBI GI: 261355472 Blast Desc: cyclin-C [Verticillium albo-atrum VaMs.102]
  misc_feature (1)..(325): NCBI GI: 46117026 Blast Desc: FG04355.1 [Gibberella zeae PH-1]
  misc_feature (1)..(325): NCBI GI: 164428020 Blast Desc: NCU01563 [Neurospora crassa OR74A] gi|166222385|sp|Q9HE63.2|SSN8_NEUCR RecName: Full=RNA polymerase II holoenzyme cyclin-like subunit gi|157071976|gb|EAA26964.2|
  misc_feature (1)..(325): NCBI GI: 74638408 Blast Desc: SSN8_GIBMO RecName: Full=RNA polymerase II holoenzyme cyclin-like subunit gi|13560304|gb|AAK30047.1|AF294431_1 C-type cyclin-like Fic1p [Gibberella moniliformis]
  misc_feature (1)..(325): NCBI GI: 256729237 Blast Desc: [Nectria haematococca mpVI 77-13-4]
  misc_feature (1)..(325): NCBI GI: 11595566 Blast Desc: related to cyclin homolog UME3 [Neurospora crassa]
  misc_feature (1)..(323): NCBI GI: 39973565 Blast Desc: MGG_01071 [Magnaporthe grisea 70-15] gi|166222342|sp|A4RD79.1|SSN8_MAGGR RecName: Full=RNA polymerase II holoenzyme cyclin-like subunit gi|145017971|gb|EDK02250.1|
  misc_feature (1)..(325): NCBI GI: 171688786 Blast Desc: protein product [Podospora anserina] gi|170944355|emb|CAP70465.1| protein product [Podospora anserina]
  misc_feature (1)..(325): NCBI GI: 239614054 Blast Desc: RNA polymerase II holoenzyme cyclin-like subunit [Ajellomyces dermatitidis ER-3]
  misc_feature (1)..(325): NCBI GI: 225558509 Blast Desc: cyclin [Ajellomyces capsulatus G186AR]
MAANYWESTQRRNWQFSKDELAIKREELEESEAELVRMYPLPEQRHLNIYFNYQLGRLGKRLGVRQQCLATAQMYLKRFYTKVEIRRTNPYLVITTALYLACKMEEAPQHIRLVVSESRSLWPVDFLSVDIARLGECEFWMISEMSSQLIIHQPYNTVSRLRDEMAITLSNDEASLTTWIINDHYMTDLPLLYAPHIIAMTAILFALVMRPNPQAGQPTGNMLQMQSSPISPAAVARDAMETIRGGGPGQSRNPNNTSSPTSQATSMARIQRYVSFLADSSNVRIEDMIECSQELISFYDCQEQYNDKLTREQINRFVKARGLDKVSSA

SEQ ID NO: 24474 - DNA, 5729 bp, Muscodor strobelii
  misc_feature: SGI EST ID NO. CUFF.57694.1
  misc_feature: Variant of the nucleotide sequence at SEQ ID NO 24472
cccagacgtgcctgctattggtccttagcatcttccgagccttccttttctgtttcttatccgtggagaggctggtccgtgcactacgtcatcacacacggtcctttgacctatatctggcccagaccttacagtacgaagtgaaaggcatagagatacagtatacaagatactctcaagcccatcgtgactgcttacatatcacgacactagccactgaaaatagcagcctcaagttcatctggggtaggacctaaactgagttgatactcgtgaggcccgactcccgagtctcggagtacccaacgtttacatccgatgacttttcgtttcgatgagtatgtgattggatcacatctcgcaagcttcgtagaagccagttataatatttcaagtttcttgtaacttcgctaatctcatcagtttcatgagttcagctttgccggctgtggcttgaagatcgactcataacatgatacatcccgactaagtcattgaagatccatttctctgtgtcgaatcacatccattccaagacgccggccaataagtcttagtgtatcagagatggctgctaattattgggaatcaactcaacgacgcaactggcaattttccaaagatgagttggcgatcaaaagagaagagcttgaggagagcgaggcagagttggtccggatgtatccactccccgagcagaggcatctaaatatatacttcaactatcagttaggacgtctgggcaaaagactgggtgttcgtcaacaatgccttgcgacagctcagatgtatctcaaacgcttctacaccaaagtcgagatacggcggacaaatccctatctcgttataactactgcactttatctggcctgcaagatggaggaagctccgcagcacattaggctggtagttagcgaatcccggtctttgtggcctgacttcctgtctgtcgacatcgcacgactcggcgaatgtgaattctggatgatatccgaaatgtccagtcagcttatcatacatcagccatacaatactgttagtagactaagggatgagatggcgatcacgctcagcaacgacgaagcgtctctcacaacgtggattattaacgatcactatatgactgatctcccccttctctatgcgcctcatatcatcgcaatgacggcaatcttattcgccctcgtcatgcggccgaatccacaggcgggtcaaccaacaggaaatatgttacaaatgcaatcaagcccaatatcacccgccgcagtggccagagacgcaatggaaactattagaggaggagggccgggacaatcgagaaacccgaataacactagcagccctaccagtcaagcaacatccatggccagaatccaacgatacgtatcgttcctagctgatagcagcaatgtcaggatagaagacatgatagagtgtagccaagagcttatttcgttttatgactgccaagaacagtataacgacaagctcacgagggagcaaatcaatcgttttgtgaaagcgagagggctcgataaggtatccagtgcttgattgagcactggatgtacaccaatgatgaagacgactaagttcgatatcggttagaataaggaacagggcatgcgaaagtatagctcgcatcagataccccaaaataagcattcgtagattatcatcggggcatggcatatatatggcgtacagggacagtaggtgacttcttctgtcatgaaatacaaactttcgaagttaatacattacattgacacggcttcatcttattgcaacataactcacttagtgatatgttctgaacccggcggcgcgattcagactcattcaagatcaagtgatcctacctgaattctataacatatctgccatttgcttagtaaacctataggcccacttgacacaatatcttcatcgtcgttagtagtccatatatcatgaaaccgcccatagatccgaacccagacccatagtgtactggctgacctgagcacgtggatcgaaaaacgcgactcaggtccccttacttcattcgggcttgccccaactttggggtagacgtcaatctcgtgcatgacgggagcctgtaagaaggaggcacagcagatgtcagacagacgcgatccggccatcatcaactagtgaactgcctgctatccgaaagctgccttttgttttcgacgacccgattgattggactgaccatacgcttctagcagtaggcgcatgtaagtaagaggacccgataccgctttgcgacggcttcagctcgtgacacatcccacttctcggcattcacaggacggtaggcttggctggggtttgtgctattcgtcgaacgtaaaacaatgcacgccatgaattcagagaaccaatgaataaaagtcgactgtcttacatcgtgcctggtgccgagccatggtaaagaggtatgcatatcagatggagacggaacacaggcgtggcagtgttatcttgaccatacggagtcgaagccacagatgactctcatagtcgtccgatgttgtcttgttcatgcagattcacccggcttgactgttaaccaaatctcagaaccagtactcggccagtattcagcctctgttcagcctctaggtgtgtttagcttatcagtcgtagtgggagatgacaactcccagtcgtggtcaacaacccggacctttgtcaggcgggagtaaagaatcggagtttgacaaccgacttgactcgtgcgagtaattcgggtaagatcgccatattccagaacaagattcgacttctggggcttggcctggtggggagagacagccgcgagataaagacgaaaatagaaattgcgaatagggcagttatcatccacctacccttgaattacatacagttattcattccctgccctatcattcccggccatagccggcatgagaacagtcgatcctcaattgcgtgttttcacggactttcgcaaattcaaagccattaatggccaaaatagagcaagtatttgttgtgttttgcaaaaggccagatatcttttgtcatgccaccagtcatcaggcgatcgcatgactgttcagccaaacggtttagagcataaatctagacaaactttgtggggttcaaatgaccatggcaaatcgatcctgggaaacgggcttggccgggcaaaagccacaaactgctattctcgggcaaatagctaggtatgatgcaatcggtcgggtgtcgcgaccaacgattgattccggcagtatcaataattacatcagagggagttgccgtttcgcgatacgacaagtaacggaccattcgtagttatcaatcctgctcatcagtttgccgctttcgtcacacgatcgcggctatcgcaagagcgacgtggtctgtctcaagccatcaatgtcattgtttttggccaggccgatgtcgttgcccatcgatactagaatgatgtctcaaacgatgtgttgtcctcggtgaacgtactcgtaccaagctcgtagatggacacatgccaatgtacggagaattcagacgatgcactccataaggcctcccaattatcagggtcctgaacagttcctgaccagttcctggacccaacccattttcaaactttcaagggacctgaccagaccaaagaaggggacatgcataggtgggtgcgcagtatgcattctattacacaaggcggcaacgtgcgttgtcggttgaacaagtgcgagggattcgattgggcttgcgcttctgacgatcctatctcgcccacggcggctgggaattatagggtcatcctgcagggcggcatcatcaggacagcctacagattacggccactattcgatagggtcgcgaccatggcagtttatagtatcaccacaatgcttcgcttgtcattcactgattgcgagtatcctatgcgacgacgggttcatgaggcgcagcaggtcgttgtcggctaatagtcccaatggtaatgccaagctacgatcaagtatgatgttttgtctcgctattctgtaagtgtgttgtttgaaacaggtcacgcctgtccgtgttcatcgtccagcgaactgaaacccgccgagcgtgcgtcagatataggaatgcaggatataaacactgcatgtcaacagtcgcaaacagcaatacacccgtcaggggcgcagatgatagtccaggccaatactcgtcatttttcggcacatcactgacgctacatgtcattcatgcaagaatatgtgatagaggctggggattgaatccatgagcaggtcagcagtacttcacgaggcagtgagaaccttctgttgccgtctagaatggtcgtagattgaatccttctacagttaggtatggggagcatgggatgggattgtcttgcgcccatttaggttggttgcgtgagacgaggataccttctcgtttgcggcgcacgagacattgtcgaactcgtcgagttccactcgcagtgcaacgatgtgggctgttgtagttgagacggtctctcagtgcagttgatacctgggagaagcccgagtggacattaccgttctgatcaatctggaccgtaaacgtctgaaaacggtgagcggtgatgtacagtttctggccggatcacagtgtcaatgagcacagtgtcgccagccacgccgtgtgaggagacgtctgtgttgatccctgagactagaacaaccagccgaaccgaactggggtgcgactggccactgcctcacacccgcatcatgcggagaccatgtaaattgcgacacattgcgcatcctagccataatggtcctctctacgctttcagtcatgccaatcaacctcctttacgtagtcgaggggtttgctgtgtcgaatcgcattcatatagtttcagagaggaatcgattggtactattcttatctaagctcgcctgtggccctgtcagcagcatgaaactcatacatatgtcctcatgaagaagcagctcgtaaggcgtgatagtatttgcagactatcaacaatctatagaagcacagaccaatcagagaatggtaggcgacacaatatgcaatggtacctggctgcggaaaaggggccatcgaggaacgagtcgtgttgagaaatctgggggtcacgatggacagaacaggcaacggaacgcacggtctggcggcaagggacagatgagattcacgaccctctagtttgcagatgcacaccttgctgtcgttcttatctgatcataagagggtcagcccaccattggccacacatatcacgcctcgaccacaccatctcacgatatgggagcagatagactgacaaactagacgagcatagcatcacacaccgctgacggtgggcttgtatatgtgtatctgttatactcgtgaacttatagtatgtcacacacacgtccgagatcgatcgagtataacccatagcagtagtatatcaaatgaattaggtggtcagcatccaaatgacctgggcgttttaggtagagatgccgaaatccaaatggctgaatagttgttcattggcctcgttgatgcattgggctggtcgaaggaatgccgttggaaggactcggtgtatttccccacatgaccaagacaagatgccgtgcatgaatgaatggtattgtgttgtaggggcgacggcgagggcacgaagggcactcggattgttaacggttgcaggcagaggtacaagaccagacagc

SEQ ID NO: 24475 - DNA, 1926 bp, Muscodor strobelii
  misc_feature: SGI cDNA ID NO. 568345
  misc_feature: Encodes the peptide sequence at SEQ ID NO 24476
atgaagatccccgacgtggtcaccgacctgcagatggacatggcggagtcgcaaaatgagcgggatgcccgcgttgagacgctgtggaagcagttggactaccaaggcaagggcgaattggattggaaggggttgcaacgcgggctgaagaagattgatcatcctatgaaaaatgcggatgagatgctgaagaacatcatcaaggtcgtggacacagatggggatggcaagatgcaatatgaagaattccgaatcttcgttgaagccgctgagcgccagctgtttcacctcttccactccattgaccgcgaccacaatggcaagcttgacaaagaagagcttcaagtggcctttcaaaaggctggcttagctgtgccgcaccgaagagtcgaggagttcttcaagaatattgatcacaacagtgatgggtttatcacttatgaggagtggcgaaactttctactgtttatgcccaacactgacaccgccacaacactgcgcgcagtcttcaccttctattcagaagtcttaactctgacctctgagggcgattcggtagtcagcgagaagtctctgcagggaataggtatgatcaaagacttccttctgtccctatttttcggttcgatcagacgggccatccttccagccgagaaaacacccaagcagactttccctgctgcctcggactcctccatatcttcttcatcctcatcctcattgtcttctccgtcccatcctgcaaccgacgacgatgccttttcacattcgccaaccccggcggtgtcacgaacgaacgattacccaggcgactcgaatgcatccacgcccagaatggatgctcgggcagctcttggcgtaggcgccgtgcgaggaacaaactcggctgacatttccacttctgaagacactcaagttgaacctgcaaaaagtgacacggtcaagaaatccctgctgatagactacctccccgatccaggctacttcgtcgccggtgccatcgcgggaggcatttctcgaactgctactgcgccgctcgacagactcaaagtgtttcttcttgttagcaccaagactgacgccaacgtcgctctcgacgccgccaaaaagggccggccccttctagcattgaagaatgcagggagacccttagtcacagccgtttctgacctgtacaaggctggaggcatgcgaggattcttcgccggtaacgggctcaacgtagtcaaaattatgccagagaccgcaataagattcggtgcatatgaggctgccaaaaagaccttggccggtcttgaaggacatggcgatccgcacaatatcaacccctactccaaatttattgccggtggcgttgctggcatggtggcacaattctgtgtctaccctctagatacactgaagtttcgattgcaatcggaatacgtaactggaggccctcgaggcaatgcattactccttcagactgcccgcaagatgatggctgaaggcggtacacgggcagcataccgtggcgtcactatgggactaattggcatgtttccgtactcggccattgatatgggcacttttgaacttctgaaaacgacgtatatcacatacaaggccaaagccaccggctgtcatgaagaagatgcacaccctagcacgtttgccaccggaatcatgggcgcctcatcaggagctttcggcgctacggtcgtctatcccctgaatgtgttgcgcactcgacttcagacgcaaggtaccagcatgcatccggcacgttacacgggcatatgggacgtcgcacaaaagacggttaagaacgaaggtgtgcgaggtctctacaagggcttgatgccgaatctacttaaagtcgcacccgcgcttagtatcacgtggatggtctacgaaaacgccaaacgcgttatgcaccttcattag

SEQ ID NO: 24476 - protein, 641 aa, Muscodor strobelii
  misc_feature: SGI Peptide ID NO. 568345
  misc_feature (62)..(90): Pfam Id: PF00036 Pfam Desc: EF hand
  misc_feature (129)..(157): Pfam Id: PF00036 Pfam Desc: EF hand
  misc_feature (93)..(121): Pfam Id: PF00036 Pfam Desc: EF hand
  misc_feature (549)..(640): Pfam Id: PF00153 Pfam Desc: Mitochondrial carrier protein
  misc_feature (442)..(535): Pfam Id: PF00153 Pfam Desc: Mitochondrial carrier protein
  misc_feature (324)..(433): Pfam Id: PF00153 Pfam Desc: Mitochondrial carrier protein
  misc_feature (549)..(638): Pfam Id: PF00153 Pfam Desc: Mitochondrial carrier protein
  misc_feature (1)..(641): NCBI GI: 145610599 Blast Desc: MGG_01072 [Magnaporthe grisea 70-15] gi|145017970|gb|EDK02249.1| MGG_01072 [Magnaporthe grisea 70-15]
  misc_feature (1)..(640): NCBI GI: 256729238 Blast Desc: [Nectria haematococca mpVI 77-13-4]
  misc_feature (14)..(641): NCBI GI: 85078645 Blast Desc: NCU01564 [Neurospora crassa OR74A] gi|16944557|emb|CAC18152.2| related to peroxisomal Ca-dependent solute carrier protein [Neurospora crassa] NCU01564 [Neurospora
  misc_feature (1)..(640): NCBI GI: 46117028 Blast Desc: FG04356.1 [Gibberella zeae PH-1]
  misc_feature (14)..(641): NCBI GI: 116199693 Blast Desc: CHGG_08002 [Chaetomium globosum CBS 148.51] gi|88179281|gb|EAQ86749.1| CHGG_08002 [Chaetomium globosum CBS 148.51]
  misc_feature (1)..(641): NCBI GI: 156060237 Blast Desc: SS1G_02257 [Sclerotinia sclerotiorum 1980] gi|154699665|gb|EDN99403.1| SS1G_02257 [Sclerotinia sclerotiorum 1980]
  misc_feature (12)..(640): NCBI GI: 145251239 Blast Desc: An15g06040 [Aspergillus niger] gi|134082663|emb|CAK42557.1| protein product [Aspergillus niger]
  misc_feature (16)..(640): NCBI GI: 225558508 Blast Desc: mitochondrial carrier protein [Ajellomyces capsulatus G186AR]
  misc_feature (17)..(640): NCBI GI: 240274942 Blast Desc: mitochondrial carrier [Ajellomyces capsulatus H143]
  misc_feature (12)..(640): NCBI GI: 159129968 Blast Desc: calcium dependent mitochondrial carrier protein, [Aspergillus fumigatus A1163]
MKIPDVVTDLQMDMAESQNERDARVETLWKQLDYQGKGELDWKGLQRGLKKIDHPMKNADEMLKNIIKVVDTDGDGKMQYEEFRIFVEAAERQLFHLFHSIDRDHNGKLDKEELQVAFQKAGLAVPHRRVEEFFKNIDHNSDGFITYEEWRNFLLFMPNTDTATTLRAVFTFYSEVLTLTSEGDSVVSEKSLQGIGMIKDFLLSLFFGSIRRAILPAEKTPKQTFPAASDSSISSSSSSSLSSPSHPATDDDAFSHSPTPAVSRTNDYPGDSNASTPRMDARAALGVGAVRGTNSADISTSEDTQVEPAKSDTVKKSLLIDYLPDPGYFVAGAIAGGISRTATAPLDRLKVFLLVSTKTDANVALDAAKKGRPLLALKNAGRPLVTAVSDLYKAGGMRGFFAGNGLNVVKIMPETAIRFGAYEAAKKTLAGLEGHGDPHNINPYSKFIAGGVAGMVAQFCVYPLDTLKFRLQSEYVTGGPRGNALLLQTARKMMAEGGTRAAYRGVTMGLIGMFPYSAIDMGTFELLKTTYITYKAKATGCHEEDAHPSTFATGIMGASSGAFGATVVYPLNVLRTRLQTQGTSMHPARYTGIWDVAQKTVKNEGVRGLYKGLMPNLLKVAPALSITWMVYENAKRVMHLH

SEQ ID NO: 24477 - DNA, 2468 bp, Muscodor strobelii
  misc_feature: SGI EST ID NO. CUFF.57806.4
  misc_feature: Variant of the nucleotide sequence at SEQ ID NO 24475
cacaattgcaacatccacatctgctgtgatccctgtcccacctttatctccttcgggtcaactgcacgtagcctctcatttgcgcgcaaatctggtcatcggcctagcctttgacgtcttgcagccttgtccagcagctggagtctcttggaacatcgtagccaacgatcatcggcctgctgcatcccctattccagcttctttttggctggggcatgctctttgacacgcgcctgcgccctttgcccagcacaaccatgttcaaatcatagccttgaccgagccctcactcaccaacgtccatctcctgcgctctccgctcgatctccccccatgctgtcatgatcacgaaagcatgaagatccccgacgtggtcaccgacctgcagatggacatggcggagtcgcaaaatgagcgggatgcccgcgttgagacgctgtggaagcagttggactaccaaggcaagggcgaattggattggaaggggttgcaacgcgggctgaagaagattgatcatcctatgaaaaatgcggatgagatgctgaagaacatcatcaaggtcgtggacacagatggggatggcaagatgcaatatgaagaattccgaatcttcgttgaagccgctgagcgccagctgtttcacctcttccactccattgaccgcgaccacaatggcaagcttgacaaagaagagcttcaagtggcctttcaaaaggctggcttagctgtgccgcaccgaagagtcgaggagttcttcaagaatattgatcacaacagtgatgggtttatcacttatgaggagtggcgaaactttctactgtttatgcccaacactgacaccgccacaacactgcgcgcagtcttcaccttctattcagaagtcttaactctgacctctgagggcgattcggtagtcagcgagaagtctctgcagggaatagacactcaagttgaacctgcaaaaagtgacacggtcaagaaatccctgctgatagactacctccccgatccaggctacttcgtcgccggtgccatcgcgggaggcatttctcgaactgctactgcgccgctcgacagactcaaagtgtttcttcttgttagcaccaagactgacgccaacgtcgctctcgacgccgccaaaaagggccggccccttctagcattgaagaatgcagggagacccttagtcacagccgtttctgacctgtacaaggctggaggcatgcgaggattcttcgccggtaacgggctcaacgtagtcaaaattatgccagagaccgcaataagattcggtgcatatgaggctgccaaaaagaccttggccggtcttgaaggacatggcgatccgcacaatatcaacccctactccaaatttattgccggtggcgttgctggcatggtggcacaattctgtgtctaccctctagatacactgaagtttcgattgcaatcggaatacgtaactggaggccctcgaggcaatgcattactccttcagactgcccgcaagatgatggctgaaggcggtacacgggcagcataccgtggcgtcactatgggactaattggcatgtttccgtactcggccattgatatgggcacttttgaacttctgaaaacgacgtatatcacatacaaggccaaagccaccggctgtcatgaagaagatgcacaccctagcacgtttgccaccggaatcatgggcgcctcatcaggagctttcggcgctacggtcgtctatcccctgaatgtgttgcgcactcgacttcagacgcaaggtaccagcatgcatccggcacgttacacgggcatatgggacgtcgcacaaaagacggttaagaacgaaggtgtgcgaggtctctacaagggcttgatgccgaatctacttaaagtcgcacccgcgcttagtatcacgtggatggtctacgaaaacgccaaacgcgttatgcaccttcattagaggcttttgcactaccacattctcaaggaccggaacacaatacgtactataatcggagaggccacacttcgacttccgcacattcaataagtacacaatatgtactgggtcagctcatatcacttcgaccctttgtttgggcagatactaccgtcatttcttgctacactgcgcctatacaacgaagagctctacttgctttacgtgcttatctagaggatagatcgatgtaagaggggcattacactggaggggtggtggggggattctcaggggcatatagttggaggggagagggaggacatcaggcgggatggattatatcctgctgtttgcctaggtacatctacttgcattggctggcgtttcaggatcatggattcctgctctatctaggtactcttgcgacattgattagcactatcacttaggtagtcacgtggatgacggtcaatgtgactgcgagggtacatgttctaggtagagaatcattaagatacccatttca

SEQ ID NO: 24478 - DNA, 1959 bp, Muscodor strobelii
  misc_feature: SGI cDNA ID NO. 568346
  misc_feature: Encodes the peptide sequence at SEQ ID NO 24479
atgaagatccccgacgtggtcaccgacctgcagatggacatggcggagtcgcaaaatgagcgggatgcccgcgttgagacgctgtggaagcagttggactaccaaggcaagggcgaattggattggaaggggttgcaacgcgggctgaagaagattgatcatcctatgaaaaatgcggatgagatgctgaagaacatcatcaaggtcgtggacacagatggggatggcaagatgcaatatgaagaattccgaatcttcgttgaagccgctgagcgccagctgtttcacctcttccactccattgaccgcgaccacaatggcaagcttgacaaagaagagcttcaagtggcctttcaaaaggctggcttagctgtgccgcaccgaagagtcgaggagttcttcaagaatattgatcacaacagtgatgggtttatcacttatgaggagtggcgcttggggaacagcacactgaccagattgaatagaaactttctactgtttatgcccaacactgacaccgccacaacactgcgcgcagtcttcaccttctattcagaagtcttaactctgacctctgagggcgattcggtagtcagcgagaagtctctgcagggaataggtatgatcaaagacttccttctgtccctatttttcggttcgatcagacgggccatccttccagccgagaaaacacccaagcagactttccctgctgcctcggactcctccatatcttcttcatcctcatcctcattgtcttctccgtcccatcctgcaaccgacgacgatgccttttcacattcgccaaccccggcggtgtcacgaacgaacgattacccaggcgactcgaatgcatccacgcccagaatggatgctcgggcagctcttggcgtaggcgccgtgcgaggaacaaactcggctgacatttccacttctgaagacactcaagttgaacctgcaaaaagtgacacggtcaagaaatccctgctgatagactacctccccgatccaggctacttcgtcgccggtgccatcgcgggaggcatttctcgaactgctactgcgccgctcgacagactcaaagtgtttcttcttgttagcaccaagactgacgccaacgtcgctctcgacgccgccaaaaagggccggccccttctagcattgaagaatgcagggagacccttagtcacagccgtttctgacctgtacaaggctggaggcatgcgaggattcttcgccggtaacgggctcaacgtagtcaaaattatgccagagaccgcaataagattcggtgcatatgaggctgccaaaaagaccttggccggtcttgaaggacatggcgatccgcacaatatcaacccctactccaaatttattgccggtggcgttgctggcatggtggcacaattctgtgtctaccctctagatacactgaagtttcgattgcaatcggaatacgtaactggaggccctcgaggcaatgcattactccttcagactgcccgcaagatgatggctgaaggcggtacacgggcagcataccgtggcgtcactatgggactaattggcatgtttccgtactcggccattgatatgggcacttttgaacttctgaaaacgacgtatatcacatacaaggccaaagccaccggctgtcatgaagaagatgcacaccctagcacgtttgccaccggaatcatgggcgcctcatcaggagctttcggcgctacggtcgtctatcccctgaatgtgttgcgcactcgacttcagacgcaaggtaccagcatgcatccggcacgttacacgggcatatgggacgtcgcacaaaagacggttaagaacgaaggtgtgcgaggtctctacaagggcttgatgccgaatctacttaaagtcgcacccgcgcttagtatcacgtggatggtctacgaaaacgccaaacgcgttatgcaccttcattag

SEQ ID NO: 24479 - protein, 652 aa, Muscodor strobelii
  misc_feature: SGI Peptide ID NO. 568346
  misc_feature (62)..(90): Pfam Id: PF00036 Pfam Desc: EF hand
  misc_feature (93)..(121): Pfam Id: PF00036 Pfam Desc: EF hand
  misc_feature (129)..(157): Pfam Id: PF00036 Pfam Desc: EF hand
  misc_feature (560)..(651): Pfam Id: PF00153 Pfam Desc: Mitochondrial carrier protein
  misc_feature (453)..(546): Pfam Id: PF00153 Pfam Desc: Mitochondrial carrier protein
  misc_feature (335)..(444): Pfam Id: PF00153 Pfam Desc: Mitochondrial carrier protein
  misc_feature (560)..(649): Pfam Id: PF00153 Pfam Desc: Mitochondrial carrier protein
  misc_feature (1)..(652): NCBI GI: 145610599 Blast Desc: MGG_01072 [Magnaporthe grisea 70-15] gi|145017970|gb|EDK02249.1| MGG_01072 [Magnaporthe grisea 70-15]
  misc_feature (14)..(652): NCBI GI: 85078645 Blast Desc: NCU01564 [Neurospora crassa OR74A] gi|16944557|emb|CAC18152.2| related to peroxisomal Ca-dependent solute carrier protein [Neurospora crassa] NCU01564 [Neurospora
  misc_feature (1)..(651): NCBI GI: 256729238 Blast Desc: [Nectria haematococca mpVI 77-13-4]
  misc_feature (1)..(651): NCBI GI: 46117028 Blast Desc: FG04356.1 [Gibberella zeae PH-1]
  misc_feature (14)..(652): NCBI GI: 116199693 Blast Desc: CHGG_08002 [Chaetomium globosum CBS 148.51] gi|88179281|gb|EAQ86749.1| CHGG_08002 [Chaetomium globosum CBS 148.51]
  misc_feature (1)..(652): NCBI GI: 156060237 Blast Desc: SS1G_02257 [Sclerotinia sclerotiorum 1980] gi|154699665|gb|EDN99403.1| SS1G_02257 [Sclerotinia sclerotiorum 1980]
  misc_feature (12)..(651): NCBI GI: 145251239 Blast Desc: An15g06040 [Aspergillus niger] gi|134082663|emb|CAK42557.1| protein product [Aspergillus niger]
  misc_feature (16)..(651): NCBI GI: 225558508 Blast Desc: mitochondrial carrier protein [Ajellomyces capsulatus G186AR]
  misc_feature (17)..(651): NCBI GI: 240274942 Blast Desc: mitochondrial carrier [Ajellomyces capsulatus H143]
  misc_feature (12)..(651): NCBI GI: 159129968 Blast Desc: calcium dependent mitochondrial carrier protein, [Aspergillus fumigatus A1163]
MKIPDVVTDLQMDMAESQNERDARVETLWKQLDYQGKGELDWKGLQRGLKKIDHPMKNADEMLKNIIKVVDTDGDGKMQYEEFRIFVEAAERQLFHLFHSIDRDHNGKLDKEELQVAFQKAGLAVPHRRVEEFFKNIDHNSDGFITYEEWRLGNSTLTRLNRNFLLFMPNTDTATTLRAVFTFYSEVLTLTSEGDSVVSEKSLQGIGMIKDFLLSLFFGSIRRAILPAEKTPKQTFPAASDSSISSSSSSSLSSPSHPATDDDAFSHSPTPAVSRTNDYPGDSNASTPRMDARAALGVGAVRGTNSADISTSEDTQVEPAKSDTVKKSLLIDYLPDPGYFVAGAIAGGISRTATAPLDRLKVFLLVSTKTDANVALDAAKKGRPLLALKNAGRPLVTAVSDLYKAGGMRGFFAGNGLNVVKIMPETAIRFGAYEAAKKTLAGLEGHGDPHNINPYSKFIAGGVAGMVAQFCVYPLDTLKFRLQSEYVTGGPRGNALLLQTARKMMAEGGTRAAYRGVTMGLIGMFPYSAIDMGTFELLKTTYITYKAKATGCHEEDAHPSTFATGIMGASSGAFGATVVYPLNVLRTRLQTQGTSMHPARYTGIWDVAQKTVKNEGVRGLYKGLMPNLLKVAPALSITWMVYENAKRVMHLH

SEQ ID NO: 24480 - DNA, 2468 bp, Muscodor strobelii; identical to SEQ ID NO: 24477
  misc_feature: SGI EST ID NO. CUFF.57806.4
  misc_feature: Variant of the nucleotide sequence at SEQ ID NO 24478

SEQ ID NO: 24481 - DNA, 1116 bp, Muscodor strobelii
  misc_feature: SGI cDNA ID NO. 568347
  misc_feature: Encodes the peptide sequence at SEQ ID NO 24482
atgtcatcatctaacacacgacctaggacttccggacagcctgctgactctgagcgccaatatgctcgtagcagggcgcctcctgttccgcccaaggacccacggcgggatacaccacaggaaaaagtaggcagtttgcagtctggtaatacatcacaacgccccaacttacacctcgatactaacatagagcagcagcagcctcgaaggagggatcgaattccgcgctctgagcgcaggaaatttgatcaatcaggtttccatggcggtcacgctctatcttctgggctcgatcaggaaacttcgggcacctctgcgaaaatcaagcccgaaaagcagaagactgggcttcgaagggcactcagtggctacgtcagtcggaaactctcgcgcagcggatcgaataagaagaagcttgttcggcgccgaagtctgtctagtcacggaacttatgctctcagaaaagataggctgggagaagtccgattgcttcaacatcggacctatcgggttctttctttcagcgaggcgtatagaagccagagagtgcgggctgcacacgaaagtttgatgctgtctagtaagactttccgaggcccgccaccaatggtcagcttcgtttctggtacacaacagatcgacaaggtcgtcaagtgtctagaaacaattccagagacgcctcatgaagagagcccgacgacaaagtacgtcaggctctcacaggatagtgcaagtgcctggtccaacttcacctggccggacaagtaccctggaaatgaggacagatcctttgatatccaggaacaccgatggaacgttgtcgaagcacgtcgtcgggtacggttgtacaacacagagaaggttgattttatcactctgtgggactcctgggtgaacgcgcagtcgcgggatatgcagcgtaaagcctcacgagacctcgcaaagggcgacgaacttcccatgcccgcacctggccgctttcataactacttcgagaccgttatgattgccatcgagggagagattcagcagcttcaggacattgctgaagcactcatcctccagtatccaggcgagtttcccgggttcttgccggcacgagcatacagagagtaa

SEQ ID NO: 24482 - protein, 371 aa, Muscodor strobelii
  misc_feature: SGI Peptide ID NO. 568347
MSSSNTRPRTSGQPADSERQYARSRAPPVPPKDPRRDTPQEKVGSLQSGNTSQRPNLHLDTNIEQQQPRRRDRIPRSERRKFDQSGFHGGHALSSGLDQETSGTSAKIKPEKQKTGLRRALSGYVSRKLSRSGSNKKKLVRRRSLSSHGTYALRKDRLGEVRLLQHRTYRVLSFSEAYRSQRVRAAHESLMLSSKTFRGPPPMVSFVSGTQQIDKVVKCLETIPETPHEESPTTKYVRLSQDSASAWSNFTWPDKYPGNEDRSFDIQEHRWNVVEARRRVRLYNTEKVDFITLWDSWVNAQSRDMQRKASRDLAKGDELPMPAPGRFHNYFETVMIAIEGEIQQLQDIAEALILQYPGEFPGFLPARAYRE

SEQ ID NO: 24483 - DNA, 1434 bp, Muscodor strobelii
  misc_feature: SGI cDNA ID NO. 568348
  misc_feature: Encodes the peptide sequence at SEQ ID NO 24484
atggccatcatattcgattttctcaaaggcgctgcctctaccatctacactgctgctgctgatgctatctcttcccgccttacccaccgtcccgaaacagaagagcgagatggagtcgcaaagcgtcaacgcgccagagacggcactcaccgaccgcgagctgctcggacccattccggcaccttctctgtcgaccaagcgtacctctccggcaccgacagcgacgatgacgaacgagaagcattccctcccaccactggcgacaacgccttgcgcccgttccccaagaacaacctcgaccacctccctcccaagtacaccacctccgagcatttcacttaccccgtcgttcgcgatattccctctacagctccatcgtcgacgtcggtctcgactacaacacgcaagagcgccgtgaaatggggtctttctgtgtcacaggcccctcttacctcgaccgaagcacaattccagcggcgcaagtctgtctccgagcattcccccgagcagcagtacaagtccgtcaaacacttcttcaataaccacggcaggcattcgctgcctggcctcgaagatgccactctttcggccgatccgcgtaaggtggaccaggtcatagaagagtgcaagcatctcatttgggaggaggagctcagactgtccagcgctctccttggacccctcggactccgccgaccaagatgccaacggcgtctcgtcgatcaactgcccacccattgggagcagcgagctttgcatgcaccccagagtggcaaattcgacaatcgggtccatcccagcgccgtcgcccttcaaccccgagattttcagaagctcgtccctcctaaagtctggttgaacgacgactgtattacatcaactctcgcttgtctgtccgttgccatcaacaaggacgtcaagcctaaagttggcaccccaaagtgcatcgtcttgaactctctgtactggaaccagttcacaaaggatcgccaagtctaccctcgtactgtcaagcgacaatggaacgtcacacccgacaacttcctcaatgtggagaccgtgctgattcccgttaaccacggtatgcattggaccttgatcgtcgtccgtccaactcgcaaggaaatcgcctggcttgattcattccactcagccggagacaattcagtttcctacgctcgtacatggatcaggaactttcttggcgagcgatatcacgacgaatggcagcagatcgatattagagtcccgacgcaatcaaacgggtacgattgtggcatgttcgtaatcaccaacgccatgtgcatggccttaggtctcgaccctatgatctattctgagacggacctgcctcttcaacgtctgcggatcgccgcgatgttgttgaacggaggcttcacaggagacttcagtctggaggactacatgatgtga

SEQ ID NO: 24484 - protein, 477 aa, Muscodor strobelii
  misc_feature: SGI Peptide ID NO. 568348
  misc_feature (284)..(465): Pfam Id: PF02902 Pfam Desc: Ulp1 protease family, C-terminal catalytic domain
  misc_feature (325)..(465): Pfam Id: PF02902 Pfam Desc: Ulp1 protease family, C-terminal catalytic domain
  misc_feature (229)..(475): NCBI GI: 46116916 Blast Desc: FG04300.1 [Gibberella zeae PH-1]
  misc_feature (229)..(475): NCBI GI: 85110474 Blast Desc: NCU05389 [Neurospora crassa OR74A] gi|11595706|emb|CAC18132.1| related to Ubl-specific protease [Neurospora crassa] gi|28925159|gb|EAA34241.1| [Neurospora crassa
  misc_feature (271)..(472): NCBI GI: 261354877 Blast Desc: conserved [Verticillium albo-atrum VaMs.102]
  misc_feature (268)..(475): NCBI GI: 256729408 Blast Desc: NECHADRAFT_47769 [Nectria haematococca mpVI 77-13-4]
  misc_feature (229)..(472): NCBI GI: 39942128 Blast Desc: MGG_03144 [Magnaporthe grisea 70-15] gi|145015879|gb|EDK00369.1| MGG_03144 [Magnaporthe grisea 70-15]
  misc_feature (229)..(475): NCBI GI: 116204775 Blast Desc: CHGG_10271 [Chaetomium globosum CBS 148.51] gi|88176399|gb|EAQ83867.1| CHGG_10271 [Chaetomium globosum CBS 148.51]
  misc_feature (240)..(470): NCBI GI: 242818522 Blast Desc: Ulp1 protease family protein [Talaromyces stipitatus ATCC 10500] gi|218713599|gb|EED13023.1| Ulp1 protease family protein [Talaromyces stipitatus ATCC 10500]
  misc_feature (238)..(471): NCBI GI: 156047787 Blast Desc: SS1G_09583 [Sclerotinia sclerotiorum 1980] gi|154693978|gb|EDN93716.1| SS1G_09583 [Sclerotinia sclerotiorum 1980]
  misc_feature (214)..(471): NCBI GI: 67524463 Blast Desc: AN2689.2 [Aspergillus nidulans FGSC A4] gi|40743907|gb|EAA63091.1| AN2689.2 [Aspergillus nidulans FGSC A4] gi|259486401|tpe|CBF84207.1| TPA: nuclear pore complex FGSC
  misc_feature (240)..(470): NCBI GI: 212530504 Blast Desc: Ulp1 protease family protein [Penicillium marneffei ATCC 18224] gi|210074807|gb|EEA28894.1| Ulp1 protease family protein [Penicillium marneffei ATCC 18224]
MAIIFDFLKGAASTIYTAAADAISSRLTHRPETEERDGVAKRQRARDGTHRPRAARTHSGTFSVDQAYLSGTDSDDDEREAFPPTTGDNALRPFPKNNLDHLPPKYTTSEHFTYPVVRDIPSTAPSSTSVSTTTRKSAVKWGLSVSQAPLTSTEAQFQRRKSVSEHSPEQQYKSVKHFFNNHGRHSLPGLEDATLSADPRKVDQVIEECKHLIWEEELRLSSALLGPLGLRRPRCQRRLVDQLPTHWEQRALHAPQSGKFDNRVHPSAVALQPRDFQKLVPPKVWLNDDCITSTLACLSVAINKDVKPKVGTPKCIVLNSLYWNQFTKDRQVYPRTVKRQWNVTPDNFLNVETVLIPVNHGMHWTLIVVRPTRKEIAWLDSFHSAGDNSVSYARTWIRNFLGERYHDEWQQIDIRVPTQSNGYDCGMFVITNAMCMALGLDPMIYSETDLPLQRLRIAAMLLNGGFTGDFSLEDYMM

SEQ ID NO: 24485 - DNA, 1875 bp, Muscodor strobelii
  misc_feature: SGI EST ID NO. CUFF.57638.0
  misc_feature: Variant of the nucleotide sequence at SEQ ID NO 24483
taacttcccaactccaaccaagtcagaccatgtatcgtggttccatccttccgcaatcgtgacgctagcgccaagggaaagaagcaccccaaaagcgcagattctctaggttaccaatgtccgccatagcgtcaacaccgacaacaccaccgctaaggtatcgcagatgacatggcgggcggttggcctgagaccacgaacggaatggccatcatattcgattttctcaaaggcgctgcctctaccatctacactgctgctgctgatgctatctcttcccgccttacccaccgtcccgaaacagaagagcgagatggagtcgcaaagcgtcaacgcgccagagacggcactcaccgaccgcgagctgctcggacccattccggcaccttctctgtcgaccaagcgtacctctccggcaccgacagcgacgatgacgaacgagaagcattccctcccaccactggcgacaacgccttgcgcccgttccccaagaacaacctcgaccacctccctcccaagtacaccacctccgagcatttcacttaccccgtcgttcgcgatattccctctacagctccatcgtcgacgtcggtctcgactacaacacgcaagagcgccgtgaaatggggtctttctgtgtcacaggcccctcttacctcgaccgaagcacaattccagcggcgcaagtctgtctccgagcattcccccgagcagcagtacaagtccgtcaaacacttcttcaataaccacggcaggcattcgctgcctggcctcgaagatgccactctttcggccgatccgcgtaaggtggaccaggtcatagaagagtgcaagcatctcatttgggaggaggagctcagactgtccagcgctctccttggacccctcggactccgccgaccaagatgccaacggcgtctcgtcgatcaactgcccacccattgggagcagcgagctttgcatgcaccccagagtggcaaattcgacaatcgggtccatcccagcgccgtcgcccttcaaccccgagattttcagaagctcgtccctcctaaagtctggttgaacgacgactgtattacatcaactctcgcttgtctgtccgttgccatcaacaaggacgtcaagcctaaagttggcaccccaaagtgcatcgtcttgaactctctgtactggaaccagttcacaaaggatcgccaagtctaccctcgtactgtcaagcgacaatggaacgtcacacccgacaacttcctcaatgtggagaccgtgctgattcccgttaaccacggtatgcattggaccttgatcgtcgtccgtccaactcgcaaggaaatcgcctggcttgattcattccactcagccggagacaattcagtttcctacgctcgtacatggatcaggaactttcttggcgagcgatatcacgacgaatggcagcagatcgatattagagtcccgacgcaatcaaacgggtacgattgtggcatgttcgtaatcaccaacgccatgtgcatggccttaggtctcgaccctatgatctattctgagacggacctgcctcttcaacgtctgcggatcgccgcgatgttgttgaacggaggcttcacaggagacttcagtctggaggactacatgatgtgagacgggatgtatttgtacagttaaagcattgttatggagtaagaggcatttgatggaatacctaaagcatggcgtatggggcattcgttggaacgacaaaagcatgaatatggcacggcgtacgaggcgttcattggtctatgaagtagactttgctcattgtaaaaacctgctcccgtaatcaaaacctaggtattacgtttctaaatattcaatcgagctgattgtcaaccaaat

SEQ ID NO: 24486 - DNA, 303 bp, Muscodor strobelii
  misc_feature: SGI cDNA ID NO. 568349
  misc_feature: Elevated expression when VOC is produced
  misc_feature: Encodes the peptide sequence at SEQ ID NO 24487
atgaagaccgcagctgccgtcgttctcgccctcgccggccttgttcaagcttgggtacctcagtctggcaagttttcggagtcctgcactgatattgctctggatggactcacgctgtccgccaactgcccggacaaagagggagttgttgggttcacctctgtcgatctcaatccgtgctggcaattctcgccaccttatggcacctacaactggaagccatacgctggagaagacggaaatctcagacagtactgcggcgactgcaccgtagagaacagggaatccacttggtacgtgtag

SEQ ID NO: 24487 - protein, 100 aa, Muscodor strobelii
  misc_feature: SGI Peptide ID NO. 568349
  misc_feature (24)..(60): Pfam Id: PF08881 Pfam Desc: CVNH domain
  misc_feature: Useful for introducing or modulating the production of volatile compounds
MKTAAAVVLALAGLVQAWVPQSGKFSESCTDIALDGLTLSANCPDKEGVVGFTSVDLNPCWQFSPPYGTYNWKPYAGEDGNLRQYCGDCTVENRESTWYV

SEQ ID NO: 24488 - DNA, 703 bp, Muscodor strobelii
  misc_feature: SGI EST ID NO. CUFF.57651.0
  misc_feature: Variant of the nucleotide sequence at SEQ ID NO 24486
caactttgggtggttctgttccttccgacttggcaacttgatttgtgttctacgtagtgacatcccataccactttgcagttcttggtcggggggtcaaagttcaccgcagaggaactgcagctttgtcaacaactgaagaaaattggtagagtcagtcacttcatgtcacggctaaatgaggtggatctagatcctcggaatctgtctacttgctgggatgcagacatgatgtttagctacctaccatggttcgtgacttcatataaagcttaaggttgatcctcctattcctacaaccttacatcgacaccacaggctctctccaaagatcgatagcactgcacgagtgttgggcaagagactatcatgaagaccgcagctgccgtcgttctcgccctcgccggccttgttcaagcttgggtacctcagtctggcaagttttcggagtcctgcactgatattgctctggatggactcacgctgtccgccaactgcccggacaaagagggagttgttgggttcacctctgtcgatctcaatccgtgctggcaattctcgccaccttatggcacctacaactggaagccatacgctggagaagacggaaatctcagacagtactgcggcgactgcaccgtagagaacagggaatccacttggtacgtgtagaaagacccacgtgtagaaagatcccacgcgag

SEQ ID NO: 24489 - DNA, 1140 bp, Muscodor strobelii
  misc_feature: SGI cDNA ID NO. 568350
  misc_feature: Elevated expression when VOC is produced
  misc_feature: Encodes the peptide sequence at SEQ ID NO 24490
atgtcgccagtatctttatttgctttctactctttgcttctaggcggcgcttccgcccgaactatttccaagagggcgagcaatccaacagtggcaagtaccactgtcgttggaaatgtagcagatccgtctatcaaccgtgattcttgcggctcaagcctagttggagaccgtgccctctggacctgccgagacagccagccctacgggagcaatggcgtccctacgatccccgtttggtcttcgtcagcaagttggactgacttcaaccttgatggaactccttccacgactcaatacggcggtgggggaagcatgaccccgtacttcacatatccatccgattattgtagcggaagcagcgtcggagactgcggcgatggtactcgctatgccttatggccagactctcccccattagttacctctaatgatggcaacactgtcacagcatatacttggattcggaactacaggattgctggtctcactcctcaagtcccagacccatcgactaccctctacaagttgacctacagcctgagcacgggcgacaaaaatgttttaccgactgtatcaatcgtaaacgagcgtttctgggccgagaactctattggttatggagcctacggaaatctggttcaagatggcaccgcctatctgttcggcaagactgcttccggaactgtggctcttgccaaagtagcagccggatcagtcgaggatttgtcccagtaccagtactgggtgaatggagcatggacatcaactcagcccggtctcaacgacggaaccatcaacattcaaaacgccggtgctggtggccaaggcacgttctattattcgagctacgcgaagtccttttactggattgggcaaggcgggattagtgtctcggccgacttctatgtgacaacagccgactcactcacaggaccctggaacagcccatcgcaattctactcgggtagcaacggaaactattcgctcggagcttacagtcttcaagctcacccggatttgttaccgtcacgtagtgcttctagtaacgagatctatatctcttatactaagaacgacgtcgtcggtgataatgttagcttgtacactacccctctgattcacgtggtatggaattaa

SEQ ID NO: 24490 - protein, 379 aa, Muscodor strobelii
  misc_feature: SGI Peptide ID NO. 568350
  misc_feature (29)..(379): NCBI GI: 212541542 Blast Desc: conserved [Penicillium marneffei ATCC 18224] gi|210068225|gb|EEA22317.1| conserved [Penicillium marneffei ATCC 18224]
  misc_feature (1)..(379): NCBI GI: 242798362 Blast Desc: TSTA_010380 [Talaromyces stipitatus ATCC 10500] gi|218716499|gb|EED15920.1| TSTA_010380 [Talaromyces stipitatus ATCC 10500]
  misc_feature (29)..(379): NCBI GI: 39971253 Blast Desc: [Magnaporthe grisea 70-15] gi|145017052|gb|EDK01415.1| [Magnaporthe grisea 70-15]
  misc_feature (45)..(379): NCBI GI: 149210847 Blast Desc: MGCH7_ch7g896 [Magnaporthe grisea 70-15] gi|86196851|gb|EAQ71489.1| MGCH7_ch7g896 [Magnaporthe grisea 70-15]
  misc_feature: Useful for introducing or modulating the production of volatile compounds
MSPVSLFAFYSLLLGGASARTISKRASNPTVASTTVVGNVADPSINRDSCGSSLVGDRALWTCRDSQPYGSNGVPTIPVWSSSASWTDFNLDGTPSTTQYGGGGSMTPYFTYPSDYCSGSSVGDCGDGTRYALWPDSPPLVTSNDGNTVTAYTWIRNYRIAGLTPQVPDPSTTLYKLTYSLSTGDKNVLPTVSIVNERFWAENSIGYGAYGNLVQDGTAYLFGKTASGTVALAKVAAGSVEDLSQYQYWVNGAWTSTQPGLNDGTINIQNAGAGGQGTFYYSSYAKSFYWIGQGGISVSADFYVTTADSLTGPWNSPSQFYSGSNGNYSLGAYSLQAHPDLLPSRSASSNEIYISYTKNDVVGDNVSLYTTPLIHVVWN

SEQ ID NO: 24491 - DNA, 1494 bp, Muscodor strobelii
  misc_feature: SGI EST ID NO. CUFF.57657.0
  misc_feature: Variant of the nucleotide sequence at SEQ ID NO 24489
aagaggtaggtcgagaatagcatagtcctagctgtcccagcactctcctagcaagcacacgcagacaaaggaaaatatatgaggaccagattcacgatgtcgttgtcgaacattgctcgtggtctgtttccctctgcttcagtccccgctggatagggcttattttacgtttcctgtcactatgtcgccagtatctttatttgctttctactctttgcttctaggcggcgcttccgcccgaactatttccaagagggcgagcaatccaacagtggcaagtaccactgtcgttggaaatgtagcagatccgtctatcaaccgtgattcttgcggctcaagcctagttggagaccgtgccctctggacctgccgagacagccagccctacgggagcaatggcgtccctacgatccccgtttggtcttcgtcagcaagttggactgacttcaaccttgatggaactccttccacgactcaatacggcggtgggggaagcatgaccccgtacttcacatatccatccgattattgtagcggaagcagcgtcggagactgcggcgatggtactcgctatgccttatggccagactctcccccattagttacctctaatgatggcaacactgtcacagcatatacttggattcggaactacaggattgctggtctcactcctcaagtcccagacccatcgactaccctctacaagttgacctacagcctgagcacgggcgacaaaaatgttttaccgactgtatcaatcgtaaacgagcgtttctgggccgagaactctattggttatggagcctacggaaatctggttcaagatggcaccgcctatctgttcggcaagactgcttccggaactgtggctcttgccaaagtagcagccggatcagtcgaggatttgtcccagtaccagtactgggtgaatggagcatggacatcaactcagcccggtctcaacgacggaaccatcaacattcaaaacgccggtgctggtggccaaggcacgttctattattcgagctacgcgaagtccttttactggattgggcaaggcgggattagtgtctcggccgacttctatgtgacaacagccgactcactcacaggaccctggaacagcccatcgcaattctactcgggtagcaacggaaactattcgctcggagcttacagtcttcaagctcacccggatttgttaccgtcacgtagtgcttctagtaacgagatctatatctcttatactaagaacgacgtcgtcggtgataatgttagcttgtacactacccctctgattcacgtggtatggaattaagggagttgggttattcggtacgcacgcatatcggtagcgagaaataggaatcttgttcaggataagtcttctcaaaccctaccatagtcggccatcaaattatttctttgtatatatgtagggaaaggaaaggaaaacataattttgataagtgatagtatttgtctcgcaca

SEQ ID NO: 24492 - DNA, 1923 bp, Muscodor strobelii
  misc_feature: SGI cDNA ID NO. 568351
  misc_feature: Encodes the peptide sequence at SEQ ID NO 24493
atggaatctcgcccctccgcacagtcggacacaccatactatgacatagtcattataggtgccgggccggtcgggctcatgctttcgacatgtctggcgaggtttggctataagattaagcatgtagacaatcgggcggagcctacgcccacaggtcgcgccgacggcattcagcctcgttctttagatttgctgaggaatatggggttgaagtcagacattatggcgcataagcctgcgagagtatacgaggttgccttctgggacccctccgagaaggaaaagggcattgttcgaacaggaacatggtctagctgtcctgccttcatagatgcgagatacccttttacgacgctcttacatcagggccatattgaaagagttttcatctcagacctggagaagcataatgtcaaaatacatcgaccgtggaaaattactgggttcacgtctgacgagacccaaaactcaacatatcctgttgaagtcaatctcgagcacatagacggcacagcgcgcgaaaccgtccgcgctaagtacctatttagtggtgaaggcgcccgatcatttgttagagatcagttaggcatcagcatcacgcacaaggaccctatatctcatgtttggggtgtcatggatggtgttgtcgagactgatttcccagacatcaagatgaaatgtacaatacattcggaacatgggtcaattatggtcatccctcgagaggataatatggtccgcttgtatatccaaatagcctcgtcaacggacccagacttcaacccgcgcaagacggcaaccgaacaggaggtccaatcatctgcgaagaagattctgcatccttattccatccagtgggagagggttgaatggtactctgtatatcctattggtcaaggaatatctgacagatatactcttgatcaacgtgtttttcttggtggagacgcttgccatacccacagcccgaaagccggacaaggcatgaatacggcgtttttagacgcgcaaaatttagcttggaagatacacatggtagaggcagggtttgctgatcgcagtatcctttctacatatgaacctgaacgcaaggatgtggctgagaatctactctctttcgataataaatatgccaagcttttctccgagcgcttaccagcagcaacggaagtccaggcagcgtcaaaacatacaaatgggcatgcggatgacaatgagttcgtcaggacctttaaagagtcatgtgaatttacaagtggctatggcgtggcatacaaacctaatgttctgaactggtcaccaagccacagtgttcagtccgcaatcgttcatcctcaaggaacgaaacttcgaacgggacgccttctcgcaaatgccgacgtcacgcgtgttgtagatgcaaatattgttcacttggaacaggaaattccttggaatgggtcattcaggatctacatcttcgctggcagaccttcggtcagtgccaaggcgcttcgagatttcgccttccaactgggagggaaaagatcttttctcggatcttacctccatccaaacctcgattcgatctcccatcacgagaagtataatccgcacagtcagttctttacatttgctactatcttcgccgcagcgcggtcggatatcgagatctcacgagacctgccgggcttacttggccgatatcgtgatcttgtgtacgcggacgacagatgggatcggcgcgtacctaatgcatcggccgctgcgcattcgaaaatgggtctcgacgaggaaaagggcgggctggttgtagtgcgaccggatggctacgtaggcatcgtcacaagcctggtggaaggcggtggcacgatggacgcgctgaatgcgtattttgatgcattctgcacaaaagatgtcggtgctaaagtatcacagctatga

SEQ ID NO: 24493 - protein, 640 aa, Muscodor strobelii
  misc_feature: SGI Peptide ID NO. 568351
  misc_feature (13)..(374): Pfam Id: PF01494 Pfam Desc: FAD binding domain
  misc_feature (417)..(594): Pfam Id: PF07976 Pfam Desc: Phenol hydroxylase, C-terminal dimerisation domain
  misc_feature (15)..(39): Pfam Id: PF07992 Pfam Desc: Pyridine nucleotide-disulphide oxidoreductase
  misc_feature (7)..(640): NCBI GI: 46116920 Blast Desc: FG04302.1 [Gibberella zeae PH-1]
  misc_feature (13)..(640): NCBI GI: 116205115 Blast Desc: CHGG_10441 [Chaetomium globosum CBS 148.51] gi|88176569|gb|EAQ84037.1| CHGG_10441 [Chaetomium globosum CBS 148.51]
  misc_feature (7)..(640): NCBI GI: 145608404 Blast Desc: MGG_03143 [Magnaporthe grisea 70-15] gi|145015880|gb|EDK00370.1| MGG_03143 [Magnaporthe grisea 70-15]
  misc_feature (14)..(634): NCBI GI: 154296501 Blast Desc: BC1G_12825 [Botryotinia fuckeliana B05.10] gi|150843348|gb|EDN18541.1| BC1G_12825 [Botryotinia fuckeliana B05.10]
  misc_feature (1)..(640): NCBI GI: 171689570 Blast Desc: protein product [Podospora anserina] gi|170944747|emb|CAP70858.1| protein product [Podospora anserina]
  misc_feature (2)..(640): NCBI GI: 156047785 Blast Desc: SS1G_09582 [Sclerotinia sclerotiorum 1980] gi|154693977|gb|EDN93715.1| SS1G_09582 [Sclerotinia sclerotiorum 1980]
  misc_feature (7)..(631): NCBI GI: 261354878 Blast Desc: phenol 2-monooxygenase [Verticillium albo-atrum VaMs.102]
  misc_feature (6)..(631): NCBI GI: 85110814 Blast Desc: NCU06804 [Neurospora crassa OR74A] gi|18375992|emb|CAB91725.2| related to phenol 2-monooxygenase [Neurospora crassa] gi|28925331|gb|EAA34409.1| NCU06804 crassa
  misc_feature (14)..(635): NCBI GI: 189189036 Blast Desc: phenol 2-monooxygenase [Pyrenophora tritici-repentis Pt-1C-BFP] gi|187972463|gb|EDU39962.1| phenol 2-monooxygenase [Pyrenophora tritici-repentis Pt-1C-BFP]
  misc_feature (14)..(640): NCBI GI: 169607691 Blast Desc: SNOG_06904 [Phaeosphaeria nodorum SN15] gi|160701471|gb|EAT85555.2| SNOG_06904 [Phaeosphaeria nodorum SN15]
  misc_feature (13)..(619): SWISSPROT Homolog: EC 1.14.13.7 Phenol 2-monooxygenase
MESRPSAQSDTPYYDIVIIGAGPVGLMLSTCLARFGYKIKHVDNRAEPTPTGRADGIQPRSLDLLRNMGLKSDIMAHKPARVYEVAFWDPSEKEKGIVRTGTWSSCPAFIDARYPFTTLLHQGHIERVFISDLEKHNVKIHRPWKITGFTSDETQNSTYPVEVNLEHIDGTARETVRAKYLFSGEGARSFVRDQLGISITHKDPISHVWGVMDGVVETDFPDIKMKCTIHSEHGSIMVIPREDNMVRLYIQIASSTDPDFNPRKTATEQEVQSSAKKILHPYSIQWERVEWYSVYPIGQGISDRYTLDQRVFLGGDACHTHSPKAGQGMNTAFLDAQNLAWKIHMVEAGFADRSILSTYEPERKDVAENLLSFDNKYAKLFSERLPAATEVQAASKHTNGHADDNEFVRTFKESCEFTSGYGVAYKPNVLNWSPSHSVQSAIVHPQGTKLRTGRLLANADVTRVVDANIVHLEQEIPWNGSFRIYIFAGRPSVSAKALRDFAFQLGGKRSFLGSYLHPNLDSISHHEKYNPHSQFFTFATIFAAARSDIEISRDLPGLLGRYRDLVYADDRWDRRVPNASAAAHSKMGLDEEKGGLVVVRPDGYVGIVTSLVEGGGTMDALNAYFDAFCTKDVGAKVSQL

SEQ ID NO: 24494 - DNA, 1221 bp, Muscodor strobelii
  misc_feature: SGI EST ID NO. CUFF.57672.0
  misc_feature: Variant of the nucleotide sequence at SEQ ID NO 24492
ccgaaagccggacaaggcatgaatacggcgtttttagacgcgcaaaatttagcttggaagatacacatggtagaggcagggtttgctgatcgcagtatcctttctacatatgaacctgaacgcaaggatgtggctgagaatctactctctttcgataataaatatgccaagcttttctccgagcgcttaccagcagcaacggaagtccaggcagcgtcaaaacatacaaatgggcatgcggatgacaatgagttcgtcaggacctttaaagagtcatgtgaatttacaagtggctatggcgtggcatacaaacctaatgttctgaactggtcaccaagccacagtgttcagtccgcaatcgttcatcctcaaggaacgaaacttcgaacgggacgccttctcgcaaatgccgacgtcacgcgtgttgtagatgcaaatattgttcacttggaacaggaaattccttggaatgggtcattcaggatctacatcttcgctggcagaccttcggtcagtgccaaggcgcttcgagatttcgccttccaactgggagggaaaagatcttttctcggatcttacctccatccaaacctcgattcgatctcccatcacgagaagtataatccgcacagtcagttctttacatttgctactatcttcgccgcagcgcggtcggatatcgagatctcacgagacctgccgggcttacttggccgatatcgtgatcttgtgtacgcggacgacagatgggatcggcgcgtacctaatgcatcggccgctgcgcattcgaaaatgggtctcgacgaggaaaagggcgggctggttgtagtgcgaccggatggctacgtaggcatcgtcacaagcctggtggaaggcggtggcacgatggacgcgctgaatgcgtattttgatgcattctgcacaaaagatgtcggtgctaaagtatcacagctatgagaacaagaaaaaaccgataactatacatggagccaatttcgaagtttttatgacattgacgtggactggaaacaacgtcgttctcataccaaatccactgacaaatctacgcaaagcactgatatccaaaactttcactacttcacgaatctcatattgagcctaacatatcgctgtcattttatctgtgaatcgccttacccggggcgaatttcatgagtaaaagggttttaggctctagatgtatgtaggtagacattgaat

SEQ ID NO: 24495 - DNA, 2772 bp, Muscodor strobelii
  misc_feature: SGI cDNA ID NO. 568352
  misc_feature: Encodes the peptide sequence at SEQ ID NO 24496
atgcagtacaccatggcgtcagacgtggtcgacgacgacggcctctttgtggctgtcagcaccgggtcaggaagtgaccgagatacctacagcatcgtcactagaccacgttcgatcagtgctgatgccaggctaaacgggcaaccattaaccacagacattcaacgcagaaactctgtggcggttgtctctgacctctcacctatccttaccccccaaacttcccaggagacacctgtttctgtaaacattggtctcgatctcgagatgagaaacgcacctcatcatcgaccactcaacccacgagatcatccttatcaccccctcgcctctaacccacctaacctgccgcctggaccgcctcagccttgctacccacaaggcgctccattctttttgccaggaagaaactcttcaattcgtgttgtcacgcccgacctcacaattgacaccccgccttccagcagagtcgtaagtgagcacgactcagacaactacacgacacagccccgtgctgaagacgaggaggcacaatctgttgcaatgcgtcctaccaagcaacaaggtgcggccagtacggcaggtggccgagatgcacctgacgctacatcgcgatacgcaggcttgcgctctcgagcggccactcagtcgcagatacctcgcccagtcggtcgcagcaatgggaatgcaccatcagcgcataactcaccccaaaaggcagacactcagcctgggtcctccgatcgtggtcgtactatggcacgtcggttcgacttcttcggtagtgatgatgagagcaacggagctctgtcccctgtccacgagaaagatggcgttgaaggtactggcaatgagagtactggacgtgagagcaatgctacaaccatgactgagttaattcgccacgccacgcgagagtcgcctcctcccttgcctccccgccagcgtccagctggacagcaggctctcacggtcgctcaaacgtttgcgattgctgaacagaaggcgaaggcacgaccagcccctcttgacctgacaggggcgattaagttcggtagagtggaccgccacaccagagaatacaactatgagcatcatccgatcaactcatctcaggctgaattcttcaactttccgcccgagtcatcttcgtcgacgtacgacaactcgcctctcaatctcccggctgtagagattccaccaggagttggagagaagagacttaccttccatgaacagtattgcatgtggaaagaggcagaggataagaagcccatcactgaggagaccgtctgggtccccgttcctgaactcggcgacaacaggttcctttacccacagccggacggtaacaaagtggtcaatgatgatgatagacttccaatccgaagccctcaggtcctccttcagagacgatcccgcagttgcatgggctatcgtgagcttcgaaatgaactcgttcgagaggcatctagcacttaccgacatccttccggtggctcagacgcaccgtctagtgtatacacgggtgccgcaatgccgtacagacccgctctgaagaagtccgcaaccatcaataatctgcaggttcctggcagcggacaaggagtgattgttcccagcagtggtcaggccagcagcattttcccagagccttacacccctctctctgccttcattgagaatcttgagccacaccctcgacccggccagcgtgacgggaagaagaagaacctgtttggtgaccatggatggcttgaagacacagctaaccccgttggaaccaaggagccgaagaccaagttggacagggctggtggtttcgtcgacaacgtcttgcgtaaagcccgtgaaatgacgactggcactggtttcggacagacccgctcgatgcgaactctccctgtcaacccagtcaagatgtccatggacgctcgcacacagagcgttctatacatggagctcatattccatcttcatgatgctctgaacgattatatcaaggcgcaacagaccgctggccgtcttgattacggcaaagtgaagcgaatctccgatgcctgggcctcgaagggccgtcccaaggtcattgagttccgttgggatctggagacgcagctagatttgctcttagtgcatatcgacgagttcagattctacggtcccctccagatcgatggtgttatcgctgtccgcgcgcgcattcaggccatgaaggtgaatgctcgtaccatgtcgcttcacaccttttgcagtcctgattcggtcattgcgcgccaagttatcgatgcccagaccttcatgaccttgatcaatgcatccgacactaagcagacgatcgtggaagctgctgcccagatgttccgactttgcgttgatagagtaaacgccgtcggcgctgcacctcaccgtggccccccaagtggtggtagcgagcagcgcgtgcgctttcaaagtcctaacagccgtcgcattacgcctcctggtgctttcccctcattcggaggaccatctgagatcagtcgatcacagactcgcccgactctgcctcttccgagcttgcctgttccaagcccccgccgtcgacgacagaattttggcagcacccacgaacttgtctcctcagagagccagagccgccttcaggttgatgtccggaaagacgagaagaaggagcagacgcgtcaagtcagtgacgttcccagctccaactatgatgatgatcaaaatcagaatagtggacagggttctcaaaagcctcgcggctggtaa

SEQ ID NO: 24496 - protein, 923 aa, Muscodor strobelii
  misc_feature: SGI Peptide ID NO. 568352
  misc_feature (576)..(794): NCBI GI: 256729209 Blast Desc: NECHADRAFT_83951 [Nectria haematococca mpVI 77-13-4]
  misc_feature (553)..(794): NCBI GI: 46116930 Blast Desc: FG04307.1 [Gibberella zeae PH-1]
  misc_feature (553)..(794): NCBI GI: 116205113 Blast Desc: CHGG_10440 [Chaetomium globosum CBS 148.51] gi|88176568|gb|EAQ84036.1| CHGG_10440 [Chaetomium globosum CBS 148.51]
  misc_feature (577)..(794): NCBI GI: 85110792 Blast Desc: NCU06793 [Neurospora crassa OR74A] gi|18375998|emb|CAB91732.2| conserved [Neurospora crassa] gi|28925320|gb|EAA34398.1| [Neurospora crassa OR74A]
  misc_feature (553)..(794): NCBI GI: 261354879 Blast Desc: conserved [Verticillium albo-atrum VaMs.102]
  misc_feature (549)..(793): NCBI GI: 145608408 Blast Desc: MGG_12770 [Magnaporthe grisea 70-15] gi|145015882|gb|EDK00372.1| MGG_12770 [Magnaporthe grisea 70-15]
  misc_feature (577)..(761): NCBI GI: 171689638 Blast Desc: protein product [Podospora anserina] gi|170944781|emb|CAP70892.1| protein product [Podospora anserina]
  misc_feature (563)..(773): NCBI GI: 154286404 Blast Desc: [Ajellomyces capsulatus NAm1] gi|150407638|gb|EDN03179.1| [Ajellomyces capsulatus NAm1]
  misc_feature (552)..(773): NCBI GI: 240274992 Blast Desc: conserved [Ajellomyces capsulatus H143]
  misc_feature (552)..(773): NCBI GI: 225558554 Blast Desc: conserved [Ajellomyces capsulatus G186AR]
MQYTMASDVVDDDGLFVAVSTGSGSDRDTYSIVTRPRSISADARLNGQPLTTDIQRRNSVAVVSDLSPILTPQTSQETPVSVNIGLDLEMRNAPHHRPLNPRDHPYHPLASNPPNLPPGPPQPCYPQGAPFFLPGRNSSIRVVTPDLTIDTPPSSRVVSEHDSDNYTTQPRAEDEEAQSVAMRPTKQQGAASTAGGRDAPDATSRYAGLRSRAATQSQIPRPVGRSNGNAPSAHNSPQKADTQPGSSDRGRTMARRFDFFGSDDESNGALSPVHEKDGVEGTGNESTGRESNATTMTELIRHATRESPPPLPPRQRPAGQQALTVAQTFAIAEQKAKARPAPLDLTGAIKFGRVDRHTREYNYEHHPINSSQAEFFNFPPESSSSTYDNSPLNLPAVEIPPGVGEKRLTFHEQYCMWKEAEDKKPITEETVWVPVPELGDNRFLYPQPDGNKVVNDDDRLPIRSPQVLLQRRSRSCMGYRELRNELVREASSTYRHPSGGSDAPSSVYTGAAMPYRPALKKSATINNLQVPGSGQGVIVPSSGQASSIFPEPYTPLSAFIENLEPHPRPGQRDGKKKNLFGDHGWLEDTANPVGTKEPKTKLDRAGGFVDNVLRKAREMTTGTGFGQTRSMRTLPVNPVKMSMDARTQSVLYMELIFHLHDALNDYIKAQQTAGRLDYGKVKRISDAWASKGRPKVIEFRWDLETQLDLLLVHIDEFRFYGPLQIDGVIAVRARIQAMKVNARTMSLHTFCSPDSVIARQVIDAQTFMTLINASDTKQTIVEAAAQMFRLCVDRVNAVGAAPHRGPPSGGSEQRVRFQSPNSRRITPPGAFPSFGGPSEISRSQTRPTLPLPSLPVPSPRRRRQNFGSTHELVSSESQSRLQVDVRKDEKKEQTRQVSDVPSSNYDDDQNQNSGQGSQKPRGW

SEQ ID NO: 24497 - DNA, 912 bp, Muscodor strobelii
  misc_feature: SGI cDNA ID NO. 568353
  misc_feature: Encodes the peptide sequence at SEQ ID NO 24498
atgtcacggcccgggagcgacgagccgcctcgtcgcgggctggcggcggattactacgacatgaaagttatccctcctatgccgatgtctgatcacgaaggacgacgccctgccagtcccggacgaactacatataatggaatgtcgcaggctaagctagcctacgagccgcaaactcccttctacccacctcagtcgccttcggcgctacaagtccccgattcgcgtgctcgacccagatcgctgcctccttccagagacacccgcgacagatctcgagacaggtcgcgggacagaaggagagagcggggatacaatagacatggcgatagcgacgattcagacgatggcagggcacggacacccgtggagaagacacggcatttcatcgacaacgcattcacgacttctacaaccgggctcggggtcggcgtccttggcgcgctagtcggcggactggcagcaagagaagcggtggactacacaagcaggcaacacaaaggtcaccacgcagacgccgatctaaaacgcaagcagctcatcagcacggtggtcggggcggccgtcggggctctgggagccaacgcagtcgagaagcgcatcgaggtgaaccgggttcgcgacgatatcaagcaggaaaagtgggagcgcaagtggagaaacaacacagacgcggatgtgattgagcggcgtgaggtcgtcgcgattccgcgcgaccgtggacctagacaacggggagacaggaagccgtgggaggatagagatcgagggcggggaatcgaacatgaggtcgatccggatgcgaggagctggaagaacgtcgaggactggctctgggacgacagggaggagaggagccgtgagtcgagaccacggtcaagcggacagcagagcggcagctatcggttttga

SEQ ID NO: 24498 - protein, 303 aa, Muscodor strobelii
  misc_feature: SGI Peptide ID NO. 568353
  misc_feature (120)..(218): NCBI GI: 256729410 Blast Desc: NECHADRAFT_101365 [Nectria haematococca mpVI 77-13-4]
  misc_feature (123)..(218): NCBI GI: 46116928 Blast Desc: FG04306.1 [Gibberella zeae PH-1]
  misc_feature (121)..(215): NCBI GI: 39942122 Blast Desc: [Magnaporthe grisea 70-15] gi|145015883|gb|EDK00373.1| [Magnaporthe grisea 70-15]
  misc_feature (118)..(202): NCBI GI: 171689640 Blast Desc: protein product [Podospora anserina] gi|170944782|emb|CAP70893.1| protein product [Podospora anserina]
  misc_feature (119)..(197): NCBI GI: 85110752 Blast Desc: NCU06773 [Neurospora crassa OR74A] gi|18376018|emb|CAB91752.2| related to pre-mRNA splicing SRp75 [Neurospora crassa] gi|28925300|gb|EAA34378.1| [Neurospora crassa
  misc_feature (122)..(158): NCBI GI: 116205111 Blast Desc: [Chaetomium globosum CBS 148.51] gi|88176567|gb|EAQ84035.1| [Chaetomium globosum CBS 148.51]
MSRPGSDEPPRRGLAADYYDMKVIPPMPMSDHEGRRPASPGRTTYNGMSQAKLAYEPQTPFYPPQSPSALQVPDSRARPRSLPPSRDTRDRSRDRSRDRRRERGYNRHGDSDDSDDGRARTPVEKTRHFIDNAFTTSTTGLGVGVLGALVGGLAAREAVDYTSRQHKGHHADADLKRKQLISTVVGAAVGALGANAVEKRIEVNRVRDDIKQEKWERKWRNNTDADVIERREVVAIPRDRGPRQRGDRKPWEDRDRGRGIEHEVDPDARSWKNVEDWLWDDREERSRESRPRSSGQQSGSYRF

SEQ ID NO: 24499 - DNA, 4224 bp, Muscodor strobelii
  misc_feature: SGI cDNA ID NO. 568354
  misc_feature: Encodes the peptide sequence at SEQ ID NO 24500
atgtcggcagataactccgatcttttccttccccagcagggcagatctcgaacccaagatgacgaggatgaagataacctatctataacctcgacggttgtggatagtggtgacccagatcagaattggtttgtagatgatgtattggccgaacggccacatcccgaaatctcgggagccgtccagtatctcatcaaatgggaggactacccccttgaggatgcgacttgggaaccggtcgagaatctcggccaagatctcattccacaatgggaagaagcaaaaaacgagattgctcaagggactcgacaaccttttgagctagccgaatacacggccgctttggatagacgggcccagaggcacgagagacgcaacgcgaagcggctgcgactcggcttagacctcacttaccctttccctcctggtcttgatcctgatgaagtatccgactcggactccgatgaagcacaagaagtgatggagatagattctgcaaccttcgaagcgtcgagagcccgaacgtcttcatcgcctaaagcccggctccaggcgtcatcacgagtgacacctaagacatcctcaaacactgacaacttgaagcctaagacaaagccaaagttgaaattgaagacagcgtcatcttcagcggcattggcatcacccaaaagtacatctgcatctccagtgacatccgcgaacaccaaaaaacccaaacaaaagacgttttccggcattccctctgacaagtcacaaaagagatatgaacctcctaaacagccttcaactgccgcgaagacaccctctacgcctaccttaccagcaggtccccagacttcaaaaggcaaccagaagagcaacaccacaatcactggctacaagggcacagcaggtagatccggagttttcaggtctatgatgactaaatcgtcggctcgaccactcagcggactctcagctggtaaagtcaaggcaactaggaccagccaacaaccaccgattggagcacgtcctgcagggtcaacgaacgtgttcgcgggcggtacaacgcgtaagaagagaacgagcctcgcagatgcaatgtcggatccatcgaagactgcaaagcctttcagcaatatgcacaaacaaaatctggcgcggaagcgaaccattgaaagaaatgaggcggtaggcgctttatcaagtataccctctaagtttctactgggcaacgagttgcaatcacccattagtacttcaaagcctgtgtctcccactgaagctgttgatcaaccagcacccacccttgatcaagttgtttctaattctcccgttgtttcagcccctcactctcttgaaatccagaatacactgggattgaatcaaccagatgatgaaccaagaccttcggtcaaacgcaagaaatctgtccgctttaccagagaggaagatctcgagactggacctagtgacttaactgagacgcctgctagtataggcttagaagacaaatttgagccacttgcgatcaacacaagtcacgaaggtgatcagctatcttattcgtcaagtgcacagcgagtcgagaagcctgtcagatttggaaagtcagaagctatccgtgtcatctttcgaggcatcgtgcagcagcagaccgggacgtggctatcagtcttcaaaaattgcgaaacattgtcctttacgacgacttgtacggcctttcattttatttcccaaagaacagatcttgtgcaagaaacgttgttcaccgggacgatcgagccaacctcgccagagcattcggcagtcttgaataacgtcgcgcaatggctgcgcaatgattcaaccggacttcatctcgttcagcgtgagttttcaattctcgtctttccgacaagatgcggcgattgggcaagtctcgatatcagtaatgatgttggcggtgatttgtgtcatctcacataccgctggtcgccgaacatggatacaagattatatcctaccgagaatgcactcaatcctaaattcctcaacgaaatttacccgccaggtaacatggacttgaagagtctcattaagagcctgacaggtctcgactacgataagatgctcccgcaagaaacttcacgtaacaaagacaaacaggcttacatgtttctcatacctttgaagcagaagcaactgctggggttgctgagagcttggcttttgtcatgccagccaaattgcgagatattcactctcgagagatccgatcaatggcctgcatttcaccacgctgcgaagacaggctctggcggcacgatcctctgccacagtgacatgacaacgtggaagctagagcgaattaaatacctctgggaaatgctgcagggtcatcgatacacattctgggatctcaatactggcgaaaacaatccgccgctatatccatctgatttgtccgctacagtcgaaccagcaaggctgcggttgacacggctgttccctttcggcaaggtatttctcattactccgagttttgtaattgccgatccccgaggcctttactattttctggattggtttagatcgcaaattgacaatcctcattaccttctcgtgggttgtttcgacttccctcgctttctacgggatattacggaagaaaaagaaagggaacgattcttgctgcttagagatttccctgacgccgatgaggaattcctagagactattggtagagctaaacaccatattgattaccacttcaaggcctgggagctactgcgaagtattatggctcagtacggtgacgatgaaacaagtgaggatgttcgcaaaatgctttgggcgaacgagttcatcgatcctagcgacgagcagagcctggtcaattggttctgttggtggtcaagcacaaagctggacatgtttcgtcgattttatgttctcggttctagccctaactgcgctaggcgagcgtacagaaacattgccattcccaagtacttcgactccgatgacagtaaccctgaaatcgccgctgccttccttgcacgaaagacaaaggcattggaagctaaagaggcaaagggttatgaggatattgacatcgcttgggcttcggatgttgttgtcaatgacgagggccggattcagttgattggaccgcccagaaagtccttctcgagagcgaagtttgctttcccaggcacgcttttctccacagatgatattggacagctacagcaacacattcgcgttcataggcatcgaactaggaccaattggggggagcttcatgaacatccagttgcctggagagactcagccatggcggatcaattcggcgacagcggagaacaaagccagtttgatacattcaaccactggatcgatgcagcgcctcggtttcatcctaggaagaatacctggtatggcatcttctacacaattgtcgaggaatgggacccggatctgcctaagcttaggtattcacgacatccgtggattgctatttggcggccgacatgcccgcatctaatcaaggtaccacacataggaattaagaatttcgagttgttcatttgggatgctgcagcagtcgacagggagtattacactggccgcccattgctcgacatgcagtgtcaattgattgactttgtcaaagaacaagttaagaacaagtaccctggctgctctctcatcgatgtgtggtatggaagtcactctgagataccagctgcacccaacgacaacgtgctggacaagacgtggtcgagattgaacgagatgtttgaagacgggaagaagtggcttccaccccaacttgcgaaactggagggttgtggatggagtcacgtggacccgcgcctttatcagagtggtcattacatgtctcatttgacgccaaagaagaaaccttggggtttgcaggtcaacggagttccacgccacgagagcgataagcacaagccggagcgctctatctggcaccctgtgacaaagacgaccatgggcctaagcagcagatgtatcaacggtcttcacgaagcgtgtcgcaaagctcgactcgaagatccgaattgcgaagcaatacgatatgactaccccgcaacaaagaactggtacgcggatctagtagttgaaggacgcaaccacacatacatccgcgtcgacgctgctcaggtgattttaaagtctctaggtttgcctcaatatcaagacaaagagcaaaacaagagccgtcgtgcatga

SEQ ID NO: 24500 - protein, 1407 aa, Muscodor strobelii
  misc_feature: SGI Peptide ID NO. 568354
  misc_feature (43)..(94): Pfam Id: PF00385 Pfam Desc: 'chromo' (CHRromatin Organisation MOdifier) domain
  misc_feature (21)..(1379): NCBI GI: 171688706 Blast Desc: protein product [Podospora anserina] gi|170944315|emb|CAP70425.1| protein product [Podospora anserina]
  misc_feature (19)..(1138): NCBI GI: 116199637 Blast Desc: CHGG_07974 [Chaetomium globosum CBS 148.51] gi|88179253|gb|EAQ86721.1| CHGG_07974 [Chaetomium globosum CBS 148.51]
  misc_feature (684)..(1391): NCBI GI: 261355115 Blast Desc: conserved [Verticillium albo-atrum VaMs.102]
  misc_feature (25)..(1388): NCBI GI: 256729219 Blast Desc: NECHADRAFT_47333 [Nectria haematococca mpVI 77-13-4]
  misc_feature (15)..(1381): NCBI GI: 39973547 Blast Desc: MGG_01080 [Magnaporthe grisea 70-15] gi|145017961|gb|EDK02240.1| MGG_01080 [Magnaporthe grisea 70-15]
  misc_feature (20)..(840): NCBI GI: 85082709 Blast Desc: NCU01522 [Neurospora crassa OR74A] gi|18376162|emb|CAD21236.1| [Neurospora crassa] gi|28918053|gb|EAA27735.1| [Neurospora crassa OR74A]
  misc_feature (311)..(1379): NCBI GI: 46116972 Blast Desc: FG04328.1 [Gibberella zeae PH-1]
  misc_feature (931)..(1388): NCBI GI: 85082709 Blast Desc: NCU01522 [Neurospora crassa OR74A] gi|18376162|emb|CAD21236.1| [Neurospora crassa] gi|28918053|gb|EAA27735.1| [Neurospora crassa OR74A]
  misc_feature (549)..(974): NCBI GI: 156063954 Blast Desc: SS1G_02095 [Sclerotinia sclerotiorum 1980] gi|154697429|gb|EDN97167.1| SS1G_02095 [Sclerotinia sclerotiorum 1980]
  misc_feature (565)..(1005): NCBI GI: 154303548 Blast Desc: BC1G_09345 [Botryotinia fuckeliana B05.10] gi|150854656|gb|EDN29848.1| BC1G_09345 [Botryotinia fuckeliana B05.10]
MSADNSDLFLPQQGRSRTQDDEDEDNLSITSTVVDSGDPDQNWFVDDVLAERPHPEISGAVQYLIKWEDYPLEDATWEPVENLGQDLIPQWEEAKNEIAQGTRQPFELAEYTAALDRRAQRHERRNAKRLRLGLDLTYPFPPGLDPDEVSDSDSDEAQEVMEIDSATFEASRARTSSSPKARLQASSRVTPKTSSNTDNLKPKTKPKLKLKTASSSAALASPKSTSASPVTSANTKKPKQKTFSGIPSDKSQKRYEPPKQPSTAAKTPSTPTLPAGPQTSKGNQKSNTTITGYKGTAGRSGVFRSMMTKSSARPLSGLSAGKVKATRTSQQPPIGARPAGSTNVFAGGTTRKKRTSLADAMSDPSKTAKPFSNMHKQNLARKRTIERNEAVGALSSIPSKFLLGNELQSPISTSKPVSPTEAVDQPAPTLDQVVSNSPVVSAPHSLEIQNTLGLNQPDDEPRPSVKRKKSVRFTREEDLETGPSDLTETPASIGLEDKFEPLAINTSHEGDQLSYSSSAQRVEKPVRFGKSEAIRVIFRGIVQQQTGTWLSVFKNCETLSFTTTCTAFHFISQRTDLVQETLFTGTIEPTSPEHSAVLNNVAQWLRNDSTGLHLVQREFSILVFPTRCGDWASLDISNDVGGDLCHLTYRWSPNMDTRLYPTENALNPKFLNEIYPPGNMDLKSLIKSLTGLDYDKMLPQETSRNKDKQAYMFLIPLKQKQLLGLLRAWLLSCQPNCEIFTLERSDQWPAFHHAAKTGSGGTILCHSDMTTWKLERIKYLWEMLQGHRYTFWDLNTGENNPPLYPSDLSATVEPARLRLTRLFPFGKVFLITPSFVIADPRGLYYFLDWFRSQIDNPHYLLVGCFDFPRFLRDITEEKERERFLLLRDFPDADEEFLETIGRAKHHIDYHFKAWELLRSIMAQYGDDETSEDVRKMLWANEFIDPSDEQSLVNWFCWWSSTKLDMFRRFYVLGSSPNCARRAYRNIAIPKYFDSDDSNPEIAAAFLARKTKALEAKEAKGYEDIDIAWASDVVVNDEGRIQLIGPPRKSFSRAKFAFPGTLFSTDDIGQLQQHIRVHRHRTRTNWGELHEHPVAWRDSAMADQFGDSGEQSQFDTFNHWIDAAPRFHPRKNTWYGIFYTIVEEWDPDLPKLRYSRHPWIAIWRPTCPHLIKVPHIGIKNFELFIWDAAAVDREYYTGRPLLDMQCQLIDFVKEQVKNKYPGCSLIDVWYGSHSEIPAAPNDNVLDKTWSRLNEMFEDGKKWLPPQLAKLEGCGWSHVDPRLYQSGHYMSHLTPKKKPWGLQVNGVPRHESDKHKPERSIWHPVTKTTMGLSSRCINGLHEACRKARLEDPNCEAIRYDYPATKNWYADLVVEGRNHTYIRVDAAQVILKSLGLPQYQDKEQNKSRRA

SEQ ID NO: 24501 - DNA, 4500 bp, Muscodor strobelii
  misc_feature: SGI EST ID NO. CUFF.57687.0
  misc_feature: Variant of the nucleotide sequence at SEQ ID NO 24499
agataacctatctataacctcgacggttgtggatagtggtgacccagatcagaattggtttgtagatgatgtattggccgaacggccacatcccgaaatctcgggagccgtccagtatctcatcaaatgggaggactacccccttgaggatgcgacttgggaaccggtcgagaatctcggccaagatctcattccacaatgggaagaagcaaaaaacgagattgctcaagggactcgacaaccttttgagctagccgaatacacggccgctttggatagacgggcccagaggcacgagagacgcaacgcgaagcggctgcgactcggcttagacctcacttaccctttccctcctggtcttgatcctgatgaagtatccgactcggactccgatgaagcacaagaagtgatggagatagattctgcaaccttcgaagcgtcgagagcccgaacgtcttcatcgcctaaagcccggctccaggcgtcatcacgagtgacacctaagacatcctcaaacactgacaacttgaagcctaagacaaagccaaagttgaaattgaagacagcgtcatcttcagcggcattggcatcacccaaaagtacatctgcatctccagtgacatccgcgaacaccaaaaaacccaaacaaaagacgttttccggcattccctctgacaagtcacaaaagagatatgaacctcctaaacagccttcaactgccgcgaagacaccctctacgcctaccttaccagcaggtccccagacttcaaaaggcaaccagaagagcaacaccacaatcactggctacaagggcacagcaggtagatccggagttttcaggtctatgatgactaaatcgtcggctcgaccactcagcggactctcagctggtaaagtcaaggcaactaggaccagccaacaaccaccgattggagcacgtcctgcagggtcaacgaacgtgttcgcgggcggtacaacgcgtaagaagagaacgagcctcgcagatgcaatgtcggatccatcgaagactgcaaagcctttcagcaatatgcacaaacaaaatctggcgcggaagcgaaccattgaaagaaatgaggcggtaggcgctttatcaagtataccctctaagtttctactgggcaacgagttgcaatcacccattagtacttcaaagcctgtgtctcccactgaagctgttgatcaaccagcacccacccttgatcaagttgtttctaattctcccgttgtttcagcccctcactctcttgaaatccagaatacactgggattgaatcaaccagatgatgaaccaagaccttcggtcaaacgcaagaaatctgtccgctttaccagagaggaagatctcgagactggacctagtgacttaactgagacgcctgctagtataggcttagaagacaaatttgagccacttgcgatcaacacaagtcacgaaggtgatcagctatcttattcgtcaagtgcacagcgagtcgagaagcctgtcagatttggaaagtcagaagctatccgtgtcatctttcgaggcatcgtgcagcagcagaccgggacgtggctatcagtcttcaaaaattgcgaaacattgtcctttacgacgacttgtacggcctttcattttatttcccaaagaacagatcttgtgcaagaaacgttgttcaccgggacgatcgagccaacctcgccagagcattcggcagtcttgaataacgtcgcgcaatggctgcgcaatgattcaaccggacttcatctcgttcagcgtgagttttcaattctcgtctttccgacaagatgcggcgattgggcaagtctcgatatcagtaatgatgttggcggtgatttgtgtcatctcacataccgctggtcgccgaacatggatacaagattatatcctaccgagaatgcactcaatcctaaattcctcaacgaaatttacccgccaggtaacatggacttgaagagtctcattaagagcctgacaggtctcgactacgataagatgctcccgcaagaaacttcacgtaacaaagacaaacaggcttacatgtttctcatacctttgaagcagaagcaactgctggggttgctgagagcttggcttttgtcatgccagccaaattgcgagatattcactctcgagagatccgatcaatggcctgcatttcaccacgctgcgaagacaggctctggcggcacgatcctctgccacagtgacatgacaacgtggaagctagagcgaattaaatacctctgggaaatgctgcagggtcatcgatacacattctgggatctcaatactggcgaaaacaatccgccgctatatccatctgatttgtccgctacagtcgaaccagcaaggctgcggttgacacggctgttccctttcggcaaggtatttctcattactccgagttttgtaattgccgatccccgaggcctttactattttctggattggtttagatcgcaaattgacaatcctcattaccttctcgtgggttgtttcgacttccctcgctttctacgggatattacggaagaaaaagaaagggaacgattcttgctgcttagagatttccctgacgccgatgaggaattcctagagactattggtagagctaaacaccatattgattaccacttcaaggcctgggagctactgcgaagtattatggctcagtacggtgacgatgaaacaagtgaggatgttcgcaaaatgctttgggcgaacgagttcatcgatcctagcgacgagcagagcctggtcaattggttctgttggtggtcaagcacaaagctggacatgtttcgtcgattttatgttctcggttctagccctaactgcgctaggcgagcgtacagaaacattgccattcccaagtacttcgactccgatgacagtaaccctgaaatcgccgctgccttccttgcacgaaagacaaaggcattggaagctaaagaggcaaagggttatgaggatattgacatcgcttgggcttcggatgttgttgtcaatgacgagggccggattcagttgattggaccgcccagaaagtccttctcgagagcgaagtttgctttcccaggcacgcttttctccacagatgatattggacagctacagcaacacattcgcgttcataggcatcgaactaggaccaattggggggagcttcatgaacatccagttgcctggagagactcagccatggcggatcaattcggcgacagcggagaacaaagccagtttgatacattcaaccactggatcgatgcagcgcctcggtttcatcctaggaagaatacctggtatggcatcttctacacaattgtcgaggaatgggacccggatctgcctaagcttaggtattcacgacatccgtggattgctatttggcggccgacatgcccgcatctaatcaaggtaccacacataggaattaagaatttcgagttgttcatttgggatgctgcagcagtcgacagggagtattacactggccgcccattgctcgacatgcagtgtcaattgattgactttgtcaaagaacaagttaagaacaagtaccctggctgctctctcatcgatgtgtggtatggaagtcactctgagataccagctgcacccaacgacaacgtgctggacaagacgtggtcgagattgaacgagatgtttgaagacgggaagaagtggcttccaccccaacttgcgaaactggagggttgtggatggagtcacgtggacccgcgcctttatcagagtggtcattacatgtctcatttgacgccaaagaagaaaccttggggtttgcaggtcaacggagttccacgccacgagagcgataagcacaagccggagcgctctatctggcaccctgtgacaaagacgaccatgggcctaagcagcagatgtatcaacggtcttcacgaagcgtgtcgcaaagctcgactcgaagatccgaattgcgaagcaatacgatatgactaccccgcaacaaagaactggtacgcggatctagtagttgaaggacgcaaccacacatacatccgcgtcgacgctgctcaggtgattttaaagtctctaggtttgcctcaatatcaagacaaagagcaaaacaagagccgtcgtgcatgatagggagcgtgtactacaggaaagtgttgagaagcaaacgattcagcagtgaggaggtaatgagattcacctgcgtcggagtatcatgagcaatcactgagcgctgctgttattattgttagaattcaatggtcagagtgtcgggatacgcaagggcggacggcacaaagttaagagggtagaccgatgggtttcaagcatggcactgcgagaattcggggatcccacgaagatgggaatgcggtgcaaaagtgtataagcgtttgtaaaagggtgcgtctatatgaataagtacttaggtagttgtcaggacagtccatcatatgagcagaattgagatactaagg

SEQ ID NO: 24502 - DNA, 636 bp, Muscodor strobelii
  misc_feature: SGI cDNA ID NO. 568355
  misc_feature: Encodes the peptide sequence at SEQ ID NO 24503
atggccaacgacgagtatgatttcctcttcaaagtggtgttgatcggagactctggcgtcggaaagtcgaacctgttgagccggttcacgcgcaacgagttcaacctcgactccaagtcgaccatcggcgtcgagttcgccacccgctccatccaggtcgactccaagaccatcaaggcccagatctgggacacggccggccaggagcgctaccgcgccatcacctcggcctactaccgcggcgccgtcggcgccctcctcgtctacgacatcagcaagcaccagacctacgagaacgtcacgagatggctcaaggagctgcgcgaccacgccgacgccaacatcgtcatcatgctggtcggtaacaagagcgatctcaggcacctgcgagccgtccccaccgaggaggccaaggcctttgccagcgagaaccacctctcctttatagaaacgtccgccttggacgccagcaacgtcgagcttgctttccagaacatcttgacagagatctaccggatcgtgtcgagcaaggcactagatagcggcgagggtgcccaggccccgatggcaggcaccaatatctcgctcagcaagtcgcccgacgatgctgccaagcagggcggcaagtgctgttaa

SEQ ID NO: 24503 - protein, 211 aa, Muscodor strobelii
  misc_feature: SGI Peptide ID NO. 568355
  misc_feature (11)..(125): Pfam Id: PF08477 Pfam Desc: Miro-like protein
  misc_feature (11)..(172): Pfam Id: PF00071 Pfam Desc: Ras family
  misc_feature (1)..(211): NCBI GI: 261355116 Blast Desc: GTP-binding protein ypt3 [Verticillium albo-atrum VaMs.102]
  misc_feature (1)..(211): NCBI GI: 154303550 Blast Desc: BC1G_09346 [Botryotinia fuckeliana B05.10] gi|150854657|gb|EDN29849.1| BC1G_09346 [Botryotinia fuckeliana B05.10]
  misc_feature (1)..(211): NCBI GI: 156063958 Blast Desc: SS1G_02097 [Sclerotinia sclerotiorum 1980] gi|154697431|gb|EDN97169.1| SS1G_02097 [Sclerotinia sclerotiorum 1980]
  misc_feature (1)..(211): NCBI GI: 145610591 Blast Desc: MGG_01079 [Magnaporthe grisea 70-15] gi|145017962|gb|EDK02241.1| MGG_01079 [Magnaporthe grisea 70-15]
  misc_feature (1)..(211): NCBI GI: 212532303 Blast Desc: Ras GTPase Rab11, [Penicillium marneffei ATCC 18224] gi|212532305|ref|XP_002146309.1| Ras GTPase Rab11, [Penicillium marneffei ATCC 18224] gi|242775273|ref|XP_002478610.1| Ras GTPase
  misc_feature (1)..(211): NCBI GI: 240109296 Blast Desc: Ras-related protein Rab-11B , [Coccidioides posadasii C735 delta SOWgp]
  misc_feature (14)..(211): NCBI GI: 46116970 Blast Desc: FG04327.1 [Gibberella zeae PH-1]
  misc_feature (1)..(211): NCBI GI: 119497347 Blast Desc: Ras GTPase Rab11, [Neosartorya fischeri NRRL 181] gi|119413594|gb|EAW23535.1| Ras GTPase Rab11, [Neosartorya fischeri NRRL 181]
  misc_feature (1)..(211): NCBI GI: 255950668 Blast Desc: Pc22g22060 [Penicillium chrysogenum Wisconsin 54-1255] gi|211593118|emb|CAP99494.1| Pc22g22060 [Penicillium chrysogenum Wisconsin 54-1255]
  misc_feature (1)..(211): NCBI GI: 238483611 Blast Desc: Ras GTPase Rab11, [Aspergillus flavus NRRL3357] gi|220701094|gb|EED57432.1| Ras GTPase Rab11, [Aspergillus flavus NRRL3357]
MANDEYDFLFKVVLIGDSGVGKSNLLSRFTRNEFNLDSKSTIGVEFATRSIQVDSKTIKAQIWDTAGQERYRAITSAYYRGAVGALLVYDISKHQTYENVTRWLKELRDHADANIVIMLVGNKSDLRHLRAVPTEEAKAFASENHLSFIETSALDASNVELAFQNILTEIYRIVSSKALDSGEGAQAPMAGTNISLSKSPDDAAKQGGKCC

SEQ ID NO: 24504 - DNA, 1522 bp, Muscodor strobelii
  misc_feature: SGI EST ID NO. CUFF.57882.1
  misc_feature: Variant of the nucleotide sequence at SEQ ID NO 24502
gataaagcgtacgacaaaaggagtatgactgtcattcacctgatctgatctgatctcataccgagcgagtgctaaaactaggcaatcccacaacccctctcactagtgaatatctggagtacctaagatctgtcagtgcctattgagcgcagcatctgcattttgtggctgccttctggatttctgccgactgtcgccccccgacttctgaagtgcccttgacgaccaccaaccctggcgggcctcccctgaaccacaagtgcaaccaacaaacccatatcaacactgcctagcctttatctgcctctgccatcatccagcattcacacacaccgtcttcgacatcgtcttgcctcactctccctgccgaacacccccaataccacccgaatcccctgcccatcatggccaacgacgagtatgatttcctcttcaaagtggtgttgatcggagactctggcgtcggaaagtcgaacctgttgagccggttcacgcgcaacgagttcaacctcgactccaagtcgaccatcggcgtcgagttcgccacccgctccatccaggtcgactccaagaccatcaaggcccagatctgggacacggccggccaggagcgctaccgcgccatcacctcggcctactaccgcggcgccgtcggcgccctcctcgtctacgacatcagcaagcaccagacctacgagaacgtcacgagatggctcaaggagctgcgcgaccacgccgacgccaacatcgtcatcatgctggtcggtaacaagagcgatctcaggcacctgcgagccgtccccaccgaggaggccaaggcctttgccagcgagaaccacctctcctttatagaaacgtccgccttggacgccagcaacgtcgagcttgctttccagaacatcttgacagagatctaccggatcgtgtcgagcaaggcactagatagcggcgagggtgcccaggccccgatggcaggcaccaatatctcgctcagcaagtcgcccgacgatgctgccaagcagggcggcaagtgctgttaaatgacattctctcttcgtgtgaggagcagtctacagccctgaacgagaccccgcgagatctgacgaatggggctgtgacgtgtgtgatacggaattctacggcttgacatgtgcaatgtgaaagacacatacggggcgtcacgtatttgattgattatggattgaggactactacgatatccaaccctccaccggaacctggacgatggtgcattgagggtaaaggaggaggagactcagaagggtgtcttttcctcctcggtactgcttgcgactctgctgttttgtttcctgtttctactgggggccgtctctgaaatgtgaccataagagggatagttgctagcaaacctaatctataaatgaccaccgccatctccgtgccgatttttaaatgctattcggagatagatagtacatgtatcggtgttgctagatcctaaacatcaggctcacgaatgattggcgaccgtgaatggaac

SEQ ID NO: 24505 - DNA, 921 bp, Muscodor strobelii
  misc_feature: SGI cDNA ID NO. 568356
  misc_feature: Reduced expression when VOC is produced
  misc_feature: Encodes the peptide sequence at SEQ ID NO 24506
atggcggccgtctacaaggccctgtcgaagacgacgggcgagaagaacgatgcgcccaaggatggcaccaagagaaacaagcagagagtgttgattctttcttcgagaggtgttacctacagacatcgacacctgttgaaagaccttgcggacatgatgcctcatggcaggaaagatgcaaagttcgactctaagaagaggctttccgagctttgtgagcttgcggagctttataattgcaacaacatcatgttcttcgaagcaagaaagggccaagatctttacttatggatagcgaaagcccccaacggcccgacggtcaaattccacatcacgaacatccacacgatggaggagttggcattcaacggaaactgcctcaagggtagcagacccattctatcattcgactcagtatttgacaccgagcctcacttgcaagtgatcaagcagctgttcctccaggtctttggtgtaccgccgcaggcgaaaaagtccaaaccatttgtggaccatgtgatgagtttctcgtttgccgacgggaaaatatggatgcgaaactaccagatcggagagcaggagtctcagacgaagaaggacgatgaggagggtgggaagaataaaagtgacaagaccaaggagactgatattcagcttgttgaaattggcccgagatgcgtcatggagcccatcataatacaagagggatctttcggctctgccattctttaccacagcaagcacttcgtatcacccaaccaagtccgcgccgacctgagacggaagaaggctacgaagcataatgcgcgggcggaacagggcattgagaggaagagtaggaaggatagattgggtctgaggacggatggagaattcaaggggaaggtggatgagcttgatactgctaagctctttgcctga

SEQ ID NO: 24506 - protein, 306 aa, Muscodor strobelii
  misc_feature: SGI Peptide ID NO. 568356
  misc_feature (31)..(233): Pfam Id: PF04427 Pfam Desc: Brix domain
  misc_feature (1)..(306): NCBI GI: 156063962 Blast Desc: SS1G_02099 [Sclerotinia sclerotiorum 1980] gi|154697433|gb|EDN97171.1| SS1G_02099 [Sclerotinia sclerotiorum 1980]
  misc_feature (1)..(306): NCBI GI: 154303554 Blast Desc: BC1G_09348 [Botryotinia fuckeliana B05.10] gi|150854659|gb|EDN29851.1| BC1G_09348 [Botryotinia fuckeliana B05.10]
  misc_feature (1)..(306): NCBI GI: 39973551 Blast Desc: MGG_01078 [Magnaporthe grisea 70-15] gi|145017963|gb|EDK02242.1| MGG_01078 [Magnaporthe grisea 70-15]
  misc_feature (1)..(306): NCBI GI: 46116968 Blast Desc: FG04326.1 [Gibberella zeae PH-1]
  misc_feature (1)..(306): NCBI GI: 256729422 Blast Desc: NECHADRAFT_47804 [Nectria haematococca mpVI 77-13-4]
  misc_feature (1)..(306): NCBI GI: 171688710 Blast Desc: protein product [Podospora anserina] gi|170944317|emb|CAP70427.1| protein product [Podospora anserina]
  misc_feature (1)..(306): NCBI GI: 18376164 Blast Desc: conserved [Neurospora crassa]
  misc_feature (1)..(306): NCBI GI: 189190038 Blast Desc: brix domain-containing protein 2 [Pyrenophora tritici-repentis Pt-1C-BFP] gi|187972964|gb|EDU40463.1| brix domain-containing protein 2 [Pyrenophora tritici-repentis
  misc_feature (1)..(306): NCBI GI: 164427987 Blast Desc: ribosome biogenesis protein BRX1 [Neurospora crassa OR74A] gi|157071963|gb|EAA27737.2| ribosome biogenesis protein BRX1 [Neurospora crassa OR74A]
  misc_feature (1)..(306): NCBI GI: 261355117 Blast Desc: ribosome biogenesis protein BRX1 [Verticillium albo-atrum VaMs.102]
  misc_feature: Useful for introducing or modulating the production of volatile compounds
MAAVYKALSKTTGEKNDAPKDGTKRNKQRVLILSSRGVTYRHRHLLKDLADMMPHGRKDAKFDSKKRLSELCELAELYNCNNIMFFEARKGQDLYLWIAKAPNGPTVKFHITNIHTMEELAFNGNCLKGSRPILSFDSVFDTEPHLQVIKQLFLQVFGVPPQAKKSKPFVDHVMSFSFADGKIWMRNYQIGEQESQTKKDDEEGGKNKSDKTKETDIQLVEIGPRCVMEPIIIQEGSFGSAILYHSKHFVSPNQVRADLRRKKATKHNARAEQGIERKSRKDRLGLRTDGEFKGKVDELDTAKLFA

SEQ ID NO: 24507 - DNA, 1530 bp, Muscodor strobelii
  misc_feature: SGI EST ID NO. CUFF.57704.0
  misc_feature: Variant of the nucleotide sequence at SEQ ID NO 24505
acgacccctttgcgataagggacagcccacttcttatcgccgttgagcttcgtaaaaaagtttagggaagctgcaattgcatccgcaattcgacatacaatctacgactatcttcttaccatttccaaatattccacaccactattagcaccacatttcaccccccgacctagagtctgcaacagaaataagctgcatagctgcacatttcgagtccaccaccagcagcgacacaaagcgcagaatcaagcgacaatggcggccgtctacaaggccctgtcgaagacgacgggcgagaagaacgatgcgcccaaggatggcaccaagagaaacaagcagagagtgttgattctttcttcgagaggtgttacctacagacatcgacacctgttgaaagaccttgcggacatgatgcctcatggcaggaaagatgcaaagttcgactctaagaagaggctttccgagctttgtgagcttgcggagctttataattgcaacaacatcatgttcttcgaagcaagaaagggccaagatctttacttatggatagcgaaagcccccaacggcccgacggtcaaattccacatcacgaacatccacacgatggaggagttggcattcaacggaaactgcctcaagggtagcagacccattctatcattcgactcagtatttgacaccgagcctcacttgcaagtgatcaagcagctgttcctccaggtctttggtgtaccgccgcaggcgaaaaagtccaaaccatttgtggaccatgtgatgagtttctcgtttgccgacgggaaaatatggatgcgaaactaccagatcggagagcaggagtctcagacgaagaaggacgatgaggagggtgggaagaataaaagtgacaagaccaaggagactgatattcagcttgttgaaattggcccgagatgcgtcatggagcccatcataatacaagagggatctttcggctctgccattctttaccacagcaagcacttcgtatcacccaaccaagtccgcgccgacctgagacggaagaaggctacgaagcataatgcgcgggcggaacagggcattgagaggaagagtaggaaggatagattgggtctgaggacggatggagaattcaaggggaaggtggatgagcttgatactgctaagctctttgcctgagtggtcccttgagtttgggttggcgttcccggtgttctgcgggggtttaggacaaacaggcagatattatgtgtatatacccgctgtccttggtctgttgacaactgcttgaatagttacaacgctactgtgaccgaggatttaagggctgtttcgttgtaaggtcaaatcagtatctcgcttatggtttgaaccgaaccgtcttacaagcaagagcagacagactgtcttttgacccctgaatattaccgctctagctatggtcatacatttcaggtccgtaccgatcgttgttaaactgtcaggagttcaaagtgttgtaagtaaaagccatagaaatgattagtaggctct

SEQ ID NO: 24508 - DNA, 1452 bp, Muscodor strobelii
  misc_feature: SGI cDNA ID NO. 568357
  misc_feature: Encodes the peptide sequence at SEQ ID NO 24509
atgctttcggcgaccccagagtctcctatcgagtgtacatccgactcgactcctggctctactttcggcactattacgcaatccattcatgagcctgctcttcagccaattccgaaggtcactttcgcgcatgcgcccaaaccagtgagatgtgtctgcatagatcagctgcctactgaaatcatcatcaacatcatgtctaacatgagaccccgcgagcttttcttcttcgtcaagactagccgccgctacgagactattatgcagcagaacaaacccgccatcttcttcagtatcctcctacgttgcccagagctcaagattctcctcaacatcttcacggctcaacagagagagacaacttcgggctacatgctctatcctcgagtcatctggttcaatctcaccaaagccaatatggagaaaaatcgagttcttgcttacgaggccttgaagaagaatcatcctcgtgaagttgaaattgaccctcttgctgccaaagcccacgttcgagcagttgcgcccgggtatgatcccactcccgagcagttggcgaaagataagatctttctagtccgagcccctgttgcttgggtggacaacaagattgtctgcccgttcaagtttgaactctcgacggcaaacctcgagactctcttcgacatcatcgatgtcatcgattggtgggttgaacactatcctcagctacgctggcgagatgacgctcaagagcgccgctgcctgtggccagaagaagaggctcgactccgcaaagccattgctcattggtggctctacagcatattcttccatggcggtttccgtcgcagcacctatgtccccaagttatatgatgacgatgacacaagactcaaccttcttcgtacactcaataccgagcaactctcggagctaagcgacttatggaacacaatctacgaatgtgtcagccttgacatttgtgcatcgcccgacaaagttgagaacaagaatgccaacggcggttacgatattgatctcaaactttggggcagaaatgaggcagagcaccacgccatcgtccgaactgtcatgaagctcagtccgaagcaaatgaaggacttgctggagaacaattatagaaacgagcgaagagacatcctatggttgatcaacaaagacttagccgtagccggtcgaggcttggctttcgacgtagagtcacttactcattcgatcagcattgttctcgaggagagaattgccttaatctacagatctgattttagtcatccgctcccttgcatgcctatcgtcgaggtagatcgagctaatcaacctgatcgtgacatcttccgacatgacgcctggcccagcggcaaagctcctggtgcaaatgagaaacgcgcggccttgggcctccagctgactgagcgaatccgtcccggcaacgatggttgggggaagggttag

SEQ ID NO: 24509 - protein, 483 aa, Muscodor strobelii
  misc_feature: SGI Peptide ID NO. 568357
  misc_feature (52)..(99): Pfam Id: PF00646 Pfam Desc: F-box domain
  misc_feature (54)..(458): NCBI GI: 46116966 Blast Desc: FG04325.1 [Gibberella zeae PH-1]
  misc_feature (57)..(453): NCBI GI: 256729421 Blast Desc: NECHADRAFT_95694 [Nectria haematococca mpVI 77-13-4]
  misc_feature (57)..(457): NCBI GI: 39973553 Blast Desc: MGG_01077 [Magnaporthe grisea 70-15] gi|145017964|gb|EDK02243.1| MGG_01077 [Magnaporthe grisea 70-15]
  misc_feature (197)..(413): NCBI GI: 156050427 Blast Desc: SS1G_07800 [Sclerotinia sclerotiorum 1980] gi|154692201|gb|EDN91939.1| SS1G_07800 [Sclerotinia sclerotiorum 1980]
  misc_feature (199)..(333): NCBI GI: 154298251 Blast Desc: BC1G_11970 [Botryotinia fuckeliana B05.10] gi|150858156|gb|EDN33348.1| BC1G_11970 [Botryotinia fuckeliana B05.10]
  misc_feature (211)..(330): NCBI GI: 240109295 Blast Desc: CPC735_028000 [Coccidioides posadasii C735 delta SOWgp]
  misc_feature (211)..(371): NCBI GI: 261194553 Blast Desc: F-box domain-containing protein [Ajellomyces dermatitidis SLH14081] gi|239588219|gb|EEQ70862.1| F-box domain-containing protein [Ajellomyces dermatitidis SLH14081]
  misc_feature (211)..(330): NCBI GI: 119182489 Blast Desc: CIMG_06269 [Coccidioides immitis RS]
  misc_feature (211)..(330): NCBI GI: 238844328 Blast Desc: F-box domain-containing protein [Microsporum canis CBS 113480]
  misc_feature (211)..(330): NCBI GI: 225678957 Blast Desc: F-box domain-containing protein [Paracoccidioides brasiliensis Pb03]
MLSATPESPIECTSDSTPGSTFGTITQSIHEPALQPIPKVTFAHAPKPVRCVCIDQLPTEIIINIMSNMRPRELFFFVKTSRRYETIMQQNKPAIFFSILLRCPELKILLNIFTAQQRETTSGYMLYPRVIWFNLTKANMEKNRVLAYEALKKNHPREVEIDPLAAKAHVRAVAPGYDPTPEQLAKDKIFLVRAPVAWVDNKIVCPFKFELSTANLETLFDIIDVIDWWVEHYPQLRWRDDAQERRCLWPEEEARLRKAIAHWWLYSIFFHGGFRRSTYVPKLYDDDDTRLNLLRTLNTEQLSELSDLWNTIYECVSLDICASPDKVENKNANGGYDIDLKLWGRNEAEHHAIVRTVMKLSPKQMKDLLENNYRNERRDILWLINKDLAVAGRGLAFDVESLTHSISIVLEERIALIYRSDFSHPLPCMPIVEVDRANQPDRDIFRHDAWPSGKAPGANEKRAALGLQLTERIRPGNDGWGKG

SEQ ID NO: 24510 - DNA, 3704 bp, Muscodor strobelii
  misc_feature: SGI EST ID NO. CUFF.57716.0
  misc_feature: Variant of the nucleotide sequence at SEQ ID NO 24508
gcgagatcacacaacaaggcagcccttgcggcaaggccttccaaatggcatctaatgcctttggagcctttctcttcactaatttcacaatatagccccaaaggaggggtggtcgttgactgagccccgtgcaattccaccctcggcttgatcaacgacaggctggtgtagaacagactgcgtgctctgttcagccaagtaattgttcagctggggcttcaaacctcacatctaagtgttgtaaaacacatagggtgacaggaaggaagactaggagccttctgcagaattcgttgctgagtgtcactactcaaaggcactcttgccttgcaagcatcctatgctgatttggcttgataatgctcatgaaagacattcgcaattatcagcaaggtctacgtcttttagacgcatgtaatatcaatcaacagcaaatcgcatcaaaacaacacacctttccctcttctccagcactcaatcttttgtgttgattccttcacctcttcacctctttcaccatcactcctttcatcacaacatatcgcagcttgaaccctgcgaggtgcttcagtctctgcgttgaccattgaggtcttctttcactacgtgtccctacttcgtctgatctcagacttgcactcttgcgaggttgcttcgtctaggaaacacgcctcgcgatcttctaacacctggtctattgtttcttcttcgtcgatccgatctgctgctgcgtacatcagctgcggtctatccgaagggcaacatccggaaggctctattacacgtattgttgttgactgataccctctttcgtgttctgtcctatttcttccttccaagtcaccttctcaacgattcatctgtacacacatcaattccaaaggaaagtcactgcccctgcccctctctgcaccgtgagaatccttcagcagcctgtttctgtcctgagcatcgaaaatctggaggatttgtgtactcttgatctgatcagtaccctgtggagaaggcaacctcagtccctctttctctctcgaaaatcctatactactcatcttacgtctcacccattcacctgatattcgtatcaactccaaatatgttcaatcccaacgctggcggtgtcgtcccgcgtcaccgcttcgggcctatagcgccccctgtttctagacgcatgttctctcagagtgcctctgtaagaagctttccgagcagccgccgaggccgccgtgctttatcggagagcatgctttcggcgaccccagagtctcctatcgagtgtacatccgactcgactcctggctctactttcggcactattacgcaatccattcatgagcctgctcttcagccaattccgaaggtcactttcgcgcatgcgcccaaaccagtgagatgtgtctgcatagatcagctgcctactgaaatcatcatcaacatcatgtctaacatgagaccccgcgagcttttcttcttcgtcaagactagccgccgctacgagactattatgcagcagaacaaacccgccatcttcttcagtatcctcctacgttgcccagagctcaagattctcctcaacatcttcacggctcaacagagagagacaacttcgggctacatgctctatcctcgagtcatctggttcaatctcaccaaagccaatatggagaaaaatcgagttcttgcttacgaggccttgaagaagaatcatcctcgtgaagttgaaattgaccctcttgctgccaaagcccacgttcgagcagttgcgcccgggtatgatcccactcccgagcagttggcgaaagataagatctttctagtccgagcccctgttgcttgggtggacaacaagattgtctgcccgttcaagtttgaactctcgacggcaaacctcgagactctcttcgacatcatcgatgtcatcgattggtgggttgaacactatcctcagctacgctggcgagatgacgctcaagagcgccgctgcctgtggccagaagaagaggctcgactccgcaaagccattgctcattggtggctctacagcatattcttccatggcggtttccgtcgcagcacctatgtccccaagttatatgatgacgatgacacaagactcaaccttcttcgtacactcaataccgagcaactctcggagctaagcgacttatggaacacaatctacgaatgtgtcagccttgacatttgtgcatcgcccgacaaagttgagaacaagaatgccaacggcggttacgatattgatctcaaactttggggcagaaatgaggcagagcaccacgccatcgtccgaactgtcatgaagctcagtccgaagcaaatgaaggacttgctggagaacaattatagaaacgagcgaagagacatcctatggttgatcaacaaagacttagccgtagccggtcgaggcttggctttcgacgtagagtcacttactcattcgatcagcattgttctcgaggagagaattgccttaatctacagatctgattttagtcatccgctcccttgcatgcctatcgtcgaggtagatcgagctaatcaacctgatcgtgacatcttccgacatgacgcctggcccagcggcaaagctcctggtgcaaatgagaaacgcgcggccttgggcctccagctgactgagcgaatccgtcccggcaacgatggttgggggaagggttagcaccgcgacacctccatggttcgctataacgaggttctagattatgacactcagttcattgagcatgtggccgatgagtcgcagctggagccccccatgccagatgcgtgcgacatgagacgcaatcaacgattattccactcgtttgactaaggtcaaactcgattggtgttgtcatcaattgtctttgtagttcgcgtgtatactgttcacaaactcggtctttcaacgcttgtcgaccgattttcatttcgcatcattacggcaaagccattttcttatcccgtcgtcaattcgtcagttttcgttgcagttttcgagatcaccaacatttcggtcacggatgcttcgtcggccgttagtacttccgtatcgcgcgccttctcgtttctcgattccagtttttcgaaaaaagttatcccgcattcaaagaccgttctcatgtcgacaaaatggtcctcagccaatcctcgcagattatactgatactctattcagttcaacaatagcattctcaaactctcaacagatggttctctgctttgtttcgcaacaagcaaaccctttcgcagccttacctcgctaatattctcattcgactacattatgacacccattgccccactttcagccaaaaatctactcgacaaataagacatcctgcttggttacctgttgccctcttaacactgctcagttctttcaccgcaaaatcggtgtgattcttcggaatcaagtgtttgattaggaatgtgtttagggtcttttgcgggccttcgggccacgcttgttctaataggaaaaaatctcggtgatttgtttgcgaaatggaaaaattaggagagttgtgctggatgtgcctgagaaaattcggtgttgatctggtacgtaggcgtccatagcaaaggcagaaaattgcagtgctcctgcaaagaattctctacgtcccccatgcgtgatcgtgaatgagaatgcttttgctactatgtgcaagctgctttgcttctcg

SEQ ID NO: 24511 - DNA, 702 bp, Muscodor strobelii
  misc_feature: SGI cDNA ID NO. 568358
  misc_feature: Encodes the peptide sequence at SEQ ID NO 24512
atggccacctccgtcttccgcgcagctccctcggcccgggcagctctcagagcaacctccgtcaagcccgcctttgccgctctggccggcacttctttcgttcgcggcaaggcgactctacccgatctatcttacgactacggtgccctcgagccctacatctcgggcaagatcatggagctgcaccacaaaaaccaccaccagacatacgtcaacggcctgaacagcgccctcgagcagattggcgacgccgaggccaagggcaacaccagcgccgccgctgctgtcgcacccctactcaacttccacggcggcggccatatcaaccactccctcttctgggagaacttggccccagccagtcagaacggcggtggcgagccagacggcgccctcaagtctgccatcgagcgtgactttggctcgttcaagaccctgcaaggccagatcaacaccgctcttgccggtatccagggctccggctgggcctggctggtcaaggacaagaccgccggcacccttcaggttgtcactcgcgccaaccaggaccctgtcactggtaactacgtgcccctgatgggtatcgacgcctgggagcacgcatactacctacaataccagaaccgcaaggctgaatatttcagtgctatctggaacgtcatcaactggaagactgttgctagccgtcttgagaaggcttaa

SEQ ID NO: 24512 - protein, 233 aa, Muscodor strobelii
  misc_feature: SGI Peptide ID NO. 568358
  misc_feature (126)..(230): Pfam Id: PF02777 Pfam Desc: Iron/manganese superoxide dismutases, C-terminal domain
  misc_feature (37)..(118): Pfam Id: PF00081 Pfam Desc: Iron/manganese superoxide dismutases, alpha-hairpin domain
  misc_feature (1)..(232): NCBI GI: 261360423 Blast Desc: superoxide dismutase [Verticillium albo-atrum VaMs.102]
  misc_feature (1)..(231): NCBI GI: 171678411 Blast Desc: protein product [Podospora anserina] gi|170937275|emb|CAP61932.1| protein product [Podospora anserina]
  misc_feature (4)..(233): NCBI GI: 39975283 Blast Desc: MGG_00212 [Magnaporthe grisea 70-15] gi|145018926|gb|EDK03205.1| MGG_00212 [Magnaporthe grisea 70-15]
  misc_feature (1)..(231): NCBI GI: 85092632 Blast Desc: superoxide dismutase, mitochondrial precursor [Neurospora crassa OR74A] gi|28920918|gb|EAA30249.1| superoxide dismutase, mitochondrial precursor [Neurospora crassa OR74A]
  misc_feature (1)..(231): NCBI GI: 156054796 Blast Desc: SS1G_06246 [Sclerotinia sclerotiorum 1980] gi|154704026|gb|EDO03765.1| SS1G_06246 [Sclerotinia sclerotiorum 1980]
  misc_feature (1)..(232): NCBI GI: 28848933 Blast Desc: manganese superoxide dismutase [Cordyceps militaris]
  misc_feature (1)..(231): NCBI GI: 154320876 Blast Desc: manganese superoxide dismutase [Botryotinia fuckeliana B05.10] gi|150853599|gb|EDN28791.1| manganese superoxide dismutase [Botryotinia fuckeliana B05.10]
  misc_feature (37)..(233): NCBI GI: 147886292 Blast Desc: manganese superoxide dismutase [Chaetomium thermophilum]
  misc_feature (1)..(232): NCBI GI: 46117224 Blast Desc: FG04454.1 [Gibberella zeae PH-1]
  misc_feature (1)..(230): NCBI GI: 169771393 Blast Desc: [Aspergillus oryzae RIB40] gi|50726917|gb|AAT81154.1| mitochondrial superoxide dismutase [Aspergillus flavus] gi|83768025|dbj|BAE58164.1| protein product [Aspergillus oryzae]
  misc_feature (27)..(231): SWISSPROT Homolog: EC 1.15.1.1 Superoxide dismutase
MATSVFRAAPSARAALRATSVKPAFAALAGTSFVRGKATLPDLSYDYGALEPYISGKIMELHHKNHHQTYVNGLNSALEQIGDAEAKGNTSAAAAVAPLLNFHGGGHINHSLFWENLAPASQNGGGEPDGALKSAIERDFGSFKTLQGQINTALAGIQGSGWAWLVKDKTAGTLQVVTRANQDPVTGNYVPLMGIDAWEHAYYLQYQNRKAEYFSAIWNVINWKTVASRLEKA

SEQ ID NO: 24513 - DNA, 2082 bp, Muscodor strobelii
  misc_feature: SGI EST ID NO. CUFF.57732.0
  misc_feature: Variant of the nucleotide sequence at SEQ ID NO 24511
agctcgttcgccattgattcgctgttgagtccaagctcggccgagcttttgattattgattgattgacatcataccatttcaaaccatcaatctcgagaatcacttctcgacaacacactgtacatcgcttgacgacgctggtctcgttcgttgtatacataaaaacaacgaatccgatccattggtaccaacacaccgtccgattcatacacacaattgcgttcaacatggccacctccgtcttccgcgcagctccctcggcccgggcagctctcagagcaacctccgtcaagcccgcctttgccgctctggccggcacttctttcgttcgcggcaaggcgactctacccgatctatcttacgactacggtgccctcgagccctacatctcgggcaagatcatggagctgcaccacaaaaaccaccaccagacatacgtcaacggcctgaacagcgccctcgagcagattggcgacgccgaggccaagggcaacaccagcgccgccgctgctgtcgcacccctactcaacttccacggcggcggccatatcaaccactccctcttctgggagaacttggccccagccagtcagaacggcggtggcgagccagacggcgccctcaagtctgccatcgagcgtgactttggctcgttcaagaccctgcaaggccagatcaacaccgctcttgccggtatccagggctccggctgggcctggctggtcaaggacaagaccgccggcacccttcaggttgtcactcgcgccaaccaggaccctgtcactggtaactacgtgcccctgatgggtatcgacgcctgggagcacgcatactacctacaataccagaaccgcaaggctgaatatttcagtgctatctggaacgtcatcaactggaagactgttgctagccgtcttgagaaggcttaaacaaaaccattcaattgttacgagataaaagatttcgcgtgtatagtaccaagcgtgtgatgagaaatccgataaaagtcgtcgagattccagttgtaattcacttagcaatccaagcagagcatttaaaaatggtcgaaacatgatgcatctcacgaccatcgcatccaataagcagacatataggaacaaagcatataaaaagctgccaagataccttggcgcaacccataatttttgtacaaagttccaatgatgagaagtcagagaagtgatcaacgttttctgcctagcagatctgcaattgctgcggcggtgccgtaatcctccctggatgtctatatatctgcctacaacgagcatgtccaacccatcaatatccacttggtttagaatgcgtctcaatcaatttgtattatatttcatagttggaaaaagaaatcatggggctcttcgacgctgtcttctggccgttctacaacatagcgcatccacttgaaacgcgcatactctccattctccacataccgagctgtacaactttccggcttctcccgcccaccaactgtcggccaactacggaccctttgccggctcacattctcatactactctgcctagcatgctacattcgactattagcatatccgcgctcccagatatacgatcgggttctctccaaccaattcgccgtgaaaacgctgaaactcatgcactggggtatgataattgcagcggcaaatagtgtttggatccaatgggcgatagatgggaataatacgtcgttttatttgaaattgatcgttgtccttttatttctataagagcggagttagggaaccgaactcaagcttttgtatgttgtataggggcaagagagatgtatattaaagaagcaatgatcgaagaggacgatatagagtgagaattggtttctgttcttaagaagagatctgtgaatggaacgatgaacatcagagacgggaggatgcgaatgaaagataagaagcataagcaccaagaattctctgactactcgatccaacgactcatctaaattaagaatacttttcccttcaagggaatcaattgcgcgagagagggaaaatccattaagattcttgttttagtttcatttgcacacatagcccg

SEQ ID NO: 24514 - DNA, 561 bp, Muscodor strobelii
  misc_feature: SGI cDNA ID NO. 568359
  misc_feature: Encodes the peptide sequence at SEQ ID NO 24515
atgtcttactatgatatagacgccatcttgacagatgccgagaaagttccttgcacctttgagcttgacgtgccagaattaggacatcttgataacaacccagcccaaacgctcaaaagcggcacctcagtcggactaccattatggctggccgagctgctcgctctcgccaaccgggctccaagtagtagtggcgaagatgccaaatctttcgtctctctcaacttaccacagtcgctgtcaaacgaggtcatggctgctcttaaggctgatccccgagccgtgcccctccgcgaccagtctcacaacttctacggcctaggcacgcgaatgcttgacttgttcgaggaaaaggagatctgtgccgttctacgtcgcacatttgtcaccagggctgctgatatcgctcttcacgctgggaaggctggggctacggacgatatgggaggtggcgaggagttcttgcgagggctagaggaatgggagaggaagctattcaagacagcgcatgatggagcaaagggaagaaaagaatggatggaaaacgtcaaaaagcattga

SEQ ID NO: 24515 - protein, 186 aa, Muscodor strobelii
  misc_feature: SGI Peptide ID NO. 568359
  misc_feature (3)..(180): Pfam Id: PF06425 Pfam Desc: Partner of SLD five, PSF3
  misc_feature (1)..(186): NCBI GI: 171678413 Blast Desc: protein product [Podospora anserina] gi|170937276|emb|CAP61933.1| protein product [Podospora anserina]
  misc_feature (1)..(185): NCBI GI: 74615527 Blast Desc: protein product [Podospora anserina] gi|170937276|emb|CAP61933.1| protein product [Podospora anserina]
  misc_feature (3)..(186): NCBI GI: 261360424 Blast Desc: DNA replication complex GINS protein PSF3 [Verticillium albo-atrum VaMs.102]
  misc_feature (1)..(186): NCBI GI: 39975281 Blast Desc: MGG_00213 [Magnaporthe grisea 70-15] gi|145018925|gb|EDK03204.1| MGG_00213 [Magnaporthe grisea 70-15]
  misc_feature (1)..(185): NCBI GI: 46117222 Blast Desc: FG04453.1 [Gibberella zeae PH-1] gi|121815255|sp|Q4IEA5.1|PSF3_GIBZE RecName: Full=DNA replication complex GINS protein PSF3
  misc_feature (1)..(185): NCBI GI: 256729508 Blast Desc: NECHADRAFT_84154 [Nectria haematococca mpVI 77-13-4]
  misc_feature (1)..(185): NCBI GI: 156054794 Blast Desc: SS1G_06245 [Sclerotinia sclerotiorum 1980] gi|154704025|gb|EDO03764.1| SS1G_06245 [Sclerotinia sclerotiorum 1980]
  misc_feature (1)..(185): NCBI GI: 238843869 Blast Desc: DNA replication complex GINS protein psf3 [Microsporum canis CBS 113480]
  misc_feature (1)..(186): NCBI GI: 121708081 Blast Desc: GINS complex subunit Psf3, [Aspergillus clavatus NRRL 1] gi|119400171|gb|EAW10597.1| GINS complex subunit Psf3, [Aspergillus clavatus NRRL 1]
  misc_feature (1)..(185): NCBI GI: 242768600 Blast Desc: GINS complex subunit Psf3, [Talaromyces stipitatus ATCC 10500] gi|218724798|gb|EED24215.1| GINS complex subunit Psf3, [Talaromyces stipitatus ATCC 10500]
MSYYDIDAILTDAEKVPCTFELDVPELGHLDNNPAQTLKSGTSVGLPLWLAELLALANRAPSSSGEDAKSFVSLNLPQSLSNEVMAALKADPRAVPLRDQSHNFYGLGTRMLDLFEEKEICAVLRRTFVTRAADIALHAGKAGATDDMGGGEEFLRGLEEWERKLFKTAHDGAKGRKEWMENVKKH

SEQ ID NO: 24516 - DNA, 976 bp, Muscodor strobelii
  misc_feature: SGI EST ID NO. CUFF.57719.0
  misc_feature: Variant of the nucleotide sequence at SEQ ID NO 24514
gcgcaactcgcgaccgcgattggcagcaccgcgtttaatggcaagctggtggctatcttatatgacaatcctaaatcaggaggaaaaggctctgcatggttaagagggcctaagtgtctaaatatgatctaggctttgtgtaataagtcattatatcattgtacccgccttgtagacgtgctcatgcagcatgtcttactatgatatagacgccatcttgacagatgccgagaaagttccttgcacctttgagcttgacgtgccagaattaggacatcttgataacaacccagcccaaacgctcaaaagcggcacctcagtcggactaccattatggctggccgagctgctcgctctcgccaaccgggctccaagtagtagtggcgaagatgccaaatctttcgtctctctcaacttaccacagtcgctgtcaaacgaggtcatggctgctcttaaggctgatccccgagccgtgcccctccgcgaccagtctcacaacttctacggcctaggcacgcgaatgcttgacttgttcgaggaaaaggagatctgtgccgttctacgtcgcacatttgtcaccagggctgctgatatcgctcttcacgctgggaaggctggggctacggacgatatgggaggtggcgaggagttcttgcgagggctagaggaatgggagaggaagctattcaagacagcgcatgatggagcaaagggaagaaaagaatggatggaaaacgtcaaaaagcattgatacccaactgatgatacgaacttaatgaatagaatgactgcacacaacggccacagcaaaggatattagtggtttgggggtgtaatacgatcggattacagaagcgatttcgtcggctgttcacttaagtaacagcattcgttagctgccgtgagtcttcatactacctttaagcgtactacctaccttacgaaatcatatcaaggtattaccttcaagctccag

SEQ ID NO: 24517 - DNA, 2766 bp, Muscodor strobelii
  misc_feature: SGI cDNA ID NO. 568360
  misc_feature: Encodes the peptide sequence at SEQ ID NO 24518
atgtctttcgatgccgcccacatctccaaggcagacgccgccgcctactcgtcatccgagggcgacgagagcgacgatgacctcttgcaaacgtccgttgacccccgcgccgacgaccttgaaggcctacaccgtcacaaacgccgtcgaactggtcgcaacaacaaggaatctgccgccctgggtatattcggctccagctctgaagacgaccggaatcccaccaagcgctggaagtccaagcccgacctgcgacacagaaacgtcgcctttgtctccgctggcaggcaagatgttctggacgatgacgatggcgactctgaagacgaggtcgagcggcctggcatcggcacgcagcctaagaaggatggtacggaggaagaagacgacgatgaagatgagaacatgtctggtatgggcatgggcttccgtccatcggcacaaggcctgggttggggttctgctgcccaaggacaacataaccccacgcagcccgctccaacgagggcagattacgatggtcgcaatccacttgggaagagtttcgtgccgacctccgccaaagaacctatactcaaccccaacctaaagaatgggccctcctccgcgcctcagaccccaatgccgagtgcctttagtgcaggctccggctccaagaacaagtctttcgctgcccgtatgatggcgaagatgggctacgtagaaggtcagggtttgggagcagaaggaacaggtcgtgccaccatcatcgaagccaccttgagaccacaaggcgtcggtcttggcgcagtcaaggagaaatcagagcaagaagccaaggaacaaaagaggcaagctcgtatgaggggcgaggatgtccccgattctgatgaagaacgaaagaaggcgaagcgggacaggaagaaaaccgcagggagcggctcagctagtggcatgagcacgcccaagaggtctaaaccgaaatacatgaccgtcaatgatatcaagaaagctgcgcctgggctccatataccagaagcattcgcccccatcctggatatgacgggtccgggccagaaactgttgacgtccagttcgggcattatgaccccgacgactggcacagagcttgtagagcagaccgagagcaagaagctcgccaggcgtgctcaagccgaccttgcgtcgttcgtggaagagtggaaaacattggaagatcagaaggcatggctcgatatggagacccatcgatgtcagcaagaaacagacgagatgcaagccgagttctccgccctcagtatgttctcgtcgatgttagacgaaatctacgaagctgcacagaatcagcaatgggatccggttatatccggcctcaagaaagccgaggctgcaggctcaacgcataataatgacgagctggcagctatcgcggttgcaagtattcaccccttccttgccagcgctgttcaaggctggcagcccctagaagatcccaaacttggaaacttcgcgaccgatctttacgacattaaaggtgtgctcggtctcaagacagctgaggcgaggggcgccgcaatcacaagatggaacgagacagaggcggagcaggcacgccatattcacgggaaatcgactacgccgtatgaaagcatgatctacaaaattctatttccaaaactggcttctacgatctcccagacatgggatgtgtacaatcctgcatcgcttcttgctgtcatagacaaatggacacccatccttcccgctttcgtgaaatctcaattactggaaacagtagtacggagactcgacgatgctatcaaagactggaagccaaggaaagagcaagctaaacttccacatctatggttattcccttggcttcagtatctcccaccacatcatttagataccaaaggcagtggccttgtctccgacgtgagacgaaaatttcgtcagctaattgacgtctgggagttcgagaagggcatcgtgccaggtttgaagccctggcaagatgttttccgtccctcaaaatcccaggatcagtggaaaccactcgttatgcaccatattctcccgagtatgggccggtatctccgtacgaatttccgcgtagatcctggggaccaggaaccatacctcaagatgctactaggtctattcaaatggacagatgtcatatcttcgtccatgattgcggaggtcatcgtcacggaggtgttccccatgtggcatgacgtactatatcaatggcttacgggcgaagaggctaactatgaagagattggtcaatggtatgagtggtggcatgtcgaagtcttccccaaagagatcgcggcgcaggagagcgtcaaggcggaattccggaagggcaccgggatgattgagaaggctcttgagcttggtgacgaagtcaagagtaaactcccatatcccaacagacagcccgcaagacagcctaagcccaaggcgagaaaagaaccggtgctggagaagaaggcaccgattatggaagagaaggagaagacgtttagagatgaggtcgaagactgggctcaggagaatgatttgcagtttattcctattaggaaggcgaacgagcagggcaagcactatttccgccttacagcgaggatggatggaaagggaggcgtgttggcctggttcaggggtgatgtgcttgttgttgagagtaggaagacgaatggggagtttcgaagagatgctatcatggagtggggtacattgcttgatccgctgttcggggaaattgaggggcggtag

SEQ ID NO: 24518 - protein, 921 aa, Muscodor strobelii
  misc_feature: SGI Peptide ID NO. 568360
  misc_feature (220)..(264): Pfam Id: PF01585 Pfam Desc: G-patch domain
  misc_feature (445)..(700): Pfam Id: PF08697 Pfam Desc: Tuftelin interacting protein 11
  misc_feature (534)..(700): Pfam Id: PF08697 Pfam Desc: Tuftelin interacting protein 11
  misc_feature (465)..(492): Pfam Id: PF08697 Pfam Desc: Tuftelin interacting protein 11
  misc_feature (17)..(907): NCBI GI: 156053754 Blast Desc: SS1G_05724 [Sclerotinia sclerotiorum 1980] gi|154703505|gb|EDO03244.1| SS1G_05724 [Sclerotinia sclerotiorum 1980]
  misc_feature (17)..(907): NCBI GI: 154303297 Blast Desc: BC1G_09397 [Botryotinia fuckeliana B05.10] gi|150854960|gb|EDN30152.1| BC1G_09397 [Botryotinia fuckeliana B05.10]
  misc_feature (1)..(912): NCBI GI: 85090022 Blast Desc: NCU06950 [Neurospora crassa OR74A] gi|28919558|gb|EAA28984.1| [Neurospora crassa OR74A]
  misc_feature (1)..(887): NCBI GI: 116206190 Blast Desc: CHGG_02388 [Chaetomium globosum CBS 148.51] gi|88182985|gb|EAQ90453.1| CHGG_02388 [Chaetomium globosum CBS 148.51]
  misc_feature (32)..(893): NCBI GI: 39975131 Blast Desc: MGG_00288 [Magnaporthe grisea 70-15] gi|145018836|gb|EDK03115.1| MGG_00288 [Magnaporthe grisea 70-15]
  misc_feature (38)..(793): NCBI GI: 256734952 Blast Desc: [Nectria haematococca mpVI 77-13-4]
  misc_feature (2)..(793): NCBI GI: 46138023 Blast Desc: FG10526.1 [Gibberella zeae PH-1]
  misc_feature (164)..(912): NCBI GI: 171681257 Blast Desc: protein product [Podospora anserina] gi|170940587|emb|CAP65815.1| protein product [Podospora anserina]
  misc_feature (117)..(894): NCBI GI: 239608660 Blast Desc: G-patch domain-containing protein [Ajellomyces dermatitidis ER-3]
  misc_feature (194)..(894): NCBI GI: 261191747 Blast Desc: G-patch domain-containing protein [Ajellomyces dermatitidis SLH14081] gi|239589597|gb|EEQ72240.1| G-patch domain-containing protein [Ajellomyces dermatitidis SLH14081]
MSFDAAHISKADAAAYSSSEGDESDDDLLQTSVDPRADDLEGLHRHKRRRTGRNNKESAALGIFGSSSEDDRNPTKRWKSKPDLRHRNVAFVSAGRQDVLDDDDGDSEDEVERPGIGTQPKKDGTEEEDDDEDENMSGMGMGFRPSAQGLGWGSAAQGQHNPTQPAPTRADYDGRNPLGKSFVPTSAKEPILNPNLKNGPSSAPQTPMPSAFSAGSGSKNKSFAARMMAKMGYVEGQGLGAEGTGRATIIEATLRPQGVGLGAVKEKSEQEAKEQKRQARMRGEDVPDSDEERKKAKRDRKKTAGSGSASGMSTPKRSKPKYMTVNDIKKAAPGLHIPEAFAPILDMTGPGQKLLTSSSGIMTPTTGTELVEQTESKKLARRAQADLASFVEEWKTLEDQKAWLDMETHRCQQETDEMQAEFSALSMFSSMLDEIYEAAQNQQWDPVISGLKKAEAAGSTHNNDELAAIAVASIHPFLASAVQGWQPLEDPKLGNFATDLYDIKGVLGLKTAEARGAAITRWNETEAEQARHIHGKSTTPYESMIYKILFPKLASTISQTWDVYNPASLLAVIDKWTPILPAFVKSQLLETVVRRLDDAIKDWKPRKEQAKLPHLWLFPWLQYLPPHHLDTKGSGLVSDVRRKFRQLIDVWEFEKGIVPGLKPWQDVFRPSKSQDQWKPLVMHHILPSMGRYLRTNFRVDPGDQEPYLKMLLGLFKWTDVISSSMIAEVIVTEVFPMWHDVLYQWLTGEEANYEEIGQWYEWWHVEVFPKEIAAQESVKAEFRKGTGMIEKALELGDEVKSKLPYPNRQPARQPKPKARKEPVLEKKAPIMEEKEKTFRDEVEDWAQENDLQFIPIRKANEQGKHYFRLTARMDGKGGVLAWFRGDVLVVESRKTNGEFRRDAIMEWGTLLDPLFGEIEGR

SEQ ID NO: 24519 - DNA, 3192 bp, Muscodor strobelii
  misc_feature: SGI EST ID NO. CUFF.57722.0
  misc_feature: Variant of the nucleotide sequence at SEQ ID NO 24517
gcgactttcttaaaaacatcattaagcttgttagattcaacaactgcggcttctaggcactctgatgcatgcccaatgacgtccacacgtatgatacaatataggaggagttagaggtcacacgctgccggtattgggctatccacgtctacgcctacacctatttgcgacatcacagattcgattcgttataatttcatcgaccgccatcgtcgccgccatgtctttcgatgccgcccacatctccaaggcagacgccgccgcctactcgtcatccgagggcgacgagagcgacgatgacctcttgcaaacgtccgttgacccccgcgccgacgaccttgaaggcctacaccgtcacaaacgccgtcgaactggtcgcaacaacaaggaatctgccgccctgggtatattcggctccagctctgaagacgaccggaatcccaccaagcgctggaagtccaagcccgacctgcgacacagaaacgtcgcctttgtctccgctggcaggcaagatgttctggacgatgacgatggcgactctgaagacgaggtcgagcggcctggcatcggcacgcagcctaagaaggatggtacggaggaagaagacgacgatgaagatgagaacatgtctggtatgggcatgggcttccgtccatcggcacaaggcctgggttggggttctgctgcccaaggacaacataaccccacgcagcccgctccaacgagggcagattacgatggtcgcaatccacttgggaagagtttcgtgccgacctccgccaaagaacctatactcaaccccaacctaaagaatgggccctcctccgcgcctcagaccccaatgccgagtgcctttagtgcaggctccggctccaagaacaagtctttcgctgcccgtatgatggcgaagatgggctacgtagaaggtcagggtttgggagcagaaggaacaggtcgtgccaccatcatcgaagccaccttgagaccacaaggcgtcggtcttggcgcagtcaaggagaaatcagagcaagaagccaaggaacaaaagaggcaagctcgtatgaggggcgaggatgtccccgattctgatgaagaacgaaagaaggcgaagcgggacaggaagaaaaccgcagggagcggctcagctagtggcatgagcacgcccaagaggtctaaaccgaaatacatgaccgtcaatgatatcaagaaagctgcgcctgggctccatataccagaagcattcgcccccatcctggatatgacgggtccgggccagaaactgttgacgtccagttcgggcattatgaccccgacgactggcacagagcttgtagagcagaccgagagcaagaagctcgccaggcgtgctcaagccgaccttgcgtcgttcgtggaagagtggaaaacattggaagatcagaaggcatggctcgatatggagacccatcgatgtcagcaagaaacagacgagatgcaagccgagttctccgccctcagtatgttctcgtcgatgttagacgaaatctacgaagctgcacagaatcagcaatgggatccggttatatccggcctcaagaaagccgaggctgcaggctcaacgcataataatgacgagctggcagctatcgcggttgcaagtattcaccccttccttgccagcgctgttcaaggctggcagcccctagaagatcccaaacttggaaacttcgcgaccgatctttacgacattaaaggtgtgctcggtctcaagacagctgaggcgaggggcgccgcaatcacaagatggaacgagacagaggcggagcaggcacgccatattcacgggaaatcgactacgccgtatgaaagcatgatctacaaaattctatttccaaaactggcttctacgatctcccagacatgggatgtgtacaatcctgcatcgcttcttgctgtcatagacaaatggacacccatccttcccgctttcgtgaaatctcaattactggaaacagtagtacggagactcgacgatgctatcaaagactggaagccaaggaaagagcaagctaaacttccacatctatggttattcccttggcttcagtatctcccaccacatcatttagataccaaaggcagtggccttgtctccgacgtgagacgaaaatttcgtcagctaattgacgtctgggagttcgagaagggcatcgtgccaggtttgaagccctggcaagatgttttccgtccctcaaaatcccaggatcagtggaaaccactcgttatgcaccatattctcccgagtatgggccggtatctccgtacgaatttccgcgtagatcctggggaccaggaaccatacctcaagatgctactaggtctattcaaatggacagatgtcatatcttcgtccatgattgcggaggtcatcgtcacggaggtgttccccatgtggcatgacgtactatatcaatggcttacgggcgaagaggctaactatgaagagattggtcaatggtatgagtggtggcatgtcgaagtcttccccaaagagatcgcggcgcaggagagcgtcaaggcggaattccggaagggcaccgggatgattgagaaggctcttgagcttggtgacgaagtcaagagtaaactcccatatcccaacagacagcccgcaagacagcctaagcccaaggcgagaaaagaaccggtgctggagaagaaggcaccgattatggaagagaaggagaagacgtttagagatgaggtcgaagactgggctcaggagaatgatttgcagtttattcctattaggaaggcgaacgagcagggcaagcactatttccgccttacagcgaggatggatggaaagggaggcgtgttggcctggttcaggggtgatgtgcttgttgttgagagtaggaagacgaatggggagtttcgaagagatgctatcatggagtggggtacattgcttgatccgctgttcggggaaattgaggggcggtagagttgtgtagcgaggaaaacatatttgatatcatcataaaggcagtcttatgggtgatgctatcatggtgtgtagatcagcatccctcaggatgagattccacggtattatgaagcctgcctcctatccatcgagacagatcaagcaaacaacaggatttaacttattgtcagtgcttgttgttttcaaacaagtaatcactttat

SEQ ID NO: 24520 - DNA, 1434 bp, Muscodor strobelii
  misc_feature: SGI cDNA ID NO. 568361
  misc_feature: Encodes the peptide sequence at SEQ ID NO 24521
atggcttcgccgcttagcatcacggtcaactggaccgatgctctcatacagtcgcagaccataaccacgctgcaatctgtagcgaatccagtcttatacaacagcagtatccgggagacagctttggaatctctgagcctggtagcatctgaccttgttcgctttgtgccatggtttccatatcctcagatggctgttccggaggtcaaagcccctattatcaccgacacagagtgtcagactttctgggacttcacctatgccgattcacttctaggagattttatcaatgctacaccaaatgtctcgcgaattatcaatttcagtacaacgccgggatggatgtgggttaccgattcagaatacacgtatcctgcgaatgcgtccgaagtcgattgggactacaaccagggaacccaactccgagatcataccttcaaagagttgactgattactaccagcgtctcgtttcttggtatgtggctggtggctttacagatgaatgtggtgtaactcacacatctggtcactcgtacacgtttgactattgggaagttctcaatgaacctgatgcagaacacactatggatcctattttctatagtcaagtgtacgatgccatcgtagaggcagtctcatcaatatcaccttcgactaaattcgtgggtggagcaatggcataccggaacgtcacatggtttgagacgtttctcacagcgagcaatcatgccgccaacatctcacttgattgggtcagctaccatttctacgcaacaccttcagatacttctgctccagatgctgctttacagtgttttcaacaagccgacacgttccttaccgaggttcagcaatttgaagctgtccgtctgcaagtctcccctaatactaagaccacgctcaacgagatcgggacgacagatccactagcagcagggagcgtaacagagggacacgtgataccggacaactattggttatatagtggtggtctgtttgcctatgtgttttccaacgtggcgaagatgggtatcaatgcactaggagagagccagctggttgggtttcctagtcaatacgaatcggtgtcaatggtagactatcggacgggtcagccaaatgcacggctgcgtactcttcagctactgcaacaaagtttccagcctggagacactctatacaatactgcaacggccgatgaatctgtattgcatgcgcaggcatttgataccgctacaggacagaagttactcttgataaacaagcagaattatactgttacggcttcagtgccggatttcgcatcaggggcggcagcaattattgatttgacgacagctggaggtccttggaagtcggaaattgtggatgcaaatacggctagtattgatattccacaatgggctgttgcggtcatatcaaataaggtgtga

SEQ ID NO: 24521 - protein, 477 aa, Muscodor strobelii
  misc_feature: SGI Peptide ID NO. 568361
  misc_feature (7)..(450): NCBI GI: 255533375 Blast Desc: Phep_3494 [Pedobacter heparinus DSM 2366] gi|255346359|gb|ACU05685.1| Phep_3494 [Pedobacter heparinus DSM 2366]
  misc_feature (4)..(438): NCBI GI: 238061582 Blast Desc: conserved [Micromonospora sp. ATCC 39149] gi|237883393|gb|EEP72221.1| conserved [Micromonospora sp. ATCC 39149]
  misc_feature (27)..(387): NCBI GI: 167527159 Blast Desc: [Monosiga brevicollis MX1] gi|163773661|gb|EDQ87299.1| [Monosiga brevicollis MX1]
  misc_feature (5)..(284): NCBI GI: 118470847 Blast Desc: MSMEG_3128 [Mycobacterium smegmatis str. MC2 155] gi|118172134|gb|ABK73030.1| MSMEG_3128 [Mycobacterium smegmatis str. MC2 155]
  misc_feature (361)..(436): NCBI GI: 118470847 Blast Desc: MSMEG_3128 [Mycobacterium smegmatis str. MC2 155] gi|118172134|gb|ABK73030.1| MSMEG_3128 [Mycobacterium smegmatis str. MC2 155]
MASPLSITVNWTDALIQSQTITTLQSVANPVLYNSSIRETALESLSLVASDLVRFVPWFPYPQMAVPEVKAPIITDTECQTFWDFTYADSLLGDFINATPNVSRIINFSTTPGWMWVTDSEYTYPANASEVDWDYNQGTQLRDHTFKELTDYYQRLVSWYVAGGFTDECGVTHTSGHSYTFDYWEVLNEPDAEHTMDPIFYSQVYDAIVEAVSSISPSTKFVGGAMAYRNVTWFETFLTASNHAANISLDWVSYHFYATPSDTSAPDAALQCFQQADTFLTEVQQFEAVRLQVSPNTKTTLNEIGTTDPLAAGSVTEGHVIPDNYWLYSGGLFAYVFSNVAKMGINALGESQLVGFPSQYESVSMVDYRTGQPNARLRTLQLLQQSFQPGDTLYNTATADESVLHAQAFDTATGQKLLLINKQNYTVTASVPDFASGAAAIIDLTTAGGPWKSEIVDANTASIDIPQWAVAVISNKV

SEQ ID NO: 24522 - DNA, 469 bp, Muscodor strobelii
  misc_feature: SGI EST ID NO. CUFF.57728.0
  misc_feature: Variant of the nucleotide sequence at SEQ ID NO 24520
catcaatatcaccttcgactaaattcgtgggtggagcaatggcataccggaacgtcacatggtttgagacgtttctcacagcgagcaatcatgccgccaacatctcacttgattgggtcagctaccatttctacgcaacaccttcagatacttctgctccagatgctgctttacagtgttttcaacaagccgacacgttccttaccgaggttcagcaatttgaagctgtccgtctgcaagtctcccctaatactaagaccacgctcaacgagatcgggacgacagatccactagcagcagggagcgtaacagagggacacgtgataccggacaactattggttatatagtggtggtctgtttgcctatgtgttttccaacgtggcgaagatgggtatcaatgcactaggagagagccagctggttgggtttcctagtcaatacgaatcggtgtcaatggtagactatcg

SEQ ID NO: 24523 - DNA, 1713 bp, Muscodor strobelii
  misc_feature: SGI cDNA ID NO. 568362
  misc_feature: Elevated expression when VOC is produced
  misc_feature: Encodes the peptide sequence at SEQ ID NO 24524
atgggtgcctacgtctcaatccaggactgtcagtcaaactataacatcacattagactgctcaataagatacgaaaatggcacagaaattacggactttgatggtcactggccttataatgtcagcctagggggcataagaagaggaagtttccaagctgattctgatatcgctggcgttggtattcttggggtctttatcgcggtgacatcgctcgctttattagtatcctttgtcgacgttatatggcagggaatgaaagtatggcgtcgtcgaagtagtgcgcctaagcgaaacatagagaagaagactaggcgcgtcagcttctcggatatcctcgagactgtagttctcgcctgcagtgaccagcaagttttcaccggcgcggcttacgcacttaccttacgatattccaccggctgctcagtctcagcataccactacaatattgtagcgaacatgcttttgttgacatgtgctacgcatcttatgtcagtaactatagttcggaattactggaaatattttggtctcgccttcatccgggtcattgccattaccggagtgtttatcgttacggcccttcttttcacaaaccagaatgccgcaggcaagggtttccctacaggtattccacggaaaaacgagaccgacagtcttttgtttttagctgctgcctgcttcgaaagctcggatagtaaggcgatcgacaccttcaagcagagcacgagtggtccaggtgcattcttccaaaacactctagtgcagagtaagccagacaataaggtcgagggctggaactacttcgtcgttactttgcttttctacggtgctgccatcattgtagccgtcgtccgcgtcatccggcgtggcaaatctagaccaggttggcgtggtcgtctggggaattcagtcaagcgatcttgtggacacattcgtttcctgagaagatttttcgagtggctcttcttcacatatctcgtcattggtgttgggataggagcccttgttgtcgtgatggcaggtagatacatattcggactccgagaatgggtcgatcggtcaggctggatcgagacggacaatgggggtttgaatcccgaaaatgactggtcgactttcggccaattggtgccgatcataaccagcgccttgattctcttcagtcttgcgcagatcgttagtgagaaagtcacaagacaccacaatcgcgagcacgaggacgaggagacacctccacaagatggcacagtcgagtttttggacccatcaaattacgatttgataacaccagcagcgaagctacccgaaaaaagcaccgaatacttcggtgcggctgcgattcgcacatccaataccaacaagtccgatactcctccgcgcatagacctcgagcaccagtcttctttcggaagttccatgtcaataccgaacgccagcccgctggcagtcgagccttcatctcccatgctcatcaccagcgtttctcctgcaacgccaaccacccccaagagaatgaaggtgcctccagcatcaacgaagcccgaccttggccttgggtacagtgccgtgcccacagagcccgagcctgtaatagtctcgcgaccgccaagtcttagtggaagcctgcacccatctcgtgtttctctaccaccctcaccagacccggcaatggaagcggagaggattgatgacagaacgcacaagtcatga

SEQ ID NO: 24524 - protein, 570 aa, Muscodor strobelii
  misc_feature: SGI Peptide ID NO. 568362
  misc_feature (1)..(385): NCBI GI: 116182896 Blast Desc: CHGG_02076 [Chaetomium globosum CBS 148.51] gi|88186373|gb|EAQ93841.1| CHGG_02076 [Chaetomium globosum CBS 148.51]
  misc_feature (62)..(422): NCBI GI: 164422711 Blast Desc: NCU09782 [Neurospora crassa OR74A] gi|157069788|gb|EAA30885.2| [Neurospora crassa OR74A]
  misc_feature (110)..(399): NCBI GI: 171682692 Blast Desc: protein product [Podospora anserina] gi|170941305|emb|CAP66955.1| protein product [Podospora anserina]
  misc_feature (98)..(416): NCBI GI: 256733916 Blast Desc: [Nectria haematococca mpVI 77-13-4]
  misc_feature (122)..(387): NCBI GI: 171685568 Blast Desc: protein product [Podospora anserina] gi|170942745|emb|CAP68398.1| protein product [Podospora anserina]
  misc_feature (5)..(228): NCBI GI: 169619734 Blast Desc: SNOG_13064 [Phaeosphaeria nodorum SN15] gi|111058271|gb|EAT79391.1| SNOG_13064 [Phaeosphaeria nodorum SN15]
  misc_feature (103)..(228): NCBI GI: 171681058 Blast Desc: protein product [Podospora anserina] gi|170940487|emb|CAP65715.1| protein product [Podospora anserina]
  misc_feature (54)..(186): NCBI GI: 256729802 Blast Desc: [Nectria haematococca mpVI 77-13-4]
  misc_feature (62)..(403): NCBI GI: 171692615 Blast Desc: protein product [Podospora anserina] gi|170946256|emb|CAP73057.1| protein product [Podospora anserina]
  misc_feature (109)..(172): NCBI GI: 169603365 Blast Desc: SNOG_04692 [Phaeosphaeria nodorum SN15] gi|160706378|gb|EAT88452.2| SNOG_04692 [Phaeosphaeria nodorum SN15]
  misc_feature: Useful for introducing or modulating the production of volatile compounds
MGAYVSIQDCQSNYNITLDCSIRYENGTEITDFDGHWPYNVSLGGIRRGSFQADSDIAGVGILGVFIAVTSLALLVSFVDVIWQGMKVWRRRSSAPKRNIEKKTRRVSFSDILETVVLACSDQQVFTGAAYALTLRYSTGCSVSAYHYNIVANMLLLTCATHLMSVTIVRNYWKYFGLAFIRVIAITGVFIVTALLFTNQNAAGKGFPTGIPRKNETDSLLFLAAACFESSDSKAIDTFKQSTSGPGAFFQNTLVQSKPDNKVEGWNYFVVTLLFYGAAIIVAVVRVIRRGKSRPGWRGRLGNSVKRSCGHIRFLRRFFEWLFFTYLVIGVGIGALVVVMAGRYIFGLREWVDRSGWIETDNGGLNPENDWSTFGQLVPIITSALILFSLAQIVSEKVTRHHNREHEDEETPPQDGTVEFLDPSNYDLITPAAKLPEKSTEYFGAAAIRTSNTNKSDTPPRIDLEHQSSFGSSMSIPNASPLAVEPSSPMLITSVSPATPTTPKRMKVPPASTKPDLGLGYSAVPTEPEPVIVSRPPSLSGSLHPSRVSLPPSPDPAMEAERIDDRTHKS

SEQ ID NO: 24525 - DNA, 2769 bp, Muscodor strobelii
  misc_feature: SGI EST ID NO. CUFF.57845.1
  misc_feature: Variant of the nucleotide sequence at SEQ ID NO 24523
cagccgtagggtttcattacattttcatacatatctgaatcccattattggcacgaatggtggttctcttgagccggaaaagacggcgtgccattgcttcaacacatactgtctctaatcacgtttgataagactcttccacagccttcttatatcccgctccttatgcattgcagatgttcttagcctcccgtagcccgcatgtcgtgacagcccacaaatcgggccatggatcgaacaggttaattctccgtaacgttgtgtaagagcctcttactcccttccttcaggtatgcggcttcagaactgaaagcaactggaattatggagggtggttgtgcatccctgaaactgggccaggtctcttagagacagtgaccttgctagtgctacctttccagctgtcatcactgcgcttcgttgccgtttgcccacctgcgggatgcagaagttagtaaaccatgatcgacagctcagctacatgcagtgtgcacagcatcaacgatgttggtagttataagtgcccataccccctcccttgtagcatacataatgttatcgtacttttgagcgttcatgacacatcatggtcataatttgaccgatttgtttgtccaacatgggtgcctacgtctcaatccaggactgtcagtcaaactataacatcacattagactgctcaataagatacgaaaatggcacagaaattacggactttgatggtcactggccttataatgtcagcctagggggcataagaagaggaagtttccaagctgattctgatatcgctggcgttggtgtatgttttcatagctttattcttctcccactcctgtcttctcatcctaatgaccaactgttccagattcttggggtctttatcgcggtgacatcgctcgctttattagtatcctttgtcgacgttatatggcagggaatgaaagtatggcgtcgtcgaagtagtgcgcctaagcgaaacatagagaagaagactaggcgcgtcagcttctcggatatcctcgagactgtagttctcgcctgcagtgaccagcaagttttcaccggcgcggcttacgcacttaccttacgatattccaccggctgctcagtctcagcataccactacaatattgtagcgaacatgcttttgttgacatgtgctacgcatcttatgtcagtaactatagttcggaattactggaaatattttggtctcgccttcatccgggtcattgccattaccggagtgtttatcgttacggcccttcttttcacaaaccagaatgccgcaggcaagggtttccctacaggtattccacggaaaaacgagaccgacagtcttttgtttttagctgctgcctgcttcgaaagctcggatagtaaggcgatcgacaccttcaagcagagcacgagtggtccaggtgcattcttccaaaacactctagtgcagagtaagccagacaataaggtcgagggctggaactacttcgtcgttactttgcttttctacggtgctgccatcattgtagccgtcgtccgcgtcatccggcgtggcaaatctagaccaggttggcgtggtcgtctggggaattcagtcaagcgatcttgtggacacattcgtttcctgagaagatttttcgagtggctcttcttcacatatctcgtcattggtgttgggataggagcccttgttgtcgtgatggcaggtagatacatattcggactccgagaatgggtcgatcggtcaggctggatcgagacggacaatgggggtttgaatcccgaaaatgactggtcgactttcggccaattggtgccgatcataaccagcgccttgattctcttcagtcttgcgcagatcgttagtgagaaagtcacaagacaccacaatcgcgagcacgaggacgaggagacacctccacaagatggcacagtcgagtttttggacccatcaaattacgatttgataacaccagcagcgaagctacccgaaaaaagcaccgaatacttcggtgcggctgcgattcgcacatccaataccaacaagtccgatactcctccgcgcatagacctcgagcaccagtcttctttcggaagttccatgtcaataccgaacgccagcccgctggcagtcgagccttcatctcccatgctcatcaccagcgtttctcctgcaacgccaaccacccccaagagaatgaaggtgcctccagcatcaacgaagcccgaccttggccttgggtacagtgccgtgcccacagagcccgagcctgtaatagtctcgcgaccgccaagtcttagtggaagcctgcacccatctcgtgtttctctaccaccctcaccagacccggcaatggaagcggagaggattgatgacagaacgcacaagtcatgattagtagctactgctctcttacgaccacttgctggatatgcaccatccccgggacttcgagtatatttccgtacgcaagatttgtttggctaggtatgctagtcattttaggggccattacttcagcatggaaccatttgaatctatctgttaatcaaagggatttcaggaagctttaacaactaatcaatccgacaacctagagcgcgtgttttacttacccagttaaggagatatattatacccagttacgataatgaacgaacataagaattcaaattaggttccatagatatactcattgactttctttcaacattgatactcttcaccgtacgctcgcatagattaccaaatgctcactatatatc

SEQ ID NO: 24526 - DNA, 1539 bp, Muscodor strobelii
  misc_feature: SGI cDNA ID NO. 568363
  misc_feature: Elevated expression when VOC is produced
  misc_feature: Encodes the peptide sequence at SEQ ID NO 24527
atgatgcaacatgcatcttccatggcaaagcagtattaccaacaacaagactcgatggcgtacgccgtgaccaccggtccgttactagatgttcaagagtggctagctcaacatcctccaatcgaagaaaatcctcctgaacttggggcttcaggttttccagatacgcagttttgccctgaaatcgactcttctcatttcaacatgaatgtctcggtctgcgactcgatgacatccgctcctacatgtgaggatggaccaatgacgcggcaaaatagtcagttcgaatatccgtctgatggggtgcgcatggtccatatgaactcccagatgtctctgggacaagatgcatacatcgaagcttcgcagcaaaaccttgaatttggtgactcgtcatttgcaacaaagcattcgtcccgcgaaaatacacttctcgctgtgggatcgaacctcagccctccagctgctcatcaatatgcagctgtgccctccaacgatcagttacttgcatcaacggagatggaacgcacgatttcaagcacaagtacagccagtgctaagtcaacatcgtcttcactcagtgctcgcgcgaaggaggcgctgaagcagcagaatcaacgtgctctaaacgcgcctattctgaagccaaaaccttcggtcgaacatgatgccattgagccaacagtcgatcagaagagggctggaaaagaagctattgctaaggcaaaatacgtccggccaagacagcctaaggtgttttgcaatcaatgcgatgaacataaagatggcttccgtggagaacacgagctccgtcgtcatagagatgctaaacaccaagttacagtcaaaaagttcatctgtgtccatcctcatgaccaaggccttcccgtcaacgtcgctattgtgaacccgttggataagtgcaaggcttgccaatcccaaaaacgatatggtgcatattataacgctgcagcacatctcagacgcacccatttcaaagagaagccgtcccgatccaaaaacaagacatctagtgcgaacaccggcgatgacgagaagcgtggtggtaagggaggtggggattggccttccatgcacgagctgaaaaactggatgaaagagatcactgtgcggaaagatgagcaatctaacgacgacgatgctgatgaagaaatggaccacatctcacattccttcggcagccctgatgtagattgcaattttggcaccaatcttccctcggactttccgtccaacggcgtgcaccttacttacccattctcgaacgatatgatcctacctacagacatgtttatgagcactatcccgcccccaatctcctccgcggatttcgcttttccccatcagactagcctgcctagttccttcaataccgacgtggcagtctactcctcgattagtccggtcagccaatttggttcggccgtctcgtcttctgcgactgtcacccagatggctaccttcgacgcacagcaacaacatcactttggagagatgaactaccattatactcaataa

SEQ ID NO: 24527 - protein, 512 aa, Muscodor strobelii
  misc_feature: SGI Peptide ID NO. 568363
  misc_feature (72)..(393): NCBI GI: 256729318 Blast Desc: NECHADRAFT_105158 [Nectria haematococca mpVI 77-13-4]
  misc_feature (72)..(504): NCBI GI: 46117220 Blast Desc: FG04452.1 [Gibberella zeae PH-1]
  misc_feature (72)..(382): NCBI GI: 74099682 Blast Desc: key lime pathogenicity protein [Glomerella acutata]
  misc_feature (69)..(391): NCBI GI: 39977419 Blast Desc: MGG_06612 [Magnaporthe grisea 70-15] gi|145015940|gb|EDK00430.1| MGG_06612 [Magnaporthe grisea 70-15]
  misc_feature (70)..(391): NCBI GI: 85090174 Blast Desc: NCU09335 [Neurospora crassa OR74A] gi|28919638|gb|EAA29056.1| [Neurospora crassa OR74A]
  misc_feature (72)..(381): NCBI GI: 116205499 Blast Desc: CHGG_10633 [Chaetomium globosum CBS 148.51] gi|88176761|gb|EAQ84229.1| CHGG_10633 [Chaetomium globosum CBS 148.51]
  misc_feature (88)..(392): NCBI GI: 154320840 Blast Desc: BC1G_01892 [Botryotinia fuckeliana B05.10] gi|150853581|gb|EDN28773.1| BC1G_01892 [Botryotinia fuckeliana B05.10]
  misc_feature (88)..(375): NCBI GI: 156040529 Blast Desc: SS1G_12281 [Sclerotinia sclerotiorum 1980] gi|154696337|gb|EDN96075.1| SS1G_12281 [Sclerotinia sclerotiorum 1980]
  misc_feature (238)..(402): NCBI GI: 85118089 Blast Desc: NCU02994 [Neurospora crassa OR74A] gi|16945371|emb|CAB97275.2| conserved [Neurospora crassa] gi|28927188|gb|EAA36144.1| NCU02994 [Neurospora crassa OR74A]
  misc_feature (241)..(402): NCBI GI: 171684779 Blast Desc: protein product [Podospora anserina] gi|170942350|emb|CAP68002.1| protein product [Podospora anserina]
  misc_feature: Useful for introducing or modulating the production of volatile compounds
MMQHASSMAKQYYQQQDSMAYAVTTGPLLDVQEWLAQHPPIEENPPELGASGFPDTQFCPEIDSSHFNMNVSVCDSMTSAPTCEDGPMTRQNSQFEYPSDGVRMVHMNSQMSLGQDAYIEASQQNLEFGDSSFATKHSSRENTLLAVGSNLSPPAAHQYAAVPSNDQLLASTEMERTISSTSTASAKSTSSSLSARAKEALKQQNQRALNAPILKPKPSVEHDAIEPTVDQKRAGKEAIAKAKYVRPRQPKVFCNQCDEHKDGFRGEHELRRHRDAKHQVTVKKFICVHPHDQGLPVNVAIVNPLDKCKACQSQKRYGAYYNAAAHLRRTHFKEKPSRSKNKTSSANTGDDEKRGGKGGGDWPSMHELKNWMKEITVRKDEQSNDDDADEEMDHISHSFGSPDVDCNFGTNLPSDFPSNGVHLTYPFSNDMILPTDMFMSTIPPPISSADFAFPHQTSLPSSFNTDVAVYSSISPVSQFGSAVSSSATVTQMATFDAQQQHHFGEMNYHYTQ

SEQ ID NO: 24528 - DNA, 3673 bp, Muscodor strobelii
  misc_feature: SGI EST ID NO. CUFF.57741.0
  misc_feature: Variant of the nucleotide sequence at SEQ ID NO 24526
gggtctacagcacattagcacatttccatccttcgatcttcgacccacatgccacgcatacgaaagcctcaaagtcgagtgactggcatttattaactctacatatcgctgtcttctgtctgtagccttcgggttgaaacagccgttcgtgttcttctatctttcctccgattccttcgctggaagatcaacatccctttgtggacttgattctcccatctgagaatcaatcgtcctcaaacaagatcctcatccaacagtcactgcatcgcctgtccttgtctacaagtattccctcgctgagctctttgaaacagggctacataagtggagaggtatattatcgtgggaaaagtgaagcgacaacgactttacatggtcgacatacaccgttgtgtctcacacttcgaataagtggccgacgccagcgtcatgagtcctaatatgaacgctgagcgagagatcgcgaggctgcgtgctgagctcgaaatagcccagaaacagatctcgcagttgcagaactcttcccagctaccacatccatcttccaatttttccacttcatgcacgaatgaactctacagtcctgatcattgtgacttcaaactgtctggtgatgtttccgtgaacaagaatgtcttgccaacgagtgcaatacctcgtagcattagtacaggagttcataatcgtcatgatggtgacatagtaagttctcgtgaagatgggccccgtgctgtcaaacgactgcggacccaaagccagcaggtgtgctcttctcagaaaatggaacgtgttgcatcgaattcatctgtcaaatctgctggccctttcaagggtagtgtggtctctctgcccccaaagatccagacgccgagtctacagcctcaacattccagaacgacgaccttcccaaacaatgacgcacttacaagctcgcacgcttcgcccaatatgatgcaacatgcatcttccatggcaaagcagtattaccaacaacaagactcgatggcgtacgccgtgaccaccggtccgttactagatgttcaagagtggctagctcaacatcctccaatcgaagaaaatcctcctgaacttggggcttcaggttttccagatacgcagttttgccctgaaatcgactcttctcatttcaacatgaatgtctcggtctgcgactcgatgacatccgctcctacatgtgaggatggaccaatgacgcggcaaaatagtcagttcgaatatccgtctgatggggtgcgcatggtccatatgaactcccagatgtctctgggacaagatgcatacatcgaagcttcgcagcaaaaccttgaatttggtgactcgtcatttgcaacaaagcattcgtcccgcgaaaatacacttctcgctgtgggatcgaacctcagccctccagctgctcatcaatatgcagctgtgccctccaacgatcagttacttgcatcaacggagatggaacgcacgatttcaagcacaagtacagccagtgctaagtcaacatcgtcttcactcagtgctcgcgcgaaggaggcgctgaagcagcagaatcaacgtgctctaaacgcgcctattctgaagccaaaaccttcggtcgaacatgatgccattgagccaacagtcgatcagaagagggctggaaaagaagctattgctaaggcaaaatacgtccggccaagacagcctaaggtgttttgcaatcaatgcgatgaacataaagatggcttccgtggagaacacgagctccgtcgtcatagagatgctaaacaccaagttacagtcaaaaagttcatctgtgtccatcctcatgaccaaggccttcccgtcaacgtcgctattgtgaacccgttggataagtgcaaggcttgccaatcccaaaaacgatatggtgcatattataacgctgcagcacatctcagacgcacccatttcaaagagaagccgtcccgatccaaaaacaagacatctagtgcgaacaccggcgatgacgagaagcgtggtggtaagggaggtggggattggccttccatgcacgagctgaaaaactggatgaaagagatcactgtgcggaaagatgagcaatctaacgacgacgatgctgatgaagaaatggaccacatctcacattccttcggcagccctgatgtagattgcaattttggcaccaatcttccctcggactttccgtccaacggcgtgcaccttacttacccattctcgaacgatatgatcctacctacagacatgtttatgagcactatcccgcccccaatctcctccgcggatttcgcttttccccatcagactagcctgcctagttccttcaataccgacgtggcagtctactcctcgattagtccggtcagccaatttggttcggccgtctcgtcttctgcgactgtcacccagatggctaccttcgacgcacagcaacaacatcactttggagagatgaactaccattatactcaataatctcgcccgtacaactacccgctcaatctcctaattgttatcctttttgcatattgagtagcgacaaaaattgttcttactggagaacgaaaagaaaaaatcaagacaaaaaaaaagaacagacggatgtgttgtgtttcatctgtctagaaacttcttacgatatttcacgagagcttctacctgatttggaccgcggcactagctcttagccagctttgtccactacgagttcaatatccggatctcacgcatagaaacattcgttacccgtgtgtttcttgggaaacgactatttctattcacttccttggcataatacacttgatgccactgtgtttgcattattattatcttgttcatcactttctcagagcaagttgagcgggtgagatttgcgaggttacgtttctataatcaccatctacctaccgacttagtgtcgtgtatcatctcgaagcttgcatcccagatcaagcaaaaaagcagcagcaacttgtacaacaccaaacgttttcctgcgccttcaaggcgatgtattcgataatccgatatcgcgagacatcgaaacccctctttcgaggtgggctaatctcgcctagggctcgcggggcgagtcatagattgcctagagattatgctctcccggcagctgtcagcaagctgacatatatctgtaatgatgtttgttattcgttcctagtggctcagttggggttgcttgtacggtacacaaggtggaggcgtggtcacatccggatcaagtggcgcggcgtttccagaggggaaggggtcccatgtgcagactgttatttgttgttcttttcaagcgcggagttctggttgcaacatggagaggctggcatcgcctcgctccccaggaagaggggattatgactacatgagcagggccgggggagcccagaccccctaaatggcctcatcattcttgagtatttttgcatagtcttctaatgttgggtactttctatacttcgtattagaaagtttgccgtctgcttcatatcaagcaaactgcaattaagatgcaacgagcactcttgccaaccaattctaagacatttcctctcatgtttgattcataacccatcttgactcgttttgtgaccggtttctgttcaggtacttttttctcccatagtgacacacaagctgaattggc

SEQ ID NO: 24529 - DNA, 1440 bp, Muscodor strobelii
  misc_feature: SGI cDNA ID NO. 568364
  misc_feature: Encodes the peptide sequence at SEQ ID NO 24530
atgcgccgtcttccctcgctcctgctggcctggacatggctgcgggtgccggtgtgccacgcccgccagcccggcttcagcgtccaccacgatcttctcgcctatccacagttcgaggtggtcttctccgagtcctacatatccgaagcagacgcccaagctctactagacaaggaagacgcttcccatcccagctaccatgcctcgcccaccggccagaccgacatcagcgcgaccatccaggctgccggcgccgacgatgaccacgacggcgcaccacgcagcctgcaggagtcgtacgagacggccaccgagctcgccaaggccgaggaggcccgcgaactcgcccgcgcctcggcccacggcaccgacctgatcaaccagctcgacggcacctgtctctactacatgtccggctggtggagctaccgcttctgctacggccaagacgtcgtccagttccatgccgtggcctcctccgtcaagggcggcccgcctatgcgcgatgccaacaccgccgaatacgtcctcggcaggatccccgaccccaatgccccgtcctcgcgccccacgaggcggacgcagcgaaaccagcagaacgaacacgatccatcgaccggcgcgggcgcagccggaacgacacacgctcccaccaccgagctgcaggtcaagggagaccagcgctatctcgtgcagaagatggcagatggcaccgtatgcgatctgaccatgcgcgagcgcaccatagaagtccagtaccactgcagccccggcagcacacaggaccgcatcgggtggattaaggaggtcaccacatgctcgtacctgatgctgatcaacacgccccgtctctgcagcgatgtcgcattccagcctcctaaagaggagagggccaacatcgtcagctgccgtgtcatcctgaacgaagagggccaggctgaatggcatctgcagaagaccctcgaagcacaggccgccatggtccgcgacacgaagcaagcggccagggcgcccatcgtgattggaggcgtcgttgttggcggcagacacataatcggcaagggtgaagatggcaaggaagctcccaagctagctccgcccaagaacttccgcggtggtgccatgaaccagctcgtggagatcattgcatctgctgcggctaaagacgagggtgggcaggttcagatgatgactgaagacgaattagctgcgctagaactcactcctgaggtcattgaggagctgaagaaggagatccagaagatcgcaggcgacaaggggtggaaacttgaacttgtcgaggttccaggcaatgctggggctcgggagctgctcggtgtcatagaggatacggatggcgaggatgaggaatcaaaagaaggcgacggtgaggccaagggcgaagggagcgaagaacagttctataaagaagaactatag

SEQ ID NO: 24530 - protein, 479 aa, Muscodor strobelii
  misc_feature: SGI Peptide ID NO. 568364
  misc_feature (131)..(212): Pfam Id: PF07915 Pfam Desc: Glucosidase II beta subunit-like protein
  misc_feature (131)..(179): Pfam Id: PF07915 Pfam Desc: Glucosidase II beta subunit-like protein
  misc_feature (1)..(448): NCBI GI: 261354409 Blast Desc: conserved [Verticillium albo-atrum VaMs.102]
  misc_feature (1)..(478): NCBI GI: 256729507 Blast Desc: NECHADRAFT_71397 [Nectria haematococca mpVI 77-13-4]
  misc_feature (1)..(457): NCBI GI: 46117218 Blast Desc: FG04451.1 [Gibberella zeae PH-1] gi|83288336|sp|Q4IEA7.1|OS9_GIBZE RecName: Full=Protein OS-9 homolog; Flags: Precursor
  misc_feature (1)..(437): NCBI GI: 171677107 Blast Desc: protein product [Podospora anserina] gi|170936621|emb|CAP61280.1| protein product [Podospora anserina]
  misc_feature (1)..(466): NCBI GI: 39968409 Blast Desc: MGG_02297 [Magnaporthe grisea 70-15] gi|145014136|gb|EDJ98777.1| MGG_02297 [Magnaporthe grisea 70-15]
  misc_feature (1)..(472): NCBI GI: 154320842 Blast Desc: BC1G_01893 [Botryotinia fuckeliana B05.10] gi|150853582|gb|EDN28774.1| BC1G_01893 [Botryotinia fuckeliana B05.10]
  misc_feature (1)..(434): NCBI GI: 116205503 Blast Desc: CHGG_10635 [Chaetomium globosum CBS 148.51] gi|88176763|gb|EAQ84231.1| CHGG_10635 [Chaetomium globosum CBS 148.51]
  misc_feature (21)..(461): NCBI GI: 156040533 Blast Desc: SS1G_12283 [Sclerotinia sclerotiorum 1980] gi|154696339|gb|EDN96077.1| SS1G_12283 [Sclerotinia sclerotiorum 1980]
  misc_feature (1)..(473): NCBI GI: 226278113 Blast Desc: conserved [Paracoccidioides brasiliensis Pb01]
  misc_feature (17)..(352): NCBI GI: 85110347 Blast Desc: NCU08445 [Neurospora crassa OR74A] gi|74619905|sp|Q872S3.1|OS9_NEUCR RecName: Full=Protein OS-9 homolog; Flags: Precursor gi|28881247|emb|CAD70506.1| conserved
MRRLPSLLLAWTWLRVPVCHARQPGFSVHHDLLAYPQFEVVFSESYISEADAQALLDKEDASHPSYHASPTGQTDISATIQAAGADDDHDGAPRSLQESYETATELAKAEEARELARASAHGTDLINQLDGTCLYYMSGWWSYRFCYGQDVVQFHAVASSVKGGPPMRDANTAEYVLGRIPDPNAPSSRPTRRTQRNQQNEHDPSTGAGAAGTTHAPTTELQVKGDQRYLVQKMADGTVCDLTMRERTIEVQYHCSPGSTQDRIGWIKEVTTCSYLMLINTPRLCSDVAFQPPKEERANIVSCRVILNEEGQAEWHLQKTLEAQAAMVRDTKQAARAPIVIGGVVVGGRHIIGKGEDGKEAPKLAPPKNFRGGAMNQLVEIIASAAAKDEGGQVQMMTEDELAALELTPEVIEELKKEIQKIAGDKGWKLELVEVPGNAGARELLGVIEDTDGEDEESKEGDGEAKGEGSEEQFYKEEL

SEQ ID NO: 24531 - DNA, 1212 bp, Muscodor strobelii
  misc_feature: SGI cDNA ID NO. 568365
  misc_feature: Encodes the peptide sequence at SEQ ID NO 24532
atggccaaaagtcaaagcaaaggtgatgcgcatgtcgcagttgatttctcaaatcgccgacgtagcgcaaggaatttaaaaacagaagaaaatgaggagaatggcaacgagaaaaaaactcagcgggcgggcaagagagcgcttacacctccaccaccagtgtcagaccgtcggcgcagtaaaagagccaaacccaacgacaccccaaaacaagagaatggtgaggaggaggaaatgaaacatgacatcgtgtcagcaacttcgcccaaagtcaagagagaagccagcactagtccccgcaaagagagcaacaagaccacgctcagcaaagacaaggcagccgacctccaggccaagaaactcaagtcttacggagagttcgcagccgtgcgccagtctccatatccaaacttcaaccacccgtcgcccgaagaatgcaagctggcccataagattcttgcttccatacacggcgaacggcggcgacctgaggaccaaggcaagaagacgacggcgcctgcgcaacgcgcagggtgcggcgattcgccgtcggtgctggatgcgctgatccgcaccattctctcacaaaatacgagcgataagaatagcacacgggccaagctttccatggacaagacttacggtcgctctgacgaatgggcggagattgtgaagggtggtcaggcgaaactacagaagagtattgagagcggtggtctcgcaaacgtgaagtcgaaggttatcttgagtattctcgaccaaacttatgagcgatatgggaagtactccctagatcatctgtttgagaagagcgatgaggaggctatgcgagagatgatttcattcaaaggtgtcggacccaagacagcgagctgtgtgttgttgttttgtctgaggcgagcgagtttcgcggttgatacgcatgtctggcgtattacagggcttttaggttggagacccgcggatgcgagccgtgatcagacgcatgcgcatcttgatgccaagatcccggatgaggataaatatgggcttcatgtgcttttggtgaaacatggaaaggagtgtgatgagtgcaaggcgggcggaaagaatcttggacgatgtgagctgaggaaggccttcaagaaggcgaagatcaagggtgaggccggagagacggtgaaacaggaggagctggagaaaatcaagaaggaagaggaatatgatgattag

SEQ ID NO: 24532 - protein, 403 aa, Muscodor strobelii
  misc_feature: SGI Peptide ID NO. 568365
  misc_feature (61)..(375): NCBI GI: 39968419 Blast Desc: MGG_02302 [Magnaporthe grisea 70-15] gi|145014129|gb|EDJ98770.1| MGG_02302 [Magnaporthe grisea 70-15]
  misc_feature (234)..(387): NCBI GI: 261358015 Blast Desc: base excision DNA repair protein [Verticillium albo-atrum VaMs.102]
  misc_feature (99)..(378): NCBI GI: 170101314 Blast Desc: [Laccaria bicolor S238N-H82] gi|164643229|gb|EDR07482.1| [Laccaria bicolor S238N-H82]
  misc_feature (129)..(376): NCBI GI: 256724997 Blast Desc: NECHADRAFT_5986 [Nectria haematococca mpVI 77-13-4]
  misc_feature (119)..(397): NCBI GI: 71003520 Blast Desc: UM00279.1 [Ustilago maydis 521] gi|46096031|gb|EAK81264.1| UM00279.1 [Ustilago maydis 521]
  misc_feature (124)..(360): NCBI GI: 256734139 Blast Desc: NECHADRAFT_77955 [Nectria haematococca mpVI 77-13-4]
  misc_feature (124)..(360): NCBI GI: 46128543 Blast Desc: FG08649.1 [Gibberella zeae PH-1]
  misc_feature (53)..(360): NCBI GI: 145250401 Blast Desc: An15g01750 [Aspergillus niger] gi|134082233|emb|CAL00988.1| protein product [Aspergillus niger]
  misc_feature (20)..(360): NCBI GI: 189200344 Blast Desc: base excision DNA repair protein [Pyrenophora tritici-repentis Pt-1C-BFP] gi|187983608|gb|EDU49096.1| base excision DNA repair protein [Pyrenophora tritici-repentis
  misc_feature (25)..(360): NCBI GI: 238494280 Blast Desc: HhH-GPD family base excision DNA repair protein [Aspergillus flavus NRRL3357] gi|220695026|gb|EED51369.1| HhH-GPD family base excision DNA repair protein [Aspergillus flavus
MAKSQSKGDAHVAVDFSNRRRSARNLKTEENEENGNEKKTQRAGKRALTPPPPVSDRRRSKRAKPNDTPKQENGEEEEMKHDIVSATSPKVKREASTSPRKESNKTTLSKDKAADLQAKKLKSYGEFAAVRQSPYPNFNHPSPEECKLAHKILASIHGERRRPEDQGKKTTAPAQRAGCGDSPSVLDALIRTILSQNTSDKNSTRAKLSMDKTYGRSDEWAEIVKGGQAKLQKSIESGGLANVKSKVILSILDQTYERYGKYSLDHLFEKSDEEAMREMISFKGVGPKTASCVLLFCLRRASFAVDTHVWRITGLLGWRPADASRDQTHAHLDAKIPDEDKYGLHVLLVKHGKECDECKAGGKNLGRCELRKAFKKAKIKGEAGETVKQEELEKIKKEEEYDD

SEQ ID NO: 24533 - DNA, 1596 bp, Muscodor strobelii
  misc_feature: SGI EST ID NO. CUFF.57770.0
  misc_feature: Variant of the nucleotide sequence at SEQ ID NO 24531
taagaactaccgtcttacctgtgctttcatcccaaccacactctatcatcccaagatctagtaaagcttacatgttgtgaagctataggtctatgagttctttacggtgactcaagatagtgcatggtccacgacccttcgtgacacacagctcccaaacaatccgtctcaccgcaacgatggccaaaagtcaaagcaaaggtgatgcgcatgtcgcagttgatttctcaaatcgccgacgtagcgcaaggaatttaaaaacagaagaaaatgaggagaatggcaacgagaaaaaaactcagcgggcgggcaagagagcgcttacacctccaccaccagtgtcagaccgtcggcgcagtaaaagagccaaacccaacgacaccccaaaacaagagaatggtgaggaggaggaaatgaaacatgacatcgtgtcagcaacttcgcccaaagtcaagagagaagccagcactagtccccgcaaagagagcaacaagaccacgctcagcaaagacaaggcagccgacctccaggccaagaaactcaagtcttacggagagttcgcagccgtgcgccagtctccatatccaaacttcaaccacccgtcgcccgaagaatgcaagctggcccataagattcttgcttccatacacggcgaacggcggcgacctgaggaccaaggcaagaagacgacggcgcctgcgcaacgcgcagggtgcggcgattcgccgtcggtgctggatgcgctgatccgcaccattctctcacaaaatacgagcgataagaatagcacacgggccaagctttccatggacaagacttacggtcgctctgacgaatgggcggagattgtgaagggtggtcaggcgaaactacagaagagtattgagagcggtggtctcgcaaacgtgaagtcgaaggttatcttgagtattctcgaccaaacttatgagcgatatgggaagtactccctagatcatctgtttgagaagagcgatgaggaggctatgcgagagatgatttcattcaaaggtgtcggacccaagacagcgagctgtgtgttgttgttttgtctgaggcgagcgagtttcgcggttgatacgcatgtctggcgtattacagggcttttaggttggagacccgcggatgcgagccgtgatcagacgcatgcgcatcttgatgccaagatcccggatgaggataaatatgggcttcatgtgcttttggtgaaacatggaaaggagtgtgatgagtgcaaggcgggcggaaagaatcttggacgatgtgagctgaggaaggccttcaagaaggcgaagatcaagggtgaggccggagagacggtgaaacaggaggagctggagaaaatcaagaaggaagaggaatatgatgattagatggagttcaccacacggatgtacaaaacttgcttcgatttgttggcagctactggatgcggttcttttgtaacattatgaaaagattaggtgtacgattactactatacaattcggttggactcagttcttacaaacagaggagtaagctataatatctatctcaaactttatgtatcaggaactgcactgcagttcttatcgc

SEQ ID NO: 24534 - DNA, 1371 bp, Muscodor strobelii
  misc_feature: SGI cDNA ID NO. 568366
  misc_feature: Reduced expression when VOC is produced
  misc_feature: Encodes the peptide sequence at SEQ ID NO 24535
atggctggggcactgcggtccaaagatatcgtgcttgatggctatggccagatgctagtgacaattttcacacaaattagtttgtgctacattgtcccagatggattccagctacccattgtcatcgacaaattgcaaagaggtctggagatcctggccgatcattttccatggctagctggtcaggttatttgcgaaggtgccagcgagggcatgacgggtgtcttcaaaatcacgccactcgatgcaacgcctcggatgtatgtgaaggacctgactgatgaagcggccatgccctcactccagaatctcagacgagcaggctacccgatgaacgacttggatgaaaagctcatcgcacccaggaacacgagctccgggcggccgggagaaaccattgcggaagtatttcagctacaagtcaacgtggtaaaaggcggtataatcatcacttttcttggccaacaccagtgtatggatggtgttggacaagcgcaggtgatgcgtttattatcgaaagcttgccgaggcgaggaattcacagacgaggaattgaaggcagggaaacgtgatcaacatgatgcggttctctcactcaacgacgatacttggtccgaaggtccggagctcaaatacaacaggagcaagccactctccgctgagcaagcaggaagaccaagaccgaatggcgtgtggtgtcactttagcttctcacccgaatccctagccagtcttaagcaagaagcaactcggactctacccgtcgacacaccatatatctcgacggatgacgcgcttaccgctttcgtctggaaagccatcatgcaagcccgacgcatgggtctccaagatgacgcgtttccgctgctggcccgttcagtagatgttcgcaagtttcttggtgtctctaccgcacatcccggtttcgtgcagtgtatgacatatcacgatgccttcacgatccagcaacttgttcagagcccactcggtgtcgtcgccgccaatctccgctccgccatcgccccggagacttcgactctggcctacggcgcgcggtcccttgcaactttaattagtcgcacgccggataagtcgactgtcagtctactaggcggcgacttcgatatgacccgcgacgttatgatcaattcgtgggtgaaccagaatgcctatgagcttgacttcgggctcgggcttgggactcctgatgcggtccgtcggccgcgattcgacgccttccagggcctcgtctatctgctgccaaaacgacaggatggtgaaataggggtcgccgtttgcttaggcgaggaggatatgctaagattgaaagacgatcaggagtttgttaggcttggtaaaccagtagggtga

SEQ ID NO: 24535 - protein, 456 aa, Muscodor strobelii
  misc_feature: SGI Peptide ID NO. 568366
  misc_feature (1)..(449): Pfam Id: PF02458 Pfam Desc: Transferase family
  misc_feature (17)..(456): NCBI GI: 121701641 Blast Desc: trichothecene 3-O-acetyltransferase, [Aspergillus clavatus NRRL 1] gi|119397228|gb|EAW07659.1| trichothecene 3-O-acetyltransferase, [Aspergillus clavatus NRRL 1]
  misc_feature (9)..(456): NCBI GI: 58865251 Blast Desc: trichothecene 3-O-acetyltransferase [Nectria rigidiuscula]
  misc_feature (6)..(456): NCBI GI: 258566435 Blast Desc: UREG_06929 [Uncinocarpus reesii 1704] gi|237907663|gb|EEP82064.1| UREG_06929 [Uncinocarpus reesii 1704]
  misc_feature (17)..(456): NCBI GI: 240104969 Blast Desc: trichothecene 3-O-acetyltransferase, [Coccidioides posadasii C735 delta SOWgp]
  misc_feature (12)..(456): NCBI GI: 256724504 Blast Desc: [Nectria haematococca mpVI 77-13-4]
  misc_feature (9)..(456): NCBI GI: 4378882 Blast Desc: trichothecene 3-O-acetyltransferase [Fusarium sporotrichioides]
  misc_feature (9)..(456): NCBI GI: 15054404 Blast Desc: trichothecene 3-O-acetyltransferase [Fusarium sporotrichioides]
  misc_feature (17)..(456): NCBI GI: 119195325 Blast Desc: CIMG_02037 [Coccidioides immitis RS]
  misc_feature (5)..(453): NCBI GI: 169786073 Blast Desc: [Aspergillus oryzae RIB40] gi|83776245|dbj|BAE66364.1| protein product [Aspergillus oryzae]
  misc_feature (6)..(456): NCBI GI: 3724330 Blast Desc: trichothecene 3-O-acetyltransferase [Fusarium sporotrichioides]
  misc_feature: Useful for introducing or modulating the production of volatile compounds
MAGALRSKDIVLDGYGQMLVTIFTQISLCYIVPDGFQLPIVIDKLQRGLEILADHFPWLAGQVICEGASEGMTGVFKITPLDATPRMYVKDLTDEAAMPSLQNLRRAGYPMNDLDEKLIAPRNTSSGRPGETIAEVFQLQVNVVKGGIIITFLGQHQCMDGVGQAQVMRLLSKACRGEEFTDEELKAGKRDQHDAVLSLNDDTWSEGPELKYNRSKPLSAEQAGRPRPNGVWCHFSFSPESLASLKQEATRTLPVDTPYISTDDALTAFVWKAIMQARRMGLQDDAFPLLARSVDVRKFLGVSTAHPGFVQCMTYHDAFTIQQLVQSPLGVVAANLRSAIAPETSTLAYGARSLATLISRTPDKSTVSLLGGDFDMTRDVMINSWVNQNAYELDFGLGLGTPDAVRRPRFDAFQGLVYLLPKRQDGEIGVAVCLGEEDMLRLKDDQEFVRLGKPVG

SEQ ID NO: 24536 - DNA, 3927 bp, Muscodor strobelii
  misc_feature: SGI EST ID NO. CUFF.57780.0
  misc_feature: Variant of the nucleotide sequence at SEQ ID NO 24534
tgtgctcttatctgcagccctaccatgaaattcgtctctccaaaccatcggatgccccatcatctacatcaatttcttgtcagtattcttagtgatttgatctattgtccctaatgcttaatttgcagacagccgtaatcattatcgacttgtaggatcttcgtctggcgtctgcttaactatagaccatgcctcttcctagataacaagcaagccacctgaatgccaattatcaccatcgccgacatcgccgccttctattctacgtcatgcacccaacaagtcgctctccagcttcttctggattgctgccgatgcctggctctccttcgtcgtcctgggctctttacagggcccgactgtcctccatgttcaataattccgaggcctatgtccttgcagctttctggctgttcggcctgatcaacaatgtgctctacgttatcatcctctgcgccgcccaggatctcgtcggctccgatatgcccaagggcgtcgtactcctcgccgatgtcctcccgtcgtttttcaccaagctcatcgctccctacttcatccaccgcgtgccctactccgtccgaataatttgcttcgccgtgctatcttcggtcggcatgttgatgatcgccttcacgccctccgacaagtcggtcggtatcaaaatggctggtgttattttcgcgagcttgtccagtggcggcggcgagctcagcttcctcggcctgacacatttctacggacatctgagccttgccgcttggggtagcggcactggtgcggccgggcttgtgggcgctgggttatacgtcttgctcactgactggataggctttagtgtcaagaacagccttcttgcttcagctttcctcccagtcatcatgttgatcagcttcttcctcattctccctaggcgaccacttagggaggcgagtaaggcgcaagagtatcagcctgtaccggacccagacgaggtggaacccgaggatatcgaggatattgtggacgatatagcgacagagaatgctgcttcgagcctgctggctcctggacctgcggttgcttccacagcgctctccgtcaacgagcgagcagattggtggtcaaagatggaagctaatctcaagcgcgcgagctcgttgttcttcccatacatgctcccgctgcttttggtctacgtagctgaatacaccatcaaccagggcgtgtcgcccacgctgctctttccccttgaatcctctcctttcaccgagtatcgagacttctatcccatgtatggatttctctaccagcttggcgtcttcatctcccgttcatccattgccttcatacgagtacgacatctctatttaccttcgtttcttcaggttgggaatctcgcactactgacacttcactcgcttttgaattttattcccaatgtctacatcatcttcctcatcatattttgggaaggtctactgggtggagctgtctacgtcaatacctttgccgagatcatggagaatgtacccatggcagacagagaattcagcctgggcgcgacctcggtaagcgacagcggcggcatttgcatcgctggctttgtaggaatggctatggaggtctggctctgtaactaccaagtctcacatggtagagactggtgcaagaaaatcgaagtctagtctactcaacacacatgtctagctacgaacgcagtctgcctgctagtaccctgggtcgagtatgaatcgcgatgcagcaatatcagagctgctgggttgaggatttagaagatgcggttgagtcccttagagctaggcgtcgagctgcgccgtgcggccttacgcattctccttttctgtgctcagcattaatgagaatctcagcttgagcaacacagtcgttcgcgcccctgcgaagagttatctcaagatgtgtcgtcttccaccatgccgatactttaccgtcgtggtccgacggaacccgccaattctgtctatgcagactatgcgtctgtctccttcggcgcagatgacatgatgagtcataccgatctcgttgcattgttatacaccatcgtctacttagtagtccctccagtccttcctccattatcatgtgtatacgcccctgtcaatcgctttcgtatatcacaggagaattaagtcttcgctacctggcttaagatggctggggcactgcggtccaaagatatcgtgcttgatggctatggccagatgctagtgacaattttcacacaaattagtttgtgctacattgtcccagatggattccagctacccattgtcatcgacaaattgcaaagaggtctggagatcctggccgatcattttccatggctagctggtcaggttatttgcgaaggtgccagcgagggcatgacgggtgtcttcaaaatcacgccactcgatgcaacgcctcggatgtatgtgaaggacctgactgatgaagcggccatgccctcactccagaatctcagacgagcaggctacccgatgaacgacttggatgaaaagctcatcgcacccaggaacacgagctccgggcggccgggagaaaccattgcggaagtatttcagctacaagtcaacgtggtaaaaggcggtataatcatcacttttcttggccaacaccagtgtatggatggtgttggacaagcgcaggtgatgcgtttattatcgaaagcttgccgaggcgaggaattcacagacgaggaattgaaggcagggaaacgtgatcaacatgatgcggttctctcactcaacgacgatacttggtccgaaggtccggagctcaaatacaacaggagcaagccactctccgctgagcaagcaggaagaccaagaccgaatggcgtgtggtgtcactttagcttctcacccgaatccctagccagtcttaagcaagaagcaactcggactctacccgtcgacacaccatatatctcgacggatgacgcgcttaccgctttcgtctggaaagccatcatgcaagcccgacgcatgggtctccaagatgacgcgtttccgctgctggcccgttcagtagatgttcgcaagtttcttggtgtctctaccgcacatcccggtttcgtgcagtgtatgacatatcacgatgccttcacgatccagcaacttgttcagagcccactcggtgtcgtcgccgccaatctccgctccgccatcgccccggagacttcgactctggcctacggcgcgcggtcccttgcaactttaattagtcgcacgccggataagtcgactgtcagtctactaggcggcgacttcgatatgacccgcgacgttatgatcaattcgtgggtgaaccagaatgcctatgagcttgacttcgggctcgggcttgggactcctgatgcggtccgtcggccgcgattcgacgccttccagggcctcgtctatctgctgccaaaacgacaggatggtgaaataggggtcgccgtttgcttaggcgaggaggatatgctaagattgaaagacgatcaggagtttgttaggcttggtaaaccagtagggtgaacccttagactgagcgatttagtgactttcactgtgacaaaggagtaacccaggtctagccacgtgtgatcgcaagcccatggtacagcgcagatattgagtacatccacttggagccggtcgaaccttatagagtaaatatgtattctgcgcgttccacatgcattattactttgaaaaattgattttgcgactgccgcctggacctcttgatctctttaataccctcaatcaccatattccgaggtgttgtaaacacgttttccatctggcttcgcgcctactgcagaattgcgtatcaactcattctatcctgcgaaaggcgctttcgacgggactagattcataaaattggtacgcattcaaatcatttcaccggcctcccgcg

SEQ ID NO: 24537 - DNA, 1395 bp, Muscodor strobelii
  misc_feature: SGI cDNA ID NO. 568367
  misc_feature: Encodes the peptide sequence at SEQ ID NO 24538
atgcacccaacaagtcgctctccagcttcttctggattgctgccgatgcctggctctccttcgtcgtcctgggctctttacagggcccgactgtcctccatgttcaataattccgaggcctatgtccttgcagctttctggctgttcggcctgatcaacaatgtgctctacgttatcatcctctgcgccgcccaggatctcgtcggctccgatatgcccaagggcgtcgtactcctcgccgatgtcctcccgtcgtttttcaccaagctcatcgctccctacttcatccaccgcgtgccctactccgtccgaataatttgcttcgccgtgctatcttcggtcggcatgttgatgatcgccttcacgccctccgacaagtcggtcggtatcaaaatggctggtgttattttcgcgagcttgtccagtggcggcggcgagctcagcttcctcggcctgacacatttctacggacatctgagccttgccgcttggggtagcggcactggtgcggccgggcttgtgggcgctgggttatacgtcttgctcactgactggataggctttagtgtcaagaacagccttcttgcttcagctttcctcccagtcatcatgttgatcagcttcttcctcattctccctaggcgaccacttagggaggcgagtaaggcgcaagagtatcagcctgtaccggacccagacgaggtggaacccgaggatatcgaggatattgtggacgatatagcgacagagaatgctgcttcgagcctgctggctcctggacctgcggttgcttccacagcgctctccgtcaacgagcgagcagattggtggtcaaagatggaagctaatctcaagcgcgcgagctcgttgttcttcccatacatgctcccgctgcttttggtctacgtagctgaatacaccatcaaccagggcgtgtcgcccacgctgctctttccccttgaatcctctcctttcaccgagtatcgagacttctatcccatgtatggatttctctaccagcttggcgtcttcatctcccgttcatccattgccttcatacgagtacgacatctctatttaccttcgtttcttcaggttgggaatctcgcactactgacacttcactcgcttttgaattttattcccaatgtctacatcatcttcctcatcatattttgggaaggtctactgggtggagctgtctacgtcaatacctttgccgagatcatggagaatgtacccatggcagacagagaattcagcctgggcgcgacctcggtaagcgacagcggcggcatttgcatcgctggctttgtaggaatggctatggaggtctggctctgtaactaccaagtctcacatggtagagactggtgcaagaaaatcgaagtctag

SEQ ID NO: 24538 - protein, 464 aa, Muscodor strobelii
  misc_feature: SGI Peptide ID NO. 568367
  misc_feature (42)..(451): Pfam Id: PF02487 Pfam Desc: CLN3 protein
  misc_feature (284)..(451): Pfam Id: PF02487 Pfam Desc: CLN3 protein
  misc_feature (42)..(212): Pfam Id: PF02487 Pfam Desc: CLN3 protein
  misc_feature (5)..(463): NCBI GI: 164423988 Blast Desc: NCU10272 [Neurospora crassa OR74A] gi|164424029|ref|XP_963280.2| NCU08408 [Neurospora crassa OR74A] gi|166227894|sp|Q7SC45.2|BTN1_NEUCR RecName: Full=Protein btn-1;
  misc_feature (16)..(464): NCBI GI: 261354354 Blast Desc: BTN1 [Verticillium albo-atrum VaMs.102]
  misc_feature (4)..(464): NCBI GI: 171677139 Blast Desc: protein product [Podospora anserina] gi|170936637|emb|CAP61296.1| protein product [Podospora anserina]
  misc_feature (5)..(463): NCBI GI: 116205443 Blast Desc: CHGG_10605 [Chaetomium globosum CBS 148.51] gi|126258167|sp|Q2GN49.1|BTN1_CHAGB RecName: Full=Protein BTN1 gi|88176733|gb|EAQ84201.1| CHGG_10605 [Chaetomium globosum CBS
  misc_feature (16)..(463): NCBI GI: 256720898 Blast Desc: [Nectria haematococca mpVI 77-13-4]
  misc_feature (16)..(463): NCBI GI: 39977403 Blast Desc: MGG_06604 [Magnaporthe grisea 70-15] gi|145015950|gb|EDK00440.1| MGG_06604 [Magnaporthe grisea 70-15]
  misc_feature (5)..(460): NCBI GI: 154316534 Blast Desc: BC1G_04198 [Botryotinia fuckeliana B05.10] gi|150845998|gb|EDN21191.1| BC1G_04198 [Botryotinia fuckeliana B05.10]
  misc_feature (7)..(428): NCBI GI: 46137807 Blast Desc: FG10419.1 [Gibberella zeae PH-1] gi|126258168|sp|Q4HX89.1|BTN1_GIBZE RecName: Full=Protein BTN1
  misc_feature (14)..(459): NCBI GI: 242809686 Blast Desc: Golgi integral membrane protein (Cln3), [Talaromyces stipitatus ATCC 10500] gi|218716048|gb|EED15470.1| Golgi integral membrane protein (Cln3), [Talaromyces stipitatus ATCC 10500]
  misc_feature (14)..(459): NCBI GI: 212537311 Blast Desc: Golgi integral membrane protein (Cln3), [Penicillium marneffei ATCC 18224] gi|210068553|gb|EEA22644.1| Golgi integral membrane protein (Cln3), [Penicillium marneffei ATCC 18224]
MHPTSRSPASSGLLPMPGSPSSSWALYRARLSSMFNNSEAYVLAAFWLFGLINNVLYVIILCAAQDLVGSDMPKGVVLLADVLPSFFTKLIAPYFIHRVPYSVRIICFAVLSSVGMLMIAFTPSDKSVGIKMAGVIFASLSSGGGELSFLGLTHFYGHLSLAAWGSGTGAAGLVGAGLYVLLTDWIGFSVKNSLLASAFLPVIMLISFFLILPRRPLREASKAQEYQPVPDPDEVEPEDIEDIVDDIATENAASSLLAPGPAVASTALSVNERADWWSKMEANLKRASSLFFPYMLPLLLVYVAEYTINQGVSPTLLFPLESSPFTEYRDFYPMYGFLYQLGVFISRSSIAFIRVRHLYLPSFLQVGNLALLTLHSLLNFIPNVYIIFLIIFWEGLLGGAVYVNTFAEIMENVPMADREFSLGATSVSDSGGICIAGFVGMAMEVWLCNYQVSHGRDWCKKIEV

SEQ ID NO: 24539 - DNA, 3927 bp, Muscodor strobelii; identical to SEQ ID NO: 24536
  misc_feature: SGI EST ID NO. CUFF.57780.0
  misc_feature: Variant of the nucleotide sequence at SEQ ID NO 24537

SEQ ID NO: 24540 - DNA, 1407 bp, Muscodor strobelii
  misc_feature: SGI cDNA ID NO. 568368
  misc_feature: Encodes the peptide sequence at SEQ ID NO 24541
atgcacccaacaagtcgctctccagcttcttctggattgctgccgatgcctggctctccttcgtcgtcctgggctctttacagggcccgactgtcctccatgttcaataattccgaggcctatgtccttgcagctttctggctgttcgtcgtgatgcaaggcctgatcaacaatgtgctctacgttatcatcctctgcgccgcccaggatctcgtcggctccgatatgcccaagggcgtcgtactcctcgccgatgtcctcccgtcgtttttcaccaagctcatcgctccctacttcatccaccgcgtgccctactccgtccgaataatttgcttcgccgtgctatcttcggtcggcatgttgatgatcgccttcacgccctccgacaagtcggtcggtatcaaaatggctggtgttattttcgcgagcttgtccagtggcggcggcgagctcagcttcctcggcctgacacatttctacggacatctgagccttgccgcttggggtagcggcactggtgcggccgggcttgtgggcgctgggttatacgtcttgctcactgactggataggctttagtgtcaagaacagccttcttgcttcagctttcctcccagtcatcatgttgatcagcttcttcctcattctccctaggcgaccacttagggaggcgagtaaggcgcaagagtatcagcctgtaccggacccagacgaggtggaacccgaggatatcgaggatattgtggacgatatagcgacagagaatgctgcttcgagcctgctggctcctggacctgcggttgcttccacagcgctctccgtcaacgagcgagcagattggtggtcaaagatggaagctaatctcaagcgcgcgagctcgttgttcttcccatacatgctcccgctgcttttggtctacgtagctgaatacaccatcaaccagggcgtgtcgcccacgctgctctttccccttgaatcctctcctttcaccgagtatcgagacttctatcccatgtatggatttctctaccagcttggcgtcttcatctcccgttcatccattgccttcatacgagtacgacatctctatttaccttcgtttcttcaggttgggaatctcgcactactgacacttcactcgcttttgaattttattcccaatgtctacatcatcttcctcatcatattttgggaaggtctactgggtggagctgtctacgtcaatacctttgccgagatcatggagaatgtacccatggcagacagagaattcagcctgggcgcgacctcggtaagcgacagcggcggcatttgcatcgctggctttgtaggaatggctatggaggtctggctctgtaactaccaagtctcacatggtagagactggtgcaagaaaatcgaagtctag

SEQ ID NO: 24541 - protein, 468 aa, Muscodor strobelii
  misc_feature: SGI Peptide ID NO. 568368
  misc_feature (42)..(455): Pfam Id: PF02487 Pfam Desc: CLN3 protein
  misc_feature (288)..(455): Pfam Id: PF02487 Pfam Desc: CLN3 protein
  misc_feature (42)..(216): Pfam Id: PF02487 Pfam Desc: CLN3 protein
  misc_feature (5)..(467): NCBI GI: 164423988 Blast Desc: NCU10272 [Neurospora crassa OR74A] gi|164424029|ref|XP_963280.2| NCU08408 [Neurospora crassa OR74A] gi|166227894|sp|Q7SC45.2|BTN1_NEUCR RecName: Full=Protein btn-1;
  misc_feature (16)..(468): NCBI GI: 261354354 Blast Desc: BTN1 [Verticillium albo-atrum VaMs.102]
  misc_feature (4)..(468): NCBI GI: 171677139 Blast Desc: protein product [Podospora anserina] gi|170936637|emb|CAP61296.1| protein product [Podospora anserina]
  misc_feature (5)..(467): NCBI GI: 116205443 Blast Desc: CHGG_10605 [Chaetomium globosum CBS 148.51] gi|126258167|sp|Q2GN49.1|BTN1_CHAGB RecName: Full=Protein BTN1 gi|88176733|gb|EAQ84201.1| CHGG_10605 [Chaetomium globosum CBS
  misc_feature (16)..(467): NCBI GI: 39977403 Blast Desc: MGG_06604 [Magnaporthe grisea 70-15] gi|145015950|gb|EDK00440.1| MGG_06604 [Magnaporthe grisea 70-15]
  misc_feature (16)..(467): NCBI GI: 256720898 Blast Desc: [Nectria haematococca mpVI 77-13-4]
  misc_feature (5)..(464): NCBI GI: 154316534 Blast Desc: BC1G_04198 [Botryotinia fuckeliana B05.10] gi|150845998|gb|EDN21191.1| BC1G_04198 [Botryotinia fuckeliana B05.10]
  misc_feature (7)..(432): NCBI GI: 46137807 Blast Desc: FG10419.1 [Gibberella zeae PH-1] gi|126258168|sp|Q4HX89.1|BTN1_GIBZE RecName: Full=Protein BTN1
  misc_feature (14)..(463): NCBI GI: 242809686 Blast Desc: Golgi integral membrane protein (Cln3), [Talaromyces stipitatus ATCC 10500] gi|218716048|gb|EED15470.1| Golgi integral membrane protein (Cln3), [Talaromyces stipitatus ATCC 10500]
  misc_feature (5)..(465): NCBI GI: 156043317 Blast Desc: SS1G_10662 [Sclerotinia sclerotiorum 1980] gi|154695049|gb|EDN94787.1| SS1G_10662 [Sclerotinia sclerotiorum 1980]
MHPTSRSPASSGLLPMPGSPSSSWALYRARLSSMFNNSEAYVLAAFWLFVVMQGLINNVLYVIILCAAQDLVGSDMPKGVVLLADVLPSFFTKLIAPYFIHRVPYSVRIICFAVLSSVGMLMIAFTPSDKSVGIKMAGVIFASLSSGGGELSFLGLTHFYGHLSLAAWGSGTGAAGLVGAGLYVLLTDWIGFSVKNSLLASAFLPVIMLISFFLILPRRPLREASKAQEYQPVPDPDEVEPEDIEDIVDDIATENAASSLLAPGPAVASTALSVNERADWWSKMEANLKRASSLFFPYMLPLLLVYVAEYTINQGVSPTLLFPLESSPFTEYRDFYPMYGFLYQLGVFISRSSIAFIRVRHLYLPSFLQVGNLALLTLHSLLNFIPNVYIIFLIIFWEGLLGGAVYVNTFAEIMENVPMADREFSLGATSVSDSGGICIAGFVGMAMEVWLCNYQVSHGRDWCKKIEV

SEQ ID NO: 24542 - DNA, 3927 bp, Muscodor strobelii; identical to SEQ ID NO: 24536
  misc_feature: SGI EST ID NO. CUFF.57780.0
  misc_feature: Variant of the nucleotide sequence at SEQ ID NO 24540

SEQ ID NO: 24543 - DNA, 834 bp, Muscodor strobelii
  misc_feature: SGI cDNA ID NO. 568369
  misc_feature: Encodes the peptide sequence at SEQ ID NO 24544
atgtctgaagagtcggccccaaaacgccagaaatcagccaaggatgttccgtatgaactcatctactggccgagtattccgggccgcggtgagcacgtccggttggcacttgaagagagcggcgcaacctatacagacacggcacatttagagaaaggtgtcgaccaagtgcttgcccagatttccgacgagaacattggcgacatattaaatccaccacctctcgcaccaccaattttgcgacatggcgacctgctcattagccagaccccaaacatcctcttgtaccttggcccacggctaggacttgtgcccacagcggaagaagcagacgggaattcggacacgttgtatcatgtcaacgccctggctctgacggcacttgacggtcttagtaacgaagtccacgactgtcaccatccaattgcgtcaggactctactacgaagaccaaaaagacgaagcattgcgaaagagtcaagacttcgttaagaatcggctacccaaattcctaggctatttcgaaagggttctacagggtagagcttcggggaagggaccgtggttgtatggcggacagttgacgtatgcggatctcgtgctgttccaggtgctggacggaactaagttcgcattccgtagagctatagcggcggcggagaagttcgggaaatacacgaaagtgtttgaattgtacagcgcggtgaaagaacggcccaggatcaaggagtatctcgagagcgacaggagacaggcatactctgaaggcatctacagatactaccccgaattggacctcgatccggaggaggagcccgtcgccacgctgccgtaa

SEQ ID NO: 24544 - protein, 277 aa, Muscodor strobelii
  misc_feature: SGI Peptide ID NO. 568369
  misc_feature (135)..(239): Pfam Id: PF00043 Pfam Desc: Glutathione S-transferase, C-terminal domain
  misc_feature (1)..(268): NCBI GI: 116179728 Blast Desc: CHGG_00492 [Chaetomium globosum CBS 148.51] gi|88184789|gb|EAQ92257.1| CHGG_00492 [Chaetomium globosum CBS 148.51]
  misc_feature (1)..(267): NCBI GI: 171691647 Blast Desc: protein product [Podospora anserina] gi|170945772|emb|CAP72572.1| protein product [Podospora anserina]
  misc_feature (2)..(267): NCBI GI: 28950064 Blast Desc: conserved [Neurospora crassa]
  misc_feature (2)..(267): NCBI GI: 164425285 Blast Desc: NCU04676 [Neurospora crassa OR74A] gi|157070866|gb|EAA29983.2| NCU04676 [Neurospora crassa OR74A]
  misc_feature (5)..(265): NCBI GI: 261354641 Blast Desc: glutathione S-transferase [Verticillium albo-atrum VaMs.102]
  misc_feature (17)..(265): NCBI GI: 238508282 Blast Desc: glutathione S-transferase family protein, [Aspergillus flavus NRRL3357] gi|220688857|gb|EED45209.1| glutathione S-transferase family protein, [Aspergillus flavus NRRL3357]
  misc_feature (17)..(265): NCBI GI: 169784552 Blast Desc: [Aspergillus oryzae RIB40] gi|83775484|dbj|BAE65604.1| protein product [Aspergillus oryzae]
  misc_feature (7)..(264): NCBI GI: 46116630 Blast Desc: FG04157.1 [Gibberella zeae PH-1]
  misc_feature (18)..(265): NCBI GI: 256726160 Blast Desc: NECHADRAFT_62085 [Nectria haematococca mpVI 77-13-4]
  misc_feature (18)..(277): NCBI GI: 145615364 Blast Desc: MGG_13106 [Magnaporthe grisea 70-15] gi|145022205|gb|EDK06225.1| MGG_13106 [Magnaporthe grisea 70-15]
  misc_feature (16)..(244): SWISSPROT Homolog: EC 2.5.1.18 Glutathione transferase
MSEESAPKRQKSAKDVPYELIYWPSIPGRGEHVRLALEESGATYTDTAHLEKGVDQVLAQISDENIGDILNPPPLAPPILRHGDLLISQTPNILLYLGPRLGLVPTAEEADGNSDTLYHVNALALTALDGLSNEVHDCHHPIASGLYYEDQKDEALRKSQDFVKNRLPKFLGYFERVLQGRASGKGPWLYGGQLTYADLVLFQVLDGTKFAFRRAIAAAEKFGKYTKVFELYSAVKERPRIKEYLESDRRQAYSEGIYRYYPELDLDPEEEPVATLP

SEQ ID NO: 24545 - DNA, 1153 bp, Muscodor strobelii
  misc_feature: SGI EST ID NO. CUFF.57782.0
  misc_feature: Variant of the nucleotide sequence at SEQ ID NO 24543
aagctatcatacgaccaaacaacttccacaaccctcataagactaaggacaaaacaacttaaaccaaaagtcttttacaaattcccaaagccttctcaccatgtctgaagagtcggccccaaaacgccagaaatcagccaaggatgttccgtatgaactcatctactggccgagtattccgggccgcggtgagcacgtccggttggcacttgaagagagcggcgcaacctatacagacacggcacatttagagaaaggtgtcgaccaagtgcttgcccagatttccgacgagaacattggcgacatattaaatccaccacctctcgcaccaccaattttgcgacatggcgacctgctcattagccagaccccaaacatcctcttgtaccttggcccacggctaggacttgtgcccacagcggaagaagcagacgggaattcggacacgttgtatcatgtcaacgccctggctctgacggcacttgacggtcttagtaacgaagtccacgactgtcaccatccaattgcgtcaggactctactacgaagaccaaaaagacgaagcattgcgaaagagtcaagacttcgttaagaatcggctacccaaattcctaggctatttcgaaagggttctacagggtagagcttcggggaagggaccgtggttgtatggcggacagttgacgtatgcggatctcgtgctgttccaggtgctggacggaactaagttcgcattccgtagagctatagcggcggcggagaagttcgggaaatacacgaaagtgtttgaattgtacagcgcggtgaaagaacggcccaggatcaaggagtatctcgagagcgacaggagacaggcatactctgaaggcatctacagatactaccccgaattggacctcgatccggaggaggagcccgtcgccacgctgccgtaatgatacatacatagtctagagtcactaagttgtaaaagtttcatatggctctttgtcgttctgatgttggatatatgaatactgtaggtgggtaatatacaacaagcaatctgcatacgataccagtagtgtcttttaatgttggtgtgggttacaccagcttctgcgaaataatcaacactttatatcattcatcatcagagcgaagacaaaccaaac

SEQ ID NO: 24546 - DNA, 1887 bp, Muscodor strobelii
  misc_feature: SGI cDNA ID NO. 568370
  misc_feature: Reduced expression when VOC is produced
  misc_feature: Encodes the peptide sequence at SEQ ID NO 24547
atggatattccagcaagatactcccgccgggagcctggcgcacccccaccggccatctacattgaagataaatctgggcgattcagttccaacttctcgccgtcgtctgtgccaatgtcgatacccaaccaacggaggctggccgaggacgacgcccctccaccgttgccgcccccgagatttctccctgggatggggcctagcgcgacccatgaccgcttcccgtccattgactcgaacgctagcttcgacagcttcaggcgtgagagcgaaggcgatcagctgcggttcaaacgacaggatgtgagacctcgtccgcagcatagggatgagggctaccacagtctggcctcgaccatctcgtctgtaggatcgcaagattcgcttccccgcaagatatttatgtctcatgatcaatatcatctaaataaatcttccgcaagtgattatgataaccatctgctgaagaagttagattcccggaggacattcggaaaccgctctccgccccggcgttctggccttgcctcaaccttcgccgatggctattcacaaaggaacccagctgagaatcgactgcatccgaatgtgccaccgctttccctcccagtgcgcttgaacaaccagtccctgatcgattctcccgggcgcttcaccgagactccgatacaatcgacgggatcaccgcgagccggaccacactacccactgagcaatgcggattatcgctcaccagtcgagtcgagcgacatggatcgctccccgctctacaggtcaagacgaaataatagtgatgatgcaaacatgtccacgccaggtagctatgacgcggttgacgaaagcgattttcccatggaagaaacatcgggcatccgaaaactaatcatcgacgattcccggtcattacaagattacccagccataggacaaaagagacgtgcgtcgtctcctcctagcggggacagtccgccgtcaagtcttgttgcatcaaacgatcttggccggcgccgcgacgttactgcgaggggatcgcctgcgcctcggctcagcgtgattccacccatctccaccataccttcggtcgtctctgtgggacgcacaaacccatatatcccacccgtgtcactcaacacgagcatttcgagcttgagctcacttgggggtagatcgcccagtggtctatcatctggaggactgtctccagttgaccccatgaccagttcgccttatactacacctatctcgttaaatcatgcttcgtgcgcgccattcgcttatggtccacaccaacgaaacctgagcaatgatgataggcagcttgcatcgccccgcagggtgagcgaagtgccaaaaactagcatttcaaagatacaggggagttatttcatgtgtgaatgctgtccaaaaaagccaaagaagttcgaaactgcggaagaattgagcgcacacgaagcagagaagcaatacgagtgctctttttgtggaaatcgtttcaaaaataaaaatgaagccgaacgccaccagaacagtctccatgtgaggcgacacagctggtcctgctcggcgcttctcattgcggggcttgatagagcattccatgaaagtacgagtagacctggcgaagtggatatctgtggttactgtggtgaagaatttggtcgcaatggtggagtcgcgcgcacacgttatgtgaccgaagaagattggaacgagcggttgcgccatcttcaagaagcacacaaattccgagaatgcaattctagcaagaaattcttccgggcggaccattttcgccaacatctcaagcatagccatgctggaacgagtgggaaatggactaacatgctagagaatgcttgcatgttggatgaggagccgccacgatga

SEQ ID NO: 24547 - protein, 628 aa, Muscodor strobelii
  misc_feature: SGI Peptide ID NO. 568370
  misc_feature (489)..(512): Pfam Id: PF00096 Pfam Desc: Zinc finger, C2H2 type
  misc_feature (109)..(626): NCBI GI: 46138005 Blast Desc: FG10517.1 [Gibberella zeae PH-1]
  misc_feature (97)..(627): NCBI GI: 116194238 Blast Desc: CHGG_03717 [Chaetomium globosum CBS 148.51] gi|88179630|gb|EAQ87098.1| CHGG_03717 [Chaetomium globosum CBS 148.51]
  misc_feature (100)..(625): NCBI GI: 171678261 Blast Desc: protein product [Podospora anserina] gi|170937200|emb|CAP61857.1| protein product [Podospora anserina]
  misc_feature (238)..(626): NCBI GI: 164423610 Blast Desc: NCU08159 [Neurospora crassa OR74A] gi|157070165|gb|EAA30415.2| [Neurospora crassa OR74A]
  misc_feature (109)..(627): NCBI GI: 156059912 Blast Desc: SS1G_03969 [Sclerotinia sclerotiorum 1980] gi|154701755|gb|EDO01494.1| SS1G_03969 [Sclerotinia sclerotiorum 1980]
  misc_feature (275)..(626): NCBI GI: 145608054 Blast Desc: MGG_09701 [Magnaporthe grisea 70-15] gi|145015519|gb|EDK00056.1| MGG_09701 [Magnaporthe grisea 70-15]
  misc_feature (242)..(628): NCBI GI: 189196630 Blast Desc: conserved [Pyrenophora tritici-repentis Pt-1C-BFP] gi|187980532|gb|EDU47158.1| conserved [Pyrenophora tritici-repentis Pt-1C-BFP]
  misc_feature (390)..(627): NCBI GI: 154292244 Blast Desc: BC1G_14205 [Botryotinia fuckeliana B05.10] gi|150846225|gb|EDN21418.1| BC1G_14205 [Botryotinia fuckeliana B05.10]
  misc_feature (146)..(624): NCBI GI: 261192591 Blast Desc: C2H2 finger domain-containing protein [Ajellomyces dermatitidis SLH14081] gi|239589184|gb|EEQ71827.1| C2H2 finger domain-containing protein [Ajellomyces dermatitidis SLH14081]
  misc_feature (146)..(624): NCBI GI: 239610246 Blast Desc: C2H2 finger domain-containing protein [Ajellomyces dermatitidis ER-3]
  misc_feature: Useful for introducing or modulating the production of volatile compounds
MDIPARYSRREPGAPPPAIYIEDKSGRFSSNFSPSSVPMSIPNQRRLAEDDAPPPLPPPRFLPGMGPSATHDRFPSIDSNASFDSFRRESEGDQLRFKRQDVRPRPQHRDEGYHSLASTISSVGSQDSLPRKIFMSHDQYHLNKSSASDYDNHLLKKLDSRRTFGNRSPPRRSGLASTFADGYSQRNPAENRLHPNVPPLSLPVRLNNQSLIDSPGRFTETPIQSTGSPRAGPHYPLSNADYRSPVESSDMDRSPLYRSRRNNSDDANMSTPGSYDAVDESDFPMEETSGIRKLIIDDSRSLQDYPAIGQKRRASSPPSGDSPPSSLVASNDLGRRRDVTARGSPAPRLSVIPPISTIPSVVSVGRTNPYIPPVSLNTSISSLSSLGGRSPSGLSSGGLSPVDPMTSSPYTTPISLNHASCAPFAYGPHQRNLSNDDRQLASPRRVSEVPKTSISKIQGSYFMCECCPKKPKKFETAEELSAHEAEKQYECSFCGNRFKNKNEAERHQNSLHVRRHSWSCSALLIAGLDRAFHESTSRPGEVDICGYCGEEFGRNGGVARTRYVTEEDWNERLRHLQEAHKFRECNSSKKFFRADHFRQHLKHSHAGTSGKWTNMLENACMLDEEPPR

SEQ ID NO: 24548 - DNA, 3762 bp, Muscodor strobelii
  misc_feature: SGI EST ID NO. CUFF.58005.0
  misc_feature: Variant of the nucleotide sequence at SEQ ID NO 24546
tctgcctatacgtccttctcatgtacggctgccccccagacgtccaccccgaaagtccaccgccgccttacctgagtctctctgtacctctcctccaatatcccacggaaggttattagtataccgttgacccccctcttgctcctgctcctgcttccacttctgcctctgcctctacctctgccttttgagtctattgtgcagtctgcaggtgtccatggggccacggaccggtctgcagcctcatttccctgtacgaagctcaaggacgcagatggtagacatatcataacagcacagcccgagactttcactctcactacacccccgtcacgtctatggtctcgggtctcgggtcttccgcttgctccacggactcgtcaagtcttgcctccgccgtataccacatcatatctcctgtataccaccttgtacccaagtcctgcccgtccagtttccagcaactcccacgatcgtatcagtcgtagagcgagctcttctggccatgacatttgttcttctatcccaataacatacaacggatactcgtgcgagtgtcttcgacggcgtagaatttgttggtctgacagacgtcacctcggctcttccgcttgccactcgaatcctgcaaccctgactcctcgccctgcgcccaaggtgtccccgccatcagctacgagcgacgagtgtgtgatctagtatccaagctccctcaatgattcactacggagccttgataattgcaaccagaaattgtcccgaagtgtccaccgaatcggtcctcgtaccactgtttggtgctgcggcaactgagttggaccggagcaattacaccaatcaggagctcgaattggaaggttagattttgggaggggaaaaaaagaagacaacacatagggcgacacgggaagacgaaggaagataaacaatggatattccagcaagatactcccgccgggagcctggcgcacccccaccggccatctacattgaagataaatctgggcgattcagttccaacttctcgccgtcgtctgtgccaatgtcgatacccaaccaacggaggctggccgaggacgacgcccctccaccgttgccgcccccgagatttctccctgggatggggcctagcgcgacccatgaccgcttcccgtccattgactcgaacgctagcttcgacagcttcaggcgtgagagcgaaggcgatcagctgcggttcaaacgacaggatgtgagacctcgtccgcagcatagggatgagggctaccacagtctggcctcgaccatctcgtctgtaggatcgcaagattcgcttccccgcaagatatttatgtctcatgatcaatatcatctaaataaatcttccgcaagtgattatgataaccatctgctgaagaagttagattcccggaggacattcggaaaccgctctccgccccggcgttctggccttgcctcaaccttcgccgatggctattcacaaaggaacccagctgagaatcgactgcatccgaatgtgccaccgctttccctcccagtgcgcttgaacaaccagtccctgatcgattctcccgggcgcttcaccgagactccgatacaatcgacgggatcaccgcgagccggaccacactacccactgagcaatgcggattatcgctcaccagtcgagtcgagcgacatggatcgctccccgctctacaggtcaagacgaaataatagtgatgatgcaaacatgtccacgccaggtagctatgacgcggttgacgaaagcgattttcccatggaagaaacatcgggcatccgaaaactaatcatcgacgattcccggtcattacaagattacccagccataggacaaaagagacgtgcgtcgtctcctcctagcggggacagtccgccgtcaagtcttgttgcatcaaacgatcttggccggcgccgcgacgttactgcgaggggatcgcctgcgcctcggctcagcgtgattccacccatctccaccataccttcggtcgtctctgtgggacgcacaaacccatatatcccacccgtgtcactcaacacgagcatttcgagcttgagctcacttgggggtagatcgcccagtggtctatcatctggaggactgtctccagttgaccccatgaccagttcgccttatactacacctatctcgttaaatcatgcttcgtgcgcgccattcgcttatggtccacaccaacgaaacctgagcaatgatgataggcagcttgcatcgccccgcagggtgagcgaagtgccaaaaactagcatttcaaagatacaggggagttatttcatgtgtgaatgctgtccaaaaaagccaaagaagttcgaaactgcggaagaattgaggtttgtcaccctgcatttatagtccagactcccgatgctaagttccaattatgtagcgcacacgaagcagagaagcaatacgagtgctctttttgtggaaatcgtttcaaaaataaaaatgaagccgaacgccaccagaacagtctccatgtgaggcgacacagctggtcctgctcggcgcttctcattgcggggcttgatagagcattccatgaaagtacgagtagacctggcgaagtggatatctgtggttactgtggtgaagaatttggtcgcaatggtggagtcgcgcgcacacgttatgtgaccgaagaagattggaacgagcggttgcgccatcttcaagaagcacacaaattccgagaatgcaattctagcaagaaattcttccgggcggaccattttcgccaacatctcaagcatagccatgctggaacgagtgggaaatggactaacatgctagagaatgcttgcatgttggatgaggagccgccacgatgacgaaaccacggttcagacctcgacgttcacctcacggttttcgcttaaacaaacggacttcccgacatcgctactaatgtctaccagctgctttgcgggcacagaatccataagcaaaatttgtgtcgcgaatgcgaggcacataccacaaaaacatgtcatgggcaacaagtggaaagatgtctttcttcatgcaagctccacatttatgcggcaggacctgctatttaaatggtggatttacgagacgtatcgtgctgacaacacgccctattgtttgctctaatttggtcaggtcggagttgcagacacatttggtcaactatttgatgcttcaagggcatttcgacgaagttggtgtgaagctgcatcgttgtctcacagttctgtgcagcaccgcatccgaagtcccggaaatgacggaaagtcgtgaagctaggatcgcaattgcactagacggcctctttaggcaacgtcataccaggtaaagcggataagctgaccgcgctgacgccgcgctgacgcctgtactgtattgagacggcctcaatctttgattccaacgaggttcatgaccaatcacgcattcacgagcataataacttctcttcaagatcgacgtagatggggatcttacataacatgtcatatgaactggcatttcaacggcgcaagtggttcacacttccttttggtttcttcatatacccatatccaaaagcggtaggaggggatatctcatgcatggaaatatcaaaatgtcagcatacaagcgcgactgtcactaagtagaaatgatcattccaagtttctaaaacgagatagcggaatgagggccaaataaacccaacgaaaagttcaacacaaaatacaatcaattctgaccgtcca

SEQ ID NO: 24549 - DNA, 924 bp, Muscodor strobelii
  misc_feature: SGI cDNA ID NO. 568371
  misc_feature: Encodes the peptide sequence at SEQ ID NO 24550
atgtcaaagatatcaggtgttgacaatctctttgtcggagggatctgggttttaaatatccaaggctacaggaaaaacctctacgagaataatgtatctcacgtactctctgccatcaaatggtcttttgatgattggggcgaggaggcgaaacgcttcaagcacatgagcatcgatatagatgatgatgagtcatcagatatactgggacatttctcttctgcagttcgcttcatagacagcggactgtttccggaagggagcgaaagtccatctacgcatggtgtatatgtgcattgtgcaatgggcaaatcacgttccgtcagctgtgtggtcgcatatcttttatacaagtacccctaccggtttgggagcaccaaaccgataaggtcatccagttcggctcagcagcggcgagccacagctaagaaagccattgaaagtgcagtagaagtagtgcgcgaaacacgagcgggtgctgagcctaaccctgggttcatgcgccaactggagctctggtgggagatggaatgcccagcagacgacgatggggctgtcgagcggcatcccatctatcaaaaatggctttacgaccgaatgcttcaggacgctcgagatatgaggatggcacccgataccgaacaaatccgctttgaagatgaagtcagtgataagctggctgagccgaagaaccaggaggttcggccagatggaaaagaggccgcagatcctacttgtgcccacatattcatcgagacgctgtcctggatgcgtcctacactcgaggaaggcacgcttgatggacgattgtgggtggtccccgccttttctttgaaccgatcccgagtggatgaggtctcgtcacggcctttcggagcagatgcaatccgcatgccccccggcagccggaacggtagcctatag

SEQ ID NO: 24550 - protein, 307 aa, Muscodor strobelii
  misc_feature: SGI Peptide ID NO. 568371
  misc_feature (1)..(176): Pfam Id: PF00782 Pfam Desc: Dual specificity phosphatase, catalytic domain
  misc_feature (29)..(119): Pfam Id: PF00782 Pfam Desc: Dual specificity phosphatase, catalytic domain
  misc_feature (1)..(303): NCBI GI: 39963071 Blast Desc: MGG_09700 [Magnaporthe grisea 70-15] gi|145015520|gb|EDK00057.1| MGG_09700 [Magnaporthe grisea 70-15]
  misc_feature (1)..(307): NCBI GI: 46138003 Blast Desc: FG10516.1 [Gibberella zeae PH-1]
  misc_feature (1)..(302): NCBI GI: 116194240 Blast Desc: CHGG_03718 [Chaetomium globosum CBS 148.51] gi|88179631|gb|EAQ87099.1| CHGG_03718 [Chaetomium globosum CBS 148.51]
  misc_feature (1)..(290): NCBI GI: 85093231 Blast Desc: NCU08158 [Neurospora crassa OR74A] gi|28921097|gb|EAA30414.1| conserved [Neurospora crassa OR74A]
  misc_feature (1)..(302): NCBI GI: 256734959 Blast Desc: NECHADRAFT_75737 [Nectria haematococca mpVI 77-13-4]
  misc_feature (1)..(307): NCBI GI: 171678263 Blast Desc: protein product [Podospora anserina] gi|170937201|emb|CAP61858.1| protein product [Podospora anserina]
  misc_feature (2)..(305): NCBI GI: 156059902 Blast Desc: SS1G_03964 [Sclerotinia sclerotiorum 1980] gi|154701750|gb|EDO01489.1| SS1G_03964 [Sclerotinia sclerotiorum 1980]
  misc_feature (2)..(307): NCBI GI: 154292232 Blast Desc: BC1G_14199 [Botryotinia fuckeliana B05.10] gi|150846219|gb|EDN21412.1| BC1G_14199 [Botryotinia fuckeliana B05.10]
  misc_feature (1)..(303): NCBI GI: 169773799 Blast Desc: [Aspergillus oryzae RIB40] gi|83769229|dbj|BAE59366.1| protein product [Aspergillus oryzae]
  misc_feature (1)..(304): NCBI GI: 121706696 Blast Desc: dual specificity phosphatase, [Aspergillus clavatus NRRL 1] gi|119399747|gb|EAW10173.1| dual specificity phosphatase, [Aspergillus clavatus NRRL 1]
  misc_feature (11)..(285): SWISSPROT Homolog: EC 3.1.3.48 Protein-tyrosine-phosphatase
MSKISGVDNLFVGGIWVLNIQGYRKNLYENNVSHVLSAIKWSFDDWGEEAKRFKHMSIDIDDDESSDILGHFSSAVRFIDSGLFPEGSESPSTHGVYVHCAMGKSRSVSCVVAYLLYKYPYRFGSTKPIRSSSSAQQRRATAKKAIESAVEVVRETRAGAEPNPGFMRQLELWWEMECPADDDGAVERHPIYQKWLYDRMLQDARDMRMAPDTEQIRFEDEVSDKLAEPKNQEVRPDGKEAADPTCAHIFIETLSWMRPTLEEGTLDGRLWVVPAFSLNRSRVDEVSSRPFGADAIRMPPGSRNGSL

SEQ ID NO: 24551 - DNA, 3078 bp, Muscodor strobelii
  misc_feature: SGI EST ID NO. CUFF.58029.1
  misc_feature: Variant of the nucleotide sequence at SEQ ID NO 24549
cgccggcatgttttcagtggagctgtacgggcgtcaaattgctggttatcaggcaacgttcgccggttaccgaactactgtactgttacaaacattgatgctcgatatattgatgatgtaagcttggtgccgctcccgttttatgctcagcagaaaggaacactgtttccgctcggtcatctgagcttcacgagacattatacaagtacactttgcctgaacattggtaatcccgacgacagtcaacctgcccattatgcggtcaattttggatagtgagacacgactgacgaattagcctggctagagtggctgagacatatcacgtgactcagccctgcaacttggggcctacggaacccgccctgcgcaaatccggcgacggaattgtagcactcccgttctacccctctgctttaggtaggaacctgccttgtctcaggtctactaggtacgcgattgctggtccactggacacccatgcatgctatattttcctcattaagctacagaccacccgtcaatctgcaaaggcaaactgttggtacttgacgaaacaaacagacttcgtatctagcaaggcaagctctagccaaaatatcgcctgctccactgtgcgagcgatgcatcattagacttatggtgagcacaacatcgagaggcttgcgctctagatcctcagacttttcaatctattcactagtaattcttcagaaactacaggcagtttctattggaaaaaatgtccgcaaatacagtcagctcgtcgtcactgatgtcaaagatatcaggtgttgacaatctctttgtcggagggatctgggttttaaatatccaaggctacaggaaaaacctctacgagaataatgtatctcacgtactctctgccatcaaatggtcttttgatgattggggcgaggaggcgaaacgcttcaagcacatgagcatcgatatagatgatgatgagtcatcagatatactgggacatttctcttctgcagttcgcttcatagacagcggactgtttccggaagggagcgaaagtccatctacgcatggtgtatatgtgcattgtgcaatgggcaaatcacgttccgtcagctgtgtggtcgcatatcttttatacaagtacccctaccggtttgggagcaccaaaccgataaggtcatccagttcggctcagcagcggcgagccacagctaagaaagccattgaaagtgcagtagaagtagtgcgcgaaacacgagcgggtgctgagcctaaccctgggttcatgcgccaactggagctctggtgggagatggaatgcccagcagacgacgatggggctgtcgagcggcatcccatctatcaaaaatggctttacgaccgaatgcttcaggacgctcgagatatgaggatggcacccgataccgaacaaatccgctttgaagatgaagtcagtgataagctggctgagccgaagaaccaggaggttcggccagatggaaaagaggttcggtgcaaaaaatgcagacgaactctcgtcacgcctcagttccttgtgtctcatactccgactggacaggccgcagatcctacttgtgcccacatattcatcgagacgctgtcctggatgcgtcctacactcgaggaaggcacgcttgatggacgattggtttgtccaaattcaaaatgcggtgcaacaatcggacgatttgcatggcaaggattacattgtacatgtaagcagtgggtggtccccgccttttctttgaaccgatcccgagtggatgaggtctcgtcacggcctttcggagcagatgcaatccgcatgccccccggcagccggaacggtagcctatagcatctttatcgtcgcaatacgcgtttgaggatagaattgaatagccccaagtcgttgtaagccatgcgtcggcatacatatgcttcatcatacctatgattcgacaacacaggtggttgctgaggccatctccgatcgtcattgtcgctgtaattgaacaaaatatgatgcgccaacaaggctcacatggatcgtctcaaagtggctggaacacatttgccgtgccttgtgctgcaggtgtatatccgcccataccgtgaggccgccttacgttcctatgtatatggacgaggatagcaggggacatcaccaatgcagatgactgaagtacaaatccatgaaaaccttatctcttcccgcggatagcggctccaggcgcctacttccgcgatcttaaagccctgcgatgcgtctcgacatggtttcggtattccaaatctcacgcatactctcaagggaaattatgctgtcatgttcggtcattcccgaaagctgtcaatagtgaatctcatcggactgatcgtacagaacatttaataaccacgagaagggtgtctcctctgatccttgatcgtaaagctgctaatttgcaggtaaacttatgctttcgacacatatatcttatcacggatggcccacgtcttcctgtagagctgacagatcgctcaaagtcccgcccaacgcgggggatcgccttgctccttgcgtttgcggcgtgggcatgatagacggcatccccgaggacccatcttggaatactggcctagtgtccgtgcaggtagcttccgtagtgccggtgtcgagggctggccatgtctgtgaaaggattgtaatagtatgacgtcctccgcggagacaacgcggactcagagggattgtcgtacgcacgcgtcgcttcgtcaaatccatcgcgaataatccttcttataagtacaagtaggaaaattgcttagaggcaaaatacacgatcatgatcatcaattcttaatcgaagcttgtttaaaggcttgacatgtatttacttgcaggcggccgcgcaagtaagggagcagtcgtcgactattcctgcgtcacctcttcgggttatccgaaaatctacgactggccacagcgatatgctcttagctaatagataattactatccgtcattgaattgttcagttatgctctgtagaattagaacaggaaaattgtttcgagagccggaattaaccatctgtttatacctgat

SEQ ID NO: 24552 - DNA, 564 bp, Muscodor strobelii
  misc_feature: SGI cDNA ID NO. 568372
  misc_feature: Encodes the peptide sequence at SEQ ID NO 24553
atgtcgcttcctaatatatggcatcaccgcaaggtcgccgacacctctgctaaggggtgtgagatctgttataagccaagtacaagtgttctcgtcactccggataaacaagatttcttctacgtctgtcctgctcatctcaaagatagaggattcgcctctcctattgttgaccatgaggccatcgcagcaaggaagaagaaagagatggatgaagaggtcgccaggttgaagaaggagtacgaagaaaaacagcgtaaaaagaacgaaaaggagaaacagaaggacaaagacaaagacaagaaagacggcaaagaggaagatgattcgaaagacgacaaggctacgaagaaggatggcgacaagtctgaagacaaggacaacgccaaggctgataccaccgcgcaacaaaatactgaagaggaaccgcgtgtatttgctttgcagagggcttttcatcaacaacggatcgacaaaagaaggcaagccgacatggcaaagaggaatcgggagcgtctcagcaatccttcgttctttccttccgttcccaaagatcttccttga

SEQ ID NO: 24553 - protein, 187 aa, Muscodor strobelii
  misc_feature: SGI Peptide ID NO. 568372
  misc_feature (5)..(184): Pfam Id: PF08432 Pfam Desc: Fungal protein of function (DUF1742)
  misc_feature (1)..(184): NCBI GI: 240280070 Blast Desc: conserved [Ajellomyces capsulatus H143]
  misc_feature (3)..(187): NCBI GI: 145608036 Blast Desc: MGG_09711 [Magnaporthe grisea 70-15] gi|145015508|gb|EDK00045.1| MGG_09711 [Magnaporthe grisea 70-15]
  misc_feature (1)..(184): NCBI GI: 261194886 Blast Desc: conserved [Ajellomyces dermatitidis SLH14081] gi|239587719|gb|EEQ70362.1| conserved [Ajellomyces dermatitidis SLH14081]
  misc_feature (1)..(184): NCBI GI: 239610785 Blast Desc: conserved [Ajellomyces dermatitidis ER-3]
  misc_feature (2)..(187): NCBI GI: 154292230 Blast Desc: BC1G_14198 [Botryotinia fuckeliana B05.10] gi|150846218|gb|EDN21411.1| BC1G_14198 [Botryotinia fuckeliana B05.10]
  misc_feature (2)..(187): NCBI GI: 156059900 Blast Desc: SS1G_03963 [Sclerotinia sclerotiorum 1980] gi|154701749|gb|EDO01488.1| SS1G_03963 [Sclerotinia sclerotiorum 1980]
  misc_feature (3)..(184): NCBI GI: 238838668 Blast Desc: conserved [Microsporum canis CBS 113480]
  misc_feature (1)..(183): NCBI GI: 121706694 Blast Desc: conserved [Aspergillus clavatus NRRL 1] gi|119399746|gb|EAW10172.1| conserved [Aspergillus clavatus NRRL 1]
  misc_feature (1)..(187): NCBI GI: 171678265 Blast Desc: protein product [Podospora anserina] gi|170937202|emb|CAP61859.1| protein product [Podospora anserina]
  misc_feature (1)..(187): NCBI GI: 255949932 Blast Desc: Pc22g18280 [Penicillium chrysogenum Wisconsin 54-1255] gi|211592750|emb|CAP99116.1| Pc22g18280 [Penicillium chrysogenum Wisconsin 54-1255]
MSLPNIWHHRKVADTSAKGCEICYKPSTSVLVTPDKQDFFYVCPAHLKDRGFASPIVDHEAIAARKKKEMDEEVARLKKEYEEKQRKKNEKEKQKDKDKDKKDGKEEDDSKDDKATKKDGDKSEDKDNAKADTTAQQNTEEEPRVFALQRAFHQQRIDKRRQADMAKRNRERLSNPSFFPSVPKDLP

SEQ ID NO: 24554 - DNA, 3439 bp, Muscodor strobelii
  misc_feature: SGI EST ID NO. CUFF.57832.1
  misc_feature: Variant of the nucleotide sequence at SEQ ID NO 24552
cgaatggtgatgcttacaattactgcataacaagaataaactttaggaagactactgaacatatacgcaggacaatgcaggacaatatattaatgcacttttatacgccctgaacatcgttgccaacgcctactaacgcttccgtcgtcagaattagtaacccacttctccagcctgtatcatggacaacataatttggggcggcgtaaactgattcggtcttcaattactcatcctccccatcctcgtcgtcctcatcagctgcatcgtcgtcatcatcatcatcatcatcgtcagaatccgtgcctgatccttctgattcaccctcggaacctgggtcgtagtcttcctcgtcttcatcttcctcatccaccaactcttgttcggcacgctgtaactcactcaatccaccttgagcggctccctcatcacccccatcttctctcttgcccttggcattctccagcaattcgcgcttggctttcctctgatcggccaagcttcgatcctgaagcttatgccgcgcgacgtagttctcgttgatgccgttataatcctcttgatctagcatagcgaactcgatctcctcggtggcctcatcatcgcctccctcactattgaatacctccacaactacattgaacgtgcgctgtagtacattggtgtaactcacagcggcgatcttgtcgagtgggataaacatgaggggcttcttgaagccccacaaaatgccgttttccaaaaagaacaggtacccatctttggaacctcggaaggctttgacgtgcacagcctgctccttgggtctgtgaggttggcgtatgacgctatggaatttggaggggtccgcagaagtaatctgcacgttgttcgccccagccttcaagcatttgttaatggcccagtggaataatgtagtatacgagtccgagacagaggatgcggcagctgcattgggaccaccgatcgagccaggcttgggtgccgttgccggaatagtgaacaccagaggatcagtcggagcagcggcaccactagggtggaaatacgagtcgggcgggaggaggacgtaattgtgttgtacctgcgacttgtcgggtactgggagaaagaatgcatattctgggaccgaggagttagtctcaatctaagggctcagacgcgtccgaagacttacgtatgctcgcccattggtatattatattaggcacggggtctttggtgccaggcgccctggcataaaggtgcttcgctgtgaagcacaagtcgaacttcttgcgctgtggtatggagaccgaaatatctttaatctctagtaaaacatcttcgcgagatacatcgtcaatagatatggatgcgccgttggaagacacgccgttctgcgctggctcaatgtcaacgcgacgacgtttatgggctggctcggcgggcgagctgtcgttaatcttgtcgtagacgaagtcaacaatgttattgaacagctttatttgcgacggagaatctattcacgagctggtcagactaccgagagatggattgtcacgggcatgggagtcacaataccggcagcttgccgaatgccctctacaatgtctggtcgcgactcgaatacaagatttagcttttgcgcatcaagccccggagccatgatgtacgaccgggcgcaagcagtcgagatcggttacaatgcggcacaatcttaatgcagggcgcagatgttgtacgataatgcagaagacagttaacctcgaggataaaaagtgcttcttgttgttgtttgcgtcgacaaggaaatgaaatcggaaaaggctacgataatttcagcctcggggactgagactgaaattgtttgttgctttgtgttgacgtgacgtattgagggagactctcggacctctgattggcaaccgccgttcctgcagggatattactctctgattcttaggtattataagtcaaggctgcaactctcggacaaggcatattcagcgctccatgactcaagattacatcaaaggcaagaaagactggttccatccacctgaagctcgaggccgtatctcgacgtgcactcacacttattgattctgttgacacaccttgacttctccgtccaggcctaagtggaagtctattgtgaaatctaggccaagaatttgtcccgtagcaccccgatataacctagagacaaaagtatgagccactatataagcaccgccacaacagtgtctcgctcagctcatggaccccaccactggacgcagcctatcttaaggctgagactcgagacataactagtcgcactagatatccaagacatccgcttttaacaatcgacgaataatacgaaactccttgagttctatataatctgatatctagtagtaatgtcgcttcctaatatatggcatcaccgcaaggtcgccgacacctctgctaaggggtgtgagatctgttataagccaagtacaagtgttctcgtcactccggataaacaagatttcttctacgtctgtcctgctcatctcaaagatagaggattcgcctctcctattgttgaccatgaggccatcgcagcaaggaagaagaaagagatggatgaagaggtcgccaggttgaagaaggagtacgaagaaaaacagcgtaaaaagaacgaaaaggagaaacagaaggacaaagacaaagacaagaaagacggcaaagaggaagatgattcgaaagacgacaaggctacgaagaaggatggcgacaagtctgaagacaaggacaacgccaaggctgataccaccgcgcaacaaaatactgaagaggaaccgcgtgtatttgctttgcagagggcttttcatcaacaacggatcgacaaaagaaggcaagccgacatggcaaagaggaatcgggagcgtctcagcaatccttcgttctttccttccgttcccaaagatcttccttgagtctgtccactgtgggacttcggcacgagagacagcatcaacagaatgggtttgcaaagtaccgtgagtggttgatgcgtaaaacagtgatcgtaacatccaccttgatatcgagcctagccaacaaagtaatatggtctcacacacgtccacgtcgagttagaggcctcttcatcactacattctccgctgcattgtccactgcacctgcgtttcaccccccgcgttctgaaccaaatactccgtagacatggtcaaatcgccgatacggattgttgatgatttctgatgcagtcttttgagtggtcacggcttatttctacgtgtcattcagaatgacttgcatccgtagacattagactagtgctagcaaacccactcgcttctcaatattttacagggttcacgtggttgcgtgcatcttttgcgggatctcggacaaggaaaaaatggcgcggatctctttggtgatgcggcgtcctttctcg

SEQ ID NO: 24555 - DNA, 624 bp, Muscodor strobelii
  misc_feature: SGI cDNA ID NO. 568373
  misc_feature: Encodes the peptide sequence at SEQ ID NO 24556
atgtcgcttcctaatatatggcatcaccgcaaggtcgccgacacctctgctaaggggtgtgagatctgttataagccaagtacaagtgttctcgtcactccggataaacaagatttcttctacgtctgtcctgctcatctcaaagatagaggattcgcctctcctattgttgaccatgaggccatcgcagcaaggaagaagaaagagatggatgaagaggtcgccaggttgaagaaggagtacgaagaaaaacagcgtaaaaagaacgaaaaggagaaacagaaggacaaagacaaagacaagaaagacggcaaagaggaagatgattcgaaagacgacaaggctacgaagaaggatggcgacaagtctgaagacaaggacaacgccaaggctgataccaccgcgcaacaaaatactgaagaggaaccgcgtgtatttgctttgcagaggtctgttgcatcgttgggtctacgcgcttctaccatcactaatctccggcaattggatagggcttttcatcaacaacggatcgacaaaagaaggcaagccgacatggcaaagaggaatcgggagcgtctcagcaatccttcgttctttccttccgttcccaaagatcttccttga

SEQ ID NO: 24556 - protein, 207 aa, Muscodor strobelii
  misc_feature: SGI Peptide ID NO. 568373
  misc_feature (5)..(204): Pfam Id: PF08432 Pfam Desc: Fungal protein of function (DUF1742)
  misc_feature (5)..(152): Pfam Id: PF08432 Pfam Desc: Fungal protein of function (DUF1742)
  misc_feature (3)..(207): NCBI GI: 145608036 Blast Desc: MGG_09711 [Magnaporthe grisea 70-15] gi|145015508|gb|EDK00045.1| MGG_09711 [Magnaporthe grisea 70-15]
  misc_feature (1)..(204): NCBI GI: 240280070 Blast Desc: conserved [Ajellomyces capsulatus H143]
  misc_feature (1)..(204): NCBI GI: 261194886 Blast Desc: conserved [Ajellomyces dermatitidis SLH14081] gi|239587719|gb|EEQ70362.1| conserved [Ajellomyces dermatitidis SLH14081]
  misc_feature (1)..(204): NCBI GI: 239610785 Blast Desc: conserved [Ajellomyces dermatitidis ER-3]
  misc_feature (2)..(207): NCBI GI: 154292230 Blast Desc: BC1G_14198 [Botryotinia fuckeliana B05.10] gi|150846218|gb|EDN21411.1| BC1G_14198 [Botryotinia fuckeliana B05.10]
  misc_feature (1)..(207): NCBI GI: 171678265 Blast Desc: protein product [Podospora anserina] gi|170937202|emb|CAP61859.1| protein product [Podospora anserina]
  misc_feature (1)..(207): NCBI GI: 255949932 Blast Desc: Pc22g18280 [Penicillium chrysogenum Wisconsin 54-1255] gi|211592750|emb|CAP99116.1| Pc22g18280 [Penicillium chrysogenum Wisconsin 54-1255]
  misc_feature (2)..(207): NCBI GI: 156059900 Blast Desc: SS1G_03963 [Sclerotinia sclerotiorum 1980] gi|154701749|gb|EDO01488.1| SS1G_03963 [Sclerotinia sclerotiorum 1980]
  misc_feature (3)..(204): NCBI GI: 238838668 Blast Desc: conserved [Microsporum canis CBS 113480]
  misc_feature (1)..(203): NCBI GI: 145256777 Blast Desc: An04g01470 [Aspergillus niger] gi|134058422|emb|CAK47909.1| protein product [Aspergillus niger]
MSLPNIWHHRKVADTSAKGCEICYKPSTSVLVTPDKQDFFYVCPAHLKDRGFASPIVDHEAIAARKKKEMDEEVARLKKEYEEKQRKKNEKEKQKDKDKDKKDGKEEDDSKDDKATKKDGDKSEDKDNAKADTTAQQNTEEEPRVFALQRSVASLGLRASTITNLRQLDRAFHQQRIDKRRQADMAKRNRERLSNPSFFPSVPKDLP

SEQ ID NO: 24557 - DNA, 3439 bp, Muscodor strobelii; identical to SEQ ID NO: 24554
  misc_feature: SGI EST ID NO. CUFF.57832.1
  misc_feature: Variant of the nucleotide sequence at SEQ ID NO 24555

SEQ ID NO: 24558 - DNA, 1695 bp, Muscodor strobelii
  misc_feature: SGI cDNA ID NO. 568375
  misc_feature: Encodes the peptide sequence at SEQ ID NO 24559
atgaaatccattttacttttagcatatccagcctttggcattgccagcgcgggagctcataatagccttcgccacctccgtctccctttaagaagcaggaattgggaggtttccgtacccggggaagaggaccttttgaagtcgacaccattcggatcagtatccacaggcctcacgcagaggcatgttctcagcccttatacggttcagatcggtctcggcacgccaatacaatatgtcgaactcggcattgatgccttttctgatagtatatgggtcaacccaacgtgcagtagctcgatggatccaaagggttgttgtgagaatggcaactacaactacaactggtcctccacagcagattctatacactgcagtgcagagccctggatgtactcatctcattatggcgaaaccgcctccggttgtacatacatcgactatgtcaacttcgccgctgcggatgcgggctatatgaaaattgatgttgcgtccgaaagttggggtttctcaactggtgttctcggcctaggcttcggatgcaaagccggaggtgagaaatcaattattgagcgcatgaaagcccttgggcacatcagtcatcttcaattcagtgtacacctaggtagtgcaatcgaattcgacgacggaagagatgatgaagttggcaagcggagtgatggtgagctagtgttttcgggtattgatactaagaagtatactggcgagcttcgtcaagttccttcgcacccatccccagacaacgatgacaccagatattacttgaccttgaccgcaatcggctacacggaatggagcagttgcaatcggtttacttatttccctaactcaacacacattgccctcgactttacacaaataatatctcgtctcccgggagcatacctggcctatttatcagatatctttccagacgcggcatacaataatgatgaaggatattgggaagtcccatgccgccatcgagatcgagacgcaacggtggacttcaacttcgacacccagcgtattgccgttcctatgcatgacttcatcttggagtacaatggcacatgtatcctaggcgctgttgcgactcaagatgaccaattgagtgttcttggtctaagttttctccgtggtgcatatgtatcaagattgcggcgagaatgttctaggatgggattcatcgggcccagatcgaactggactatgtactccgacagccaccgactttcctccctcatgctcgtcaacttcattgaccgcgtcaacatcaactacgagccactcgaccacgagcatgcatgtcacgacatcgacgcatcctacatctacgacgcattcatcaacgcatacattcacaagcaatacgtctcgttcatcgagccatacgtctacgtctacgtcagcatcgtcgtcgactcatacatccaaacacacttcgaagcacagctcaaccctatcttctacgcgccattcgacaacgacatcaacacatacttccatccattccctaacacattcttcgacacactcatccacgtcatcctcgtcatccacgaaggctctgccatcaagttcaaaaaaatccacatccacaagaatgatatacacaagctaccccactgcgccaagttcctcgcacaattactcgtcatgggggacgtcagggatctacacctcaggaattag

SEQ ID NO: 24559 - protein, 564 aa, Muscodor strobelii
  misc_feature: SGI Peptide ID NO. 568375
  misc_feature (66)..(399): Pfam Id: PF00026 Pfam Desc: Eukaryotic aspartyl protease
  misc_feature (67)..(384): NCBI GI: 171682894 Blast Desc: protein product [Podospora anserina] gi|170941406|emb|CAP67057.1| protein product [Podospora anserina]
  misc_feature (67)..(370): NCBI GI: 116202981 Blast Desc: CHGG_09375 [Chaetomium globosum CBS 148.51] gi|88177893|gb|EAQ85361.1| CHGG_09375 [Chaetomium globosum CBS 148.51]
  misc_feature (67)..(383): NCBI GI: 118161444 Blast Desc: secreted aspartic proteinase [Hypocrea lixii]
  misc_feature (67)..(384): NCBI GI: 256722247 Blast Desc: NECHADRAFT_21517 [Nectria haematococca mpVI 77-13-4]
  misc_feature (67)..(383): NCBI GI: 39948622 Blast Desc: MGG_08698 [Magnaporthe grisea 70-15] gi|145009241|gb|EDJ93952.1| MGG_08698 [Magnaporthe grisea 70-15]
  misc_feature (57)..(384): NCBI GI: 85096825 Blast Desc: NCU07063 [Neurospora crassa OR74A] gi|28921816|gb|EAA31092.1| [Neurospora crassa OR74A]
  misc_feature (67)..(402): NCBI GI: 39970765 Blast Desc: MGG_02849 [Magnaporthe grisea 70-15] gi|149210259|ref|XP_001522504.1| MGCH7_ch7g607 [Magnaporthe grisea 70-15] gi|86196562|gb|EAQ71200.1| MGCH7_ch7g607 grisea
  misc_feature (53)..(384): NCBI GI: 145606406 Blast Desc: MGG_11945 [Magnaporthe grisea 70-15] gi|145014070|gb|EDJ98711.1| MGG_11945 [Magnaporthe grisea 70-15]
  misc_feature (67)..(384): NCBI GI: 46116266 Blast Desc: FG03975.1 [Gibberella zeae PH-1]
  misc_feature (26)..(384): NCBI GI: 256723475 Blast Desc: NECHADRAFT_81095 [Nectria haematococca mpVI 77-13-4]
  misc_feature (67)..(384): SWISSPROT Homolog: EC 3.4.23.35 Barrierpepsin
MKSILLLAYPAFGIASAGAHNSLRHLRLPLRSRNWEVSVPGEEDLLKSTPFGSVSTGLTQRHVLSPYTVQIGLGTPIQYVELGIDAFSDSIWVNPTCSSSMDPKGCCENGNYNYNWSSTADSIHCSAEPWMYSSHYGETASGCTYIDYVNFAAADAGYMKIDVASESWGFSTGVLGLGFGCKAGGEKSIIERMKALGHISHLQFSVHLGSAIEFDDGRDDEVGKRSDGELVFSGIDTKKYTGELRQVPSHPSPDNDDTRYYLTLTAIGYTEWSSCNRFTYFPNSTHIALDFTQIISRLPGAYLAYLSDIFPDAAYNNDEGYWEVPCRHRDRDATVDFNFDTQRIAVPMHDFILEYNGTCILGAVATQDDQLSVLGLSFLRGAYVSRLRRECSRMGFIGPRSNWTMYSDSHRLSSLMLVNFIDRVNINYEPLDHEHACHDIDASYIYDAFINAYIHKQYVSFIEPYVYVYVSIVVDSYIQTHFEAQLNPIFYAPFDNDINTYFHPFPNTFFDTLIHVILVIHEGSAIKFKKIHIHKNDIHKLPHCAKFLAQLLVMGDVRDLHLRN

SEQ ID NO: 24560 - DNA, 517 bp, Muscodor strobelii
  misc_feature: SGI EST ID NO. CUFF.57838.0
  misc_feature: Variant of the nucleotide sequence at SEQ ID NO 24558
aaagcccttgggcacatcagtcatcttcaattcagtgtacacctaggtagtgcaatcgaattcgacgacggaagagatgatgaagttggcaagcggagtgatggtgagctagtgttttcgggtattgatactaagaagtatactggcgagcttcgtcaagttccttcgcacccatccccagacaacgatgacaccagatattacttgaccttgaccgcaatcggctacacggaatggagcagttgcaatcggtttacttatttccctaactcaacacacattgccctcgactttacacaaataatatctcgtctcccgggagcatacctggcctatttatcagatatctttccagacgcggcatacaataatgatgaaggatattgggaagtcccatgccgccatcgagatcgagacgcaacggtggacttcaacttcgacacccagcgtattgccgttcctatgcatgacttcatcttggagtacaatggcacatgtatcctaggcgctgttgcga

SEQ ID NO: 24561 - DNA, 1545 bp, Muscodor strobelii
  misc_feature: SGI cDNA ID NO. 568376
  misc_feature: Reduced expression when VOC is produced
  misc_feature: Encodes the peptide sequence at SEQ ID NO 24562
atggaggccattactaatttcatgcccgagcggctagctggactacctatgtccgtgcaggtgattggggtcacgattctcttcagcgtcatctacggatatttgacgaaagagcgacctcttgcttctttcccagtcatcagcgtcaatggaaaaagtcctttaaggagttggatgtttagcggcagggaggtgatggacgaaggccaaaagataacgtcagggccatttcaagtaattactggcacaggacccaagattatgttgccaaaccgctacgccgacgagatccgcaatctgccggaactgaacttcccaaaggcgttttcaaaggacttcatggtcaactatccaggatttgacgcccatagacaaggtctacagaatgattatctcattcaagacactgttcgaatcaagttgacacagtcgttgggtctcgtgacgaaggatctaaatgacgaaacgatcagcacaatcgaagacatatttggccactccgagcaatggaacacacgagagatcagggaggactgcctagacattgtcgcacgagtgtcatcacgagtgtttctcggcagcaccctttgcagaaacaaacgttggctcgatatcgcaaagacctacaccgtcgattcattcttgctctcgcgcctaatgcgaatggccccggttgtactgaggcccttcgtctatctcgtgctacctcagtctcgacgactccgtaagtcggtccgagacgcgcgaaagatcatcaacccggaaatcgaacgccgcaaaaaaattgtagacgccgcacgtgccgcaggcgagaagccaccaaagactgcggatacgattggttggatgtatgatattgtcaagccgggtgatgctcaacccgactatgttgcggctcagctgtcgctcacgatggctgctattcatactaccacagaaagcacgtgtagagccctgatggatatctgcaaatacccggaaacagcacagcttttgcgagacgagatcactgaggttctgggtagggatggatgggctaagacaaccctatacaagctcaagataatggacagcttcctgaaagagagtcagagatatacgccgctgggttacagctcgatgaaccgatacgttgagaaggatctcaccctctcggacgggacatttattccaaaaggcaagcgtattttggtagctggaaccttcggtgacccaggtgtgtaccctgagccggagaaattcgacccattgcgattccttaagaaaaggcaagagcctggccaagagaatagctggcagttcgtgaccacgagcccggagcacctgaactttggccatggtcaacatgcctgcccgggtcgattcttcgcatcaaatgagatcaaaatcatcctttgccacctgcttatgaaatacgactggcggttcgtccctgacgagcctgagcctcaaccccgcagattcgagtccacgtcttctgtcgacccgaacactcggctccaggcacgggccagaaaaccagaaatcgacattgacagcctttga

SEQ ID NO: 24562 - protein, 514 aa, Muscodor strobelii
  misc_feature: SGI Peptide ID NO. 568376
  misc_feature (41)..(504): Pfam Id: PF00067 Pfam Desc: Cytochrome P450
  misc_feature (301)..(504): Pfam Id: PF00067 Pfam Desc: Cytochrome P450
  misc_feature (53)..(512): NCBI GI: 256725297 Blast Desc: NECHADRAFT_95128 [Nectria haematococca mpVI 77-13-4]
  misc_feature (31)..(512): NCBI GI: 149211351 Blast Desc: MG10351.4 [Magnaporthe grisea 70-15]
  misc_feature (80)..(511): NCBI GI: 261353362 Blast Desc: ent-kaurene oxidase [Verticillium albo-atrum VaMs.102]
  misc_feature (24)..(511): NCBI GI: 270124461 Blast Desc: cytochrome P450 [Alternaria brassicicola]
  misc_feature (14)..(513): NCBI GI: 270124305 Blast Desc: cytochrome P450 [Alternaria brassicicola]
  misc_feature (18)..(511): NCBI GI: 67903086 Blast Desc: AN8530.2 [Aspergillus nidulans FGSC A4] gi|40747727|gb|EAA66883.1| AN8530.2 [Aspergillus nidulans FGSC A4] gi|259484480|tpe|CBF80737.1| TPA: cytochrome P450, (Eurofung)
  misc_feature (31)..(444): NCBI GI: 149211349 Blast Desc: MGCH7_ch7g1131 [Magnaporthe grisea 70-15] gi|86197086|gb|EAQ71724.1| MGCH7_ch7g1131 [Magnaporthe grisea 70-15]
  misc_feature (49)..(506): NCBI GI: 261198797 Blast Desc: cytochrome P450 [Ajellomyces dermatitidis SLH14081] gi|239594952|gb|EEQ77533.1| cytochrome P450 [Ajellomyces dermatitidis SLH14081]
  misc_feature (26)..(514): NCBI GI: 121699333 Blast Desc: cytochrome P450 [Aspergillus clavatus NRRL 1] gi|119396129|gb|EAW06561.1| cytochrome P450 [Aspergillus clavatus NRRL 1]
  misc_feature (12)..(514): NCBI GI: 242815592 Blast Desc: cytochrome P450, [Talaromyces stipitatus ATCC 10500] gi|218714938|gb|EED14361.1| cytochrome P450, [Talaromyces stipitatus ATCC 10500]
  misc_feature (57)..(505): SWISSPROT Homolog: EC 1.14.13.78 Ent-kaurene oxidase
  misc_feature: Useful for introducing or modulating the production of volatile compounds
MEAITNFMPERLAGLPMSVQVIGVTILFSVIYGYLTKERPLASFPVISVNGKSPLRSWMFSGREVMDEGQKITSGPFQVITGTGPKIMLPNRYADEIRNLPELNFPKAFSKDFMVNYPGFDAHRQGLQNDYLIQDTVRIKLTQSLGLVTKDLNDETISTIEDIFGHSEQWNTREIREDCLDIVARVSSRVFLGSTLCRNKRWLDIAKTYTVDSFLLSRLMRMAPVVLRPFVYLVLPQSRRLRKSVRDARKIINPEIERRKKIVDAARAAGEKPPKTADTIGWMYDIVKPGDAQPDYVAAQLSLTMAAIHTTTESTCRALMDICKYPETAQLLRDEITEVLGRDGWAKTTLYKLKIMDSFLKESQRYTPLGYSSMNRYVEKDLTLSDGTFIPKGKRILVAGTFGDPGVYPEPEKFDPLRFLKKRQEPGQENSWQFVTTSPEHLNFGHGQHACPGRFFASNEIKIILCHLLMKYDWRFVPDEPEPQPRRFESTSSVDPNTRLQARARKPEIDIDSL

SEQ ID NO: 24563 - DNA, 5656 bp, Muscodor strobelii
  misc_feature: SGI EST ID NO. CUFF.57957.1
  misc_feature: Variant of the nucleotide sequence at SEQ ID NO 24561
tagcattgctggagcaagctcctctggccacttggatatggcatgatatcgacgggattcctggcaaatgcccaaaacgaggggctaccatcctattataaacaccatgctgtgccagaggcacatatttctgctcaagtcggcgatagtacacccatctatcgtgcgaaagcagtcaggatggaggccattactaatttcatgcccgagcggctagctggactacctatgtccgtgcaggtgattggggtcacgattctcttcagcgtcatctacggatatttgacgaaagagcgacctcttgcttctttcccagtcatcagcgtcaatggaaaaagtcctttaaggagttggatgtttagcggcagggaggtgatggacgaaggccaaaagataacgtcagggccatttcaagtaattactggcacaggacccaagattatgttgccaaaccgctacgccgacgagatccgcaatctgccggaactgaacttcccaaaggcgttttcaaaggacttcatggtcaactatccaggatttgacgcccatagacaaggtctacagaatgattatctcattcaagacactgttcgaatcaagttgacacagtcgttgggtctcgtgacgaaggatctaaatgacgaaacgatcagcacaatcgaagacatatttggccactccgagcaatggaacacacgagagatcagggaggactgcctagacattgtcgcacgagtgtcatcacgagtgtttctcggcagcaccctttgcagaaacaaacgttggctcgatatcgcaaagacctacaccgtcgattcattcttgctctcgcgcctaatgcgaatggccccggttgtactgaggcccttcgtctatctcgtgctacctcagtctcgacgactccgtaagtcggtccgagacgcgcgaaagatcatcaacccggaaatcgaacgccgcaaaaaaattgtagacgccgcacgtgccgcaggcgagaagccaccaaagactgcggatacgattggttggatgtatgatattgtcaagccgggtgatgctcaacccgactatgttgcggctcagctgtcgctcacgatggctgctattcatactaccacagaaagcacgtgtagagccctgatggatatctgcaaatacccggaaacagcacagcttttgcgagacgagatcactgaggttctgggtagggatggatgggctaagacaaccctatacaagctcaagataatggacagcttcctgaaagagagtcagagatatacgccgctgggttacagctcgatgaaccgatacgttgagaaggatctcaccctctcggacgggacatttattccaaaaggcaagcgtattttggtagctggaaccttcggtgacccaggtgtgtaccctgagccggagaaattcgacccattgcgattccttaagaaaaggcaagagcctggccaagagaatagctggcagttcgtgaccacgagcccggagcacctgaactttggccatggtcaacatgcctgcccgggtcgattcttcgcatcaaatgagatcaaaatcatcctttgccacctgcttatgaaatacgactggcggttcgtccctgacgagcctgagcctcaaccccgcagattcgagtccacgtcttctgtcgacccgaacactcggctccaggcacgggccagaaaaccagaaatcgacattgacagcctttgagaatagcgaaccgatgttaccgagtataatctgcacgcgggcattgtatgttgtagctactttggttgattgtatttagcacttttcacatttcagttcgcatacagtacaggatgagatgagtcatatgctcacgtggacaggatacgacgaatcgatcctcgatcgtctcgttctgcttcatgggtctaagtcgtaaattagtgctatgcatggactaccggttctaattcgacgtatgcgagtatcgtctagatctcgcacgtggtttgatgcctgtgttgcccaaaattttcggtacgagtataccgggaagatgaaagtaggcgagataggataggaaatttgaaacgaaagttctatgtgaagctgagactgaggcatctctctgcatcatactgtattacatcatgacatgattttcagcaaagtatttcttttgttcgtaaatattgcggatattccctccgggttgactggggctaccgcttggctggaatcgagaccctgctgtgcctctatacgcaactaggatcatacctgctaatctcgtgtcgtagtcaagcgggagactcggggtggaatcgataacactattgaaatttgatccccgcagagaaaagagatataaaaagcatatatgatgcccaatgtcaggcaccagcgtcgtagaattattcatcgcgcgaacagtcacatgaggctcgttcgagattcttcatactgtgtttacaatttccttctttcgagcgctttctgagaagatcgatagtgcaatgtgatcattgaaactcgttgcaaggctctcaatgtgtagacctttgtaaccccccttaagttccatgcaccatgtagcctgttcctgcatgtcttagcacatatattgaagtactctttagggtggtggcacaatgcgaggcccctgccaaggcaaagataaggtgggctgcatgctgcatttggtctcccgatatgtcggctgtctcttcccgcaggaacgtagcaaggattcgtacaatctcatctggagattggccacccacttctcacctcatctcgacaacctgtatcacaccgccgcaaagtgctctcgtttctgcaatgcaccctttgcaaagcgcgtaaaatggcgcgtcgcttcgcctctgtacgatagcgcgcgctacatactaccattaaagtaaactttttgctcgtttttgagagggagagacagatggattaaccttggtcgaaaacggcaaggctagcgcagctccatacgacgcgtgctgagacggcttcatcggaatcatccgctgccactggctgaatgagagaacatgggcaaacagctaggatcgtcccacggacatgggtcgtggcttgaaaaccaggggaagcttgccagcctcgccagcttggcgagatttctgtgattatgactgatgaggataagacattaagtcatgtgggggaaagatcgccagagtagcgtgagaacgtttgacgaaaaacgtggcgggcagataacgtcagcacgaacctccctctttccctattcaaaagccaggcgcttggtcgtctagttcatgaattgtctcgtagttatcagcgctatctgtgctcgtctttctgtcgtagctggatagaggttgatccagaccactggtaaatttggctggtcactgcgtgaggttaatgcttcagtcatggtcctaaaagggttctccctcgctgcttctggggcaaacgagctgcgatgcattccgaaatggtcatcgcaacatttcgaggcaaccggcaagccactccggtttgcggtggactcgtcgaattggtggtatcgaaacatcactgcccagaaggaggctgatcttcaacgacaaaacccgaattctcatccgagagaaaaacggatcatggagcggatactgtatctcttgaggatgaatgttcagctcatttttgtcttcggcggatcaagtgggcctctggaaacccagcctgccggacaggaatacgcagagtcaaatgtagcactgctaaaggagctgctcgatcacctaggtgttccatttcacgacgcaccctgttccgcgatcgccgagtgcgcccgccttcaggagctcggaattgtggacgcgatttggagtgataatacagacgtgctgatgttcggcacagacccgacattggtatcatttcgaaagaaggaaggcgaacagttcaagagttccaacacagtcgtcgtatcacccggtaaatgcatcaaggagcgcacaggactgtctaaagagggtttcttgacctttgggatgcttgtcggatgcggctatacagacggtctcgagggctttggaaaatccgatttctctcgtatcgagaagcaccctcagtttgatgctgcagctaaattgctagcttcgccttcgacaacttcacacgaacttggtaaatggcgagcgatgatagctcgtatgcttaaagacgtcacacccaccagagagcttacgggattagcaaagtcgtttcccgatattacgacgttgaaacattgtgctcacccaatcgtttcattcgatgtcacacttctggatctaccgtgcttgcgccagggttggttccagtccttcagtcttagtatgctcagtcgataccgcttccttttgcacaatttcaactcgggagtacacgagagctgggtagcacgagatctagttcccatagagctcaccaatcgcctacgagaagccaatgcagatggaatagtcataaataagggttacaatatcaaagcgaagcggaaactcaaagacagacccgtcacgaccgtgaccgtagacccattgaaggtcattcccgaactgaagagctgtttcccgaaagatatctaccgaacggtaaacggcaagaatatcgagattcaggcccccatattccgctgcgaggagatggatctcctcgactgcgtcctcaaaattggtcttaccgaggtggagctcccagcaaagccattacccgatattccacggcattcgaaaaaacagagtctctacaaagaaaggaagtcctcaatcaccggcaaactcccacccgcagtaccaccgaaaccagtattcacatccaaccgaccgcctcaagttcgaaaaacaaccggcctacacctcgaagtcccagtctccaaaaacgcactcctccagattcccgagtccccaataactccccaatctcccgcctcacctataacaccatactctcgctcatccagtatctcgacaacagccgcagaactatatcccctctcacctctgtccccttacttccaaggcgagctccatttaccaggagacttcgactggggcctgcccagcgaatcaacctggcatagtcttccttcagataatccattgagcaaaacagctagcaaactcgcaaagcgaatttcccggcataaacccatcaaccccaatatgctggagcagttcgctgctacccagaaatctacatctaccacagctccgaaaccgcagccagtttttgaacaacctccttggtggatttttgaatagatcctacctacttctaacacgttaccctggcgagtaatgtgttggatttattgtgttaatgtgtaatacctcgtgacacctatagtcgtgtcgaggcagaagggggaatatcagggaatactactagtctgcaacaagtctcattacgtgtatcgggcgattaggcaggtttattgctttatgtggttacggacgggtttgcggagttggcatggtcggttgcgaaatcttatcactttgcgagggtatggacaaaacgtattaccaatataattacatgctggcatcgctctaatagctcgtaaagcagcttgatgatgtgaaaattcccggcccgtaaaatgatgttcgggcgaagtcatagcgataagtgatgctgg

SEQ ID NO: 24564 - DNA, 1860 bp, Muscodor strobelii
  misc_feature: SGI cDNA ID NO. 568377
  misc_feature: Encodes the peptide sequence at SEQ ID NO 24565
atggtcctaaaagggttctccctcgctgcttctggggcaaacgagctgcgatgcattccgaaatggtcatcgcaacatttcgaggcaaccggcaagccactccggtttgcggtggactcgtcgaattggtggtatcgaaacatcactgcccagaaggaggctgatcttcaacgacaaaacccgaattctcatccgagagaaaaacggatcatggagcggatactgtatctcttgaggatgaatgttcagctcatttttgtcttcggcggatcaagtgggcctctggaaacccagcctgccggacaggaatacgcagagtcaaatgtagcactgctaaaggagctgctcgatcacctaggtgttccatttcacgacgcaccctgttccgcgatcgccgagtgcgcccgccttcaggagctcggaattgtggacgcgatttggagtgataatacagacgtgctgatgttcggcacagacccgacattggtatcatttcgaaagaaggaaggcgaacagttcaagagttccaacacagtcgtcgtatcacccggtaaatgcatcaaggagcgcacaggactgtctaaagagggtttcttgacctttgggatgcttgtcggatgcggctatacagacggtctcgagggctttggaaaatccgatttctctcgtatcgagaagcaccctcagtttgatgctgcagctaaattgctagcttcgccttcgacaacttcacacgaacttggtaaatggcgagcgatgatagctcgtatgcttaaagacgtcacacccaccagagagcttacgggattagcaaagtcgtttcccgatattacgacgttgaaacattgtgctcacccaatcgtttcattcgatgtcacacttctggatctaccgtgcttgcgccagggttggttccagtccttcagtcttagtatgctcagtcgataccgcttccttttgcacaatttcaactcgggagtacacgagagctgggtagcacgagatctagttcccatagagctcaccaatcgcctacgagaagccaatgcagatggaatagtcataaataagggttacaatatcaaagcgaagcggaaactcaaagacagacccgtcacgaccgtgaccgtagacccattgaaggtcattcccgaactgaagagctgtttcccgaaagatatctaccgaacggtaaacggcaagaatatcgagattcaggcccccatattccgctgcgaggagatggatctcctcgactgcgtcctcaaaattggtcttaccgaggtggagctcccagcaaagccattacccgatattccacggcattcgaaaaaacagagtctctacaaagaaaggaagtcctcaatcaccggcaaactcccacccgcagtaccaccgaaaccagtattcacatccaaccgaccgcctcaagttcgaaaaacaaccggcctacacctcgaagtcccagtctccaaaaacgcactcctccagattcccgagtccccaataactccccaatctcccgcctcacctataacaccatactctcgctcatccagtatctcgacaacagccgcagaactatatcccctctcacctctgtccccttacttccaaggcgagctccatttaccaggagacttcgactggggcctgcccagcgaatcaacctggcatagtcttccttcagataatccattgagcaaaacagctagcaaactcgcaaagcgaatttcccggcataaacccatcaaccccaatatgctggagcagttcgctgctacccagaaatctacatctaccacagctccgaaaccgcagccagtttttgaacaacctccttggtggatttttgaatag

SEQ ID NO: 24565 - protein, 619 aa, Muscodor strobelii
  misc_feature: SGI Peptide ID NO. 568377
  misc_feature (117)..(212): Pfam Id: PF00867 Pfam Desc: XPG I-region
  misc_feature (117)..(157): Pfam Id: PF00867 Pfam Desc: XPG I-region
  misc_feature (26)..(458): NCBI GI: 189198980 Blast Desc: conserved [Pyrenophora tritici-repentis Pt-1C-BFP] gi|187982926|gb|EDU48414.1| conserved [Pyrenophora tritici-repentis Pt-1C-BFP]
  misc_feature (19)..(209): NCBI GI: 169616754 Blast Desc: SNOG_11552 [Phaeosphaeria nodorum SN15] gi|111060140|gb|EAT81260.1| SNOG_11552 [Phaeosphaeria nodorum SN15]
  misc_feature (8)..(359): NCBI GI: 67525457 Blast Desc: AN3186.2 [Aspergillus nidulans FGSC A4] gi|40743763|gb|EAA62950.1| AN3186.2 [Aspergillus nidulans FGSC A4] gi|259485857|tpe|CBF83236.1| TPA: Rad2-like endonuclease, A4]
  misc_feature (11)..(158): NCBI GI: 156049867 Blast Desc: SS1G_08641 [Sclerotinia sclerotiorum 1980] gi|154693039|gb|EDN92777.1| SS1G_08641 [Sclerotinia sclerotiorum 1980]
  misc_feature (19)..(157): NCBI GI: 169614377 Blast Desc: SNOG_10329 [Phaeosphaeria nodorum SN15] gi|111061544|gb|EAT82664.1| SNOG_10329 [Phaeosphaeria nodorum SN15]
  misc_feature (12)..(373): NCBI GI: 189192965 Blast Desc: flap structure-specific endonuclease [Pyrenophora tritici-repentis Pt-1C-BFP] gi|187978385|gb|EDU45011.1| flap structure-specific endonuclease [Pyrenophora tritici-repentis
  misc_feature (8)..(346): NCBI GI: 238489679 Blast Desc: Rad2-like endonuclease, [Aspergillus flavus NRRL3357] gi|220698465|gb|EED54805.1| Rad2-like endonuclease, [Aspergillus flavus NRRL3357]
  misc_feature (8)..(346): NCBI GI: 169763722 Blast Desc: [Aspergillus oryzae RIB40] gi|83770789|dbj|BAE60922.1| protein product [Aspergillus oryzae]
  misc_feature (8)..(346): NCBI GI: 115391513 Blast Desc: conserved [Aspergillus terreus NIH2624] gi|114194185|gb|EAU35885.1| conserved [Aspergillus terreus NIH2624]
  misc_feature (8)..(346): NCBI GI: 145233351 Blast Desc: An02g09150 [Aspergillus niger] gi|134056976|emb|CAK44323.1| protein product [Aspergillus niger]
MVLKGFSLAASGANELRCIPKWSSQHFEATGKPLRFAVDSSNWWYRNITAQKEADLQRQNPNSHPREKRIMERILYLLRMNVQLIFVFGGSSGPLETQPAGQEYAESNVALLKELLDHLGVPFHDAPCSAIAECARLQELGIVDAIWSDNTDVLMFGTDPTLVSFRKKEGEQFKSSNTVVVSPGKCIKERTGLSKEGFLTFGMLVGCGYTDGLEGFGKSDFSRIEKHPQFDAAAKLLASPSTTSHELGKWRAMIARMLKDVTPTRELTGLAKSFPDITTLKHCAHPIVSFDVTLLDLPCLRQGWFQSFSLSMLSRYRFLLHNFNSGVHESWVARDLVPIELTNRLREANADGIVINKGYNIKAKRKLKDRPVTTVTVDPLKVIPELKSCFPKDIYRTVNGKNIEIQAPIFRCEEMDLLDCVLKIGLTEVELPAKPLPDIPRHSKKQSLYKERKSSITGKLPPAVPPKPVFTSNRPPQVRKTTGLHLEVPVSKNALLQIPESPITPQSPASPITPYSRSSSISTTAAELYPLSPLSPYFQGELHLPGDFDWGLPSESTWHSLPSDNPLSKTASKLAKRISRHKPINPNMLEQFAATQKSTSTTAPKPQPVFEQPPWWIFE

SEQ ID NO: 24566 - DNA, 5656 bp, Muscodor strobelii; identical to SEQ ID NO: 24563
  misc_feature: SGI EST ID NO. CUFF.57957.1
  misc_feature: Variant of the nucleotide sequence at SEQ ID NO 24564

SEQ ID NO: 24567 - DNA, 2160 bp, Muscodor strobelii
  misc_feature: SGI cDNA ID NO. 568378
  misc_feature: Encodes the peptide sequence at SEQ ID NO 24568
atgtccgactcatcagacaccgacgctacccctcgtcggcgggcgagccgcgccctgcccgtgcgacaggccaagatcaaggcaccagcccgcgcgaccaggtccaatgccgccttcttcgccggcagttccgacaacagccagccctcgtcccccgactccgacaacgcccctcccatccgctacctacggcccctgcccaagaagagaaagcttgactctgcatacacgtcacccgcccctgtcaagccgggcaaacggcgacatatcaaggaggagagtgaggaggacgacgatgacgatgatgatgtcttgttgttgtcgtccgacaccgtcatcccgccctgggagacgctcccgtaccacgtctggctccgtgtcttcgactgcatcgccgcccccatccgcgacagcgctgctcgcatcgaccatgtcgcggaagccgtcgccattttgctagctggagcccgtgcttgtcgggccacacttgagcccgcgttggctgctctgtacaaatgtcccccgttctaccacctctactcaaacaaagctccccagaacgccttcacttctttcctacacactctagctctcgatccctcggctaccttcatccaatacaggcccaaggtcaagacattacgcattgacgttgatgcatgccttagcaagaaggtcgatgatactccaaggacattggagcgcgtggtcagggatcttccgcagttacgcagcctagagttatacagttctttcgataatcctccgtacagagatttgttgactcatctacgatggaaagtcaccgaagacgacatgtctgctgctctccagtctgttgtacctgacggggattccatcatgctaggtcgaacaaagccacttgcgcttgaaagctggcgttggaactcccgtctcttcgacaacagtctcactctcggtcggattgcggagctgcacaagctgcccagctttcaaactctgcgcaaagtggcctatgttaactaccaactcccatccctgactcgctttgcagccagggcccgcgagagtcaggaggcacaagacagtgatcggcaggcgatcgtccaactcgcttcgtcaatctcggtgttacccgatttacaccacctggtgatagagtcgtctactttagctaatggctcgctcctggaaagcctccccaagactctcaaacatctcgaactagtgaattgttgggagattagcagtgaggacttagccctatttctcacctcacacgggagctctcttacccacttgaccttgaaacattgccagtccctgagcttaggctttctgcctgtcctgggagtcgcttgtcccaatcttactcatttggagatggatctgtcctacttccgacaccacgcctcttatgcggataacaagccagaatatgaaattcttcttaatgccgatgaggtcccgacttggccgtcgtcaattcagagcattcaaataatcaacatgcgcaattggaaccgcgaagcagcggagatgttttttgatagtttgaccaagaatgctcagaatttggccggccttcgccgccttgagttcaaagtaatccttgacatagaatggcgccagcgccaggaaatgaggaaatctctggccgatcaaatgtctaaaatattcaagcggaatcccgcacctccaaaagaacacaaaactctgcgaatcaaaatgcaaactcccagtaccccagtcaaggctgaaggcaagtctggaacaagacgtagcactcgaattgcgggcgaatcacctacacctgtctcacccgatgtccatacgttaccctcacttgaaagcgcccgaaaacgatctcgcctttccttgagagaagttcgatcgcttaacactgttgtaccgacctttgatgccgatgatgaagagagtagcgaggacgagctcgctatgaatgatggctcgaatactaagagagctgccaccagaatcaccaaaaatccgaacactcacactgagcctttcattcatggtctttgcgattttgttgacattcaagtcgataatcaacgtcctgctgagcgccagtatgacatggaagacttcttggactcaccggagcaggaagagtccgagtgggagagtaacgaggacgacatcttcgactaa

SEQ ID NO: 24568 - protein, 719 aa, Muscodor strobelii
  misc_feature: SGI Peptide ID NO. 568378
  misc_feature (115)..(701): NCBI GI: 39942180 Blast Desc: MGG_03170 [Magnaporthe grisea 70-15] gi|145015848|gb|EDK00338.1| MGG_03170 [Magnaporthe grisea 70-15]
  misc_feature (84)..(702): NCBI GI: 154298225 Blast Desc: BC1G_11957 [Botryotinia fuckeliana B05.10] gi|150858143|gb|EDN33335.1| BC1G_11957 [Botryotinia fuckeliana B05.10]
  misc_feature (113)..(702): NCBI GI: 156050407 Blast Desc: SS1G_07790 [Sclerotinia sclerotiorum 1980] gi|154692191|gb|EDN91929.1| SS1G_07790 [Sclerotinia sclerotiorum 1980]
  misc_feature (31)..(568): NCBI GI: 85110239 Blast Desc: NCU06857 [Neurospora crassa OR74A] gi|28881204|emb|CAD70385.1| [Neurospora crassa] gi|28925007|gb|EAA34095.1| [Neurospora crassa OR74A]
  misc_feature (112)..(701): NCBI GI: 256729218 Blast Desc: NECHADRAFT_63028 [Nectria haematococca mpVI 77-13-4]
  misc_feature (65)..(718): NCBI GI: 46116960 Blast Desc: FG04322.1 [Gibberella zeae PH-1]
  misc_feature (86)..(719): NCBI GI: 169766822 Blast Desc: [Aspergillus oryzae RIB40] gi|83765737|dbj|BAE55880.1| protein product [Aspergillus oryzae]
  misc_feature (86)..(719): NCBI GI: 145229425 Blast Desc: An01g05970 [Aspergillus niger] gi|134055126|emb|CAK37072.1| protein product [Aspergillus niger]
  misc_feature (103)..(719): NCBI GI: 115396810 Blast Desc: conserved [Aspergillus terreus NIH2624] gi|114193613|gb|EAU35313.1| conserved [Aspergillus terreus NIH2624]
  misc_feature (110)..(557): NCBI GI: 171690270 Blast Desc: protein product [Podospora anserina] gi|170945083|emb|CAP71194.1| protein product [Podospora anserina]
MSDSSDTDATPRRRASRALPVRQAKIKAPARATRSNAAFFAGSSDNSQPSSPDSDNAPPIRYLRPLPKKRKLDSAYTSPAPVKPGKRRHIKEESEEDDDDDDDVLLLSSDTVIPPWETLPYHVWLRVFDCIAAPIRDSAARIDHVAEAVAILLAGARACRATLEPALAALYKCPPFYHLYSNKAPQNAFTSFLHTLALDPSATFIQYRPKVKTLRIDVDACLSKKVDDTPRTLERVVRDLPQLRSLELYSSFDNPPYRDLLTHLRWKVTEDDMSAALQSVVPDGDSIMLGRTKPLALESWRWNSRLFDNSLTLGRIAELHKLPSFQTLRKVAYVNYQLPSLTRFAARARESQEAQDSDRQAIVQLASSISVLPDLHHLVIESSTLANGSLLESLPKTLKHLELVNCWEISSEDLALFLTSHGSSLTHLTLKHCQSLSLGFLPVLGVACPNLTHLEMDLSYFRHHASYADNKPEYEILLNADEVPTWPSSIQSIQIINMRNWNREAAEMFFDSLTKNAQNLAGLRRLEFKVILDIEWRQRQEMRKSLADQMSKIFKRNPAPPKEHKTLRIKMQTPSTPVKAEGKSGTRRSTRIAGESPTPVSPDVHTLPSLESARKRSRLSLREVRSLNTVVPTFDADDEESSEDELAMNDGSNTKRAATRITKNPNTHTEPFIHGLCDFVDIQVDNQRPAERQYDMEDFLDSPEQEESEWESNEDDIFD

SEQ ID NO: 24569 - DNA, 2975 bp, Muscodor strobelii
  misc_feature: SGI EST ID NO. CUFF.57851.0
  misc_feature: Variant of the nucleotide sequence at SEQ ID NO 24567
ggtcgctgtagcaaatcccaaaaaagcttatttagtgggtcgctatagctctagcctggtagggatagctctggggaaggcgctgctgaggtgatgacgccaacaggtgccccttcctttaagtgtgctcggcactgtttgtcaaagaaaacttgccggcatccaaatcttcaattcacaccccaaacacgtattttcgctgctcacccggccagatctcttttgacttgctctctcgattgtcgcagattgtaatatgaattcgaagtacccgtagtctacgtcttcaaacccgtcgccagggcgtcgagtgcagccgcatcggcgctcagtgaagagaaagggcacatcgcctgcagctgccctgccttgccgcgcctcgtccggtgtgtaccacaagacatgtccgactcatcagacaccgacgctacccctcgtcggcgggcgagccgcgccctgcccgtgcgacaggccaagatcaaggcaccagcccgcgcgaccaggtccaatgccgccttcttcgccggcagttccgacaacagccagccctcgtcccccgactccgacaacgcccctcccatccgctacctacggcccctgcccaagaagagaaagcttgactctgcatacacgtcacccgcccctgtcaagccgggcaaacggcgacatatcaaggaggagagtgaggaggacgacgatgacgatgatgatgtcttgttgttgtcgtccgacaccgtcatcccgccctgggagacgctcccgtaccacgtctggctccgtgtcttcgactgcatcgccgcccccatccgcgacagcgctgctcgcatcgaccatgtcgcggaagccgtcgccattttgctagctggagcccgtgcttgtcgggccacacttgagcccgcgttggctgctctgtacaaatgtcccccgttctaccacctctactcaaacaaagctccccagaacgccttcacttctttcctacacactctagctctcgatccctcggctaccttcatccaatacaggcccaaggtcaagacattacgcattgacgttgatgcatgccttagcaagaaggtcgatgatactccaaggacattggagcgcgtggtcagggatcttccgcagttacgcagcctagagttatacagttctttcgataatcctccgtacagagatttgttgactcatctacgatggaaagtcaccgaagacgacatgtctgctgctctccagtctgttgtacctgacggggattccatcatgctaggtcgaacaaagccacttgcgcttgaaagctggcgttggaactcccgtctcttcgacaacagtctcactctcggtcggattgcggagctgcacaagctgcccagctttcaaactctgcgcaaagtggcctatgttaactaccaactcccatccctgactcgctttgcagccagggcccgcgagagtcaggaggcacaagacagtgatcggcaggcgatcgtccaactcgcttcgtcaatctcggtgttacccgatttacaccacctggtgatagagtcgtctactttagctaatggctcgctcctggaaagcctccccaagactctcaaacatctcgaactagtgaattgttgggagattagcagtgaggacttagccctatttctcacctcacacgggagctctcttacccacttgaccttgaaacattgccagtccctgagcttaggctttctgcctgtcctgggagtcgcttgtcccaatcttactcatttggagatggatctgtcctacttccgacaccacgcctcttatgcggataacaagccagaatatgaaattcttcttaatgccgatgaggtcccgacttggccgtcgtcaattcagagcattcaaataatcaacatgcgcaattggaaccgcgaagcagcggagatgttttttgatagtttgaccaagaatgctcagaatttggccggccttcgccgccttgagttcaaagtaatccttgacatagaatggcgccagcgccaggaaatgaggaaatctctggccgatcaaatgtctaaaatattcaagcggaatcccgcacctccaaaagaacacaaaactctgcgaatcaaaatgcaaactcccagtaccccagtcaaggctgaaggcaagtctggaacaagacgtagcactcgaattgcgggcgaatcacctacacctgtctcacccgatgtccatacgttaccctcacttgaaagcgcccgaaaacgatctcgcctttccttgagagaagttcgatcgcttaacactgttgtaccgacctttgatgccgatgatgaagagagtagcgaggacgagctcgctatgaatgatggctcgaatactaagagagctgccaccagaatcaccaaaaatccgaacactcacactgagcctttcattcatggtctttgcgattttgttgacattcaagtcgataatcaacgtcctgctgagcgccagtatgacatggaagacttcttggactcaccggagcaggaagagtccgagtgggagagtaacgaggacgacatcttcgactaatgttgtcttctacgttgatattgtactattgtccaatttttctaacagaaaggggtcagaggtcgatttgcgaccaagagatgaatcacttgtagaaccatcgtgtctgtttcatggagttggcgtcatacggagggtagaaagtgatacccagcttgcaggattcgatgtaacatccgcatcgctattgccttgcgctaagagatagcggatcggattgacgacgacgacttgcaagatagacactgcgataatgaatttaatgagcttatacaactctgtaaatcgctaattgtattgaaatagttgagattatcctaagtgttcctaagtatacttcagcatgctcaatacacttagagtcctaattcaagcgctttcgaattgaaaatttgaagtttgcaacccatgaa

SEQ ID NO: 24570 - DNA, 1887 bp, Muscodor strobelii
  misc_feature: SGI cDNA ID NO. 568379
  misc_feature: Encodes the peptide sequence at SEQ ID NO 24571
atggggaataagctatcagcgcagaacagtgacacgcctgcaaatgaaaatatctcgcctcggcctcacaagcggcgtcgtgttgtcgcagaggactctgccgacgcaggtcgcgccttagcagatcgcctccactccaatgctgagaatggcgagaacgactttgaaaaagcggtccgcgtcgaggtcctatccatcatgcgtgggaacaccgctaagcccaaaccagtgaatcttcactacggcaacggctctccagagaagctggacatccctgtgctcaaagcccgctgcaaactaaccatattcgagcatgtaccgggcaatgtgtctgccgttctctactgcgacagtcaaatgtgcagctttaagctgttcagggattcggatgatacgtgtcggatggctagaatctatctgccagcgccctttgatgtcccagtcgagaagctctacgtccaatccgatattggaggttggcagcttgctcatgaatatctggttcgcgtcgagatcgaattttcagagacggggaaatggccaccgagcgatttgcttacgaaaagggaacttacgagcctgggttccggtaatcctcgacgctggaacctatgctgcacgactctttacgtacttggcaaaggaaagcattccggtgcggtcaaaattcgaaaatcagcgaagccaagcgatgactgtcccgtagatctatcaatggacatggatttccggtggtctgttggtcatacagtgggatgtatcaaacgagtcgggagctctgagcctgcactaaatgaatgcgcaatccacagcaacggtgtgctagaacctcttaccaatggccatgtgaatggcagagcagatcacccgatgaatgactgggataaaatagaaagtgaccgagctggggtggcggacgacgacgaagatgcagacgaggccacaacaccaagtcgatcacttcggacaagagggaaacagaactataacttgaagctacttagtgacaaagctcgaggtaaagagctcaaagagagaaaacaacgcaagctagcaaatattgggaaacgggatggcatggcaacttggtgctcgatcactgcagatcgaacattgcttcagattcttccagtcaacgacgatggcctttattcaccagccgcgagttttgctcactggggccccgatgatcatgactcggagttggagggcgatgaaagccctcaaaaatcaccaaggaagtcattgcatccaaaaaatggcgtgccacagccaccgttgtataagccgcctcaggcgaagcagctcatccccatcacaaaacaacccatatatgaccgcgtcagcaaagcattacttgaacctgggtctctcgttgattcgccgcctgttaatgacacgtggctggtccagaaacaccgagatatcattcgagattacagtgatgtcgacgccggggagaaagagtatatctatgagtgggatgcctttgtaaacagagactgcgtcacatcggagcctcatttgcaagacgtatacatcaggtttgttcaggataaggcctcctggattgtagcatcgcaaaatcggacggcggaatgggcaaaacacctgagctatctgaaatcaaggaatgccctgaccgattctaccatcgctcaagccctttcaataatccgacatctgagatctcaaatgccgcctagtgaaggagaaccagaacccaccaagaccccctcacctagatccgcgtatcgcaaatctgtagcaggatgtgcaatatgcggccaaccagttcggggccctgcctcattgatctgttccaacctggtgagtcttttgggccctgacaacttgaacaaaactaaacttctagcagaactgtga

SEQ ID NO: 24571 - protein, 628 aa, Muscodor strobelii
  misc_feature: SGI Peptide ID NO. 568379
  misc_feature (424)..(609): NCBI GI: 46116958 Blast Desc: FG04321.1 [Gibberella zeae PH-1]
  misc_feature (429)..(609): NCBI GI: 256729418 Blast Desc: NECHADRAFT_47393 [Nectria haematococca mpVI 77-13-4]
  misc_feature (433)..(609): NCBI GI: 145608368 Blast Desc: MGG_03169 [Magnaporthe grisea 70-15] gi|145015849|gb|EDK00339.1| MGG_03169 [Magnaporthe grisea 70-15]
  misc_feature (394)..(609): NCBI GI: 116204733 Blast Desc: CHGG_10250 [Chaetomium globosum CBS 148.51] gi|88176378|gb|EAQ83846.1| CHGG_10250 [Chaetomium globosum CBS 148.51]
  misc_feature (429)..(609): NCBI GI: 171690268 Blast Desc: protein product [Podospora anserina] gi|170945082|emb|CAP71193.1| protein product [Podospora anserina]
  misc_feature (1)..(352): NCBI GI: 116204733 Blast Desc: CHGG_10250 [Chaetomium globosum CBS 148.51] gi|88176378|gb|EAQ83846.1| CHGG_10250 [Chaetomium globosum CBS 148.51]
  misc_feature (418)..(609): NCBI GI: 261354863 Blast Desc: conserved [Verticillium albo-atrum VaMs.102]
  misc_feature (1)..(348): NCBI GI: 164424851 Blast Desc: NCU05460 [Neurospora crassa OR74A] gi|157070690|gb|EAA34215.2| [Neurospora crassa OR74A]
  misc_feature (1)..(348): NCBI GI: 16944518 Blast Desc: [Neurospora crassa]
  misc_feature (1)..(348): NCBI GI: 171690268 Blast Desc: protein product [Podospora anserina] gi|170945082|emb|CAP71193.1| protein product [Podospora anserina]
MGNKLSAQNSDTPANENISPRPHKRRRVVAEDSADAGRALADRLHSNAENGENDFEKAVRVEVLSIMRGNTAKPKPVNLHYGNGSPEKLDIPVLKARCKLTIFEHVPGNVSAVLYCDSQMCSFKLFRDSDDTCRMARIYLPAPFDVPVEKLYVQSDIGGWQLAHEYLVRVEIEFSETGKWPPSDLLTKRELTSLGSGNPRRWNLCCTTLYVLGKGKHSGAVKIRKSAKPSDDCPVDLSMDMDFRWSVGHTVGCIKRVGSSEPALNECAIHSNGVLEPLTNGHVNGRADHPMNDWDKIESDRAGVADDDEDADEATTPSRSLRTRGKQNYNLKLLSDKARGKELKERKQRKLANIGKRDGMATWCSITADRTLLQILPVNDDGLYSPAASFAHWGPDDHDSELEGDESPQKSPRKSLHPKNGVPQPPLYKPPQAKQLIPITKQPIYDRVSKALLEPGSLVDSPPVNDTWLVQKHRDIIRDYSDVDAGEKEYIYEWDAFVNRDCVTSEPHLQDVYIRFVQDKASWIVASQNRTAEWAKHLSYLKSRNALTDSTIAQALSIIRHLRSQMPPSEGEPEPTKTPSPRSAYRKSVAGCAICGQPVRGPASLICSNLVSLLGPDNLNKTKLLAEL

SEQ ID NO: 24572 - DNA, 3062 bp, Muscodor strobelii
  misc_feature: SGI EST ID NO. CUFF.57861.0
  misc_feature: Variant of the nucleotide sequence at SEQ ID NO 24570
gaagatcttcaattccccagtttccccgtcacatgtgcagccgccatatcctctttcaccctcgaccccctcttttcatgcttgctgtatactatttcttttgccctctcagcgatttgatcttttcttgagagttcttcgcctttttatggtggtatatctactaccgtgggactctcttcctaattgcatggccggtcaacaatcgtctcatcgccgacttcacgtcttaatctcaccagccatacctgacttttcatcccgccccacatcgcacataagcctgctcgtgcactctttgtcctcgccttattcttgatcattgttgtccaaagtcgctcgctaaattgtgcttctcaacatgaggcctggctcctccccgtaattcacggtcgtcgtagattgtaaataaatctactctttaattatcacatcgatctcagttctaagcacgtcgccgcaacatcgtggctgtttgcgcccatgttcccctttagagatggagacagtcagcaattaccaacgcgctacctctggatatccacacgatctcgccgagaactttcatcgtgcctggcgaaatattgtgacttccacatctccacgcggcatggggaataagctatcagcgcagaacagtgacacgcctgcaaatgaaaatatctcgcctcggcctcacaagcggcgtcgtgttgtcgcagaggactctgccgacgcaggtcgcgccttagcagatcgcctccactccaatgctgagaatggcgagaacgactttgaaaaagcggtccgcgtcgaggtcctatccatcatgcgtgggaacaccgctaagcccaaaccagtgaatcttcactacggcaacggctctccagagaagctggacatccctgtgctcaaagcccgctgcaaactaaccatattcgagcatgtaccgggcaatgtgtctgccgttctctactgcgacagtcaaatgtgcagctttaagctgttcagggattcggatgatacgtgtcggatggctagaatctatctgccagcgccctttgatgtcccagtcgagaagctctacgtccaatccgatattggaggttggcagcttgctcatgaatatctggttcgcgtcgagatcgaattttcagagacggggaaatggccaccgagcgatttgcttacgaaaagggaacttacgagcctgggttccggtaatcctcgacgctggaacctatgctgcacgactctttacgtacttggcaaaggaaagcattccggtgcggtcaaaattcgaaaatcagcgaagccaagcgatgactgtcccgtagatctatcaatggacatggatttccggtggtctgttggtcatacagtgggatgtatcaaacgagtcgggagctctgagcctgcactaaatgaatgcgcaatccacagcaacggtgtgctagaacctcttaccaatggccatgtgaatggcagagcagatcacccgatgaatgactgggataaaatagaaagtgaccgagctggggtggcggacgacgacgaagatgcagacgaggccacaacaccaagtcgatcacttcggacaagagggaaacagaactataacttgaagctacttagtgacaaagctcgaggtaaagagctcaaagagagaaaacaacgcaagctagcaaatattgggaaacgggatggcatggcaacttggtatataccgactattggagaagtcttactggacaaccatcattgcgcaagatgctatgcaccgcatgcgtctttacatgagctggtagaacacgtcagaactcaccctgatattaggtgctcgatcactgcagatcgaacattgcttcagattcttccagtcaacgacgatggcctttattcaccagccgcgagttttgctcactggggccccgatgatcatgactcggagttggagggcgatgaaagccctcaaaaatcaccaaggaagtcattgcatccaaaaaatggcgtgccacagccaccgttgtataagccgcctcaggcgaagcagctcatccccatcacaaaacaacccatatatgaccgcgtcagcaaagcattacttgaacctgggtctctcgttgattcgccgcctgttaatgacacgtggctggtccagaaacaccgagatatcattcgagattacagtgatgtcgacgccggggagaaagagtatatctatgagtgggatgcctttgtaaacagagactgcgtcacatcggagcctcatttgcaagacgtatacatcaggtttgttcaggataaggcctcctggattgtagcatcgcaaaatcggacggcggaatgggcaaaacacctgagctatctgaaatcaaggaatgccctgaccgattctaccatcgctcaagccctttcaataatccgacatctgagatctcaaatgccgcctagtgaaggagaaccagaacccaccaagaccccctcacctagatccgcgtatcgcaaatctgtagcaggatgtgcaatatgcggccaaccagttcggggccctgcctcattgatctgttccaacctgaactgtgacaaggctctctaccacatagggtgcattcgatctgaggccgtacagcccgtcgagagccgcaattggcggtgcaatacctgccagcctgaatcgacggcttttgcatagaatcatcagaagcgcagcgtaaatagttgaaattataaatgattagatgcttcggtgcatcaacaatgaccatgacaacgaataggacaagctatcggtaaacatgtcttgagcaagtcatcacgatgagttaacccagctgaagcagcagcaaatgtaaaaatgtatcatatcttgcaacaagcaaacatttagatggtccagcaaaagcggtggctagagtcaccatcacatcaattacatcgaacttaaataatgagcggtggatcgtagaatttcataaactaggctgtcagtaagtgaaccgtgactatggcacgaaagtaagggatcggtttccaaaagatggcagttcgtcaaaacgagagatcgaaccaccgacaatacc

SEQ ID NO: 24573 - DNA, 2385 bp, Muscodor strobelii
  misc_feature: SGI cDNA ID NO. 568380
  misc_feature: Reduced expression when VOC is produced
  misc_feature: Encodes the peptide sequence at SEQ ID NO 24574
gtctcccgccacccacaccaacaccaacaccagccccagtatgcccagcagaaccaccaccagcagcagtttatggactggcaacctatggcgcctcccacgaccatcgcctcgcccgtgcccgcctaccaaccacagcagccgtcgccccatcagcggccaacccaacacttgccgcctcagcagccacagcgcgtgcactcccctctagtcgcccactctccccagctccagcaccaacaacaccgccaacacgctaattcacccgccctcgcccattcgaagcatgttgctgcccaccaggccgtcacaaacagccagcacaagacatccgcggccgctgctgcagtccgaggcgaccacgccgcccgcgtgtccgcgagtccacgcatggctacccagccgctcacccggagtccgagcgtgagctcgacgagatcgaccccggccctcgtgccccacttccacgataccaacgccctgctgctatgtgtcgctgaggatctcctgctcagatccaggaagaactccagggacgtcgccggcgcactcgatgagcagaggctgtctgagtatcacaagatggtagccaccgctctgcactgccttgaagtcgcgatcggcagtaacaagctgccacctcgtaccgaagcactcgcccgccttcgctatgccagcactttgtgtctggagaccgccaacgtcatggaggccgagaccgctctgaccaagggcatcaccctgtgcgagagaaatcgtttcgtcgacttgaaatactctatgcatttgttgcaaatcaaattgctgttctcgcagcacaaggacaaggccgcgctgattgccgtggaaacacgcatcaaagaagtggaagtgttgaaatatgtgccttggatttatgccttccgctttctcaaagcgtcgttttatctccagttccccagtcccatagaggcccacgccatggaaaacctgcgagcgatcagcatggtagctaatagcaggggcgatcgagccatctacgtctttgcttcattacttgaagctctgagccatcttcgcgccatgaaggatgatgcccatgtacgcatacagggttgtcttgcccaagcatccaagtaccaattcgaggcatctgcgcgcatcatacaactcgatgtattgactctcatcttggatctggcttgcagtctgcaacagaaagagcccgccatgatagcgcagaagatgaaagctctacagactcgtatggatcagagtgttcgtgatcaaagctggcatgaagtcgacagaaagctatgcctccccatggccaaacaaacgaccggtcagcagaccatcagccaagacacctccagtatattgcaaccaggccaagatggagacgcgtttgattacattgtcctgtccttctggagcaagctggaggcttttgccactcaatatacatacaacggtcttgctctcctctatgtacagccccgtgatgcgaaagatgcgaaagcttccatgagcctgaagctgtgggccgaagccactagccaactggggacgaatgcatcaaaggtccgaggaacacccttctgcttagaggatgcaatccaaaatgccaattgggaaagggaaacaacgtgttatctacatattctgtgcgctttataccacgctgcctcggcggattggaacgaagtgaagaaaagcgtgaaagtattagaaacgatgtccggatcgccattggggaacactactattctatattcgttatacctgcagggggtatatcaccagggaacaggaaacattgaggccgccatccgagtgtacagtgacccgagattaagtctggagtctatcagcgggcgaaatcgaaagcgagctgatacagatgccgcgttgttgtctgctttcaacatgatatggattatgcaagatccgcggtatcgagacgatcaacttacccaggacctactggatcgaatccgtccattctgcacagagtgtccgaatcaagagattcgtacagcgtacaacctcgtcctggcggcaattcacactgatcctccgatgccaatgacgtcggtgaagacgtacatctcgaccgccctgagcaatgctaagagtttcggggacgtccagacgatgtctatggctttgagtctgatgcgagcgaagttattccagagtatcgtgggagaccaggcgttgaagagcgcgaaagctgcccatctacaggcgagacgtagcgggaacacactctggatgagtgttgctgatggcatgctgtcgcagagctacgaggttcaggggcagattgcggaggcccagagggcatggaatgatgcggtgggatacgctaatcgggcgctgccggggagtaatggggagtaa

SEQ ID NO: 24574 - protein, 794 aa, Muscodor strobelii
  misc_feature: SGI Peptide ID NO. 568380
  misc_feature (126)..(790): NCBI GI: 256731378 Blast Desc: NECHADRAFT_105311 [Nectria haematococca mpVI 77-13-4]
  misc_feature (37)..(773): NCBI GI: 171692113 Blast Desc: protein product [Podospora anserina] gi|170946005|emb|CAP72806.1| protein product [Podospora anserina]
  misc_feature (127)..(787): NCBI GI: 85102788 Blast Desc: NCU01303 [Neurospora crassa OR74A] gi|16944590|emb|CAD11365.1| [Neurospora crassa] gi|28922934|gb|EAA32153.1| [Neurospora crassa OR74A]
  misc_feature (128)..(793): NCBI GI: 46125931 Blast Desc: FG07343.1 [Gibberella zeae PH-1]
  misc_feature (127)..(788): NCBI GI: 116206656 Blast Desc: CHGG_02621 [Chaetomium globosum CBS 148.51] gi|88183218|gb|EAQ90686.1| CHGG_02621 [Chaetomium globosum CBS 148.51]
  misc_feature (186)..(729): NCBI GI: 261351638 Blast Desc: conserved [Verticillium albo-atrum VaMs.102]
  misc_feature (83)..(780): NCBI GI: 145609351 Blast Desc: MGG_07531 [Magnaporthe grisea 70-15] gi|145016728|gb|EDK01158.1| MGG_07531 [Magnaporthe grisea 70-15]
  misc_feature (157)..(790): NCBI GI: 154322647 Blast Desc: BC1G_00666 [Botryotinia fuckeliana B05.10] gi|150848000|gb|EDN23193.1| BC1G_00666 [Botryotinia fuckeliana B05.10]
  misc_feature (161)..(790): NCBI GI: 156064861 Blast Desc: SS1G_00438 [Sclerotinia sclerotiorum 1980] gi|154691300|gb|EDN91038.1| SS1G_00438 [Sclerotinia sclerotiorum 1980]
  misc_feature (157)..(774): NCBI GI: 255945787 Blast Desc: Pc20g11750 [Penicillium chrysogenum Wisconsin 54-1255] gi|211588396|emb|CAP86504.1| Pc20g11750 [Penicillium chrysogenum Wisconsin 54-1255]
  misc_feature: Useful for introducing or modulating the production of volatile compounds
VSRHPHQHQHQPQYAQQNHHQQQFMDWQPMAPPTTIASPVPAYQPQQPSPHQRPTQHLPPQQPQRVHSPLVAHSPQLQHQQHRQHANSPALAHSKHVAAHQAVTNSQHKTSAAAAAVRGDHAARVSASPRMATQPLTRSPSVSSTRSTPALVPHFHDTNALLLCVAEDLLLRSRKNSRDVAGALDEQRLSEYHKMVATALHCLEVAIGSNKLPPRTEALARLRYASTLCLETANVMEAETALTKGITLCERNRFVDLKYSMHLLQIKLLFSQHKDKAALIAVETRIKEVEVLKYVPWIYAFRFLKASFYLQFPSPIEAHAMENLRAISMVANSRGDRAIYVFASLLEALSHLRAMKDDAHVRIQGCLAQASKYQFEASARIIQLDVLTLILDLACSLQQKEPAMIAQKMKALQTRMDQSVRDQSWHEVDRKLCLPMAKQTTGQQTISQDTSSILQPGQDGDAFDYIVLSFWSKLEAFATQYTYNGLALLYVQPRDAKDAKASMSLKLWAEATSQLGTNASKVRGTPFCLEDAIQNANWERETTCYLHILCALYHAASADWNEVKKSVKVLETMSGSPLGNTTILYSLYLQGVYHQGTGNIEAAIRVYSDPRLSLESISGRNRKRADTDAALLSAFNMIWIMQDPRYRDDQLTQDLLDRIRPFCTECPNQEIRTAYNLVLAAIHTDPPMPMTSVKTYISTALSNAKSFGDVQTMSMALSLMRAKLFQSIVGDQALKSAKAAHLQARRSGNTLWMSVADGMLSQSYEVQGQIAEAQRAWNDAVGYANRALPGSNGE

SEQ ID NO: 24575 - DNA, 2855 bp, Muscodor strobelii
  misc_feature: SGI EST ID NO. CUFF.58056.0
  misc_feature: Variant of the nucleotide sequence at SEQ ID NO 24573
cgtctcccgccacccacaccaacaccaacaccagccccagtatgcccagcagaaccaccaccagcagcagtttatggactggcaacctatggcgcctcccacgaccatcgcctcgcccgtgcccgcctaccaaccacagcagccgtcgccccatcagcggccaacccaacacttgccgcctcagcagccacagcgcgtgcactcccctctagtcgcccactctccccagctccagcaccaacaacaccgccaacacgctaattcacccgccctcgcccattcgaagcatgttgctgcccaccaggccgtcacaaacagccagcacaagacatccgcggccgctgctgcagtccgaggcgaccacgccgcccgcgtgtccgcgagtccacgcatggctacccagccgctcacccggagtccgagcgtgagctcgacgagatcgaccccggccctcgtgccccacttccacgataccaacgccctgctgctatgtgtcgctgaggatctcctgctcagatccaggaagaactccagggacgtcgccggcgcactcgatgagcagaggctgtctgagtatcacaagatggtagccaccgctctgcactgccttgaagtcgcgatcggcagtaacaagctgccacctcgtaccgaagcactcgcccgccttcgctatgccagcactttgtgtctggagaccgccaacgtcatggaggccgagaccgctctgaccaagggcatcaccctgtgcgagagaaatcgtttcgtcgacttgaaatactctatgcatttgttgcaaatcaaattgctgttctcgcagcacaaggacaaggccgcgctgattgccgtggaaacacgcatcaaagaagtggaagtgttgaaatatgtgccttggatttatgccttccgctttctcaaagcgtcgttttatctccagttccccagtcccatagaggcccacgccatggaaaacctgcgagcgatcagcatggtagctaatagcaggggcgatcgagccatctacgtctttgcttcattacttgaagctctgagccatcttcgcgccatgaaggatgatgcccatgtacgcatacagggttgtcttgcccaagcatccaagtaccaattcgaggcatctgcgcgcatcatacaactcgatgtattgactctcatcttggatctggcttgcagtctgcaacagaaagagcccgccatgatagcgcagaagatgaaagctctacagactcgtatggatcagagtgttcgtgatcaaagctggcatgaagtcgacagaaagctatgcctccccatggccaaacaaacgaccggtcagcagaccatcagccaagacacctccagtatattgcaaccaggccaagatggagacgcgtttgattacattgtcctgtccttctggagcaagctggaggcttttgccactcaatatacatacaacggtcttgctctcctctatgtacagccccgtgatgcgaaagatgcgaaagcttccatgagcctgaagctgtgggccgaagccactagccaactggggacgagtaagaccaggtcacaatatgaaagcatgcttgatacactaacatatactattagatgcatcaaaggtccgaggaacacccttctgcttagaggatgcaatccaaaatgccaattgggaaagggaaacaacgtgttatctacatattctgtgcgctttataccacgctgcctcggcggattggaacgaagtgaagaaaagcgtgaaagtattagaaacgatgtccggatcgccattggggaacactactattctatattcgttatacctgcagggggtatatcaccagggaacaggaaacattgaggccgccatccgagtgtacagtgacccgagattaagtctggagtctatcagcgggcgaaatcgaaagcgagctgatacagatgccgcgttgttgtctgctttcaacatgatatggattatgcaagatccgcggtatcgagacgatcaacttacccaggacctactggatcgaatccgtccattctgcacagagtgtccgaatcaagagattcgtacagcgtacaacctcgtcctggcggcaattcacactgatcctccgatgccaatgacgtcggtgaagacgtacatctcgaccgccctgagcaatgctaagagtttcggggacgtccagacgatgtctatggctttgagtctgatgcgagcgaagttattccagagtatcgtgggagaccaggcgttgaagagcgcgaaagctgcccatctacaggcgagacgtagcgggaacacactctggatgagtgttgctgatggcatgctgtcgcagagctacgaggttcaggggcagattgcggaggcccagagggcatggaatgatgcggtgggatacgctaatcgggcgctgccggggagtaatggggagtaagtatgtctcgacaatgcgattggttgtgtgttcaaccagatgatggcttgagtcctgtcggatacggattgtgcgatgtaccataaaggacgtggacaaaacaaaacggcgtaagatgtttggggtgtgaaatgtaagatcacaggcgttgctcactggatttagggaatgggtaatggccaggtcaatgatatataccctattagtttttttatactgtccttattgatgctttctgattcaagatgtgaataggtttatggatctcagccagcaccacgactagaagcagcaatctacttagctacgactatttcgaccggactatcatagcggctagtgtatgtttccataatgtagtgcacctagattgcgaaaactggaagtgttgccaacgacataagtatcctagcg

SEQ ID NO: 24576 - DNA, 1068 bp, Muscodor strobelii
  misc_feature: SGI cDNA ID NO. 568381
  misc_feature: Encodes the peptide sequence at SEQ ID NO 24577
atggctcctgctcagaagctcaagaccgacttcaagacgtacgagtcggctactcgtctgcttgccgcggtcatcgcgacgacggggtgcaagcttgacttcaaggagctggcaagacatgttggaggtcgcgctaccaaagactctatcaatcaccgtctccgaccgatcaagcatcttgccaagcttcaggttcgcgccctagagcagaatcaggatccaggcgatcttccggtggagactcaagcgattggtgatcttcttgacgccacgccgtcggcaatggagcaccgttttcgcccgatcaagaagttggggcaggagcttacagctcaactgaaagctaacaacaccctcatcaagtgtgctgttgtcaaggctgttgatctgaggcgcgctggtgtgacggcctctagcgagttgcttttggccgaagatgagatccatcgtctcttcggcgagtcgacccctcagggcctcgagtggcagttccgcgatatcaaggctctagctaaggcccagaaggaggcagccaacaatgacgaagatgtcacagccttgagcatcggcaactttggcaagggtggcaaaggagctgccaagaagggagctgtcgctggtgggaaactcgcagctactcccaagaagggagctgctggtagtaagcgaaagcaagccagcaagaaggacgattccgacgacgacaccagcgaggagactatcgacctcggcgacgacagcgacgagccaacccccaagcgtgctaatacgaacaagaagacgaaggccgctgctgctagccccagtgctgtcaagcagcccgctgtgcaggcccaggccagcctttcccctgcagccactcacccagtcacgtccatgttcggcgatggcagcggcgctttcgtcacatcggctgctgacgacaacttcaacatcagccagatgttcgctcacccttccgcgggcaccaaagctgtcaagcaggaggcatccggtgcagcccagtatatgacgtatgatggtgtccgtggttacatggatgaaaaccttgaggacggcgaaatctga

SEQ ID NO: 24577 - protein, 355 aa, Muscodor strobelii
  misc_feature: SGI Peptide ID NO. 568381
  misc_feature (7)..(313): NCBI GI: 85091154 Blast Desc: NCU09544 [Neurospora crassa OR74A] gi|28920147|gb|EAA29527.1| [Neurospora crassa OR74A] gi|38566860|emb|CAE76166.1| [Neurospora crassa]
  misc_feature (1)..(109): NCBI GI: 145612233 Blast Desc: [Magnaporthe grisea 70-15] gi|145019432|gb|EDK03660.1| [Magnaporthe grisea 70-15]
  misc_feature (1)..(269): NCBI GI: 256730935 Blast Desc: NECHADRAFT_84664 [Nectria haematococca mpVI 77-13-4]
  misc_feature (1)..(226): NCBI GI: 46125497 Blast Desc: FG07126.1 [Gibberella zeae PH-1]
  misc_feature (11)..(77): NCBI GI: 116206410 Blast Desc: [Chaetomium globosum CBS 148.51] gi|88183095|gb|EAQ90563.1| [Chaetomium globosum CBS 148.51]
MAPAQKLKTDFKTYESATRLLAAVIATTGCKLDFKELARHVGGRATKDSINHRLRPIKHLAKLQVRALEQNQDPGDLPVETQAIGDLLDATPSAMEHRFRPIKKLGQELTAQLKANNTLIKCAVVKAVDLRRAGVTASSELLLAEDEIHRLFGESTPQGLEWQFRDIKALAKAQKEAANNDEDVTALSIGNFGKGGKGAAKKGAVAGGKLAATPKKGAAGSKRKQASKKDDSDDDTSEETIDLGDDSDEPTPKRANTNKKTKAAAASPSAVKQPAVQAQASLSPAATHPVTSMFGDGSGAFVTSAADDNFNISQMFAHPSAGTKAVKQEASGAAQYMTYDGVRGYMDENLEDGEI

SEQ ID NO: 24578 - DNA, 2397 bp, Muscodor strobelii
  misc_feature: SGI EST ID NO. CUFF.57915.1
  misc_feature: Variant of the nucleotide sequence at SEQ ID NO 24576
cgcagtacttgtatggcattcttttaaatattatgatatgctttgttggtagctcttccaaaccgcatgtcctagaaatatcgctctcaacactttgcttatcccatctatattagccaatcaagcaattcttgttcattgtcaccaaaagatataccgacaatatcaagcaggagcttatgtcctttcaaattatcgtttcccccactactgcagactgctagaagtcaggcctattttcctgggatcaactgaatgtcgagtgctttgactggagtcttcaagtacacaaggaaggcaagagctggtgaagaatctcaagcattccttacagtaatagccttggccgtcgaagaggaaaaagagaaggaaccgaactaccgatttggactgcacccgctccggaggtccgattgccttccgtgttgtccaagacccatccccgtgcccagcttccgggtcccacccaccaatgtttccacgatctgatgccatctaataaactccttagagctgatcggcaccggccaatttggtagtcaccagctcagctactccaaggtcattcttaagcacacacagatcgacctcaaagacgctatctcgtatccaatacgcaatcagagaagttgttgtctcgaactagataatcgtcctgccaactttctatccgagcagcctactctgttgccagctcctctacctcgagacttgactgccatccgagcagtcaacatttgactcatcagcaacctgaaagcggcagtcgtctcacgtattccttcctcgcgacgactattcgctgcagtccgaacgattcttagtttcaacatcagcatcagcatcagcatcctcatatccctctacaagttcccaagtcttctcgttgaccgaacgatcatcattcaccatggctcctgctcagaagctcaagaccgacttcaagacgtacgagtcggctactcgtctgcttgccgcggtcatcgcgacgacggggtgcaagcttgacttcaaggagctggcaagacatgttggaggtcgcgctaccaaagactctatcaatcaccgtctccgaccgatcaagcatcttgccaagcttcaggttcgcgccctagagcagaatcaggatccaggcgatcttccggtggagactcaagagatccatcgtctcttcggcgagtcgacccctcagggcctcgagtggcagttccgcgatatcaaggctctagctaaggcccagaaggaggcagccaacaatgacgaagatgtcacagccttgagcatcggcaactttggcaagggtggcaaaggagctgccaagaagggagctgtcgctggtgggaaactcgcagctactcccaagaagggagctgctggtagtaagcgaaagcaagccagcaagaaggacgattccgacgacgacaccagcgaggagactatcgacctcggcgacgacagcgacgagccaacccccaagcgtgctaatacgaacaagaagacgaaggccgctgctgctagccccagtgctgtcaagcagcccgctgtgcaggcccaggccagcctttcccctgcagccactcacccagtcacgtccatgttcggcgatggcagcggcgctttcgtcacatcggctgctgacgacaacttcaacatcagccagatgttcgctcacccttccgcgggcaccaaagctgtcaagcaggaggcatccggtgcagcccagtatatgacgtatgatggtgtccgtggttacatggatgaaaaccttgaggacggcgaaatctgaattgcctcaacatctcggactgtctgattctatcgcttatgatagaagacaggccctcacctatttttctattcttatcacaacatctgttgccacgcgggaagaacacaaagtatgcaccaaaatgcagagcatagttggtcagcaagtcctggcaaattccgtgctgaattcatttctccttttatgcgcttccatttgatgaaatcactatctcgacaacatcatgttgtgctacgacacgactaggacaaatcgttccctatacccgatttcccgatcttcgccaattgatattggtcttcgcatttcagagaccgcatctcaccactttgccaagccatttgcattaacacagctccggccatggtcgaatgacatgttctcaggagattagtcgcggaacgaagtgagaaaggagacaagaagtagcaacaggaaataggaaaaatttcggaaaaccagagagaaaaaaagggtgcgcatcgggatcactcacggaaagggaccacatggtatcattctcatggctctcgcctataagatgataccctccttagtacaagactgcgttagtacattattatagttaacgttgatttccatcagag

SEQ ID NO: 24579 - DNA, 783 bp, Muscodor strobelii
  misc_feature: SGI cDNA ID NO. 568382
  misc_feature: Encodes the peptide sequence at SEQ ID NO 24580
atgtcaccatcaactcctcgcaaagcccagagccgacatccacagccacccaaccccaacaaccactatatacaacaataccagcatcagccccacggccacgccagaaacagatcccagcaagtccaggcagaggccctccagcaccagttcgcggcatccgactatgagtccgatactgctcagtacatggcttcccacccggccaagcctgccgcccacctggctgccaggaccaacaccgagctcaacatgagcgtcatcaggcgatatgtgcccagcgtcactagtatcctgagcatcgccgccaacgccgtcctctacacctttgagccaccttcggaatggaagcgaatgagcatgctcgaaggcaccatgttcatctgctctcagggggagcacgccggtgaagtgagtgagaacggctgcctcttcatcctcaaccgcaagggcctggacaatctcaccctcgatctcaacactgtcgacgacttcgagctgtccaacgacctccttatcttcaagctgagcccgggagcccacgtgaccatgaagctggagactggcgcgacgattgcaccagaggtcttgggcatctggacatatgccgaagaggactctgagcgccagacaaatgcggctctcatttatgagatgtggtccaaagtgcgcgaagccagggagaagagagcttctgccccccaaaccactgcttctgacccgccgggggccaccggacgcaaggtcgagctaagtgaacttttcagcacacagcagagatag

SEQ ID NO: 24580 - protein, 260 aa, Muscodor strobelii
  misc_feature: SGI Peptide ID NO. 568382
  misc_feature (76)..(216): Pfam Id: PF06058 Pfam Desc: Dcp1-like decapping family
  misc_feature (52)..(257): NCBI GI: 256728604 Blast Desc: NECHADRAFT_51083 [Nectria haematococca mpVI 77-13-4]
  misc_feature (47)..(256): NCBI GI: 39941222 Blast Desc: MGG_05522 [Magnaporthe grisea 70-15] gi|145022194|gb|EDK06214.1| MGG_05522 [Magnaporthe grisea 70-15]
  misc_feature (52)..(226): NCBI GI: 46110419 Blast Desc: FG02091.1 [Gibberella zeae PH-1]
  misc_feature (1)..(258): NCBI GI: 171692637 Blast Desc: protein product [Podospora anserina] gi|170946267|emb|CAP73068.1| protein product [Podospora anserina]
  misc_feature (33)..(257): NCBI GI: 261360974 Blast Desc: conserved [Verticillium albo-atrum VaMs.102]
  misc_feature (49)..(256): NCBI GI: 154299150 Blast Desc: BC1G_11753 [Botryotinia fuckeliana B05.10] gi|150857456|gb|EDN32648.1| BC1G_11753 [Botryotinia fuckeliana B05.10]
  misc_feature (50)..(224): NCBI GI: 156051232 Blast Desc: SS1G_07023 [Sclerotinia sclerotiorum 1980] gi|154704801|gb|EDO04540.1| SS1G_07023 [Sclerotinia sclerotiorum 1980]
  misc_feature (55)..(259): NCBI GI: 238495330 Blast Desc: decapping enzyme Dcp1, [Aspergillus flavus NRRL3357] gi|220695551|gb|EED51894.1| decapping enzyme Dcp1, [Aspergillus flavus NRRL3357]
  misc_feature (62)..(259): NCBI GI: 238839874 Blast Desc: conserved [Microsporum canis CBS 113480]
  misc_feature (54)..(259): NCBI GI: 70998252 Blast Desc: decapping enzyme Dcp1 [Aspergillus fumigatus Af293] gi|66851487|gb|EAL91813.1| decapping enzyme Dcp1, [Aspergillus fumigatus Af293] gi|159126412|gb|EDP51528.1| decapping enzyme
MSPSTPRKAQSRHPQPPNPNNHYIQQYQHQPHGHARNRSQQVQAEALQHQFAASDYESDTAQYMASHPAKPAAHLAARTNTELNMSVIRRYVPSVTSILSIAANAVLYTFEPPSEWKRMSMLEGTMFICSQGEHAGEVSENGCLFILNRKGLDNLTLDLNTVDDFELSNDLLIFKLSPGAHVTMKLETGATIAPEVLGIWTYAEEDSERQTNAALIYEMWSKVREAREKRASAPQTTASDPPGATGRKVELSELFSTQQR

SEQ ID NO: 24581 - DNA, 7820 bp, Muscodor strobelii
  misc_feature: SGI EST ID NO. CUFF.58027.0
  misc_feature: Variant of the nucleotide sequence at SEQ ID NO 24579
gcctagtcaggccacagccgggacacgatgaacagatttaagtgtatctcaacgagaccgggtttacatgttgaatattgaatattgaatcgcagttcgctttacggaaacattacttcatttctcaacgcccgacgacctgtccgggagccaaactgttaaatgagtaaacgcaatcaagtatcgagatggtttccgggatcgcacccgaagctttgcgcccaggaaagagcttgaagtttagtcaatagtactattaatattgatataatcggcacgctgccttttagaatacatattaaatgggttaagactcaatgtagcttaagctctttgatgccattgcgacacgatcgagtacggatttgaatacacgtgcaaatgcacaccgaaagcctctaggcgatctgcgctgcagcattggcacttagtccgtctcacaagtgcaacacagctaatgctcgaattatttcagtatatcaagattaagttaccatgagtttgtagcacttcaaagctcaacggccatgcactacttcggaagtcactcccctgcacgtagggttcagccagcgactctgtcacacgaaataatggtgtaatagcatcagttaaaggaaatcagaccacgctatcgctcagataaattgacaccacccccaaatgcggatccaaaacacaataccaacgagctgggatcgtagtggagtattttggcttagcgtgatctgtacgaaataccaaggcctaacacattgtgggcgctagtagaacgacaatagcttctcttgattttagtttgggcatcctagaatttccgattcaacggctctggatcattgcagacagccaatatcatcattttctctcgtgccgacttgcccgacacttcctattcactcgccaaatggcttgaattgtggcgccacaaatggtcacgctgtatcttggcgccactggcaacctagcgaccgatattgaggcacagcgtcccaaaaaacgaagtcaagaaggtcgagatgcgattcgttaagacattggacagtattcaatctcggttcaaaagccaagaggacgtaaatgtatgaacatactcatagaggtaggtgaggtggcgagcgacataagccgggcgaagtggcatgacagaccttctagaagcaaataagaagcagacgctggagagctaagccaatatataccctactcaaatacaacctacacatgcgaaacgtgcagcataacgagactatttccctccttggatattgagagcgcatttcacggacccgaaccaaatatgctgagatgtaaaagcccgaaaccccctctgcaatactacacaccacaccgtcccccctgcatccagatgcacagcatttcggggttcaggttggtggcgcgggtgatttatttaccaattatgccgtagaatcgtaaagtttcgtgttttaacctgatggctcgtctcttgttgtttcgctgcgacggcttgttgacaatatgaggtctaggattcgcgaagcctaattcaaaaacactccttcaacttgttacactatagattatatgtaggtctgtgtacagttaatgctgaagctatcagtagcggaggggtataactctcgatccaaagcataattcagcccgtggatcctggcatgatgcacaacttaaaggatataatatatgccactaatgtgccccgttgtcgtatatgacctacctactgtagtattcattacggtccttctcgcgcatgaacatctccaagacactactcatcttgtcctcaacagtcttcttctctctcacgctattgaatgccgaggctctgcagatggccacattgaagatctctgctgtctttctctcccatgcaagacgtcgttgaatcgcaccttcattaacggcagacccaggtcgacgaaaactaagactccgcttcccaatagtgctgggcttccttgtgctcagagtctctagttcgtctttgtttaaaggtaggagttcattagcgaccctcgcaagcatcgaggtgagaaatacgaaggagatgttataatatggagcggcagagaggatatcgaggacgatagccttcgcatcatcaatctcagcaggcgatttcgcgttacctatttgcggtagagcctgctcgatctttgcccagagcggagctgttatgattccgtctgtcatactccgaaggaagaggagcaatatctcgctgacaatctccaagcgtttcaacgcgggtacgtcggctttcaacgcatctgaaattggctcgtcattctctaatgcttcgatgattagcccccgtaaggtagcataatcattatctttgtttgtctgatatgtatgctcgtcaaatggccagccagggctcgcccgtgggactttgatatcatctatcatgttctcgtccgcaatcatgcgttctgtaatagcttctatagcctcggtgagtttgaaaagttcggtaggtgaggaatgctgcacttcgagactgtatggaatggatcctttctgttcttgttgatgaatgaatgctttgatcccaccccgtggaacgcgaatcaattcttctagagatcgcccgaagcaagacggttgccatgtcgcccgtatcgaaagaaagtaatctcttccatctattacagataggaccaagacatcttcgagagctgtgcttccttcgttcaaggcgcgcagaagtgacagatcccgaacctcaatgctgatgatcgcattcaccgtttcaccaggttccaaggacatagtagaaccgagcgtgtcatcgttgccctcgccgggactgcttggtgtatgtgcaaacttgaagtccagccatttgggctgcttttcaccagcgtctcgactgtgtggtcgttctaagaaactaaattgagccgcaacgccgccggtattcgcaatagtcaaagatcgagtttcttgtcgcaagaatccaatgtggccaaagtcgatcccatcactgccatctgttgcgcccttttcaccgcttgctctgtaatccctgttatcaacgacaatagtgatgccgggacgcccctcattttcgacgcggtcgagctcttttgccacttcggcgtgtactttggccttcagttcaggcactatagcctcataattcaatgtaaacatcgcgataagaggtttatggtccgaagatgtaatgcgttgatgactcgtgtacaaatcaaggctgatttggtctgtgaacccctctttcgtggttataggctgtgcatcatcatcgtcttcctcatactcgttgtactcatcgacttcgtaagattgatcttttgttgccagtgtctcgctcgaatctgcagcaggatcataatcgaacaacacgctctcgtcatcagccgcctggtcaatccccctctgcttcatgtcttcatctctttttttggcgtcgatctcatcttggtatttcttcgtgtagtcgtcatagtccttgcgggtccgatacagaattcggtcacaccaactaggtgcacgtttcttttcagacgtgtcgaagagacctatcgtaccgacgtcatacttatacgtcggcaaaaacgatatggacccttcccgccaaccctcatgaaaagctttgcgtttcctaatcaccttggatagctgatcatgaggtagtagtgaatcaatagtcgcttggagggatgctggatcatcgtgcggagctggaacaaagtcatcagggtcgggaagctcagcatcttcgacatcttcatcgttatcgcccttatcaaatgatgcttcccgtgaaatcatgcctggtgtagaagtaccgtccgagctgtcgtcatctttattattgagtattattacaccttcttcgccaagaggctgagagctgtcttgtttcgtcacatcatattcgcctcgagcgtggagtgtcagtaggtgtctgatgtcatcaccaggaagaccatccaggcgaaagttaagatcaccgaagaaaaaactgaaatcctcatcgcctatcttgtcaccctcgtcctccgagacgccagcgcgagtaattggagagaattttgcctgggacacgatcttgttatagtcccaacatcggcgatctaggctaccttggtcgtggccagacgcaagatgggagtttgagaagaccaatcgagtagtatcgcccaagagaatgcgcgagacaacggcgcccttgtttcccatgtagcccaacaagcctgtcccaacagacagagtcgattcattggagatggttggcgcgacttcaggagatgcgtatatgagcagcaatagcccgactagctgctgagatgctacgagcgcatagcctttgggcagagccgcctccagagcatcttgccacttggtgacagagcttgggtccgagtaaaaggactgatgcacaagattcaaattgaccatctcctggagccccagaacatacagtccaatcttgtcgccgcccaacactctgatgctcggctcttgatgcgcctcgcttgaccctgtctggtcgacaactgcttcttgcgaggcaccgccctgtcctgcagccaactggagcgggccgtcgtcgctctggaggtcaatgctgttctccgacaggttcagttttgcaaggtctgagtcaaatcgaggctcgagcccttccccatccacaagccaactagccagatctttgtcggtcccggggcatccagccacattccaggagccaatcttgatgcgtattctatgtgtgcgcgtgtactcggctcgtcgggcatgcaccatgcgggagagagagaaatgggtggtcgagggctcgtcatggtcgactccggcaggctcagaagcatcggctgcagacgcgacggatgaatcgcggttggtcatgggcattttggaagaggttgagaccgcgagggcctatgtgtgcaaggagagggtatgaacatggaagagaacagcagtggtacagaaggagctacggcaaagccatgatggtcggcgtctgcgtacctaagagggcattctgggaatgcgacaagagcgacaagagcgacgagagctgatggaggggcagtggtgaagtgcatgtcatggagatctgccatggcggggcttccgcgattacactagtcagcatgtagcattcattaccttgcgaccttctcagctcgttacatgccagccaaacggacaataggcaagctggagatgtgttattcacttgcgcctgtccagcacgagtgtagttcaaaacaataaggcaaaagcaggtcgcgtaagaatcaagcccttcgtgttggtgatactacctcttacgtgacgacagctcttcagagcttacatcagaactcaatctaccttatagaggtgccagtgacgaggtgccgccgccttttatcagtcgcggccgataggcgttgggtactggcccgaagctctgctcttcagcatcccatgcctgtctgcatccatctcaaggttgtcttatcgttatcgtagcttccctgtgcaatggcttctaggcacactcgcagagcagggacccaacgagttctggcgctttacaaacgggtcgattaccgggcagatgacaacatcgtgaaggaggccacggctgcactagctctggcagaagctgcggatcctcacacttaacttatctaaggcccaagccataatattgcaatccagacacattgaatagcctccgtcctgaaccccgccttggaccccgggacgcggcggctgctcttcagctattgccgacgacagctcagaaagcatctgtaccgccggctagctgcgctttccatcttgcgccggactgagcaattgtatctggttgtctgcacatcttccgcgtctctgagttgatgcggcaactctagctttcacaggatatcaagccacgcaatacatctgcgcaacatcttcaatatctatcatgtcaccatcaactcctcgcaaagcccagagccgacatccacagccacccaaccccaacaaccactatatacaacaataccagcatcagccccacggccacgccagaaacagatcccagcaagtccaggcagaggccctccagcaccagttcgcggcatccgactatgagtccgatactgctcagtacatggcttcccacccggccaagcctgccgcccacctggctgccaggaccaacaccgagctcaacatgagcgtcatcaggcgatatgtgcccagcgtcactagtatcctgagcatcgccgccaacgccgtcctctacacctttgagccaccttcggaatggaagcgaatgagcatgctcgaaggcaccatgttcatctgctctcagggggagcacgccggtgaagtgagtgagaacggctgcctcttcatcctcaaccgcaagggcctggacaatctcaccctcgatctcaacactgtcgacgacttcgagctgtccaacgacctccttatcttcaagctgagcccgggagcccacgtgaccatgaagctggagactggcgcgacgattgcaccagaggtcttgggcatctggacatatgccgaagaggactctgagcgccagacaaatgcggctctcatttatgagatgtggtccaaagtgcgcgaagccagggagaagagagcttctgccccccaaaccactgcttctgacccgccgggggccaccggacgcaaggtcgagctaagtgaacttttcagcacacagcagagatagtcgcctgagggtcgccagaggttctggttcaacgtcaaacagtttagttgacggaacttgcaagcgataattcgaccttgcccatcattcctcacccattatccactatgcaaacgatttgattgagcttgtttgccattagccatagaatgctcgtattacgccatttacgatttccaaagcccactgatgcaggtacgcacacactgtcctcatacatcaacacagttgaaaggcatattaagtctgtgtcccaggttgcaaactaccttcttagcgcaaccaatgatgagatattttgtctttttgtccttacaatgacggagcttggcaaaataaaggatactcgcgtcactagcgatgaatttatcatcactgctctatctcacttgaggtagcctcatcatgagacttaacattctgactatctcttgtgcccatagaacttctttggtgacaattgcagtaaaattgtgccgtgtctgacactttgctaggcctaactttccaaatttgtcgaccatcgctatactcctttctatacaacacaacctatgccagacttgacttccttagtacaatgcataccttcgactcctccgcacgtgaaaagactatggccgtcaaagacttccagggccaagtgcaatagtgctgtaatgatgaggacttatacgaggcttccataattaggctcagccaataactggttttatgtcatggatatgctcatatgctactattcaaaaagtctcttttgacaatttaaggagttgcgtgccccctgttgtatttcagagggcctaaatgtcaagagattaagtcaagtactaagggataaagaccattgttttgttttgctactgcatggtctcactactgtgtgttggcacaatactagcatttgcctcaactggtaacatggttgcaagaagtcgcttagttatactagtgatgtttttcgcagaacgctcatggcgattctagatttgaggatcactttatcctaccaaatcgcgatgagatgaagcgattggtctatctctaatgtgggatcacacattcaatagttcgtgtctcaagg

SEQ ID NO: 24582 - DNA, 3177 bp, Muscodor strobelii
  misc_feature: SGI cDNA ID NO. 568383
  misc_feature: Encodes the peptide sequence at SEQ ID NO 24583
atgcccatgaccaaccgcgattcatccgtcgcgtctgcagccgatgcttctgagcctgccggagtcgaccatgacgagccctcgaccacccatttctctctctcccgcatggtgcatgcccgacgagccgagtacacgcgcacacatagaatacgcatcaagattggctcctggaatgtggctggatgccccgggaccgacaaagatctggctagttggcttgtggatggggaagggctcgagcctcgatttgactcagaccttgcaaaactgaacctgtcggagaacagcattgacctccagagcgacgacggcccgctccagttggctgcaggacagggcggtgcctcgcaagaagcagttgtcgaccagacagggtcaagcgaggcgcatcaagagccgagcatcagagtgttgggcggcgacaagattggactgtatgttctggggctccaggagatggtcaatttgaatcttgtgcatcagtccttttactcggacccaagctctgtcaccaagtggcaagatgctctggaggcggctctgcccaaaggctatgcgctcgtagcatctcagcagctagtcgggctattgctgctcatatacgcatctcctgaagtcgcgccaaccatctccaatgaatcgactctgtctgttgggacaggcttgttgggctacatgggaaacaagggcgccgttgtctcgcgcattctcttgggcgatactactcgattggtcttctcaaactcccatcttgcgtctggccacgaccaaggtagcctagatcgccgatgttgggactataacaagatcgtgtcccaggcaaaattctctccaattactcgcgctggcgtctcggaggacgagggtgacaagataggcgatgaggatttcagttttttcttcggtgatcttaactttcgcctggatggtcttcctggtgatgacatcagacacctactgacactccacgctcgaggcgaatatgatgtgacgaaacaagacagctctcagcctcttggcgaagaaggtgtaataatactcaataataaagatgacgacagctcggacggtacttctacaccaggcatgatttcacgggaagcatcatttgataagggcgataacgatgaagatgtcgaagatgctgagcttcccgaccctgatgactttgttccagctccgcacgatgatccagcatccctccaagcgactattgattcactactacctcatgatcagctatccaaggtgattaggaaacgcaaagcttttcatgagggttggcgggaagggtccatatcgtttttgccgacgtataagtatgacgtcggtacgataggtctcttcgacacgtctgaaaagaaacgtgcacctagttggtgtgaccgaattctgtatcggacccgcaaggactatgacgactacacgaagaaataccaagatgagatcgacgccaaaaaaagagatgaagacatgaagcagagggggattgaccaggcggctgatgacgagagcgtgttgttcgattatgatcctgctgcagattcgagcgagacactggcaacaaaagatcaatcttacgaagtcgatgagtacaacgagtatgaggaagacgatgatgatgcacagcctataaccacgaaagaggggttcacagaccaaatcagccttgatttgtacacgagtcatcaacgcattacatcttcggaccataaacctcttatcgcgatgtttacattgaattatgaggctatagtgcctgaactgaaggccaaagtacacgccgaagtggcaaaagagctcgaccgcgtcgaaaatgaggggcgtcccggcatcactattgtcgttgataacagggattacagagcaagcggtgaaaagggcgcaacagatggcagtgatgggatcgactttggccacattggattcttgcgacaagaaactcgatctttgactattgcgaataccggcggcgttgcggctcaatttagtttcttagaacgaccacacagtcgagacgctggtgaaaagcagcccaaatggctggacttcaagtttgcacatacaccaagcagtcccggcgagggcaacgatgacacgctcggttctactatgtccttggaacctggtgaaacggtgaatgcgatcatcagcattgaggttcgggatctgtcacttctgcgcgccttgaacgaaggaagcacagctctcgaagatgtcttggtcctatctgtaatagatggaagagattactttctttcgatacgggcgacatggcaaccgtcttgcttcgggcgatctctagaagaattgattcgcgttccacggggtgggatcaaagcattcattcatcaacaagaacagaaaggatccattccatacagtctcgaagtgcagcattcctcacctaccgaacttttcaaactcaccgaggctatagaagctattacagaacgcatgattgcggacgagaacatgatagatgatatcaaagtcccacgggcgagccctggctggccatttgacgagcatacatatcagacaaacaaagataatgattatgctaccttacgggggctaatcatcgaagcattagagaatgacgagccaatttcagatgcgttgaaagccgacgtacccgcgttgaaacgcttggagattgtcagcgagatattgctcctcttccttcggagtatgacagacggaatcataacagctccgctctgggcaaagatcgagcaggctctaccgcaaataggtaacgcgaaatcgcctgctgagattgatgatgcgaaggctatcgtcctcgatatcctctctgccgctccatattataacatctccttcgtatttctcacctcgatgcttgcgagggtcgctaatgaactcctacctttaaacaaagacgaactagagactctgagcacaaggaagcccagcactattgggaagcggagtcttagttttcgtcgacctgggtctgccgttaatgaaggtgcgattcaacgacgtcttgcatgggagagaaagacagcagagatcttcaatgtggccatctgcagagcctcggcattcaatagcgtgagagagaagaagactgttgaggacaagatgagtagtgtcttggagatgttcatgcgcgagaaggaccgtaatgaatactacagtaggtag

SEQ ID NO: 24583 - protein, 1058 aa, Muscodor strobelii
  misc_feature: SGI Peptide ID NO. 568383
  misc_feature (53)..(579): Pfam Id: PF03372 Pfam Desc: Endonuclease/Exonuclease/phosphatase family
  misc_feature (147)..(579): Pfam Id: PF03372 Pfam Desc: Endonuclease/Exonuclease/phosphatase family
  misc_feature (3)..(1048): NCBI GI: 261360973 Blast Desc: type II inositol-1,4,5-trisphosphate 5-phosphatase [Verticillium albo-atrum VaMs.102]
  misc_feature (17)..(1048): NCBI GI: 256728776 Blast Desc: [Nectria haematococca mpVI 77-13-4]
  misc_feature (25)..(1047): NCBI GI: 46110417 Blast Desc: FG02090.1 [Gibberella zeae PH-1]
  misc_feature (33)..(1050): NCBI GI: 85104070 Blast Desc: NCU01047 [Neurospora crassa OR74A] gi|18376182|emb|CAD21299.1| related to inositol polyphosphate 5-phosphatase ocrl-1 [Neurospora crassa] conserved [Neurospora
  misc_feature (19)..(1048): NCBI GI: 156051234 Blast Desc: SS1G_07024 [Sclerotinia sclerotiorum 1980] gi|154704802|gb|EDO04541.1| SS1G_07024 [Sclerotinia sclerotiorum 1980]
  misc_feature (3)..(1051): NCBI GI: 171692635 Blast Desc: protein product [Podospora anserina] gi|170946266|emb|CAP73067.1| protein product [Podospora anserina]
  misc_feature (28)..(1050): NCBI GI: 116198599 Blast Desc: CHGG_07455 [Chaetomium globosum CBS 148.51] gi|88178734|gb|EAQ86202.1| CHGG_07455 [Chaetomium globosum CBS 148.51]
  misc_feature (33)..(1048): NCBI GI: 154299148 Blast Desc: BC1G_11752 [Botryotinia fuckeliana B05.10] gi|150857455|gb|EDN32647.1| BC1G_11752 [Botryotinia fuckeliana B05.10]
  misc_feature (12)..(1038): NCBI GI: 39941224 Blast Desc: MGG_05523 [Magnaporthe grisea 70-15] gi|145022195|gb|EDK06215.1| MGG_05523 [Magnaporthe grisea 70-15]
  misc_feature (33)..(1048): NCBI GI: 169778069 Blast Desc: [Aspergillus oryzae RIB40] gi|83772237|dbj|BAE62367.1| protein product [Aspergillus oryzae]
MPMTNRDSSVASAADASEPAGVDHDEPSTTHFSLSRMVHARRAEYTRTHRIRIKIGSWNVAGCPGTDKDLASWLVDGEGLEPRFDSDLAKLNLSENSIDLQSDDGPLQLAAGQGGASQEAVVDQTGSSEAHQEPSIRVLGGDKIGLYVLGLQEMVNLNLVHQSFYSDPSSVTKWQDALEAALPKGYALVASQQLVGLLLLIYASPEVAPTISNESTLSVGTGLLGYMGNKGAVVSRILLGDTTRLVFSNSHLASGHDQGSLDRRCWDYNKIVSQAKFSPITRAGVSEDEGDKIGDEDFSFFFGDLNFRLDGLPGDDIRHLLTLHARGEYDVTKQDSSQPLGEEGVIILNNKDDDSSDGTSTPGMISREASFDKGDNDEDVEDAELPDPDDFVPAPHDDPASLQATIDSLLPHDQLSKVIRKRKAFHEGWREGSISFLPTYKYDVGTIGLFDTSEKKRAPSWCDRILYRTRKDYDDYTKKYQDEIDAKKRDEDMKQRGIDQAADDESVLFDYDPAADSSETLATKDQSYEVDEYNEYEEDDDDAQPITTKEGFTDQISLDLYTSHQRITSSDHKPLIAMFTLNYEAIVPELKAKVHAEVAKELDRVENEGRPGITIVVDNRDYRASGEKGATDGSDGIDFGHIGFLRQETRSLTIANTGGVAAQFSFLERPHSRDAGEKQPKWLDFKFAHTPSSPGEGNDDTLGSTMSLEPGETVNAIISIEVRDLSLLRALNEGSTALEDVLVLSVIDGRDYFLSIRATWQPSCFGRSLEELIRVPRGGIKAFIHQQEQKGSIPYSLEVQHSSPTELFKLTEAIEAITERMIADENMIDDIKVPRASPGWPFDEHTYQTNKDNDYATLRGLIIEALENDEPISDALKADVPALKRLEIVSEILLLFLRSMTDGIITAPLWAKIEQALPQIGNAKSPAEIDDAKAIVLDILSAAPYYNISFVFLTSMLARVANELLPLNKDELETLSTRKPSTIGKRSLSFRRPGSAVNEGAIQRRLAWERKTAEIFNVAICRASAFNSVREKKTVEDKMSSVLEMFMREKDRNEYYSR

SEQ ID NO: 24584 - DNA, 1443 bp, Muscodor strobelii
  misc_feature: SGI cDNA ID NO. 568384
  misc_feature: Elevated expression when VOC is produced
  misc_feature: Encodes the peptide sequence at SEQ ID NO 24585
atgtcgagtgccgatgtgctgccatacaatggcacagtgggcgtggctgatcccggttattccaccgaaaccactaacttaaacctcttttacgatagcggtaatttcgcctggatcatcacagcctcggcgcttgtgcttctcatgattccgggtgttggtttcttctactcaggcttggccagacgcaagtctgctcttagtctaatcatgttgtccatgctatcggtggctgtggtagattttcaatggtttttctggggttatagcttggctttctctcataccggcagtgcctacatcggcgatctctccaactttggtctcatgaagactctagcgcagccctcgacgggcagcaccgctatgcctgatattctcttctgcctctaccagggcatgttcgctgccatcacacccgctcttgctattggtgctgctgtcgatcgtgctcgcattctcccttgcatcgtctttatcttcgtatggtcgaccatcgtgtatgatcccatcgcttactggacctggaacgccaacggatggtctttcaagctcggcggtcttgattttgctggtggtacgcccgtccacatctcgtctggttccgctgctcttgcctactccgtcatgctcggcaagcgtactggctacgacaagaccgctggtctaccttaccgaccccataatgtcacgcacattgtcctcggaactgttttcctctgggttggttggttcggattcaacggtggctctgccctctctgccaatctgcgtgccgtaatggcttgcatcgtcacccatctggcggcctccgttggtgccattacctggatgttgctagattatagactggagaagaaatggtctgtcgtgggcttctgctctggtgccattgctgggttggtcgctatcacacccgcctccggttacgttaccccctgggctgccgtcatttacggcgttgttggtggaattggctgcaatgttgctaccaagctcaagttcttgatcggtgtagatgacgcgctcgatatcttcgctgttcacgctatcggaggtatcattggtaacttgctgaccggtctcttcgctgctgattacatagctgcattggacggttcgaccgcgattccaggaggttggattaaccacaactacattcagctcgcttatcagctcgctgattctgttgccggctgctcttactcatttgtcttgacctgcgttatcttgttcatcatgaacttgattcccggcctgagcctccgtgcttcccccgaggatgaggacaccggtcttgatgatgctgagctcggcgaattcgcgtatgactacgttgagcttcagcgacacacttcagatgtcatccctggtgagctgatagagcgctccagctcctctaagggcagtgtgccagagaaatcctctgagatacccgcataa

SEQ ID NO: 24585 - protein, 480 aa, Muscodor strobelii
  misc_feature: SGI Peptide ID NO. 568384
  misc_feature (37)..(443): Pfam Id: PF00909 Pfam Desc: Ammonium Transporter Family
  misc_feature (1)..(476): NCBI GI: 116198645 Blast Desc: CHGG_07478 [Chaetomium globosum CBS 148.51] gi|88178757|gb|EAQ86225.1| CHGG_07478 [Chaetomium globosum CBS 148.51]
  misc_feature (1)..(475): NCBI GI: 85104138 Blast Desc: ammonium transporter MEP2 [Neurospora crassa OR74A] gi|18376210|emb|CAD21326.1| ammonium transporter MEPa [Neurospora crassa] gi|28923225|gb|EAA32441.1| ammonium transporter MEP2
  misc_feature (1)..(479): NCBI GI: 171693439 Blast Desc: protein product [Podospora anserina] gi|170946668|emb|CAP73471.1| protein product [Podospora anserina]
  misc_feature (1)..(477): NCBI GI: 39941230 Blast Desc: MGG_05526 [Magnaporthe grisea 70-15] gi|145022199|gb|EDK06219.1| MGG_05526 [Magnaporthe grisea 70-15]
  misc_feature (6)..(478): NCBI GI: 242768292 Blast Desc: ammonium transporter (Mep2), [Talaromyces stipitatus ATCC 10500] gi|218724735|gb|EED24152.1| ammonium transporter (Mep2), [Talaromyces stipitatus ATCC 10500]
  misc_feature (8)..(454): NCBI GI: 117557484 Blast Desc: ammonium permease [Gibberella fujikuroi]
  misc_feature (6)..(480): NCBI GI: 17221150 Blast Desc: high affinity ammonium transporter [Tuber borchii]
  misc_feature (8)..(454): NCBI GI: 46110425 Blast Desc: FG02094.1 [Gibberella zeae PH-1]
  misc_feature (7)..(472): NCBI GI: 115491497 Blast Desc: ammonium transporter MEP2 [Aspergillus terreus NIH2624] gi|114197236|gb|EAU38936.1| ammonium transporter MEP2 [Aspergillus terreus NIH2624]
  misc_feature (6)..(478): NCBI GI: 212542533 Blast Desc: ammonium transporter (Mep2), [Penicillium marneffei ATCC 18224] gi|210066328|gb|EEA20421.1| ammonium transporter (Mep2), [Penicillium marneffei ATCC 18224]
  misc_feature: Useful for introducing or modulating the production of volatile compounds
MSSADVLPYNGTVGVADPGYSTETTNLNLFYDSGNFAWIITASALVLLMIPGVGFFYSGLARRKSALSLIMLSMLSVAVVDFQWFFWGYSLAFSHTGSAYIGDLSNFGLMKTLAQPSTGSTAMPDILFCLYQGMFAAITPALAIGAAVDRARILPCIVFIFVWSTIVYDPIAYWTWNANGWSFKLGGLDFAGGTPVHISSGSAALAYSVMLGKRTGYDKTAGLPYRPHNVTHIVLGTVFLWVGWFGFNGGSALSANLRAVMACIVTHLAASVGAITWMLLDYRLEKKWSVVGFCSGAIAGLVAITPASGYVTPWAAVIYGVVGGIGCNVATKLKFLIGVDDALDIFAVHAIGGIIGNLLTGLFAADYIAALDGSTAIPGGWINHNYIQLAYQLADSVAGCSYSFVLTCVILFIMNLIPGLSLRASPEDEDTGLDDAELGEFAYDYVELQRHTSDVIPGELIERSSSSKGSVPEKSSEIPA

SEQ ID NO: 24586 - DNA, 1799 bp, Muscodor strobelii
  misc_feature: SGI EST ID NO. CUFF.57927.0
  misc_feature: Variant of the nucleotide sequence at SEQ ID NO 24584
cccccggcttcccggccttcgtctcctcttctctcctttcgtgatttgtctcacttttcttgtcagtcaaccagcgacagactggtccgtgtgtgtcatcagaagggaacggtgccctttcgacaacctttctgttcgaggataggaccttcacacttccatcgaaccggcgaaactccatccatcccgtcgtcaatatgtcgagtgccgatgtgctgccatacaatggcacagtgggcgtggctgatcccggttattccaccgaaaccactaacttaaacctcttttacgatagcggtaatttcgcctggatcatcacagcctcggcgcttgtgcttctcatgattccgggtgttggtttcttctactcaggcttggccagacgcaagtctgctcttagtctaatcatgttgtccatgctatcggtggctgtggtagattttcaatggtttttctggggttatagcttggctttctctcataccggcagtgcctacatcggcgatctctccaactttggtctcatgaagactctagcgcagccctcgacgggcagcaccgctatgcctgatattctcttctgcctctaccagggcatgttcgctgccatcacacccgctcttgctattggtgctgctgtcgatcgtgctcgcattctcccttgcatcgtctttatcttcgtatggtcgaccatcgtgtatgatcccatcgcttactggacctggaacgccaacggatggtctttcaagctcggcggtcttgattttgctggtggtacgcccgtccacatctcgtctggttccgctgctcttgcctactccgtcatgctcggcaagcgtactggctacgacaagaccgctggtctaccttaccgaccccataatgtcacgcacattgtcctcggaactgttttcctctgggttggttggttcggattcaacggtggctctgccctctctgccaatctgcgtgccgtaatggcttgcatcgtcacccatctggcggcctccgttggtgccattacctggatgttgctagattatagactggagaagaaatggtctgtcgtgggcttctgctctggtgccattgctgggttggtcgctatcacacccgcctccggttacgttaccccctgggctgccgtcatttacggcgttgttggtggaattggctgcaatgttgctaccaagctcaagttcttgatcggtgtagatgacgcgctcgatatcttcgctgttcacgctatcggaggtatcattggtaacttgctgaccggtctcttcgctgctgattacatagctgcattggacggttcgaccgcgattccaggaggttggattaaccacaactacattcagctcgcttatcagctcgctgattctgttgccggctgctcttactcatttgtcttgacctgcgttatcttgttcatcatgaacttgattcccggcctgagcctccgtgcttcccccgaggatgaggacaccggtcttgatgatgctgagctcggcgaattcgcgtatgactacgttgagcttcagcgacacacttcagatgtcatccctggtgagctgatagagcgctccagctcctctaagggcagtgtgccagagaaatcctctgagatacccgcataagcatctgtgaagacgaatttaacatagaaaagcggattttgtatagagcgtttatacatcgtgttgaatcttggttttggttagctgtgctctgaacacataaccgtttcttgttgatatatcaatttccataatacccatagcgaattatacccactt

SEQ ID NO: 24587 - DNA, 1032 bp, Muscodor strobelii
  misc_feature: SGI cDNA ID NO. 568385
  misc_feature: Encodes the peptide sequence at SEQ ID NO 24588
atggctgcgaagcgagtcagaggcgctgaagccgcaaccgagtcaacactgcaacaacagcgaagacgatatcaagcagggcatcgcgacgaaatcgacgacatgacagatcatttcctacgattcagcgtcagtacggcgtacatacccttcacgcacggaaaaaatgctttctggctgctattgactgaagatcctggccggcccgacgaatcagcccgcaatcctctccaagattttgctctgaggcctgcaaaggatgttagagatgcccgcagaaaatgggatattctgttccccatgatagccgcatttcagctaaaggtcaaatggcatcactttaatcctgaacacggcttcgacgagagtggcgcttttcaacaacaagcgcgctttctcgcccagctatataactatgaagaagagcttgacaatctgacaattgacccggaagatagcgttgctgtcgagcgtttcgaggtcctgcgcctacagcatctcgtagctttcgtctttgtctcctgttgtctagaccggacggagcagtcatatgatgactgccttccgcaattttggaacatccttcggcgctgccgcccactagttgagaaagcttacaaacagcgctcacgaattgggttcagtagtgacaacggcgtgctgatgtccctctgttttgttggtgggaaatgtcgcgatcaaaacgtgcgaatcgaagccctggacttaatcctcaaatatgacggcagagaaggaggcattgagagtctgagtctggctgcatcactaaaagaactcatgaagcttgaagggcaatcggaagctttaaataaatatcaaacccggtcaaagccagacgagagtgttgtgtgcgcagactctggtattccatcaccagagaacaggtacgcctggatcgatgcttggcgcgacatggaacttccgcgctttgctatggttttctcgaagatcctaccaagtgtcacgggcgagttcgagaaacatagtgaatgggtttacctgaagcaatag

SEQ ID NO: 24588 - protein, 343 aa, Muscodor strobelii
  misc_feature: SGI Peptide ID NO. 568385
  misc_feature (132)..(311): NCBI GI: 46139683 Blast Desc: FG11356.1 [Gibberella zeae PH-1]
  misc_feature (90)..(281): NCBI GI: 145251495 Blast Desc: An15g07350 [Aspergillus niger] gi|134082795|emb|CAK48569.1| protein product [Aspergillus niger]
  misc_feature (161)..(260): NCBI GI: 119499604 Blast Desc: NFIA_101460 [Neosartorya fischeri NRRL 181] gi|119414724|gb|EAW24662.1| conserved [Neosartorya fischeri NRRL 181]
  misc_feature (32)..(272): NCBI GI: 156035595 Blast Desc: SS1G_13001 [Sclerotinia sclerotiorum 1980] gi|154698406|gb|EDN98144.1| SS1G_13001 [Sclerotinia sclerotiorum 1980]
  misc_feature (132)..(270): NCBI GI: 238500209 Blast Desc: sugar transporter, [Aspergillus flavus NRRL3357] gi|220693092|gb|EED49438.1| sugar transporter, [Aspergillus flavus NRRL3357]
  misc_feature (32)..(272): NCBI GI: 154312413 Blast Desc: BC1G_05809 [Botryotinia fuckeliana B05.10] gi|150849910|gb|EDN25103.1| BC1G_05809 [Botryotinia fuckeliana B05.10]
  misc_feature (156)..(270): NCBI GI: 145251199 Blast Desc: An15g05840 [Aspergillus niger] gi|134082643|emb|CAK42537.1| protein product [Aspergillus niger]
  misc_feature (127)..(252): NCBI GI: 156053479 Blast Desc: SS1G_06907 [Sclerotinia sclerotiorum 1980] gi|154704685|gb|EDO04424.1| SS1G_06907 [Sclerotinia sclerotiorum 1980]
  misc_feature (133)..(270): NCBI GI: 169779547 Blast Desc: [Aspergillus oryzae RIB40] gi|83772977|dbj|BAE63105.1| protein product [Aspergillus oryzae]
  misc_feature (145)..(252): NCBI GI: 154292733 Blast Desc: BC1G_14751 [Botryotinia fuckeliana B05.10] gi|150845833|gb|EDN21026.1| BC1G_14751 [Botryotinia fuckeliana B05.10]
MAAKRVRGAEAATESTLQQQRRRYQAGHRDEIDDMTDHFLRFSVSTAYIPFTHGKNAFWLLLTEDPGRPDESARNPLQDFALRPAKDVRDARRKWDILFPMIAAFQLKVKWHHFNPEHGFDESGAFQQQARFLAQLYNYEEELDNLTIDPEDSVAVERFEVLRLQHLVAFVFVSCCLDRTEQSYDDCLPQFWNILRRCRPLVEKAYKQRSRIGFSSDNGVLMSLCFVGGKCRDQNVRIEALDLILKYDGREGGIESLSLAASLKELMKLEGQSEALNKYQTRSKPDESVVCADSGIPSPENRYAWIDAWRDMELPRFAMVFSKILPSVTGEFEKHSEWVYLKQ

SEQ ID NO: 24589 - DNA, 2042 bp, Muscodor strobelii
  misc_feature: SGI EST ID NO. CUFF.57934.0
  misc_feature: Variant of the nucleotide sequence at SEQ ID NO 24587
cgcctgcgacgtcgattgctggttcaattgctacgtcacaaaatgagcgcaaaaacgacagcaagttgatacggaaaagggcgagtaagcccaaagttcgcacaggatgtgtcagttgcaaaaggcgtcatgtaagtcataattcttcacacaatacatgcagatgactgacacgatatacaggtgaaatgcgatgaaggtaaaccaacatgtaacgagtgtaagcgagttgggctcgtttgtgagggatatcaccccaaccagacatcaaaagcacaatcggcgcgcaatatattgcccaggttggcgtcgacaactaccctcgcagctcggccaagggctgctcaagccagcaccgctgctctcgctccgcgacagaatttagatacaccgaaaattttgcagaggccctctttaggcttctcgttgacggatgacgagatgtggtatttcaccatcttcaaagagcaaatcccgcaagaactatgtccgcactcagatagcggcttttggacgggtacatctctccgggctttcatgggaaacgagtgtattcgccattccattctgagcataggggcccaagttcatgctttgaggcaggatcgtgagagctttcctgagccgggtgctaggctgcaacgacgatggaagatattcgggccgtcaaatcgacactaccaggccgcactccaacatcacacacaagccctctcacatcttcgatcgagtatcgagaagcaagggatagacgataaaatatcgatggcggctaatcttttatttattgtattcgagtggatgatgggtagcggcgcagctttgttagtccacaacggaattatggctgcgaagcgagtcagaggcgctgaagccgcaaccgagtcaacactgcaacaacagcgaagacgatatcaagcagggcatcgcgacgaaatcgacgacatgacagatcatttcctacgattcagcgtcagtacggcgtacatacccttcacgcacggaaaaaatgctttctggctgctattgactgaagatcctggccggcccgacgaatcagcccgcaatcctctccaagattttgctctgaggcctgcaaaggatgttagagatgcccgcagaaaatgggatattctgttccccatgatagccgcatttcagctaaaggtcaaatggcatcactttaatcctgaacacggcttcgacgagagtggcgcttttcaacaacaagcgcgctttctcgcccagctatataactatgaagaagagcttgacaatctgacaattgacccggaagatagcgttgctgtcgagcgtttcgaggtcctgcgcctacagcatctcgtagctttcgtctttgtctcctgttgtctagaccggacggagcagtcatatgatgactgccttccgcaattttggaacatccttcggcgctgccgcccactagttgagaaagcttacaaacagcgctcacgaattgggttcagtagtgacaacggcgtgctgatgtccctctgttttgttggtgggaaatgtcgcgatcaaaacgtgcgaatcgaagccctggacttaatcctcaaatatgacggcagagaaggaggcattgagagtctgagtctggctgcatcactaaaagaactcatgaagcttgaagggcaatcggaagctttaaataaatatcaaacccggtcaaagccagacgagagtgttgtgtgcgcagactctggtattccatcaccagagaacaggtacgcctggatcgatgcttggcgcgacatggaacttccgcgctttgctatggttttctcgaagatcctaccaagtgtcacgggcgagttcgagaaacatagtgaatgggtttacctgaagcaatagacatcacaactctggagatataggattacagaatgtacaagtataagactagacttacgagagatgatgatacaatgacagttatgatggattaagcatggttgggagcgatgttattcaacggctagatactagagtatatcaatgagatgctctccctatagaac

SEQ ID NO: 24590 - DNA, 528 bp, Muscodor strobelii
  misc_feature: SGI cDNA ID NO. 568386
  misc_feature: Reduced expression when VOC is produced
  misc_feature: Encodes the peptide sequence at SEQ ID NO 24591
atgcaatgcctcgataccatcagcgatgaagcattggctgaagatggcgattcgtccgaaaacgacaaaggcctggacgaagatagcgagtccgatgataacgatgctacaactcgcaaaaagaaacttacgatgcacacaaacgacgattcgtccccgcccagttcagacgatgaagacgatagcgatagtgcgagcctatctagtgcatctaatctttcactctcggatttcaagaaagtaaaaaatatatttcgcaatccagtagagggagtcacgcaagcagctactaaaacgcttgcaccggggcacaatgatccagatgacggctctcgaggtgtgcaggcacaactacgagactacaaggatcatcataagcaacttcaccgaaagcatcgtggcatcatgcagtggcgtgcggcacgggaggtcgatcatattggcgggaagttgactagactgaagggaaatatcagtcaagtctttcaacatggtgacaaagatacgggagttgagactgaagtttga

SEQ ID NO: 24591 - protein, 175 aa, Muscodor strobelii
  misc_feature: SGI Peptide ID NO. 568386
  misc_feature (1)..(175): NCBI GI: 145607421 Blast Desc: MGG_12184 [Magnaporthe grisea 70-15] gi|145014979|gb|EDJ99547.1| MGG_12184 [Magnaporthe grisea 70-15]
  misc_feature (105)..(175): NCBI GI: 85068406 Blast Desc: NCU08064 [Neurospora crassa OR74A] gi|28927000|gb|EAA35959.1| [Neurospora crassa OR74A]
  misc_feature (108)..(175): NCBI GI: 171677153 Blast Desc: protein product [Podospora anserina] gi|170936644|emb|CAP61303.1| protein product [Podospora anserina]
  misc_feature (117)..(175): NCBI GI: 256735398 Blast Desc: NECHADRAFT_98912 [Nectria haematococca mpVI 77-13-4]
  misc_feature (108)..(174): NCBI GI: 169601024 Blast Desc: SNOG_03366 [Phaeosphaeria nodorum SN15] gi|111067451|gb|EAT88571.1| SNOG_03366 [Phaeosphaeria nodorum SN15]
  misc_feature (113)..(175): NCBI GI: 169843722 Blast Desc: CC1G_10257 [Coprinopsis cinerea okayama7#130] gi|116510294|gb|EAU93189.1| CC1G_10257 [Coprinopsis cinerea okayama7#130]
  misc_feature (117)..(175): NCBI GI: 39973519 Blast Desc: MGG_01094 [Magnaporthe grisea 70-15] gi|145017943|gb|EDK02222.1| MGG_01094 [Magnaporthe grisea 70-15]
  misc_feature (110)..(174): NCBI GI: 189193985 Blast Desc: meiotically up-regulated gene 190 protein [Pyrenophora tritici-repentis Pt-1C-BFP] gi|187978895|gb|EDU45521.1| meiotically up-regulated gene 190 protein [Pyrenophora Pt-1C-BFP]
  misc_feature: Useful for introducing or modulating the production of volatile compounds
MQCLDTISDEALAEDGDSSENDKGLDEDSESDDNDATTRKKKLTMHTNDDSSPPSSDDEDDSDSASLSSASNLSLSDFKKVKNIFRNPVEGVTQAATKTLAPGHNDPDDGSRGVQAQLRDYKDHHKQLHRKHRGIMQWRAAREVDHIGGKLTRLKGNISQVFQHGDKDTGVETEV

SEQ ID NO: 24592 - DNA, 3508 bp, Muscodor strobelii
  misc_feature: SGI EST ID NO. CUFF.57946.0
  misc_feature: Variant of the nucleotide sequence at SEQ ID NO 24590
atcagactataccgaataagaaagagactaatatgttttaattcattagatttgaagacgaagtctgggattctgcacgccgcgaagaacacgcaattttggggaatgacgaagagctgcccgaaagcactcagtggctcaatagtttgattgcctctatttggcctttagtgaatccagatctcttcgcgtcgctggtggaccaaattgaggatgtgatgcaggcatcgctgcccaaggtcatccgaatggtcagtgtcgatgacatgggacaaggcagcgagtcgattcgtatcttgggtgtccgatggttaccttctggtgctgcgagtcagactgttgagtcagatggaaagctgcaaaaagactccagagcttcccagaatgaccgtacagatcctgggaacccccaggatatgactggtgaaggcgataccgatacttctgaccaagctcaaggagatgacgacaagaaccagaactccaagcagcaggaatccgaagaggttgccatgcgggaaggcatggaggcagaagaaggagattttatcaaccttgaattggcccttgcttatcgcagtcgtccgtctggtcaatcttttaggtcaaaggttaggagtgcccatctctacctcaaattctacctaccaggcggaattgcaatcccggtctgggtgcagctgagaggtatcgtcatgactcttcgccttagattgcaactcacgcccgatcctcctttcatttcgctttgtactttgacctttctcggacagcctaaagcgaatatttcatgtggtaagtgcgaatccaatccggtccgggtctcaagtcgttgcttttcataagatttcatgctgatattcctcataatgccattatctaagcacagcgttagcttaacggacgtaccattaatctcgtcttttgtcaattccgccatcgatgctgctttagctgaatatgttgctccaaagagtttgacgctgaacttaaaggacatgttagttggagaagattacaagaaagacactgtcagtcttggtgtcatcttgatcttgattaaacgggcgagcggcttcaaacaaggtgacggtggaatcggcccagtggatggttctagcgactcgtacgtcacggtctcttggggtaaattcggtaaagcagtcgtctctacgcgtatcgtccccggcgaaaatgatcctagttggcatgaatacgcgagcattcttgttacacctgaagaggttaatgcacaggaaaaacttcgtttgcaattgtgggattcagacaaatggacagccgatgacgacttaggaagagtagaggtcgacttgaaatctctaatgcgcggttcggagaccgaaaacaagatgcaggaccgagaggatcggtttacaggggaggattgtgaggagaaaatgcctggttcacttgcttggtcagtcggatactttgcaaaaacgaggatcactcagcaacagttccaggaacaaacagtcaacaagaacatccgatcaaagaacgatctgaagcaacatatttcagacactgctgaaaacaaactcagggagtctggcaagcctgcggatgatgatgaagttcgccaacagaagactcaagattacaaggaggttgaaaccgctatgatcgtatcagcaccaccaagcgacgagttctactcaggaatattgagcgtacagattcacaacattaccggcctagaaacacaaaagctccagaaacaagacaaaggcgacgggggtgatagcgaggacgaagctgagcgggctgacgacttacccgacagctattgcaccataatcctgaatcacaagaagatctttcgaacgcgcactaaacctaagaactccaagcctttcttcaacgctggaacagagcgattcattggagactggcgtgacgccgaggtcatagtgagcattcgagattcacgagagagagaggacgaccctctaatcggcttaatatatcttcccctttccaaggttttcaagcagtccagccaggttattgataactactctataattgggggtattggctacggaagagcacgaatcagcatggtctggcggagcgtcgagttgaagctacccaagaatgtgagaggatgggattacgggacgatacagatcagggacccagtctcgccaaaggcagggcttgacagtgaacttactaaccatcgcattaagatcaggacgaatatgggacaccttaaattgtattccgaaaatggacgctggaacgggaaaggtggcaaaacagacgagctgttcttgcctgtgcggaagaggtactcttcggccttgatcatcgagtttcgtggctcctcactgggtcccgacaagacattggcgtttgcttgcctttggcttcatgagcttgaagatgaagtcgacgaggtgaaaattttgaaggtttggaaaggttccaaagatggtcttcgcaaagcccaatcatgcgccgaatataatgggttgaatgagaacgaaaaaccgctcggggagattgaggtacccattcgattttggcgcggattgtctgggtaccacaaaggctacgcggcgcagtccaagaatacagacgtgagtgacctttttgcctcgagggaatacccggcagcaaccttgaacccttagcaaagctcgattttatgtacatgctgacatatcttacatcttagatgcgcgatgtcatgcaatgcctcgataccatcagcgatgaagcattggctgaagatggcgattcgtccgaaaacgacaaaggcctggacgaagatagcgagtccgatgataacgatgctacaactcgcaaaaagaaacttacgatgcacacaaacgacgattcgtccccgcccagttcagacgatgaagacgatagcgatagtgcgagcctatctagtgcatctaatctttcactctcggatttcaagaaagtaaaaaatatatttcgcaatccagtagagggagtcacgcaagcagctactaaaacgcttgcaccggggcacaatgatccagatgacggctctcgaggtgtgcaggcacaactacgagactacaaggatcatcataagcaacttcaccgaaagcatcgtggcatcatgcagtggcgtgcggcacgggaggtcgatcatattggcgggaagttgactagactgaagggaaatatcagtcaagtctttcaacatggtgacaaagatacgggagttgagactgaagtttgaactgtggagaaagcttgacgtttggacttatgatggacttgtaagtgacgaagtcgtccaagtgtgggttggtaattctgcgcgtaattccaccggcttgctgaaaaatttactcggtttagcgtctgctcaaggtcgcgctgtaaatgggtgacctataaaacgatattaaatgcttatgatagtatatattgcctttctgacctgaggctagacaataggaataaatacccggttggaatgattaaaatgacatcaaac

SEQ ID NO: 24593 - DNA, 3525 bp, Muscodor strobelii
  misc_feature: SGI cDNA ID NO. 568387
  misc_feature: Reduced expression when VOC is produced
  misc_feature: Encodes the peptide sequence at SEQ ID NO 24594
atggcaggccaacaagatttcgaagaggaccagactgcccctaggacgactcatggcggaccacatagtggcaaacatccgattcctactgttcaaggttacagacagcaccgcaaagagctagagggccaagttgagaccgaagaaaaagctcaagagggccccgaagacgagtccaaacccaagagagcttacaaatctgccaaagctatcttcaagggccaagatccgcagtctgagacccaacatgacccgtacccatccacaaatcataactacgtggactacccccctaagaacagttcacaggaagctacaagtcacgtagatgagccagaatccttcccggatgaatccaaacaacgagatgacgatcacgatgcgggcaaagataagaagcgtcaagatgagggcgatgatcaaacggcaacggaggctgtcgcaagcaagactgaccccaaagaaaaacggaagattatgaagaagaaaaagagacatggtgaaggcagagaagtcactgatccggtcacacatcttcctgtcataatacatgatcaaactgagaaagatttggactccgttccagagaacgagccccagccaggtacttctcacgatactgcgacagggcctcagggagcctctaaatcagaagatgagctacgatcagaacaaggaaagatgcaaagaggcatcaatggtatgcagcgcgtgttccctccccctgatttcgacactacaagacaggagttgggtgctctctaccaaaaggctatgatcgccggccttgccatgattagtattctttcagccattctcgtagtactaccagtacatttctcacaacagaatacatccaagtcatggaaagagagtgacagctggttttctctcttgttcggtttatccggtgttgccgttgtcttcggcgtcggcgtattgattgtcatcggcttaggcagatttgaagacgaagtctgggattctgcacgccgcgaagaacacgcaattttggggaatgacgaagagctgcccgaaagcactcagtggctcaatagtttgattgcctctatttggcctttagtgaatccagatctcttcgcgtcgctggtggaccaaattgaggatgtgatgcaggcatcgctgcccaaggtcatccgaatggtcagtgtcgatgacatgggacaaggcagcgagtcgattcgtatcttgggtgtccgatggttaccttctggtgctgcgagtcagactgttgagtcagatggaaagctgcaaaaagactccagagcttcccagaatgaccgtacagatcctgggaacccccaggatatgactggtgaaggcgataccgatacttctgaccaagctcaaggagatgacgacaagaaccagaactccaagcagcaggaatccgaagaggttgccatgcgggaaggcatggaggcagaagaaggagattttatcaaccttgaattggcccttgcttatcgcagtcgtccgtctggtcaatcttttaggtcaaaggttaggagtgcccatctctacctcaaattctacctaccaggcggaattgcaatcccggtctgggtgcagctgagaggtatcgtcatgactcttcgccttagattgcaactcacgcccgatcctcctttcatttcgctttgtactttgacctttctcggacagcctaaagcgaatatttcatgtgatttcatgctgatattcctcataatgccattatctaagcacagcgttagcttaacggacgtaccattaatctcgtcttttgtcaattccgccatcgatgctgctttagctgaatatgttgctccaaagagtttgacgctgaacttaaaggacatgttagttggagaagattacaagaaagacactgtcagtcttggtgtcatcttgatcttgattaaacgggcgagcggcttcaaacaaggtgacggtggaatcggcccagtggatggttctagcgactcgtacgtcacggtctcttggggtaaattcggtaaagcagtcgtctctacgcgtatcgtccccggcgaaaatgatcctagttggcatgaatacgcgagcattcttgttacacctgaagaggttaatgcacaggaaaaacttcgtttgcaattgtgggattcagacaaatggacagccgatgacgacttaggaagagtagaggtcgacttgaaatctctaatgcgcggttcggagaccgaaaacaagatgcaggaccgagaggatcggtttacaggggaggattgtgaggagaaaatgcctggttcacttgcttggtcagtcggatactttgcaaaaacgaggatcactcagcaacagttccaggaacaaacagtcaacaagaacatccgatcaaagaacgatctgaagcaacatatttcagacactgctgaaaacaaactcagggagtctggcaagcctgcggatgatgatgaagttcgccaacagaagactcaagattacaaggaggttgaaaccgctatgatcgtatcagcaccaccaagcgacgagttctactcaggaatattgagcgtacagattcacaacattaccggcctagaaacacaaaagctccagaaacaagacaaaggcgacgggggtgatagcgaggacgaagctgagcgggctgacgacttacccgacagctattgcaccataatcctgaatcacaagaagatctttcgaacgcgcactaaacctaagaactccaagcctttcttcaacgctggaacagagcgattcattggagactggcgtgacgccgaggtcatagtgagcattcgagattcacgagagagagaggacgaccctctaatcggcttaatatatcttcccctttccaaggttttcaagcagtccagccaggttattgataactactctataattgggggtattggctacggaagagcacgaatcagcatggtctggcggagcgtcgagttgaagctacccaagaatgtgagaggatgggattacgggacgatacagatcagggacccagtctcgccaaaggcagggcttgacagtgaacttactaaccatcgcattaagatcaggacgaatatgggacaccttaaattgtattccgaaaatggacgctggaacgggaaaggtggcaaaacagacgagctgttcttgcctgtgcggaagaggtactcttcggccttgatcatcgagtttcgtggctcctcactgggtcccgacaagacattggcgtttgcttgcctttggcttcatgagcttgaagatgaagtcgacgaggtgaaaattttgaaggtttggaaaggttccaaagatggtcttcgcaaagcccaatcatgcgccgaatataatgggttgaatgagaacgaaaaaccgctcggggagattgaggtacccattcgattttggcgcggattgtctgggtaccacaaaggctacgcggcgcagtccaagaatacagacgtgagtgacctttttgcctcgagggaatacccggcagcaaccttgaacccttag

SEQ ID NO: 24594 - protein, 1174 aa, Muscodor strobelii
  misc_feature: SGI Peptide ID NO. 568387
  misc_feature (637)..(729): Pfam Id: PF00168 Pfam Desc: C2 domain
  misc_feature (851)..(922): Pfam Id: PF00168 Pfam Desc: C2 domain
  misc_feature (1)..(1162): NCBI GI: 145607421 Blast Desc: MGG_12184 [Magnaporthe grisea 70-15] gi|145014979|gb|EDJ99547.1| MGG_12184 [Magnaporthe grisea 70-15]
  misc_feature (1)..(1158): NCBI GI: 85068406 Blast Desc: NCU08064 [Neurospora crassa OR74A] gi|28927000|gb|EAA35959.1| [Neurospora crassa OR74A]
  misc_feature (1)..(1152): NCBI GI: 46107710 Blast Desc: FG00738.1 [Gibberella zeae PH-1]
  misc_feature (1)..(1149): NCBI GI: 256735398 Blast Desc: NECHADRAFT_98912 [Nectria haematococca mpVI 77-13-4]
  misc_feature (9)..(1155): NCBI GI: 189193985 Blast Desc: meiotically up-regulated gene 190 protein [Pyrenophora tritici-repentis Pt-1C-BFP] gi|187978895|gb|EDU45521.1| meiotically up-regulated gene 190 protein [Pyrenophora Pt-1C-BFP]
  misc_feature (1)..(1155): NCBI GI: 169601024 Blast Desc: SNOG_03366 [Phaeosphaeria nodorum SN15] gi|111067451|gb|EAT88571.1| SNOG_03366 [Phaeosphaeria nodorum SN15]
  misc_feature (485)..(1155): NCBI GI: 171677153 Blast Desc: protein product [Podospora anserina] gi|170936644|emb|CAP61303.1| protein product [Podospora anserina]
  misc_feature (299)..(1115): NCBI GI: 154299615 Blast Desc: BC1G_10770 [Botryotinia fuckeliana B05.10] gi|150857262|gb|EDN32454.1| BC1G_10770 [Botryotinia fuckeliana B05.10]
  misc_feature (344)..(1151): NCBI GI: 156030768 Blast Desc: SS1G_14323 [Sclerotinia sclerotiorum 1980] gi|154700714|gb|EDO00453.1| SS1G_14323 [Sclerotinia sclerotiorum 1980]
  misc_feature (299)..(1115): NCBI GI: 46117072 Blast Desc: FG04378.1 [Gibberella zeae PH-1]
  misc_feature: Useful for introducing or modulating the production of volatile compounds
MAGQQDFEEDQTAPRTTHGGPHSGKHPIPTVQGYRQHRKELEGQVETEEKAQEGPEDESKPKRAYKSAKAIFKGQDPQSETQHDPYPSTNHNYVDYPPKNSSQEATSHVDEPESFPDESKQRDDDHDAGKDKKRQDEGDDQTATEAVASKTDPKEKRKIMKKKKRHGEGREVTDPVTHLPVIIHDQTEKDLDSVPENEPQPGTSHDTATGPQGASKSEDELRSEQGKMQRGINGMQRVFPPPDFDTTRQELGALYQKAMIAGLAMISILSAILVVLPVHFSQQNTSKSWKESDSWFSLLFGLSGVAVVFGVGVLIVIGLGRFEDEVWDSARREEHAILGNDEELPESTQWLNSLIASIWPLVNPDLFASLVDQIEDVMQASLPKVIRMVSVDDMGQGSESIRILGVRWLPSGAASQTVESDGKLQKDSRASQNDRTDPGNPQDMTGEGDTDTSDQAQGDDDKNQNSKQQESEEVAMREGMEAEEGDFINLELALAYRSRPSGQSFRSKVRSAHLYLKFYLPGGIAIPVWVQLRGIVMTLRLRLQLTPDPPFISLCTLTFLGQPKANISCDFMLIFLIMPLSKHSVSLTDVPLISSFVNSAIDAALAEYVAPKSLTLNLKDMLVGEDYKKDTVSLGVILILIKRASGFKQGDGGIGPVDGSSDSYVTVSWGKFGKAVVSTRIVPGENDPSWHEYASILVTPEEVNAQEKLRLQLWDSDKWTADDDLGRVEVDLKSLMRGSETENKMQDREDRFTGEDCEEKMPGSLAWSVGYFAKTRITQQQFQEQTVNKNIRSKNDLKQHISDTAENKLRESGKPADDDEVRQQKTQDYKEVETAMIVSAPPSDEFYSGILSVQIHNITGLETQKLQKQDKGDGGDSEDEAERADDLPDSYCTIILNHKKIFRTRTKPKNSKPFFNAGTERFIGDWRDAEVIVSIRDSREREDDPLIGLIYLPLSKVFKQSSQVIDNYSIIGGIGYGRARISMVWRSVELKLPKNVRGWDYGTIQIRDPVSPKAGLDSELTNHRIKIRTNMGHLKLYSENGRWNGKGGKTDELFLPVRKRYSSALIIEFRGSSLGPDKTLAFACLWLHELEDEVDEVKILKVWKGSKDGLRKAQSCAEYNGLNENEKPLGEIEVPIRFWRGLSGYHKGYAAQSKNTDVSDLFASREYPAATLNP

SEQ ID NO: 24595 - DNA, 3508 bp, Muscodor strobelii; identical to SEQ ID NO: 24592
  misc_feature: SGI EST ID NO. CUFF.57946.0
  misc_feature: Variant of the nucleotide sequence at SEQ ID NO 24593

SEQ ID NO: 24596 - DNA, 1314 bp, Muscodor strobelii
  misc_feature: SGI cDNA ID NO. 568388
  misc_feature: Encodes the peptide sequence at SEQ ID NO 24597
atgctgtccgggatcctgatcttcaaccagaagggcgagaacctgatcttccgggcgttccgcaacgactgccggccgcggctcgccgacgtcttccgcatccaggtcatctcgaacccgcaggtgcggtcgccgatcctgacgctgggcagcacgacgttcagccacgtcaagcacgagaacatctacctggtggccatcaccaagagcaacgccaatgcggcgctcgtcttcgagttcctctaccgcctcatccagctggggcggggctacttcggcaagttcgacgaggaggccgtcaagaacaacttcgtgctcgtctacgagctgctcgacgagatcatcgacttcggctacccccagaacaccgagaccgacaccctcaagatgtacatcaccaccgagggcgtcaagtccgagcgcgcccccgaggactcggccaagatcaccatgcaggccaccggcgccctgtcctggcgcaaggccgacgtccgctaccgcaagaacgaggcctttgtcgacgtcatcgaggacgtcaacctgctcatgtccgccaccggtgccgtcctgcgcgccgacgtcaccggccagatcatcatgcgcgcctatctctccggcacccccgagtgcaagtttggcctgaacgaccgcctgctgctcgaccaggacggcctgcagtctctgcccagcggcaacaggcttggcagcaaggccacaaaagccgctgctggcagtgtcacgctggaagactgccagttccaccagtgcgtgaagctcggcaagttcgattccgatcgcatcatctccttcgtcccgcccgacggagagttcgagctcatgcgttatcgcgccacggaaaacgtcaacctgcccttcaaagtccatgcgctcgtcaatgaagtcggcaagacaaaagttgaatatagtataggggttaaagccaattttggcacaaagctattcgccaccaacgtcgtcgttcgcattcccacccctctcaacaccgcacgcatcaccgaacgctgcacgcaaggcaaggccaagtacgagcctagcgaaaatcacattgtctggaagattggccgatttaccggtcaaagcgaatatgtgctgagcgccgaggccgaacttaccagcatgacgaaccagaaggcttggtcacggcccccgctaagcatgagcttcagtcttctcatgttcactagctccggtctcttggtgcggtatctgaaagtcttcgagaaaagtaactattcaagtgttaaatgggtacggtacatgacgagagctggttcatacgaaatacgattctaa

SEQ ID NO: 24597 - protein, 437 aa, Muscodor strobelii
  misc_feature: SGI Peptide ID NO. 568388
  misc_feature (157)..(437): Pfam Id: PF00928 Pfam Desc: Adaptor complexes medium subunit family
  misc_feature (1)..(436): NCBI GI: 171676444 Blast Desc: protein product [Podospora anserina] gi|170936288|emb|CAP60947.1| protein product [Podospora anserina]
  misc_feature (1)..(436): NCBI GI: 85074593 Blast Desc: AP-2 complex subunit mu-1 [Neurospora crassa OR74A] gi|28922285|gb|EAA31527.1| AP-2 complex subunit mu-1 [Neurospora crassa OR74A] gi|28949978|emb|CAD70739.1| clathrin-associated
  misc_feature (1)..(436): NCBI GI: 256728784 Blast Desc: [Nectria haematococca mpVI 77-13-4]
  misc_feature (1)..(437): NCBI GI: 39941144 Blast Desc: conserved [Magnaporthe grisea 70-15] gi|145022142|gb|EDK06162.1| conserved [Magnaporthe grisea 70-15]
  misc_feature (1)..(436): NCBI GI: 46110447 Blast Desc: FG02105.1 [Gibberella zeae PH-1]
  misc_feature (1)..(437): NCBI GI: 59802869 Blast Desc: clathrin coat assembly protein-like protein [Magnaporthe grisea]
  misc_feature (1)..(437): NCBI GI: 154312744 Blast Desc: conserved [Botryotinia fuckeliana B05.10] gi|150849775|gb|EDN24968.1| conserved [Botryotinia fuckeliana B05.10]
  misc_feature (1)..(436): NCBI GI: 169612513 Blast Desc: SNOG_09379 [Phaeosphaeria nodorum SN15] gi|111062451|gb|EAT83571.1| SNOG_09379 [Phaeosphaeria nodorum SN15]
  misc_feature (1)..(437): NCBI GI: 242793369 Blast Desc: AP-2 adaptor complex subunit mu, [Talaromyces stipitatus ATCC 10500] gi|218718735|gb|EED18155.1| AP-2 adaptor complex subunit mu, [Talaromyces stipitatus ATCC 10500]
  misc_feature (1)..(437): NCBI GI: 212535524 Blast Desc: AP-2 adaptor complex subunit mu, [Penicillium marneffei ATCC 18224] gi|210070317|gb|EEA24407.1| AP-2 adaptor complex subunit mu, [Penicillium marneffei ATCC 18224]
MLSGILIFNQKGENLIFRAFRNDCRPRLADVFRIQVISNPQVRSPILTLGSTTFSHVKHENIYLVAITKSNANAALVFEFLYRLIQLGRGYFGKFDEEAVKNNFVLVYELLDEIIDFGYPQNTETDTLKMYITTEGVKSERAPEDSAKITMQATGALSWRKADVRYRKNEAFVDVIEDVNLLMSATGAVLRADVTGQIIMRAYLSGTPECKFGLNDRLLLDQDGLQSLPSGNRLGSKATKAAAGSVTLEDCQFHQCVKLGKFDSDRIISFVPPDGEFELMRYRATENVNLPFKVHALVNEVGKTKVEYSIGVKANFGTKLFATNVVVRIPTPLNTARITERCTQGKAKYEPSENHIVWKIGRFTGQSEYVLSAEAELTSMTNQKAWSRPPLSMSFSLLMFTSSGLLVRYLKVFEKSNYSSVKWVRYMTRAGSYEIRF

SEQ ID NO: 24598 - DNA, 1946 bp, Muscodor strobelii
  misc_feature: SGI EST ID NO. CUFF.57967.0
  misc_feature: Variant of the nucleotide sequence at SEQ ID NO 24596
atcaggggtccgttcaacgacgggtgctactgtagaacctgaagctactccatttcggcgtcactgattgagctgcgacgggcttccagcgaggatgaccgcaacgcaaccactagactgcaacgaccaagcccgccatcgcagctcgcccgacacagcacgccgcctgtcgctctctcggtcggcacgatgctgtccgggatcctgatcttcaaccagaagggcgagaacctgatcttccgggcgttccgcaacgactgccggccgcggctcgccgacgtcttccgcatccaggtcatctcgaacccgcaggtgcggtcgccgatcctgacgctgggcagcacgacgttcagccacgtcaagcacgagaacatctacctggtggccatcaccaagagcaacgccaatgcggcgctcgtcttcgagttcctctaccgcctcatccagctggggcggggctacttcggcaagttcgacgaggaggccgtcaagaacaacttcgtgctcgtctacgagctgctcgacgagatcatcgacttcggctacccccagaacaccgagaccgacaccctcaagatgtacatcaccaccgagggcgtcaagtccgagcgcgcccccgaggactcggccaagatcaccatgcaggccaccggcgccctgtcctggcgcaaggccgacgtccgctaccgcaagaacgaggcctttgtcgacgtcatcgaggacgtcaacctgctcatgtccgccaccggtgccgtcctgcgcgccgacgtcaccggccagatcatcatgcgcgcctatctctccggcacccccgagtgcaagtttggcctgaacgaccgcctgctgctcgaccaggacggcctgcagtctctgcccagcggcaacaggcttggcagcaaggccacaaaagccgctgctggcagtgtcacgctggaagactgccagttccaccagtgcgtgaagctcggcaagttcgattccgatcgcatcatctccttcgtcccgcccgacggagagttcgagctcatgcgttatcgcgccacggaaaacgtcaacctgcccttcaaagtccatgcgctcgtcaatgaagtcggcaagacaaaagttgaatatagtataggggttaaagccaattttggcacaaagctattcgccaccaacgtcgtcgttcgcattcccacccctctcaacaccgcacgcatcaccgaacgctgcacgcaaggcaaggccaagtacgagcctagcgaaaatcacattgtctggaagattggccgatttaccggtcaaagcgaatatgtgctgagcgccgaggccgaacttaccagcatgacgaaccagaaggcttggtcacggcccccgctaagcatgagcttcagtcttctcatgttcactagctccggtctcttggtgcggtatctgaaagtcttcgagaaaagtaactattcaagtgttaaatgggtacggtacatgacgagagctggttcatacgaaatacgattctaatttttgaactcgagacttgctagagtactagcaaaacaaaacaccaaagcacacgaaaacatctcgtagtcgccaataaagagtagataatacctaggtagccggttgcaagcgctctacatgatgcctacacgagccacgagcaagatgacttccgagctaaaaattggcatttcgatttcgaatcttggagtggatttgactctgcgtgttcgccactcacctgtgttactgcctttgttgcatccatcttctgtggcactatgcgcggcgccaagcacatggctaatgatcgttctttgtccaagatgcaatgcggacaaaatagagctttaggaaaggaacctgcgtctgttcgagataccccacatcctcaactctagacggaggtcggagggtgtagtaaataaatctgttaaaccatgagaaatacccttgcgcaa

SEQ ID NO: 24599 - DNA, 1311 bp, Muscodor strobelii
  misc_feature: SGI cDNA ID NO. 568389
  misc_feature: Encodes the peptide sequence at SEQ ID NO 24600
atgctgtccgggatcctgatcttcaaccagaagggcgagaacctgatcttccgggcgttccgcaacgactgccggccgcggctcgccgacgtcttccgcatccaggtcatctcgaacccgcaggtgcggtcgccgatcctgacgctgggcagcacgacgttcagccacgtcaagcacgagaacatctacctggtggccatcaccaagagcaacgccaatgcggcgctcgtcttcgagttcctctaccgcctcatccagctggggcggggctacttcggcaagttcgacgaggaggccgtcaagaacaacttcgtgctcgtctacgagctgctcgacgagatcatcgacttcggctacccccagaacaccgagaccgacaccctcaagatgtacatcaccaccgagggcgtcaagtccgagcgcgcccccgaggactcggccaagatcaccatgcaggccaccggcgccctgtcctggcgcaaggccgacgtccgctaccgcaagaacgaggcctttgtcgacgtcatcgaggacgtcaacctgctcatgtccgccaccggtgccgtcctgcgcgccgacgtcaccggccagatcatcatgcgcgcctatctctccggcacccccgagtgcaagtttggcctgaacgaccgcctgctgctcgaccaggacggcctgcagtctctgcccagcggcaacaggcttggcagcaaggccacaaaagccgctgctggcagtgtcacgctggaagactgccagttccaccagtgcgtgaagctcggcaagttcgattccgatcgcatcatctccttcgtcccgcccgacggagagttcgagctcatgcgttatcgcgccacggaaaacgtcaacctgcccttcaaagtccatgcgctcgtcaatgaagtcggcaagacaaaagttgaatatagtataggggttaaagccaattttggcacaaagctattcgccaccaacgtcgtcgttcgcattcccacccctctcaacaccgcacgcatcaccgaacgctgcacgcaaggcaaggccaagtacgagcctagcgaaaatcacattgtctggaagattggccgatttaccggtcaaagcgaatatgtgctgagcgccgaggccgaacttaccagcatgacgaaccagaaggcttggtcacggcccccgctaagcatgagcttcagtcttctcatgttcactagctccggtctcttggtgcggtatctgaaagtcttcgagaaaagtaactattcaagtgttaaatgggtacggtacatgacgagagctggttcatacgaaatacggtaa

SEQ ID NO: 24600 - protein, 436 aa, Muscodor strobelii
  misc_feature: SGI Peptide ID NO. 568389
  misc_feature (157)..(435): Pfam Id: PF00928 Pfam Desc: Adaptor complexes medium subunit family
  misc_feature (157)..(436): Pfam Id: PF00928 Pfam Desc: Adaptor complexes medium subunit family
  misc_feature (1)..(436): NCBI GI: 171676444 Blast Desc: protein product [Podospora anserina] gi|170936288|emb|CAP60947.1| protein product [Podospora anserina]
  misc_feature (1)..(436): NCBI GI: 85074593 Blast Desc: AP-2 complex subunit mu-1 [Neurospora crassa OR74A] gi|28922285|gb|EAA31527.1| AP-2 complex subunit mu-1 [Neurospora crassa OR74A] gi|28949978|emb|CAD70739.1| clathrin-associated
  misc_feature (1)..(436): NCBI GI: 256728784 Blast Desc: [Nectria haematococca mpVI 77-13-4]
  misc_feature (1)..(436): NCBI GI: 39941144 Blast Desc: conserved [Magnaporthe grisea 70-15] gi|145022142|gb|EDK06162.1| conserved [Magnaporthe grisea 70-15]
  misc_feature (1)..(436): NCBI GI: 46110447 Blast Desc: FG02105.1 [Gibberella zeae PH-1]
  misc_feature (1)..(436): NCBI GI: 59802869 Blast Desc: clathrin coat assembly protein-like protein [Magnaporthe grisea]
  misc_feature (1)..(436): NCBI GI: 154312744 Blast Desc: conserved [Botryotinia fuckeliana B05.10] gi|150849775|gb|EDN24968.1| conserved [Botryotinia fuckeliana B05.10]
  misc_feature (1)..(436): NCBI GI: 169612513 Blast Desc: SNOG_09379 [Phaeosphaeria nodorum SN15] gi|111062451|gb|EAT83571.1| SNOG_09379 [Phaeosphaeria nodorum SN15]
  misc_feature (1)..(436): NCBI GI: 242793369 Blast Desc: AP-2 adaptor complex subunit mu, [Talaromyces stipitatus ATCC 10500] gi|218718735|gb|EED18155.1| AP-2 adaptor complex subunit mu, [Talaromyces stipitatus ATCC 10500]
  misc_feature (1)..(436): NCBI GI: 212535524 Blast Desc: AP-2 adaptor complex subunit mu, [Penicillium marneffei ATCC 18224] gi|210070317|gb|EEA24407.1| AP-2 adaptor complex subunit mu, [Penicillium marneffei ATCC 18224]
MLSGILIFNQKGENLIFRAFRNDCRPRLADVFRIQVISNPQVRSPILTLGSTTFSHVKHENIYLVAITKSNANAALVFEFLYRLIQLGRGYFGKFDEEAVKNNFVLVYELLDEIIDFGYPQNTETDTLKMYITTEGVKSERAPEDSAKITMQATGALSWRKADVRYRKNEAFVDVIEDVNLLMSATGAVLRADVTGQIIMRAYLSGTPECKFGLNDRLLLDQDGLQSLPSGNRLGSKATKAAAGSVTLEDCQFHQCVKLGKFDSDRIISFVPPDGEFELMRYRATENVNLPFKVHALVNEVGKTKVEYSIGVKANFGTKLFATNVVVRIPTPLNTARITERCTQGKAKYEPSENHIVWKIGRFTGQSEYVLSAEAELTSMTNQKAWSRPPLSMSFSLLMFTSSGLLVRYLKVFEKSNYSSVKWVRYMTRAGSYEIR

SEQ ID NO: 24601 - DNA, 1946 bp, Muscodor strobelii; identical to SEQ ID NO: 24598
  misc_feature: SGI EST ID NO. CUFF.57967.0
  misc_feature: Variant of the nucleotide sequence at SEQ ID NO 24599

SEQ ID NO: 24602 - DNA, 732 bp, Muscodor strobelii
  misc_feature: SGI cDNA ID NO. 568390
  misc_feature: Encodes the peptide sequence at SEQ ID NO 24603
atgaacccagggaccaaagatttcaaagttgctatcgtcataggcagccttcgggcggtccgagtctgcccacagatcgcgcagtttgtacttgacacaatcaagtcgcatcatggcaacaccagggtgaatctacagtttaatctcctcgacatcgcagacttcgacctaccactcgccgacttacaaaaactcccttcacatctcaagaacatcccattggactacgacaacgaagccacgagagcatggtctagagctgttgcaagttacgatgcatttatctttgtcacgccgcaatacaactggggtgttccagcgggactcaagaatgcacttgaccacatattccacgaattcagtggcaagccggccatggtcgtagcgtatggcggccacggcgggacaattgccgcagccgcacttatcacaattctcgccggcatgggcttgaaatgtgtcaggcatgctgtttgcatgaaatacccgggtccggagttcatgagagaagccgtccagggccatgcggtggggcttgatgcgctgagtgagagcggggtgtgggcggaatatcgagacgatattgttgagctgtgggaagagactcttggtgttctgcttgggacgcaccaagtacctgaatctcgatctggtggtctcgtggagtattggactgagattttggcgcctgtttctgcgatcgagatgaatatgcgagacgcgaagagctga

SEQ ID NO: 24603 - protein, 243 aa, Muscodor strobelii
  misc_feature: SGI Peptide ID NO. 568390
  misc_feature (8)..(208): Pfam Id: PF03358 Pfam Desc: NADPH-dependent FMN reductase
  misc_feature (76)..(135): Pfam Id: PF03358 Pfam Desc: NADPH-dependent FMN reductase
  misc_feature (10)..(212): NCBI GI: 255710911 Blast Desc: KLTH0A06468p [Lachancea thermotolerans] gi|238933116|emb|CAR21297.1| KLTH0A06468p [Lachancea thermotolerans]
  misc_feature (10)..(195): NCBI GI: 121711767 Blast Desc: NADPH-dependent FMN reductase, [Aspergillus clavatus NRRL 1] gi|119401650|gb|EAW12073.1| NADPH-dependent FMN reductase, [Aspergillus clavatus NRRL 1]
  misc_feature (10)..(196): NCBI GI: 70986723 Blast Desc: NADPH-dependent FMN reductase Lot6 [Aspergillus fumigatus Af293] gi|66846481|gb|EAL86813.1| NADPH-dependent FMN reductase Lot6, [Aspergillus fumigatus Af293]
  misc_feature (10)..(196): NCBI GI: 159123380 Blast Desc: NADPH-dependent FMN reductase Lot6, [Aspergillus fumigatus A1163]
  misc_feature (9)..(174): NCBI GI: 242821985 Blast Desc: NADPH-dependent FMN reductase Lot6, [Talaromyces stipitatus ATCC 10500] gi|218712713|gb|EED12138.1| NADPH-dependent FMN reductase Lot6, [Talaromyces stipitatus ATCC
  misc_feature (10)..(208): NCBI GI: 119483166 Blast Desc: NADPH-dependent FMN reductase, [Neosartorya fischeri NRRL 181] gi|119409766|gb|EAW19714.1| NADPH-dependent FMN reductase, [Neosartorya fischeri NRRL 181]
  misc_feature (9)..(207): NCBI GI: 169770135 Blast Desc: [Aspergillus oryzae RIB40] gi|238487494|ref|XP_002374985.1| NADPH-dependent FMN reductase Lot6, [Aspergillus flavus NRRL3357] gi|83767396|dbj|BAE57535.1|
  misc_feature (8)..(163): NCBI GI: 6323039 Blast Desc: FMN-dependent NAD(P)H:quinone reductase, may be involved in quinone detoxification; expression elevated at low temperature; sequesters the Cin5p transcription factor in the in
  misc_feature (10)..(219): NCBI GI: 145228391 Blast Desc: An01g00600 [Aspergillus niger] gi|134054591|emb|CAK43446.1| protein product [Aspergillus niger]
  misc_feature (9)..(164): NCBI GI: 255942863 Blast Desc: Pc18g03620 [Penicillium chrysogenum Wisconsin 54-1255] gi|211586933|emb|CAP94586.1| Pc18g03620 [Penicillium chrysogenum Wisconsin 54-1255]
  misc_feature (8)..(128): SWISSPROT Homolog: EC 1.5.1.29 FMN reductase
MNPGTKDFKVAIVIGSLRAVRVCPQIAQFVLDTIKSHHGNTRVNLQFNLLDIADFDLPLADLQKLPSHLKNIPLDYDNEATRAWSRAVASYDAFIFVTPQYNWGVPAGLKNALDHIFHEFSGKPAMVVAYGGHGGTIAAAALITILAGMGLKCVRHAVCMKYPGPEFMREAVQGHAVGLDALSESGVWAEYRDDIVELWEETLGVLLGTHQVPESRSGGLVEYWTEILAPVSAIEMNMRDAKS

SEQ ID NO: 24604 - DNA, 3033 bp, Muscodor strobelii
  misc_feature: SGI EST ID NO. CUFF.57961.0
  misc_feature: Variant of the nucleotide sequence at SEQ ID NO 24602
tgggagtcaactggttttcgttcccattttcatgctataatacctccaccatctagttcaccagcggaacttatcagcagtcgcctgattcacatcttgaccgatgcaacttcacaaacatacttgtctcctcaggctattaactgccttttcccgttcatcccttcgcgcctggggcagaacactgccctagatcttgcggtttcatcactgtgttgcatctacagtgatctacgaataggtatgaagatatcagtgtcgacagcacagattcatgcgaaatgtcttggtaaattgcgatcatctgttgccagccccgcacttcgtacaacgcttgaaactatatgtgcttctctcgtcgtagagctttgcgaggtcagcttgtccgtgtgaaagtagtattttgatccgtttaatgtttcgctaactttcaagctcgtcgaaggtacttttgaaagaagatcacgaaaaatatgcggaccttttaagagggtcccagctcctgatgcaggctgccggagccgaaatgttccggtcaggtcttggaagagccatgttggagatgcaacgagcagcatttgtaggttagacccccaatgaaatgtgccgcaaagctcaccacgcttctgtttaactagatcgcgttagctgtttctgaagggagagcctcctttctcgtagaacccgagtggcgcgcgctcaacgagagaccgcctgcatttccgcaacaagaagtctctggcatgtggttacgatgccaacttagtgattttctagttgagctctcagacattcgcttaggatcgcaccagctcaatgcagcgcaagatgtggacatggacgatattgcagcgcgtacaaaagatctgaaatatcgtatggaaacttggtatgagaacgaactacgcccccacgcggaaacggccgctctgagccactcgaacgaacctggtgcttcttataatggcgataactctgcactggtcttcactatgttgacctgcataacgtgctcggttcttgccaaactacacgagtttttaaaggggcttcaagatacctgtggacaacagaatatcgagaatatcggatcaagttcctctacgaaaggattcaagatttcccgctaccacagtcaccaagattcagcatattcgacttacctccaaattcaagctcgatcgctgcttacagcaagacaggtatctttcggacttcgcggactgcgttctttggtcgccccgaaggctcggataacaagatgatacgatttgtaataaaactatagcctttctgtcacttccaccatgcatcataatccgctcgatttaggttcctatccacattgtacgctgagatctgagggtgagatctctataacccacgctgattggacagctcgcaacttcacacctcagtcaagagagactataaaagacccacactagaattccttggtaaagatcaagtctaaagagctgaccgctataagataagattttcctggcaccatataagaaagctgtatgaattaattgaatcttgcgtcttcaggctcttacaatattgcgaccttctattcccggttctcgtttgtctagtttttgaatttattgatgagacaaaattacttccttgtcattacacttagcaaaaaagaagaaaagcggaaagcgacgaacaaagaactccgccgtgcgtttaacttaaaccacaaactcacaatgaacccagggaccaaagatttcaaagttgctatcgtcataggcagccttcgggcggtccgagtctgcccacagatcgcgcagtttgtacttgacacaatcaagtcgcatcatggcaacaccagggtgaatctacagtttaatctcctcgacatcgcagacttcgacctaccactcgccgacttacaaaaactcccttcacatctcaagaacatcccattggactacgacaacgaagccacgagagcatggtctagagctgttgcaagttacgatgcatttatctttgtcacgccgcaatacaactggggtgttccagcgggactcaagaatgcacttgaccacatattccacgaattcagtggcaagccggccatggtcgtagcgtatggcggccacggcgggacaattgccgcagccgcacttatcacaattctcgccggcatgggcttgaaatgtgtcaggcatgctgtttgcatgaaatacccgggtccggagttcatgagagaagccgtccagggccatgcggtggggcttgatgcgctgagtgagagcggggtgtgggcggaatatcgagacgatattgttgagctgtgggaagagactcttggtgttctgcttgggacgcaccaagtacctgaatctcgatctggtggtctcgtggagtattggactgagattttggcgcctgtttctgcgatcgagatgaatatgcgagacgcgaagagctgagtacctcgttgtcaagcggtggctaggatagagtcgagttagctgtgattcaagatgtcaggtattaaatcgccttttcgttatagttcctgagtcttcgttcttccgtcttcgagatcatctaggtactcatggagtattgttggtgcgtaccttgagcagagggtctataactttgtagatgctttcataatcagaccttacatttccacatgttcatcaccgccggtagcgttcgctgacttagcgtcgatatactttcataccaagagagctcatttagttgcggtagaccttaactgctgaagcacggcatcaaaaagatacagatataacgcttatgatgaagtagatgtcgctagcttgatattatcatcaggtggccaaagtgtgaaaggtcatccaccttcgaatgagagctgtgatacatgatccaatgtttcttgagtgatcgatatgactaccatgatgcaatgatagcgatgtgcattcttgttctagaattaggtacctaggtaggtagttaatcgatgacagtcgagtcttgtttcgatgttctagtgatgaaataggttgg

SEQ ID NO: 24605 - DNA, 3279 bp, Muscodor strobelii
  misc_feature: SGI cDNA ID NO. 568391
  misc_feature: Encodes the peptide sequence at SEQ ID NO 24606
atgaccaacctggtctccgccgttccagtgccaggtggttcctattttcgcatcatcctggacgagtctcgtcgtcctttggtaatcagcataagcaatgacagggtctccaaactccaacttgtctcgcatagcaagggtcagtccagcgacgtcctggatttgggctctatatttggtatcgcctcagacctatgcgtcgtcactttcgatgtccaacaggcaacgaatctcgccgtctgcttgtgcatcggcattgcagaccagcaaggcttcacgtccatcatcctaacccagccattctcccccagcgcattgaagcctaacggccgcgttccaattataagggggagttcggacattggaacagtccagagaatatggatgactccaatattcgaagatcccaatcgtcctcacggttatcccgctgtttacatcacgcataagaatcttgaacagacagtctcgtggggttcggacatcgtccgccttgacgtggccgcgaatggctacgagtacacagtggccagagatgaagagaccccagagaatgtcgacggcatcgtagacattgcacctgcctcaagcatatatggcaagggcttgtttgttttgtacaagagcggcggaatctccaagctctacgctcgttttcgccgtctcgacaccgatgccaacgacggttccatggcgacattcgtgacgtcgctcaagtgcgctgctgacgcttgctgcatcgcctcaatgtctcaagatacgcctcgtggtctggcttccgggctcttggtgggaggctccgagggcgtgcggcagatagatgcccggaatgtggacgaaaagcaaaacctcggcattttggtatactccagcacggtctcgctcgagaacatccgtagcctcgagatcgctcaggacggcccgtacagtacggtgtggttcaccaacttggcggatgaactcggctacatccggacatcgaatgccgacttctctggtggcgtgggcgccatgctcctccccgaaaagcaagccagttcctttgccgtttgcaccgctcagccagccgacgagaatggcaacaccgcctggcagatcctgatgagtgttgaccgtcagggaagtttgagacttctacagcaagcaagcgatacaggtatatggagatcagagcccttctacatgccgtccaacagcaaaaacttcgaggttgagagttataccatcacgatgaaagtgaatggagctgacaatctgccgcttacctctgggcgggcatttgtagcatcagcatcatccgtcgaggccgtgctgaacggtgtcagttgcacactgacgcccgacggcgactggtacgacgtcgacgactcgggcagtctgaattttatcgtgccaacacagtcattgggcgcgcagagtctggagatcaagaggctcgtcgacagcgacggtgccgaggttgctttaccgcagcgcttcgtgtacgaccccgcgatgaagccgatgcagaacatgtatgaaaagctcaagtcgttcaaagatgcaaaagaacttgccgctgcaaaaacaggcgacggatctcccctcttcatcaatgcacccaattcaaaggaattggatgatgccctcaagaccttcgagactctcagtgacgcctatgttaagatgccgcgcgacggcacatcagcgcttgtcaaaggagccaagagagcagaagccgttgtggaagtcaccgaggcgaaagttgaagaggtcagcatggacgcctggcattggctgaagcacaaggtgcacgaggcggcggaatggattgttgaaactgccggcaaagcgtggaaattcatctgcaagttgggtggaaaggtctggcagttcgttctggactgtgctgagaagatctgcgaagcggccacctgggtatgggaaagaatcaaagtcgggtggcaaaagctcaaagactttgtcggtttcgtcttcaattggtccgatatcacggagaccaagagcaccatttctaccctcttaacggctagtatcggtgctgccagcgacaaggtcggggacttcgagaataaggtcgatgtcttcttcgacggcataatagaacaagtcgactcgctcgaacaatcagccagtgcaaagaaactggccaagggctccgatgctcaatggtcaaagtccgacaactcgagcaatggcacaggcgcgtcttgggctcaagagagattgaaaaatggtggcgccacgagttcaaccgaggttgaaccagtggtgcagcccgcacttgacagactccaaaaagatgtcgccaaggtatcgcaagacattgcgaatttgttcaaaaagagcggcgccatcactggagatgatgtccttcaggtgtctaaaggcgttctaaaggtcgccattgacgcggttcgcggtctggtgacgagcatcctgcgcctggtccgcaagctgtgcaatgaagttgtcaatattggaaacaagcctatcaagattccaattttcagcagtctctggaaaaagatttccggctcggatctgaccgtcttcgatgcggtctctcttatcatcgccataccaacgacgatactagccaagctgaccactgggaagaagcccccaaccatcgccggactggatcgtgcactcatgaaacgggtattgtacaacgacccaacgctcgatcctcagatatcatacaacctagcggtgatcaaagctgaagtcggtttgggcttggcggttagcaaggggacatggactctcatcaagatcggctacaagatggtcaagcaaggtcttccaggggctgtcgatgccaaggtggcagctattggtccagcgacattctttgacacgatgggaatcgccttcgatatgttgggctcaatcatttcactcccagatcaacaagatttgccaggcgtagaatacagaaactggatcagtgccatctcattctaccgcggcgcatgcaaactggtagccttcttcgtcggcggtggcgaggcagctgacaaagctctcgtagtcctcgatgtgatcagcacactggcgcaatttggcttgtacatggccgtgtgtgatgccgagtacgacgcgaagaagtgggcagattacgatgctgatgtcacgactgtgtcggttaccgaagcagtcctgaatctcgtctcgggatgtgctttggtcggcatgtcggcggtggagattgccaaattcaaggctctgtatgagaagaagcggagggctaggctgacggctccagctgtttaa

SEQ ID NO: 24606 - protein, 1092 aa, Muscodor strobelii
  misc_feature: SGI Peptide ID NO. 568391
  misc_feature (53)..(1091): NCBI GI: 238497682 Blast Desc: conserved [Aspergillus flavus NRRL3357] gi|220693350|gb|EED49695.1| conserved [Aspergillus flavus NRRL3357]
  misc_feature (1)..(1059): NCBI GI: 255944587 Blast Desc: Pc20g05210 [Penicillium chrysogenum Wisconsin 54-1255] gi|211587796|emb|CAP85850.1| Pc20g05210 [Penicillium chrysogenum Wisconsin 54-1255]
  misc_feature (1)..(883): NCBI GI: 256721653 Blast Desc: NECHADRAFT_44876 [Nectria haematococca mpVI 77-13-4]
  misc_feature (1)..(880): NCBI GI: 256724048 Blast Desc: NECHADRAFT_97068 [Nectria haematococca mpVI 77-13-4]
  misc_feature (1)..(880): NCBI GI: 169778450 Blast Desc: [Aspergillus oryzae RIB40] gi|83772428|dbj|BAE62557.1| protein product [Aspergillus oryzae]
  misc_feature (1)..(880): NCBI GI: 238499165 Blast Desc: conserved [Aspergillus flavus NRRL3357] gi|220692570|gb|EED48916.1| conserved [Aspergillus flavus NRRL3357]
  misc_feature (1)..(1039): NCBI GI: 255951683 Blast Desc: Pc23g00450 [Penicillium chrysogenum Wisconsin 54-1255] gi|211904229|emb|CAP79539.1| Pc23g00450 [Penicillium chrysogenum Wisconsin 54-1255]
  misc_feature (1)..(970): NCBI GI: 70986144 Blast Desc: conserved [Aspergillus fumigatus Af293] gi|66846197|gb|EAL86530.1| conserved [Aspergillus fumigatus Af293]
  misc_feature (1)..(970): NCBI GI: 159128296 Blast Desc: conserved [Aspergillus fumigatus A1163]
  misc_feature (234)..(970): NCBI GI: 119474063 Blast Desc: NFIA_003660 [Neosartorya fischeri NRRL 181] gi|119407060|gb|EAW17010.1| conserved [Neosartorya fischeri NRRL 181]
MTNLVSAVPVPGGSYFRIILDESRRPLVISISNDRVSKLQLVSHSKGQSSDVLDLGSIFGIASDLCVVTFDVQQATNLAVCLCIGIADQQGFTSIILTQPFSPSALKPNGRVPIIRGSSDIGTVQRIWMTPIFEDPNRPHGYPAVYITHKNLEQTVSWGSDIVRLDVAANGYEYTVARDEETPENVDGIVDIAPASSIYGKGLFVLYKSGGISKLYARFRRLDTDANDGSMATFVTSLKCAADACCIASMSQDTPRGLASGLLVGGSEGVRQIDARNVDEKQNLGILVYSSTVSLENIRSLEIAQDGPYSTVWFTNLADELGYIRTSNADFSGGVGAMLLPEKQASSFAVCTAQPADENGNTAWQILMSVDRQGSLRLLQQASDTGIWRSEPFYMPSNSKNFEVESYTITMKVNGADNLPLTSGRAFVASASSVEAVLNGVSCTLTPDGDWYDVDDSGSLNFIVPTQSLGAQSLEIKRLVDSDGAEVALPQRFVYDPAMKPMQNMYEKLKSFKDAKELAAAKTGDGSPLFINAPNSKELDDALKTFETLSDAYVKMPRDGTSALVKGAKRAEAVVEVTEAKVEEVSMDAWHWLKHKVHEAAEWIVETAGKAWKFICKLGGKVWQFVLDCAEKICEAATWVWERIKVGWQKLKDFVGFVFNWSDITETKSTISTLLTASIGAASDKVGDFENKVDVFFDGIIEQVDSLEQSASAKKLAKGSDAQWSKSDNSSNGTGASWAQERLKNGGATSSTEVEPVVQPALDRLQKDVAKVSQDIANLFKKSGAITGDDVLQVSKGVLKVAIDAVRGLVTSILRLVRKLCNEVVNIGNKPIKIPIFSSLWKKISGSDLTVFDAVSLIIAIPTTILAKLTTGKKPPTIAGLDRALMKRVLYNDPTLDPQISYNLAVIKAEVGLGLAVSKGTWTLIKIGYKMVKQGLPGAVDAKVAAIGPATFFDTMGIAFDMLGSIISLPDQQDLPGVEYRNWISAISFYRGACKLVAFFVGGGEAADKALVVLDVISTLAQFGLYMAVCDAEYDAKKWADYDADVTTVSVTEAVLNLVSGCALVGMSAVEIAKFKALYEKKRRARLTAPAV

SEQ ID NO: 24607 - DNA, 1057 bp, Muscodor strobelii
  misc_feature: SGI EST ID NO. CUFF.58000.1
  misc_feature: Variant of the nucleotide sequence at SEQ ID NO 24605
caagattccaattttcagcagtctctggaaaaagatttccggctcggatctgaccgtcttcgatgcggtctctcttatcatcgccataccaacgacgatactagccaagctgaccactgggaagaagcccccaaccatcgccggactggatcgtgcactcatgaaacgggtattgtacaacgacccaacgctcgatcctcagatatcatacaacctagcggtgatcaaagctgaagtcggtttgggcttggcggttagcaaggggacatggactctcatcaagatcggctacaagatggtcaagcaaggtcttccaggggctgtcgatgccaaggtggcagctattggtccagcgacattctttgacacgatgggaatcgccttcgatatgttgggctcaatcatttcactcccagatcaacaagatttgccaggcgtagaatacagaaactgggtgagttgcagcacaattttcccctagacatgtccatcgtttgcaatgaatcgaaatgcttgctaaccttgaccatttatctctcaatagatcagtgccatctcattctaccgcggcgcatgcaaactggtagccttcttcgtcggcggtggcgaggcagctgacaaagctctcgtagtcctcgatgtgatcagcacactggcgcaatttggcttgtacatggccgtgtgtgatgccgagtacgacgcgaagaagtgggcagattacgatgctgatgtcacgactgtgtcggttaccgaagcagtcctgaatctcgtctcgggagtgggctactctaccgcggcattcttcaagcagaaacagccgaaagtctcgggggtgggcatcatcgtgactgccagtgtgctttggtcggcatgtcggcggtggagattgccaaattcaaggctctgtatgagaagaagcggagggctaggctgacggctccagctgtttaaatgatataacgtgttgtcattctcatgaaataatcatttgtgttgatctaaacagtcgtgtaacagcgttacaggctgccatttcatgtcttatgaccaattctca

SEQ ID NO: 24608 - DNA, 1974 bp, Muscodor strobelii
  misc_feature: SGI cDNA ID NO. 568392
  misc_feature: Encodes the peptide sequence at SEQ ID NO 24609
atgtctgcacgaatcaccacggtcaatactggccaatatcaccaagtcctcgccataactcagcacatgatcaatcaggggttggagaacttatttctcaagaaggccgcaacccttcccaagaactacatcactctcggcaatgggttcaagaatgtgaaactcggttgcccaaagattatcattgagacggaaaatgatactcatacagacatctactatcgaattcatatcgaaagtggcaactatacgactgccgtggatggcgcggatggggaagctgcaacaggcacagatcttgccaaaatcaactatgtcatcaaggactggactttcacattcctggtcgatcttacacaaactgttctcacagatgacaacccaaagaaaggtgaggccctgaaggccatgaatcgtatggctggcaagtatactgtgcaacagctcatggtcaacatgaaaactgcaaagatcaacaaccccgaccctagcgctacttcccatggcaattgggacgccaaggacaagtttttcgatgctgacgacaatcctatcgagccggactactggaaaattggtcagcctaggatctgggagaaagaacccgcgcctatcaaggacggtttcaagtctataattaacaaggtcgtggatgcgttacaaaaggcagacctacaaaatctcggcgtcacagccgaggccgttgacgcaggcagaatctcggtgactgatcctggccacccaccaacctttatgcccgtcgattgtcggtttcagacctatccctggaaggatccaggaaacgcaaactatgccgaggtcaatagtatcgatggtaatggccgcctcaattatcttctgtatctcgaaatgacgggcaatgacgacggtaccaagcctgtggtcaagggtggcgaagaccgcttcttgagagaggttggcaattggaccgacggtcgaactccaggaaccgaccctcccagcaaattcggctcatttatgcttacgtaccagaaattttgggacgagttcctgcttcccaagtttgacaagataaatcgcttggtcagggtcgatctgaaatcgataaaagccagtgtctacaccaaaggactctactcctacttcccgcgagacctcacactgtccattggtgaaggcgtcatcgccggacctgatcccaaggatcaggacttccgtttccgcaaggcggcagacgccaaagatgttatgactcagtttcttgacaagctacctggaggcttgcttttctcgtctttgccgtctaatgcactagtctggtattcgtttttcgtggacgagaatgtctccgatcatggtgaagacagatatctcaacatcgcctacaaatgtgaacactcagggaaagccagctcaatgactgcgacgcgcctattcattgtgccaggacaaaacatagtcaaatttgaaggagtctcgaacacatatatgtactgggaacaagactttgacattgtcccaaacaccaaaatgtctctcaagtgttcggccaagtggagtgtcactctgacgatggcggcggtgtcagatggtggtctgcaattccagattgatgcaccggagccggacttgaccttcacgggtgaaaacaaggaacagctaagctcgtacgagagttatctgcgaaaggcctatgcaacggccaataggaacttcaagtccatcttggaagcattgaagaatagtctggaaggacaagagaagtttttcttgccggcatccggagtattttggttcaagaacccgatctttaactaccagggatctctactctgcgatcttgaatacaatggcaatgccacacttaagactccaaacaccgacgctgctacacgttcagccgttggcaacacaaacatacaaagcatgcctggcacattttcgaacccggctgaagacattagggagaaaaaatcgaaggattcagggtga

SEQ ID NO: 24609 - protein, 657 aa, Muscodor strobelii
  misc_feature: SGI Peptide ID NO. 568392
  misc_feature (99)..(588): NCBI GI: 238497680 Blast Desc: AFLA_065160 [Aspergillus flavus NRRL3357] gi|220693349|gb|EED49694.1| AFLA_065160 [Aspergillus flavus NRRL3357]
  misc_feature (10)..(610): NCBI GI: 255951685 Blast Desc: Pc23g00460 [Penicillium chrysogenum Wisconsin 54-1255] gi|211904230|emb|CAP79540.1| Pc23g00460 [Penicillium chrysogenum Wisconsin 54-1255]
  misc_feature (13)..(650): NCBI GI: 256721685 Blast Desc: NECHADRAFT_82426 [Nectria haematococca mpVI 77-13-4]
  misc_feature (468)..(612): NCBI GI: 238499163 Blast Desc: conserved [Aspergillus flavus NRRL3357] gi|220692569|gb|EED48915.1| conserved [Aspergillus flavus NRRL3357]
  misc_feature (5)..(612): NCBI GI: 146323201 Blast Desc: AFUA_3G02430 [Aspergillus fumigatus Af293] gi|129556515|gb|EAL86528.2| AFUA_3G02430 [Aspergillus fumigatus Af293]
  misc_feature (107)..(612): NCBI GI: 119474061 Blast Desc: NFIA_003650 [Neosartorya fischeri NRRL 181] gi|119407059|gb|EAW17009.1| NFIA_003650 [Neosartorya fischeri NRRL 181]
MSARITTVNTGQYHQVLAITQHMINQGLENLFLKKAATLPKNYITLGNGFKNVKLGCPKIIIETENDTHTDIYYRIHIESGNYTTAVDGADGEAATGTDLAKINYVIKDWTFTFLVDLTQTVLTDDNPKKGEALKAMNRMAGKYTVQQLMVNMKTAKINNPDPSATSHGNWDAKDKFFDADDNPIEPDYWKIGQPRIWEKEPAPIKDGFKSIINKVVDALQKADLQNLGVTAEAVDAGRISVTDPGHPPTFMPVDCRFQTYPWKDPGNANYAEVNSIDGNGRLNYLLYLEMTGNDDGTKPVVKGGEDRFLREVGNWTDGRTPGTDPPSKFGSFMLTYQKFWDEFLLPKFDKINRLVRVDLKSIKASVYTKGLYSYFPRDLTLSIGEGVIAGPDPKDQDFRFRKAADAKDVMTQFLDKLPGGLLFSSLPSNALVWYSFFVDENVSDHGEDRYLNIAYKCEHSGKASSMTATRLFIVPGQNIVKFEGVSNTYMYWEQDFDIVPNTKMSLKCSAKWSVTLTMAAVSDGGLQFQIDAPEPDLTFTGENKEQLSSYESYLRKAYATANRNFKSILEALKNSLEGQEKFFLPASGVFWFKNPIFNYQGSLLCDLEYNGNATLKTPNTDAATRSAVGNTNIQSMPGTFSNPAEDIREKKSKDSG

SEQ ID NO: 24610 - DNA, 1041 bp, Muscodor strobelii
  misc_feature: SGI EST ID NO. CUFF.57984.0
  misc_feature: Variant of the nucleotide sequence at SEQ ID NO 24608
ggcagaatctcggtgactgatcctggccacccaccaacctttatgcccgtcgattgtcggtttcagacctatccctggaaggatccaggaaacgcaaactatgccgaggtcaatagtatcgatggtaatggccgcctcaattatcttctgtatctcgaaatgacgggcaatgacgacggtaccaagcctgtggtcaagggtggcgaagaccgcttcttgagagaggttggcaattggaccgacggtcgaactccaggaaccgaccctcccagcaaattcggctcatttatgcttacgtaccagaaattttgggacgagttcctgcttcccaagtttgacaagataaatcgcttggtcagggtcgatctgaaatcgataaaagccagtgtctacaccaaaggactctactcctacttcccgcgagacctcacactgtccattggtgaaggcgtcatcgccggacctgatcccaaggatcaggacttccgtttccgcaaggcggcagacgccaaagatgttatgactcagtttcttgacaagctacctggaggcttgcttttctcgtctttgccgtctaatgcactagtctggtattcgtttttcgtggacgagaatgtctccgatcatggtgaagacagatatctcaacatcgcctacaaatgtgaacactcagggaaagccagctcaatgactgcgacgcgcctattcattgtgccaggacaaaacatagtcaaatttgaaggagtctcgaacacatatatgtactgggaacaagactttgacattgtcccaaacaccaaaatgtctctcaagtgttcggccaagtggagtgtcactctgacgatggcggcggtgtcagatggtggtctgcaattccagattgatgcaccggagccggacttgaccttcacgggtgaaaacaaggaacagctaagctcgtacgagagttatctgcgaaaggcctatgcaacggccaataggaacttcaagtccatcttggaagcattgaagaatagtctggaaggacaagagaagtttttc

SEQ ID NO: 24611 - DNA, 405 bp, Muscodor strobelii
  misc_feature: SGI cDNA ID NO. 568393
  misc_feature: Encodes the peptide sequence at SEQ ID NO 24612
atgcgtttctccatcgtcgctactcttaccttcgccctcggcgccattgccgctccccagatgggtggcagcggagtctcggccgacaccaccatcgctcaggccaacgacgtctgtggtcaagatttcgacctcagctgctgcaacaaagtttctcagtccggtgactccgtcaacgaggccagcggtctcctgtctggtcttctgtccggtgctctcgagaacggcgatgttggcttgttcgatggctgctcgaagctggacgttgctgccctcatcggtgtggatgacctccttaactcccagtgcaagcagaccgcagcctgctgccaacgctccggcaccaaccaagatggcctcgtcaacgtcggccttccttgcgttgcccttggtggcctcctataa

SEQ ID NO: 24612 - protein, 134 aa, Muscodor strobelii
  misc_feature: SGI Peptide ID NO. 568393
  misc_feature (5)..(131): Pfam Id: PF01185 Pfam Desc: Fungal hydrophobin
  misc_feature (26)..(134): NCBI GI: 67903632 Blast Desc: RODL_EMENI RODLET PROTEIN PRECURSOR [Aspergillus nidulans FGSC A4] gi|133264|sp|P28346.1|RODL_EMENI RecName: Full=Rodlet protein; Flags: Precursor gi|168086|gb|AAA33321.1|
  misc_feature (26)..(128): NCBI GI: 269993866 Blast Desc: rodlet peptide [Emericella nidulans]
  misc_feature (1)..(134): NCBI GI: 145258896 Blast Desc: An04g08500 [Aspergillus niger] gi|134074822|emb|CAK38937.1| protein product [Aspergillus niger]
  misc_feature (1)..(134): NCBI GI: 145237540 Blast Desc: An07g03340 [Aspergillus niger] gi|85691205|gb|ABC73721.1| rodlet protein [Aspergillus niger] gi|134075889|emb|CAL00268.1| protein product [Aspergillus niger]
  misc_feature (26)..(130): NCBI GI: 110171908 Blast Desc: rodA [Emericella nidulans]
  misc_feature (1)..(134): NCBI GI: 67522761 Blast Desc: AN1837.2 [Aspergillus nidulans FGSC A4] gi|40745846|gb|EAA65002.1| AN1837.2 [Aspergillus nidulans FGSC A4] gi|259487186|tpe|CBF85659.1| TPA: [Aspergillus nidulans FGSC
  misc_feature (27)..(134): NCBI GI: 70996676 Blast Desc: conidial hydrophobin RodB [Aspergillus fumigatus Af293] gi|27461063|gb|AAL27804.1| hydrophobin precursor [Aspergillus fumigatus] gi|66850728|gb|EAL91055.1| conidial RodB
  misc_feature (26)..(128): NCBI GI: 110171909 Blast Desc: rodA [Emericella miyajii]
  misc_feature (26)..(128): NCBI GI: 110171910 Blast Desc: rodA [Emericella parvathecia]
  misc_feature (27)..(133): NCBI GI: 119494273 Blast Desc: conidial hydrophobin RodB [Neosartorya fischeri NRRL 181] gi|119412194|gb|EAW22135.1| conidial hydrophobin RodB [Neosartorya fischeri NRRL 181]
MRFSIVATLTFALGAIAAPQMGGSGVSADTTIAQANDVCGQDFDLSCCNKVSQSGDSVNEASGLLSGLLSGALENGDVGLFDGCSKLDVAALIGVDDLLNSQCKQTAACCQRSGTNQDGLVNVGLPCVALGGLL

SEQ ID NO: 24613 - DNA, 1344 bp, Muscodor strobelii
  misc_feature: SGI cDNA ID NO. 568394
  misc_feature: Encodes the peptide sequence at SEQ ID NO 24614
atgtcgaaacctgaaaatgaccagtccggcggccaagggcagaagaaaaaaagagacgagccagaatctatcaagccaggccgaaaccctattcttacgggcatcagtctattgatcttcctcggcatttcttattacatagccaatttctacggtcgagatccgatcgtagatcctttagacttcgcgcagaggacagaaattatcctgaagtctacgcccctcattgatggtcacaatgacctgccatatcttttgcgcatagagttgaagaacaagatctacaaccaatctgctttcacatttcgcgatcatctcgcaagccatacagatttagtgcgtatgcagcaaggacgtgttggtggtcaattctggtctgtctttgttgaatgcccagatatcgcgaaccttgacgatccaaccttctccgtgcgcgataccctggaacagatcgacgttactaaacgcttcatcaacgacaattctgagttggcatactgcgaaacctcaacatgcgcaaagtcagagtttacgaatggtaagattccttcgatgctaggggctgagggcatgcatcagacgggttcatcaatcgctgtgctgcgccaattatttgatctcggtgtgcgttatgtaaccatcacgcacaactgcgacaacccgtatgccacagcagcatcgaccgtcacggcaacgggcgttgatggtggcttgactccctttggcgctgtggcgatccgtgagatgaatcgtctgggcatgatggtcgacttgtcacatacgtcgcacgatgctatgcgtcagattcttgatatcacgaagagccctgtcatgttcagtcacagcgcttgctatggattagcgaagaattttcgcaatgcgcccgatgatgttattgcacgcctcaaggagaatgatggagttttgatggtcatgtttgtcagtcgctttctgaatgctacaaatccggacgaggcggatatcaacacagtcgttgaccacataatgcatgtggttgagcttgcaggctgggatcatgttggaatcggaggagacttcgatggcacagttaaactggcaaatggaattggatctgtggctgactacccgaaactcatcgaggcggtcatgaagcgaggagctacggacgaacagattcgcaaacttgtcggagagaacattttgagggtttggcgcgaaaacgaactcatcgcagcacagcttgtagagcaattgcccgcagaagaagtctgggaagagaggaaattcacaagatggaacggcccacttccaataatgattcccggaaacacagagagaattggcgcagctgactatgagtaa

SEQ ID NO: 24614 - protein, 447 aa, Muscodor strobelii
  misc_feature: SGI Peptide ID NO. 568394
  misc_feature (68)..(400): Pfam Id: PF01244 Pfam Desc: Membrane dipeptidase (Peptidase family M19)
  misc_feature (1)..(440): NCBI GI: 240106660 Blast Desc: Microsomal dipeptidase precursor, [Coccidioides posadasii C735 delta SOWgp]
  misc_feature (1)..(440): NCBI GI: 119174012 Blast Desc: CIMG_08988 [Coccidioides immitis RS]
  misc_feature (57)..(434): NCBI GI: 242770303 Blast Desc: dipeptidase, [Talaromyces stipitatus ATCC 10500] gi|218725147|gb|EED24564.1| dipeptidase, [Talaromyces stipitatus ATCC 10500]
  misc_feature (61)..(425): NCBI GI: 238840437 Blast Desc: dipeptidase 1 [Microsporum canis CBS 113480]
  misc_feature (28)..(445): NCBI GI: 256722808 Blast Desc: NECHADRAFT_87110 [Nectria haematococca mpVI 77-13-4]
  misc_feature (57)..(440): NCBI GI: 258570123 Blast Desc: conserved [Uncinocarpus reesii 1704] gi|237904135|gb|EEP78536.1| conserved [Uncinocarpus reesii 1704]
  misc_feature (61)..(425): NCBI GI: 240106764 Blast Desc: Microsomal dipeptidase precursor, [Coccidioides posadasii C735 delta SOWgp]
  misc_feature (39)..(438): NCBI GI: 225682862 Blast Desc: dipeptidase [Paracoccidioides brasiliensis Pb03]
  misc_feature (39)..(438): NCBI GI: 226290309 Blast Desc: dipeptidase [Paracoccidioides brasiliensis Pb18]
  misc_feature (64)..(435): NCBI GI: 19076022 Blast Desc: dipeptidyl aminopeptidase () [Schizosaccharomyces pombe 972h-] gi|74582250|sp|O59832.1|DPEH2_SCHPO RecName: Full=Uncharacterized dipeptidase C965.12 dipeptidyl peptidase ()
  misc_feature (64)..(435): SWISSPROT Homolog: EC 3.4.13.19 Membrane dipeptidase
MSKPENDQSGGQGQKKKRDEPESIKPGRNPILTGISLLIFLGISYYIANFYGRDPIVDPLDFAQRTEIILKSTPLIDGHNDLPYLLRIELKNKIYNQSAFTFRDHLASHTDLVRMQQGRVGGQFWSVFVECPDIANLDDPTFSVRDTLEQIDVTKRFINDNSELAYCETSTCAKSEFTNGKIPSMLGAEGMHQTGSSIAVLRQLFDLGVRYVTITHNCDNPYATAASTVTATGVDGGLTPFGAVAIREMNRLGMMVDLSHTSHDAMRQILDITKSPVMFSHSACYGLAKNFRNAPDDVIARLKENDGVLMVMFVSRFLNATNPDEADINTVVDHIMHVVELAGWDHVGIGGDFDGTVKLANGIGSVADYPKLIEAVMKRGATDEQIRKLVGENILRVWRENELIAAQLVEQLPAEEVWEERKFTRWNGPLPIMIPGNTERIGAADYE

SEQ ID NO: 24615 - DNA, 2469 bp, Muscodor strobelii
  misc_feature: SGI EST ID NO. CUFF.58003.0
  misc_feature: Variant of the nucleotide sequence at SEQ ID NO 24613
cagagagatagctgcatgataggtcgtcacgcgacagcccaactcaataaataattatcgtcatacacaattttattcctttgttcgttgcctacgcagcctcgtggcgcggggtaggatttgtgagattcaagttcaatgacccagatacacctaatctaaatccccgttgccatcttgtttatccaccaagtccagataacgaacacagctactataagctcagagaacactcacatcgtaatgtcgaaacctgaaaatgaccagtccggcggccaagggcagaagaaaaaaagagacgagccagaatctatcaagccaggccgaaaccctattcttacgggcatcagtctattgatcttcctcggcatttcttattacatagccaatttctacggtcgagatccgatcgtagatcctttagacttcgcgcagaggacagaaattatcctgaagtctacgcccctcattgatggtcacaatgacctgccatatcttttgcgcatagagttgaagaacaagatctacaaccaatctgctttcacatttcgcgatcatctcgcaagccatacagatttagtgcgtatgcagcaaggacgtgttggtggtcaattctggtctgtctttgttgaatgcccagatatcgcgaaccttgacgatccaaccttctccgtgcgcgataccctggaacagatcgacgttactaaacgcttcatcaacgacaattctgagttggcatactgcgaaacctcaacatgcgcaaagtcagagtttacgaatggtaagattccttcgatgctaggggctgagggcatgcatcagacgggttcatcaatcgctgtgctgcgccaattatttgatctcggtgtgcgttatgtaaccatcacgcacaactgcgacaacccgtatgccacagcagcatcgaccgtcacggcaacgggcgttgatggtggcttgactccctttggcgctgtggcgatccgtgagatgaatcgtctgggcatgatggtcgacttgtcacatacgtcgcacgatgctatgcgtcagattcttgatatcacgaagagccctgtcatgttcagtcacagcgcttgctatggattagcgaagaattttcgcaatgcgcccgatgatgttattgcacgcctcaaggagaatgatggagttttgatggtcatgtttgtcagtcgctttctgaatgctacaaatccggacgaggcggatatcaacacagtcgttgaccacataatgcatgtggttgagcttgcaggctgggatcatgttggaatcggaggagacttcgatggcacagttaaactggcaaatggaattggatctgtggctgactacccgaaactcatcgaggcggtcatgaagcgaggagctacggacgaacagattcgcaaacttgtcggagagaacattttgagggtttggcgcgaaaacgaactcatcgcagcacagcttgtagagcaattgcccgcagaagaagtctgggaagagaggaaattcacaagatggaacggcccacttccaataatgattcccggaaacacagagagaattggcgcagctgactatgagtaagacctgtcagacaagtactgaagagcaaatcaatggtggatgcacgttgaggcatatgggccgagatcactaagacacgcaagaaacaccgaatgctagttaaacgagcgactcaagttggatttatcgtgctactcatacaccatgccccatcccaaaagaaatcatcaagaaccacacccgagcacgattataaagacacactcaattacatctccacatatctcatgtactccgtgatatgttgcaaaatgggccatatgcgaacaaagtggctatatatgcagctcgtgaagggaaacgagaaaggcatttataggaggccaccaagggcaacgcaaggaaggccgacgttgacgaggccatcctgagacattgtgtcagatttgatcgagagaaatgggcggagtccacttgacttacttggttggtgccggagcgttggcagcaggctgcggtctgcttgcactgggagttaaggaggtcatccacaccgatgactgtaatagattgattagcatcttattcaaactgtcaatgaagagcgaagtgaaaacgtacgggcagcaacgtccagcttcgagcagccatcgaacaagccaacatcgccgttctcgagagcaccggacagaagaccagacaggagaccgctggcctcgttgacggagtcaccggactgagaaactttgttgcagcagctgaggtcgaaatcttgaccacagacgtcgttggcctgagcgatggtggtgtcggccgagactccgctgccacccatctggggagcggcaatggcgccgagggcgaaggtaagagtagcgacgatggagaaacgcattttgatggtttgttggtggttaaattaagattattgaaatctggttg

SEQ ID NO: 24616 - DNA, 1869 bp, Muscodor strobelii
  misc_feature: SGI cDNA ID NO. 568395
  misc_feature: Elevated expression when VOC is produced
  misc_feature: Encodes the peptide sequence at SEQ ID NO 24617
atgggcttctttggcaagaagaaacagccacaacctacagcatatcccttgaaagatgagctatcgccgctaccgcaaggacagcatcatgccgctctcaatcaacactccggatatcccttagcaccgcaagtagtctcttcatatggctacaatcatcctccgcaatcatctcgaccagtcccccctttacctatccacagtcaggatcagaaacactatgccccgatcatagtaaatcagcattactaccttaatcctcccattcagcagcattcctcttcaaatgtctacccaaacagtggtgcaaaccgcttaccgaatagatcaaaggtagacttagccgttgatctcatgaatcttccatacaatgtgattaatgctgtctgcgatgatgggttaccaagatggcatgggtatggctcccagcttttgaatcaaggggctgccttgtatgatcagatatcctctaaatttgacgatgtcatgaccttgattgaccgagacaaatacgccggaaatgaaagcgatctgttcatgtatcagcagccaagccctactctatccgacatctcatcgtctcctccaactgttaaaagaggccaagggaagaagaacaaaaaggatccgcagaaaggccaaagtagcgcagtgtcggcctcactgattacgagtggatattttgcgaaagtagatctctatgcaaattctaggctacccttggatttgcctcgtcttcgagtgaccataccaacatatccactgctctgtctcgcggcacagtactcagaaagagtctatgacaaacctagaggagctgagcgtgatgcacatgttgacgctgattggcgtaccgggactaaagctatgtacatcaaaagtgtgcccatggatgacgtgaacacgattgtctttgctatccgaggaacaacatctttcatggactgggctgtaaacctcaataccgcccctactactccaacaggctttctcgatgatccgagaaatttctgccacgctggatttttgtctgttgcgaggaagatgatcgcacctgttgctgcacgcttgagacagctgctcgaagaaaaccccgagcggttctcatactcacttctcattaccggccattccgcgggtggtgccgtcgctcaattattgtacagtcacatgctctcgacatctaaaaacgcttcttccgagctcaatgctctgtctggatgttttaagaaagtccactgcatcacatttggctcgccaccagtgtcactatttcccttacagacgccaaccaggcacgaacttcgtagatcactattctataatttcatcaacgaaggtgacccggtcgtgagagctgataaggcctatgtcaagagcctgcttgagctttttgctgcaccctcgccatctcccttaaaaccaaaggaatcaaacaaacagcttatggccccagatattccaccatcgaagccgagcaagccacatgagaagaaatcaaaggcctcactctcatcgaagacatcaaaaatgtccatgaaatctacacagtctctgcactcgaatgcgtcatcaaagacaaatagatcaaaatccaaagagccgaccggtccccgttgggaggtgccgccaagcacactgagcaacgctggaaagatcatagttttgcgatccaaaaacccaaattcgaagttcaagcgcgcaaaaacgattgaagagcgcctcagcgaaggcgttatggcacaaatcgcaagcgatgagaaattacgaggtgtcatctttggtgatcctgtttgccatgtcatgagattctacgcggcgaggattgaggctttagcgattgaggccatcacggctaagggccggtga

SEQ ID NO: 24617 - protein, 622 aa, Muscodor strobelii
  misc_feature: SGI Peptide ID NO. 568395
  misc_feature (304)..(455): Pfam Id: PF01764 Pfam Desc: Lipase (class 3)
  misc_feature (304)..(422): Pfam Id: PF01764 Pfam Desc: Lipase (class 3)
  misc_feature (47)..(620): NCBI GI: 145615045 Blast Desc: MGG_05340 [Magnaporthe grisea 70-15] gi|145021968|gb|EDK05988.1| MGG_05340 [Magnaporthe grisea 70-15]
  misc_feature (76)..(621): NCBI GI: 171692483 Blast Desc: protein product [Podospora anserina] gi|170946190|emb|CAP72991.1| protein product [Podospora anserina]
  misc_feature (74)..(470): NCBI GI: 116198461 Blast Desc: CHGG_07386 [Chaetomium globosum CBS 148.51] gi|88178665|gb|EAQ86133.1| CHGG_07386 [Chaetomium globosum CBS 148.51]
  misc_feature (10)..(480): NCBI GI: 18375950 Blast Desc: [Neurospora crassa]
  misc_feature (49)..(466): NCBI GI: 256728600 Blast Desc: NECHADRAFT_50901 [Nectria haematococca mpVI 77-13-4]
  misc_feature (147)..(620): NCBI GI: 154302859 Blast Desc: BC1G_09173 [Botryotinia fuckeliana B05.10] gi|150855097|gb|EDN30289.1| BC1G_09173 [Botryotinia fuckeliana B05.10]
  misc_feature (145)..(621): NCBI GI: 189206676 Blast Desc: conserved [Pyrenophora tritici-repentis Pt-1C-BFP] gi|187975765|gb|EDU42391.1| conserved [Pyrenophora tritici-repentis Pt-1C-BFP]
  misc_feature (76)..(459): NCBI GI: 46110401 Blast Desc: FG02082.1 [Gibberella zeae PH-1]
  misc_feature (48)..(597): NCBI GI: 156048276 Blast Desc: SS1G_08869 [Sclerotinia sclerotiorum 1980] gi|154693266|gb|EDN93004.1| SS1G_08869 [Sclerotinia sclerotiorum 1980]
  misc_feature (151)..(620): NCBI GI: 261195704 Blast Desc: conserved [Ajellomyces dermatitidis SLH14081] gi|239588128|gb|EEQ70771.1| conserved [Ajellomyces dermatitidis SLH14081]
  misc_feature: Useful for introducing or modulating the production of volatile compounds
MGFFGKKKQPQPTAYPLKDELSPLPQGQHHAALNQHSGYPLAPQVVSSYGYNHPPQSSRPVPPLPIHSQDQKHYAPIIVNQHYYLNPPIQQHSSSNVYPNSGANRLPNRSKVDLAVDLMNLPYNVINAVCDDGLPRWHGYGSQLLNQGAALYDQISSKFDDVMTLIDRDKYAGNESDLFMYQQPSPTLSDISSSPPTVKRGQGKKNKKDPQKGQSSAVSASLITSGYFAKVDLYANSRLPLDLPRLRVTIPTYPLLCLAAQYSERVYDKPRGAERDAHVDADWRTGTKAMYIKSVPMDDVNTIVFAIRGTTSFMDWAVNLNTAPTTPTGFLDDPRNFCHAGFLSVARKMIAPVAARLRQLLEENPERFSYSLLITGHSAGGAVAQLLYSHMLSTSKNASSELNALSGCFKKVHCITFGSPPVSLFPLQTPTRHELRRSLFYNFINEGDPVVRADKAYVKSLLELFAAPSPSPLKPKESNKQLMAPDIPPSKPSKPHEKKSKASLSSKTSKMSMKSTQSLHSNASSKTNRSKSKEPTGPRWEVPPSTLSNAGKIIVLRSKNPNSKFKRAKTIEERLSEGVMAQIASDEKLRGVIFGDPVCHVMRFYAARIEALAIEAITAKGR

SEQ ID NO: 24618 - DNA, 2723 bp, Muscodor strobelii
  misc_feature: SGI EST ID NO. CUFF.58009.0
  misc_feature: Variant of the nucleotide sequence at SEQ ID NO 24616
cccagactcgtggttcgtccaacacctgcaatgcccgcattcccggcacactagcattttgcccagacctcccctatggcatcgattggggcggagtcgatgcttcacagcgaatcattccccagcgaccaggaacacgcagctcagggcaaggcacaaccactccaagcgggcaactcggcaggctgaacttgtgaattgatgctctctgcatgtccgcccacattccaaaaccggccgttgtgctactcagtttgattgactcagccatcttattcgccatcagttatggcggccagtagagagctcttgctctacagttcccctcttcactctcttttgtgcacgtagtcgacgtgacaagccaagtacgcttcttttcaagcttgattacgatcttgtgttgctttgtttccccaggatatgccaggagagtttattcatattgttcagttccctaatttattggtttggaggtctcgtgagctgtatgtaggaatccaccaaacctcgccatgggcttctttggcaagaagaaacagccacaacctacagcatatcccttgaaagatgagctatcgccgctaccgcaaggacagcatcatgccgctctcaatcaacactccggatatcccttagcaccgcaagtagtctcttcatatggctacaatcatcctccgcaatcatctcgaccagtcccccctttacctatccacagtcaggatcagaaacactatgccccgatcatagtaaatcagcattactaccttaatcctcccattcagcagcattcctcttcaaatgtctacccaaacagtggtgcaaaccgcttaccgaatagatcaaaggtagacttagccgttgatctcatgaatcttccatacaatgtgattaatgctgtctgcgatgatgggttaccaagatggcatgggtatggctcccagcttttgaatcaaggggctgccttgtatgatcagatatcctctaaatttgacgatgtcatgaccttgattgaccgagacaaatacgccggaaatgaaagcgatctgttcatgtatcagcagccaagccctactctatccgacatctcatcgtctcctccaactgttaaaagaggccaagggaagaagaacaaaaaggatccgcagaaaggccaaagtagcgcagtgtcggcctcactgattacgagtggatattttgcgaaagtagatctctatgcaaattctaggctacccttggatttgcctcgtcttcgagtgaccataccaacatatccactgctctgtctcgcggcacagtactcagaaagagtctatgacaaacctagaggagctgagcgtgatgcacatgttgacgctgattggcgtaccgggactaaagctatgtacatcaaaagtgtgcccatggatgacgtgaacacgattgtctttgctatccgaggaacaacatctttcatggactgggctgtaaacctcaataccgcccctactactccaacaggctttctcgatgatccgagaaatttctgccacgctggatttttgtctgttgcgaggaagatgatcgcacctgttgctgcacgcttgagacagctgctcgaagaaaaccccgagcggttctcatactcacttctcattaccggccattccgcgggtggtgccgtcgctcaattattgtacagtcacatgctctcgacatctaaaaacgcttcttccgagctcaatgctctgtctggatgttttaagaaagtccactgcatcacatttggctcgccaccagtgtcactatttcccttacagacgccaaccaggcacgaacttcgtagatcactattctataatttcatcaacgaaggtgacccggtcgtgagagctgataaggcctatgtcaagagcctgcttgagctttttgctgcaccctcgccatctcccttaaaaccaaaggaatcaaacaaacagcttatggccccagatattccaccatcgaagccgagcaagccacatgagaagaaatcaaaggcctcactctcatcgaagacatcaaaaatgtccatgaaatctacacagtctctgcactcgaatgcgtcatcaaagacaaatagatcaaaatccaaagagccgaccggtccccgttgggaggtgccgccaagcacactgagcaacgctggaaagatcatagttttgcgatccaaaaacccaaattcgaagttcaagcgcgcaaaaacgattgaagagcgcctcagcgaaggcgttatggcacaaatcgcaagcgatgagaaattacgaggtgtcatctttggtgatcctgtttgccatgtcatgagattctacgcggcgaggattgaggctttagcgattgaggccatcacggctaagggccggtgacttgcataggatggattccattgaacgacattatgacgcttatgatattattgccggctggtcctaggattgttgtgtaaattataccataaatcgggcatcttattcaagggatcattcaaatataataaggattaggacatacttgtacttgagcgtgtcattctgctcctgagagagaacattcttaatgtaacaaagactgaatcacttgcctttcgtcctttgtttgatctcgtgcgagtttgttatagctaacctcaacaaatagatatctggatgagatacgcacgattggtgtaaagtgatcagatgacgggtttgcttatgggattatcc

SEQ ID NO: 24619 - DNA, 2895 bp, Muscodor strobelii
  misc_feature: SGI cDNA ID NO. 568396
  misc_feature: Encodes the peptide sequence at SEQ ID NO 24620
atggatttctggtcgcgcctcatagccaacacgccgctgtcctctaagtcgtcggccaaggacgccgcgaaggaccccatccgacgtcgacagcgcttcgagaaggagtacagccagctacttcacacctggcgcaactgctccaacgtcgctcacgatgccgacgccgccgaggccctcgagatccgcctgcaggagctcacgaacctgctcgccgacgagtcgcgccgcccgctgccccatccgtgcatcgcctttgccgcgtccaagcagatctacatccccatcgccaagatagccaccacctcgtacaacgaatggatcatcaaggaggccgtgctgttcttcgccaccctcatcgagagcgaggaggaggccttcgtcgagaacgacgccttctccgccagcctgaccaacctgctcgtccgcatcaccggcgccaacagcatccgcctcggcgccgacaccgaggtccgcgtcgtcgagctggccttcaacatcaccaccaagatccgcctcgagcccgacattatccctgcctggttcaagtcccatgccggccccgacgcgcacgacggcagggtccaggaccagagggagaagtttgccggccgaacgcagaagcaggacttcccgctcttctacctcctgatggactacatacagcacgagggcaaggtcggcgactttgcccgcaccgggctgctctatattatcgaggccgcctccagctccgtcgccctggagcagtggattgtcgagagcgatctgtccacgctgatggccactggcctcggcgcattgtacagccagctgagcaggaagctggtcatcgatcacccgccccaagacctgcctccggtcctcgccttctctgactacgagcacccgacatcgaccttcgagattgtcagctcgacaagcccggactatcagttgcatatggacaccttcttgtctcacctcctattttggcaggacgtcctcaaccactgtcgatctgttgaagtaaaatcaacactgctcgaacatttccaggtcatcttcctccaacaactcttatatccctcactcctcgaatcgtccgacgtagatggaggctcctctgtcgcagttctcacctacctcagacgtattttagaatctctagatcatcccgacatgatcaatctaatcctacattatcttctagctctgccagacaacgatatggggtcccggagtttctctgagccttccgtaagtgctgcacggaaacggaaatctgtcgacctggccagcatgatggcatccaaaatggaatcctcgtattcgccattactgttcaatttggtcgacttgattcactcgtgcctcaaatcgcaaaatgaccaaacggtatgcgtcacactccaactcgttgcgacgattcttaagcggcatcatcgctatgctatcgtgacccttctccataccgaaggtatcgacaccgatacgtgtcggcggactatgggggctcatcaacaggaggtagagtttctgatgacattagcaggcgctgtcgggggccaagataattttgacgaagtctacgataatatcttgaaggataccatgaaccgagtggagggacatccgtgttcgctcaagctcgttgcacccaaagtctcaactcataaccacaagctacctgctataccggatagtatccctggagcaccccgtgacgtgccgcctcacactttaagccccgaagaccctctcctcagcaacattctcgatatcatggaacagtttttcatcaaccctgtggaaaccaatctctcgatgactgagatggtcttggatctcgccgtttgtggctatataacggtggaggggtggcttgtgcgccaccctcggaaatacgagtttgatgaagaatctgatgacgttttatctccgcttccagatcccgcttccaagtcattcaaagagattgagaaactgcaggcagtaaaaaactgtcggcgccgaccgaaatggcagctctcaactcttccaaggattctactggtacttgagagtctcgccgatcaagttgtgtcgtttcgggagtcgattcccagatttgacgatcttatgcaacagcgtcgggaagcattccagacagccgatgccataataccaaatcaaccaagtctccgatccaactcagccgccagagagccggctttaaatccaccatctagccatggtgactcccgaacggcatcacctgcgagacctagtgcgcttgaaggatttgcccagagaatactatctgaatttggcactccgagtcgctcgggaagcccgcgggggcgaaaggacactcaacgtagctcaggcttctctaataaatcgggaggtgccagttcggcatcgccttctaaacctctaccgctgcccccaaaagaattccccttgaactacgagagccccagcaaaagcggactgtctcgttcgttctctccaagcagccatgatatgccaggcaatagtgggagaagcagtcctatatctagtcaggtagctgctttcgctgctgtagatcagggaatactagctagaaggctaggcctaccgaaatccaagacagagccagaacctattcctctgaacttcaaccgaaaaaatcggagccgagatggtgacttcgatgtagagaacggcaaggatgaggatgacgaaatagatccaacggaagcacaggtcgccgcagacgaagatgagatagaggagcacccagtactccaaatgccacctgaggaggaagatacagcatctgtgtctcatattctcaccaatgtcatcatctaccagtcatttcttcttgagctggctagcttgatacaagtgcgagctggcctcttcaatgaggttaagtttgcttag

SEQ ID NO: 24620 - protein, 964 aa, Muscodor strobelii
  misc_feature: SGI Peptide ID NO. 568396
  misc_feature (1)..(963): NCBI GI: 171692481 Blast Desc: protein product [Podospora anserina] gi|170946189|emb|CAP72990.1| protein product [Podospora anserina]
  misc_feature (1)..(964): NCBI GI: 116198463 Blast Desc: CHGG_07387 [Chaetomium globosum CBS 148.51] gi|88178666|gb|EAQ86134.1| CHGG_07387 [Chaetomium globosum CBS 148.51]
  misc_feature (1)..(937): NCBI GI: 85098771 Blast Desc: NCU08869 [Neurospora crassa OR74A] gi|28922176|gb|EAA31426.1| conserved [Neurospora crassa OR74A]
  misc_feature (1)..(862): NCBI GI: 18375949 Blast Desc: conserved [Neurospora crassa]
  misc_feature (43)..(878): NCBI GI: 256728579 Blast Desc: NECHADRAFT_96933 [Nectria haematococca mpVI 77-13-4]
  misc_feature (41)..(870): NCBI GI: 46110333 Blast Desc: FG02048.1 [Gibberella zeae PH-1]
  misc_feature (1)..(963): NCBI GI: 145615047 Blast Desc: MGG_05341 [Magnaporthe grisea 70-15] gi|145021969|gb|EDK05989.1| MGG_05341 [Magnaporthe grisea 70-15]
  misc_feature (1)..(963): NCBI GI: 154305832 Blast Desc: BC1G_08147 [Botryotinia fuckeliana B05.10] gi|150853032|gb|EDN28224.1| BC1G_08147 [Botryotinia fuckeliana B05.10]
  misc_feature (131)..(957): NCBI GI: 261360582 Blast Desc: conserved [Verticillium albo-atrum VaMs.102]
  misc_feature (1)..(893): NCBI GI: 156048112 Blast Desc: SS1G_08787 [Sclerotinia sclerotiorum 1980] gi|154693184|gb|EDN92922.1| SS1G_08787 [Sclerotinia sclerotiorum 1980]
MDFWSRLIANTPLSSKSSAKDAAKDPIRRRQRFEKEYSQLLHTWRNCSNVAHDADAAEALEIRLQELTNLLADESRRPLPHPCIAFAASKQIYIPIAKIATTSYNEWIIKEAVLFFATLIESEEEAFVENDAFSASLTNLLVRITGANSIRLGADTEVRVVELAFNITTKIRLEPDIIPAWFKSHAGPDAHDGRVQDQREKFAGRTQKQDFPLFYLLMDYIQHEGKVGDFARTGLLYIIEAASSSVALEQWIVESDLSTLMATGLGALYSQLSRKLVIDHPPQDLPPVLAFSDYEHPTSTFEIVSSTSPDYQLHMDTFLSHLLFWQDVLNHCRSVEVKSTLLEHFQVIFLQQLLYPSLLESSDVDGGSSVAVLTYLRRILESLDHPDMINLILHYLLALPDNDMGSRSFSEPSVSAARKRKSVDLASMMASKMESSYSPLLFNLVDLIHSCLKSQNDQTVCVTLQLVATILKRHHRYAIVTLLHTEGIDTDTCRRTMGAHQQEVEFLMTLAGAVGGQDNFDEVYDNILKDTMNRVEGHPCSLKLVAPKVSTHNHKLPAIPDSIPGAPRDVPPHTLSPEDPLLSNILDIMEQFFINPVETNLSMTEMVLDLAVCGYITVEGWLVRHPRKYEFDEESDDVLSPLPDPASKSFKEIEKLQAVKNCRRRPKWQLSTLPRILLVLESLADQVVSFRESIPRFDDLMQQRREAFQTADAIIPNQPSLRSNSAAREPALNPPSSHGDSRTASPARPSALEGFAQRILSEFGTPSRSGSPRGRKDTQRSSGFSNKSGGASSASPSKPLPLPPKEFPLNYESPSKSGLSRSFSPSSHDMPGNSGRSSPISSQVAAFAAVDQGILARRLGLPKSKTEPEPIPLNFNRKNRSRDGDFDVENGKDEDDEIDPTEAQVAADEDEIEEHPVLQMPPEEEDTASVSHILTNVIIYQSFLLELASLIQVRAGLFNEVKFA

SEQ ID NO: 24621 - DNA, 4454 bp, Muscodor strobelii
  misc_feature: SGI EST ID NO. CUFF.58092.0
  misc_feature: Variant of the nucleotide sequence at SEQ ID NO 24619
tttcgagcttgccatctgcttttgagatggtgctatctgtctagtaggaacgatgcatctcaactgggtgtacactgcttattgtacgtgttgaaatgcgtataatatgaaatgcacaagctggatcgtcaagtgacaggacggactctggctggactccgggcacagtgcgttttgatttacctagaaatatgaaatcttcgaccccattttaacggcgcgatctatggatgcattaggccaggcaaaagatgataaagcgatgatgccgtcgtacttggagttttagggttgaaataaatgtccctggatgcggtcttcatagcaagctagcctgggcagcatttcaacctatttagagtgccgctaataggcagctcttcctcctatcgaagacggtatctcttgctgtgcgtgaaagcataccttatgttgcatctgccatcatttcttcatcgttctttccttcatccaatacatcggccaatacacgtgcacccgtattgtcgccttagtaccgtacacgccccatatgggaagcttgggggtgtacggatgattggggtgcctggagtgtccaccgcgcttcgacaggtacgcaacatgaggccatcggcgacgctcctacttatccaccctgtccatcaacaccgggaatcttggaatctcccgggtatcgtctgttggactactactgctgctgctactgtagaattgatacgcattacagggtattgtcaacccttgctggacccccaacgccatggtctctcggtatcgatattctggcgtgcattagcagggcaaacaggcgacagggatgctccactcggtagctaccctgctaggacagccggctaataataatcattctcagcatatgattctcaaacatcgggcattgggttaattcatgcgacacggccgcgggggactgggactctgggactctggaaggtgacttcatgccacgccgtcgcctcgcgagatagctgtgctgctcgacctcgtccagctcgactttacgaggagatgcatctcgcgtcgccatggatttctggtcgcgcctcatagccaacacgccgctgtcctctaagtcgtcggccaaggacgccgcgaaggaccccatccgacgtcgacagcgcttcgagaaggagtacagccagctacttgtatgccctctgccactccttgcctgcgtccgatatgtatgtctaatcccaaccaacgcagcacacctggcgcaactgctccaacgtcgctcacgatgccgacgccgccgaggccctcgagatccgcctgcaggagctcacgaacctgctcgccgacgagtcgcgccgcccgctgccccatccgtgcatcgcctttgccgcgtccaagcagatctacatccccatcgccaagatagccaccacctcgtacaacgaatggatcatcaaggaggccgtgctgttcttcgccaccctcatcgagagcgaggaggaggccttcgtcgagaacgacgccttctccgccagcctgaccaacctgctcgtccgcatcaccggcgccaacagcatccgcctcggcgccgacaccgaggtccgcgtcgtcgagctggccttcaacatcaccaccaagatccgcctcgagcccgacattatccctgcctggttcaagtcccatgccggccccgacgcgcacgacggcagggtccaggaccagagggagaagtttgccggccgaacgcagaagcaggacttcccgctcttctacctcctgatggactacatacagcacgagggcaaggtcggcgactttgcccgcaccgggctgctctatattatcgaggccgcctccagctccgtcgccctggagcagtggattgtcgagagcgatctgtccacgctgatggccactggcctcggcgcattgtacagccagctgagcaggaagctggtcatcgatcacccgccccaagacctgcctccggtcctcgccttctctgactacgagcacccgacatcgaccttcgagattgtcagctcgacaagcccggactatcagttgcatatggacaccttcttgtctcacctcctattttggcaggacgtcctcaaccactgtcgatctgttgaagtaaaatcaacactgctcgaacatttccaggtcatcttcctccaacaactcttatatccctcactcctcgaatcgtccgacgtagatggaggctcctctgtcgcagttctcacctacctcagacgtattttagaatctctagatcatcccgacatgatcaatctaatcctacattatcttctagctctgccagacaacgatatggggtcccggagtttctctgagccttccgtaagtgctgcacggaaacggaaatctgtcgacctggccagcatgatggcatccaaaatggaatcctcgtattcgccattactgttcaatttggtcgacttgattcactcgtgcctcaaatcgcaaaatgaccaaacggtatgcgtcacactccaactcgttgcgacgattcttaagcggcatcatcgctatgctatcgtgacccttctccataccgaaggtatcgacaccgatacgtgtcggcggactatgggggctcatcaacaggaggtagagtttctgatgacattagcaggcgctgtcgggggccaagataattttgacgaagtctacgataatatcttgaaggataccatgaaccgagtggagggacatccgtgttcgctcaagctcgttgcacccaaagtctcaactcataaccacaagctacctgctataccggatagtatccctggagcaccccgtgacgtgccgcctcacactttaagccccgaagaccctctcctcagcaacattctcgatatcatggaacagtttttcatcaaccctgtggaaaccaatctctcgatgactgagatggtcttggatctcgccgtttgtggctatataacggtggaggggtggcttgtgcgccaccctcggaaatacgagtttgatgaagaatctgatgacgttttatctccgcttccagatcccgcttccaagtcattcaaagagattgagaaactgcaggcagtaaaaaactgtcggcgccgaccgaaatggcagctctcaactcttccaaggattctactggtacttgagagtctcgccgatcaagttgtgtcgtttcgggagtcgattcccagatttgacgatcttatgcaacagcgtcgggaagcattccagacagccgatgccataataccaaatcaaccaagtctccgatccaactcagccgccagagagccggctttaaatccaccatctagccatggtgactcccgaacggcatcacctgcgagacctagtgcgcttgaaggatttgcccagagaatactatctgaatttggcactccgagtcgctcgggaagcccgcgggggcgaaaggacactcaacgtagctcaggcttctctaataaatcgggaggtgccagttcggcatcgccttctaaacctctaccgctgcccccaaaagaattccccttgaactacgagagccccagcaaaagcggactgtctcgttcgttctctccaagcagccatgatatgccaggcaatagtgggagaagcagtcctatatctagtcaggtagctgctttcgctgctgtagatcagggaatactagctagaaggctaggcctaccgaaatccaagacagagccagaacctattcctctgaacttcaaccgaaaaaatcggagccgagatggtgacttcgatgtagagaacggcaaggatgaggatgacgaaatagatccaacggaagcacaggtcgccgcagacgaagatgagatagaggagcacccagtactccaaatgccacctgaggaggaagatacagcatctgtgtctcatattctcaccaatgtcatcatctaccagtcatttcttcttgagctggctagcttgatacaagtgcgagctggcctcttcaatgaggttaagtttgcttagactcgtgtcgggagattcacagcggggaatggagtattgttgttacccgcctcgcctctcagttcacttggggccatactgctgctgcatacgaggcctcgatcaaggccattgttacataagataccacctttctgagagaattaggtagacagacacatggtcatgttgatcgatgcatgattggcgcgctaccgccgcaaaagtattgctggagtatcgatactaatagacagcaaatagaatatatttctgcccttcaaggccaagtgttgcaaacggattgacatagtagtgttgatcgcttcgagtaacgattcggctttcctccccaagcttactagccaactactttaggttggggcttagaacgcatctttcttgatctaatcttatagccaagtaaatgcgatatgatacgaaccagagatatttaatttccatttgag

SEQ ID NO: 24622 - DNA, 954 bp, Muscodor strobelii
  misc_feature: SGI cDNA ID NO. 568397
  misc_feature: Encodes the peptide sequence at SEQ ID NO 24623
atgatcttcgtgcaacaattcaaccaaggtcaaagtgaagctcagaggtgggagcaactcctatgtcacaaaaacacctccgatggcatcgctctacgccatcaattcccgagtataagatgggtattccctcgcggaaagatatcttccgatgaatctaggatacatgtcgacattaatgtcaatgtctgggacattaccgacttttcatccaaggagagggccgcacttaatctcacatggggcaaaaacgtaccctacctcacgcaagtaatactcaacgaagcacgaatacttggcggtatgaacaagatcatcctgggcggcgcggacgtcggatcatccgctgcgctcgatgcactgacaggcttctataattttctcttcacgagaatctcccggccgaatagcctcaatgaatttttcgacttacgtattttcgataaccgtcgcaagtctcccgcgagtcaagttgagatcgcggggttctttggtaccgaaaccctacagccttatagtaaggttggcgaaaaggatttcgcgctcctgtctaacggatttcccgagactattgagactgagtactcgatgttccacaatccaagaccaggtctagagcattttggtagtggcagggggacaatatggagcggcgaagtgtatgatgtgtttaggagctttctggaggatatacttggtgtacctcgttcattgaccgatgtcgatgaagagaaagtgaaaaaatggaaggagacacagttgatgggaaaccacccagagattgcacaaaaagttattgcggagtttaaacttaaggatgccgcctccggtcggtctagattccggaaacggagaaggggctcgatgcgacgccgcacatcaagactacgtcgcgtctttacagtgccatgggaactacttgagcccagtgtaggggaaacaacactgccctaa

SEQ ID NO: 24623 - protein, 317 aa, Muscodor strobelii
  misc_feature: SGI Peptide ID NO. 568397
  misc_feature (14)..(121): NCBI GI: 39970873 Blast Desc: MGG_02903 [Magnaporthe grisea 70-15] gi|149210379|ref|XP_001522564.1| MGCH7_ch7g667 [Magnaporthe grisea 70-15] gi|86196622|gb|EAQ71260.1| MGCH7_ch7g667 grisea
MIFVQQFNQGQSEAQRWEQLLCHKNTSDGIALRHQFPSIRWVFPRGKISSDESRIHVDINVNVWDITDFSSKERAALNLTWGKNVPYLTQVILNEARILGGMNKIILGGADVGSSAALDALTGFYNFLFTRISRPNSLNEFFDLRIFDNRRKSPASQVEIAGFFGTETLQPYSKVGEKDFALLSNGFPETIETEYSMFHNPRPGLEHFGSGRGTIWSGEVYDVFRSFLEDILGVPRSLTDVDEEKVKKWKETQLMGNHPEIAQKVIAEFKLKDAASGRSRFRKRRRGSMRRRTSRLRRVFTVPWELLEPSVGETTLP

SEQ ID NO: 24624 - DNA, 203 bp, Muscodor strobelii
  misc_feature: SGI EST ID NO. CUFF.58014.0
  misc_feature: Variant of the nucleotide sequence at SEQ ID NO 24622
aaagtgaaaaaatggaaggagacacagttgatgggaaaccacccagagattgcacaaaaagttattgcggagtttaaacttaaggatgccgcctccggtcggtctagattccggaaacggagaaggggctcgatgcgacgccgcacatcaagactacgtcgcgtctttacagtgccatgggaactacttgagcccagtgtagg

SEQ ID NO: 24625 - DNA, 747 bp, Muscodor strobelii
  misc_feature: SGI cDNA ID NO. 568398
  misc_feature: Encodes the peptide sequence at SEQ ID NO 24626
atgtcgtttggtgaatgctgcatcaagacctttagatgggaaggcacacccacaggcagggagagcacgctcgcaaacaacaagtgctacgtcacaggcgacaacaaagatgcagcaatcttacttatccacgatctctttggatggacatacaacaacgtgcgagtcctcgccgaccactacgccagcgagatcggcgcaacggtgtacgtgcctgatttcttcggaggctggcaggtcaatttcgaggatgccgagaacgaccgcttcgacaaaatagatctaaagggcatcgccaaggaccaggcgcgggaaatccggttcccggagatgctggcctgcaccaaagcgttgaaggctgacttgggattcaagcgcgttggcgccattggatactgctacggtggatgggcagtctgtcagctagggtctaagcaatatgatcccccgatcgtggacgcgatctctatggcccatccttcgtggataaataagggggatatcgatggtttgactatgccgatccaggttcttgcccctgagcacgatatggcatttactaaagagctgaagagttatacgtttgagacgctgttgaagtataacttgccgtttgactatcagcatttccctggcgttgcgcatggtgcttttatcagggggagtacgacgcatgatggggagagggaggcaatggctagggcgaagaacgccgcggtttcttggtttaagctgtatcttaagtag

SEQ ID NO: 24626 - protein, 248 aa, Muscodor strobelii
  misc_feature: SGI Peptide ID NO. 568398
  misc_feature (30)..(247): Pfam Id: PF01738 Pfam Desc: Dienelactone hydrolase family
  misc_feature (1)..(247): NCBI GI: 240278145 Blast Desc: dienelactone hydrolase [Ajellomyces capsulatus H143]
  misc_feature (1)..(247): NCBI GI: 154274872 Blast Desc: conserved [Ajellomyces capsulatus NAm1] gi|150414727|gb|EDN10089.1| conserved [Ajellomyces capsulatus NAm1]
  misc_feature (1)..(247): NCBI GI: 225557503 Blast Desc: dienelactone hydrolase [Ajellomyces capsulatus G186AR]
  misc_feature (1)..(248): NCBI GI: 169765898 Blast Desc: [Aspergillus oryzae RIB40] gi|83765275|dbj|BAE55418.1| protein product [Aspergillus oryzae]
  misc_feature (1)..(248): NCBI GI: 238482511 Blast Desc: dienelactone hydrolase family protein [Aspergillus flavus NRRL3357] gi|220700544|gb|EED56882.1| dienelactone hydrolase family protein [Aspergillus flavus NRRL3357]
  misc_feature (1)..(247): NCBI GI: 70990182 Blast Desc: dienelactone hydrolase family protein [Aspergillus fumigatus Af293] gi|66847572|gb|EAL87902.1| dienelactone hydrolase family protein [Aspergillus fumigatus Af293]
  misc_feature (1)..(247): NCBI GI: 119497409 Blast Desc: dienelactone hydrolase family protein [Neosartorya fischeri NRRL 181] gi|119413625|gb|EAW23566.1| dienelactone hydrolase family protein [Neosartorya fischeri NRRL 181]
  misc_feature (1)..(247): NCBI GI: 256720628 Blast Desc: NECHADRAFT_85513 [Nectria haematococca mpVI 77-13-4]
  misc_feature (2)..(247): NCBI GI: 39975059 Blast Desc: MGG_00324 [Magnaporthe grisea 70-15] gi|145018790|gb|EDK03069.1| MGG_00324 [Magnaporthe grisea 70-15]
  misc_feature (6)..(247): NCBI GI: 85104122 Blast Desc: NCU01061 [Neurospora crassa OR74A] gi|18376215|emb|CAD21331.1| conserved [Neurospora crassa] gi|28923221|gb|EAA32437.1| NCU01061 [Neurospora crassa OR74A]
MSFGECCIKTFRWEGTPTGRESTLANNKCYVTGDNKDAAILLIHDLFGWTYNNVRVLADHYASEIGATVYVPDFFGGWQVNFEDAENDRFDKIDLKGIAKDQAREIRFPEMLACTKALKADLGFKRVGAIGYCYGGWAVCQLGSKQYDPPIVDAISMAHPSWINKGDIDGLTMPIQVLAPEHDMAFTKELKSYTFETLLKYNLPFDYQHFPGVAHGAFIRGSTTHDGEREAMARAKNAAVSWFKLYLK

SEQ ID NO: 24627 - DNA, 1050 bp, Muscodor strobelii
  misc_feature: SGI EST ID NO. CUFF.58017.0
  misc_feature: Variant of the nucleotide sequence at SEQ ID NO 24625
tataaacaagactagttgtatctgaacgaacgccaattgtcaaattaacccgtccggcaaatcaaccccatcatcatgtcgtttggtgaatgctgcatcaagacctttagatgggaaggcacacccacaggcagggagagcacgctcgcaaacaacaagtgctacgtcacaggcgacaacaaagatgcagcaatcttacttatccacgatctctttggatggacatacaacaacgtgcgagtcctcgccgaccactacgccagcgagatcggcgcaacggtgtacgtgcctgatttcttcggaggctggcaggtcaatttcgaggatgccgagaacgaccgcttcgacaaaatagatctaaagggcatcgccaaggaccaggcgcgggaaatccggttcccggagatgctggcctgcaccaaagcgttgaaggctgacttgggattcaagcgcgttggcgccattggatactgctacggtggatgggcagtctgtcagctagggtctaagcaatatgatcccccgatcgtggacgcgatctctatggcccatccttcgtggataaataagggggatatcgatggtttgactatgccgatccaggttcttgcccctgagcacgatatggcatttactaaagagctgaagagttatacgtttgagacgctgttgaagtataacttgccgtttgactatcagcatttccctggcgttgcgcatggtgcttttatcagggggagtacgacgcatgatggggagagggaggcaatggctagggcgaagaacgccgcggtttcttggtttaagctgtatcttaagtagatacgttcttaaccagagatagatacgattttgttatttggggaattacgtggattagctgacaacgtcagatcagattagggaaatgcgttgcttcattagtacgaacgagaaactccaggataagggagaatgatgatggctatgagacgggaaaagtgatacatgttcccctactgactatcattctgaatgaaatacacgcgcttatgaggatatttgcatgag

SEQ ID NO: 24628 - DNA, 930 bp, Muscodor strobelii
  misc_feature: SGI cDNA ID NO. 568399
  misc_feature: Encodes the peptide sequence at SEQ ID NO 24629
atggctcccgtatctgctgctgtggtcccaaagaagccggagggtatcgacctctacgctcgttttgcgctcgctggtgccgtgggatgttccgtcactcacggcgctttcaccccagtcgatgttgtcaagactaggattcaacttgacccagcgacgtacaaccgtggtatgataggcggcttccgtcaggttatccagaacgaaggtattggtgcacttgcaactggtttcggtccaacagccacaggttatttcattcagggagcattcaagtttggcggttacgagttcttcaagaagcaatctatcgacatcctcggtatagaccgagctcgccagaaccgcacagctgtgtatgcagtgtcttcagcatcagctgaattcttcgcttctattgctctctgcccccttgaagctactcgtattcgcctcgtgtctactcccggatttgctaatggtttgatcggcggtttcactaaaatcctcaaaaacgagggagttggtgccttttactctggctttggccctattctcttcaagcaggtaccatacaccgttacgaagttcgtaggatttgaaaagatctatgagaccatttcagcccaggttgatggtaagaacttatccgctggaggacaaactgctctcaacttgggatgcggtttgctcgccggttttgctgccgccattgtttcacagcccgccgacacgatgttgtcaaaaatcaacaagaccaagggaatgcccggtgagagcacgatctctcgtctcatcaagatcgctggcgaattaggagtccgcggttccttcgccggcctcccaacgcgtctgttcatggttggggggttgactgccggtcaattcgccctgtacggcgatatcaagaaggctctgggtgccaccaatggtgtagagatcgccaaataa

SEQ ID NO: 24629 - protein, 309 aa, Muscodor strobelii
  misc_feature: SGI Peptide ID NO. 568399
  misc_feature (18)..(107): Pfam Id: PF00153 Pfam Desc: Mitochondrial carrier protein
  misc_feature (116)..(204): Pfam Id: PF00153 Pfam Desc: Mitochondrial carrier protein
  misc_feature (214)..(303): Pfam Id: PF00153 Pfam Desc: Mitochondrial carrier protein
  misc_feature (14)..(309): NCBI GI: 39972375 Blast Desc: MGG_07489 [Magnaporthe grisea 70-15] gi|145016679|gb|EDK01109.1| MGG_07489 [Magnaporthe grisea 70-15]
  misc_feature (4)..(309): NCBI GI: 115401128 Blast Desc: mitochondrial phosphate carrier protein [Aspergillus terreus NIH2624] gi|114190093|gb|EAU31793.1| mitochondrial phosphate carrier protein [Aspergillus terreus NIH2624]
  misc_feature (1)..(309): NCBI GI: 119488205 Blast Desc: mitochondrial phosphate carrier protein (Ptp), [Neosartorya fischeri NRRL 181] gi|119410802|gb|EAW20747.1| mitochondrial phosphate carrier protein (Ptp), [Neosartorya NRRL
  misc_feature (1)..(309): NCBI GI: 121714673 Blast Desc: mitochondrial phosphate carrier protein (Ptp), [Aspergillus clavatus NRRL 1] gi|119403101|gb|EAW13521.1| mitochondrial phosphate carrier protein (Ptp), [Aspergillus NRRL
  misc_feature (11)..(309): NCBI GI: 238844167 Blast Desc: mitochondrial phosphate carrier protein [Microsporum canis CBS 113480]
  misc_feature (1)..(309): NCBI GI: 70990348 Blast Desc: mitochondrial phosphate carrier protein (Ptp) [Aspergillus fumigatus Af293] gi|66847655|gb|EAL87985.1| mitochondrial phosphate carrier protein (Ptp), [Aspergillus
  misc_feature (4)..(309): NCBI GI: 258563086 Blast Desc: UREG_07061 [Uncinocarpus reesii 1704] gi|237907795|gb|EEP82196.1| UREG_07061 [Uncinocarpus reesii 1704]
  misc_feature (7)..(308): NCBI GI: 242773281 Blast Desc: mitochondrial phosphate carrier protein (Mir1), [Talaromyces stipitatus ATCC 10500] gi|218721827|gb|EED21245.1| mitochondrial phosphate carrier protein (Mir1), [Talaromyces ATCC
  misc_feature (8)..(309): NCBI GI: 240108614 Blast Desc: Mitochondrial carrier protein [Coccidioides posadasii C735 delta SOWgp]
  misc_feature (8)..(309): NCBI GI: 119186315 Blast Desc: conserved [Coccidioides immitis RS]
MAPVSAAVVPKKPEGIDLYARFALAGAVGCSVTHGAFTPVDVVKTRIQLDPATYNRGMIGGFRQVIQNEGIGALATGFGPTATGYFIQGAFKFGGYEFFKKQSIDILGIDRARQNRTAVYAVSSASAEFFASIALCPLEATRIRLVSTPGFANGLIGGFTKILKNEGVGAFYSGFGPILFKQVPYTVTKFVGFEKIYETISAQVDGKNLSAGGQTALNLGCGLLAGFAAAIVSQPADTMLSKINKTKGMPGESTISRLIKIAGELGVRGSFAGLPTRLFMVGGLTAGQFALYGDIKKALGATNGVEIAK

SEQ ID NO: 24630 - DNA, 2649 bp, Muscodor strobelii
  misc_feature: SGI EST ID NO. CUFF.58023.0
  misc_feature: Variant of the nucleotide sequence at SEQ ID NO 24628
cagagacctctgttaaaacagttagctcagacactatatttggcgcaggcagtaaaacaatcgggggaaataggaataaaatccgaaacccgtcagattaaaatggatctttcaatcattttgctggtctcagtggagacttgacagcgacgacagatctaccgcatttgctgaccttcgatcagcttgccattcgttattttcatatttcgctaaatcgctcagtcgctcattgccttacgtcgcgttgtgttttgttaactcgtgctaattgttacaatggctcccgtatctgctgctgtggtcccaaagaagccggagggtatcgacctctacgctcgttttgcgctcgctggtgccgtgggatgttccgtcactcacggcgctttcaccccagtcgatgttgtcaagactaggattcaacttgacccagcgacgtacaaccgtggtatgataggcggcttccgtcaggttatccagaacgaaggtattggtgcacttgcaactggtttcggtccaacagccacaggttatttcattcagggagcattcaagtttggcggttacgagttcttcaagaagcaatctatcgacatcctcggtatagaccgagctcgccagaaccgcacagctgtgtatgcagtgtcttcagcatcagctgaattcttcgcttctattgctctctgcccccttgaagctactcgtattcgcctcgtgtctactcccggatttgctaatggtttgatcggcggtttcactaaaatcctcaaaaacgagggagttggtgccttttactctggctttggccctattctcttcaagcaggtaccatacaccgttacgaagttcgtaggatttgaaaagatctatgagaccatttcagcccaggttgatggtaagaacttatccgctggaggacaaactgctctcaacttgggatgcggtttgctcgccggttttgctgccgccattgtttcacagcccgccgacacgatgttgtcaaaaatcaacaagaccaagggaatgcccggtgagagcacgatctctcgtctcatcaagatcgctggcgaattaggagtccgcggttccttcgccggcctcccaacgcgtctgttcatggttggggggttgactgccggtcaattcgccctgtacggcgatatcaagaaggctctgggtgccaccaatggtgtagagatcgccaaataaactagaccgtatccaccttatttcgaattatacgcgcaattagaccaatgtgtagaagttcagtgtagagaaaggcgtggctagacccacgtcctttgttaacagcgtgtgcgcttatgtataattagacatctttagactcaatcgccgaagtcgcggttgaaatgcaatagatcaatttagtcataacctagcaacagtctcaaaggattggacaccactgtgcacgtgttatcgtgagacccaaaagatcgtgtttcattgatctaccttagacacaaacttgccctagtcgggtctgtcctgaataccttacattcccaatgaaattcaagaacgccgaatgtaagagttatcaaacgaatgtgtaggactggtctcctgatactgaaagcctgacccttagatataggaaacagcacacaagctcaacccaagtgggtcgcatattgcttccggaataataaataatcaacctcctcctcatgtatcatactcgcaactcgtccgccgtctgatctgattgcaaaaccgtactgcatgttcgacctaagatcgcactcttagctagacttcactctgttgttgtcagaaccaccgccgccgccacttccacctccagtcgagtcatcctttttgtcgatcttcttatcagtcgactcatctttgcagtgctcaatcttcgccgggcctattacaaacccggttttatcttggtcaggcggaattggttcatatttgccacgtttctgactgccgtaaccgtagttgtcgttcatggttaatcacgatggcgactcttgcgctgtcttacacgttcgtgcttggtttgaagagctcggatatgtgtatgttctccttgaacgcctgtagagaggaagtatacaggtggtagatagcgagtctaggctgacgaacgatgtcttgatgtagtattttttgtcgaatgttggcgatgaatatgcaagacagcatgtccaaatcgatctgtatttgagtcggatgagcgtctatttatgtcagtcggtggcgattatttgttgactgttcgtccgtggcaatatggccttgaagtgagaaccgtagtacatcatgcacaataaacaggagaaatagatgatagagcgtacttttaggaattaatgggtggcgagatccccgagtgcgacagattggtgtcgtgttggccatacattgtatcagaaagatctgttggtcgtacaggcattcctgaacaaagaaagaggcgcacaatgttaacaaggaataataacatcatatctacgttgcagggcaaagaaaacattggtcaagaggcgccagtaggtgctccccataagaatattcgatggaactcccgtggtgatagaagcgtaaattccctcgacatttgcttcctttcgccaaaggcgtccaaccaaggacgataggcagccacgg

SEQ ID NO: 24631 - DNA, 1098 bp, Muscodor strobelii
  misc_feature: SGI cDNA ID NO. 568400
  misc_feature: Elevated expression when VOC is produced
  misc_feature: Encodes the peptide sequence at SEQ ID NO 24632
atgacagacaagacagaggacggcgcgggcccgatcccaatggaaacgagcccaccgaatgaagaaacacttgccagccgcatggaaaagatggtccagggcgatcgcatatcatggggcggtggtagcgcgccgtcccttccatctatcgacgacaaccccgacagtgatgccatgagcattgcagacagcgtaagatcatctactatgtcgctagactcgacactgtatcacttcgttgaagaaaacgggcgaacgtatcacaagtacaagcaaggaagatattttcttcccaatgacttggcggaacaagaacggctagatctacaacatcagttgttttgtctcacgataggagggaaactgcacctagcaccagtcccggaaggaccaaagagggtgttggatattgctactggtaccggcatttgggccatagagtttgcttctcaacatccagacacgcaggttactggcacagatcttagccccatccagccacattacttgcccgagaattgcagatttgagatagacgatgcagaggacgattggacgtatactgagccattcacgtttgtccatggacgcgcactcatgagttgcttcgataaccctgcgaaggttgtacaacaagctttcgacaatatcgaacctggtggtttcatagagttccaggatgctttctttcccatgaactggatcggtgaaccaccgaaggactcagctctgtataaatggaacgaacttctgctattaggactgaagaatattgggagatcttggagtaatgtcaagaattaccccaagtactttgaagatgccgggttcgagaacattgtcgagcgccgatttttctggcccacgagcccttgggccaagggcaaatacttcaagaccgtcgccatgtatttccaggaagatatgatatctggtcttgatggcataagcatgaaggtcctccaagctgctaacatgacgccggacgagatcaaaacgttcgtagaggaggtgaaagcggactttaggaatactgatctgcatgcgtatctggaagtgtcttacatttttgcacagaaaccgctcccaaaggcgtga

SEQ ID NO: 24632 - protein, 365 aa, Muscodor strobelii
  misc_feature: SGI Peptide ID NO. 568400
  misc_feature (135)..(223): Pfam Id: PF08242 Pfam Desc: Methyltransferase domain
  misc_feature (61)..(363): NCBI GI: 156053960 Blast Desc: SS1G_05828 [Sclerotinia sclerotiorum 1980] gi|154703608|gb|EDO03347.1| SS1G_05828 [Sclerotinia sclerotiorum 1980]
  misc_feature (44)..(353): NCBI GI: 154321477 Blast Desc: BC1G_01613 [Botryotinia fuckeliana B05.10] gi|150852151|gb|EDN27343.1| BC1G_01613 [Botryotinia fuckeliana B05.10]
  misc_feature (55)..(361): NCBI GI: 256729457 Blast Desc: NECHADRAFT_63067 [Nectria haematococca mpVI 77-13-4]
  misc_feature (50)..(361): NCBI GI: 256725883 Blast Desc: NECHADRAFT_94679 [Nectria haematococca mpVI 77-13-4]
  misc_feature (55)..(362): NCBI GI: 256723515 Blast Desc: NECHADRAFT_104604 [Nectria haematococca mpVI 77-13-4]
  misc_feature (52)..(350): NCBI GI: 46111077 Blast Desc: FG02420.1 [Gibberella zeae PH-1]
  misc_feature (40)..(350): NCBI GI: 154275878 Blast Desc: [Ajellomyces capsulatus NAm1] gi|150413857|gb|EDN09222.1| [Ajellomyces capsulatus NAm1]
  misc_feature (76)..(361): NCBI GI: 256723471 Blast Desc: NECHADRAFT_81086 [Nectria haematococca mpVI 77-13-4]
  misc_feature (50)..(361): NCBI GI: 225684266 Blast Desc: conserved [Paracoccidioides brasiliensis Pb03]
  misc_feature (49)..(361): NCBI GI: 256724032 Blast Desc: NECHADRAFT_101990 [Nectria haematococca mpVI 77-13-4]
  misc_feature: Useful for introducing or modulating the production of volatile compounds
MTDKTEDGAGPIPMETSPPNEETLASRMEKMVQGDRISWGGGSAPSLPSIDDNPDSDAMSIADSVRSSTMSLDSTLYHFVEENGRTYHKYKQGRYFLPNDLAEQERLDLQHQLFCLTIGGKLHLAPVPEGPKRVLDIATGTGIWAIEFASQHPDTQVTGTDLSPIQPHYLPENCRFEIDDAEDDWTYTEPFTFVHGRALMSCFDNPAKVVQQAFDNIEPGGFIEFQDAFFPMNWIGEPPKDSALYKWNELLLLGLKNIGRSWSNVKNYPKYFEDAGFENIVERRFFWPTSPWAKGKYFKTVAMYFQEDMISGLDGISMKVLQAANMTPDEIKTFVEEVKADFRNTDLHAYLEVSYIFAQKPLPKA

SEQ ID NO: 24633 - DNA, 2095 bp, Muscodor strobelii
  misc_feature: SGI EST ID NO. CUFF.58078.1
  misc_feature: Variant of the nucleotide sequence at SEQ ID NO 24631
caacttcttcgcctttctgattggcagaccatcagtcatgctccgaaactccgggaatccatgtaaacttctcgcattctttgactttggaaatgcgagtccttcctcgaatccgtattattgaactcggtgtactaggccatccatattccgtacatgtctctagcttgaatgagtccctccaccgatcaaacccctcatggccacatggttcgcaggggctagcccagcccgctaaaactcgtctctagctcgccaagtcaacgagtaattggtagcctctcttatccaacttcacatagtatgtcaccttctcagatccttcgcgacaaaaagagccccagtcccgcagccagcctgcagcttggccgttcgtggcatgcttagtggcggcctgaaaggctcttacctccacttagataccctcctatcacgctgctatcacataggtattctcgaaccattccattgggcggggttttcgtctgaattactagcgaccgccgtcagtcagatagagtactccgtgccgtagacctacatacgtgtcagaaggtggttcttaagttcttaaacatcttcatcgcattattttcccagaagtgaacagaactgtcgaattacgtcacgtcttggatatcttgcgctatatattatttcacatcttcgtctcgctaccttaacccaataagttgcaattgcaacctgtgacatccaccttggtttgcgagtctagacactacagatagactttcactttaagtttcttcgatatcttaatcagtgcaagcccctacatcgcaatgacagacaagacagaggacggcgcgggcccgatcccaatggaaacgagcccaccgaatgaagaaacacttgccagccgcatggaaaagatggtccagggcgatcgcatatcatggggcggtggtagcgcgccgtcccttccatctatcgacgacaaccccgacagtgatgccatgagcattgcagacagcgtaagatcatctactatgtcgctagactcgacactgtatcacttcgttgaagaaaacgggcgaacgtatcacaagtacaagcaaggaagatattttcttcccaatgacttggcggaacaagaacggctagatctacaacatcagttgttttgtctcacgataggagggaaactgcacctagcaccagtcccggaaggaccaaagagggtgttggatattgctactggttcgatggtcgcctagctctcccgtcaattggactttgctaatataagaaataggtaccggcatttgggccatagagtttgcttctcaacatccagacacgcaggttactggcacagatcttagccccatccagccacattacttgcccgagaattgcagatttgagatagacgatgcagaggacgattggacgtatactgagccattcacgtttgtccatggacgcgcactcatgagttgcttcgataaccctgcgaaggttgtacaacaagctttcgacaatatcgaacctggtggtttcatagagttccaggatgctttctttcccatgaactggatcggtgaaccaccgaaggactcagctctgtataaatggaacgaacttctgctattaggactgaagaatattgggagatcttggagtaatgtcaagaattaccccaagtactttgaagatgccgggttcgagaacattgtcgagcgccgatttttctggcccacgagcccttgggccaagggcaaatacttcaagaccgtcgccatgtatttccaggaagatatgatatctggtcttgatggcataagcatgaaggtcctccaagctgctaacatgacgccggacgagatcaaaacgttcgtagaggaggtgaaagcggactttaggaatactgatctgcatgcgtatctggaagtgtcttacatttttgcacagaaaccgctcccaaaggcgtgatggaacatagagtgtagtttacagttgaataccaggaaaccatggtcgcctattagactaatacgatcgcccgatatacttcgatgtctcttgttttgataataatatacgctatcgcaaatgcggtattcgctccttg

SEQ ID NO: 24634 - DNA, 1293 bp, Muscodor strobelii
  misc_feature: SGI cDNA ID NO. 568401
  misc_feature: Encodes the peptide sequence at SEQ ID NO 24635
atgcctttcattcccaacacccccgagtccctcgtgggccgctcagactcaaaaaatcccgccacgacctgcagaggcattacgtctggcggacggccgtgtcgtagaccactggctccctccccaggcgcgtcgcctgctacctctccgttcgcttcacgaagccgcgtaaatcaactgcgtgtcgacgatcccagaaacccagagctctactgctggcagcataaagaccaggcagcctcatcagcgagatcgagccctggaccccaatcacgcaccagactgagccctgtacggcaagaaagcatcgacagtctcatcggtcgccttggcatcgttgaagccgaacagactggccgaaagcctgcgaaaccctcgacgagaccgccaaggcaagatggacgggttgcagaaacagacgaaaagctggctcagccagcaaacccccagcaccggcgcaaggcggcaaagaaggcaacattctgctgctgcttcacaatgccagtctacgaagaagaacgccctgcaagaccaaaaccgagaccagtccaaagcgcatcaaataaaccaagctctgtgaaagtgccttcgagtcatcacctcgctccctcttccacaagtcagcggccgagtcttgctgcgtcaaagcactcatctgcacagtctacagtgtcgcaaacctcccaatacatatccctgatcccccccactgtgcagccagagacaatggcaaaccttctcaaagagcttgccaaacctgtctctctacaagacgaacctggctatatctatattttctggctgacgcccgagtctgagcctactcctcccgcgactggtgcctcgaggaacctcctggccccaccttctcgcccagatatacggcagcgacgcacgagcgatgtgttgcaatcatttgccgcacaatcgagtcaagcgggcacctcgggcaagacggtcttgctcaaaattgggagagcgtctaacgtccaacgacggttaaatgagtggcaacggcagtgcgggtacaatgtctcgctcattcgatattatccgtacgtctcgtcaaatcagccttcgacgcctcgtaagatgccgcatagtcacaaagtcgagcgcctgatccacattgaacttgaaggtcacgggctgcgggtcaatcacaaaacgtcttgtgatgcgtgtggaaggaatcatcgagaatggtttgaagtagaggcgacgcgagccggcatcaataccgtcgatgagatagtgaagaggtggtcagactgggatgagtctaatggctga

SEQ ID NO: 24635 - protein, 430 aa, Muscodor strobelii
  misc_feature: SGI Peptide ID NO. 568401
  misc_feature (321)..(405): Pfam Id: PF08582 Pfam Desc: Domain of function (DUF1766)
  misc_feature (1)..(427): NCBI GI: 116198533 Blast Desc: CHGG_07422 [Chaetomium globosum CBS 148.51] gi|88178701|gb|EAQ86169.1| CHGG_07422 [Chaetomium globosum CBS 148.51]
  misc_feature (1)..(427): NCBI GI: 39977793 Blast Desc: MGG_06781 [Magnaporthe grisea 70-15] gi|145013695|gb|EDJ98336.1| MGG_06781 [Magnaporthe grisea 70-15]
  misc_feature (1)..(428): NCBI GI: 171692557 Blast Desc: protein product [Podospora anserina] gi|170946227|emb|CAP73028.1| protein product [Podospora anserina]
  misc_feature (1)..(429): NCBI GI: 256728751 Blast Desc: NECHADRAFT_64257 [Nectria haematococca mpVI 77-13-4]
  misc_feature (1)..(428): NCBI GI: 85103690 Blast Desc: NCU01211 [Neurospora crassa OR74A] gi|18376298|emb|CAD21410.1| conserved [Neurospora crassa] gi|28923124|gb|EAA32341.1| NCU01211 [Neurospora crassa OR74A]
  misc_feature (1)..(429): NCBI GI: 46110335 Blast Desc: FG02049.1 [Gibberella zeae PH-1]
  misc_feature (1)..(427): NCBI GI: 169624132 Blast Desc: SNOG_15318 [Phaeosphaeria nodorum SN15] gi|160705115|gb|EAT77251.2| SNOG_15318 [Phaeosphaeria nodorum SN15]
  misc_feature (1)..(430): NCBI GI: 70998206 Blast Desc: conserved [Aspergillus fumigatus Af293] gi|66851465|gb|EAL91791.1| conserved [Aspergillus fumigatus Af293] gi|159126434|gb|EDP51550.1| conserved [Aspergillus A1163]
  misc_feature (6)..(429): NCBI GI: 156037386 Blast Desc: SS1G_12404 [Sclerotinia sclerotiorum 1980] gi|154697815|gb|EDN97553.1| SS1G_12404 [Sclerotinia sclerotiorum 1980]
  misc_feature (1)..(429): NCBI GI: 212535466 Blast Desc: conserved [Penicillium marneffei ATCC 18224] gi|210070288|gb|EEA24378.1| conserved [Penicillium marneffei ATCC 18224]
MPFIPNTPESLVGRSDSKNPATTCRGITSGGRPCRRPLAPSPGASPATSPFASRSRVNQLRVDDPRNPELYCWQHKDQAASSARSSPGPQSRTRLSPVRQESIDSLIGRLGIVEAEQTGRKPAKPSTRPPRQDGRVAETDEKLAQPANPQHRRKAAKKATFCCCFTMPVYEEERPARPKPRPVQSASNKPSSVKVPSSHHLAPSSTSQRPSLAASKHSSAQSTVSQTSQYISLIPPTVQPETMANLLKELAKPVSLQDEPGYIYIFWLTPESEPTPPATGASRNLLAPPSRPDIRQRRTSDVLQSFAAQSSQAGTSGKTVLLKIGRASNVQRRLNEWQRQCGYNVSLIRYYPYVSSNQPSTPRKMPHSHKVERLIHIELEGHGLRVNHKTSCDACGRNHREWFEVEATRAGINTVDEIVKRWSDWDESNG

SEQ ID NO: 24636 - DNA, 5096 bp, Muscodor strobelii
  misc_feature: SGI EST ID NO. CUFF.58138.1
  misc_feature: Variant of the nucleotide sequence at SEQ ID NO 24634
caaaagggttgaagttataagggttaggagggtagattgaggtcgataatttcatagctaagaggtctgatactttgactttgaccttttgttgacagtcgcttgcctcgacagacattcacgcgtaggtcccgtttagcaaacaacgacgactggggcaccgtaactcaaattcgggatctcttactatatctggacagcttccgcttgcagacgcaaacctgccaaacctgcgcctgcaggttcaacttttcaacattgtggagataggcagtaatggagtcggaatcatcagaacacaaaacggcgatgccctctgccgaaaggccggccgattcacaagttgatggcaaagaaattgatacatcaagggcaccatcaataacctcaagcggatccagaacggaggctgaacaatcgggcgctgaagagcctgagcaggaggccaagaatgtctcgacgccgaaagaactgaaggaaggcgacgaacttggagaatatgtcgagggctggaagttatggtctttgcttctcagcacgtcgttaacctttttcttggtcttgttggatagttccattctcagcacagctattcctcgaattacaactgagtttcacgcccttgcggatcaaggttggtatactggtgcttatcaactcagcagctcggttttacagcctataagtggtaaaatctacacttatttcaatacgaaatggacgtatctggcattcttcattgtattcgagattggctccctgctgtgcggtgttgctacttcttcgactttcttcattattggtcgtgctatagccggcattggtgtttcggggttacagaatggcgctttgagtatcattgctggtgccgttccgcttcagaaaagacccttctatcttggccttctgattggtagtatgtaaccccttactttcaagagactctttgaatgaagacattggccagctcggtattgtgttgggacctttgatcggcggcgcgttgacggactatgtgtcatggcggtggtgcttctatatcaaccttcccgttggcggtgccgcattcattattatgactttcattcattgccctgaacagattgtcaagagtcccttttcgattgattatgtgcgccgaacccttccgaaattcgatctcttcgggttcgcactattcgcgcctttcgcgctcatgctccttctggcccttcaatttggcacagagatgaaatacgcgtggaattcttccgtcaacattggcctgttcgccggctctggagtttcactcatcctcttcttgctgtgggagcggcacactggtgacaatgctatcatcccgttttcgatgctcaaaaatagaatagtatggggcagcacgatgttttactggacgttgatcgcgtgcatcttcgtcggtacacagtatatccccatctacttccagtccgttaagggagcgacccccattctcagtggcgtttatctgctgcccagtatcttgtcccaactatttttcctcattagctgtggaatattagtacaaaaagttgggtattatctcccatttgccgtcgttgccggcgcaggagcagtcgttgctagtgcgctactatcgacattgcagccagggagctccactggcgaatgggtcgggtatcaaatcatctttggtttgcgaggatgtggtgtccaagttgcggtcatcgctatacaaaatgctcttccgccagctcagagtcaaataggtctggccttcacagtcttctgtcagaactttgccgcggcggtcttcgttgtcgtagcgaatacgatattcacccagggattaactgaccaggtcaccaaattggtgacgccgctggacccgagaatcacgcccgctgctgttcttgcagctggctcttccgcacaaggtatccgggctttgtttccggagggcggtgaagggctagacgcgttgttgaaagcttatgcgaatgcttttgacctgatctgctacttgatgattgcgttggcggccatttccttcattttcgcattcttcagcggttgggttaatctcaaaaagaagcccgaagcaaaggatgaagtagagaaggcacaggctaaagaggataaggcagaggcgctggtcagggttcggacaccagtctgagattgtcatttatcccttccgcaatcgagagatgagcaggacttgttttcagcactttcagcatcaccacttacgactacactgcattatagacaggagcgcgggcaacagcatatagaattaggagccctttctaagacatttaattgagttcaaacaaaatcgccaaataggctaataataagaagttggattcatccccttcatcgattcgatctgagggattctctcatatactgtcgttttctatattccccgatgatagcggtttgactagaaactgtttgatgtcccattagtggcgaatgaaaagtaactagaactctgtgatggatgcatactgttgcaggtattgaagttgagacgacctattgaggttttggtggccagtggccaccattgaactggcgtcctcaagacaagctgcatcgtgggtggcactggatccattccattcccgtcccaggcagtgtcaacggcagccactgctcagcctcatgggacagaaagccagccacagcgcgtcgaagacaggcagatacctgggtacatgcaggtaacgtgttgagggtgcattgtccaagttcttcattcctgtcatcgttgtagcccattcttgacggtggcagaatggatgcctacgagccaacgattgccaaccatcgtctagccccctgacaagtgtcgctgtgtcggtctccatatgcaggcgggcatgcagaagcgctggaggggcatagcctatgacatgggtgcggctgcggtgacgtcgagtcactggtaatgattcctcctagattcacgtctcctgcctgtgcttcgcgcctagtgccgtgaactctgccggcgtcatgcacatattgaataatcagagcagggcgtcgattgatttatatacatatgtccgcctaaaacacctcttgtatgctgggaacctcggttgttgggtcgtaatccccaacgtactatctttcgcgaacccttagcaatccctcttcatatcgcgcgacactcgttcaagctcaagtactggcacgagagatgcctttcattcccaacacccccgagtccctcgtgggccgctcagactcaaaaaatcccgccacgacctgcagaggcattacgtctggcggacggccgtgtcgtagaccactggctccctccccaggcgcgtcgcctgctacctctccgttcgcttcacgaagccgcgtaaatcaactgcgtgtcgacgatcccagaaacccagagctctactgctggcagcataaagaccaggcagcctcatcagcgagatcgagccctggaccccaatcacgcaccagactgagccctgtacggcaagaaagcatcgacagtctcatcggtcgccttggcatcgttgaagccgaacagactggccgaaagcctgcgaaaccctcgacgagaccgccaaggcaagatggacgggttgcagaaacagacgaaaagctggctcagccagcaaacccccagcaccggcgcaaggcggcaaagaaggcaacattctgctgctgcttcacaatgccagtctacgaagaagaacgccctgcaagaccaaaaccgagaccagtccaaagcgcatcaaataaaccaagctctgtgaaagtgccttcgagtcatcacctcgctccctcttccacaagtcagcggccgagtcttgctgcgtcaaagcactcatctgcacagtctacagtgtcgcaaacctcccaatacatatccctgatcccccccactgtgcagccagagacaatggcaaaccttctcaaagagcttgccaaacctgtctctctacaagacgaacctggctatatctatattttctggctgacgcccgagtctgagcctactcctcccgcgactggtgcctcgaggaacctcctggccccaccttctcgcccagatatacggcagcgacgcacgagcgatgtgttgcaatcatttgccgcacaatcgagtcaagcgggcacctcgggcaagacggtcttgctcaaaattgggagagcgtctaacgtccaacgacggttaaatgagtggcaacggcagtgcgggtacaatgtctcgctcattcgatattatccgtacgtctcgtcaaatcagccttcgacgcctcgtaagatgccgcatagtcacaaagtcgagcgcctgatccacattgaacttgaaggtcacgggctgcgggtcaatcacaaaacgtcttgtgatgcgtgtggaaggaatcatcgagaatggtttgaagtagaggcgacgcgagccggcatcaataccgtcgatgagatagtgaagaggtggtcagactgggatgagtctaatggctgatacttacctaaataacttcgtcgaatcaacgggaacgaaagtacgactgacgatgtgatgatgcttagcaactcttttggcatgggcggcgttgatagatttcatccggggtctgttgctcttatgggagatggtaatgccataaataaccaatgaagtcttctcgttgcatgttccaattcccaataccacggttctgggtaacgtgctcccaccccttgcccattaccgtgccacttgacctccgaatcatctgacagttatgaacatcgtatcggttactccgtattcaggcctattgcaactttgacagggctccagatcaacggttcaagtcgcgcggctttggcgtcatatcggggcgtcttaagcatgtagctgacacttggcataagttgctctactatgggtgtgtgatttgttccacttaggtgacaacggcacattcctggaaatattacgcgtgcatgaatttgcgaaagccacccgaagtacatgtttacggtgcgccgagtccactatgatgggggcgaatttcgaatatgtactgaaagatttgttgtaggaaagaactttgacgagcattcaagattacctatttacg

SEQ ID NO: 24637 - DNA, 1806 bp, Muscodor strobelii
  misc_feature: SGI cDNA ID NO. 568402
  misc_feature: Encodes the peptide sequence at SEQ ID NO 24638
atgccctctgccgaaaggccggccgattcacaagttgatggcaaagaaattgatacatcaagggcaccatcaataacctcaagcggatccagaacggaggctgaacaatcgggcgctgaagagcctgagcaggaggccaagaatgtctcgacgccgaaagaactgaaggaaggcgacgaacttggagaatatgtcgagggctggaagttatggtctttgcttctcagcacgtcgttaacctttttcttggtcttgttggatagttccattctcagcacagctattcctcgaattacaactgagtttcacgcccttgcggatcaaggttggtatactggtgcttatcaactcagcagctcggttttacagcctataagtggtaaaatctacacttatttcaatacgaaatggacgtatctggcattcttcattgtattcgagattggctccctgctgtgcggtgttgctacttcttcgactttcttcattattggtcgtgctatagccggcattggtgtttcggggttacagaatggcgctttgagtatcattgctggtgccgttccgcttcagaaaagacccttctatcttggccttctgattggtattggccagctcggtattgtgttgggacctttgatcggcggcgcgttgacggactatgtgtcatggcggtggtgcttctatatcaaccttcccgttggcggtgccgcattcattattatgactttcattcattgccctgaacagattgtcaagagtcccttttcgattgattatgtgcgccgaacccttccgaaattcgatctcttcgggttcgcactattcgcgcctttcgcgctcatgctccttctggcccttcaatttggcacagagatgaaatacgcgtggaattcttccgtcaacattggcctgttcgccggctctggagtttcactcatcctcttcttgctgtgggagcggcacactggtgacaatgctatcatcccgttttcgatgctcaaaaatagaatagtatggggcagcacgatgttttactggacgttgatcgcgtgcatcttcgtcggtacacagtatatccccatctacttccagtccgttaagggagcgacccccattctcagtggcgtttatctgctgcccagtatcttgtcccaactatttttcctcattagctgtggaatattagtacaaaaagttgggtattatctcccatttgccgtcgttgccggcgcaggagcagtcgttgctagtgcgctactatcgacattgcagccagggagctccactggcgaatgggtcgggtatcaaatcatctttggtttgcgaggatgtggtgtccaagttgcggtcatcgctatacaaaatgctcttccgccagctcagagtcaaataggtctggccttcacagtcttctgtcagaactttgccgcggcggtcttcgttgtcgtagcgaatacgatattcacccagggattaactgaccaggtcaccaaattggtgacgccgctggacccgagaatcacgcccgctgctgttcttgcagctggctcttccgcacaaggtatccgggctttgtttccggagggcggtgaagggctagacgcgttgttgaaagcttatgcgaatgcttttgacctgatctgctacttgatgattgcgttggcggccatttccttcattttcgcattcttcagcggttgggttaatctcaaaaagaagcccgaagcaaaggatgaagtagagaaggcacaggctaaagaggataaggcagaggcgctggtcagggttcggacaccagtctga

SEQ ID NO: 24638 - protein, 601 aa, Muscodor strobelii
  misc_feature: SGI Peptide ID NO. 568402
  misc_feature (77)..(482): Pfam Id: PF07690 Pfam Desc: Major Facilitator Superfamily
  misc_feature (77)..(287): Pfam Id: PF07690 Pfam Desc: Major Facilitator Superfamily
  misc_feature (63)..(596): NCBI GI: 189206433 Blast Desc: efflux pump protein [Pyrenophora tritici-repentis Pt-1C-BFP] gi|187975644|gb|EDU42270.1| efflux pump protein [Pyrenophora tritici-repentis Pt-1C-BFP]
  misc_feature (2)..(574): NCBI GI: 212539209 Blast Desc: MFS multidrug transporter, [Penicillium marneffei ATCC 18224] gi|210069502|gb|EEA23593.1| MFS multidrug transporter, [Penicillium marneffei ATCC 18224]
  misc_feature (32)..(586): NCBI GI: 212536316 Blast Desc: conserved [Penicillium marneffei ATCC 18224] gi|210070713|gb|EEA24803.1| conserved [Penicillium marneffei ATCC 18224]
  misc_feature (3)..(583): NCBI GI: 119483622 Blast Desc: MFS transporter, [Neosartorya fischeri NRRL 181] gi|119409870|gb|EAW19817.1| MFS transporter, [Neosartorya fischeri NRRL 181]
  misc_feature (2)..(574): NCBI GI: 242760731 Blast Desc: MFS multidrug transporter, [Talaromyces stipitatus ATCC 10500] gi|218723245|gb|EED22662.1| MFS multidrug transporter, [Talaromyces stipitatus ATCC 10500]
  misc_feature (3)..(592): NCBI GI: 242795376 Blast Desc: efflux pump antibiotic resistance protein, [Talaromyces stipitatus ATCC 10500] gi|218719162|gb|EED18582.1| efflux pump antibiotic resistance protein, [Talaromyces ATCC
  misc_feature (35)..(594): NCBI GI: 145236515 Blast Desc: An06g00770 [Aspergillus niger] gi|134075361|emb|CAK44984.1| protein product [Aspergillus niger]
  misc_feature (10)..(583): NCBI GI: 159123996 Blast Desc: MFS multidrug transporter, [Aspergillus fumigatus A1163]
  misc_feature (10)..(583): NCBI GI: 70983169 Blast Desc: MFS multidrug transporter [Aspergillus fumigatus Af293] gi|66844737|gb|EAL85074.1| MFS multidrug transporter, [Aspergillus fumigatus Af293]
  misc_feature (3)..(593): NCBI GI: 171677646 Blast Desc: protein product [Podospora anserina] gi|170936891|emb|CAP61550.1| protein product [Podospora anserina]
MPSAERPADSQVDGKEIDTSRAPSITSSGSRTEAEQSGAEEPEQEAKNVSTPKELKEGDELGEYVEGWKLWSLLLSTSLTFFLVLLDSSILSTAIPRITTEFHALADQGWYTGAYQLSSSVLQPISGKIYTYFNTKWTYLAFFIVFEIGSLLCGVATSSTFFIIGRAIAGIGVSGLQNGALSIIAGAVPLQKRPFYLGLLIGIGQLGIVLGPLIGGALTDYVSWRWCFYINLPVGGAAFIIMTFIHCPEQIVKSPFSIDYVRRTLPKFDLFGFALFAPFALMLLLALQFGTEMKYAWNSSVNIGLFAGSGVSLILFLLWERHTGDNAIIPFSMLKNRIVWGSTMFYWTLIACIFVGTQYIPIYFQSVKGATPILSGVYLLPSILSQLFFLISCGILVQKVGYYLPFAVVAGAGAVVASALLSTLQPGSSTGEWVGYQIIFGLRGCGVQVAVIAIQNALPPAQSQIGLAFTVFCQNFAAAVFVVVANTIFTQGLTDQVTKLVTPLDPRITPAAVLAAGSSAQGIRALFPEGGEGLDALLKAYANAFDLICYLMIALAAISFIFAFFSGWVNLKKKPEAKDEVEKAQAKEDKAEALVRVRTPV

SEQ ID NO: 24639 - DNA, 5096 bp, Muscodor strobelii; identical to SEQ ID NO: 24636
  misc_feature: SGI EST ID NO. CUFF.58138.1
  misc_feature: Variant of the nucleotide sequence at SEQ ID NO 24637

SEQ ID NO: 24640 - DNA, 2025 bp, Muscodor strobelii
  misc_feature: SGI cDNA ID NO. 568403
  misc_feature: Encodes the peptide sequence at SEQ ID NO 24641
atggactcgacttcgtcgcttccctcgccatcaacactcacgcaacctgcatctccaccccgagtctcggctccaaagcaacgctcttccaagacgaaacgtgctggctcgcataccgactcaacttcgtcttcggcagcacattccagtaatgcatctgctgcgactcgggccgccaacctcgagcagaaacttgaggatctagtcgctattctcaaggcccaagccgcttctgggaactcccctaacacttcattacccagtcccggtgctctgcttcgagagcgtggcttctccgatgacttcaggcaagatattagaggatcgtcgtctatggccattgatcatgctctaaaagattcatcaaatcgagccattccgggggcctttgcggtcacacccgctacatctcatagccatgcgacgtcacctacaaataagtcggtagcgagtccgccagacgcttcggatatcgatgcactatcacccctcgaagcggaggagacacttgctctgttccgcaacaacttcctccccatgtttccattcgcgcatatcccttcgacgttgactgctgcagaacttcaacgggatcggccattcttatgggcgaacatccgagcattatgtagtaaatctccggtcaagcagatggcattgcatcagagatgtcgtgatgatcttggacgaaaacttttgagtaacggcgatcgggatatcgatatgttactcggtgtgctgctacttctcggatggacgatgcatttctttaccgggaaaccaacccaaaacgtcctaatgaatattgcaatgggcattgtaggcgaccttcgtcttgatagaccgattcaggattccaatgcacgcgacgtaaattgtttcaagacggacgaatttaaaaagacgactgcgcctcaaatccgaacaaatgaacatagaagggctgtaattgcatgctatattttctgctcctgtggctcagctttcttgcgatcgcaatcaatgcgctggacgccccatatggaagagtctctccagatgctggcggcgagtcctgaatgggaaggagatcaactgttgttcgtcatggccaagacgcgccgactcatggaaacggtacaggaagtaacctgggctcaaggggtttcagaggtggatggcctcacttcgataaaaccaccaccttcgctatacatcaagatattgcgacagaacttgcagcatctaaagaatcaggttccagaaacgatcaagcataacagaatagtacaaacatgcatcctgtctgtggatatgctcatcacagaaatgccttttccaaattgcgccaaagacacctgtgtaactctcccgccagcgacaccgaacgcaaagtccggtgcgacgatgatggacacagcccgtctagagaatctatatgcgacttttcagactagcaaagcattcttggaccacttcctcggattcggacttgcggaacttgtcggcgtttcattcccagtcttcctccacttcttccgtgcctgccagactctatacagactcataatgaccgaagatcccggttgggatagctctgtggtatcggacggcgtggacctcgtggcaaccatcaaattgctttcgagccggtttgcgcaacttccgggtctatatgggcttcacaatgatatagatagtgacgggaacgaggtgttgaacttctttgcgaagtgtgcgaagacgctgaccaataccgcgcctatgtggcagacggcctttgcccaggctggtattggcaagaatggatcgagtaatgacgcggtgaggggagtgagagataattcgattgctcaggtccagagtatgcccgggcctccgggcatgctcggcgctggtctctccgcgcagcaccctgaaccgcagatccccggaacgcagggatatatcctgccgaatctgtttcccattgatttctctgtcgatgatgggtggtggaatgactattttacgtcgccctgggatatgcctgggcagcagttttga

SEQ ID NO: 24641 - protein, 674 aa, Muscodor strobelii
  misc_feature: SGI Peptide ID NO. 568403
  misc_feature (55)..(575): NCBI GI: 171681732 Blast Desc: protein product [Podospora anserina] gi|170940825|emb|CAP66474.1| protein product [Podospora anserina]
  misc_feature (31)..(574): NCBI GI: 145253563 Blast Desc: An17g00650 [Aspergillus niger] gi|134083862|emb|CAK42993.1| protein product [Aspergillus niger]
  misc_feature (61)..(674): NCBI GI: 154303398 Blast Desc: BC1G_09270 [Botryotinia fuckeliana B05.10] gi|150854581|gb|EDN29773.1| BC1G_09270 [Botryotinia fuckeliana B05.10]
  misc_feature (56)..(609): NCBI GI: 116201841 Blast Desc: CHGG_08805 [Chaetomium globosum CBS 148.51] gi|88177323|gb|EAQ84791.1| CHGG_08805 [Chaetomium globosum CBS 148.51]
  misc_feature (42)..(551): NCBI GI: 242795372 Blast Desc: TSTA_123110 [Talaromyces stipitatus ATCC 10500] gi|218719161|gb|EED18581.1| TSTA_123110 [Talaromyces stipitatus ATCC 10500]
  misc_feature (28)..(590): NCBI GI: 67904612 Blast Desc: AN9293.2 [Aspergillus nidulans FGSC A4] gi|40747204|gb|EAA66360.1| AN9293.2 [Aspergillus nidulans FGSC A4] gi|259488127|tpe|CBF87346.1| TPA: Zn(II)2Cys6 transcription
  misc_feature (53)..(590): NCBI GI: 146324657 Blast Desc: AFUA_8G00950 [Aspergillus fumigatus Af293] gi|129555483|gb|EAL85073.2| AFUA_8G00950 [Aspergillus fumigatus Af293] gi|159123995|gb|EDP49114.1| conserved [Aspergillus A1163]
  misc_feature (40)..(561): NCBI GI: 212536314 Blast Desc: PMAA_087780 [Penicillium marneffei ATCC 18224] gi|210070712|gb|EEA24802.1| PMAA_087780 [Penicillium marneffei ATCC 18224]
  misc_feature (52)..(585): NCBI GI: 145245211 Blast Desc: An11g09150 [Aspergillus niger] gi|134079569|emb|CAK97045.1| protein product [Aspergillus niger]
  misc_feature (142)..(548): NCBI GI: 67541240 Blast Desc: AN6790.2 [Aspergillus nidulans FGSC A4] gi|40739418|gb|EAA58608.1| AN6790.2 [Aspergillus nidulans FGSC A4] gi|259480384|tpe|CBF71465.1| TPA: Zn(II)2Cys6 transcription
MDSTSSLPSPSTLTQPASPPRVSAPKQRSSKTKRAGSHTDSTSSSAAHSSNASAATRAANLEQKLEDLVAILKAQAASGNSPNTSLPSPGALLRERGFSDDFRQDIRGSSSMAIDHALKDSSNRAIPGAFAVTPATSHSHATSPTNKSVASPPDASDIDALSPLEAEETLALFRNNFLPMFPFAHIPSTLTAAELQRDRPFLWANIRALCSKSPVKQMALHQRCRDDLGRKLLSNGDRDIDMLLGVLLLLGWTMHFFTGKPTQNVLMNIAMGIVGDLRLDRPIQDSNARDVNCFKTDEFKKTTAPQIRTNEHRRAVIACYIFCSCGSAFLRSQSMRWTPHMEESLQMLAASPEWEGDQLLFVMAKTRRLMETVQEVTWAQGVSEVDGLTSIKPPPSLYIKILRQNLQHLKNQVPETIKHNRIVQTCILSVDMLITEMPFPNCAKDTCVTLPPATPNAKSGATMMDTARLENLYATFQTSKAFLDHFLGFGLAELVGVSFPVFLHFFRACQTLYRLIMTEDPGWDSSVVSDGVDLVATIKLLSSRFAQLPGLYGLHNDIDSDGNEVLNFFAKCAKTLTNTAPMWQTAFAQAGIGKNGSSNDAVRGVRDNSIAQVQSMPGPPGMLGAGLSAQHPEPQIPGTQGYILPNLFPIDFSVDDGWWNDYFTSPWDMPGQQF

SEQ ID NO: 24642 - DNA, 3334 bp, Muscodor strobelii
  misc_feature: SGI EST ID NO. CUFF.58039.0
  misc_feature: Variant of the nucleotide sequence at SEQ ID NO 24640
tgagcagtcggcggttccagattgtgagtcatccattcagcccttcattgttcaacggattcggcggacttctcgtaactccgtcttaccaaacccgataagcctcctcgatccaacagacgcccagatccagcgtcaaaggagtcaacgacatttgtcctccaggttctctattctatgccaatttgatctttctcaaggctatctcagaccaagtgaggaaccagcataaggggtcgtattacaggctagactcgacacaagcgatccactcatctgcttttctgcaagctccttggtgccaattccggcagggcttccgtttcaattccgtctgcattgtgaagcatcgcaacccagctcgccagcaaagcttgatgcactgagcgaaccgatgtttacatcgggttctttgtaaccaataagcagggtctatactagtcgccaaatctatcacaaagcacgagcttgtaagcgggaggcaacagtggaattccgggcctccctcacatccatcttcatatcctccatattggctccgggtttcgtactactgtatgccttaacggcattggtctcttcggaccatggactcgacttcgtcgcttccctcgccatcaacactcacgcaacctgcatctccaccccgagtctcggctccgtacggccaagcttgtatcaactgcgctaaggcgaaatgcaaatgtatcattagtagaacgccaagttctggcgctggacgtggaaatagtttcatttgtgaacgatgtcttcgactaggccgagaatgtataccatctactggtgtcagaaagcaacgctcttccaagacgaaacgtgctggctcgcataccgactcaacttcgtcttcggcagcacattccagtaatgcatctgctgcgactcgggccgccaacctcgagcagaaacttgaggatctagtcgctattctcaaggcccaagccgcttctgggaactcccctaacacttcattacccagtcccggtgctctgcttcgagagcgtggcttctccgatgacttcaggcaagatattagaggatcgtcgtctatggccattgatcatgctctaaaagattcatcaaatcgagccattccgggggcctttgcggtcacacccgctacatctcatagccatgcgacgtcacctacaaataagtcggtagcgagtccgccagacgcttcggatatcgatgcactatcacccctcgaagcggaggagacacttgctctgttccgcaacaacttcctccccatgtttccattcgcgcatatcccttcgacgttgactgctgcagaacttcaacgggatcggccattcttatgggcgaacatccgagcattatgtagtaaatctccggtcaagcagatggcattgcatcagagatgtcgtgatgatcttggacgaaaacttttgagtaacggcgatcgggatatcgatatgttactcggtgtgctgctacttctcggatggacgatgcatttctttaccgggaaaccaacccaaaacgtcctaatgaatattgcaatgggcattgtaggcgaccttcgtcttgatagaccgattcaggattccaatgcacgcgacgtaaattgtttcaagacggacgaatttaaaaagacgactgcgcctcaaatccgaacaaatgaacatagaagggctgtaattgcatgctatattttctgctcctgtggctcagctttcttgcgatcgcaatcaatgcgctggacgccccatatggaagagtctctccagatgctggcggcgagtcctgaatgggaaggagatcaactgttgttcgtcatggccaagacgcgccgactcatggaaacggtacaggaagtaacctgggctcaaggggtttcagaggtggatggcctcacttcgataaaaccaccaccttcgctatacatcaagatattgcgacagaacttgcagcatctaaagaatcaggttccagaaacgatcaagcataacagaatagtacaaacatgcatcctgtctgtggatatgctcatcacagaaatgccttttccaaattgcgccaaagacacctgtgtaactctcccgccagcgacaccgaacgcaaagtccggtgcgacgatgatggacacagcccgtctagagaatctatatgcgacttttcagactagcaaagcattcttggaccacttcctcggattcggacttgcggaacttgtcggcgtttcattcccagtcttcctccacttcttccgtgcctgccagactctatacagactcataatgaccgaagatcccggttgggatagctctgtggtatcggacggcgtggacctcgtggcaaccatcaaattgctttcgagccggtttgcgcaacttccgggtctatatgggcttcacaatgatatagatagtgacgggaacgaggtgttgaacttctttgcgaagtgtgcgaagacgctgaccaataccgcgcctatgtggcagacggcctttgcccaggctggtattggcaagaatggatcgagtaatgacgcggtgaggggagtgagagataattcgattgctcaggtccagagtatgcccgggcctccgggcatgctcggcgctggtctctccgcgcagcaccctgaaccgcagatccccggaacgcagggatatatcctgccgaatctgtttcccattgatttctctgtcgatgatgggtggtggaatgactattttacgtcgccctgggatatgcctgggcagcagttttgagagctaccttaggtaggtaggttcttgttttgggatgggagtgggaatgcatgtaggatggatcatggctagacgctgtacgactaatcttttcgcgcctggaaagcatctgcaaactgtaggaaaacatataatgcatttagagcattacatctctaatggttgagcgaatggtaatgtgattgacgcatggtaacaaacatcatatttcgttgaaataagcactccgttggatgccgttcctggtcggaaatcacctaggattattttttgcatgaggactaactttgcgtactcttacctttgatctgctatctgctgctgttcttcaaaactgggttagtttgtaggaactacatatctttcaataatatcgtggaatacttctgtaagccagaatcagaatgcaaggaacatccttcctccggccgtgcaaacattaggtaaggtagctagtctggtatcatgctccattcaacgttaaaaacaatcccgaatgcgagcgtttttctcttttagaatccaacgaaatctactatagcatagtccatctggcctcatgcatgaatgcg

SEQ ID NO: 24643 - DNA, 2910 bp, Muscodor strobelii
  misc_feature: SGI cDNA ID NO. 568404
  misc_feature: Reduced expression when VOC is produced
  misc_feature: Encodes the peptide sequence at SEQ ID NO 24644
atgcctcgcgcctcagcatcggccaagcgacatcacggtgcctccaacaatcgcgacgcgaagaatgacaatggacttgtagccgccgctgccgccaagcgcaacaattccaacaagcagcagcagcagcagcagcagcagaagtgccagactcccccgaacggtagcatccccaacaagcagccgacgcagcagcagacgcagcagcagcccgccgccgaagatgcacccccgtctgctccctccacaccgcctgcccatgcgaacggcttccccaagcagtcgtccgatatgcctgcagacagccgcaccgccgagtctctgaggcgtgcctctctcggcgcctactccgagacctcgtccgccgattcttacaactcccacgccagcccacccgaggacaaccatcgccgcatcgatgtgaatgccaccaagaactcgaatgtccaccgcgaccctggcccgctggattttgccttgaccgttctgcgactgtgccccctgcaggacaccattgctatcctcatcatcctcatgcaggttccctccgctatgctctccggcatctacttccttttcactgtgctcacctttgttacgagcaacggtctcactcttagcgacgtgttcgagtggaatctaggcgccccctctctggccaccgtcatctgtgtcgatggtatcgtgctgctgatatggctcttcttgtggggccctatccagcatgtcatacttgatctggctcaaatggtcatagcactgggcctgggaggagggtccagctcccgagatgggggttccatgaagaacaccgtcatctgtctgagcatgatattactgtcccatgtcttgcgccacaccaggatgaagtatcatcctgtaggatatctactcggctcgagtcggttcatgactccggacttcgacgaccccctggaaggacttgactctctacgaggctatgatagggtccaatcgggctggttcagttgggttaagagtattttggcgatccacatactcacgcaaggccttgttaagtacattcgcgattggtatttaagaagagagaggcgagacagtcttgctcagaccgctgcggatccggaagcaggaaaatcatatgcacccgatatcgatggcgggttttccacgcccgatagcgatacaacatcattacaaaatccatcaacattaagtataaaaaagaaaagaaaacaaagcactcaagttcggaatcgccaacccctctgggctgccctggcgagtaccaaaattgtcgttatcaaggagtacgaattgacacatgcagcggccgaatccgctggttccaacgctgttgacatccatgacctcgggaacgccccgtttaatacgcagcctggtcagatttggatatcatatgtcggctgtgacgaggtctgtttcaacactagtgagttccctacttcgcaatctgccgagagtcgccagaacggttcgaaggtcgacacctcgaaaccattctacgtcagggtcaacaatgccatttggcaaccgactcgaatgacacccgtggagacatgtgaaggaagtccagggtcaggcattcggtggagtggagatatctatgggttgactcccttgtcaaactacgaatgcgaatttgttagtgttacaacgaatgaaatcttattttcgacgagtgttaggaccacacagcccaagtcagcagacgtggactctacaggttcaaaggcgtccacgaagcgttctcttcgaccagattccccaatcaccaccctgaagacatccattgccgcgaatgaggccaagctttccgaagaaagacagcggcagaaggggttgcgcaaagaatctcaccgcaagacaaacgctttgaaaaaggagaacgagaagctccacgccgctttgcagtcggcaggtactggtgatgacaagctgcgccaaaagattcagcagaatgtgacacaacagaagcaagcagagcaggccttggccaatctggagacggatttgaaagattttgaaaagattcctgaatctttgaaaagttcgtggaaaagccgtcaatcggtctggacaaacgagaaggccaagtttgatggcgctgtagcagcgttcaaaagtttcaaggcttctgtggatggtggaatcaagtcattggaagaggaaaagacgaatctccaagccaagcgtaataagattagcaatcgtatcgctaaggttgatggggagcacgctcgtattaccgatgccaataatcgagggctggatgaggagcaacgtcggcgccaagcgagggagtcttatgagaacgacatcgccaaggtcgatcgagaccttgtttcgagaatcaacgagctagagagctctatctacgaaaaggaacagcagaatttgatgctcaaagagcaacttgatgtcttccatgcgcagcaagcagctatggcatatggttcatatgagcatttccccgagtctgccagtcaatttgcgtcacccgctatcgtcaatgcacagccagctacctctaacacctcaccttatggtgccgcagctgcctggaataatagcctctatcaatcttctctttggggcccttcgccacttgcatccgcgttcgttccgcagcagtcccaagcccagcaactcatcaagggtagaggccgatcatcctcaatgcttagcaacgtctccggtttcacacagagtagcgaggagctcgaagactggaatggcctggatcaaggtgtaatgcaaagtcaaggagcctctcctggattcgcatctcctgcgatcgcgcggcgtgctagtgacgaggctgttagcgatggtagtagtagccctcgcggtggaagtagtgggagcggcagtgccagagaccagatgagcccgcctccgcattag

SEQ ID NO: 24644 - protein, 969 aa, Muscodor strobelii
  misc_feature: SGI Peptide ID NO. 568404
  misc_feature (1)..(920): NCBI GI: 171692477 Blast Desc: protein product [Podospora anserina] gi|170946187|emb|CAP72988.1| protein product [Podospora anserina]
  misc_feature (1)..(908): NCBI GI: 116198433 Blast Desc: CHGG_07372 [Chaetomium globosum CBS 148.51] gi|88178651|gb|EAQ86119.1| CHGG_07372 [Chaetomium globosum CBS 148.51]
  misc_feature (1)..(906): NCBI GI: 164423880 Blast Desc: NCU07778 [Neurospora crassa OR74A] gi|16945443|emb|CAC28577.2| [Neurospora crassa] gi|157070270|gb|EAA29463.2| [Neurospora crassa OR74A]
  misc_feature (1)..(914): NCBI GI: 39940888 Blast Desc: MGG_05356 [Magnaporthe grisea 70-15] gi|145021985|gb|EDK06005.1| MGG_05356 [Magnaporthe grisea 70-15]
  misc_feature (1)..(908): NCBI GI: 46110331 Blast Desc: FG02047.1 [Gibberella zeae PH-1]
  misc_feature (1)..(908): NCBI GI: 256728577 Blast Desc: [Nectria haematococca mpVI 77-13-4]
  misc_feature (1)..(923): NCBI GI: 156037738 Blast Desc: SS1G_12583 [Sclerotinia sclerotiorum 1980] gi|154697991|gb|EDN97729.1| SS1G_12583 [Sclerotinia sclerotiorum 1980]
  misc_feature (209)..(686): NCBI GI: 154304332 Blast Desc: BC1G_08436 [Botryotinia fuckeliana B05.10] gi|150854238|gb|EDN29430.1| BC1G_08436 [Botryotinia fuckeliana B05.10]
  misc_feature (8)..(908): NCBI GI: 169617940 Blast Desc: SNOG_12153 [Phaeosphaeria nodorum SN15] gi|111059445|gb|EAT80565.1| SNOG_12153 [Phaeosphaeria nodorum SN15]
  misc_feature (81)..(806): NCBI GI: 225682531 Blast Desc: conserved [Paracoccidioides brasiliensis Pb03]
  misc_feature: Useful for introducing or modulating the production of volatile compounds
MPRASASAKRHHGASNNRDAKNDNGLVAAAAAKRNNSNKQQQQQQQQKCQTPPNGSIPNKQPTQQQTQQQPAAEDAPPSAPSTPPAHANGFPKQSSDMPADSRTAESLRRASLGAYSETSSADSYNSHASPPEDNHRRIDVNATKNSNVHRDPGPLDFALTVLRLCPLQDTIAILIILMQVPSAMLSGIYFLFTVLTFVTSNGLTLSDVFEWNLGAPSLATVICVDGIVLLIWLFLWGPIQHVILDLAQMVIALGLGGGSSSRDGGSMKNTVICLSMILLSHVLRHTRMKYHPVGYLLGSSRFMTPDFDDPLEGLDSLRGYDRVQSGWFSWVKSILAIHILTQGLVKYIRDWYLRRERRDSLAQTAADPEAGKSYAPDIDGGFSTPDSDTTSLQNPSTLSIKKKRKQSTQVRNRQPLWAALASTKIVVIKEYELTHAAAESAGSNAVDIHDLGNAPFNTQPGQIWISYVGCDEVCFNTSEFPTSQSAESRQNGSKVDTSKPFYVRVNNAIWQPTRMTPVETCEGSPGSGIRWSGDIYGLTPLSNYECEFVSVTTNEILFSTSVRTTQPKSADVDSTGSKASTKRSLRPDSPITTLKTSIAANEAKLSEERQRQKGLRKESHRKTNALKKENEKLHAALQSAGTGDDKLRQKIQQNVTQQKQAEQALANLETDLKDFEKIPESLKSSWKSRQSVWTNEKAKFDGAVAAFKSFKASVDGGIKSLEEEKTNLQAKRNKISNRIAKVDGEHARITDANNRGLDEEQRRRQARESYENDIAKVDRDLVSRINELESSIYEKEQQNLMLKEQLDVFHAQQAAMAYGSYEHFPESASQFASPAIVNAQPATSNTSPYGAAAAWNNSLYQSSLWGPSPLASAFVPQQSQAQQLIKGRGRSSSMLSNVSGFTQSSEELEDWNGLDQGVMQSQGASPGFASPAIARRASDEAVSDGSSSPRGGSSGSGSARDQMSPPPH

SEQ ID NO: 24645 - DNA, 3671 bp, Muscodor strobelii
  misc_feature: SGI EST ID NO. CUFF.58178.0
  misc_feature: Variant of the nucleotide sequence at SEQ ID NO 24643
ccagtccacactgcacgctgcacatttccactcccaccctctcccgtcacgaaagcctcaatcttcattttcttacttatcaatccccatttgtgtggacagatcccgtaacccctccgggactctattgcgctcccagcagccttcgcaatagagttcacacgaccgttgcacacgcccaatatccggtacactagctgtcgagacgaagggaaactttgggccacgccactccgacgggctgacccctttccacgccgcctcagacaccgccagccacgctagacacgcgcgcactcccttgctcgacgtcacctcctcccctcgggcatcgtcaccgtcatcgccgtcgacgtctcgctcggctgactggctcggaacacgttctgggtcgggtcagcacaacgcgagcgtatgcctcgcgcctcagcatcggccaagcgacatcacggtgcctccaacaatcgcgacgcgaagaatgacaatggacttgtagccgccgctgccgccaagcgcaacaattccaacaagcagcagcagcagcagcagcagcagaagtgccagactcccccgaacggtagcatccccaacaagcagccgacgcagcagcagacgcagcagcagcccgccgccgaagatgcacccccgtctgctccctccacaccgcctgcccatgcgaacggcttccccaagcagtcgtccgatatgcctgcagacagccgcaccgccgagtctctgaggcgtgcctctctcggcgcctactccgagacctcgtccgccgattcttacaactcccacgccagcccacccgaggacaaccatcgccgcatcgatgtgaatgccaccaagaactcgaatgtccaccgcgaccctggcccgctggattttgccttgaccgttctgcgactgtgccccctgcaggacaccattgctatcctcatcatcctcatgcaggttccctccgctatgctctccggcatctacttccttttcactgtgctcacctttgttacgagcaacggtctcactcttagcgacgtgttcgagtggaatctaggcgccccctctctggccaccgtcatctgtgtcgatggtatcgtgctgctgatatggctcttcttgtggggccctatccagcatgtcatacttgatctggctcaaatggtcatagcactgggcctgggaggagggtccagctcccgagatgggggttccatgaagaacaccgtcatctgtctgagcatgatattactgtcccatgtcttgcgccacaccaggatgaagtatcatcctgtaggatatctactcggctcgagtcggttcatgactccggacttcgacgaccccctggaaggacttgactctctacgaggctatgatagggtccaatcgggctggttcagttgggttaagagtattttggcgatccacatactcacgcaaggccttgttaagtacattcgcgattggtatttaagaagagagaggcgagacagtcttgctcagaccgctgcggatccggaagcaggaaaatcatatgcacccgatatcgatggcgggttttccacgcccgatagcgatacaacatcattacaaaatccatcaacattaagtataaaaaagaaaagaaaacaaagcactcaagttcggaatcgccaacccctctgggctgccctggcgagtaccaaaattgtcgttatcaaggagtacgaattgacacatgcagcggccgaatccgctggttccaacgctgttgacatccatgacctcgggaacgccccgtttaatacgcagcctggtcagatttggatatcatatgtcggctgtgacgaggtctgtttcaacactagtgagttccctacttcgcaatctgccgagagtcgccagaacggttcgaaggtcgacacctcgaaaccattctacgtcagggtcaacaatgccatttggcaaccgactcgaatgacacccgtggagacatgtgaaggaagtccagggtcaggcattcggtggagtggagatatctatgggttgactcccttgtcaaactacgaatgcgaatttgttagtgttacaacgaatgaaatcttattttcgacgagtgttaggaccacacagcccaagtcagcagacgtggactctacaggttcaaaggcgtccacgaagcgttctcttcgaccagattccccaatcaccaccctgaagacatccattgccgcgaatgaggccaagctttccgaagaaagacagcggcagaaggggttgcgcaaagaatctcaccgcaagacaaacgctttgaaaaaggagaacgagaagctccacgccgctttgcagtcggcaggtactggtgatgacaagctgcgccaaaagattcagcagaatgtgacacaacagaagcaagcagagcaggccttggccaatctggagacggatttgaaagattttgaaaagattcctgaatctttgaaaagttcgtggaaaagccgtcaatcggtctggacaaacgagaaggccaagtttgatggcgctgtagcagcgttcaaaagtttcaaggcttctgtggatggtggaatcaagtcattggaagaggaaaagacgaatctccaagccaagcgtaataagattagcaatcgtatcgctaaggttgatggggagcacgctcgtattaccgatgccaataatcgagggctggatgaggagcaacgtcggcgccaagcgagggagtcttatgagaacgacatcgccaaggtcgatcgagaccttgtttcgagaatcaacgagctagagagctctatctacgaaaaggaacagcagaatttgatgctcaaagagcaacttgatgtcttccatgcgcagcaagcagctatggcatatggttcatatgagcatttccccgagtctgccagtcaatttgcgtcacccgctatcgtcaatgcacagccagctacctctaacacctcaccttatggtgccgcagctgcctggaataatagcctctatcaatcttctctttggggcccttcgccacttgcatccgcgttcgttccgcagcagtcccaagcccagcaactcatcaagggtagaggccgatcatcctcaatgcttagcaacgtctccggtttcacacagagtagcgaggagctcgaagactggaatggcctggatcaaggtgtaatgcaaagtcaaggagcctctcctggattcgcatctcctgcgatcgcgcggcgtgctagtgacgaggctgttagcgatggtagtagtagccctcgcggtggaagtagtgggagcggcagtgccagagaccagatgagcccgcctccgcattagtcatttctgcctccttacagcgctatgtattcttagtccatgaccagcaccatcctgagattcaagctgcatcaaccctagcaactatgttaaggctcccagtagactgatataggcaacaaaagctttgttattcactttcatccggttttcctgaccagactattcaacagttggtgttgcggtgaatgtagcacgtatagtaagatgtataaccttgcgtattcgtctcgtctgatcattcaatgttcatactacgtgcctggtccacaatgacagctgccagctacttgttcagctaaaatgtatccagaagccatcctggcagggtaagaatccgattagca

SEQ ID NO: 24646 - DNA, 900 bp, Muscodor strobelii
  misc_feature: SGI cDNA ID NO. 568405
  misc_feature: Encodes the peptide sequence at SEQ ID NO 24647
atgcctccgcggttatgtctgagcctccccggcgcaagccgcgccggtggcttacatatcaccatatcggagccgttattcaaaccgttattgagcgccccgaagaaggtctttagagctgcatactctaatagtagcgcagagtcggttgctaatactattactacaccgccaagcagatgggtctcagatgtgcggtctcgggtcggcaaatgtctcatgttcggctgtaatactgagcaggtccgtcgcgctgctggaatgatgactatcattgcgaaagagtggcgggcgctgagcgctggatccgacggatttcttgttggcgacgttggccttgagaatcaacaggttctttggggtgagatggacagttttggtcacgttaataatacacattacaatcgatgggccgaaacatcgcgtgtaaactggacacactatttcggacgcatatatccggacgataaagctcgttgggcaggacttatgacacctaaggaggttgggttaataatgaagtctatcaagaccgattacaagtttcctgtgacctacccggatacattctcagcataccacaaactatctataaaacctgaacacacccacacatctctccttgtagagtgcgttatcttctcccacagacatcagcgcgttgcagcgcgaacaaccgaggagattgtgatatatgactaccagaaagctacgaaaacaactttaccggatttcacgctcggtccgctgaatatcacgtggtggagtcaggaagaggcaattattgaagctagaaggaaaatttcgatgctgctcgaggatgttagagatttagaaagagaaatttgggatagagaggatgctgtggaggatttagggggtgtgggggacaagaagtga

SEQ ID NO: 24647 - protein, 299 aa, Muscodor strobelii
  misc_feature: SGI Peptide ID NO. 568405
  misc_feature (57)..(293): NCBI GI: 85091031 Blast Desc: NCU07782 [Neurospora crassa OR74A] gi|16945446|emb|CAC28580.2| [Neurospora crassa] gi|28920084|gb|EAA29467.1| [Neurospora crassa OR74A]
  misc_feature (61)..(296): NCBI GI: 171692475 Blast Desc: protein product [Podospora anserina] gi|170946186|emb|CAP72987.1| protein product [Podospora anserina]
  misc_feature (54)..(294): NCBI GI: 116198431 Blast Desc: CHGG_07371 [Chaetomium globosum CBS 148.51] gi|88178650|gb|EAQ86118.1| CHGG_07371 [Chaetomium globosum CBS 148.51]
  misc_feature (1)..(293): NCBI GI: 156037774 Blast Desc: SS1G_12601 [Sclerotinia sclerotiorum 1980] gi|154698009|gb|EDN97747.1| SS1G_12601 [Sclerotinia sclerotiorum 1980]
  misc_feature (46)..(294): NCBI GI: 159125516 Blast Desc: conserved [Aspergillus fumigatus A1163]
  misc_feature (46)..(294): NCBI GI: 70993414 Blast Desc: conserved [Aspergillus fumigatus Af293] gi|66849188|gb|EAL89516.1| conserved [Aspergillus fumigatus Af293]
  misc_feature (60)..(296): NCBI GI: 212541973 Blast Desc: conserved [Penicillium marneffei ATCC 18224] gi|210066048|gb|EEA20141.1| conserved [Penicillium marneffei ATCC 18224]
  misc_feature (60)..(297): NCBI GI: 259481876 Blast Desc: TPA: conserved [Aspergillus nidulans FGSC A4]
  misc_feature (20)..(294): NCBI GI: 119500012 Blast Desc: NFIA_103540 [Neosartorya fischeri NRRL 181] gi|119414928|gb|EAW24866.1| conserved [Neosartorya fischeri NRRL 181]
  misc_feature (1)..(293): NCBI GI: 255947098 Blast Desc: Pc22g02720 [Penicillium chrysogenum Wisconsin 54-1255] gi|211591333|emb|CAP97560.1| Pc22g02720 [Penicillium chrysogenum Wisconsin 54-1255]
MPPRLCLSLPGASRAGGLHITISEPLFKPLLSAPKKVFRAAYSNSSAESVANTITTPPSRWVSDVRSRVGKCLMFGCNTEQVRRAAGMMTIIAKEWRALSAGSDGFLVGDVGLENQQVLWGEMDSFGHVNNTHYNRWAETSRVNWTHYFGRIYPDDKARWAGLMTPKEVGLIMKSIKTDYKFPVTYPDTFSAYHKLSIKPEHTHTSLLVECVIFSHRHQRVAARTTEEIVIYDYQKATKTTLPDFTLGPLNITWWSQEEAIIEARRKISMLLEDVRDLEREIWDREDAVEDLGGVGDKK

SEQ ID NO: 24648 - DNA, 1540 bp, Muscodor strobelii
  misc_feature: SGI EST ID NO. CUFF.58066.0
  misc_feature: Variant of the nucleotide sequence at SEQ ID NO 24646
cggccctctaaaagacggcacttcggaccacgttcttgtaaacaccacgtattgatgctagaagatcctctgtgcaaatgatcgttataaatttgcgttgagacatccataggatcatcacaattcaaaagcgatactccaatgcctccgcggttatgtctgagcctccccggcgcaagccgcgccggtggcttacatatcaccatatcggagccgttattcaaaccgttattgagcgccccgaagaaggtctttagagctgcatactctaatagtagcgcagagtcggttgctaatactattactacaccgccaagcagatgggtctcagatgtgcggtctcgggtcggcaaatgtctcatgttcggctgtaatactgagcaggtccgtcgcgctgctggaatgatgactatcattgcgaaagagtggcgggcgctgagcgctggatccgacggatttcttgttggcgacgttggccttgagaatcaacaggttctttggggtgagatggacagttttggtcacgttaataatacacattacaatcgatgggccgaaacatcgcgtgtaaactggacacactatttcggacgcatatatccggacgataaagctcgttgggcaggacttatgacacctaaggaggttgggttaataatgaagtctatcaagaccgattacaagtttcctgtgacctacccggatacattctcagcataccacaaactatctataaaacctgaacacacccacacatctctccttgtagagtgcgttatcttctcccacagacatcagcgcgttgcagcgcgaacaaccgaggagattgtgatatatgactaccagaaagctacgaaaacaactttaccggatttcacgctcggtccgctgaatatcacgtggtggagtcaggaagaggcaattattgaagctagaaggaaaatttcgatgctgctcgaggatgttagagatttagaaagagaaatttgggatagagaggatgctgtggaggatttagggggtgtgggggacaagaagtgagaggaaagactagtcgtcagcgttttacattagaggcctcttagatgtcaaaaagtagagcatatatagcgagtagagcgatagacctatgcgaagtacatcgccagtgttacgaggtcaagattaccctttgtgttcaatcttacgtttttcgtgtatgaacactaaactcatagtctatagtgaccttgcgttttacggagacaaaaaaacaaggagtcgtgatccaaatgtgaggtgttagatgccgcactgcaagtatatgtgcttgaaaaacaaagaggagaagcttaggcaggagagaatttaactgtcatctatctttaaagtaagtctcaatgtaacggatagtcgaatgtgacaggactagactatgatttctaacattgtttataagtcaagggccaaggttgttgctacttctgacttcgcttggtcgttccgcggtgatagaggacaaaggttcttgtgtcgagaacatattgaaattacaggtcct

SEQ ID NO: 24649 - DNA, 204 bp, Muscodor strobelii
  misc_feature: SGI cDNA ID NO. 568406
  misc_feature: Reduced expression when VOC is produced
  misc_feature: Encodes the peptide sequence at SEQ ID NO 24650
atgtccgcacccaaccctgaattaaggagacaagtcatcgccatctacaaagaactcctacatataggcaaagaatatcccctaggcttctcatatttccgcccacgtctgcaccgagccttcatgtccaatgcctcacaacgggacgaagacgagatcagaaagggaatatcacgcgctgagttcgtcaaaaaaggttcgtag

SEQ ID NO: 24650 - protein, 67 aa, Muscodor strobelii
  misc_feature: SGI Peptide ID NO. 568406
  misc_feature (7)..(61): Pfam Id: PF05347 Pfam Desc: Complex 1 protein (LYR family)
  misc_feature (3)..(65): NCBI GI: 46110326 Blast Desc: FG02045.1 [Gibberella zeae PH-1]
  misc_feature (4)..(66): NCBI GI: 39940892 Blast Desc: MGG_05358 [Magnaporthe grisea 70-15] gi|145021987|gb|EDK06007.1| MGG_05358 [Magnaporthe grisea 70-15]
  misc_feature (4)..(67): NCBI GI: 156037772 Blast Desc: [Sclerotinia sclerotiorum 1980] gi|154698008|gb|EDN97746.1| [Sclerotinia sclerotiorum 1980]
  misc_feature (1)..(65): NCBI GI: 171692473 Blast Desc: protein product [Podospora anserina] gi|170946185|emb|CAP72986.1| protein product [Podospora anserina]
  misc_feature (5)..(66): NCBI GI: 121708433 Blast Desc: LYR family protein [Aspergillus clavatus NRRL 1] gi|119400277|gb|EAW10703.1| LYR family protein [Aspergillus clavatus NRRL 1]
  misc_feature (3)..(67): NCBI GI: 116198429 Blast Desc: CHGG_07370 [Chaetomium globosum CBS 148.51] gi|88178649|gb|EAQ86117.1| CHGG_07370 [Chaetomium globosum CBS 148.51]
  misc_feature (1)..(66): NCBI GI: 169617936 Blast Desc: SNOG_12151 [Phaeosphaeria nodorum SN15] gi|160703519|gb|EAT80563.2| SNOG_12151 [Phaeosphaeria nodorum SN15]
  misc_feature (5)..(67): NCBI GI: 119500014 Blast Desc: NADH-ubiquinone oxidoreductase complex 1/LYR family protein [Neosartorya fischeri NRRL 181] gi|119414929|gb|EAW24867.1| NADH-ubiquinone oxidoreductase 1/LYR
  misc_feature (8)..(65): NCBI GI: 238838572 Blast Desc: conserved [Microsporum canis CBS 113480]
  misc_feature (4)..(65): NCBI GI: 146323875 Blast Desc: NADH-ubiquinone oxidoreductase complex 1/LYR family protein [Aspergillus fumigatus Af293] gi|129557492|gb|EAL89517.2| NADH-ubiquinone oxidoreductase complex 1/LYR family protein 1/LYR
  misc_feature: Useful for introducing or modulating the production of volatile compounds
MSAPNPELRRQVIAIYKELLHIGKEYPLGFSYFRPRLHRAFMSNASQRDEDEIRKGISRAEFVKKGS

SEQ ID NO: 24651 - DNA, 6593 bp, Muscodor strobelii
  misc_feature: SGI EST ID NO. CUFF.58377.0
  misc_feature: Variant of the nucleotide sequence at SEQ ID NO 24649
ctcactcttagcagctacaccttcatattcattcgtatatgaaccttcaactcgataccaaagatccaggcaaatcatatcaacacctccacaacacaatgtccgcacccaaccctgaattaaggagacaagtcatcgccatctacaaagaactcctacatataggcaaagaatatcccctaggcttctcatatttccgcccacgtctgcaccgagccttcatgtccaatgcctcacaacgggacgaagacgagatcagaaagggaatatcacgcgctgagttcgtcaaaaaagaaatcgaagctctgtaagtccaagtcatgaatttaacactctcagtcccagtgccgtatctgtctttgttctcttcaatctcaactcaaaattcgaactgcttatatatcaatcccattccgactgtaaaagtgcaaaaagcacctctctaagaaaatatattcaagaaaagactcccctcaccagccaaccagggcatatcctcaagcacctcaaaaaaccacacaatctgctttagtaacatcagaggggaaaaaaagaaactttatatgcaaaacccagtccccccgactttgtactatggtaccaaattgcttcatgctcgcatgctgtgcatttctcggttaatccaaacccaactgacacaaacaaccactccctctagatactacctgaagcgctaccgcaccctgcgaaaacgatactcagccccctaacaaactgcccgctcaagtcttgttgtgtctcttcctagccgtccaacacccaacctccagacactcaccccacgaagttcccccttccctaagcaaatcattcgtcatcttcccggcccacgtatcccactcctcttgactcttcccattgatatccctcaacatcggctcgagcgccaatatgaaattcaccgttgtctccagcgccgtcctcctaagactcgcctgtgccgtcgtcaacgtcttcccacctttccctctcaggtcgtcgtctcggaacttccccttctgcgagtcgatgtaggtcttgccgtctttcgtgacaacaccacctacgccctcacgctcccagcggatctcgcttaacggcaccgcaagccttttggagaagacatctgtcaacgactcggcctcctgaagtaaatacgcgccgatgagaccgcaaggtacagcagacaaaccacgtgcttctaggcccttcgtacaccagccgttatattcgactagaaatgagttgagcggtgcactcatgggcgtgttcgtcgtcatgacgtaagcgcccatccgttgcaccgtatcctcttcttcttcttcatcgtcatccgacgagtcaacgtcaaaggtcgttgaggatgcattttgcgggccgtgtggccgcagcatgcggaacgtagaatcagtttcccaggattcaagcacacctccaggcttcaaaatgcgcaaatactcatccatcacgggttgtgagtcgcgaaatgacgagcagagagacatgtccttggccataatgagatcgaactcgttatcggcaaaaggccaggggaaaattcgaaggtcgtgggccacgaaccgccaccgcatatccttgtccggcttagcttcagaatcggtcccggccccggctagcgggacgatatccataccggtgaaagatatggatgagtggccatgttgtgcaaagtaacggtgacacatcatgctccagaaaccagtgccgcaaccgacctccaagacccgcaatggaggtttgcttgcgaacgcggtggagagtatagggccaccaaaaagctgaaacatgagaagggttcggagagattgccggtggagttccgcgaggtcgacgggcaaggggtaaggcacggagagctcgtgtatatatgtgcggttgtttcgaatgtagtaagatttaggatttaggggtacggatctagaagcagtagaggtagcgtttgaagaggcgatggaccctgtcttctcgacggcagagccaatgctctcgctggaggtcatgactccagacatgttggtaaatacggcgctccctacggatgggacgtactctgggagaaatgggccatgattggcggacatgctttcataatgatcatgtacaccttggctcccggatgaaattaagggcgcgatgctgggtgatggtgatgcggggggtgattgttctcgggaattgtgcctgtggaagtggtcccggatgtggagcctcttcgcagacgtggaggaggaggagctgtgggtgaagaaatggggaagccgcggggatgcaggcggagacgaggacggatcggctgcgtacgccggcgtgagttggttcagtagtgacttgctcgaaggcgggctcttcactcgagacttcttggaggtagcactctgattagatccggaggaggtggagatagcggcaccggtattcgaagactcaatcgattccttccgctataatgcatgataccagtcagtctctgtctccaccagctacaatggaaagttgaaagaagatacattgagtaggtcaatgcttgataatctggagttgccgtggtgctgagctacgagggtaatatactggtccaatggcagatggcatgaagtgaagcattggtacttgagacaagacgggaagagcaaagtggatgagcaagagacatggcagcacgaacattggagtgtctcagcgaatgcaacagcgatggctgatgctgatgatgggccgcaggggcgtacggggaggcggagctggcgtcgccggaggaggctctgacgtgatgcgatggcggcgggggggttgagtgctgttttgccagcgacgaggtccggcgtggatggttgggccgcgcgaagaggagaggctggtggatgcgatcgccaaagctagaccggctgcttttggagatggtgctattcctgcggctctccgcgtcggccggataatactctagcttgttgcaatcgctatcgttgtggttgtcgttatcgttgctattaccaatgcctggagagcttggttgggtgcactcgcccgcaatgacgacgatattgctgatagtcagttgttgcttgccgtcgtcgtgagaatcggttccgaccgggcgggtggtgcgaggcggcgatctgggggtggtggtgttggtgatgaacactctcgcgtgcctcgtcggatggccagcagcagcactcggggggctaccagtgctcgtggtgctggtggctgcgatagggggcggcggcggcgaggagcgagcgggctcaggttcgggctggtcgggcttgggtttggagggggacctggagctcgagacggcggcacctactatttcagatgtgggttcaattgtgttggaaggatagtgcttcttggccttggccaacttggctaccctgctgcgaggcttggccttgtccttgttagctgctggtgcaggtggtgcaggtactgctccagctttcgacttcttgccctgctcagcttgtttcttgcgctttggaggcggctgtcggtagcgcccgatcaaatcaggggctattgccgccgacaggtgccacccgtagtccccgtccattttgatagtgtacctgagtcagttgcgacaggtatcgagaaattacatgtaataaaataatccgtatttctgatagatctcctctttcttcctttttctcttttctttttctgctctcctgttctctcgcagcctgtggtcctgctaggtcacccgcgacaatggccgcgtatgcccggatacgtccccgtcgtcacctgctgcagttgtacgaatagcgaatacgaccaagatttacggcatccagtcgcatggaaccgtttcgtacgccactgctaattttgacttgacgtcttgcacgaccataactcatctgttggatttgaaaatacagctatccaatgcgcaggttgggattgctgttgcctctttcaccccatgagacaagacggcacacaaaactgatataacttatttcaaattctttgtatcagtccagatctaactggaggtaacctgatggcgctggcaccgttcgaagagaccttgtgttgctattttctcttcttgtacgtaatccgttatgtcccaagcagaaggtcgatatctcgggttgtggtttgtttccagagcaaactattgctgatcatggttttgtgtaagtgagtagccctttaggcgtatcattacgaccaaagaatcgcgatgttgcttgtttatctgtttgagtatctcaacatttatccatacttcggcttacaacgtgacatgcggtctcgttcggtgattatgcacttcggtccatgccggggtctgaggaccctgagttgcgcagcacaacaagatagatgcgcataccgcgctgcttgagatacgcttgaccggctgtataaagggtgatggagcagaaatcaacaacgccaaacagagcatattcatttcaaagtgcgctgcgagacgcgccgcggatctatctacgtctatataccgcctactctatgccgtaccacctttgactcaggatggaagctctgcttggtggtagaatccagatcgctttcgcatggcgaaatatgccatggtcctttttctggatatttggcccaatcccccatggctacagccgagacagcgtttggctcgcccttaccggtaaccatagacaccaagattatgcaaccaagaccccctggtcgctagccggttcccccgcattatagggttgcaattactgcagttcttggtcggcgacagtaccctggcgtggagttcgtgaaaccaaggctagtgtgccgactagctgtgctttttgtctctgccatatatgaagttcgttcgcgattcggcccgttgctagggagctcccgccatccgcgtgacactaggaactcttgtcttgctactcaatcattaagcaggatattttgcaatatgggggaaaggaagcagagctaagggctcttagttagccagccactcaagttgaaaatacttacctctcaagctgctcgtggtggtcgcgatctgggtcaggagtctacaacttatctgtgataatgcacctcgtacacagcaccggtgaaacagatatgaacagcaaaagccggagggaaagtctcgatctggttcgagcggcgagatgccgtcataaacatacgttggacttcgccagcgcgttgaaacggggtcacatcatgggtagtgctgctgtcatataacttcggtaccgtcttgcatatggtcgcttgcatagggtgacgtgactccatcacggaatctcgctaatcggagcggcttctcgggaacactaaactggtctcgacatctaaccttatgtctttgacaaatgctgccaaggtctacgttgatgaatctatagctagcgaggcagcattgtatgcacgccgagactcttatttcaacgccataaataaaacccaacccagactctcggtaatcattatggacgtaaggttcctaagtttagcaagatgcatcacaacgaaatggctcaagtggtgattctagtcacaagatcgggaacccggtggtgcggtcaattttcggccttcggcagagagcttcgcttattggggatgaggcacagcgtgcaatagtccatcgtctgcaagatctaaaatatgattgtaggtgaggatagtgtgctgcgactgagatacatgcggtgatggctcggctccgaatgcttcgagtttaatgggtgtgtgagggtggtaggtcgatagattaataaatcgggtaaacggtccgctcttgtggaacattggcatagtagaacattcaggttacaactttgtaactattaggatatctgtcaggttgtgaaaagtgtatcctacaacttgaatctgtcatgacaactagatcaaaatattgagacagaattctgagacaatccgagtagtgcccaggggagactgttgccgaaaatccttggggatcgtaggagactctagaagtcggtggcttttgaaggatgaagctgctgctaggcacctcttggtaactacattagactgatggaagagatgtccatctaaggtcatcatttcatgctaccaggagaccaggaaacatatttgagattcccacctactaggagatcacctgtggcaacatggccagttgcatacctttagatacgcacacgaatagtacttctctctgaagttgatcagagaaaatataatcactcctgatgcttcttcttttgtcaatgttcgtaatagaaccgaaatgctgtcaatgcgacctatataacacgataatgaccagcaccatcaaccatgatgaacgagcggtgtggctgttaccgaatagaggaagttagtctgctccctttgggttaccagccggtttgctcctcccatgcttaacctgatcacagatgtgagggactggcggacaaaatccaaaatggttccttattccaacaacgaagaataacaaagtgttatcttatggagatcaacgagcccgataacattggacatggaaacttttatcgtgaaggaggggtgaggattcagcccctccatcagctccc

SEQ ID NO: 24652 - DNA, 2619 bp, Muscodor strobelii
  misc_feature: SGI cDNA ID NO. 568407
  misc_feature: Reduced expression when VOC is produced
  misc_feature: Encodes the peptide sequence at SEQ ID NO 24653
atggacggggactacgggtggcacctgtcggcggcaatagcccctgatttgatcgggcgctaccgacagccgcctccaaagcgcaagaaacaagctgagcagggcaagaagtcgaaagctggagcagtacctgcaccacctgcaccagcagctaacaaggacaaggccaagcctcgcagcagggtagccaagttggccaaggccaagaagcactatccttccaacacaattgaacccacatctgaaatagtaggtgccgccgtctcgagctccaggtccccctccaaacccaagcccgaccagcccgaacctgagcccgctcgctcctcgccgccgccgccccctatcgcagccaccagcaccacgagcactggtagccccccgagtgctgctgctggccatccgacgaggcacgcgagagtgttcatcaccaacaccaccacccccagatcgccgcctcgcaccacccgcccggtcggaaccgattctcacgacgacggcaagcaacaactgactatcagcaatatcgtcgtcattgcgggcgagtgcacccaaccaagctctccaggcattggtaatagcaacgataacgacaaccacaacgatagcgattgcaacaagctagagtattatccggccgacgcggagagccgcaggaatagcaccatctccaaaagcagccggtctagctttggcgatcgcatccaccagcctctcctcttcgcgcggcccaaccatccacgccggacctcgtcgctggcaaaacagcactcaacccccccgccgccatcgcatcacgtcagagcctcctccggcgacgccagctccgcctccccgtacgcccctgcggcccatcatcagcatcagccatcgctgttgcattcgctgagacactccaatcggaaggaatcgattgagtcttcgaataccggtgccgctatctccacctcctccggatctaatcagagtgctacctccaagaagtctcgagtgaagagcccgccttcgagcaagtcactactgaaccaactcacgccggcgtacgcagccgatccgtcctcgtctccgcctgcatccccgcggcttccccatttcttcacccacagctcctcctcctccacgtctgcgaagaggctccacatccgggaccacttccacaggcacaattcccgagaacaatcaccccccgcatcaccatcacccagcatcgcgcccttaatttcatccgggagccaaggtgtacatgatcattatgaaagcatgtccgccaatcatggcccatttctcccagagtacgtcccatccgtagggagcgccgtatttaccaacatgtctggagtcatgacctccagcgagagcattggctctgccgtcgagaagacagggtccatcgcctcttcaaacgctacctctactgcttctagatccgtacccctaaatcctaaatcttactacattcgaaacaaccgcacatatatacacgagctctccgtgccttaccccttgcccgtcgacctcgcggaactccaccggcaatctctccgaacccttctcatgtttcagctttttggtggccctatactctccaccgcgttcgcaagcaaacctccattgcgggtcttggaggtcggttgcggcactggtttctggagcatgatgtgtcaccgttactttgcacaacatggccactcatccatatctttcaccggtatggatatcgtcccgctagccggggccgggaccgattctgaagctaagccggacaaggatatgcggtggcggttcgtggcccacgaccttcgaattttcccctggccttttgccgataacgagttcgatctcattatggccaaggacatgtctctctgctcgtcatttcgcgactcacaacccgtgatggatgagtatttgcgcattttgaagcctggaggtgtgcttgaatcctgggaaactgattctacgttccgcatgctgcggccacacggcccgcaaaatgcatcctcaacgacctttgacgttgactcgtcggatgacgatgaagaagaagaagaggatacggtgcaacggatgggcgcttacgtcatgacgacgaacacgcccatgagtgcaccgctcaactcatttctagtcgaatataacggctggtgtacgaagggcctagaagcacgtggtttgtctgctgtaccttgcggtctcatcggcgcgtatttacttcaggaggccgagtcgttgacagatgtcttctccaaaaggcttgcggtgccgttaagcgagatccgctgggagcgtgagggcgtaggtggtgttgtcacgaaagacggcaagacctacatcgactcgcagaaggggaagttccgagacgacgacctgagagggaaaggtgggaagacgttgacgacggcacaggcgagtcttaggaggacggcgctggagacaacggtgaatttcatattggcgctcgagccgatgttgagggatatcaatgggaagagtcaagaggagtgggatacgtgggccgggaagatgacgaatgatttgcttagggaagggggaacttcgtggggtgagtgtctggaggttgggtgttggacggctaggaagagacacaacaagacttga

SEQ ID NO: 24653 - protein, 872 aa, Muscodor strobelii
  misc_feature: SGI Peptide ID NO. 568407
  misc_feature (541)..(648): Pfam Id: PF08241 Pfam Desc: Methyltransferase domain
  misc_feature (444)..(868): NCBI GI: 256728575 Blast Desc: NECHADRAFT_101931 [Nectria haematococca mpVI 77-13-4]
  misc_feature (444)..(871): NCBI GI: 46110324 Blast Desc: FG02044.1 [Gibberella zeae PH-1]
  misc_feature (450)..(868): NCBI GI: 171692471 Blast Desc: protein product [Podospora anserina] gi|170946184|emb|CAP72985.1| protein product [Podospora anserina]
  misc_feature (479)..(868): NCBI GI: 39940894 Blast Desc: MGG_05359 [Magnaporthe grisea 70-15] gi|145021988|gb|EDK06008.1| MGG_05359 [Magnaporthe grisea 70-15]
  misc_feature (455)..(868): NCBI GI: 85091035 Blast Desc: NCU07784 [Neurospora crassa OR74A] gi|12718347|emb|CAC28582.1| [Neurospora crassa] gi|28920086|gb|EAA29469.1| [Neurospora crassa OR74A]
  misc_feature (484)..(872): NCBI GI: 156037770 Blast Desc: SS1G_12599 [Sclerotinia sclerotiorum 1980] gi|154698007|gb|EDN97745.1| SS1G_12599 [Sclerotinia sclerotiorum 1980]
  misc_feature (423)..(858): NCBI GI: 116198427 Blast Desc: CHGG_07369 [Chaetomium globosum CBS 148.51] gi|88178648|gb|EAQ86116.1| CHGG_07369 [Chaetomium globosum CBS 148.51]
  misc_feature (479)..(872): NCBI GI: 154304298 Blast Desc: BC1G_08419 [Botryotinia fuckeliana B05.10] gi|150854221|gb|EDN29413.1| BC1G_08419 [Botryotinia fuckeliana B05.10]
  misc_feature (487)..(868): NCBI GI: 226281061 Blast Desc: SAM binding motif containing protein [Paracoccidioides brasiliensis Pb01]
  misc_feature (487)..(868): NCBI GI: 226289940 Blast Desc: SAM binding motif containing protein [Paracoccidioides brasiliensis Pb18]
  misc_feature: Useful for introducing or modulating the production of volatile compounds
MDGDYGWHLSAAIAPDLIGRYRQPPPKRKKQAEQGKKSKAGAVPAPPAPAANKDKAKPRSRVAKLAKAKKHYPSNTIEPTSEIVGAAVSSSRSPSKPKPDQPEPEPARSSPPPPPIAATSTTSTGSPPSAAAGHPTRHARVFITNTTTPRSPPRTTRPVGTDSHDDGKQQLTISNIVVIAGECTQPSSPGIGNSNDNDNHNDSDCNKLEYYPADAESRRNSTISKSSRSSFGDRIHQPLLFARPNHPRRTSSLAKQHSTPPPPSHHVRASSGDASSASPYAPAAHHQHQPSLLHSLRHSNRKESIESSNTGAAISTSSGSNQSATSKKSRVKSPPSSKSLLNQLTPAYAADPSSSPPASPRLPHFFTHSSSSSTSAKRLHIRDHFHRHNSREQSPPASPSPSIAPLISSGSQGVHDHYESMSANHGPFLPEYVPSVGSAVFTNMSGVMTSSESIGSAVEKTGSIASSNATSTASRSVPLNPKSYYIRNNRTYIHELSVPYPLPVDLAELHRQSLRTLLMFQLFGGPILSTAFASKPPLRVLEVGCGTGFWSMMCHRYFAQHGHSSISFTGMDIVPLAGAGTDSEAKPDKDMRWRFVAHDLRIFPWPFADNEFDLIMAKDMSLCSSFRDSQPVMDEYLRILKPGGVLESWETDSTFRMLRPHGPQNASSTTFDVDSSDDDEEEEEDTVQRMGAYVMTTNTPMSAPLNSFLVEYNGWCTKGLEARGLSAVPCGLIGAYLLQEAESLTDVFSKRLAVPLSEIRWEREGVGGVVTKDGKTYIDSQKGKFRDDDLRGKGGKTLTTAQASLRRTALETTVNFILALEPMLRDINGKSQEEWDTWAGKMTNDLLREGGTSWGECLEVGCWTARKRHNKT

SEQ ID NO: 24654 - DNA, 6500 bp, Muscodor strobelii
  misc_feature: SGI EST ID NO. CUFF.58378.1
  misc_feature: Variant of the nucleotide sequence at SEQ ID NO 24652
gggagctgatggaggggctgaatcctcacccctccttcacgataaaagtttccatgtccaatgttatcgggctcgttgatctccataagataacactttgttattcttcgttgttggaataaggaaccattttggattttgtccgccagtccctcacatctgtgatcaggttaagcatgggaggagcaaaccggctggtaacccaaagggagcagactaacttcctctattcggtaacagccacaccgctcgttcatcatggttgatggtgctggtcattatcgtgttatataggtcgcattgacagcatttcggttctattacgaacattgacaaaagaagaagcatcaggagtgattatattttctctgatcaacttcagagagaagtactattcgtgtgcgtatctaaaggtatgcaactggccatgttgccacaggtgatctcctagtaggtgggaatctcaaatatgtttcctggtctcctggtagcatgaaatgatgaccttagatggacatctcttccatcagtctaatgtagttaccaagaggtgcctagcagcagcttcatccttcaaaagccaccgacttctagagtctcctacgatccccaaggattttcggcaacagtctcccctgggcactactcggattgtctcagaattctgtctcaatattttgatctagttgtcatgacagattcaagttgtaggatacacttttcacaacctgacagatatcctaatagttacaaagttgtaacctgaatgttctactatgccaatgttccacaagagcggaccgtttacccgatttattaatctatcgacctaccaccctcacacacccattaaactcgaagcattcggagccgagccatcaccgcatgtatctcagtcgcagcacactatcctcacctacaatcatattttagatcttgcagacgatggactattgcacgctgtgcctcatccccaataagcgaagctctctgccgaaggccgaaaattgaccgcaccaccgggttcccgatcttgtgactagaatcaccacttgagccatttcgttgtgatgcatcttgctaaacttaggaaccttacgtccataatgattaccgagagtctgggttgggttttatttatggcgttgaaataagagtctcggcgtgcatacaatgctgcctcgctagctatagattcatcaacgtagaccttggcagcatttgtcaaagacataaggttagatgtcgagaccagtttagtgttcccgagaagccgctccgattagcgagattccgtgatggagtcacgtcaccctatgcaagcgaccatatgcaagacggtaccgaagttatatgacagcagcactacccatgatgtgaccccgtttcaacgcgctggcgaagtccaacgtatgtttatgacggcatctcgccgctcgaaccagatcgagactttccctccggcttttgctgttcatatctgtttcaccggtgctgtgtacgaggtgcattatcacagataagttgtagactcctgacccagatcgcgaccaccacgagcagcttgagaggtaagtattttcaacttgagtggctggctaactaagagcccttagctctgcttcctttcccccatattgcaaaatatcctgcttaatgattgagtagcaagacaagagttcctagtgtcacgcggatggcgggagctccctagcaacgggccgaatcgcgaacgaacttcatatatggcagagacaaaaagcacagctagtcggcacactagccttggtttcacgaactccacgccagggtactgtcgccgaccaagaactgcagtaattgcaaccctataatgcgggggaaccggctagcgaccagggggtcttggttgcataatcttggtgtctatggttaccggtaagggcgagccaaacgctgtctcggctgtagccatgggggattgggccaaatatccagaaaaaggaccatggcatatttcgccatgcgaaagcgatctggattctaccaccaagcagagcttccatcctgagtcaaaggtggtacggcatagagtaggcggtatatagacgtagatagatccgcggcgcgtctcgcagcgcactttgaaatgaatatgctctgtttggcgttgttgatttctgctccatcaccctttatacagccggtcaagcgtatctcaagcagcgcggtatgcgcatctatcttgttgtgctgcgcaactcagggtcctcagaccccggcatggaccgaagtgcataatcaccgaacgagaccgcatgtcacgttgtaagccgaagtatggataaatgttgagatactcaaacagataaacaagcaacatcgcgattctttggtcgtaatgatacgcctaaagggctactcacttacacaaaaccatgatcagcaatagtttgctctggaaacaaaccacaacccgagatatcgaccttctgcttgggacataacggattacgtacaagaagagaaaatagcaacacaaggtctcttcgaacggtgccagcgccatcaggttacctccagttagatctggactgatacaaagaatttgaaataagttatatcagttttgtgtgccgtcttgtctcatggggtgaaagaggcaacagcaatcccaacctgcgcattggatagctgtattttcaaatcctggcgacggcattcagccaagagttcaacattggtattaggaccaaagcattagagttcgacaaggtggagagtgagagcctcggaaaccagaaacaaagtcgatgggaacttttgatggaatacacaaagtgctaggataaagaggaaactgaaaaccctggattgcgacttcgggaagcaaggcaggagaggttgaaagcaataagagccgaagcttacataccaacagatgagttatggtcgtgcaagacgtcaagtcaaaattagcagtggcgtacgaaacggttccatgcgactggatgccgtaaatcttggtcgtattcgctattcgtacaactgcagcaggtgacgacggggacgtatccgggcatacgcggccattgtcgcgggtgacctagcaggaccacaggctgcgagagaacaggagagcagaaaaagaaaagagaaaaaggaagaaagaggagatctatcagaaatacggattattttattacatgtaatttctcgatacctgtcgcaactgactcaggtacactatcaaaatggacggggactacgggtggcacctgtcggcggcaatagcccctgatttgatcgggcgctaccgacagccgcctccaaagcgcaagaaacaagctgagcagggcaagaagtcgaaagctggagcagtacctgcaccacctgcaccagcagctaacaaggacaaggccaagcctcgcagcagggtagccaagttggccaaggccaagaagcactatccttccaacacaattgaacccacatctgaaatagtaggtgccgccgtctcgagctccaggtccccctccaaacccaagcccgaccagcccgaacctgagcccgctcgctcctcgccgccgccgccccctatcgcagccaccagcaccacgagcactggtagccccccgagtgctgctgctggccatccgacgaggcacgcgagagtgttcatcaccaacaccaccacccccagatcgccgcctcgcaccacccgcccggtcggaaccgattctcacgacgacggcaagcaacaactgactatcagcaatatcgtcgtcattgcgggcgagtgcacccaaccaagctctccaggcattggtaatagcaacgataacgacaaccacaacgatagcgattgcaacaagctagagtattatccggccgacgcggagagccgcaggaatagcaccatctccaaaagcagccggtctagctttggcgatcgcatccaccagcctctcctcttcgcgcggcccaaccatccacgccggacctcgtcgctggcaaaacagcactcaacccccccgccgccatcgcatcacgtcagagcctcctccggcgacgccagctccgcctccccgtacgcccctgcggcccatcatcagcatcagccatcgctgttgcattcgctgagacactccaatcggaaggaatcgattgagtcttcgaataccggtgccgctatctccacctcctccggatctaatcagagtgctacctccaagaagtctcgagtgaagagcccgccttcgagcaagtcactactgaaccaactcacgccggcgtacgcagccgatccgtcctcgtctccgcctgcatccccgcggcttccccatttcttcacccacagctcctcctcctccacgtctgcgaagaggctccacatccgggaccacttccacaggcacaattcccgagaacaatcaccccccgcatcaccatcacccagcatcgcgcccttaatttcatccgggagccaaggtgtacatgatcattatgaaagcatgtccgccaatcatggcccatttctcccagagtacgtcccatccgtagggagcgccgtatttaccaacatgtctggagtcatgacctccagcgagagcattggctctgccgtcgagaagacagggtccatcgcctcttcaaacgctacctctactgcttctagatccgtacccctaaatcctaaatcttactacattcgaaacaaccgcacatatatacacgagctctccgtgccttaccccttgcccgtcgacctcgcggaactccaccggcaatctctccgaacccttctcatgtttcagctttttggtggccctatactctccaccgcgttcgcaagcaaacctccattgcgggtcttggaggtcggttgcggcactggtttctggagcatgatgtgtcaccgttactttgcacaacatggccactcatccatatctttcaccggtatggatatcgtcccgctagccggggccgggaccgattctgaagctaagccggacaaggatatgcggtggcggttcgtggcccacgaccttcgaattttcccctggccttttgccgataacgagttcgatctcattatggccaaggacatgtctctctgctcgtcatttcgcgactcacaacccgtgatggatgagtatttgcgcattttgaagcctggaggtgtgcttgaatcctgggaaactgattctacgttccgcatgctgcggccacacggcccgcaaaatgcatcctcaacgacctttgacgttgactcgtcggatgacgatgaagaagaagaagaggatacggtgcaacggatgggcgcttacgtcatgacgacgaacacgcccatgagtgcaccgctcaactcatttctagtcgaatataacggctggtgtacgaagggcctagaagcacgtggtttgtctgctgtaccttgcggtctcatcggcgcgtatttacttcaggaggccgagtcgttgacagatgtcttctccaaaaggcttgcggtgccgttaagcgagatccgctgggagcgtgagggcgtaggtggtgttgtcacgaaagacggcaagacctacatcgactcgcagaaggggaagttccgagacgacgacctgagagggaaaggtgggaagacgttgacgacggcacaggcgagtcttaggaggacggcgctggagacaacggtgaatttcatattggcgctcgagccgatgttgagggatatcaatgggaagagtcaagaggagtgggatacgtgggccgggaagatgacgaatgatttgcttagggaagggggaacttcgtggggtgagtgtctggaggttgggtgttggacggctaggaagagacacaacaagacttgagcgggcagtttgttagggggctgagtatcgttttcgcagggtgcggtagcgcttcaggtagtatctagagggagtggttgtttgtgtcagttgggtttggattaaccgagaaatgcacagcatgcgagcatgaagcaatttggtaccatagtacaaagtcggggggactgggttttgcatataaagtttctttttttcccctctgatgttactaaagcagattgtgtggttttttgaggtgcttgaggatatgccctggttggctggtgaggggagtcttttcttgaatatattttcttagagaggtgctttttgcacttttacagtcggaatgggattgatatataagcagttcgaattttgagttgagattgaagagaacaaagacagatacggcactgggactgagagtgttaaattcatgacttggacttacagagcttcgatttctgcgagtttgcgggtttgttagctaccgccaattcatatgaggcgaagaggcttaggcattacagcgataggaagtagctacgaaccttttttgacgaactcagcgcgtgatattccctttctgatctcgtcttcgtcccgttgtgaggcattggacatgaaggctcggtgcagacgtgggcggaaatatgagaagcc

SEQ ID NO: 24655 - DNA, 774 bp, Muscodor strobelii
  misc_feature: SGI cDNA ID NO. 568408
  misc_feature: Encodes the peptide sequence at SEQ ID NO 24656
atggccaaggacatgtctctctgctcgtcatttcgcgactcacaacccgtgatggatgagtatttgcgcattttgaagcctggaggtgtgcttgaatcctgggaaactgattctacgttccgcatgctgcggccacacggcccgcaaaatgcatcctcaacgacctttgacgttgactcgtcggatgacgatgaagaagaagaagaggatacggtgcaacggatgggcgcttacgtcatgacgacgaacacgcccatgagtgcaccgctcaactcatttctagtcgaatataacggctggtgtacgaagggcctagaagcacgtggtttgtctgctgtaccttgcggtctcatcggcgcgtatttacttcaggaggccgagtcgttgacagatgtcttctccaaaaggcttgcggtgccgttaagcgagatccgctgggagcgtgagggcgtaggtggtgttgtcacgaaagacggcaagacctacatcgactcgcagaaggggaagttccgagacgacgacctgagagggaaaggtgggaagacgttgacgacggcacaggcgagtcttaggaggacggcgctggagacaacggtgaatttcatattggcgctcgagccgatgttgagggatatcaatgggaagagtcaagaggagtgggatacgtgggccgggaagatgacgaatgatttgcttagggaagggggaacttcgtggggtgagtgtctggaggttgggtgttggacggctaggaagagacacaacaagacttga

SEQ ID NO: 24656 - protein, 257 aa, Muscodor strobelii
  misc_feature: SGI Peptide ID NO. 568408
  misc_feature (1)..(253): NCBI GI: 85091035 Blast Desc: NCU07784 [Neurospora crassa OR74A] gi|12718347|emb|CAC28582.1| [Neurospora crassa] gi|28920086|gb|EAA29469.1| [Neurospora crassa OR74A]
  misc_feature (1)..(253): NCBI GI: 256728575 Blast Desc: NECHADRAFT_101931 [Nectria haematococca mpVI 77-13-4]
  misc_feature (1)..(253): NCBI GI: 171692471 Blast Desc: protein product [Podospora anserina] gi|170946184|emb|CAP72985.1| protein product [Podospora anserina]
  misc_feature (1)..(256): NCBI GI: 46110324 Blast Desc: FG02044.1 [Gibberella zeae PH-1]
  misc_feature (17)..(253): NCBI GI: 39940894 Blast Desc: MGG_05359 [Magnaporthe grisea 70-15] gi|145021988|gb|EDK06008.1| MGG_05359 [Magnaporthe grisea 70-15]
  misc_feature (1)..(257): NCBI GI: 156037770 Blast Desc: SS1G_12599 [Sclerotinia sclerotiorum 1980] gi|154698007|gb|EDN97745.1| SS1G_12599 [Sclerotinia sclerotiorum 1980]
  misc_feature (1)..(243): NCBI GI: 116198427 Blast Desc: CHGG_07369 [Chaetomium globosum CBS 148.51] gi|88178648|gb|EAQ86116.1| CHGG_07369 [Chaetomium globosum CBS 148.51]
  misc_feature (1)..(257): NCBI GI: 154304298 Blast Desc: BC1G_08419 [Botryotinia fuckeliana B05.10] gi|150854221|gb|EDN29413.1| BC1G_08419 [Botryotinia fuckeliana B05.10]
  misc_feature (3)..(253): NCBI GI: 261205706 Blast Desc: SAM binding domain-containing protein containing protein [Ajellomyces dermatitidis SLH14081] gi|239592649|gb|EEQ75230.1| SAM binding domain-containing protein
  misc_feature (3)..(253): NCBI GI: 239611199 Blast Desc: SAM binding domain-containing protein containing protein [Ajellomyces dermatitidis ER-3]
MAKDMSLCSSFRDSQPVMDEYLRILKPGGVLESWETDSTFRMLRPHGPQNASSTTFDVDSSDDDEEEEEDTVQRMGAYVMTTNTPMSAPLNSFLVEYNGWCTKGLEARGLSAVPCGLIGAYLLQEAESLTDVFSKRLAVPLSEIRWEREGVGGVVTKDGKTYIDSQKGKFRDDDLRGKGGKTLTTAQASLRRTALETTVNFILALEPMLRDINGKSQEEWDTWAGKMTNDLLREGGTSWGECLEVGCWTARKRHNKT

SEQ ID NO: 24657 - DNA, 6500 bp, Muscodor strobelii; identical to SEQ ID NO: 24654
  misc_feature: SGI EST ID NO. CUFF.58378.1
  misc_feature: Variant of the nucleotide sequence at SEQ ID NO 24655

SEQ ID NO: 24658 - DNA, 1290 bp, Muscodor strobelii
  misc_feature: SGI cDNA ID NO. 568409
  misc_feature: Elevated expression when VOC is produced
  misc_feature: Encodes the peptide sequence at SEQ ID NO 24659
atgtctggagtcatgacctccagcgagagcattggctctgccgtcgagaagacagggtccatcgcctcttcaaacgctacctctactgcttctagatccgtacccctaaatcctaaatcttactacattcgaaacaaccgcacatatatacacgagctctccgtgccttaccccttgcccgtcgacctcgcggaactccaccggcaatctctccgaacccttctcatgtttcagctttttggtggccctatactctccaccgcgttcgcaagcaaacctccattgcgggtcttggaggtcggttgcggcactggtttctggagcatgatgtgtcaccgttactttgcacaacatggccactcatccatatctttcaccggtatggatatcgtcccgctagccggggccgggaccgattctgaagctaagccggacaaggatatgcggtggcggttcgtggcccacgaccttcgaattttcccctggccttttgccgataacgagttcgatctcattatggccaaggacatgtctctctgctcgtcatttcgcgactcacaacccgtgatggatgagtatttgcgcattttgaagcctggaggtgtgcttgaatcctgggaaactgattctacgttccgcatgctgcggccacacggcccgcaaaatgcatcctcaacgacctttgacgttgactcgtcggatgacgatgaagaagaagaagaggatacggtgcaacggatgggcgcttacgtcatgacgacgaacacgcccatgagtgcaccgctcaactcatttctagtcgaatataacggctggtgtacgaagggcctagaagcacgtggtttgtctgctgtaccttgcggtctcatcggcgcgtatttacttcaggaggccgagtcgttgacagatgtcttctccaaaaggcttgcggtgccgttaagcgagatccgctgggagcgtgagggcgtaggtggtgttgtcacgaaagacggcaagacctacatcgactcgcagaaggggaagttccgagacgacgacctgagagggaaaggtgggaagacgttgacgacggcacaggcgagtcttaggaggacggcgctggagacaacggtgaatttcatattggcgctcgagccgatgttgagggatatcaatgggaagagtcaagaggagtgggatacgtgggccgggaagatgacgaatgatttgcttagggaagggggaacttcgtggggtgagtgtctggaggttgggtgttggacggctaggaagagacacaacaagacttga

SEQ ID NO: 24659 - protein, 429 aa, Muscodor strobelii
  misc_feature: SGI Peptide ID NO. 568409
  misc_feature (98)..(205): Pfam Id: PF08241 Pfam Desc: Methyltransferase domain
  misc_feature (1)..(425): NCBI GI: 256728575 Blast Desc: NECHADRAFT_101931 [Nectria haematococca mpVI 77-13-4]
  misc_feature (1)..(428): NCBI GI: 46110324 Blast Desc: FG02044.1 [Gibberella zeae PH-1]
  misc_feature (7)..(425): NCBI GI: 171692471 Blast Desc: protein product [Podospora anserina] gi|170946184|emb|CAP72985.1| protein product [Podospora anserina]
  misc_feature (36)..(425): NCBI GI: 39940894 Blast Desc: MGG_05359 [Magnaporthe grisea 70-15] gi|145021988|gb|EDK06008.1| MGG_05359 [Magnaporthe grisea 70-15]
  misc_feature (12)..(425): NCBI GI: 85091035 Blast Desc: NCU07784 [Neurospora crassa OR74A] gi|12718347|emb|CAC28582.1| [Neurospora crassa] gi|28920086|gb|EAA29469.1| [Neurospora crassa OR74A]
  misc_feature (39)..(429): NCBI GI: 156037770 Blast Desc: SS1G_12599 [Sclerotinia sclerotiorum 1980] gi|154698007|gb|EDN97745.1| SS1G_12599 [Sclerotinia sclerotiorum 1980]
  misc_feature (6)..(415): NCBI GI: 116198427 Blast Desc: CHGG_07369 [Chaetomium globosum CBS 148.51] gi|88178648|gb|EAQ86116.1| CHGG_07369 [Chaetomium globosum CBS 148.51]
  misc_feature (39)..(429): NCBI GI: 154304298 Blast Desc: BC1G_08419 [Botryotinia fuckeliana B05.10] gi|150854221|gb|EDN29413.1| BC1G_08419 [Botryotinia fuckeliana B05.10]
  misc_feature (44)..(425): NCBI GI: 226281061 Blast Desc: SAM binding motif containing protein [Paracoccidioides brasiliensis Pb01]
  misc_feature (44)..(425): NCBI GI: 226289940 Blast Desc: SAM binding motif containing protein [Paracoccidioides brasiliensis Pb18]
  misc_feature: Useful for introducing or modulating the production of volatile compounds
MSGVMTSSESIGSAVEKTGSIASSNATSTASRSVPLNPKSYYIRNNRTYIHELSVPYPLPVDLAELHRQSLRTLLMFQLFGGPILSTAFASKPPLRVLEVGCGTGFWSMMCHRYFAQHGHSSISFTGMDIVPLAGAGTDSEAKPDKDMRWRFVAHDLRIFPWPFADNEFDLIMAKDMSLCSSFRDSQPVMDEYLRILKPGGVLESWETDSTFRMLRPHGPQNASSTTFDVDSSDDDEEEEEDTVQRMGAYVMTTNTPMSAPLNSFLVEYNGWCTKGLEARGLSAVPCGLIGAYLLQEAESLTDVFSKRLAVPLSEIRWEREGVGGVVTKDGKTYIDSQKGKFRDDDLRGKGGKTLTTAQASLRRTALETTVNFILALEPMLRDINGKSQEEWDTWAGKMTNDLLREGGTSWGECLEVGCWTARKRHNKT

SEQ ID NO: 24660 - DNA, 6500 bp, Muscodor strobelii; identical to SEQ ID NO: 24654
  misc_feature: SGI EST ID NO. CUFF.58378.1
  misc_feature: Variant of the nucleotide sequence at SEQ ID NO 24658

SEQ ID NO: 24661 - DNA, 2100 bp, Muscodor strobelii
  misc_feature: SGI cDNA ID NO. 568410
  misc_feature: Reduced expression when VOC is produced
  misc_feature: Encodes the peptide sequence at SEQ ID NO 24662
atgtatcaacacaataatcagcaggggcacaattcgcgcctgaatggtgtccctgggggtgcgaggatgcagatgatgtacaactacgcgcagccccagggaggccacggtcaccatactcatccgcaacagcacaaccacgcactccagcaggaccatgccaaccacaatgtcacaccaggcgccataaaccactccggctattcctctggtcttggtcctaatgtatccccttttacccctaacaaccaccagaatggcgcaacccctggatcccgtgctggacaaggccaacaacagttcagcaaatcctgggaggagcagctcaaggcattcaaggaatcggagcgtgccaaccagctcatgatcgaccagcaccagcagcactactatgcccggagcaaggcgtcggagaacaaaggtatcggcatgcctacgaacaatgcccagagcgagagtgcggatggtgaacaagaggagagaggtcggcccgttaatgtcgataaggcgctagataggcaagactggctcatgcttgacatgagcggccaggggctgaagaacgtctctggcccattcttcgactaccaattcctcaccgaggtttacctatcctctaatcagctcactgtgcttcccaaggccatcgggcagcttcgctccctccgcctgctggatgtctcccataaccaattgacccacctacctgcagagctgggcatgtgtacacctttgcgccagctactcctattcaacaatatgattcgtgacatccctgtcgagttgggcgccctccatttcctggagatgcttggcattcaaggaaatccattagaccaagaggtcaaggccaagatcatggaggacggaacaaaggaattcatcaactacctgaaggaaaacgctccagtacctatgccccccagcccacgtgtgcctatcacgattcaggaggacgttggctcagagaaggagcgtatccgggtcctgtcttggaacaccctgtgcgaatactacaccacgagctcgctctacgggtacacgcctgccaatgctctgtcttgggattaccggaaggacagcatcatgcaagagcttcatgacaagcaggccgatattctctgtctacaggagacggctatggatgcattcgacaactactttgctcccgaactcgccaaaaagggctacaagggagtattctaccccaagactcgctacaagcacatgtcaagcaaagaccagcagctagtggacggatgctctatcttttacaacagcgacaagtacatgatgctcgacaagcagctgattgacttcaggcagacagcgatcaacaggccggatatgaagtccgcagatgacgtcttcaaccgtgtgatgccaaaggataccatcgctgtctattgcttcttcgagtcacgtttcacagggaaccgcttcatcattgtgaatgcgcacctctgctgggagtctttcttacccgacgtcaaggccgtacaaaccggtatcctcatggagcttgtgacgaaacaggctgagagatatgcacggagacctgctatccctatcgaggagaagaggatcaccaagtcctttgctgacgatgctccagaggacatagagtttcctgaccctgctcctagccaagagtacagaaacaatactgatattcctttgcttctgtgcggagattacaactcaatgcgcgacagctcggtctacgagttactcgagaagggccggataccaccggaccacccggatcttctcggccactcgtacggtaatttcacgcgcgacggtattgagcatccctttagcctccggaactcttacgcccacttgtttggaacccctgatgagctcacctttaccaactatacgcctactttctctggcgtgttggactacatctggtactcgactaatgctctggaccttgtcgagctcttgggccctcccgacatggagtatctgaagcgtgttcctggcttccccaattatcacttcccttcggatcatatccagatcatgggcgaatttgtgttcaagtccaagagggagcgcaaggccgttgatcacggccgagcggactga

SEQ ID NO: 24662 - protein, 699 aa, Muscodor strobelii
  misc_feature: SGI Peptide ID NO. 568410
  misc_feature (327)..(682): Pfam Id: PF03372 Pfam Desc: Endonuclease/Exonuclease/phosphatase family
  misc_feature (1)..(692): NCBI GI: 164423882 Blast Desc: NCU07779 [Neurospora crassa OR74A] gi|157070271|gb|EAA29464.2| conserved [Neurospora crassa OR74A]
  misc_feature (1)..(691): NCBI GI: 256728749 Blast Desc: [Nectria haematococca mpVI 77-13-4]
  misc_feature (1)..(692): NCBI GI: 12718343 Blast Desc: related to CCR4 protein [Neurospora crassa]
  misc_feature (1)..(691): NCBI GI: 46110322 Blast Desc: FG02043.1 [Gibberella zeae PH-1]
  misc_feature (1)..(691): NCBI GI: 145615065 Blast Desc: MGG_13020 [Magnaporthe grisea 70-15] gi|145021989|gb|EDK06009.1| MGG_13020 [Magnaporthe grisea 70-15]
  misc_feature (1)..(693): NCBI GI: 261360921 Blast Desc: glucose-repressible alcohol dehydrogenase transcriptional effector [Verticillium albo-atrum VaMs.102]
  misc_feature (1)..(693): NCBI GI: 171692469 Blast Desc: protein product [Podospora anserina] gi|170946183|emb|CAP72984.1| protein product [Podospora anserina]
  misc_feature (75)..(691): NCBI GI: 156037768 Blast Desc: SS1G_12598 [Sclerotinia sclerotiorum 1980] gi|154698006|gb|EDN97744.1| SS1G_12598 [Sclerotinia sclerotiorum 1980]
  misc_feature (5)..(691): NCBI GI: 154304302 Blast Desc: BC1G_08421 [Botryotinia fuckeliana B05.10] gi|150854223|gb|EDN29415.1| BC1G_08421 [Botryotinia fuckeliana B05.10]
  misc_feature (62)..(696): NCBI GI: 238838574 Blast Desc: glucose-repressible alcohol dehydrogenase transcriptional effector [Microsporum canis CBS 113480]
  misc_feature (1)..(692): SWISSPROT Homolog: EC 3.1.13.4 Poly(A)-specific ribonuclease
  misc_feature: Useful for introducing or modulating the production of volatile compounds
MYQHNNQQGHNSRLNGVPGGARMQMMYNYAQPQGGHGHHTHPQQHNHALQQDHANHNVTPGAINHSGYSSGLGPNVSPFTPNNHQNGATPGSRAGQGQQQFSKSWEEQLKAFKESERANQLMIDQHQQHYYARSKASENKGIGMPTNNAQSESADGEQEERGRPVNVDKALDRQDWLMLDMSGQGLKNVSGPFFDYQFLTEVYLSSNQLTVLPKAIGQLRSLRLLDVSHNQLTHLPAELGMCTPLRQLLLFNNMIRDIPVELGALHFLEMLGIQGNPLDQEVKAKIMEDGTKEFINYLKENAPVPMPPSPRVPITIQEDVGSEKERIRVLSWNTLCEYYTTSSLYGYTPANALSWDYRKDSIMQELHDKQADILCLQETAMDAFDNYFAPELAKKGYKGVFYPKTRYKHMSSKDQQLVDGCSIFYNSDKYMMLDKQLIDFRQTAINRPDMKSADDVFNRVMPKDTIAVYCFFESRFTGNRFIIVNAHLCWESFLPDVKAVQTGILMELVTKQAERYARRPAIPIEEKRITKSFADDAPEDIEFPDPAPSQEYRNNTDIPLLLCGDYNSMRDSSVYELLEKGRIPPDHPDLLGHSYGNFTRDGIEHPFSLRNSYAHLFGTPDELTFTNYTPTFSGVLDYIWYSTNALDLVELLGPPDMEYLKRVPGFPNYHFPSDHIQIMGEFVFKSKRERKAVDHGRAD

SEQ ID NO: 24663 - DNA, 3848 bp, Muscodor strobelii
  misc_feature: SGI EST ID NO. CUFF.58657.1
  misc_feature: Variant of the nucleotide sequence at SEQ ID NO 24661
agcagatatcacgtgctggcaaggctgtcatggggcacggtgtagcacgtacctagcgccgcttgctcgtgaaggggcaagccggagaggctgggcagttggacgcgggcgagcattcgatgtaccacgtccaagacacctcggccgccgttgaatcgacacgatttgcacaacaatacaacaccgccgaacacaatcaccacaatgatcgctgtctattccgacgcagagctatctcacactcgttattagaccgagatatcattgggccgcattcaataccagcacttttatccaaccatatgccaccatcaatgcaatgaccgtccaatgaccacccggacaccaccgccgccaacgccaagcacgagtgcaagaactgcaccgtccacctcatagcttgctatcacaactgcttgctcttttttgttccaatccaacattcaattcacatcatcgcacgtgtactgcatccgatctcgacccgcccccagagccagcaccagcagacggtccgggcctgtcgccatccttggctccgcttcgagcttatcaggacagatcgcgcaagctctgattcacagtctcccattcaatctatcgtgactaacgcttgaaacccacccttgaatggcccgacctgtcattcatccaccagcatatcataaacagcattgacaccgcattgccctcccatcctcaatgctcagcgaacccagacaacccgcagtatagacaccaacaccagtcccaacgattccaataagtcttccgattccaacaggcacactcgcgtccctcatcctctcccacctccgtcctcaactgtcgacacctctgcccaacagtcgcaacgctcatgcagccgtccagccaagctcgaatctcaatgtgccgcaaaccaaacgacgaccgactgctcctcgcctccgcgcatcttacaccctccatccccgtaactgatctggccccgcatcaacctgtgtgggagagtccagcatcttagaggcgctcccggcaaaacatcactacctcattcctcgccgatggacttgccccctggctggcgttctttcctagcataactatttcaacgcacgccgcgcgcttccaacccaatccaaaccagttacaaacacctcatcttctgtccaatcttccacaccgttttcaagtccaagacactcatacaagcaaccccagtgtcccgattcaacaggcttccaactgcatttcgagcacgccgtaagcatgtatcaacacaataatcagcaggggcacaattcgcgcctgaatggtgtccctgggggtgcgaggatgcagatgatgtacaactacgcgcagccccagggaggccacggtcaccatactcatccgcaacagcacaaccacgcactccagcaggaccatgccaaccacaatgtcacaccaggcgccataaaccactccggctattcctctggtcttggtcctaatgtatccccttttacccctaacaaccaccagaatggcgcaacccctggatcccgtgctggacaaggccaacaacagttcagcaaatcctgggaggagcagctcaaggcattcaaggaatcggagcgtgccaaccagctcatgatcgaccagcaccagcagcactactatgcccggagcaaggcgtcggagaacaaaggtatcggcatgcctacgaacaatgcccagagcgagagtgcggatggtgaacaagaggagagaggtcggcccgttaatgtcgataaggcgctagataggcaagactggctcatgcttgacatgagcggccaggggctgaagaacgtctctggcccattcttcgactaccaattcctcaccgaggtttacctatcctctaatcagctcactgtgcttcccaaggccatcgggcagcttcgctccctccgcctgctggatgtctcccataaccaattgacccacctacctgcagagctgggcatgtgtacacctttgcgccagctactcctattcaacaatatgattcgtgacatccctgtcgagttgggcgccctccatttcctggagatgcttggcattcaaggaaatccattagaccaagaggtcaaggccaagatcatggaggacggaacaaaggaattcatcaactacctgaaggaaaacgctccagtacctatgccccccagcccacgtgtgcctatcacgattcaggaggacgttggctcagagaaggagcgtatccgggtcctgtcttggaacaccctgtgcgaatactacaccacgagctcgctctacgggtacacgcctgccaatgctctgtcttgggattaccggaaggacagcatcatgcaagagcttcatgacaagcaggccgatattctctgtctacaggagacggctatggatgcattcgacaactactttgctcccgaactcgccaaaaagggctacaagggagtattctaccccaagactcgctacaagcacatgtcaagcaaagaccagcagctagtggacggatgctctatcttttacaacagcgacaagtacatgatgctcgacaagcagctgattgacttcaggcagacagcgatcaacaggccggatatgaagtccgcagatgacgtcttcaaccgtgtgatgccaaaggataccatcgctgtctattgcttcttcgagtcacgtttcacagggaaccgcttcatcattgtgaatgcgcacctctgctgggagtctttcttacccgacgtcaaggccgtacaaaccggtatcctcatggagcttgtgacgaaacaggctgagagatatgcacggagacctgctatccctatcgaggagaagaggatcaccaagtcctttgctgacgatgctccagaggacatagagtttcctgaccctgctcctagccaagagtacagaaacaatactgatattcctttgcttctgtgcggagattacaactcaatgcgcgacagctcggtctacgagttactcgagaagggccggataccaccggaccacccggatcttctcggccactcgtacggtaatttcacgcgcgacggtattgagcatccctttagcctccggaactcttacgcccacttgtttggaacccctgatgagctcacctttaccaactatacgcctactttctctggcgtgttggactacatctggtactcgactaatgctctggaccttgtcgagctcttgggccctcccgacatggagtatctgaagcgtgttcctggcttccccaattatcacttcccttcggatcatatccagatcatgggcgaatttgtgttcaagtccaagagggagcgcaaggccgttgatcacggccgagcggactgagtgcagggaagtcactttcatctcgagacaccagacggaagaaggatgctctacgatatagcgtaagaaggagatattgaccttggcctacggcggattggtcacatgtacatgaacgaatgaatggatgcagcgaatcttttctcatactctgaggatggtttgtttggtcggggcatctggattggacatctcagacggcggttttcggaaggagtcggagggctcaatttcgcgttctctcgacttttcgtacctgtcttttccgttcaatgcagtatttggcgttatcaagtatactgtactgtagctgtttctgaagttttctataacgccaaacgataagctgccatgtcgcagttgtttgccacttaacccttccggccttcccttattctaatctgattatgtgatatgaactgtgcatgcactggattagacggaaaataattgagccttccaatgttggattcagtgacatgagatattcaactaaa

SEQ ID NO: 24664 - DNA, 1059 bp, Muscodor strobelii
  misc_feature: SGI cDNA ID NO. 568411
  misc_feature: Encodes the peptide sequence at SEQ ID NO 24665
atggctaagaccgagatcccacgaaccgtccactggaatgggaaggatgtccccgtctaccctatgcagtcgttcgacttcagcagactcctttcccaggagccggctgagctcgagagacttgtccactgctgccagactgagggatacttctacattgatctgcaaaacatcgatggtcgtcgattcctcgaggaccagcaggagacgttgaagcttatgcatcgcttctttgagcagccccttgaagcgaagaacgagtttgggcttgttgcgccccatcttggctacgagcctgttggttctcgaactggcgttcttgcgaatactaaggatggatatgagatgatcaaggtctctcgcgatgagatccaaaaggattctccccatctcccagccgtcctgaagaccagcccagacatgaaggtcctcgagaacgccatcgcagggtccaacataatcaccaaggcgatcctctccgctctctcaaccggaagcggtctacaaggcgcttctcgctttgagaacaaccaccgcaacgagcgcccctcaaccagcaccctagcgatgatgcactacatcccgtccgacccgcgaaaggacgccaacatcggccaccaaaagcacaccgatatctcctccctcacgctgctcttctccgagcaatggggcatgcaggtccgacccccgggagccaaggaattcggcttcgtcgagccacgacccggcacagccgtcgtcaacgtcggggactccctgcgcttcgcgtctgaccacactttccagtcttgcatccaccgcgttgtgccatttgactataccgagcaccgatactcgattgcgtacttcctccgcgctgagaacgacacgatgttcactgattctgagggccgatacattaccgctggccagtggcatgacgagaaattctttgctttcactaacccgcctgagtggcaggctcttgctcctacctctatgattctgggtggtatgacggaggaaggtgttgatgagcctgagggtattcggaaggagaatgctgttgaggcttattag

SEQ ID NO: 24665 - protein, 352 aa, Muscodor strobelii
  misc_feature: SGI Peptide ID NO. 568411
  misc_feature (185)..(286): Pfam Id: PF03171 Pfam Desc: 2OG-Fe(II) oxygenase superfamily
  misc_feature (1)..(340): NCBI GI: 39940200 Blast Desc: MGG_05140 [Magnaporthe grisea 70-15] gi|145010603|gb|EDJ95259.1| MGG_05140 [Magnaporthe grisea 70-15]
  misc_feature (7)..(340): NCBI GI: 261358031 Blast Desc: conserved [Verticillium albo-atrum VaMs.102]
  misc_feature (4)..(342): NCBI GI: 169608552 Blast Desc: SNOG_07358 [Phaeosphaeria nodorum SN15] gi|111063704|gb|EAT84824.1| SNOG_07358 [Phaeosphaeria nodorum SN15]
  misc_feature (4)..(343): NCBI GI: 116200933 Blast Desc: CHGG_08351 [Chaetomium globosum CBS 148.51] gi|88176869|gb|EAQ84337.1| CHGG_08351 [Chaetomium globosum CBS 148.51]
  misc_feature (4)..(298): NCBI GI: 189202228 Blast Desc: conserved [Pyrenophora tritici-repentis Pt-1C-BFP] gi|187984549|gb|EDU50037.1| conserved [Pyrenophora tritici-repentis Pt-1C-BFP]
  misc_feature (4)..(343): NCBI GI: 171685308 Blast Desc: protein product [Podospora anserina] gi|170942615|emb|CAP68267.1| protein product [Podospora anserina]
  misc_feature (15)..(335): NCBI GI: 46127407 Blast Desc: FG08081.1 [Gibberella zeae PH-1]
  misc_feature (22)..(313): NCBI GI: 238507652 Blast Desc: gibberellin 20-oxidase family protein [Aspergillus flavus NRRL3357] gi|220688546|gb|EED44898.1| gibberellin 20-oxidase family protein [Aspergillus flavus NRRL3357]
  misc_feature (22)..(335): NCBI GI: 256721263 Blast Desc: NECHADRAFT_44650 [Nectria haematococca mpVI 77-13-4]
  misc_feature (30)..(335): NCBI GI: 154311343 Blast Desc: BC1G_06524 [Botryotinia fuckeliana B05.10] gi|150850921|gb|EDN26114.1| BC1G_06524 [Botryotinia fuckeliana B05.10]
  misc_feature (16)..(283): SWISSPROT Homolog: EC 1.14.11.9 Flavanone 3-dioxygenase
MAKTEIPRTVHWNGKDVPVYPMQSFDFSRLLSQEPAELERLVHCCQTEGYFYIDLQNIDGRRFLEDQQETLKLMHRFFEQPLEAKNEFGLVAPHLGYEPVGSRTGVLANTKDGYEMIKVSRDEIQKDSPHLPAVLKTSPDMKVLENAIAGSNIITKAILSALSTGSGLQGASRFENNHRNERPSTSTLAMMHYIPSDPRKDANIGHQKHTDISSLTLLFSEQWGMQVRPPGAKEFGFVEPRPGTAVVNVGDSLRFASDHTFQSCIHRVVPFDYTEHRYSIAYFLRAENDTMFTDSEGRYITAGQWHDEKFFAFTNPPEWQALAPTSMILGGMTEEGVDEPEGIRKENAVEAY

SEQ ID NO: 24666 - DNA, 1680 bp, Muscodor strobelii
  misc_feature: SGI cDNA ID NO. 568412
  misc_feature: Encodes the peptide sequence at SEQ ID NO 24667
atggcttcgcaacaactcgcaatcgccaaagtggccttctcggccgtgctgctgcgcgcagacccgacctcgtgcccgcgcaccgagatcgacagcttcctcgcccagctcgacgcgaccgtctcgcgatgctccccgcccaatgtccagaaatgcaagcaatggatcactgcgaacctggctccttcgcccgctagagtcaccgcactcggcaagtatctcgtcgccctcgccaactcttactcgtccgacctggctgcctcgcgagcggcacgtgagaccccagccaagcgcaagcgtctgcatcttctctatgtcctgaacgacgtgctctaccaggtccatgtccgggaccgggatcgtcgctttgctacaaatcttgaggccgctttgccgagtctattccagagtgctgctgccttcgagaacagccccaaacacaccaaaaggctctacactttactcgacatctgggacgagaacaagtactactcttctgacttcaccaccaagctccgtaaagctgttcaagaaggaccgaaagcacgagattctcctacacagggcaatggcattgcaaacggctctgcagactcgacagcaagatctgctaaggatgccccttgggtcttacccacaatgcatggcgatgtcacagctccgtggtacgacctcccagcagccaattggctccccgtcattgagccaaactctacgagaccaatgaaccccgatatgatcaagccgctacagttttcctcagggccggttgaaaagcaccttatcaaagccgtcgaggatctgctagccgacgtagatcggatttacgcgggggagactatcatcaccgacagtcgtaccgaagacatcgaccagttaggacagcgcgtggttcgtgatgaaatcacgggggaaatcataggcggagatacatactacggctggtcccgtcccttttgcaacaagatgaagcgacgtgccaagaagggaccgcagagcagcagcagcaacggacgtggacgaagcatgtcgcgttcggtatcccgttcaccctcacgatcgcggagttcatctagaggctcatctcgtccggctttcaagcgccgtcgtatttcagcatcaccagatacgagacaagctcgcagtcgtggccgcacccgaagccgtagcaggactcgcagtagcagtcgcagtagtcgcagcaaaagctatgatcatcagcggccgagatcttatagtcgccggcgtagcatgtcgagatcgagatcgagatcacgttcacgaagtcggaatagagatcctttacagactcattctaggccaccaaataatttgccgcaaccacctcaattccataaccagaaccagaaccagttcatgccgcagaactttcaaccaaacttcaacaacaaattccctgtaccgccgcctccccctccacctaattactcgggtccttggcctcctccgcctcctcctttaccgcctaatttcatgccacccatgccaaatcctcacgcaaacgctggagggggtggatgggttcctcctccgcctgggggtagtgggtacgggcagtcaggcggtggtggtggttatggccagtatggtcgaggtcgtggtgattaccgcggtggctatcgtggaggacgcggtggaaatcgaggacgcggctggtga

SEQ ID NO: 24667 - protein, 559 aa, Muscodor strobelii
  misc_feature: SGI Peptide ID NO. 568412
  misc_feature (1)..(375): NCBI GI: 116198173 Blast Desc: CHGG_07242 [Chaetomium globosum CBS 148.51] gi|88178521|gb|EAQ85989.1| CHGG_07242 [Chaetomium globosum CBS 148.51]
  misc_feature (1)..(371): NCBI GI: 261355508 Blast Desc: conserved [Verticillium albo-atrum VaMs.102]
  misc_feature (1)..(333): NCBI GI: 39944020 Blast Desc: MGG_04021 [Magnaporthe grisea 70-15] gi|145014743|gb|EDJ99311.1| MGG_04021 [Magnaporthe grisea 70-15]
  misc_feature (3)..(376): NCBI GI: 85101619 Blast Desc: NCU03790 [Neurospora crassa OR74A] gi|16944691|emb|CAD11415.1| [Neurospora crassa] gi|28922720|gb|EAA31943.1| [Neurospora crassa OR74A]
  misc_feature (1)..(401): NCBI GI: 256731133 Blast Desc: NECHADRAFT_96400 [Nectria haematococca mpVI 77-13-4]
  misc_feature (1)..(473): NCBI GI: 154319001 Blast Desc: BC1G_02452 [Botryotinia fuckeliana B05.10] gi|150856883|gb|EDN32075.1| BC1G_02452 [Botryotinia fuckeliana B05.10]
  misc_feature (1)..(388): NCBI GI: 154285340 Blast Desc: [Ajellomyces capsulatus NAm1] gi|150407106|gb|EDN02647.1| [Ajellomyces capsulatus NAm1]
  misc_feature (1)..(326): NCBI GI: 226277714 Blast Desc: PAAG_04333 [Paracoccidioides brasiliensis Pb01]
  misc_feature (1)..(388): NCBI GI: 240277612 Blast Desc: conserved [Ajellomyces capsulatus H143]
  misc_feature (1)..(326): NCBI GI: 226287230 Blast Desc: PADG_07563 [Paracoccidioides brasiliensis Pb18]
MASQQLAIAKVAFSAVLLRADPTSCPRTEIDSFLAQLDATVSRCSPPNVQKCKQWITANLAPSPARVTALGKYLVALANSYSSDLAASRAARETPAKRKRLHLLYVLNDVLYQVHVRDRDRRFATNLEAALPSLFQSAAAFENSPKHTKRLYTLLDIWDENKYYSSDFTTKLRKAVQEGPKARDSPTQGNGIANGSADSTARSAKDAPWVLPTMHGDVTAPWYDLPAANWLPVIEPNSTRPMNPDMIKPLQFSSGPVEKHLIKAVEDLLADVDRIYAGETIITDSRTEDIDQLGQRVVRDEITGEIIGGDTYYGWSRPFCNKMKRRAKKGPQSSSSNGRGRSMSRSVSRSPSRSRSSSRGSSRPAFKRRRISASPDTRQARSRGRTRSRSRTRSSSRSSRSKSYDHQRPRSYSRRRSMSRSRSRSRSRSRNRDPLQTHSRPPNNLPQPPQFHNQNQNQFMPQNFQPNFNNKFPVPPPPPPPNYSGPWPPPPPPLPPNFMPPMPNPHANAGGGGWVPPPPGGSGYGQSGGGGGYGQYGRGRGDYRGGYRGGRGGNRGRGW

SEQ ID NO: 24668 - DNA, 2359 bp, Muscodor strobelii
  misc_feature: SGI EST ID NO. CUFF.58080.1
  misc_feature: Variant of the nucleotide sequence at SEQ ID NO 24666
tgcagctccagtcaaacgtctgccacttcatatcacgtataacgttgcgcctcatgcaagatagcattcttgctctccacagctactcaagcagaaattatactatgcgtagccacagtctctagcgatggcttcgcaacaactcgcaatcgccaaagtggccttctcggccgtgctgctgcgcgcagacccgacctcgtgcccgcgcaccgagatcgacagcttcctcgcccagctcgacgcgaccgtctcgcgatgctccccgcccaatgtccagaaatgcaagcaatggatcactgcgaacctggctccttcgcccgctagagtcaccgcactcggcaagtatctcgtcgccctcgccaactcttactcgtccgacctggctgcctcgcgagcggcacgtgagaccccagccaagcgcaagcgtctgcatcttctctatgtcctgaacgacgtgctctaccaggtccatgtccgggaccgggatcgtcgctttgctacaaatcttgaggccgctttgccgagtctattccagagtgctgctgccttcgagaacagccccaaacacaccaaaaggctctacactttactcgacatctgggacgagaacaagtactactcttctgacttcaccaccaagctccgtaaagctgttcaagaaggaccgaaagcacgagattctcctacacagggcaatggcattgcaaacggctctgcagactcgacagcaagatctgctaaggatgccccttgggtcttacccacaatgcatggcgatgtcacagctccgtggtacgacctcccagcagccaattggctccccgtcattgagccaaactctacgagaccaatgaaccccgatatgatcaagccgctacagttttcctcagggccggttgaaaagcaccttatcaaagccgtcgaggatctgctagccgacgtagatcggatttacgcgggggagactatcatcaccgacagtcgtaccgaagacatcgaccagttaggacagcgcgtggttcgtgatgaaatcacgggggaaatcataggcggagatacatactacggctggtcccgtcccttttgcaacaagatgaagcgacgtgccaagaagggaccgcagagcagcagcagcaacggacgtggacgaagcatgtcgcgttcggtatcccgttcaccctcacgatcgcggagttcatctagaggctcatctcgtccggctttcaagcgccgtcgtatttcagcatcaccagatacgagacaagctcgcagtcgtggccgcacccgaagccgtagcaggactcgcagtagcagtcgcagtagtcgcagcaaaagctatgatcatcagcggccgagatcttatagtcgccggcgtagcatgtcgagatcgagatcgagatcacgttcacgaagtcggaatagagatcctttacagactcattctaggccaccaaataatttgccgcaaccacctcaattccataaccagaaccagaaccagttcatgccgcagaactttcaaccaaacttcaacaacaaattccctgtaccgccgcctccccctccacctaattactcgggtccttggcctcctccgcctcctcctttaccgcctaatttcatgccacccatgccaaatcctcacgcaaacgctggagggggtggatgggttcctcctccgcctgggggtagtgggtacgggcagtcaggcggtggtggtggttatggccagtatggtcgaggtcgtggtgattaccgcggtggctatcgtggaggacgcggtggaaatcgaggacgcggctggtgaatgagtgaaggatgtgattgtgtctgagctatggttatatgatactaaatataagaccagaacatttgagctcatgcgtcttgcgaggtaccaatgaagagatgatattgtactatatagcgaatagctttgctgacaagaagcatgagcgctatttctctgccaccatcctattcgctctatttcttgtacttagtcaatgcatcgcaaacgcctttgccttggcctaaactaaatcaacgaattcccaataataacggccatcacaaatatggagaagcagtgatttatatcaacttactcgaaaacaagtaaggtcacttcaaaccctgagctcactgtcaaacaaaacttataatgtaaataaatcttccttgcctttacacaatccccatctcatctgctgcctgccgacgatcactaccccagcaccacatcctagccctcacatcatgacctgcatccgtggaaaaatccgttttcaacaaaccgacataagaagaattactacatcttactctcaacaacggaatcaagtcaggtcggttagct

SEQ ID NO: 24669 - DNA, 1698 bp, Muscodor strobelii
  misc_feature: SGI cDNA ID NO. 568413
  misc_feature: Encodes the peptide sequence at SEQ ID NO 24670
atggctgcccccgacgccctcgacatcgactacacccagaagggcgcccaccctgcgaagccgcccccgccccggcccagggaagagccccagcgagccatacacgcgcgcgagctgaatgcatcctacctgcacggcctcaacgacggcaagcagcccgaggagctggatctgcccgccaagcacgaggtcaactacactttcggagacagggggtcgctgtcacggatgaccaagctgaaggggatctacaacatggccgagaagaccgggcgcactgtcgaggaggtggccctggaccgctacggaaacctacgcgatttcgacgacgcccgcgaggagcaggtcgagatggacaggcgcaaggtctacggcgacggctatgtcggcaaggagaagcccagcggagagctctaccaggagcgcaaactcgccgcagatgtccacgagaagcgacccccaccccctgagtacgccccgccggatcagggtgtcgtcatccccgaagcccctacctctcagcagccagtcctcgatcagacggctctgaaccggctgagagcccagatgatgaaggccaagctcaagaaagcaccagatgctgccaagctcgaggccgactacaaccacgccgccgccgccttcgcttccaggggacccgaagtgcacctcaacgtcatggagcagcgcatgctggtcggcacccgggcggaagccaaggccgtcgacacgaaacgaggtcgcgagagaggccttgtcgaacagaacgacgacttgtccatcgaagacatggtgcgcgaagaacgacgcacccgtggtcaggctggcggcgagggtctacggctggccgagcgcatcgccaaggatggcaagttcgacgatgacctggagtacatggacgagaacgccgagaagctggccaagcgtgttcagaaatcagagctcaacctccgcaacgctgccgtcggcgactttcagaagatcaacaagatcctcgacaactgccagctctgccaccacgaagaccgcaatcaaccccctatcgcgcccatcatctccctcgggacgagggtctacctcaccttggctacggagcctgagctgaccgaagggggcgccgtcatcgtgcccatccagcaccgcaccaatctgctcgagtgcgacgacgacgagtgggaggagatacgcaatttcatgaagtgtctcacgagattatatcatgaccagggcagggaggtcgtcttctacgagaacgccgcagctccacagaggcacatgcatgcggccatgcaggccgttcctatcccctacgagctgggcgacaccgcgcccgccttcttcaaggaggccatgctatcggccgacgaagagtggtcacagcacaagaagatcattgacacggggactcgggctcgcgatggcctgggcaagctagcattccgccgatcgattgcgaaggagatgccatacttccatgcctggttcacgctagatggggggctggggcacgtggtcgaagatgccaatagatggcccagaggcgacttgttcgcaagggagattctgggtggtatggtcgatgctgaaccccatgtgatcaagaagcagggccgatggcatcgaagtgacgcgagagccgagggattcaagaagagctggaggaagttcgactggacaagggtgctttcggacgggtga

SEQ ID NO: 24670 - protein, 565 aa, Muscodor strobelii
  misc_feature: SGI Peptide ID NO. 568413
  misc_feature (322)..(448): Pfam Id: PF04677 Pfam Desc: Protein similar to CwfJ C-terminus 1
  misc_feature (457)..(559): Pfam Id: PF04676 Pfam Desc: Protein similar to CwfJ C-terminus 2
  misc_feature (1)..(564): NCBI GI: 154318321 Blast Desc: BC1G_03328 [Botryotinia fuckeliana B05.10] gi|150842851|gb|EDN18044.1| BC1G_03328 [Botryotinia fuckeliana B05.10]
  misc_feature (1)..(564): NCBI GI: 156053113 Blast Desc: SS1G_06724 [Sclerotinia sclerotiorum 1980] gi|154704502|gb|EDO04241.1| SS1G_06724 [Sclerotinia sclerotiorum 1980]
  misc_feature (1)..(565): NCBI GI: 256723492 Blast Desc: [Nectria haematococca mpVI 77-13-4]
  misc_feature (1)..(565): NCBI GI: 46116268 Blast Desc: FG03976.1 [Gibberella zeae PH-1]
  misc_feature (1)..(565): NCBI GI: 85082454 Blast Desc: NCU04505 [Neurospora crassa OR74A] gi|28917997|gb|EAA27680.1| NCU04505 [Neurospora crassa OR74A]
  misc_feature (1)..(565): NCBI GI: 116195382 Blast Desc: CHGG_04289 [Chaetomium globosum CBS 148.51] gi|88180202|gb|EAQ87670.1| CHGG_04289 [Chaetomium globosum CBS 148.51]
  misc_feature (1)..(565): NCBI GI: 115391111 Blast Desc: conserved [Aspergillus terreus NIH2624] gi|114193984|gb|EAU35684.1| conserved [Aspergillus terreus NIH2624]
  misc_feature (4)..(565): NCBI GI: 145229639 Blast Desc: An01g07040 [Aspergillus niger] gi|134055237|emb|CAK43823.1| protein product [Aspergillus niger]
  misc_feature (1)..(563): NCBI GI: 240105301 Blast Desc: CwfJ-like C-terminus 1 domain containing protein [Coccidioides posadasii C735 delta SOWgp]
  misc_feature (1)..(563): NCBI GI: 119194471 Blast Desc: CIMG_01610 [Coccidioides immitis RS]
MAAPDALDIDYTQKGAHPAKPPPPRPREEPQRAIHARELNASYLHGLNDGKQPEELDLPAKHEVNYTFGDRGSLSRMTKLKGIYNMAEKTGRTVEEVALDRYGNLRDFDDAREEQVEMDRRKVYGDGYVGKEKPSGELYQERKLAADVHEKRPPPPEYAPPDQGVVIPEAPTSQQPVLDQTALNRLRAQMMKAKLKKAPDAAKLEADYNHAAAAFASRGPEVHLNVMEQRMLVGTRAEAKAVDTKRGRERGLVEQNDDLSIEDMVREERRTRGQAGGEGLRLAERIAKDGKFDDDLEYMDENAEKLAKRVQKSELNLRNAAVGDFQKINKILDNCQLCHHEDRNQPPIAPIISLGTRVYLTLATEPELTEGGAVIVPIQHRTNLLECDDDEWEEIRNFMKCLTRLYHDQGREVVFYENAAAPQRHMHAAMQAVPIPYELGDTAPAFFKEAMLSADEEWSQHKKIIDTGTRARDGLGKLAFRRSIAKEMPYFHAWFTLDGGLGHVVEDANRWPRGDLFAREILGGMVDAEPHVIKKQGRWHRSDARAEGFKKSWRKFDWTRVLSDG

SEQ ID NO: 24671 - DNA, 3101 bp, Muscodor strobelii
  misc_feature: SGI EST ID NO. CUFF.58110.1
  misc_feature: Variant of the nucleotide sequence at SEQ ID NO 24669
accaccgctcgtcagagacgcctggatggctgcccccgacgccctcgacatcgactacacccagaagggcgcccaccctgcgaagccgcccccgccccggcccagggaagagccccagcgagccatacacgcgcgcgagctgaatgcatcctacctgcacggcctcaacgacggcaagcagcccgaggagctggatctgcccgccaagcacgaggtcaactacactttcggagacagggggtcgctgtcacggatgaccaagctgaaggggatctacaacatggccgagaagaccgggcgcactgtcgaggaggtggccctggaccgctacggaaacctacgcgatttcgacgacgcccgcgaggagcaggtcgagatggacaggcgcaaggtctacggcgacggctatgtcggcaaggagaagcccagcggagagctctaccaggagcgcaaactcgccgcagatgtccacgagaagcgacccccaccccctgagtacgccccgccggatcagggtgtcgtcatccccgaagcccctacctctcagcagccagtcctcgatcagacggctctgaaccggctgagagcccagatgatgaaggccaagctcaagaaagcaccagatgctgccaagctcgaggccgactacaaccacgccgccgccgccttcgcttccaggggacccgaagtgcacctcaacgtcatggagcagcgcatgctggtcggcacccgggcggaagccaaggccgtcgacacgaaacgaggtcgcgagagaggccttgtcgaacagaacgacgacttgtccatcgaagacatggtgcgcgaagaacgacgcacccgtggtcaggctggcggcgagggtctacggctggccgagcgcatcgccaaggatggcaagttcgacgatgacctggagtacatggacgagaacgccgagaagctggccaagcgtgttcagaaatcagagctcaacctccgcaacgctgccgtcggcgactttcagaagatcaacaagatcctcgacaactgccagctctgccaccacgaagaccgcaatcaaccccctatcgcgcccatcatctccctcgggacgagggtctacctcaccttggctacggagcctgagctgaccgaagggggcgccgtcatcgtgcccatccagcaccgcaccaatctgctcgagtgcgacgacgacgagtgggaggagatacgcaatttcatgaagtgtctcacgagattatatcatgaccagggcagggaggtcgtcttctacgagaacgccgcagctccacagaggcacatgcatgcggccatgcaggccgttcctatcccctacgagctgggcgacaccgcgcccgccttcttcaaggaggccatgctatcggccgacgaagagtggtcacagcacaagaagatcattgacacggggactcgggctcgcgatggcctgggcaagctagcattccgccgatcgattgcgaaggagatgccatacttccatgcctggttcacgctagatggggggctggggcacgtggtcgaagatgccaatagatggcccagaggcgacttgttcgcaagggagattctgggtggtatggtcgatgctgaaccccatgtgatcaagaagcagggccgatggcatcgaagtgacgcgagagccgagggattcaagaagagctggaggaagttcgactggacaagggtgctttcggacgggtgagcgaactgagcctcgctgtaaggtacacgagctagagcccatcaaagaaccaagttctatcgggccgtctttcaatgtgcgactccttgcttgactatttgctcttgcgtctcccggtaactatgaggataagaatgggtaggtatatcctcaaatgtattccactcttatctaatgcgccgtgtggagagctgctgttctacgacgcttctcattatggcgcgcatctccctctgaacaccgctgagccatgccaccacgactcttgaatccgcatctgatatgccacaggccgcacgttggaagggtgcactcggcgtattgtctcgactcaactatgaccagagccacaatggtagaataacaagatgatcagcaaaataaccttggccttgacgacatgactcttttcgtctacgggctagtattatttacacctagtgtacgaattgttcgtcaattttatattggaaagccggttgtcaactagtacacattcagtcatgtcaatcttcacgtagttttgaacaatcattcgagtacattacagtcagaacctttctgttagctacggtataaacagctctcacacaccacccatcgcttttatagtgaccgatatcttgcttagaccttgctaggtagactgagaatcaagctggatttggtacacaatcactcgtcttcgacacaaacgtacatgattcaaaacatatagagaaatctccatcgagtcttaagtgaaagtaagaaaacacggtgtcctggcagacgatgtccaacctgaggttggtgccctctcccgcgctcttgtctatacaagatcggttacgagacagacgcaatgccagagtgatagcgatcaacacgtctttaataacgagcgccatcggggcgccgttcacacacggggcctccatgatcattggcgctctagttgcgttctggcacggatataagctgaaccggatacgcagaagcctgaacgacgtacgcgccgagctggctagccgcgggcaaagattccggcgtaccacgatgggcaatatgctgagctggcgatcgcttgtcgctgcctcggcacgcattgctgggctcggattggatgctggtgtgctcagtgcgcttgtggcaccgttcgacgtggcggatgtggccaggactgttgttgtccgtgctgctcctcgaggttttgcaaatcgacgcgggcccaacgcgcagctcttcatccaagggcatggctattagtactgaatgaatgagagatacccttgaccaccggcgttgaagcgatgatatcgcgactcttcccatttctcaacttgctcacttctttgtagaattagcttcatagtgagatccgtataagatgacaagc

SEQ ID NO: 24672 - DNA, 468 bp, Muscodor strobelii
  misc_feature: SGI cDNA ID NO. 568414
  misc_feature: Encodes the peptide sequence at SEQ ID NO 24673
atggccgccaatcagaagcgcatcaccaaggagctgcaggagtgcaccaccaacccgcccgagggcatgatcatcaccccgaacgaggccgatctgcacacctggctcatcacgctcacgggccccgccaactcgccgtacgcgggcggcaccttcaacgtgacgctgaccctgccgcccaactacccgttcaaggcgcccaccgtcaacttccagacgcgcatctaccaccccaatatcaccaacgatagcgtcggctccatctgcctgtcgctgatcaaggactcggagtggaagcccgcctcgcgcatcaagggcgtcctcgaggccgtccgccacctgctcgtccagcccaaccccgacgaccccctcgaggaccgcatcgcccgcgagtacaaggagagccgcgccgagttcgacaagaacgcccagagctacgtcctgcgctacgcctcggccaagagatga

SEQ ID NO: 24673 - protein, 155 aa, Muscodor strobelii
  misc_feature: SGI Peptide ID NO. 568414
  misc_feature (7)..(147): Pfam Id: PF00179 Pfam Desc: Ubiquitin-conjugating enzyme
  misc_feature (3)..(151): NCBI GI: 39975501 Blast Desc: MGG_00103 [Magnaporthe grisea 70-15] gi|145019057|gb|EDK03336.1| MGG_00103 [Magnaporthe grisea 70-15]
  misc_feature (1)..(153): NCBI GI: 116195396 Blast Desc: CHGG_04296 [Chaetomium globosum CBS 148.51] gi|88180209|gb|EAQ87677.1| CHGG_04296 [Chaetomium globosum CBS 148.51]
  misc_feature (3)..(151): NCBI GI: 85082486 Blast Desc: NCU04513 [Neurospora crassa OR74A] gi|28918005|gb|EAA27688.1| NCU04513 [Neurospora crassa OR74A]
  misc_feature (4)..(153): NCBI GI: 261352912 Blast Desc: ubiquitin-conjugating enzyme [Verticillium albo-atrum VaMs.102]
  misc_feature (3)..(153): NCBI GI: 171691400 Blast Desc: protein product [Podospora anserina] gi|170945648|emb|CAP71761.1| protein product [Podospora anserina]
  misc_feature (3)..(154): NCBI GI: 154288176 Blast Desc: HCAG_01930 [Ajellomyces capsulatus NAm1] gi|150408524|gb|EDN04065.1| HCAG_01930 [Ajellomyces capsulatus NAm1] gi|225560196|gb|EEH08478.1| ubiquitin-conjugating enzyme E2
  misc_feature (3)..(154): NCBI GI: 261201105 Blast Desc: ubiquitin conjugating enzyme [Ajellomyces dermatitidis SLH14081] gi|239594025|gb|EEQ76606.1| ubiquitin conjugating enzyme [Ajellomyces dermatitidis SLH14081] ubiquitin-conjugating
  misc_feature (3)..(151): NCBI GI: 226284329 Blast Desc: ubiquitin-conjugating enzyme [Paracoccidioides brasiliensis Pb01]
  misc_feature (3)..(151): NCBI GI: 226289008 Blast Desc: ubiquitin-conjugating enzyme [Paracoccidioides brasiliensis Pb18]
  misc_feature (6)..(151): NCBI GI: 242784165 Blast Desc: ubiquitin conjugating enzyme (UbcB), [Talaromyces stipitatus ATCC 10500] gi|218720479|gb|EED19898.1| ubiquitin conjugating enzyme (UbcB), [Talaromyces stipitatus ATCC 10500]
  misc_feature (6)..(151): SWISSPROT Homolog: EC 6.3.2.19 Ubiquitin--protein ligase
MAANQKRITKELQECTTNPPEGMIITPNEADLHTWLITLTGPANSPYAGGTFNVTLTLPPNYPFKAPTVNFQTRIYHPNITNDSVGSICLSLIKDSEWKPASRIKGVLEAVRHLLVQPNPDDPLEDRIAREYKESRAEFDKNAQSYVLRYASAKR

SEQ ID NO: 24674 - DNA, 6097 bp, Muscodor strobelii
  misc_feature: SGI EST ID NO. CUFF.58365.1
  misc_feature: Variant of the nucleotide sequence at SEQ ID NO 24672
caagtttcatctaggcatatttccacacaagatacctaagcatatgaataatccactgcgcaattgcttcatctgaggtgttaccggttcagaacaaaggaattgtagctcgtgtagctgcaaccccaccatcccaccaacaagctccccagtgttgtcattgttatcccacatatttgacatcccaccttcgccgcctcgatcatcaagtaccgacggccttcaacaccaacaccaatattcgtgatcgcgcatattgtgattgccaatagatacacccataacacgcatttcctgactacagacacgcacaaccaagaagcaaagtcatcatcatggccgccaatcagaagcgcatcaccaaggagctgcaggagtgcaccaccaacccgcccgagggcatgatcatcaccccgaacgaggccgatctgcacacctggctcatcacgctcacgggccccgccaactcgccgtacgcgggcggcaccttcaacgtgacgctgaccctgccgcccaactacccgttcaaggcgcccaccgtcaacttccagacgcgcatctaccaccccaatatcaccaacgatagcgtcggctccatctgcctgtcgctgatcaaggactcggagtggaagcccgcctcgcgcatcaagggcgtcctcgaggccgtccgccacctgctcgtccagcccaaccccgacgaccccctcgaggaccgcatcgcccgcgagtacaaggagagccgcgccgagttcgacaagaacgcccagagctacgtcctgcgctacgcctcggccaagagatgaaccaaccttcgcactgattaacgacgatacgacatgattacgactacacaccccatgcatagactaggctgcccagattgaggttgacttgcttacttgcttgcttgcctgctttttgtacgatagatggatgaatacgaggggaaagggcggaggaattgcaaagtgcagcactgcggcgatgagatgggctccatatggccgcccccataagatcatctagactggtagcggactgtgttagcagtctaaaggaaaggcagcatcgctaccatattgatacaacacgcaaaagaatgaacaataaagcatgtatcgctttcatcgcgaaccgaataattagtggaattaacattcaactaggtttaggattacttaggtatctaggagcacatccagacacgacagagcacacgtaacagcaagaaaagagaagacatagaggcccgattaccaatagcaactgtacttcatgcatatgtacgctattgttcattcatttcttcccctgtatttctctctatttctctctgatccctttgcatatctacacgacgtggtattttccccaacaaatctgactgcacaaaaaacgcctgatacgccggaccttgatattatgtacaatgccacatggcgcctcttgtggatgctattgctcaaatgctcgatgctcgttgctgatgctgatgatgatccctcccattttgctgttacccttcgtccattcttccgcagaggcttcgtcgcccccaccaatcttgtttttttcttttcccccttactaacagatccttgacacacatgcctgaggtagtcgccaagtcttctccttttccctattactcagtgtcataatgtcgtcatgtatcgtagacaaatagaataccatgccccttttcgtcgtgggcttccaaaaccaagagaggccctactctctctcctgattaacaaggcatggcaatagcgggagaccgccagccgataagcaccggtcccgggacggtagagcgcgatgcctccaattgacgaggaacgggagcgtctcaacgaccgttgaccgtctgcgtccggtctctggctttccctcgcttgaacagcgtccccttcctcgacacgtcaccatccgtcggcgtgacggggatgcccgcggcaagcttctccttctctgccttgacgtgcatgcgtcgctcctggcgtctctgttcgatggtctcctgactaaggtgaccaaacccattccgccgtttgtagcaggcctccatcaacccgttggcgtccagcatcttgcgtggcattgtctgtaccacctggaagatctccatcgggtccgccaccttcttgatctccccttcaccgagccggaggatcgtcagcgcgatgcggaatagcgtcttggatccctcatagaaaaaaatatcccacactcgcaaggtgctctcgatcgggagtgtcccgatgaaacagctcatgaaccaagacgtcatggacaacgtgattgggggcagacgcgtcgtcaattcgccccggcgaaggtgtcgtcgggacttgggccgcacggcatccgtgccgtcgagttccccgccaatcttggcccacacgttcggcattgactcctggatcgtcgtcatcagcacgcccaggtccacgttggcgccctcaaggctcatttcatgcgtccccggaagatagaccctggttatgatgttaagtaaccagaaggcatgctcctcggactcgacaaagagcagcaatagccccgctaggaagttgagagactggcagtacccgatgcgcgggttgtagatagagaaggccgtaagcacacgacgaagtgacgagatcatgggcgtctcgtctcgcatagggtctccctcttcagacccgcctaccgtcagttggctgtttcgcttggcattttcctcatgcgccgggagattcgggcccgatgacgatcgaaacctgatgttatcggggaaggtcctatgcaagtcacgctcgatagcctcggagtcgacatccttgacttgcgatttgaggagctcgtcgtacaaacctcggtgcttctgaagtatggccggcccgccagcgtagtagaaccaggcagcgcctctccactccggcggtatgcccttgcggacgaaccgcttggtcttggccgaccgcggagggaaccggtttggagagtccgtcatcagaccgttttccttgaggtgaagaatccacttcttctttcgacgagtcagaaactcggaatatcctgaatcccaacgatcgaattcttcacgtgtgatgtactggctgctcttcttgaacccataccggtcccgctcatcgaagccagtagttgtcagagtcgtctcatgtcgggtgggcggcgatggtctgaaatcgtcgggcgagctgacaggagagtctccccgttggcctgggacatcgtcgctgacatttgcatcctcagaaggcgtagagacatgattagacacccggaaaatggcggccgagtcgcgtacaatcgacttcttgcgcacgataccagattccgcagagatgaagggcggcgctggcaggctcatctcctccggcgtcacctccaaagtggtcgtgggcatcttgctcaattccgatacagccgtgggcggccgcgtgctgtcctggaaatcgtcgtcttcgccggccgagtcgtcgtcgaatcctttgtcgtagagtcccaacacatcatctacactcagatcattgtccacgggcccgtacacagacgtgatagagctgctttttgtcatgacgctactcctctccgtggccagggtaccctgggcggtggacgtggagagctgggagcggaagcttgaccgaagctcttcgctgggaagtgaggccatgcggggaataggagggtcacggaggccccgagtgaaagccggcccgctgctctcggctcggatgttagtcagagcctgtcgagcaggggtggcgtgttgggggcgaggtcggcctcgagagcgctcgtgatagctctccagtgacggccggagggagatggaaacggaagcatatgtcgaggcggattggttcgaagagatagagggcccgcgagaccgtggccagttcgcagggctgttcagaggatcgagttggctggcttcgaactgcggctgcatcggcgaccggagccgaggactgtcgatgtgtggctgcttgatgctgggaagacggggtctggagaaattgcccacagccatggggctctcggggatgttggtcctcgcgacgggcagcgaggggaactcgtccctcgtctcggaggcaatggtgtcgatgcttcgatgggagccactgcccgagacagaggattcgtggggaaacgtgctgggcgagggcgagctgggcatcgagggctgcacacgactgtggacagatacgtcggaacggggcagcgagtcccaccgaggggagatgggcggtgaggggatctgatacgacgggctgctgggctccctcgcgtctcccgaagtgtgcacacgcaggtcgtgatggcgcgcatgcgaggcgaaggtagaggtgccaggcgagggtatcgagggtgaaaaagagtagtcgtgtgtgtccgtgtgcgagtgcgtgttgtcggggtcgagatatccgtgggaaggaggcgtggtggtggatgtgtagacggcgacggaatctcgaacgtgtttcaggctgggctttctcgtggccgggtgtgcaggggcaagtgcaggtacagatgcgagcacaggcttgctgaagttggcactgcgatctggtcgaggcacgcgggctgggccgctggagttggagctgtgatctgtcacatatgcgtgtgcagcatcgttaccgagctggcggtggtggtaatggtactgctgctggtgctggtgctgcaggggttcggacgacccgttgtcagggttctgcatcaccgccattgtcttcccagccatagcttcccctggccctttcgcccagctgactaacaacgtgtcgtcgggccgcgtgacttcgaccataccatgcaccttcactccacagctcaaatcagattgtaagagtgagagagcggtttggtcaagcccgctcttctggagccgcggccggccagttggcgtagccgtgtccaggtcagccgaagaaagtgatgtgcgatggacacaatgctgctgtgctcggtgctgttcagcttgtctgatctggatcagcagtgctgcgattagagaaaactagccagttgaggcggacgctgcggttgtgagaacgggttggcgtgtcggatgaggcagtgaggtagcgaggtgtggcggagaagagaagagggtgatgtcgtcggtcactcaagatccatccatgctcgtgatcaaggggcatgtatttcgcagagcccgagggggacgcaacgggcgtaaaatgagtaaatgagtaaatgagaggttggacggcggtccagtcgtattgcgaggcgccactctgcgtgtctgagtcttgcagatctgcggctttgccttgagacctgagcccaacggtggtgactcgagcacgtcgtggccgtgacacaagcccgccagacggaacaataaatacctgaaacttaaaggagcgacgatgcctcgggcgtatggccgttggggatgtggggtcggagatgtatttgatagatttgaagcagcgagtgagttgggctgaatagacaggcttggatagccgtatgaatgaagggactgatggatgaatgagtgggtgaaggagcgaatgattgcacaatgactaggagtttattgtgtgaatgaaggcctgccgattgggtcgtccattgccgtcacgattgatctgcactgctaccgacgcactctcaagacgagctgagaaccactggcttcaattggcactctgccaatctgcaaggggaaaagagcaaagctgccgggaagctggagctgaagtcgctggaggtgcgccactggtgtgccgtgggcgacagcgtcgttggttcctgcaatacctggatcccgaggtgaggtaggtcgtcaatcaagacgacgcatgtacaaattcaacgaaactaccacgctgcacagctattgccgctgtgtcgagaggagaaatcagtgttgacaattgacaaaacagtgaaggataagcgcgacgagaaagcacgagcgagtcaggtcgatagcaaaaggtgtgacctagcctagtctggtctttttgctttccaagttcccacgagtccaacggcggtcaaaaagcgggagggccaaactagtgcatgtacg

SEQ ID NO: 24675 - DNA, 441 bp, Muscodor strobelii
  misc_feature: SGI cDNA ID NO. 568415
  misc_feature: Encodes the peptide sequence at SEQ ID NO 24676
atgacgtcttggttcatgagctgtttcatcgggacactcccgatcgagagcaccttgcgagtgtgggatatttttttctatgagggatccaagacgctattccgcatcgcgctgacgatcctccggctcggtgaaggggagatcaagaaggtggcggacccgatggagatcttccaggtggtacagacaatgccacgcaagatgctggacgccaacgggttgatggaggcctgctacaaacggcggaatgggtttggtcaccttagtcaggagaccatcgaacagagacgccaggagcgacgcatgcacgtcaaggcagagaaggagaagcttgccgcgggcatccccgtcacgccgacggatggtgacgtgtcgaggaaggggacgctgttcaagcgagggaaagccagagaccggacgcagacggtcaacggtcgttga

SEQ ID NO: 24676 - protein, 146 aa, Muscodor strobelii
  misc_feature: SGI Peptide ID NO. 568415
  misc_feature (4)..(41): Pfam Id: PF00566 Pfam Desc: TBC domain
  misc_feature (1)..(138): NCBI GI: 261352916 Blast Desc: GTPase-activating protein gyp3 [Verticillium albo-atrum VaMs.102]
  misc_feature (2)..(137): NCBI GI: 156061960 Blast Desc: SS1G_01094 [Sclerotinia sclerotiorum 1980] gi|154696432|gb|EDN96170.1| SS1G_01094 [Sclerotinia sclerotiorum 1980]
  misc_feature (2)..(137): NCBI GI: 154295748 Blast Desc: BC1G_12877 [Botryotinia fuckeliana B05.10] gi|150843910|gb|EDN19103.1| BC1G_12877 [Botryotinia fuckeliana B05.10]
  misc_feature (1)..(114): NCBI GI: 256723086 Blast Desc: NECHADRAFT_42427 [Nectria haematococca mpVI 77-13-4]
  misc_feature (1)..(138): NCBI GI: 145611790 Blast Desc: MGG_00118 [Magnaporthe grisea 70-15] gi|145019038|gb|EDK03317.1| MGG_00118 [Magnaporthe grisea 70-15]
  misc_feature (1)..(114): NCBI GI: 46116382 Blast Desc: FG04033.1 [Gibberella zeae PH-1]
  misc_feature (1)..(139): NCBI GI: 116195398 Blast Desc: CHGG_04297 [Chaetomium globosum CBS 148.51] gi|88180210|gb|EAQ87678.1| CHGG_04297 [Chaetomium globosum CBS 148.51]
  misc_feature (1)..(136): NCBI GI: 85082490 Blast Desc: NCU04514 [Neurospora crassa OR74A] gi|28918006|gb|EAA27689.1| [Neurospora crassa OR74A]
  misc_feature (1)..(109): NCBI GI: 171691402 Blast Desc: protein product [Podospora anserina] gi|170945649|emb|CAP71762.1| protein product [Podospora anserina]
  misc_feature (3)..(98): NCBI GI: 50547535 Blast Desc: YALI0B22792p [Yarrowia lipolytica] gi|49647103|emb|CAG83490.1| YALI0B22792p [Yarrowia lipolytica]
MTSWFMSCFIGTLPIESTLRVWDIFFYEGSKTLFRIALTILRLGEGEIKKVADPMEIFQVVQTMPRKMLDANGLMEACYKRRNGFGHLSQETIEQRRQERRMHVKAEKEKLAAGIPVTPTDGDVSRKGTLFKRGKARDRTQTVNGR

SEQ ID NO: 24677 - DNA, 6282 bp, Muscodor strobelii
  misc_feature: SGI EST ID NO. CUFF.58365.0
  misc_feature: Variant of the nucleotide sequence at SEQ ID NO 24675
cgtacatgcactagtttggccctcccgctttttgaccgccgttggactcgtgggaacttggaaagcaaaaagaccagactaggctaggtcacaccttttgctatcgacctgactcgctcgtgctttctcgtcgcgcttatccttcactgttttgtcaattgtcaacactgatttctcctctcgacacagcggcaatagctgtgcagcgtggtagtttcgttgaatttgtacatgcgtcgtcttgattgacgacctacctcacctcgggatccaggtattgcaggaaccaacgacgctgtcgcccacggcacaccagtggcgcacctccagcgacttcagctccagcttcccggcagctttgctcttttccccttgcagattggcagagtgccaattgaagccagtggttctcagctcgtcttgagagtgcgtcggtagcagtgcagatcaatcgtgacggcaatggacgacccaatcggcaggccttcattcacacaataaactcctagtcattgtgcaatcattcgctccttcacccactcattcatccatcagtcccttcattcatacggctatccaagcctgtctattcagcccaactcactcgctgcttcaaatctatcaaatacatctccgaccccacatccccaacggccatacgcccgaggcatcgtcgctcctttaagtttcaggtatttattgttccgtctggcgggcttgtgtcacggccacgacgtgctcgagtcaccaccgttgggctcaggtctcaaggcaaagccgcagatctgcaagactcagacacgcagagtggcgcctcgcaatacgactggaccgccgtccaacctctcatttactcatttactcattttacgcccgttgcgtccccctcgggctctgcgaaatacatgccccttgatcacgagcatggatggatcttgagtgaccgacgacatcaccctcttctcttctccgccacacctcgctacctcactgcctcatccgacacgccaacccgttctcacaaccgcagcgtccgcctcaactggctagttttctctaatcgcagcactgctgatccagatcagacaagctgaacagcaccgagcacagcagcattgtgtccatcgcacatcactttcttcggctgacctggacacggctacgccaactggccggccgcggctccagaagagcgggcttgaccaaaccgctctctcactcttacaatctgatttgagctgtggagtgaaggtgcatggtatggtcgaagtcacgcggcccgacgacacgttgttagtcagctgggcgaaagggccaggggaagctatggctgggaagacaatggcggtgatgcagaaccctgacaacgggtcgtccgaacccctgcagcaccagcaccagcagcagtaccattaccaccaccgccagctcggtaacgatgctgcacacgcatatgtgacagatcacagctccaactccagcggcccagcccgcgtgcctcgaccagatcgcagtgccaacttcagcaagcctgtgctcgcatctgtacctgcacttgcccctgcacacccggccacgagaaagcccagcctgaaacacgttcgagattccgtcgccgtctacacatccaccaccacgcctccttcccacggatatctcgaccccgacaacacgcactcgcacacggacacacacgactactctttttcaccctcgataccctcgcctggcacctctaccttcgcctcgcatgcgcgccatcacgacctgcgtgtgcacacttcgggagacgcgagggagcccagcagcccgtcgtatcagatcccctcaccgcccatctcccctcggtgggactcgctgccccgttccgacgtatctgtccacagtcgtgtgcagccctcgatgcccagctcgccctcgcccagcacgtttccccacgaatcctctgtctcgggcagtggctcccatcgaagcatcgacaccattgcctccgagacgagggacgagttcccctcgctgcccgtcgcgaggaccaacatccccgagagccccatggctgtgggcaatttctccagaccccgtcttcccagcatcaagcagccacacatcgacagtcctcggctccggtcgccgatgcagccgcagttcgaagccagccaactcgatcctctgaacagccctgcgaactggccacggtctcgcgggccctctatctcttcgaaccaatccgcctcgacatatgcttccgtttccatctccctccggccgtcactggagagctatcacgagcgctctcgaggccgacctcgcccccaacacgccacccctgctcgacaggctctgactaacatccgagccgagagcagcgggccggctttcactcggggcctccgtgaccctcctattccccgcatggcctcacttcccagcgaagagcttcggtcaagcttccgctcccagctctccacgtccaccgcccagggtaccctggccacggagaggagtagcgtcatgacaaaaagcagctctatcacgtctgtgtacgggcccgtggacaatgatctgagtgtagatgatgtgttgggactctacgacaaaggattcgacgacgactcggccggcgaagacgacgatttccaggacagcacgcggccgcccacggctgtatcggaattgagcaagatgcccacgaccactttggaggtgacgccggaggagatgagcctgccagcgccgcccttcatctctgcggaatctggtatcgtgcgcaagaagtcgattgtacgcgactcggccgccattttccgggtgtctaatcatgtctctacgccttctgaggatgcaaatgtcagcgacgatgtcccaggccaacggggagactctcctgtcagctcgcccgacgatttcagaccatcgccgcccacccgacatgagacgactctgacaactactggcttcgatgagcgggaccggtatgggttcaagaagagcagccagtacatcacacgtgaagaattcgatcgttgggattcaggatattccgagtttctgactcgtcgaaagaagaagtggattcttcacctcaaggaaaacggtctgatgacggactctccaaaccggttccctccgcggtcggccaagaccaagcggttcgtccgcaagggcataccgccggagtggagaggcgctgcctggttctactacgctggcgggccggccatacttcagaagcaccgaggtttgtacgacgagctcctcaaatcgcaagtcaaggatgtcgactccgaggctatcgagcgtgacttgcataggaccttccccgataacatcaggtttcgatcgtcatcgggcccgaatctcccggcgcatgaggaaaatgccaagcgaaacagccaactgacggtaggcgggtctgaagagggagaccctatgcgagacgagacgcccatgatctcgtcacttcgtcgtgtgcttacggccttctctatctacaacccgcgcatcgggtactgccagtctctcaacttcctagcggggctattgctgctctttgtcgagtccgaggagcatgccttctggttacttaacatcataaccagggtctatcttccggggacgcatgaaatgagccttgagggcgccaacgtggacctgggcgtgctgatgacgacgatccaggagtcaatgccgaacgtgtgggccaagattggcggggaactcgacggcacggatgccgtgcggcccaagtcccgacgacaccttcgccggggcgaattgacgacgcgtctgcccccaatcacgttgtccatgacgtcttggttcatgagctgtttcatcgggacactcccgatcgagagcaccttgcgagtgtgggatatttttttctatgagggatccaagacgctattccgcatcgcgctgacgatcctccggctcggtgaaggggagatcaagaaggtggcggacccgatggagatcttccaggtggtacagacaatgccacgcaagatgctggacgccaacgggttgatggaggcctgctacaaacggcggaatgggtttggtcaccttagtcaggagaccatcgaacagagacgccaggagcgacgcatgcacgtcaaggcagagaaggagaagcttgccgcgggcatccccgtcacgccgacggatggtgacgtgtcgaggaaggggacgctgttcaagcgagggaaagccagagaccggacgcagacggtcaacggtcgttgagacgctcccgttcctcgtcaattggaggcatcgcgctctaccgtcccgggaccggtgcttatcggctggcggtctcccgctattgccatgccttgttaatcaggagagagagtagggcctctcttggttttggaagcccacgacgaaaaggggcatggtattctatttgtctacgatacatgacgacattatgacactgagtaatagggaaaaggagaagacttggcgactacctcaggcatgtgtgtcaaggatctgttagtaagggggaaaagaaaaaaacaagattggtgggggcgacgaagcctctgcggaagaatggacgaagggtaacagcaaaatgggagggatcatcatcagcatcagcaacgagcatcgagcatttgagcaatagcatccacaagaggcgccatgtggcattgtacataatatcaaggtccggcgtatcaggcgttttttgtgcagtcagatttgttggggaaaataccacgtcgtgtagatatgcaaagggatcagagagaaatagagagaaatacaggggaagaaatgaatgaacaatagcgtacatatgcatgaagtacagttgctattggtaatcgggcctctatgtcttctcttttcttgctgttacgtgtgctctgtcgtgtctggatgtgctcctagatacctaagtaatcctaaacctagttgaatgttaattccactaattattcggttcgcgatgaaagcgatacatgctttattgttcattcttttgcgtgttgtatcaatatggtagcgatgctgcctttcctttagactgctaacacagtccgctaccagtctagatgatcttatgggggcggccatatggagcccatctcatcgccgcagtgctgcactttgcaattcctccgccctttcccctcgtattcatccatctatcgtacaaaaagcaggcaagcaagcaagtaagcaagtcaacctcaatctgggcagcctagtctatgcatggggtgtgtagtcgtaatcatgtcgtatcgtcgttaatcagtgcgaaggttggttcatctcttggccgaggcgtagcgcaggacgtagctctgggcgttcttgtcgaactcggcgcggctctccttgtactcgcgggcgatgcggtcctcgagggggtcgtcggggttgggctggacgagcaggtggcggacggcctcgaggacgcccttgatgcgcgaggcgggcttccactccgagtccttgatcagcgacaggcagatggagccgacgctatcgttggtgatattggggtggtagatgcgcgtctggaagttgacggtgggcgccttgaacgggtagttgggcggcagggtcagcgtcacgttgaaggtgccgcccgcgtacggcgagttggcggggcccgtgagcgtgatgagccaggtgtgcagatcggcctcgttcggggtgatgatcatgccctcgggcgggttggtggtgcactcctgcagctcctacatagacgagcagacattagtgatgcgtttgttcatttgtttgtttagtcagagtgaggccggacagcaaggttggcgagaaaatatgaaatgggatgagataatgtgagagagaggcagggacgagcttaggtgtgagctagtgagcgagtaggagagtgagaaagtgagaaagtgagtaccttggtgatgcgcttctgattggcggccatgatgatgactttgcttcttggttgtgcgtgtctgtagtcaggaaatgcgtgttatgggtgtatctattggcaatcacaatatgcgcgatcacgaatattggtgttggtgttgaaggccgtcggtacttgatgatcgaggcggcgaaggtgggatgtcaaatatgtgggataacaatgacaacactggggagcttgttggtgggatggtggggttgcagctacacgagctacaattcctttgttctgaaccggtaacacctcagatgaagcaattgcgcagtggattattcatatgcttaggtatcttgtgtggaaatatgcctagatgaaacttg

SEQ ID NO: 24678 - DNA, 2988 bp, Muscodor strobelii
  misc_feature: SGI cDNA ID NO. 568416
  misc_feature: Reduced expression when VOC is produced
  misc_feature: Encodes the peptide sequence at SEQ ID NO 24679
atggtcgaagtcacgcggcccgacgacacgttgttagtcagctgggcgaaagggccaggggaagctatggctgggaagacaatggcggtgatgcagaaccctgacaacgggtcgtccgaacccctgcagcaccagcaccagcagcagtaccattaccaccaccgccagctcggtaacgatgctgcacacgcatatgtgacagatcacagctccaactccagcggcccagcccgcgtgcctcgaccagatcgcagtgccaacttcagcaagcctgtgctcgcatctgtacctgcacttgcccctgcacacccggccacgagaaagcccagcctgaaacacgttcgagattccgtcgccgtctacacatccaccaccacgcctccttcccacggatatctcgaccccgacaacacgcactcgcacacggacacacacgactactctttttcaccctcgataccctcgcctggcacctctaccttcgcctcgcatgcgcgccatcacgacctgcgtgtgcacacttcgggagacgcgagggagcccagcagcccgtcgtatcagatcccctcaccgcccatctcccctcggtgggactcgctgccccgttccgacgtatctgtccacagtcgtgtgcagccctcgatgcccagctcgccctcgcccagcacgtttccccacgaatcctctgtctcgggcagtggctcccatcgaagcatcgacaccattgcctccgagacgagggacgagttcccctcgctgcccgtcgcgaggaccaacatccccgagagccccatggctgtgggcaatttctccagaccccgtcttcccagcatcaagcagccacacatcgacagtcctcggctccggtcgccgatgcagccgcagttcgaagccagccaactcgatcctctgaacagccctgcgaactggccacggtctcgcgggccctctatctcttcgaaccaatccgcctcgacatatgcttccgtttccatctccctccggccgtcactggagagctatcacgagcgctctcgaggccgacctcgcccccaacacgccacccctgctcgacaggctctgactaacatccgagccgagagcagcgggccggctttcactcggggcctccgtgaccctcctattccccgcatggcctcacttcccagcgaagagcttcggtcaagcttccgctcccagctctccacgtccaccgcccagggtaccctggccacggagaggagtagcgtcatgacaaaaagcagctctatcacgtctgtgtacgggcccgtggacaatgatctgagtgtagatgatgtgttgggactctacgacaaaggattcgacgacgactcggccggcgaagacgacgatttccaggacagcacgcggccgcccacggctgtatcggaattgagcaagatgcccacgaccactttggaggtgacgccggaggagatgagcctgccagcgccgcccttcatctctgcggaatctggtatcgtgcgcaagaagtcgattgtacgcgactcggccgccattttccgggtgtctaatcatgtctctacgccttctgaggatgcaaatgtcagcgacgatgtcccaggccaacggggagactctcctgtcagctcgcccgacgatttcagaccatcgccgcccacccgacatgagacgactctgacaactactggcttcgatgagcgggaccggtatgggttcaagaagagcagccagtacatcacacgtgaagaattcgatcgttgggattcaggatattccgagtttctgactcgtcgaaagaagaagtggattcttcacctcaaggaaaacggtctgatgacggactctccaaaccggttccctccgcggtcggccaagaccaagcggttcgtccgcaagggcataccgccggagtggagaggcgctgcctggttctactacgctggcgggccggccatacttcagaagcaccgaggtttgtacgacgagctcctcaaatcgcaagtcaaggatgtcgactccgaggctatcgagcgtgacttgcataggaccttccccgataacatcaggtttcgatcgtcatcgggcccgaatctcccggcgcatgaggaaaatgccaagcgaaacagccaactgacggtaggcgggtctgaagagggagaccctatgcgagacgagacgcccatgatctcgtcacttcgtcgtgtgcttacggccttctctatctacaacccgcgcatcgggtactgccagtctctcaacttcctagcggggctattgctgctctttgtcgagtccgaggagcatgccttctggttacttaacatcataaccagggtctatcttccggggacgcatgaaatgagccttgagggcgccaacgtggacctgggcgtgctgatgacgacgatccaggagtcaatgccgaacgtgtgggccaagattggcggggaactcgacggcacggatgccgtgcggcccaagtcccgacgacaccttcgccggggcgaattgacgacgcgtctgcccccaatcacgttgtccatgacgtcttggttcatgagctgtttcatcgggacactcccgatcgagagcaccttgcgagtgtgggatatttttttctatgagggatccaagacgctattccgcatcgcgctgacgatcctccggctcggtgaaggggagatcaagaaggtggcggacccgatggagatcttccaggtggtacagacaatgccacgcaagatgctggacgccaacgggttgatggaggcctgctacaaacggcggaatgggtttggtcaccttagtcaggagaccatcgaacagagacgccaggagcgacgcatgcacgtcaaggcagagaaggagaagcttgccgcgggcatccccgtcacgccgacggatggtgacgtgtcgaggaaggggacgctgttcaagcgagggaaagccagagaccggacgcagacggtcaacggtcgttga

SEQ ID NO: 24679 - protein, 995 aa, Muscodor strobelii
  misc_feature: SGI Peptide ID NO. 568416
  misc_feature (632)..(900): Pfam Id: PF00566 Pfam Desc: TBC domain
  misc_feature (731)..(813): Pfam Id: PF00566 Pfam Desc: TBC domain
  misc_feature (853)..(890): Pfam Id: PF00566 Pfam Desc: TBC domain
  misc_feature (178)..(963): NCBI GI: 256723086 Blast Desc: NECHADRAFT_42427 [Nectria haematococca mpVI 77-13-4]
  misc_feature (333)..(986): NCBI GI: 154295748 Blast Desc: BC1G_12877 [Botryotinia fuckeliana B05.10] gi|150843910|gb|EDN19103.1| BC1G_12877 [Botryotinia fuckeliana B05.10]
  misc_feature (412)..(987): NCBI GI: 261352916 Blast Desc: GTPase-activating protein gyp3 [Verticillium albo-atrum VaMs.102]
  misc_feature (334)..(986): NCBI GI: 156061960 Blast Desc: SS1G_01094 [Sclerotinia sclerotiorum 1980] gi|154696432|gb|EDN96170.1| SS1G_01094 [Sclerotinia sclerotiorum 1980]
  misc_feature (569)..(963): NCBI GI: 46116382 Blast Desc: FG04033.1 [Gibberella zeae PH-1]
  misc_feature (241)..(988): NCBI GI: 116195398 Blast Desc: CHGG_04297 [Chaetomium globosum CBS 148.51] gi|88180210|gb|EAQ87678.1| CHGG_04297 [Chaetomium globosum CBS 148.51]
  misc_feature (383)..(958): NCBI GI: 171691402 Blast Desc: protein product [Podospora anserina] gi|170945649|emb|CAP71762.1| protein product [Podospora anserina]
  misc_feature (569)..(987): NCBI GI: 145611790 Blast Desc: MGG_00118 [Magnaporthe grisea 70-15] gi|145019038|gb|EDK03317.1| MGG_00118 [Magnaporthe grisea 70-15]
  misc_feature (569)..(954): NCBI GI: 85082490 Blast Desc: NCU04514 [Neurospora crassa OR74A] gi|28918006|gb|EAA27689.1| [Neurospora crassa OR74A]
  misc_feature (391)..(964): NCBI GI: 159127350 Blast Desc: GTPase activating protein (Gyp3), [Aspergillus fumigatus A1163]
  misc_feature: Useful for introducing or modulating the production of volatile compounds
MVEVTRPDDTLLVSWAKGPGEAMAGKTMAVMQNPDNGSSEPLQHQHQQQYHYHHRQLGNDAAHAYVTDHSSNSSGPARVPRPDRSANFSKPVLASVPALAPAHPATRKPSLKHVRDSVAVYTSTTTPPSHGYLDPDNTHSHTDTHDYSFSPSIPSPGTSTFASHARHHDLRVHTSGDAREPSSPSYQIPSPPISPRWDSLPRSDVSVHSRVQPSMPSSPSPSTFPHESSVSGSGSHRSIDTIASETRDEFPSLPVARTNIPESPMAVGNFSRPRLPSIKQPHIDSPRLRSPMQPQFEASQLDPLNSPANWPRSRGPSISSNQSASTYASVSISLRPSLESYHERSRGRPRPQHATPARQALTNIRAESSGPAFTRGLRDPPIPRMASLPSEELRSSFRSQLSTSTAQGTLATERSSVMTKSSSITSVYGPVDNDLSVDDVLGLYDKGFDDDSAGEDDDFQDSTRPPTAVSELSKMPTTTLEVTPEEMSLPAPPFISAESGIVRKKSIVRDSAAIFRVSNHVSTPSEDANVSDDVPGQRGDSPVSSPDDFRPSPPTRHETTLTTTGFDERDRYGFKKSSQYITREEFDRWDSGYSEFLTRRKKKWILHLKENGLMTDSPNRFPPRSAKTKRFVRKGIPPEWRGAAWFYYAGGPAILQKHRGLYDELLKSQVKDVDSEAIERDLHRTFPDNIRFRSSSGPNLPAHEENAKRNSQLTVGGSEEGDPMRDETPMISSLRRVLTAFSIYNPRIGYCQSLNFLAGLLLLFVESEEHAFWLLNIITRVYLPGTHEMSLEGANVDLGVLMTTIQESMPNVWAKIGGELDGTDAVRPKSRRHLRRGELTTRLPPITLSMTSWFMSCFIGTLPIESTLRVWDIFFYEGSKTLFRIALTILRLGEGEIKKVADPMEIFQVVQTMPRKMLDANGLMEACYKRRNGFGHLSQETIEQRRQERRMHVKAEKEKLAAGIPVTPTDGDVSRKGTLFKRGKARDRTQTVNGR

SEQ ID NO: 24680 - DNA, 6282 bp, Muscodor strobelii; identical to SEQ ID NO: 24677
  misc_feature: SGI EST ID NO. CUFF.58365.0
  misc_feature: Variant of the nucleotide sequence at SEQ ID NO 24678

SEQ ID NO: 24681 - DNA, 456 bp, Muscodor strobelii
  misc_feature: SGI cDNA ID NO. 568417
  misc_feature: Elevated expression when VOC is produced
  misc_feature: Encodes the peptide sequence at SEQ ID NO 24682
atgagttcacgcaagagaaagtcagacgaagaagaggagctcgttgctcttcccagcgatgaaagtgaggaagaagaagagtatgtctcggaaggtgatgaagatgaagatgatgtcgatgatgacgatgacgatgaggaatttgaagaagacgccgagcctgaggaggaggaaaatggcgttaagccacaagctcctccagccaagaaacagaagacgaccaatgcctccaacgagcccgttcccgtcgtagataatggagaagaagaggaggaaggagaagaggagttcgatgaggaggacgcggaggacgtcgatgatgaagaagaagaggaggatgaagagggtgtcgacgtgcctacctccaaggccaagacaggcgtcgatgttccagctacttccacgaaggcatcccatgctgtggcagcagatggcgatgatgatgaggaagaatga

SEQ ID NO: 24682 - protein, 151 aa, Muscodor strobelii
  misc_feature: SGI Peptide ID NO. 568417
  misc_feature: Useful for introducing or modulating the production of volatile compounds
MSSRKRKSDEEEELVALPSDESEEEEEYVSEGDEDEDDVDDDDDDEEFEEDAEPEEEENGVKPQAPPAKKQKTTNASNEPVPVVDNGEEEEEGEEEFDEEDAEDVDDEEEEEDEEGVDVPTSKAKTGVDVPATSTKASHAVAADGDDDEEE

SEQ ID NO: 24683 - DNA, 1343 bp, Muscodor strobelii
  misc_feature: SGI EST ID NO. CUFF.58112.0
  misc_feature: Variant of the nucleotide sequence at SEQ ID NO 24681
cgtatcaatacttctcaatacatgtaaacgtaatcaaggcggaggtagccaattctctcccagagcttgtgtgtgcctatccaactgctaagctcactccgccaccccttctaacagcacaccgtccaaactccatgctgcgttcctcttccatccccatcttccctgccctctctcccacctcaactctgatccagctaactcacctgcgtgtctgtccaccttacctccatagcctgcctactaccaatcgattccccccagcccagcttgaccacccaagtcccccaaaatccagccctctgtccctctccgatcccacgctctcagcaggagctccctaacacacgcacaacacccagacattccccccctatcctccccagctctccccattctctgtttcctctcttctttccttttcttaccccgtacacaataatccgctctatctgtcccatttgatcactcctcccaccaaacgaagctgcttctccatcaatctctagccccaaatccgctacaccggcttcaagatgagttcacgcaagagaaagtcagacgaagaagaggagctcgttgctcttcccagcgatgaaagtgaggaagaagaagagtatgtctcggaaggtgatgaagatgaagatgatgtcgatgatgacgatgacgatgaggaatttgaagaagacgccgagcctgaggaggaggaaaatggcgttaagccacaagctcctccagccaagaaacagaagacgaccaatgcctccaacgagcccgttcccgtcgtagataatggagaagaagaggaggaaggagaagaggagttcgatgaggaggacgcggaggacgtcgatgatgaagaagaagaggaggatgaagagggtgtcgacgtgcctacctccaaggccaagacaggcgtcgatgttccagctacttccacgaaggcatcccatgctgtggcagcagatggcgatgatgatgaggaagaatgatgcgtccatcgcttgtccttagctctagttgtgcttaggcatagggcacatggcttcttctcttgtcttctcttatcttgcccttgcatctacttcattggacctatacttggaataagtagagctattgcctttttggcccgtaatacatagcacgtgtctgaattgagcgcatagaccagtctgtcatagcaaaacaggaagatgacaagtaaaaaagaggattttcttttcataggcccaccagtgctgtctagtatcggtcgaagcatagtatcgatgcagaggttcgaccagtcgacacatgtgtgctttattgctggctttgtttgcccggaccgaatgagcaag

SEQ ID NO: 24684 - DNA, 1509 bp, Muscodor strobelii
  misc_feature: SGI cDNA ID NO. 568418
  misc_feature: Reduced expression when VOC is produced
  misc_feature: Encodes the peptide sequence at SEQ ID NO 24685
atggcacccctggccaaaaaacggagggtcgagcccaccagcacgaacgacaacggcggcgacgatagtcccagcgatactggcagcggcaacgatagcagcggcgaaagcggcagcgacaatgacaccagccaagacgaccccgtccccaaccagacctcgaccgagcacgagtccgaaaccgtcgacgaggaagctgccgaagaccagccccgcaagactttcacggagctgggcatcatccaacccctcgctgacgcctgcgcttcgctcaagttcactcatgctactcccatccaggccaaggccatccccgtcgcgctctcgggccgcgacgtcatcggcctcgctgagacgggctccggcaagacggccgccttcgtgctgcctatcctccaagccttactccaagaatcacggccttctcccctgtacgccctcattctggctccgacaagagagcttgcccagcagattggccaggcctgtgacgccctcggctccaccatctccttgcggacggtgacaatcgtcggtgggctcgatatggtcggacaggccatctcgctcggcaagaagcctcatattgtcgtcgcaacaccgggacgtctcattgaccatctggagaagaccaaaggtttcaaactgggccagctgaaatatcttgttatagacgaggcagacaggctgctcgacatggactttgggccagtgttggacaagttgttgaaattcatccccagagagcgcaggaccttcctattctcagccaccatgagctccaaggtcgagtctcttcagcgtgccagcctcaaggaccccgtccgtgtctctgtttcgagctccaagtaccagaccgtgtctaccttgaaacagcactatttattcatcccccatatgttcaaggacatctatctcgtctatctgctgaacgagttcgccggccgtagcaccatcatcttcacccgcaccgtctttgaggcccagcgcatatccatcttgatccgacaactcgggttcaaaggagttccgcttcatggccaattgtcacaatcggcgcgcttaggtgccctgaacaagttcaaaagctcggcgcgcgatatccttatcgccactgacgttgccgccagaggtctcgatattccttcggttgatgttgtcctgaactacgacctcccaggcgacagcaaaacttacatccacagagttggtcgaacggcgagagcaggcagagcaggacaagctgtcaacatcgtcactcagtatgacctagagatctatagccgtatcgaggctgccctaggttcgaagctccctgagtacgagactgagcgcgacgaagtcatggtcttccggcagcgtgttgaagaagcacaacgggaatcgagaaaccagatgaagagtctcatggaagatcgcgggaagaaaggagctgtcatcaggggtcgcaggacaaacgcacccggtggcaaaaggcgtcgtgacaacatggatgccgaggaaggctag

SEQ ID NO: 24685 - protein, 502 aa, Muscodor strobelii
  misc_feature: SGI Peptide ID NO. 568418
  misc_feature (97)..(266): Pfam Id: PF00270 Pfam Desc: DEAD/DEAH box helicase
  misc_feature (334)..(410): Pfam Id: PF00271 Pfam Desc: Helicase conserved C-terminal domain
  misc_feature (31)..(502): NCBI GI: 145611832 Blast Desc: MGG_11672 [Magnaporthe grisea 70-15] gi|152060562|sp|A4RGD1.1|RRP3_MAGGR RecName: Full=ATP-dependent rRNA helicase RRP3 gi|145019073|gb|EDK03352.1| MGG_11672 grisea
  misc_feature (46)..(502): NCBI GI: 85082449 Blast Desc: ATP-dependent rRNA helicase RRP3 [Neurospora crassa OR74A] gi|74662479|sp|Q7RY59.1|RRP3_NEUCR RecName: Full=ATP-dependent rRNA helicase rrp-3 gi|28917996|gb|EAA27679.1|
  misc_feature (49)..(502): NCBI GI: 116195380 Blast Desc: CHGG_04288 [Chaetomium globosum CBS 148.51] gi|118595827|sp|Q2H1Q8.1|RRP3_CHAGB RecName: Full=ATP-dependent rRNA helicase RRP3 gi|88180201|gb|EAQ87669.1| CHGG_04288 globosum
  misc_feature (64)..(502): NCBI GI: 46116372 Blast Desc: FG04028.1 [Gibberella zeae PH-1] gi|91207782|sp|Q4IFI0.1|RRP3_GIBZE RecName: Full=ATP-dependent rRNA helicase RRP3
  misc_feature (51)..(502): NCBI GI: 171691382 Blast Desc: protein product [Podospora anserina] gi|170945639|emb|CAP71752.1| protein product [Podospora anserina]
  misc_feature (73)..(502): NCBI GI: 156052799 Blast Desc: conserved [Sclerotinia sclerotiorum 1980] gi|160358660|sp|A7EML8.1|RRP3_SCLS1 RecName: Full=ATP-dependent rRNA helicase rrp3 gi|154704345|gb|EDO04084.1| conserved 1980]
  misc_feature (73)..(502): NCBI GI: 154315003 Blast Desc: conserved [Botryotinia fuckeliana B05.10] gi|160358659|sp|A6RW56.1|RRP3_BOTFB RecName: Full=ATP-dependent rRNA helicase rrp3 gi|150848381|gb|EDN23574.1| conserved B05.10]
  misc_feature (59)..(502): NCBI GI: 261357856 Blast Desc: ATP-dependent rRNA helicase RRP3 [Verticillium albo-atrum VaMs.102]
  misc_feature (65)..(479): NCBI GI: 256723080 Blast Desc: [Nectria haematococca mpVI 77-13-4]
  misc_feature (45)..(502): NCBI GI: 154284444 Blast Desc: ATP-dependent rRNA helicase RRP3 [Ajellomyces capsulatus NAm1] gi|160358658|sp|A6QRQ7.1|RRP3_AJECN RecName: Full=ATP-dependent rRNA helicase RRP3 gi|150406658|gb|EDN02199.1|
  misc_feature: Useful for introducing or modulating the production of volatile compounds
MAPLAKKRRVEPTSTNDNGGDDSPSDTGSGNDSSGESGSDNDTSQDDPVPNQTSTEHESETVDEEAAEDQPRKTFTELGIIQPLADACASLKFTHATPIQAKAIPVALSGRDVIGLAETGSGKTAAFVLPILQALLQESRPSPLYALILAPTRELAQQIGQACDALGSTISLRTVTIVGGLDMVGQAISLGKKPHIVVATPGRLIDHLEKTKGFKLGQLKYLVIDEADRLLDMDFGPVLDKLLKFIPRERRTFLFSATMSSKVESLQRASLKDPVRVSVSSSKYQTVSTLKQHYLFIPHMFKDIYLVYLLNEFAGRSTIIFTRTVFEAQRISILIRQLGFKGVPLHGQLSQSARLGALNKFKSSARDILIATDVAARGLDIPSVDVVLNYDLPGDSKTYIHRVGRTARAGRAGQAVNIVTQYDLEIYSRIEAALGSKLPEYETERDEVMVFRQRVEEAQRESRNQMKSLMEDRGKKGAVIRGRRTNAPGGKRRRDNMDAEEG

SEQ ID NO: 24686 - DNA, 2038 bp, Muscodor strobelii
  misc_feature: SGI EST ID NO. CUFF.58151.0
  misc_feature: Variant of the nucleotide sequence at SEQ ID NO 24684
gcgaaccttgagttgagtcacaggtcccaaggtcgaattgccatatcacagaatattttcacgtcaaacccgacatcaactgcacgagtcggcttagcacacaacttgtcctgggattgttctcgtccctcatctcacgacggcattgagtcaatccgctgtgacacgcgaaacaagccatcatggcacccctggccaaaaaacggagggtcgagcccaccagcacgaacgacaacggcggcgacgatagtcccagcgatactggcagcggcaacgatagcagcggcgaaagcggcagcgacaatgacaccagccaagacgaccccgtccccaaccagacctcgaccgagcacgagtccgaaaccgtcgacgaggaagctgccgaagaccagccccgcaagactttcacggagctgggcatcatccaacccctcgctgacgcctgcgcttcgctcaagttcactcatgctactcccatccaggccaaggccatccccgtcgcgctctcgggccgcgacgtcatcggcctcgctgagacgggctccggcaagacggccgccttcgtgctgcctatcctccaagccttactccaagaatcacggccttctcccctgtacgccctcattctggctccgacaagagagcttgcccagcagattggccaggcctgtgacgccctcggctccaccatctccttgcggacggtgacaatcgtcggtgggctcgatatggtcggacaggccatctcgctcggcaagaagcctcatattgtcgtcgcaacaccgggacgtctcattgaccatctggagaagaccaaaggtttcaaactgggccagctgaaatatcttgttatagacgaggcagacaggctgctcgacatggactttgggccagtgttggacaagttgttgaaattcatccccagagagcgcaggaccttcctattctcagccaccatgagctccaaggtcgagtctcttcagcgtgccagcctcaaggaccccgtccgtgtctctgtttcgagctccaagtaccagaccgtgtctaccttgaaacagcactatttattcatcccccatatgttcaaggacatctatctcgtctatctgctgaacgagttcgccggccgtagcaccatcatcttcacccgcaccgtctttgaggcccagcgcatatccatcttgatccgacaactcgggttcaaaggagttccgcttcatggccaattgtcacaatcggcgcgcttaggtgccctgaacaagttcaaaagctcggcgcgcgatatccttatcgccactgacgttgccgccagaggtctcgatattccttcggttgatgttgtcctgaactacgaccgtgcgtactcattctttgccgtcgtgccttcatgcgcagccattttcactgttttcttttcccgctatattgcgaaaaaggcacaagccaactactaacacctatgatacagtcccaggcgacagcaaaacttacatccacagagttggtcgaacggcgagagcaggcagagcaggacaagctgtcaacatcgtcactcagtatgacctagagatctatagccgtatcgaggctgccctaggttcgaagctccctgagtacgagactgagcgcgacgaagtcatggtcttccggcagcgtgttgaagaagcacaacgggaatcgagaaaccagatgaagagtctcatggaagatcgcgggaagaaaggagctgtcatcaggggtcgcaggacaaacgcacccggtggcaaaaggcgtcgtgacaacatggatgccgaggaaggctaggctggacagagcactcgagtgccggaaatgagaatgaggacacgcttgcattgggtttttgataccacatgaggggtctggagttattgattgccttcgaaatattccagtgattgatccgaataatcgcagaatctgttcctgaatcatttagtaaattcattcgcgacgatccgattggctacagtctcgaacagctcattagtgaaacgggtattgacgtgaaagatattcg

SEQ ID NO: 24687 - DNA, 1563 bp, Muscodor strobelii
  misc_feature: SGI cDNA ID NO. 568419
  misc_feature: Encodes the peptide sequence at SEQ ID NO 24688
atggcacccctggccaaaaaacggagggtcgagcccaccagcacgaacgacaacggcggcgacgatagtcccagcgatactggcagcggcaacgatagcagcggcgaaagcggcagcgacaatgacaccagccaagacgaccccgtccccaaccagacctcgaccgagcacgagtccgaaaccgtcgacgaggaagctgccgaagaccagccccgcaagactttcacggagctgggcatcatccaacccctcgctgacgcctgcgcttcgctcaagttcactcatgctactcccatccaggccaaggccatccccgtcgcgctctcgggccgcgacgtcatcggcctcgctgagacgggctccggcaagacggccgccttcgtgctgcctatcctccaagccttactccaagaatcacggccttctcccctgtacgccctcattctggctccgacaagagagcttgcccagcagattggccaggcctgtgacgccctcggctccaccatctccttgcggacggtgacaatcgtcggtgggctcgatatggtcggacaggccatctcgctcggcaagaagcctcatattgtcgtcgcaacaccgggacgtctcattgaccatctggagaagaccaaaggtttcaaactgggccagctgaaatatcttgttatagacgaggcagacaggctgctcgacatggactttgggccagtgttggacaagttgttgaaattcatccccagagagcgcaggaccttcctattctcagccaccatgagctccaaggtcgagtctcttcagcgtgccagcctcaaggaccccgtccgtgtctctgtttcgagctccaagtaccagaccgtgtctaccttgaaacagcactatttattcatcccccatatgttcaaggacatctatctcgtctatctgctgaacgagttcgccggccgtagcaccatcatcttcacccgcaccgtctttgaggcccagcgcatatccatcttgatccgacaactcgggttcaaaggagttccgcttcatggcaagttagcaattcctctgggtctaaaaacatatccactaatctctcacttaggccaattgtcacaatcggcgcgcttaggtgccctgaacaagttcaaaagctcggcgcgcgatatccttatcgccactgacgttgccgccagaggtctcgatattccttcggttgatgttgtcctgaactacgacctcccaggcgacagcaaaacttacatccacagagttggtcgaacggcgagagcaggcagagcaggacaagctgtcaacatcgtcactcagtatgacctagagatctatagccgtatcgaggctgccctaggttcgaagctccctgagtacgagactgagcgcgacgaagtcatggtcttccggcagcgtgttgaagaagcacaacgggaatcgagaaaccagatgaagagtctcatggaagatcgcgggaagaaaggagctgtcatcaggggtcgcaggacaaacgcacccggtggcaaaaggcgtcgtgacaacatggatgccgaggaaggctag

SEQ ID NO: 24688 - protein, 520 aa, Muscodor strobelii
  misc_feature: SGI Peptide ID NO. 568419
  misc_feature (97)..(266): Pfam Id: PF00270 Pfam Desc: DEAD/DEAH box helicase
  misc_feature (352)..(428): Pfam Id: PF00271 Pfam Desc: Helicase conserved C-terminal domain
  misc_feature (31)..(520): NCBI GI: 145611832 Blast Desc: MGG_11672 [Magnaporthe grisea 70-15] gi|152060562|sp|A4RGD1.1|RRP3_MAGGR RecName: Full=ATP-dependent rRNA helicase RRP3 gi|145019073|gb|EDK03352.1| MGG_11672 grisea
  misc_feature (49)..(520): NCBI GI: 116195380 Blast Desc: CHGG_04288 [Chaetomium globosum CBS 148.51] gi|118595827|sp|Q2H1Q8.1|RRP3_CHAGB RecName: Full=ATP-dependent rRNA helicase RRP3 gi|88180201|gb|EAQ87669.1| CHGG_04288 globosum
  misc_feature (46)..(520): NCBI GI: 85082449 Blast Desc: ATP-dependent rRNA helicase RRP3 [Neurospora crassa OR74A] gi|74662479|sp|Q7RY59.1|RRP3_NEUCR RecName: Full=ATP-dependent rRNA helicase rrp-3 gi|28917996|gb|EAA27679.1|
  misc_feature (64)..(520): NCBI GI: 46116372 Blast Desc: FG04028.1 [Gibberella zeae PH-1] gi|91207782|sp|Q4IFI0.1|RRP3_GIBZE RecName: Full=ATP-dependent rRNA helicase RRP3
  misc_feature (51)..(520): NCBI GI: 171691382 Blast Desc: protein product [Podospora anserina] gi|170945639|emb|CAP71752.1| protein product [Podospora anserina]
  misc_feature (73)..(520): NCBI GI: 156052799 Blast Desc: conserved [Sclerotinia sclerotiorum 1980] gi|160358660|sp|A7EML8.1|RRP3_SCLS1 RecName: Full=ATP-dependent rRNA helicase rrp3 gi|154704345|gb|EDO04084.1| conserved 1980]
  misc_feature (73)..(520): NCBI GI: 154315003 Blast Desc: conserved [Botryotinia fuckeliana B05.10] gi|160358659|sp|A6RW56.1|RRP3_BOTFB RecName: Full=ATP-dependent rRNA helicase rrp3 gi|150848381|gb|EDN23574.1| conserved B05.10]
  misc_feature (59)..(520): NCBI GI: 261357856 Blast Desc: ATP-dependent rRNA helicase RRP3 [Verticillium albo-atrum VaMs.102]
  misc_feature (65)..(497): NCBI GI: 256723080 Blast Desc: [Nectria haematococca mpVI 77-13-4]
  misc_feature (45)..(520): NCBI GI: 154284444 Blast Desc: ATP-dependent rRNA helicase RRP3 [Ajellomyces capsulatus NAm1] gi|160358658|sp|A6QRQ7.1|RRP3_AJECN RecName: Full=ATP-dependent rRNA helicase RRP3 gi|150406658|gb|EDN02199.1|
MAPLAKKRRVEPTSTNDNGGDDSPSDTGSGNDSSGESGSDNDTSQDDPVPNQTSTEHESETVDEEAAEDQPRKTFTELGIIQPLADACASLKFTHATPIQAKAIPVALSGRDVIGLAETGSGKTAAFVLPILQALLQESRPSPLYALILAPTRELAQQIGQACDALGSTISLRTVTIVGGLDMVGQAISLGKKPHIVVATPGRLIDHLEKTKGFKLGQLKYLVIDEADRLLDMDFGPVLDKLLKFIPRERRTFLFSATMSSKVESLQRASLKDPVRVSVSSSKYQTVSTLKQHYLFIPHMFKDIYLVYLLNEFAGRSTIIFTRTVFEAQRISILIRQLGFKGVPLHGKLAIPLGLKTYPLISHLGQLSQSARLGALNKFKSSARDILIATDVAARGLDIPSVDVVLNYDLPGDSKTYIHRVGRTARAGRAGQAVNIVTQYDLEIYSRIEAALGSKLPEYETERDEVMVFRQRVEEAQRESRNQMKSLMEDRGKKGAVIRGRRTNAPGGKRRRDNMDAEEG

SEQ ID NO: 24689 - DNA, 2038 bp, Muscodor strobelii; identical to SEQ ID NO: 24686
  misc_feature: SGI EST ID NO. CUFF.58151.0
  misc_feature: Variant of the nucleotide sequence at SEQ ID NO 24687

SEQ ID NO: 24690 - DNA, 1323 bp, Muscodor strobelii
  misc_feature: SGI cDNA ID NO. 568420
  misc_feature: Reduced expression when VOC is produced
  misc_feature: Encodes the peptide sequence at SEQ ID NO 24691
atggccaagccacggacgaagaagcggacgcatgtcggcgccaacaacccgaagcacaaggcgccgctgacggggcggtcggccgtcaacgaccccaagagcatggtcatccgcatcggcgccggcgaggtcgggagcgccgcggccaaccgcctgcgcgactatgtcaccatgacggggccgctcggcgtcacccacctgctgctcttctcccgctccgacgccggcaacaccaacctgcgcgtcgccaccaccccgcgcgggcccacgctgcacttccgcgtcgagaagtacgccctcgcccgcgacgtccgccgtgcccagcgccatccccgcggcggcggcaaggagtacgacacatcccccctgctcatcatgaacgacatctccacgcccggcgccgacgcctcctccgccgtccccaagcacctcgagtccctcaccatcaccgtcttccagtccctcttcccccgcatcaaccctgagaccacccccctcaagtccatacggcgtgtcctcctcgtcaatagagagcgatcgaccgacgaggacgacggcagtttcgtcctcaacttccgccactacgccatcaccaccaagcccgccggcatctcccggcccctgcgccgcctcaatgccgccgacaagatcctttcgggcaagaacggccggaaaggtggcctacccaacctcggcaagctcgaggacatctccgacttcatgattggaggcgagaacggcgacggctacatgaccgacggcaccagtgggagcgagatggacaccgacgcagaggtcgaggttctcgaagacgcgccccgcaaggtgttgtccagcaaggcccgagccacacagcgtgacaatgagggtaatgattttgaagacgacgagagggtagaacggcggagggtcaaactcgtcgagctgggccctcgcatgaagctacgcatgactaaagtcgaggaaggactatgttccggaaagactatgtggcatgacaatatatacaaatctagaacagaagaacaagagctcgagaggcgatgggacatgaagagaagggaaaaggaagcaaggaggagagagcaaaaggcaaatgtagagaggaaaaagaaagagcgaggtgccaatggcgccaagaagggcgacgacgacgacgacgatgaggtcaacggaaacaatagcgacttgtttgatgagatgatggatgacgacgacgaaatagacagcgaaggcctcgcgggtgacggcgaagaggctttcaatagaggactggacgaggacgaatgggaagacgaaagagacgagattgccggttcgtaa

SEQ ID NO: 24691 - protein, 440 aa, Muscodor strobelii
  misc_feature: SGI Peptide ID NO. 568420
  misc_feature (17)..(320): Pfam Id: PF04427 Pfam Desc: Brix domain
  misc_feature (50)..(320): Pfam Id: PF04427 Pfam Desc: Brix domain
  misc_feature (1)..(422): NCBI GI: 116195378 Blast Desc: CHGG_04287 [Chaetomium globosum CBS 148.51] gi|88180200|gb|EAQ87668.1| CHGG_04287 [Chaetomium globosum CBS 148.51]
  misc_feature (1)..(422): NCBI GI: 171691380 Blast Desc: protein product [Podospora anserina] gi|170945638|emb|CAP71751.1| protein product [Podospora anserina]
  misc_feature (1)..(422): NCBI GI: 85082445 Blast Desc: NCU04503 [Neurospora crassa OR74A] gi|28917995|gb|EAA27678.1| NCU04503 [Neurospora crassa OR74A]
  misc_feature (1)..(422): NCBI GI: 46116370 Blast Desc: FG04027.1 [Gibberella zeae PH-1]
  misc_feature (1)..(422): NCBI GI: 261357855 Blast Desc: ribosome biogenesis protein SSF1 [Verticillium albo-atrum VaMs.102]
  misc_feature (1)..(422): NCBI GI: 39975533 Blast Desc: MGG_00087 [Magnaporthe grisea 70-15] gi|145019072|gb|EDK03351.1| MGG_00087 [Magnaporthe grisea 70-15]
  misc_feature (1)..(369): NCBI GI: 156052797 Blast Desc: SS1G_06566 [Sclerotinia sclerotiorum 1980] gi|154704344|gb|EDO04083.1| SS1G_06566 [Sclerotinia sclerotiorum 1980]
  misc_feature (1)..(404): NCBI GI: 225556563 Blast Desc: brix domain-containing protein c [Ajellomyces capsulatus G186AR]
  misc_feature (1)..(404): NCBI GI: 240273676 Blast Desc: brix domain-containing protein c [Ajellomyces capsulatus H143]
  misc_feature (1)..(385): NCBI GI: 261194142 Blast Desc: ribosome biogenesis protein Ssf2 [Ajellomyces dermatitidis SLH14081] gi|239588490|gb|EEQ71133.1| ribosome biogenesis protein Ssf2 [Ajellomyces dermatitidis SLH14081] Ssf2
  misc_feature: Useful for introducing or modulating the production of volatile compounds
MAKPRTKKRTHVGANNPKHKAPLTGRSAVNDPKSMVIRIGAGEVGSAAANRLRDYVTMTGPLGVTHLLLFSRSDAGNTNLRVATTPRGPTLHFRVEKYALARDVRRAQRHPRGGGKEYDTSPLLIMNDISTPGADASSAVPKHLESLTITVFQSLFPRINPETTPLKSIRRVLLVNRERSTDEDDGSFVLNFRHYAITTKPAGISRPLRRLNAADKILSGKNGRKGGLPNLGKLEDISDFMIGGENGDGYMTDGTSGSEMDTDAEVEVLEDAPRKVLSSKARATQRDNEGNDFEDDERVERRRVKLVELGPRMKLRMTKVEEGLCSGKTMWHDNIYKSRTEEQELERRWDMKRREKEARRREQKANVERKKKERGANGAKKGDDDDDDEVNGNNSDLFDEMMDDDDEIDSEGLAGDGEEAFNRGLDEDEWEDERDEIAGS

SEQ ID NO: 24692 - DNA, 4138 bp, Muscodor strobelii
  misc_feature: SGI EST ID NO. CUFF.58193.1
  misc_feature: Variant of the nucleotide sequence at SEQ ID NO 24690
tgccattcattgagacatggaatgcaagtgtacctaaggaaatcccatatctttgagctgaggatgacacgccggttccgtctccaacacgaccatctagaactccaacagctgtcacaagatcgtccaattcgcaagtactcatcttcactcggctgtgtctctcacatgtgtggtagagaacagcgctaggtatttttcccccagcgacttggcgagcttgggtacctagcagaggcttatcttatcgctatcgagtctgcatcggctccgttattttttctgcccaggtcgcttatcaacttaaagtttctagaagtcgacgactgaagcatcccacctcgcctgcaaacaccgtgacgaccgacggcattgcaccatcacgcccaactgtcgcattcattcccaattattcaagagagaagactacgatatcaccgaccaacatctctctggactgtgactgccaattcgctctagaacgggccccgcgatggccaagccacggacgaagaagcggacgcatgtcggcgccaacaacccgaagcacaaggcgccgctgacggggcggtcggccgtcaacgaccccaagagcatggtcatccgcatcggcgccggcgaggtcgggtcgagcgtgagccagctggccaaggacgtgcgccaggtcatggagccgcgcacggcgtcgcgcctcaaggagcgccgcggccaaccgcctgcgcgactatgtcaccatgacggggccgctcggcgtcacccacctgctgctcttctcccgctccgacgccggcaacaccaacctgcgcgtcgccaccaccccgcgcgggcccacgctgcacttccgcgtcgagaagtacgccctcgcccgcgacgtccgccgtgcccagcgccatccccgcggcggcggcaaggagtacgacacatcccccctgctcatcatgaacgacatctccacgcccggcgccgacgcctcctccgccgtccccaagcacctcgagtccctcaccatcaccgtcttccagtccctcttcccccgcatcaaccctgagaccacccccctcaagtccatacggcgtgtcctcctcgtcaatagagagcgatcgaccgacgaggacgacggcagtttcgtcctcaacttccgccactacgccatcaccaccaagcccgccggcatctcccggcccctgcgccgcctcaatgccgccgacaagatcctttcgggcaagaacggccggaaaggtggcctacccaacctcggcaagctcgaggacatctccgacttcatgattggaggcgagaacggcgacggctacatgaccgacggcaccagtgggagcgagatggacaccgacgcagaggtcgaggttctcgaagacgcgccccgcaaggtgttgtccagcaaggcccgagccacacagcgtgacaatgagggtaatgattttgaagacgacgagagggtagaacggcggagggtcaaactcgtcgagctgggccctcgcatgaagctacgcatgactaaagtcgaggaaggactatgttccggaaagactatgtggcatgacaatatatacaaatctagaacagaagaacaagagctcgagaggcgatgggacatgaagagaagggaaaaggaagcaaggaggagagagcaaaaggcaaatgtagagaggaaaaagaaagagcgaggtgccaatggcgccaagaagggcgacgacgacgacgacgatgaggtcaacggaaacaatagcgacttgtttgatgagatgatggatgacgacgacgaaatagacagcgaaggcctcgcgggtgacggcgaagaggctttcaatagaggactggacgaggacgaatgggaagacgaaagagacgagattgccggttcgtaaccgtgagagataccaatacaaatatcaaaaaggccatgggtattttgccaggctcaatgacgcgactcgtttgaagagtgatgcattttgattgcaaaggcatttgctaagtgaaatctgcctgctcaattaccactcaatatcgatcaaactcgggtcttgtgtcgacccatccttggcgacatttgagttggccatctccatttgcgtggaaactggtggatgtcatctcggcgaagggaggaatgagtgaaggagcaactccgggcttggagacaccagctaaggcttgctttctaagctcgatccagggaggagctgcaatccaggagtcaggaatgtgaagggtctctagtcatgtctcaaagtcagggtgctcgcccctttcgagttccgctgatcttcacctcgtgcaacgctctctccctcaccttcatttcatttgttgctcagttcccggtgtccatgagatcggttccaaggtaggtgagaatgatgaagatgagtatcgacatatactgggctgggctgctgctgctcgcgcccctcgtcggtaccgtcgcgagatgggaaaacatcgctgccttgttcgccaagttacgaggtcgcacaacgacgagagagaagacgggcaggaagccgagtgatctcgaagcgaggaggttcaagaagacctttttgcgagtgtatcttctagttatgggtgctgagtggctacagggccctttcacatatacactcttccggcatcaaaagacgctcccagaatggaccgtcgcgctcctctacgtcgttacttacaccgcggccgcgctgtcctctctattcaccggctacctcaccgatcgattcgggaggcgaaaggcttgtctatgcttttgcttcattcatgccctggccgctgtcacggtgtgctcagaccagcttccgatcttgatactggggcgagtgctggcgggtatcggcatcaccttgctatggaccgcgttcgaaagttggatgattgcggagtataacgaacggggtttggaggagagcgagttgagactaggcgccatgttcgcgggcatgaccactgcgaattgtcttacggccatctttgcgggtgttcttggtcattgtgttgttttcgtgtgggggagtaagattgtgcctttcttactgggtgtcgtcctcgatttgacagccgccatcctgatggtctggacctggagcgaaaaccgcggtacgtctcctctctctgcggccgacgaggagggtttcgttcaagacgcccgcgcaacaacccagggagagacatcagcttcgccatcgcttggtattcagacacatgagttgacaaaagatgcacgagtgtggataattagtttcgtaacgtgttgcttcgaaggcacactggtttctcttcctgttcttctggcccggtgcgctccaagatgcgcatggatcatcagagactgatacgatcccacacggtgttattttcgcatgcttcatggcttccatggtccttggtgccttgggattcaatattctcatatctcatcatccttcaagttctggtaacgcgatggaactcaccatcaagccagacacattaacaccgacccggctcctcggcacagcgctcctcctggcagctgttggtttcttaactgcggcctttataaatcacgaactaggctttttcatcgcgtttcttctcattgaagcatgtaatggggtctacgtcccgagcatcgcgtaccatcgcggaatcattgttgaggataaggacagagcgcgcgtgtatagtctcatgaacataccgctttttctgttcgttgtcctcgcgttgagctcgacggcgggttctgatagtggcggatataacgttcatagacagactgtgttcgtcatttgtgcaattatactctttgctgcgactctagtcgtccttctatttcttaatattgggcaggcatcaaaagagttccatccagtcccctcgggggacgagaataaggagggcgtcaccattgacacgtcgttttgtatacaagaggatctagatgatggatgcacatgagattgcagtttttgcacgtgtctaatgggcccaagtgtgacaacaattccctcggcccctcttcggggtacaactgcttctgatagaatctgatagtatatgtacttgtatgcaccagttatatcatggcggccaatagataattcatagtttttggtgagcatcggcttcaagagtatagacg

SEQ ID NO: 24693 - DNA, 1254 bp, Muscodor strobelii
  misc_feature: SGI cDNA ID NO. 568421
  misc_feature: Reduced expression when VOC is produced
  misc_feature: Encodes the peptide sequence at SEQ ID NO 24694
atgatgaagatgagtatcgacatatactgggctgggctgctgctgctcgcgcccctcgtcggtaccgtcgcgagatgggaaaacatcgctgccttgttcgccaagttacgaggtcgcacaacgacgagagagaagacgggcaggaagccgagtgatctcgaagcgaggaggttcaagaagacctttttgcgagtgtatcttctagttatgggtgctgagtggctacagggccctttcacatatacactcttccggcatcaaaagacgctcccagaatggaccgtcgcgctcctctacgtcgttacttacaccgcggccgcgctgtcctctctattcaccggctacctcaccgatcgattcgggaggcgaaaggcttgtctatgcttttgcttcattcatgccctggccgctgtcacggtgtgctcagaccagcttccgatcttgatactggggcgagtgctggcgggtatcggcatcaccttgctatggaccgcgttcgaaagttggatgattgcggagtataacgaacggggtttggaggagagcgagttgagactaggcgccatgttcgcgggcatgaccactgcgaattgtcttacggccatctttgcgggtgttcttggtcattgtgttgttttcgtgtgggggagtaagattgtgcctttcttactgggtgtcgtcctcgatttgacagccgccatcctgatggtctggacctggagcgaaaaccgcggtacgtctcctctctctgcggccgacgaggagggtttcgttcaagacgcccgcgcaacaacccagggagagacatcagcttcgccatcgcttgagactgatacgatcccacacggtgttattttcgcatgcttcatggcttccatggtccttggtgccttgggattcaatattctcatatctcatcatccttcaagttctggtaacgcgatggaactcaccatcaagccagacacattaacaccgacccggctcctcggcacagcgctcctcctggcagctgttggtttcttaactgcggcctttataaatcacgaactaggctttttcatcgcgtttcttctcattgaagcatgtaatggggtctacgtcccgagcatcgcgtaccatcgcggaatcattgttgaggataaggacagagcgcgcgtgtatagtctcatgaacataccgctttttctgttcgttgtcctcgcgttgagctcgacggcgggttctgatagtggcggatatagtgagtattaa

SEQ ID NO: 24694 - protein, 417 aa, Muscodor strobelii
  misc_feature: SGI Peptide ID NO. 568421
  misc_feature (23)..(341): Pfam Id: PF05631 Pfam Desc: Domain of function (DUF791)
  misc_feature (62)..(405): Pfam Id: PF07690 Pfam Desc: Major Facilitator Superfamily
  misc_feature (58)..(245): Pfam Id: PF05631 Pfam Desc: Domain of function (DUF791)
  misc_feature (105)..(161): Pfam Id: PF00083 Pfam Desc: Sugar (and other) transporter
  misc_feature (6)..(411): NCBI GI: 189200815 Blast Desc: major facilitator superfamily domain containing protein 5 [Pyrenophora tritici-repentis Pt-1C-BFP] gi|187983843|gb|EDU49331.1| major facilitator superfamily domain
  misc_feature (52)..(410): NCBI GI: 261353103 Blast Desc: major facilitator superfamily domain-containing protein [Verticillium albo-atrum VaMs.102]
  misc_feature (4)..(227): NCBI GI: 171691378 Blast Desc: protein product [Podospora anserina] gi|170945637|emb|CAP71750.1| protein product [Podospora anserina]
  misc_feature (37)..(404): NCBI GI: 154301357 Blast Desc: BC1G_10348 [Botryotinia fuckeliana B05.10] gi|150856088|gb|EDN31280.1| BC1G_10348 [Botryotinia fuckeliana B05.10]
  misc_feature (4)..(406): NCBI GI: 258571621 Blast Desc: [Uncinocarpus reesii 1704] gi|237904884|gb|EEP79285.1| [Uncinocarpus reesii 1704]
  misc_feature (28)..(411): NCBI GI: 238845044 Blast Desc: major facilitator superfamily domain-containing protein 5 [Microsporum canis CBS 113480]
  misc_feature (4)..(406): NCBI GI: 119182447 Blast Desc: CIMG_06249 [Coccidioides immitis RS] gi|240109276|gb|EER27445.1| Major Facilitator Superfamily protein [Coccidioides posadasii C735 delta SOWgp]
  misc_feature (60)..(403): NCBI GI: 170108676 Blast Desc: [Laccaria bicolor S238N-H82] gi|164639422|gb|EDR03693.1| [Laccaria bicolor S238N-H82]
  misc_feature (58)..(403): NCBI GI: 198417576 Blast Desc: : similar to Y54G2A.4 [Ciona intestinalis]
  misc_feature (33)..(409): NCBI GI: 169850740 Blast Desc: CC1G_07433 [Coprinopsis cinerea okayama7#130] gi|116506813|gb|EAU89708.1| CC1G_07433 [Coprinopsis cinerea okayama7#130]
  misc_feature: Useful for introducing or modulating the production of volatile compounds
MMKMSIDIYWAGLLLLAPLVGTVARWENIAALFAKLRGRTTTREKTGRKPSDLEARRFKKTFLRVYLLVMGAEWLQGPFTYTLFRHQKTLPEWTVALLYVVTYTAAALSSLFTGYLTDRFGRRKACLCFCFIHALAAVTVCSDQLPILILGRVLAGIGITLLWTAFESWMIAEYNERGLEESELRLGAMFAGMTTANCLTAIFAGVLGHCVVFVWGSKIVPFLLGVVLDLTAAILMVWTWSENRGTSPLSAADEEGFVQDARATTQGETSASPSLETDTIPHGVIFACFMASMVLGALGFNILISHHPSSSGNAMELTIKPDTLTPTRLLGTALLLAAVGFLTAAFINHELGFFIAFLLIEACNGVYVPSIAYHRGIIVEDKDRARVYSLMNIPLFLFVVLALSSTAGSDSGGYSEY

SEQ ID NO: 24695 - DNA, 4292 bp, Muscodor strobelii
  misc_feature: SGI EST ID NO. CUFF.58193.0
  misc_feature: Variant of the nucleotide sequence at SEQ ID NO 24693
tgccattcattgagacatggaatgcaagtgtacctaaggaaatcccatatctttgagctgaggatgacacgccggttccgtctccaacacgaccatctagaactccaacagctgtcacaagatcgtccaattcgcaagtactcatcttcactcggctgtgtctctcacatgtgtggtagagaacagcgctaggtatttttcccccagcgacttggcgagcttgggtacctagcagaggcttatcttatcgctatcgagtctgcatcggctccgttattttttctgcccaggtcgcttatcaacttaaagtttctagaagtcgacgactgaagcatcccacctcgcctgcaaacaccgtgacgaccgacggcattgcaccatcacgcccaactgtcgcattcattcccaattattcaagagagaagactacgatatcaccgaccaacatctctctggactgtgactgccaattcgctctagaacgggccccgcgatggccaagccacggacgaagaagcggacgcatgtcggcgccaacaacccgaagcacaaggcgccgctgacggggcggtcggccgtcaacgaccccaagagcatggtcatccgcatcggcgccggcgaggtcgggtcgagcgtgagccagctggccaaggacgtgcgccaggtcatggagccgcgcacggcgtcgcgcctcaaggagcgccgcggccaaccgcctgcgcgactatgtcaccatgacggggccgctcggcgtcacccacctgctgctcttctcccgctccgacgccggcaacaccaacctgcgcgtcgccaccaccccgcgcgggcccacgctgcacttccgcgtcgagaagtacgccctcgcccgcgacgtccgccgtgcccagcgccatccccgcggcggcggcaaggagtacgacacatcccccctggtacgacaatcatacatatcttattatcttcctgcgactactctactgacctaactctaactacagctcatcatgaacgacatctccacgcccggcgccgacgcctcctccgccgtccccaagcacctcgagtccctcaccatcaccgtcttccagtccctcttcccccgcatcaaccctgagaccacccccctcaagtccatacggcgtgtcctcctcgtcaatagagagcgatcgaccgacgaggacgacggcagtttcgtcctcaacttccgccactacgccatcaccaccaagcccgccggcatctcccggcccctgcgccgcctcaatgccgccgacaagatcctttcgggcaagaacggccggaaaggtggcctacccaacctcggcaagctcgaggacatctccgacttcatgattggaggcgagaacggcgacggctacatgaccgacggcaccagtgggagcgagatggacaccgacgcagaggtcgaggttctcgaagacgcgccccgcaaggtgttgtccagcaaggcccgagccacacagcgtgacaatgagggtaatgattttgaagacgacgagagggtagaacggcggagggtcaaactcgtcgagctgggccctcgcatgaagctacgcatgactaaagtcgaggaaggactatgttccggaaagactatgtggcatgacaatatatacaaatctagaacagaagaacaagagctcgagaggcgatgggacatgaagagaagggaaaaggaagcaaggaggagagagcaaaaggcaaatgtagagaggaaaaagaaagagcgaggtgccaatggcgccaagaagggcgacgacgacgacgacgatgaggtcaacggaaacaatagcgacttgtttgatgagatgatggatgacgacgacgaaatagacagcgaaggcctcgcgggtgacggcgaagaggctttcaatagaggactggacgaggacgaatgggaagacgaaagagacgagattgccggttcgtaaccgtgagagataccaatacaaatatcaaaaaggccatgggtattttgccaggctcaatgacgcgactcgtttgaagagtgatgcattttgattgcaaaggcatttgctaagtgaaatctgcctgctcaattaccactcaatatcgatcaaactcgggtcttgtgtcgacccatccttggcgacatttgagttggccatctccatttgcgtggaaactggtggatgtcatctcggcgaagggaggaatgagtgaaggagcaactccgggcttggagacaccagctaaggcttgctttctaagctcgatccagggaggagctgcaatccaggagtcaggaatgtgaagggtctctagtcatgtctcaaagtcagggtgctcgcccctttcgagttccgctgatcttcacctcgtgcaacgctctctccctcaccttcatttcatttgttgctcagttcccggtgtccatgagatcggttccaaggtaggtgagaatgatgaagatgagtatcgacatatactgggctgggctgctgctgctcgcgcccctcgtcggtaccgtcgcgagatgggaaaacatcgctgccttgttcgccaagttacgaggtcgcacaacgacgagagagaagacgggcaggaagccgagtgatctcgaagcgaggaggttcaagaagacctttttgcgagtgtatcttctagttatgggtgctgagtggctacagggccctttcacatatacactcttccggcatcaaaagacgctcccagaatggaccgtcgcgctcctctacgtcgttacttacaccgcggccgcgctgtcctctctattcaccggctacctcaccgatcgattcgggaggcgaaaggcttgtctatgcttttgcttcattcatgccctggccgctgtcacggtgtgctcagaccagcttccgatcttgatactggggcgagtgctggcgggtatcggcatcaccttgctatggaccgcgttcgaaagttggatgattgcggagtataacgaacggggtttggaggagagcgagttgagactaggcgccatgttcgcgggcatgaccactgcgaattgtcttacggccatctttgcgggtgttcttggtcattgtgttgttttcgtgtgggggagtaagattgtgcctttcttactgggtgtcgtatgtttgccccttcattgacttccttggcgcgtgggaacagaaccgtgtcgatgatgaagtatgtcttctcacctaaaaactataggtcctcgatttgacagccgccatcctgatggtctggacctggagcgaaaaccgcggtacgtctcctctctctgcggccgacgaggagggtttcgttcaagacgcccgcgcaacaacccagggagagacatcagcttcgccatcgcttggtattcagacacatgagttgacaaaagatgcacgagtgtggataattagtttcgtaacgtgttgcttcgaaggcacactggtttctcttcctgttcttctggcccggtgcgctccaagatgcgcatggatcatcagagactgatacgatcccacacggtgttattttcgcatgcttcatggcttccatggtccttggtgccttgggattcaatattctcatatctcatcatccttcaagttctggtaacgcgatggaactcaccatcaagccagacacattaacaccgacccggctcctcggcacagcgctcctcctggcagctgttggtttcttaactgcggcctttataaatcacgaactaggctttttcatcgcgtttcttctcattgaagcatgtaatggggtctacgtcccgagcatcgcgtaccatcgcggaatcattgttgaggataaggacagagcgcgcgtgtatagtctcatgaacataccgctttttctgttcgttgtcctcgcgttgagctcgacggcgggttctgatagtggcggatataacgttcatagacagactgtgttcgtcatttgtgcaattatactctttgctgcgactctagtcgtccttctatttcttaatattgggcaggcatcaaaagagttccatccagtcccctcgggggacgagaataaggagggcgtcaccattgacacgtcgttttgtatacaagaggatctagatgatggatgcacatgagattgcagtttttgcacgtgtctaatgggcccaagtgtgacaacaattccctcggcccctcttcggggtacaactgcttctgatagaatctgatagtatatgtacttgtatgcaccagttatatcatggcggccaatagataattcatagtttttggtgagcatcggcttcaagagtatagacg

SEQ ID NO: 24696 - DNA, 1866 bp, Muscodor strobelii
  misc_feature: SGI cDNA ID NO. 568422
  misc_feature: Encodes the peptide sequence at SEQ ID NO 24697
atgagttctctaagcgaagagaaggtcggccatcgcgccacaactccaccaccgggcgttgaacacacccacccccatttgcaccacggtggtcctgctgcgaaccccgccaatcacgatgacgaggttacgtacatgaacacagcgcccgacggcagcttcgtgaagagcaatggcgagttcacaaagaatagcgagtttgcaatgggcgaaaaaacaattagcaccgacgaggagagcggcaatgcaagtcccgttcgggatgttcccctcagcaaaatgggtcttggcgaaatgattgcatggagttatcgcaagtacagggccgtttatcaccttgccatctggctggtattcactgcttggtggatctatggtcttgtcaagttccgaaagaccaagaactggcttatccccttcttggtctatcttgccatcactctgcgcatcatcacgctctggatccccgtcagctacgttatgagaccgacgagatgggtctggtatcattccgtcttcaaagtctacgaggtgatcccgaaggcttttcaccagcccgttgctgctatcggtaccgttggtgttttcttgattggcagcatggttcccgcggaggaaggcgacaacacaagagccagccgtgcgcagtctctctttggtctgattgtcatgatcgctgtcatgtcaggaacatcaaagaatttccgggccatcccctggcacactgtcatcggtggcatgcttactcagttcatcatcgccattttcgtgctcaaatcgcaagccggttatgatatcttcaaattcatttccgatttggcaggtagcttgcttggcttcgccgaccagggtgtgacattcttgaccaacgataccgttcctcaactgcactggttcctgacagctgtcattcccgccattatcttcttcatctccctcatctctctgctcttccacgttggcctcgtccagtggttcattggaaagttctccgtgttcttcttttggtcattacgaatttcgggtgccgaagctgtcgtcgctgccgccacgcctttcatcggtcagggagaatcggctatgttggttcgtccattcgtaccgcatctcaccatgtccgaaatccacactatcatgtgctgtggtttcgcgacaatttcgggttctgtgcttgtcgcttatatcggcctgggtctcaaccctcaggcgctcgtctcgtcctgcatcatgtccattcccgcgtccattgccgtttctaagatgcgctaccccgaaatggaagaaccactcagcgccggacatgctgtcgtccctgaagacccagagaataaagccagcaatgccattcacgccttcgccaatggcgcctggctcggtcttaagattggtggcatgattgtcgccacactcctctgcattattgcattcgtcggcttgatcaatggtctcttgacctggtggggaggctactggggcattaaggcgctcactcttcagttcattctcggctacgtcttctaccccgttgcctggcttcttggtgtgcctaagggcgagcttctccaggttggtgaactcattggtatgaaggtcatcaccaacgagtttgttgccttcaacgcccttacgactgagccccgctactctatgctgagctcccgtgccaccatcatcgccacctatgcctgctgtggattcggtaacgttggatctcttggtacgcaaattggtgtcttgtcgcaagtcgctccccaccgtggtggtgatgtctctaagcttgcactttcggctctggctgctggtgtggttacgacactcagctctgctaccattgctggcatgttgtacacgtccaacgtcaagtaa

SEQ ID NO: 24697 - protein, 621 aa, Muscodor strobelii
  misc_feature: SGI Peptide ID NO. 568422
  misc_feature (300)..(401): Pfam Id: PF07670 Pfam Desc: Nucleoside recognition
  misc_feature (404)..(617): Pfam Id: PF07662 Pfam Desc: Na+ dependent nucleoside transporter C-terminus
  misc_feature (212)..(293): Pfam Id: PF01773 Pfam Desc: Na+ dependent nucleoside transporter N-terminus
  misc_feature (101)..(612): NCBI GI: 85092816 Blast Desc: NCU08148 [Neurospora crassa OR74A] gi|28921000|gb|EAA30323.1| NCU08148 [Neurospora crassa OR74A]
  misc_feature (122)..(618): NCBI GI: 116205722 Blast Desc: CHGG_02154 [Chaetomium globosum CBS 148.51] gi|88182751|gb|EAQ90219.1| CHGG_02154 [Chaetomium globosum CBS 148.51]
  misc_feature (14)..(620): NCBI GI: 39941110 Blast Desc: MGG_05467 [Magnaporthe grisea 70-15] gi|145022125|gb|EDK06145.1| MGG_05467 [Magnaporthe grisea 70-15]
  misc_feature (6)..(621): NCBI GI: 70992695 Blast Desc: H+/nucleoside cotransporter [Aspergillus fumigatus Af293] gi|66848829|gb|EAL89158.1| H+/nucleoside cotransporter [Aspergillus fumigatus Af293] gi|159130349|gb|EDP55462.1| A1163]
  misc_feature (20)..(621): NCBI GI: 119472976 Blast Desc: H+/nucleoside cotransporter [Neosartorya fischeri NRRL 181] gi|119406609|gb|EAW16560.1| H+/nucleoside cotransporter [Neosartorya fischeri NRRL 181]
  misc_feature (66)..(618): NCBI GI: 171678247 Blast Desc: protein product [Podospora anserina] gi|170937193|emb|CAP61850.1| protein product [Podospora anserina]
  misc_feature (22)..(621): NCBI GI: 121700210 Blast Desc: H+/nucleoside cotransporter [Aspergillus clavatus NRRL 1] gi|119396512|gb|EAW06944.1| H+/nucleoside cotransporter [Aspergillus clavatus NRRL 1]
  misc_feature (78)..(621): NCBI GI: 226278361 Blast Desc: inner membrane transport protein yeiJ [Paracoccidioides brasiliensis Pb01]
  misc_feature (71)..(621): NCBI GI: 189197155 Blast Desc: sodium/nucleoside cotransporter 1 /nucleoside cotransporter 1 [Pyrenophora tritici-repentis Pt-1C-BFP] gi|187980863|gb|EDU47489.1| sodium/nucleoside cotransporter 1 1
  misc_feature (78)..(621): NCBI GI: 225683940 Blast Desc: sodium/nucleoside cotransporter 1 /nucleoside cotransporter 1) [Paracoccidioides brasiliensis Pb03] gi|226293330|gb|EEH48750.1| inner membrane transport protein yeiJ
MSSLSEEKVGHRATTPPPGVEHTHPHLHHGGPAANPANHDDEVTYMNTAPDGSFVKSNGEFTKNSEFAMGEKTISTDEESGNASPVRDVPLSKMGLGEMIAWSYRKYRAVYHLAIWLVFTAWWIYGLVKFRKTKNWLIPFLVYLAITLRIITLWIPVSYVMRPTRWVWYHSVFKVYEVIPKAFHQPVAAIGTVGVFLIGSMVPAEEGDNTRASRAQSLFGLIVMIAVMSGTSKNFRAIPWHTVIGGMLTQFIIAIFVLKSQAGYDIFKFISDLAGSLLGFADQGVTFLTNDTVPQLHWFLTAVIPAIIFFISLISLLFHVGLVQWFIGKFSVFFFWSLRISGAEAVVAAATPFIGQGESAMLVRPFVPHLTMSEIHTIMCCGFATISGSVLVAYIGLGLNPQALVSSCIMSIPASIAVSKMRYPEMEEPLSAGHAVVPEDPENKASNAIHAFANGAWLGLKIGGMIVATLLCIIAFVGLINGLLTWWGGYWGIKALTLQFILGYVFYPVAWLLGVPKGELLQVGELIGMKVITNEFVAFNALTTEPRYSMLSSRATIIATYACCGFGNVGSLGTQIGVLSQVAPHRGGDVSKLALSALAAGVVTTLSSATIAGMLYTSNVK

SEQ ID NO: 24698 - DNA, 4985 bp, Muscodor strobelii
  misc_feature: SGI EST ID NO. CUFF.58323.1
  misc_feature: Variant of the nucleotide sequence at SEQ ID NO 24696
ccagtattcaataccttcacagctcgacagcctcggcagctgagcatcattgtctttatgatagttattgtagatacaggtaaaattctacgggaagcgtgtctcacttatctgcgataaccaatccacattgccacattcaaaccttttttcttgtaaatctgattgaacacacgagagaaaaggatccgggcctatcatcgagtccaggactagtcccctaagaccgcacgttcccagttatagaaggtccttccccttctagaagcaaccccatgtcctagtgccgcccactcgacttgccagggctcagccagggctcactccaccacaccagtcaaatctcgcagtccggacgcgatttgcagttcgctgcaggcccgaagagctcttgggacctttcgaggcgcgtccattcggtcggtctgcgctgccaaggctcagcgatgtccccgatctagcaggcagtccgagatagccttgatagccaagggtctcgagggttttacgggccatacgtccacttgtggcacgtctgccaatctcacgccccgatcagcaggtagatagggctcgtgggtgtatatcatcaccattctccgctcccaaccgacggtgcgtcctgcttgagaaactcttgctcgtgtgtgctcgcgacagaggaacatcggcagtgtttgctttcgtcttcttcctcctccccttctcctggtcctttcatcggcgagcttcagagcggcaaacctggcgacgattgtaccatgagttctctaagcgaagagaaggtcggccatcgcgccacaactccaccaccgggcgttgaacacacccacccccatttgcaccacggtggtcctgctgcgaaccccgccaatcacgatgacgaggttacgtacatgaacacagcgcccgacggcagcttcgtgaagagcaatggcgagttcacaaagaatagcgagtttgcaatgggcgaaaaaacaattagcaccgacgaggagagcggcaatgcaagtcccgttcgggatgttcccctcagcaaaatgggtcttggcgaaatgattgcatggagttatcgcaagtacagggccgtttatcaccttgccatctggctggtattcactgcttggtggatctatggtcttgtcaagttccgaaagaccaagaactggcttatccccttcttggtctatcttgccatcactctgcgcatcatcacgctctggatccccgtcagctacgttatgagaccgacgagatgggtctggtatcattccgtcttcaaagtctacgaggtgatcccgaaggcttttcaccagcccgttgctgctatcggtaccgttggtgttttcttgattggcagcatggttcccgcggaggaaggcgacaacacaagagccagccgtgcgcagtctctctttggtctgattgtcatgatcgctgtcatgtcaggaacatcaaagaatttccgggccatcccctggcacactgtcatcggtggcatgcttactcagttcatcatcgccattttcgtgctcaaatcgcaagccggttatgatatcttcaaattcatttccgatttggcaggtagcttgcttggcttcgccgaccagggtgtgacattcttgaccaacgataccgttcctcaactgcactggttcctgacagctgtcattcccgccattatcttcttcatctccctcatctctctgctcttccacgttggcctcgtccagtggttcattggaaagttctccgtgttcttcttttggtcattacgaatttcgggtgccgaagctgtcgtcgctgccgccacgcctttcatcggtcagggagaatcggctatgttggttcgtccattcgtaccgcatctcaccatgtccgaaatccacactatcatgtgctgtggtttcgcgacaatttcgggttctgtgcttgtcgcttatatcggcctgggtctcaaccctcaggcgctcgtctcgtcctgcatcatgtccattcccgcgtccattgccgtttctaagatgcgctaccccgaaatggaagaaccactcagcgccggacatgctgtcgtccctgaagacccagagaataaagccagcaatgccattcacgccttcgccaatggcgcctggctcggtcttaagattggtggcatgattgtcgccacactcctctgcattattgcattcgtcggcttgatcaatggtctcttgacctggtggggaggctactggggcattaaggcgctcactcttcagttcattctcggctacgtcttctaccccgttgcctggcttcttggtgtgcctaagggcgagcttctccaggttggtgaactcattggtatgaaggtcatcaccaacgagtttgttgccttcaacgcccttacgactgagccccgctactctatgctgagctcccgtgccaccatcatcgccacctatgcctgctgtggattcggtaacgttggatctcttggtacgcaaattggtgtcttgtcgcaagtcgctccccaccgtggtggtgatgtctctaagcttgcactttcggctctggctgctggtgtggttacgacactcagctctgctaccattgctggcatgttgtacacgtccaacgtcaagtaagcgacgagcgctttcaaataaatatcagtaattagagcaaaataaagaattggacgaaaaattgtgagcttgcatggcgatatgaaagacaaatttgggaaatgaacttcttgctctattataagttcttgccactcgtagagcagctcattggacgttgggtatttgtgcctagctccgacggactcctgcggactcattagtcacgcaatgaagattccgccaacgggaataggctatcacaaagtctacaaagcggtctggaattgcttcccacaactgctgcgacggcgtatagaagtaccatatacatgcgccttcacctacattgccaacatactgcactagccagcctcaagggcaccggcagtgacactacactagaaactgagtgatatttagcgacaatgtcactgcctgctactagcagcaggtcccttaatctcgacatagcatctgaagtgatctatgactacgatcaatacgcagatttttctgacactcatggaggtaacttcatttgtcgcatgggcgcccattcattcaggactcaacccctgtgtattcataacacgcgtgcgagtgtcatataggtgtctgaatgtgtatctatgcgagtgtgattcgtcctagattggatactggtggttcagtcagattgatttcctaaagtcttataagtatctaaatggctttcattggcttgctaactaactcgctctcacttccataagattctaacaaagcaagttggaaaattggccgattatgttgttgggaggtcaccatagtaggtatgttgcctattgtattaattacctacaactacagcatagtctccgcatggctcttcgaaatcaagactgcaactacatggaattggagatcctcaggctatttgcccgagcagacctgctttaatctgaatgaagttcctagcgcttattccatagccctctatttgatcgtcgagtaagaacgatcgaagacgatcaaccgcacagtcgttcctaattgtcaaccaaagatgcctccagctattggttgaactgtctgtaaaattcttgcacataatcacaatagtcgctgtatatgttagagctcaatatttagggcagtaacggtagcgggattattctattgtatgactatactcaataacttcgagggtttattgatagaaacctggggtgatatcttatccggcttcccatcaatagtttttcgccatctctaatgccaaattgaaagcggacaatgcagccagggattaagtcatagctgatcataagtgctgctttacaatatgtgttaatactttggtctaataggatgaggacaatttactgagcaataagtcgacatgatatgcaataacgcgtctgccgcttgtctcttatctctttatgtcctccccgatcccggtattgtgcagattcttttcgttctcacggtacttatatgtggtcatcaggtaccatttttgttttgcatcccgttttctcgattcgagatgcccactccctggtgctttcgatcactgcgtatcctcgctgcacgcattggatgcatcttcttggctgaaaggtctttgtgactgaccccacgttgcgcccgactccaagtcaaccctaatacatttgcgtgagcacaactgcctctcgcttgtttgtcattaggctggtacttgtaatacctccgtgctcaatggcatgataagatttcgtgagctttgataattgcaatgtaccgttcgtgactgagtctctctcatgtctctgcttcgcttttctcgctatcctctaggccgactgatacattgacatatctgcacgaggctctggcgatgaagtctgcggccgtggccgcggataatatgccggaactcttcgtagcaatggccatattataaaggctctgcttatctaagtgacgacgaatctggccccgatgattcgggcctccgatgctttgtgggcggctgggcttgtgtgcaagggctccgttgattcgattggaggttgataacccagtgtcccaagatcctttactccagcgttgctgtgtatatcatgatcttgttgaccttcttgtcttcaaggaatgccttcacttagttcgatgtaagggctcaagccgggctgtatggacttggatctcctgtcggtttttgtcttcggctcatgtctactactctgttgttggatataagaagcagggcgctgaactgcaggggctgagtcggactggaaaagagaaatcttgggcaaaaatgaaaccattttcgtgtagaagggtttgtcaacgacatggacgacccaaatagagtgcatcgaaggaacgcagctgacaatgatt

SEQ ID NO: 24699 - DNA, 948 bp, Muscodor strobelii
  misc_feature: SGI cDNA ID NO. 568423
  misc_feature: Encodes the peptide sequence at SEQ ID NO 24700
atgtcagatttcacgatcgacaattttcttgcaatcgaaatcattctcgtcgtgctcgtggtcgccccggtaggcgctcgtttatggaacaattacatactcggccagcgtcaacatctggacgattccgtaaccccagagcaggcgttatattatcttaagatcgtttcccagtggctgattgccgacttttcgatcgctgtacttgctatatggttctcgaaagcacctcttcttttgctctacattcgagtgttcggtgtcaaggatgtggtacgatacacttgttacgcaacgcttgtcgcaagcgcaattgcatacttcacggtatcgacgtacctcgccgtcgtatgtgacccattcacacgtaacattgaaaacttagcgcaattcgacatatataaggacagatgtactgcgctgtatgctcgtgttggcttcattcctgcctgctccctatctattttccaagacgtcctcaattttgcgctccctatacccctcatatggtccttgaatcttaacaagaggaaaaagatcgggttggcttttgttttcgcatggggtgcagttgccgtcgcagcgagcattctttcactgctcttccacttgaatttcggtctgcaaaataatgcttacgccttttacatcgaacaactgctagccttaattgacggtagcattgcaatcattgtcagctgcgttccttcgatgcactctatttgggtcgtccatgtcgttgacaaacccttctacacgaaaatggtttcatttttgcccaagatttctcttttccagtccgactcagcccctgcagttcagcgccctgcttcttatatccaacaacagagtagtagacatgagccgaagacaaaaaccgacaggagatccaagtccatacagcccggcttgagcccttacatcgaactaagtgaaggcattccttga

SEQ ID NO: 24700 - protein, 315 aa, Muscodor strobelii
  misc_feature: SGI Peptide ID NO. 568423
  misc_feature (36)..(302): NCBI GI: 238845707 Blast Desc: conserved [Microsporum canis CBS 113480]
  misc_feature (70)..(267): NCBI GI: 238840889 Blast Desc: conserved [Microsporum canis CBS 113480]
  misc_feature (35)..(297): NCBI GI: 169785237 Blast Desc: [Aspergillus oryzae RIB40] gi|83775827|dbj|BAE65946.1| protein product [Aspergillus oryzae]
  misc_feature (35)..(297): NCBI GI: 238506213 Blast Desc: conserved [Aspergillus flavus NRRL3357] gi|220689021|gb|EED45372.1| conserved [Aspergillus flavus NRRL3357]
  misc_feature (71)..(240): NCBI GI: 156057637 Blast Desc: SS1G_04550 [Sclerotinia sclerotiorum 1980] gi|154702335|gb|EDO02074.1| SS1G_04550 [Sclerotinia sclerotiorum 1980]
  misc_feature (54)..(211): NCBI GI: 242766624 Blast Desc: conserved [Talaromyces stipitatus ATCC 10500] gi|218724404|gb|EED23821.1| conserved [Talaromyces stipitatus ATCC 10500]
  misc_feature (144)..(295): NCBI GI: 169768552 Blast Desc: [Aspergillus oryzae RIB40] gi|83766604|dbj|BAE56744.1| protein product [Aspergillus oryzae]
  misc_feature (144)..(295): NCBI GI: 238497854 Blast Desc: conserved [Aspergillus flavus NRRL3357] gi|220693436|gb|EED49781.1| conserved [Aspergillus flavus NRRL3357]
  misc_feature (71)..(243): NCBI GI: 169612652 Blast Desc: SNOG_09450 [Phaeosphaeria nodorum SN15] gi|111061595|gb|EAT82715.1| SNOG_09450 [Phaeosphaeria nodorum SN15]
  misc_feature (66)..(244): NCBI GI: 67900566 Blast Desc: AN7270.2 [Aspergillus nidulans FGSC A4] gi|40741951|gb|EAA61141.1| AN7270.2 [Aspergillus nidulans FGSC A4] gi|259483384|tpe|CBF78730.1| TPA: conserved [Aspergillus FGSC
MSDFTIDNFLAIEIILVVLVVAPVGARLWNNYILGQRQHLDDSVTPEQALYYLKIVSQWLIADFSIAVLAIWFSKAPLLLLYIRVFGVKDVVRYTCYATLVASAIAYFTVSTYLAVVCDPFTRNIENLAQFDIYKDRCTALYARVGFIPACSLSIFQDVLNFALPIPLIWSLNLNKRKKIGLAFVFAWGAVAVAASILSLLFHLNFGLQNNAYAFYIEQLLALIDGSIAIIVSCVPSMHSIWVVHVVDKPFYTKMVSFLPKISLFQSDSAPAVQRPASYIQQQSSRHEPKTKTDRRSKSIQPGLSPYIELSEGIP

SEQ ID NO: 24701 - DNA, 5610 bp, Muscodor strobelii
  misc_feature: SGI EST ID NO. CUFF.58324.3
  misc_feature: Variant of the nucleotide sequence at SEQ ID NO 24699
tgccgacttttcgatcgctgtacttgctatatggttctcgaaagcacctcttcttttgctctacattcgagtgttcggtgtcaaggatgtggtacgatacacttgttacgcaacgcttgtcgcaagcgcaattgcatacttcacggtatcgacgtacctcgccgtcgtatgtgacccattcacacgtaacattgaaaacttagcgcaattcgacatatataaggacagatgtactgcgctgtatgctcgtgttggcttcattcctgcctgctccctatctattttccaagacgtcctcaattttgcgctccctatacccctcatatggtccttgaatcttaacaagaggaaaaagatcgggttggcttttgttttcgcatggggtgcagttgccgtcgcagcgagcattctttcactgctcttccacttgaatttcggtctgcaaaataatgcttacgccttttacatcgaacaactgctagccttaattgacggtagcattgcaatcattgtcagctgcgttccttcgatgcactctatttgggtcgtccatgtcgttgacaaacccttctacacgaaaatggtttcatttttgcccaagatttctcttttccagtccgactcagcccctgcagttcagcgccctgcttcttatatccaacaacagagtagtagacatgagccgaagacaaaaaccgacaggagatccaagtccatacagcccggcttgagcccttacatcgaactaagtgaaggcattccttgaagacaagaaggtcaacaagatcatgatatacacagcaacgctggagtaaaggatcttgggacactgggttatcaacctccaatcgaatcaacggagcccttgcacacaagcccagccgcccacaaagcatcggaggcccgaatcatcggggccagattcgtcgtcacttagataagcagagcctttataatatggccattgctacgaagagttccggcatattatccgcggccacggccgcagacttcatcgccagagcctcgtgcagatatgtcaatgtatcagtcggcctagaggatagcgagaaaagcgaagcagagacatgagagagactcagtcacgaacggtacattgcaattatcaaagctcacgaaatcttatcatgccattgagcacggaggtattacaagtaccagcctaatgacaaacaagcgagaggcagttgtgctcacgcaaatgtattagggttgacttggagtcgggcgcaacgtggggtcagtcacaaagacctttcagccaagaagatgcatccaatgcgtgcagcgaggatacgcagtgatcgaaagcaccagggagtgggcatctcgaatcgagaaaacgggatgcaaaacaaaaatggtacctgatgaccacatataagtaccgtgagaacgaaaagaatctgcacaataccgggatcggggaggacataaagagataagagacaagcggcagacgcgttattgcatatcatgtcgacttattgctcagtaaattgtcctcatcctattagaccaaagtattaacacatattgtaaagcagcacttatgatcagctatgacttaatccctggctgcattgtccgctttcaatttggcattagagatggcgaaaaactattgatgggaagccggataagatatcaccccaggtttctatcaataaaccctcgaagttattgagtatagtcatacaatagaataatcccgctaccgttactgccctaaatattgagctctaacatatacagcgactattgtgattatgtgcaagaattttacagacagttcaaccaatagctggaggcatctttggttgacaattaggaacgactgtgcggttgatcgtcttcgatcgttcttactcgacgatcaaatagagggctatggaataagcgctaggaacttcattcagattaaagcaggtctgctcgggcaaatagcctgaggatctccaattccatgtagttgcagtcttgatttcgaagagccatgcggagactatgctgtagttgtaggtaattaatacaataggcaacatacctactatggtgacctcccaacaacataatcggccaattttccaacttgctttgttagaatcttatggaagtgagagcgagttagttagcaagccaatgaaagccatttagatacttataagactttaggaaatcaatctgactgaaccaccagtatccaatctaggacgaatcacactcgcatagatacacattcagacacctatatgacactcgcacgcgtgttatgaatacacaggggttgagtcctgaatgaatgggcgcccatgcgacaaatgaagttacctccatgagtgtcagaaaaatctgcgtattgatcgtagtcatagatcacttcagatgctatgtcgagattaagggacctgctgctagtagcaggcagtgacattgtcgctaaatatcactcagtttctagtgtagtgtcactgccggtgcccttgaggctggctagtgcagtatgttggcaatgtaggtgaaggcgcatgtatatggtacttctatacgccgtcgcagcagttgtgggaagcaattccagaccgctttgtagactttgtgatagcctattcccgttggcggaatcttcattgcgtgactaatgagtccgcaggagtccgtcggagctaggcacaaatacccaacgtccaatgagctgctctacgagtggcaagaacttataatagagcaagaagttcatttcccaaatttgtctttcatatcgccatgcaagctcacaatttttcgtccaattctttattttgctctaattactgatatttatttgaaagcgctcgtcgcttacttgacgttggacgtgtacaacatgccagcaatggtagcagagctgagtgtcgtaaccacaccagcagccagagccgaaagtgcaagcttagagacatcaccaccacggtggggagcgacttgcgacaagacaccaatttgcgtaccaagagatccaacgttaccgaatccctaaatcagaaactattagtatctcagatgcaatataaacgagtgccagatagacttacacagcaggcataggtggcgatgatggtggcacgggagctcagcatagagtagcggggctcagtcgtaagggcgttgaaggcaacaaactcgttggtgatgaccttcataccaatgagttcaccaacctggagaagctcgcccttaggcacaccaagaagccaggcaacggggtagaagacgtagccgagaatgaactgaagagtgagcgccttaatgccccagtagcctccccaccaggtcaagagaccattgatcaagccgacgaatgcaataatgcagaggagtgtggcgacaatcatgccaccaatcttaagaccgagccaggcgccattggcgaaggcgtgaatggcattgctggctttattctctgggtcttcagggacgacagcatgtccggcgctgagtggttcttccatttcggggtagcgcatcttagaaacggcaatggacgcgggaatggacatgatgcaggacgagacgagcgcctgagggttgagacccaggccgatataagcgacaagcacagaacccgaaattgtcgcgaaaccacagcacatgatagtgtggatttcggacatggtgagatgcggtacgaatggacgaaccaacatagccgattctccctgaccgatgaaaggcgtggcggcagcgacgacagcttcggcacccgaaattcgtaatgaccaaaagaagaacacggagaactttccaatgaaccactggacgaggccaacgtggaagagcagagagatgagggagatgaagaagataatggcgggaatgacagctgtcaggaaccagtgcagttgaggaacggtatcgttggtcaagaatgtcacaccctggtcggcgaagccaagcaagctacctgccaaatcggaaatgaatttgaagatatcataaccggcttgcgatttgagcacgaaaatggcgatgatgaactgatgtgccaggggatggcccggaaattctttgatgttcctgacatgacagcgatcatgacaatcagaccaaagagagactgcgcacggctggctcttgtgttgtcgccttcctccgcgggaaccatgctgccaatcaagaaaacaccaacggtaccgatagcagcaacgggctggtgaaaagccttcgggatcacctcgtagactttgaagacggaatgataccagacccatctcgtcggtctcataacgtagctgacggggatccagagcgtgatgatgcgcagagtgatggcaagatagaccaagaaggggataagccagttcttggtctttcggaacttgacaagaccatagatccaccaactatgggtgcgtcagcctgttgtgcacaggatgtagaagaatgctactcttcattctttatccagggcgcatatgacaacttacgcagtgaataccagccagatggcaaggtgataaacggccctgtacttgcgataactccatgcaatcatttcgccaagacccattttgctgaggggaacatcccgaacgggacttgcattgccgctctcctcgtcggtgctaattgttttttcgcccattgcaaactcgctattctttgtgaactcgccattgctcttcacgaagctgccgtcgggcgctgtgttcatgtacgtaacctcgtcatcgtgattggcggggttcgcagcaggaccaccgtggtgcaaatgggggtgggtgtgttcaacgcccggtggtggagttgtggcgcgatggccgaccttctcttcgcttagagaactcatggtacaatcgtcgccaggtttgccgctctgaagctcgccgatgaaaggaccaggagaaggggaggaggaagaagacgaaagcaaacactgccgatgttcctctgtcgcgagcacacacgagcaagagtttctcaagcaggacgcaccgtcggttgggagcggagaatggtgatgatatacacccacgagccctatctacctgctgatcggggcgtgagattggcagacgtgccacaagtggacgtatggcccgtaaaaccctcgagacccttggctatcaaggctatctcggactgcctgctagatcggggacatcgctgagccttggcagcgcagaccgaccgaatggacgcgcctcgaaaggtcccaagagctcttcgggcctgcagcgaactgcaaatcgcgtccggactgcgagatttgactggtgtggtggagtgagccctggctgagccctggcaagtcgagtgggcggcactaggacatggggttgcttctagaaggggaaggaccttctataactgggaacgtgcggtcttaggggactagtcctggactcgatgataggcccggatccttttctctcgtgtgttcaatcagatttacaagaaaaaaggtttgaatgtggcaatgtggattggttatcgcagataagtgagacacgcttcccgtagaattttacctgtatctacaataactatcataaagacaatgatgctcagctgccgaggctgtcgagctgtgaaggtattgaatactgg

SEQ ID NO: 24702 - DNA, 1896 bp, Muscodor strobelii
  misc_feature: SGI cDNA ID NO. 568424
  misc_feature: Reduced expression when VOC is produced
  misc_feature: Encodes the peptide sequence at SEQ ID NO 24703
atgctgttctcaacccttctggtggcactcgcctcctcttctgtgacttgccttgctgcgccgtcgtctagcaagcatgtgctgcatgagaagcgcgatggaagtccgcacatgtgggagagacgccatcgcgcaaagcgtgaccaatcgcttccaattcgaattggcctccgtcacaggaatctagagaacattgataagtatcttgaggatgtctccgacccagcttcgtccaatttcggcaagcactggaccgctgagaaagtcgcaaatactttcgctccaacccctgaagcaaggactacggtattgggttggctcgtagaatcaggcattgatcgctcccgcttgaagctgtcaaccggacatgattgggtccagttcgacggcaccgtcgaagaagctgagcgcctttttgcaacagagtattaccactataagcatatcgaggagggcggctaccgccttgccgttgatgcttattccttgcctgaacatgttcaaaagcatgttgatttcgtaatgcctaccatcgcacttgatggaatgcgaccagttgcgaataaacagatcaacacagacctacaggctacctttcctcaaggggcatcgttgggttcactaccttgcggaaagctcattacgattgattgtttgcgggacttatacaatcttcccacgctgaagacagcggttgcaaacaattcattgggcgtagccgagtgggctgattatctgtactatcccgacctaccgatattctacaagaacttcacatcgcctgagattcctgctgacaccgttcctgaatttatctccatcgacggaggacttcatgctaatctcactactgtctctcaacaatccggtatcgagtctgctcttgatgttcagtctgcatactcgatcatacacccacaaggcattcgcctgtatcagatcggtgacggtatcaacgtggatagtgtcggcacgttcaacattttcctcgatgcactggatgggagctattgcacatatcagggtggcgatcagccatatgttgaccctgcgtacccagatcccaatgacaatctgggaggatacacaggtccgctccaatgcggcggtgcgccccaatcgaatgtgatctcagtcagctatggccaaattgaaaattcacttccgcaattctaccaagagcgacaatgtcgagaatgggcaaagctcgctcttcaaggtgtgagcgtcctctatgcgagcggagattcaggagtggccaatcgctacaatgccgggtatcccaactcttgtctgaatgctgagttcccatacgttgacaacaatggaactcgttactcgccgtcatttccggtgaactgcccttacatcactgctgtcggcggaactacacttctaggaaatactaccgatagtggagaacaggctgtgactcgattcggctctggaggcgggttttccaacatctttggggtaccgtcttaccaaaagatagcacacaagcacttcataaacaactacgctccgaattacggcccgaatgtttataacaagactggtcgcggctttcccgatgttgcagccatcggagataatgtagtcacggtcttcaacggcacgacgctcggtgtcggtggtaccagtgccagtgcacccatttttgctggcatcgtgacgctgctcaatgaggctcgaattgctgctggcaaggggcctattggcttcctaaaccctacactttatgcaaaccctcatgccttcaacgacatcacaattggtagcaaccccggttgtggctctggcggtttcaatgcaacaccagggtgggatcctgtcactggcttgggcactcccaattacaagaagctggagaagattttcttgtcgctcccatga

SEQ ID NO: 24703 - protein, 631 aa, Muscodor strobelii
  misc_feature: SGI Peptide ID NO. 568424
  misc_feature (36)..(180): Pfam Id: PF09286 Pfam Desc: Pro-kumamolisin, activation domain
  misc_feature (524)..(565): Pfam Id: PF00082 Pfam Desc: Subtilase family
  misc_feature (18)..(631): NCBI GI: 169614057 Blast Desc: SNOG_10163 [Phaeosphaeria nodorum SN15] gi|160707267|gb|EAT82498.2| SNOG_10163 [Phaeosphaeria nodorum SN15]
  misc_feature (19)..(631): NCBI GI: 189195206 Blast Desc: aorsin precursor [Pyrenophora tritici-repentis Pt-1C-BFP] gi|187979820|gb|EDU46446.1| aorsin precursor [Pyrenophora tritici-repentis Pt-1C-BFP]
  misc_feature (1)..(631): NCBI GI: 145228611 Blast Desc: An01g01750 [Aspergillus niger] gi|134054705|emb|CAK43546.1| protein product [Aspergillus niger]
  misc_feature (19)..(631): NCBI GI: 145234709 Blast Desc: An03g01010 [Aspergillus niger] gi|134057676|emb|CAK38074.1| protein product [Aspergillus niger]
  misc_feature (18)..(631): NCBI GI: 154320662 Blast Desc: BC1G_01803 [Botryotinia fuckeliana B05.10] gi|150853492|gb|EDN28684.1| BC1G_01803 [Botryotinia fuckeliana B05.10]
  misc_feature (2)..(631): NCBI GI: 212545452 Blast Desc: protease S8 tripeptidyl peptidase I, [Penicillium marneffei ATCC 18224] gi|210065849|gb|EEA19943.1| protease S8 tripeptidyl peptidase I, [Penicillium marneffei ATCC 18224]
  misc_feature (27)..(631): NCBI GI: 238497265 Blast Desc: protease S8 tripeptidyl peptidase I, [Aspergillus flavus NRRL3357] gi|220694748|gb|EED51092.1| protease S8 tripeptidyl peptidase I, [Aspergillus flavus NRRL3357]
  misc_feature (27)..(631): NCBI GI: 21321299 Blast Desc: aorsin [Aspergillus oryzae]
  misc_feature (27)..(631): NCBI GI: 169774229 Blast Desc: [Aspergillus oryzae RIB40] gi|94730360|sp|Q8NK92.2|AORSN_ASPOR RecName: Full=Aorsin; Flags: Precursor gi|83769445|dbj|BAE59580.1| protein product oryzae]
  misc_feature (1)..(631): NCBI GI: 154292593 Blast Desc: BC1G_14820 [Botryotinia fuckeliana B05.10] gi|150845901|gb|EDN21094.1| BC1G_14820 [Botryotinia fuckeliana B05.10]
  misc_feature (30)..(628): SWISSPROT Homolog: EC 3.4.14.9 Tripeptidyl-peptidase I
  misc_feature: Useful for introducing or modulating the production of volatile compounds
MLFSTLLVALASSSVTCLAAPSSSKHVLHEKRDGSPHMWERRHRAKRDQSLPIRIGLRHRNLENIDKYLEDVSDPASSNFGKHWTAEKVANTFAPTPEARTTVLGWLVESGIDRSRLKLSTGHDWVQFDGTVEEAERLFATEYYHYKHIEEGGYRLAVDAYSLPEHVQKHVDFVMPTIALDGMRPVANKQINTDLQATFPQGASLGSLPCGKLITIDCLRDLYNLPTLKTAVANNSLGVAEWADYLYYPDLPIFYKNFTSPEIPADTVPEFISIDGGLHANLTTVSQQSGIESALDVQSAYSIIHPQGIRLYQIGDGINVDSVGTFNIFLDALDGSYCTYQGGDQPYVDPAYPDPNDNLGGYTGPLQCGGAPQSNVISVSYGQIENSLPQFYQERQCREWAKLALQGVSVLYASGDSGVANRYNAGYPNSCLNAEFPYVDNNGTRYSPSFPVNCPYITAVGGTTLLGNTTDSGEQAVTRFGSGGGFSNIFGVPSYQKIAHKHFINNYAPNYGPNVYNKTGRGFPDVAAIGDNVVTVFNGTTLGVGGTSASAPIFAGIVTLLNEARIAAGKGPIGFLNPTLYANPHAFNDITIGSNPGCGSGGFNATPGWDPVTGLGTPNYKKLEKIFLSLP

SEQ ID NO: 24704 - DNA, 2968 bp, Muscodor strobelii
  misc_feature: SGI EST ID NO. CUFF.58472.0
  misc_feature: Variant of the nucleotide sequence at SEQ ID NO 24702
tcgcaattgtaatattgtatgtctttgctttgcttaactggatataaaagccaagtctttccaccccgccacacgtgtcttggccagtttcttagatctcttggctcccgttcacgttgcggtccagatccagacccctaggctcagctacagagactgtggtcattatgctgttctcaacccttctggtggcactcgcctcctcttctgtgacttgccttgctgcgccgtcgtctagcaagcatgtgctgcatgagaagcgcgatggaagtccgcacatgtgggagagacgccatcgcgcaaagcgtgaccaatcgcttccaattcgaattggcctccgtcacaggaatctagagaacattgataagtatcttgaggatgtctccgacccagcttcgtccaatttcggcaagcactggaccgctgagaaagtcgcaaatactttcgctccaacccctgaagcaaggactacggtattgggttggctcgtagaatcaggcattgatcgctcccgcttgaagctgtcaaccggacatgattgggtccagttcgacggcaccgtcgaagaagctgagcgcctttttgcaacagagtattaccactataagcatatcgaggagggcggctaccgccttgccgttgatgcttattccttgcctgaacatgttcaaaagcatgttgatttcgtaatgcctaccatcgcacttgatggaatgcgaccagttgcgaataaacagatcaacacagacctacaggctacctttcctcaaggggcatcgttgggttcactaccttgcggaaagctcattacgattgattgtttgcgggacttatacaatcttcccacgctgaagacagcggttgcaaacaattcattgggcgtagccgagtgggctgattatctgtactatcccgacctaccgatattctacaagaacttcacatcgcctgagattcctgctgacaccgttcctgaatttatctccatcgacggaggacttcatgctaatctcactactgtctctcaacaatccggtatcgagtctgctcttgatgttcagtctgcatactcgatcatacacccacaaggcattcgcctgtatcagatcggtgacggtatcaacgtggatagtgtcggcacgttcaacattttcctcgatgcactggatgggagctattgcacatatcagggtggcgatcagccatatgttgaccctgcgtacccagatcccaatgacaatctgggaggatacacaggtccgctccaatgcggcggtgcgccccaatcgaatgtgatctcagtcagctatggccaaattgaaaattcacttccgcaattctaccaagagcgacaatgtcgagaatgggcaaagctcgctcttcaaggtgtgagcgtcctctatgcgagcggagattcaggagtggccaatcgctacaatgccgggtatcccaactcttgtctgaatgctgagttcccatacgttgacaacaatggaactcgttactcgccgtcatttccggtgaactgcccttacatcactgctgtcggcggaactacacttctaggaaatactaccgatagtggagaacaggctgtgactcgattcggctctggaggcgggttttccaacatctttggggtaccgtcttaccaaaagatagcacacaagcacttcataaacaactacgctccgaattacggcccgaatgtttataacaagactggtcgcggctttcccgatgttgcagccatcggagataatgtagtcacggtcttcaacggcacgacgctcggtgtcggtggtaccagtgccagtgcacccatttttgctggcatcgtgacgctgctcaatgaggctcgaattgctgctggcaaggggcctattggcttcctaaaccctacactttatgcaaaccctcatgccttcaacgacatcacaattggtagcaaccccggttgtggctctggcggtttcaatgcaacaccagggtgggatcctgtcactggcttgggcactcccaattacaagaagctggagaagattttcttgtcgctcccatgagtgttgactccttagtctacataatgattctgagtatagagctgaatagaaatatgatgccgcttatatgcatagtcttcgagtcatgaaccggataagcttttcatcgcactttcagataatcatagattgcacgtagggactagatccaggattacatggtaaaatgatcgtcgctagactagcttgagaagtggcatggcattcgatcaaattggtcaaatcgtttatcgcttcatatcctcactcattaacgatgggtgcctcacctctttcggctcgccaccggttcgttgcctccaagacacctggccagtctctgaccaaccatccccatttcttcaaaaagccttctgacatctcccagccggaaatgtgccaaggcggtgaccacgcaatgatgccgcgttgctcaatctcatcatctggaaacccctcgtacagacccccgatgcagtcagaccacagatcgtcctcgtcgaaagtaccggcagccatgatcagcagatcgcgcccctctggacatggccacaaatctatccagtccccgtgcggcactgtctgttgaagaagagttggtaagagcgtagggggaagtgattccggctttttgggatagggaacgatgtgagtgacttcgttgtcacagtctagtggtgtggcgagaataccggatacgagactacgattgacagcgagggcgcgcagggcgttatattgttgtagtgtgataagatgatctggacagaggggaaagacaattttgaagctcccctttttcaatgagggtggcaacaatggcacctgtgcattatacagccgtttggctcgagatactggagcgatgaatactgcctgcttgtcatcatcccagtattcagtcaaagactctgacctgatcaaac

SEQ ID NO: 24705 - DNA, 879 bp, Muscodor strobelii
  misc_feature: SGI cDNA ID NO. 568425
  misc_feature: Reduced expression when VOC is produced
  misc_feature: Encodes the peptide sequence at SEQ ID NO 24706
atgacccttttacctcagctcggaaatacggcggcgccaagcattaggcttctgtccatgccgcagttagtcgaggcaagaagcaaggaagacgactggactggaaccaccgacgccgcagcacgtagaagagcacagaccagacttaatacaagggcgtatcggaaacgcaaagctctcgcgaaaaaggtcgaagcttctagcacagccgaaaaaagtttgatcaggtcagagtctttgactgaatactgggatgatgacaagcaggcagtattcatcgctccagtatctcgagccaaacggctgtataatgcacaggtgccattgttgccaccctcattgaaaaaggggagcttcaaaattgtctttcccctctgtccagatcatcttatcacactacaacaatataacgccctgcgcgccctcgctgtcaatcgtagtctcgtatccggtattctcgccacaccactagactgtgacaacgaagtcactcacatcgttccctatcccaaaaagccggaatcacttccccctacgctcttaccaactcttcttcaacagacagtgccgcacggggactggatagatttgtggccatgtccagaggggcgcgatctgctgatcatggctgccggtactttcgacgaggacgatctgtggtctgactgcatcgggggtctgtacgaggggtttccagatgatgagattgagcaacgcggcatcattgcgtggtcaccgccttggcacatttccggctgggagatgtcagaaggctttttgaagaaatggggatggttggtcagagactggccaggtgtcttggaggcaacgaaccggtggcgagccgaaagaggtgaggcacccatcgttaatgagtga

SEQ ID NO: 24706 - protein, 292 aa, Muscodor strobelii
  misc_feature: SGI Peptide ID NO. 568425
  misc_feature (20)..(292): NCBI GI: 238503722 Blast Desc: conserved [Aspergillus flavus NRRL3357] gi|220690564|gb|EED46913.1| conserved [Aspergillus flavus NRRL3357]
  misc_feature (15)..(290): NCBI GI: 46127813 Blast Desc: FG08284.1 [Gibberella zeae PH-1]
  misc_feature (10)..(287): NCBI GI: 145616349 Blast Desc: MGG_14540 [Magnaporthe grisea 70-15] gi|145010378|gb|EDJ95034.1| MGG_14540 [Magnaporthe grisea 70-15]
  misc_feature (14)..(290): NCBI GI: 242821991 Blast Desc: conserved [Talaromyces stipitatus ATCC 10500] gi|218712714|gb|EED12139.1| conserved [Talaromyces stipitatus ATCC 10500]
  misc_feature (9)..(292): NCBI GI: 256724364 Blast Desc: NECHADRAFT_88103 [Nectria haematococca mpVI 77-13-4]
  misc_feature (14)..(292): NCBI GI: 212546953 Blast Desc: conserved [Penicillium marneffei ATCC 18224] gi|210065150|gb|EEA19245.1| conserved [Penicillium marneffei ATCC 18224]
  misc_feature (26)..(292): NCBI GI: 154322294 Blast Desc: BC1G_01294 [Botryotinia fuckeliana B05.10] gi|150850541|gb|EDN25734.1| BC1G_01294 [Botryotinia fuckeliana B05.10]
  misc_feature (14)..(289): NCBI GI: 242813908 Blast Desc: conserved [Talaromyces stipitatus ATCC 10500] gi|218714601|gb|EED14024.1| conserved [Talaromyces stipitatus ATCC 10500]
  misc_feature (14)..(290): NCBI GI: 212544802 Blast Desc: conserved [Penicillium marneffei ATCC 18224] gi|210065524|gb|EEA19618.1| conserved [Penicillium marneffei ATCC 18224]
  misc_feature (13)..(292): NCBI GI: 156036494 Blast Desc: SS1G_12936 [Sclerotinia sclerotiorum 1980] gi|154698341|gb|EDN98079.1| SS1G_12936 [Sclerotinia sclerotiorum 1980]
  misc_feature: Useful for introducing or modulating the production of volatile compounds
MTLLPQLGNTAAPSIRLLSMPQLVEARSKEDDWTGTTDAAARRRAQTRLNTRAYRKRKALAKKVEASSTAEKSLIRSESLTEYWDDDKQAVFIAPVSRAKRLYNAQVPLLPPSLKKGSFKIVFPLCPDHLITLQQYNALRALAVNRSLVSGILATPLDCDNEVTHIVPYPKKPESLPPTLLPTLLQQTVPHGDWIDLWPCPEGRDLLIMAAGTFDEDDLWSDCIGGLYEGFPDDEIEQRGIIAWSPPWHISGWEMSEGFLKKWGWLVRDWPGVLEATNRWRAERGEAPIVNE

SEQ ID NO: 24707 - DNA, 2270 bp, Muscodor strobelii
  misc_feature: SGI EST ID NO. CUFF.58473.2
  misc_feature: Variant of the nucleotide sequence at SEQ ID NO 24705
ccgttcccgagtgtcagattagtgtgtgtgagcagcttgcataccggtatcgcggaattagagactgaatcggcagtcgtcatcggtcagtatcattatcacctcacttgaggagaatatcatcagcagtatgacccttttacctcagctcggaaatacggcggcgccaagcattaggcttctgtccatgccgcagttagtcgaggcaagaagcaaggaagacgactggactggaaccaccgacgccgcagcacgtagaagagcacagaccagacttaatacaagggcgtatcggaaacgcaaagctctcgcgaaaaaggtcgaagcttctagcacagccgaaaaaagtttgatcaggtcagagtctttgactgaatactgggatgatgacaagcaggcagtattcatcgctccagtatctcgagccaaacggctgtataatgcacaggtgccattgttgccaccctcattgaaaaaggggagcttcaaaattgtctttcccctctgtccagatcatcttatcacactacaacaatataacgccctgcgcgccctcgctgtcaatcgtagtctcgtatccggtattctcgccacaccactagactgtgacaacgaagtcactcacatcgttccctatcccaaaaagccggaatcacttccccctacgctcttaccaactcttcttcaacagacagtgccgcacggggactggatagatttgtggccatgtccagaggggcgcgatctgctgatcatggctgccggtactttcgacgaggacgatctgtggtctgactgcatcgggggtctgtacgaggggtttccagatgatgagattgagcaacgcggcatcattgcgtggtcaccgccttggcacatttccggctgggagatgtcagaaggctttttgaagaaatggggatggttggtcagagactggccaggtgtcttggaggcaacgaaccggtggcgagccgaaagaggtgaggcacccatcgttaatgagtgaggatatgaagcgataaacgatttgaccaatttgatcgaatgccatgccacttctcaagctagtctagcgacgatcattttaccatgtaatcctggatctagtccctacgtgcaatctatgattatctgaaagtgcgatgaaaagcttatccggttcatgactcgaagactatgcatataagcggcatcatatttctattcagctctatactcagaatcattatgtagactaaggagtcaacactcatgggagcgacaagaaaatcttctccagcttcttgtaattgggagtgcccaagccagtgacaggatcccaccctggtgttgcattgaaaccgccagagccacaaccggggttgctaccaattgtgatgtcgttgaaggcatgagggtttgcataaagtgtagggtttaggaagccaataggccccttgccagcagcaattcgagcctcattgagcagcgtcacgatgccagcaaaaatgggtgcactggcactggtaccaccgacaccgagcgtcgtgccgttgaagaccgtgactacattatctccgatggctgcaacatcgggaaagccgcgaccagtcttgttataaacattcgggccgtaattcggagcgtagttgtttatgaagtgcttgtgtgctatcttttggtaagacggtaccccaaagatgttggaaaacccgcctccagagccgaatcgagtcacagcctgttctccactatcggtagtatttcctagaagtgtagttccgccgactgagagactttatcagtgatgactgccaatgaaatgcaactcggcttgactaaccagcagtgatgtaagggcagttcaccggaaatgacggcgagtaacgagttccattgttgtcaacgtatgggaactcagcattcagacaagagttgggatacctgagcatagttagaagaacgcattcgatctttttcatctcgtccaaattgtcttacccggcattgtagcgattggccactcctgaatctccgctcgcatagaggacgctcacaccttgaagagcgagctttgcccattctcgacattgtcgctcttggtagaattgcggaagtgaattctgcgagtaaattgttcatcagttatcttcgtattacatgaagtatcgagccatactcacttcaatttggccatagctgactgagatcacattcgattggggcgcaccgccgcattggagcggacctgtgtatcctcccagattgtcattgggatctgggtacgc

SEQ ID NO: 24708 - DNA, 963 bp, Muscodor strobelii
  misc_feature: SGI cDNA ID NO. 568426
  misc_feature: Encodes the peptide sequence at SEQ ID NO 24709
atgactttctccccgaactctcttcctaatctcaatggacacgttttcatagttactggcggaaactctggcataggctatcataccgtctctcaccttgcaaagcatggagcacatgtctatatgtgcgcgcggtactcagaaaagggtacagcggctatcagcgacattaggaaaacgaacccagcagcaaatgtcgacctccttcaaatggatctcgcggatcttggcagtgttgctgcggcggcgacgcggtttctgacaatggaaacggctctgcatggtctagtcaacaatgcaggaatcatggcaacgccatttgaaatcactaaagatggccatgaggctcaatggcaaacgaactatttggcgcattgggttttgacagagaatctgctccccttgatgcaacagaccgccaagtcgcactctcctggcagcgtacgcattgtgaacctaacatcttctggtcacttgggcgcacctaagactggtataaattttagtgatctgtcgctcaaagaaagtggaccatggccaaggtacgggcaaagtaaactcgcaaacattcttcacaccaagacattacacaagctgtatggccctggttcaccgaatgcacggaacggagaaggcgaaatatgggttacgtccgtacacccaggagttgtccaaacgaatataggcgcgtcagtgagagagtcgggttccatttttatgacaatcctatctgcttttcgcatctttggattgatctggtctgctgatagaggatcttggaacagtctgttctgtgcagcgagccaagacatgaaggcacagcagagtggcgcatacttggagatctatcatcgtttcggcgagccatggtgggagagtggagccgcaaaggatggaaaactggcagagagccttgaagagtggacaaggacagcaatgaggcggggaggatgggttcaatga

SEQ ID NO: 24709 - protein, 320 aa, Muscodor strobelii
  misc_feature: SGI Peptide ID NO. 568426
  misc_feature (14)..(161): Pfam Id: PF00106 Pfam Desc: short chain dehydrogenase
  misc_feature (14)..(136): Pfam Id: PF00106 Pfam Desc: short chain dehydrogenase
  misc_feature (1)..(319): NCBI GI: 238503724 Blast Desc: short-chain dehydrogenase, [Aspergillus flavus NRRL3357] gi|220690565|gb|EED46914.1| short-chain dehydrogenase, [Aspergillus flavus NRRL3357]
  misc_feature (1)..(320): NCBI GI: 46127811 Blast Desc: FG08283.1 [Gibberella zeae PH-1]
  misc_feature (1)..(319): NCBI GI: 256724482 Blast Desc: NECHADRAFT_54705 [Nectria haematococca mpVI 77-13-4]
  misc_feature (1)..(320): NCBI GI: 242821997 Blast Desc: carbonyl reductase, [Talaromyces stipitatus ATCC 10500] gi|218712715|gb|EED12140.1| carbonyl reductase, [Talaromyces stipitatus ATCC 10500]
  misc_feature (1)..(315): NCBI GI: 212546951 Blast Desc: short-chain dehydrogenase, [Penicillium marneffei ATCC 18224] gi|210065149|gb|EEA19244.1| short-chain dehydrogenase, [Penicillium marneffei ATCC 18224]
  misc_feature (1)..(319): NCBI GI: 169622900 Blast Desc: SNOG_14675 [Phaeosphaeria nodorum SN15] gi|111056747|gb|EAT77867.1| SNOG_14675 [Phaeosphaeria nodorum SN15]
  misc_feature (2)..(313): NCBI GI: 256720352 Blast Desc: NECHADRAFT_56065 [Nectria haematococca mpVI 77-13-4]
  misc_feature (6)..(280): NCBI GI: 213406113 Blast Desc: retinol dehydrogenase [Schizosaccharomyces japonicus yFS275] gi|212001875|gb|EEB07535.1| retinol dehydrogenase [Schizosaccharomyces japonicus yFS275]
  misc_feature (6)..(309): NCBI GI: 19075284 Blast Desc: short chain dehydrogenase [Schizosaccharomyces pombe] gi|74582607|sp|O74959.1|YJCD_SCHPO RecName: Full=Uncharacterized oxidoreductase C736.13 gi|3169083|emb|CAA19277.1| short chain ()
  misc_feature (1)..(313): NCBI GI: 159128997 Blast Desc: oxidoreductase, short-chain dehydrogenase/reductase family [Aspergillus fumigatus A1163]
  misc_feature (17)..(231): SWISSPROT Homolog: EC 1.1.1.208 (+)-neomenthol dehydrogenase
MTFSPNSLPNLNGHVFIVTGGNSGIGYHTVSHLAKHGAHVYMCARYSEKGTAAISDIRKTNPAANVDLLQMDLADLGSVAAAATRFLTMETALHGLVNNAGIMATPFEITKDGHEAQWQTNYLAHWVLTENLLPLMQQTAKSHSPGSVRIVNLTSSGHLGAPKTGINFSDLSLKESGPWPRYGQSKLANILHTKTLHKLYGPGSPNARNGEGEIWVTSVHPGVVQTNIGASVRESGSIFMTILSAFRIFGLIWSADRGSWNSLFCAASQDMKAQQSGAYLEIYHRFGEPWWESGAAKDGKLAESLEEWTRTAMRRGGWVQ

SEQ ID NO: 24710 - DNA, 678 bp, Muscodor strobelii
  misc_feature: SGI cDNA ID NO. 568427
  misc_feature: Elevated expression when VOC is produced
  misc_feature: Encodes the peptide sequence at SEQ ID NO 24711
atgagatatagcatcgtcgccacgtttctgccattggtctcggcggccggcttcaacacgcgccaagtcaacggactgaggttcgcaatcagcgattttgatggagagtgcgaatcagacaagactacctgcgaatacgagatgaaaatagttactagcgacaatcccgaatttgaagtaagctgtgacttcgctgcgacaagcgaaactggcgagcttcctgccatcagcgaaacccagtgcggaacatatagggttgcgatcgataagacgaatgatggtggtttgactgtaacagtcaagggcgaccaaggacgcctgacggggacttacacgattcctagcggcgacatagacacggattcatctggtgacagatcagtgcagaagtatgatggtgattccgacttcaccattgaaatcacaaccgggtcgtccggtacaggttctactgcgacttctactacaggcacgacgaccaccacagcgatcactgcgacaactgctactactacttcaacaacaactaattctggttctacaactggctccgatccttcgtccgctgctactacaacctctgagtctgccacgcctagtccgacgagtggcgtggctcgtggaaatgcattcataggtttgcctgttgctgtgggtctgatggcattggctctgtga

SEQ ID NO: 24711 - protein, 225 aa, Muscodor strobelii
  misc_feature: SGI Peptide ID NO. 568427
  misc_feature: Useful for introducing or modulating the production of volatile compounds
MRYSIVATFLPLVSAAGFNTRQVNGLRFAISDFDGECESDKTTCEYEMKIVTSDNPEFEVSCDFAATSETGELPAISETQCGTYRVAIDKTNDGGLTVTVKGDQGRLTGTYTIPSGDIDTDSSGDRSVQKYDGDSDFTIEITTGSSGTGSTATSTTGTTTTTAITATTATTTSTTTNSGSTTGSDPSSAATTTSESATPSPTSGVARGNAFIGLPVAVGLMALAL

SEQ ID NO: 24712 - DNA, 1498 bp, Muscodor strobelii
  misc_feature: SGI EST ID NO. CUFF.58185.0
  misc_feature: Variant of the nucleotide sequence at SEQ ID NO 24710
ctgcactcatggtctatgggcggaccctacaagtgcaggggcgttttggcacaatatcattactgccaagcaagcttgccagggtcgtcaagtgcgtcgtcgacttggtacgtatgcatttacctagcccatcgcttctatttgcagatgtcacgaaaccccccactatatgtcaatacagcccgagagagatggaagcaaaagtggctcggctgggacatgaaaacagactgatatagtcgatgttgattcaagaattgggtccaaattgtcacgctgggctgtggccgggaggaccttgcgtacttcatcttggcaaaggaatagactgggctcccttattaaaaatgaatacctagccaagacaccacaaaagagttgaatggggcctatataaatgccacaacactcgcactcgactcaggtgcttttcgatcatctagaatcgttaagtacaggcacgaattcacattacttcacgaccaactcttcatccactttgtcttcacacgtcaagatgagatatagcatcgtcgccacgtttctgccattggtctcggcggccggcttcaacacgcgccaagtcaacggactgaggttcgcaatcagcgattttgatggagagtgcgaatcagacaagactacctgcgaatacgagatgaaaatagttactagcgacaatcccgaatttgaagtaagctgtgacttcgctgcgacaagcgaaactggcgagcttcctgccatcagcgaaacccagtgcggaacatatagggttgcgatcgataagacgaatgatggtggtttgactgtaacagtcaagggcgaccaaggacgcctgacggggacttacacgattcctagcggcgacatagacacggattcatctggtgacagatcagtgcagaagtatgatggtgattccgacttcaccattgaaatcacaaccgggtcgtccggtacaggttctactgcgacttctactacaggcacgacgaccaccacagcgatcactgcgacaactgctactactacttcaacaacaactaattctggttctacaactggctccgatccttcgtccgctgctactacaacctctgagtctgccacgcctagtccgacgagtggcgtggctcgtggaaatgcattcataggtttgcctgttgctgtgggtctgatggcattggctctgtgattggcaacaaaatatgatgtaaagggatgattggatttcatgttagcaaatcaaggaacaaagtttttcatggtcactcatttcatttgaagcttgatctttaccaggcagcgccaggtctatcatacaattagaagcaaacgctcattcagtaacaatttcattgaacccatcctccccgcctcattgctgtccttgtccactcttcaaggctctctgccagttttccatcctttgcggctccactctcccaccatggctcgccgaaacgatgatagatctccaagtatgcgccactctgct

SEQ ID NO: 24713 - DNA, 687 bp, Muscodor strobelii
  misc_feature: SGI cDNA ID NO. 568428
  misc_feature: Reduced expression when VOC is produced
  misc_feature: Encodes the peptide sequence at SEQ ID NO 24714
atgccggccaatcctttcctcctcgccgccgacgacccggccgcgctgctgccgctgctcgatgaaaagcccgagctcgccagccagcaagacgaccacggctactctctcctgcacgccgctgccagctacaaccacctcgatcttctgcgtgcactcgtccggaagtacggtgtcgacgtcaacctgcgcgacgaggacgacgagacggcccttttcgtcgtagagacgctcgacgccgccaaggtcctggtcgaggatctcggcgccgacgtcatggtcaagggtgcagacggctacactgcccgccagaagatcttcgaggagggcgactaccccgacgtcgccgagtatctcaagcagcaggaagccagccgcgcccagcagctgctcaacggtgctcacgacgcctccgcccaccgcgactcccaccgcgactcccaccgcgactcccacgacgcgcccccgcccttgcccgacggcctcaacatctccgtcagcgctgttgcccccgccgacgtcgacgagaacgagcccgaccccgagttcaggaggaggatcgaggagctggccgagcgcgacgacttccacaccgacgccggccaggccgagctgaggcagctggtccaggacgctctcgcaggcgacgacttttcagaccgcaacgtccgtccccgtcaagcttga

SEQ ID NO: 24714 - protein, 228 aa, Muscodor strobelii
  misc_feature: SGI Peptide ID NO. 568428
  misc_feature (33)..(66): Pfam Id: PF00023 Pfam Desc: Ankyrin repeat
  misc_feature (1)..(227): NCBI GI: 261352878 Blast Desc: ankyrin repeat-containing protein [Verticillium albo-atrum VaMs.102]
  misc_feature (4)..(227): NCBI GI: 46140239 Blast Desc: FG11634.1 [Gibberella zeae PH-1]
  misc_feature (4)..(228): NCBI GI: 256722010 Blast Desc: NECHADRAFT_61719 [Nectria haematococca mpVI 77-13-4]
  misc_feature (1)..(227): NCBI GI: 39977941 Blast Desc: MGG_06855 [Magnaporthe grisea 70-15] gi|145013587|gb|EDJ98228.1| MGG_06855 [Magnaporthe grisea 70-15]
  misc_feature (1)..(227): NCBI GI: 171690982 Blast Desc: protein product [Podospora anserina] gi|170945439|emb|CAP71551.1| protein product [Podospora anserina]
  misc_feature (1)..(227): NCBI GI: 116195732 Blast Desc: CHGG_04464 [Chaetomium globosum CBS 148.51] gi|88180377|gb|EAQ87845.1| CHGG_04464 [Chaetomium globosum CBS 148.51]
  misc_feature (4)..(226): NCBI GI: 154318257 Blast Desc: BC1G_03296 [Botryotinia fuckeliana B05.10] gi|150842819|gb|EDN18012.1| BC1G_03296 [Botryotinia fuckeliana B05.10]
  misc_feature (3)..(226): NCBI GI: 156053153 Blast Desc: SS1G_06744 [Sclerotinia sclerotiorum 1980] gi|154704522|gb|EDO04261.1| SS1G_06744 [Sclerotinia sclerotiorum 1980]
  misc_feature (1)..(215): NCBI GI: 85085340 Blast Desc: NCU04409 [Neurospora crassa OR74A] gi|28918578|gb|EAA28250.1| NCU04409 [Neurospora crassa OR74A] gi|40882212|emb|CAF06037.1| conserved [Neurospora crassa]
  misc_feature (4)..(226): NCBI GI: 238489807 Blast Desc: ankyrin repeat protein [Aspergillus flavus NRRL3357] gi|220698529|gb|EED54869.1| ankyrin repeat protein [Aspergillus flavus NRRL3357]
  misc_feature: Useful for introducing or modulating the production of volatile compounds
MPANPFLLAADDPAALLPLLDEKPELASQQDDHGYSLLHAAASYNHLDLLRALVRKYGVDVNLRDEDDETALFVVETLDAAKVLVEDLGADVMVKGADGYTARQKIFEEGDYPDVAEYLKQQEASRAQQLLNGAHDASAHRDSHRDSHRDSHDAPPPLPDGLNISVSAVAPADVDENEPDPEFRRRIEELAERDDFHTDAGQAELRQLVQDALAGDDFSDRNVRPRQA

SEQ ID NO: 24715 - DNA, 1143 bp, Muscodor strobelii
  misc_feature: SGI cDNA ID NO. 568429
  misc_feature: Encodes the peptide sequence at SEQ ID NO 24716
atgttcgccattccgagcccaagcgtgtatcagagctcgaaatgtttcgtcacgtacgggactatggcacatcctgatgtcgaacaacttccgaagaaagtgaagccctggagctcactgctcagtcaagacttcgtgcataaggttgacctggtgctgccggatgacttgacacatctcatcgaggacacgatcgtcagagagtcatccaaaatgacgagctaccagcgtgtgatcatgacgctaggtcagatccttgagggcgacttcttcacgcagtatattaagattggtacttatgattcgcgcgttaccagcggttggctgggacacgttgcttacgaatttggtttaggaaacatcatgatgctctccgaaggcagagtagaccgcgacaacgtgttctccgtcaaagacggcattctgaccatgcatgtggacaaagagacatacgagcgagctgggctcgtgggaaagacctacggtgtcaagggcggaagaggtctcaaaccaagatgggttatcaagtacgatcttcgagctccatcggcgctccatggcaagaaaggctttgatagactagtctacgcctgcaaaaatgctctgaacaagccgactacctggcttttctgcaatctctccaagactcccgagccagatcctctcctaccgcatttcccaaccaagtatacgtcgcaagcggcacttgcgcgcgggatgaagatcaagatacctcgccttcagccgcccacgaccatcctcacgagcaacagccgatcggacctggacgagttcgccacggaggtgtacgaatggctttccttgatacggctggaaagctcccgagtggaggctaacgataatgttgacccgtatctctgcacgtacactataccagggattcccccggaggtggaagagggcgcgctttgcaagatcagctggcaggggttcatatcgccaggctgggtagcgcgcacgctagccgaggtgatacggacgttgccagcgaaggcgtggttctcgctaagcgcgacaccattcgctcggggtgcaatgggccacgggacggagtgcacagcaatgaggccgcccaactcggctggggaataccttctgtgggagatcaaaagccacgaatga

SEQ ID NO: 24716 - protein, 380 aa, Muscodor strobelii
  misc_feature: SGI Peptide ID NO. 568429
  misc_feature (82)..(379): Pfam Id: PF08584 Pfam Desc: Ribonuclease P 40kDa (Rpp40) subunit
  misc_feature (119)..(379): Pfam Id: PF08584 Pfam Desc: Ribonuclease P 40kDa (Rpp40) subunit
  misc_feature (1)..(380): NCBI GI: 85085335 Blast Desc: NCU04408 [Neurospora crassa OR74A] gi|28918577|gb|EAA28249.1| [Neurospora crassa OR74A] gi|40882213|emb|CAF06038.1| conserved [Neurospora crassa]
  misc_feature (80)..(380): NCBI GI: 145605802 Blast Desc: MGG_06856 [Magnaporthe grisea 70-15] gi|145013586|gb|EDJ98227.1| MGG_06856 [Magnaporthe grisea 70-15]
  misc_feature (41)..(380): NCBI GI: 261352879 Blast Desc: conserved [Verticillium albo-atrum VaMs.102]
  misc_feature (144)..(380): NCBI GI: 116195730 Blast Desc: CHGG_04463 [Chaetomium globosum CBS 148.51] gi|88180376|gb|EAQ87844.1| CHGG_04463 [Chaetomium globosum CBS 148.51]
  misc_feature (80)..(380): NCBI GI: 171690980 Blast Desc: protein product [Podospora anserina] gi|170945438|emb|CAP71550.1| protein product [Podospora anserina]
  misc_feature (14)..(353): NCBI GI: 145229727 Blast Desc: An01g07470 [Aspergillus niger] gi|134055282|emb|CAK96172.1| protein product [Aspergillus niger]
  misc_feature (1)..(353): NCBI GI: 238843784 Blast Desc: conserved [Microsporum canis CBS 113480]
  misc_feature (1)..(353): NCBI GI: 261194641 Blast Desc: conserved [Ajellomyces dermatitidis SLH14081] gi|239588263|gb|EEQ70906.1| conserved [Ajellomyces dermatitidis SLH14081]
  misc_feature (1)..(353): NCBI GI: 239613456 Blast Desc: conserved [Ajellomyces dermatitidis ER-3]
  misc_feature (1)..(232): NCBI GI: 154318255 Blast Desc: BC1G_03295 [Botryotinia fuckeliana B05.10] gi|150842818|gb|EDN18011.1| BC1G_03295 [Botryotinia fuckeliana B05.10]
  misc_feature (128)..(349): SWISSPROT Homolog: EC 3.1.26.5 Ribonuclease P
MFAIPSPSVYQSSKCFVTYGTMAHPDVEQLPKKVKPWSSLLSQDFVHKVDLVLPDDLTHLIEDTIVRESSKMTSYQRVIMTLGQILEGDFFTQYIKIGTYDSRVTSGWLGHVAYEFGLGNIMMLSEGRVDRDNVFSVKDGILTMHVDKETYERAGLVGKTYGVKGGRGLKPRWVIKYDLRAPSALHGKKGFDRLVYACKNALNKPTTWLFCNLSKTPEPDPLLPHFPTKYTSQAALARGMKIKIPRLQPPTTILTSNSRSDLDEFATEVYEWLSLIRLESSRVEANDNVDPYLCTYTIPGIPPEVEEGALCKISWQGFISPGWVARTLAEVIRTLPAKAWFSLSATPFARGAMGHGTECTAMRPPNSAGEYLLWEIKSHE

SEQ ID NO: 24717 - DNA, 2782 bp, Muscodor strobelii
  misc_feature: SGI EST ID NO. CUFF.58279.2
  misc_feature: Variant of the nucleotide sequence at SEQ ID NO 24715
aaaagaactccgcctctggttgttcaattctggaaatttcacggatgcttcagtcttgaacaatgaagccctcatcttcccttagtgagttaggagctgggagttggtgaggttgaatttaggtgcaggcagctagcagccgctagactgcctatcgcggacccctgaaaattcaccactccagacaaacacaatttctgggtttcgacagagagcgtcaggcaatcaattttgcatgaatcgtgcattcttattcaatctggtatctctgagcagaacgctcactatgtctcactgctagagccgaccgacttgccgtcgcatcctccgagatcttcgagtactacacagaatcatctgctgggacaatcattggaccgagaacctagcattacagcatcacgacattacagatcccttctagcgattccagcccacgccatgttcgccattccgagcccaagcgtgtatcagagctcgaaatgtttcgtcacgtacgggactatggcacatcctgatgtcgaacaacttccgaagaaagtgaagccctggagctcactgctcagtcaagacttcgtgcataaggttgacctggtgctgccggatgacttgacacatctcatcgaggacacgatcgtcagagagtcatccaaaatgacgagctaccagcgtgtgatcatgacgctaggtcagatccttgagggcgacttcttcacgcagtatattaagattggaaacatcatgatgctctccgaaggcagagtagaccgcgacaacgtgttctccgtcaaagacggcattctgaccatgcatgtggacaaagagacatacgagcgagctgggctcgtgggaaagacctacggtgtcaagggcggaagaggtctcaaaccaagatggggtacgtccgtcttcagttgctaccatgtgcattctcatccactaaggctagtatgacgcaaaagttatcaagtacgatcttcgagctccatcggcgctccatggcaagaaaggctttgatagactagtctacgcctgcaaaaatgctctgaacaagccgactacctggcttttctgcaatctctccaagagtaagtcataactctccgcacacagtagacacagttgccaatacactctccccagctcccgagccagatcctctcctaccgcatttcccaaccaagtatacgtcgcaagcggcacttgcgcgcgggatgaagatcaagatacctcgccttcagccgcccacgaccatcctcacgagcaacagccgatcggacctggacgagttcgccacggaggtgtacgaatggctttccttgatacggctggaaagctcccgagtggaggctaacgataatgttgacccgtatctctgcacgtacactataccagggattcccccggaggtggaagagggcgcgctttgcaagatcagctggcaggggttcatatcgccaggctgggtagcgcgcacgctagccgaggtgatacggacgttgccagcgaaggcgtggttctcgctaagcgcgacaccattcgctcggggtgcaatgggccacgggacggagtgcacagcaatgaggccgcccaactcggctggggaataccttctgtgggagatcaaaagccacgaatgagcgcgagcagtcatgataaggtagatatgaatgctaagcaagttgttgttgtactgctgtcgtcggtgctgatgtcgtcatcgaagagattgtgtggtggtgatgtttgtgcgtgtgtcaagcttgacggggacggacgttgcggtctgaaaagtcgtcgcctgcgagagcgtcctggaccagctgcctcagctcggcctggccggcgtcggtgtggaagtcgtcgcgctcggccagctcctcgatcctcctcctgaactcggggtcgggctcgttctcgtcgacgtcggcgggggcaacagcgctgacggagatgttgaggccgtcgggcaagggcgggggcgcgtcgtgggagtcgcggtgggagtcgcggtgggagtcgcggtgggcggaggcgtcgtgagcaccgttgagcagctgctgggcgcggctggcttcctgctgcttgagatactcggcgacgtcggggtagtcgccctcctcgaagatcttctggcgggcagtgtagccgtctgcacccttgaccatgacgtcggcgccgagatcctcgaccaggaccttggcggcgtcgagcgtctctacgacgaaaagggccgtctcgtcgtcctcgtcgcgcaggttgacgtcgacaccgtacttccggacgagtgcacgcagaagatcgaggtggttgtagctggcagcggcgtgcaggagagagtagccgtggtcgtcttgctggctggcgagctcgggcttttcatcgagcagcggcagcagcgcggccgggtcgtcggcggcgaggaggaaaggattggccggcatggcggcgtgcgagttgagtgtcggtcggctttgtagctgaatgtatgatgtgattacattgacttcaaggttgtgacggtgctcgccagtgttgccgtgagtgtttccgagatgtgattgcggcgttggagatgcgggtggtgctggtagtcgctgccagattaattttgtttggcgggggaggggctgttgctgcactggagctcgtctgattttcgggaagtaccaaggtaagctactactaaggtacggtcggcgtcacgcgttacgccttacagcccaccctgtctgtaacttcgaatttcgacacacttatttgctcaagtccgccatcaact

SEQ ID NO: 24718 - DNA, 1020 bp, Muscodor strobelii
  misc_feature: SGI cDNA ID NO. 568430
  misc_feature: Encodes the peptide sequence at SEQ ID NO 24719
atggcgcaaaacaaagcagctattcttgatggagctaacgctcgattgcgggtgggcgacatcgacatgccaaaggcggagtccgatagggtcgtggtgcgcaaccgggccgtcgccgtcaacccagcagattggaaaattcaagacaatccttcttttatccggtcatttcctctcgtactcggtggagataccgccggcgaggtcatcgaagttggtaccaatgtgaaaaacgtcaaagtcggcgacagagtcctaggacatggagttgttcttggaacccaagttccaactgacgggtgctttgctttctatacgtcactgcctgcgtccaacacagcggtgattccaagttcggtttctttcgctgaggcctcggtactgccgctttgtttggacacggcggctcaaggtctctatggaaccattgaggatggatttttgggccttccatatccctcgcttcagccggcctcggtcggaaaggtcatcgtcgtgtggggaggctcgtcatccgttggtgcttgcacaattcagctcgcggtggctagtggcgttcaagttgttgccgtagccagccagcataacttcgaattttgcaagaagtgtggcgcatcgcaggtatttgattacaaaagcggttcggttgttcaggatatcgtggaagtcgtcaacacgagcagcgcatcctttgccggagtttttgatgcaatttctgagccgggacagtcgtacaagcctgctctcgagatcttgaaggctctgggaggtggaactcttgctgcagtagcgccgccaccggaggtgctccctccaaacgtcaagtcgaaaatgatgattgcagtcaacccgcaatcactaccattatgggctcactatataacgcctgccttggaaagcggccaactaaagtgtctcccagagccaatggtcattgggcaaggcttggagatcatccaaaagggattggatatcaataaagaaggtgtcagcgcaaaaaaggttgttgtcgagctttga

SEQ ID NO: 24719 - protein, 339 aa, Muscodor strobelii
  misc_feature: SGI Peptide ID NO. 568430
  misc_feature (28)..(116): Pfam Id: PF08240 Pfam Desc: Alcohol dehydrogenase GroES-like domain
  misc_feature (160)..(300): Pfam Id: PF00107 Pfam Desc: Zinc-binding dehydrogenase
  misc_feature (160)..(225): Pfam Id: PF00107 Pfam Desc: Zinc-binding dehydrogenase
  misc_feature (1)..(339): NCBI GI: 67901854 Blast Desc: AN7914.2 [Aspergillus nidulans FGSC A4] gi|40740378|gb|EAA59568.1| AN7914.2 [Aspergillus nidulans FGSC A4] gi|259480663|tpe|CBF73513.1| TPA: conserved [Aspergillus FGSC
  misc_feature (1)..(339): NCBI GI: 242785287 Blast Desc: alcohol dehydrogenase, [Talaromyces stipitatus ATCC 10500] gi|218720710|gb|EED20129.1| alcohol dehydrogenase, [Talaromyces stipitatus ATCC 10500]
  misc_feature (1)..(339): NCBI GI: 212527996 Blast Desc: quinone oxidoreductase, [Penicillium marneffei ATCC 18224] gi|210073553|gb|EEA27640.1| quinone oxidoreductase, [Penicillium marneffei ATCC 18224]
  misc_feature (4)..(339): NCBI GI: 189209570 Blast Desc: zinc-binding oxidoreductase CipB [Pyrenophora tritici-repentis Pt-1C-BFP] gi|187977210|gb|EDU43836.1| zinc-binding oxidoreductase CipB [Pyrenophora tritici-repentis
  misc_feature (4)..(329): NCBI GI: 116202493 Blast Desc: CHGG_09131 [Chaetomium globosum CBS 148.51] gi|88177649|gb|EAQ85117.1| CHGG_09131 [Chaetomium globosum CBS 148.51]
  misc_feature (1)..(339): NCBI GI: 169779471 Blast Desc: [Aspergillus oryzae RIB40] gi|238500119|ref|XP_002381294.1| alcohol dehydrogenase, [Aspergillus flavus NRRL3357] gi|83772939|dbj|BAE63067.1| protein
  misc_feature (1)..(339): NCBI GI: 169783188 Blast Desc: [Aspergillus oryzae RIB40] gi|83774800|dbj|BAE64923.1| protein product [Aspergillus oryzae]
  misc_feature (1)..(339): NCBI GI: 238492947 Blast Desc: zinc-binding oxidoreductase CipB [Aspergillus flavus NRRL3357] gi|220696204|gb|EED52546.1| zinc-binding oxidoreductase CipB [Aspergillus flavus NRRL3357]
  misc_feature (2)..(339): NCBI GI: 169764711 Blast Desc: [Aspergillus oryzae RIB40] gi|238504026|ref|XP_002383245.1| zinc binding dehydrogenase, [Aspergillus flavus NRRL3357] gi|83764681|dbj|BAE54825.1| protein
  misc_feature (1)..(339): NCBI GI: 169626212 Blast Desc: SNOG_16389 [Phaeosphaeria nodorum SN15] gi|160705790|gb|EAT76214.2| SNOG_16389 [Phaeosphaeria nodorum SN15]
MAQNKAAILDGANARLRVGDIDMPKAESDRVVVRNRAVAVNPADWKIQDNPSFIRSFPLVLGGDTAGEVIEVGTNVKNVKVGDRVLGHGVVLGTQVPTDGCFAFYTSLPASNTAVIPSSVSFAEASVLPLCLDTAAQGLYGTIEDGFLGLPYPSLQPASVGKVIVVWGGSSSVGACTIQLAVASGVQVVAVASQHNFEFCKKCGASQVFDYKSGSVVQDIVEVVNTSSASFAGVFDAISEPGQSYKPALEILKALGGGTLAAVAPPPEVLPPNVKSKMMIAVNPQSLPLWAHYITPALESGQLKCLPEPMVIGQGLEIIQKGLDINKEGVSAKKVVVEL

SEQ ID NO: 24720 - DNA, 1479 bp, Muscodor strobelii
  misc_feature: SGI EST ID NO. CUFF.58196.0
  misc_feature: Variant of the nucleotide sequence at SEQ ID NO 24718
ccagcttcacttatatatacctgtaggtatcttagatactcactccaatgtatgtatgactatggtgttgagtgtacggctgcagtctgaattgaatttctctggatcattgctagaacaaatctgtctacaatcagatcgtcccgatggcgcaaaacaaagcagctattcttgatggagctaacgctcgattgcgggtgggcgacatcgacatgccaaaggcggagtccgatagggtcgtggtgcgcaaccgggccgtcgccgtcaacccagcagattggaaaattcaagacaatccttcttttatccggtcatttcctctcgtactcggtggagataccgccggcgaggtcatcgaagttggtaccaatgtgaaaaacgtcaaagtcggcgacagagtcctaggacatggagttgttcttggaacccaagttccaactgacgggtgctttgctttctatacgtcactgcctgcgtccaacacagcggtgattccaagttcggtttctttcgctgaggcctcggtactgccgctttgtttggacacggcggctcaaggtctctatggaaccattgaggatggatttttgggccttccatatccctcgcttcagccggcctcggtcggaaaggtcatcgtcgtgtggggaggctcgtcatccgttggtgcttgcacaattcagctcgcggtggctagtggcgttcaagttgttgccgtagccagccagcataacttcgaattttgcaagaagtgtggcgcatcgcaggtatttgattacaaaagcggttcggttgttcaggatatcgtggaagtcgtcaacacgagcagcgcatcctttgccggagtttttgatgcaatttctgagccgggacagtcgtacaagcctgctctcgagatcttgaaggctctgggaggtggaactcttgctgcagtagcgccgccaccggaggtgctccctccaaacgtcaagtcgaaaatgatgattgcagtcaacccgcaatcactaccattatgggctcactatataacgcctgccttggaaagcggccaactaaagtgtctcccagagccaatggtcattgggcaaggcttggagatcatccaaaagggattggatatcaataaagaaggtgtcagcgcaaaaaaggttgttgtcgagctttgaggggttgaagaaaatctagagtgcggttgagcagttgcgcgatgtgatgcgtctagtaacccaagtccaagctatagcccgtgtcgaccggcgtacaccaaagcagagaaggcagttgttctggatcctccattttgcaccactgctacaagccctagtccaacacatatcagtgtaaccacaagtgtcaatacatatgtcaggatcaatgccgtctggtcaaacttgtatacagattcgctgctatagacattgattgctgtaagtgtcccattcccggtgtgcgcaccagaggacagcatgcttagcgtag

SEQ ID NO: 24721 - DNA, 915 bp, Muscodor strobelii
  misc_feature: SGI cDNA ID NO. 568431
  misc_feature: Encodes the peptide sequence at SEQ ID NO 24722
atggatagcgaccacgggtcaggaattgtcttcctcgaaaagactacgtccaatccgtcgtttgaagaagaatccgctgtggcaaagaaggagaagaaacagaaaattctgacgagtccgacagttgtgaagatcttgatactacttggcctaggagcagccggtgcagcaagccatctattctactatcgaagtattgataagcaaatactttcgtccacttcgctctcacaggcatggaacctccgtatcggtacaatacttgctttcgtcgtgaagacatcatggactgtggcagtcttgaatgcccaagagcagcaagtctggcgtactatgagtcggaaggagctcaaattcaggacacttgacgctatgctcatgtctcctacagatttcacggcattccgacatgcaagtatgctcgctaaggcgaagacagccacattacttgctcttgttgcatggctcatacctatcagtgccattttcaccccggcaacattgacggtcatgtcgaacgacatggcaaatagtagagttgttaatgagatcgttcccgacatcgacttcaacactactgaaaagtttgcgagtcttgctacctgcacggccgattcatgtggcgtgactgatagtgacgattatagtgcaacgcagtttcgctctcccaatgcacaaactgtcatgcgaatagtatccacggcagcaaatggtcgcatcgaaccgatggttcccgggcaccccaactcgacctacacgtcaactttcgtcggcccaaacttccgatgcttaccagccaatagctctacagtcgtggaaatagatcgcattgataaagctacggctccgtcgaatgattcgtatcaatacaaggtatgtcagctactttgcatttgtgccaggaaagacatctag

SEQ ID NO: 24722 - protein, 304 aa, Muscodor strobelii
  misc_feature: SGI Peptide ID NO. 568431
  misc_feature (40)..(263): NCBI GI: 121704407 Blast Desc: conserved [Aspergillus clavatus NRRL 1] gi|119398612|gb|EAW09041.1| conserved [Aspergillus clavatus NRRL 1]
  misc_feature (47)..(263): NCBI GI: 67525573 Blast Desc: AN3244.2 [Aspergillus nidulans FGSC A4] gi|40743963|gb|EAA63145.1| AN3244.2 [Aspergillus nidulans FGSC A4] gi|259485791|tpe|CBF83110.1| TPA: conserved [Aspergillus FGSC
  misc_feature (40)..(278): NCBI GI: 255954279 Blast Desc: Pc21g08530 [Penicillium chrysogenum Wisconsin 54-1255] gi|211589603|emb|CAP95750.1| Pc21g08530 [Penicillium chrysogenum Wisconsin 54-1255]
  misc_feature (47)..(263): NCBI GI: 67539038 Blast Desc: AN5689.2 [Aspergillus nidulans FGSC A4] gi|40743592|gb|EAA62782.1| AN5689.2 [Aspergillus nidulans FGSC A4] gi|259484837|tpe|CBF81400.1| TPA: conserved [Aspergillus FGSC
  misc_feature (47)..(279): NCBI GI: 119466981 Blast Desc: NFIA_047350 [Neosartorya fischeri NRRL 181] gi|119405449|gb|EAW15400.1| conserved [Neosartorya fischeri NRRL 181]
  misc_feature (47)..(285): NCBI GI: 238508002 Blast Desc: conserved [Aspergillus flavus NRRL3357] gi|220688721|gb|EED45073.1| conserved [Aspergillus flavus NRRL3357]
  misc_feature (39)..(282): NCBI GI: 154313165 Blast Desc: BC1G_05584 [Botryotinia fuckeliana B05.10] gi|150849669|gb|EDN24862.1| BC1G_05584 [Botryotinia fuckeliana B05.10]
  misc_feature (36)..(272): NCBI GI: 145603035 Blast Desc: MGG_04554 [Magnaporthe grisea 70-15] gi|145011366|gb|EDJ96022.1| MGG_04554 [Magnaporthe grisea 70-15]
  misc_feature (39)..(263): NCBI GI: 46127387 Blast Desc: FG08071.1 [Gibberella zeae PH-1]
  misc_feature (40)..(282): NCBI GI: 67522186 Blast Desc: AN1550.2 [Aspergillus nidulans FGSC A4] gi|40745101|gb|EAA64257.1| AN1550.2 [Aspergillus nidulans FGSC A4] gi|259486876|tpe|CBF85091.1| TPA: conserved [Aspergillus FGSC
MDSDHGSGIVFLEKTTSNPSFEEESAVAKKEKKQKILTSPTVVKILILLGLGAAGAASHLFYYRSIDKQILSSTSLSQAWNLRIGTILAFVVKTSWTVAVLNAQEQQVWRTMSRKELKFRTLDAMLMSPTDFTAFRHASMLAKAKTATLLALVAWLIPISAIFTPATLTVMSNDMANSRVVNEIVPDIDFNTTEKFASLATCTADSCGVTDSDDYSATQFRSPNAQTVMRIVSTAANGRIEPMVPGHPNSTYTSTFVGPNFRCLPANSSTVVEIDRIDKATAPSNDSYQYKVCQLLCICARKDI

SEQ ID NO: 24723 - DNA, 281 bp, Muscodor strobelii
  misc_feature: SGI EST ID NO. CUFF.58202.0
  misc_feature: Variant of the nucleotide sequence at SEQ ID NO 24721
ccttgatctctttgctctattaattagtcaagtttctttccgggtcagcaaaaatggaagagaggtccagccttcttgatcccaccatctattaatcggtaatggatagcgaccacgggtcaggaattgtcttcctcgaaaagactacgtccaatccgtcgtttgaagaagaatccgctgtggcaaagaaggagaagaaacagaaaattctgacgagtccgacagttgtgaagatcttgatactacttggcctaggagcagccggtgcagcaagccatcta

SEQ ID NO: 24724 - DNA, 1275 bp, Muscodor strobelii
  misc_feature: SGI cDNA ID NO. 568432
  misc_feature: Encodes the peptide sequence at SEQ ID NO 24725
atgcctgcgatacgagcactcgttgtcggggcctcgatagccggtccatcaacggcctactggctggccaaagcaggggccaaagtcactatcattgagcgcttcccatctctcagaaccggcggacagaatattgacattcgaacgatcggggttgaggtgatgcggaagatccccgggatggaagctgccgtgcgtgccaagaaatacgacatggacggcatgagcttggtccgtagtgatggaagaccatatggggtattaaaacccacgggcaatcccgaccaacagaccttagtctccgagtatgagatcttgcgaggcgatttgtcaaagatccttttcgacttgaccaaggacaacgaaaacattaaatatgtattcggagagcaggtaacagccattcaacagcctgcagatgggggcccggtcacagttgagttcgccaacggattaccggcttcagaatatgaaatggttgttgcttgcgacggaactacatcaaggactcgagcaattggtttaggatgtggcgtccgggattacacggtttcaaccaattgctggggtgcatatttcagtgtgccacaagatcttttacacggcagtaagatcggagaaggattcaacgcgcccggcggaaggatgatggctgtcgcaccgaatgcgccggcaggtaaccggattttcatgatgtcggtttacccaggtggagatcctgatgccacagtaccattccgggaggctctgaagcaaggcgatcaggaactcaaagaattcatttgccggcggtacgaaaattcaggttggaaggattcacaactactcgaagctctgatgacagcggatgacttgtatgccagcgaagtgatgcaggtcaaagcacctcatttgtacaaaggccggtttgtcatggtcggcgatgctggatacgccagtggtctgactggtgtgggcacaagccttgcgatggctggcgcttatgttttggctggcgagattagcaagcatgaaggagacatttctgcaggccttcaaggttacgaggagcgcatgaaagttctcgtcgacgaggtaggacagatgcctcggttcgtcacgactttcatggcgcctcaaacagcctggggaatatcgctacggaataacatttttgcttttgtgatgtggactggcgttcttgacttcattacgaggttcatggggagcgggtttgagaaaacgaacaaagacatgctacagcattacagcaggatagtgggagtgagtacttag

SEQ ID NO: 24725 - protein, 424 aa, Muscodor strobelii
  misc_feature: SGI Peptide ID NO. 568432
  misc_feature (3)..(359): Pfam Id: PF01494 Pfam Desc: FAD binding domain
  misc_feature (5)..(34): Pfam Id: PF01266 Pfam Desc: FAD dependent oxidoreductase
  misc_feature (5)..(62): Pfam Id: PF00070 Pfam Desc: Pyridine nucleotide-disulphide oxidoreductase
  misc_feature (1)..(405): NCBI GI: 46115056 Blast Desc: FG03370.1 [Gibberella zeae PH-1]
  misc_feature (1)..(416): NCBI GI: 261356629 Blast Desc: oxidoreductase [Verticillium albo-atrum VaMs.102]
  misc_feature (2)..(416): NCBI GI: 116179108 Blast Desc: CHGG_00182 [Chaetomium globosum CBS 148.51] gi|88184479|gb|EAQ91947.1| CHGG_00182 [Chaetomium globosum CBS 148.51]
  misc_feature (4)..(388): NCBI GI: 169620960 Blast Desc: SNOG_13684 [Phaeosphaeria nodorum SN15] gi|111058011|gb|EAT79131.1| SNOG_13684 [Phaeosphaeria nodorum SN15]
  misc_feature (1)..(400): NCBI GI: 256735574 Blast Desc: NECHADRAFT_103269 [Nectria haematococca mpVI 77-13-4]
  misc_feature (4)..(401): NCBI GI: 189194041 Blast Desc: flavoprotein monooxygenase [Pyrenophora tritici-repentis Pt-1C-BFP] gi|187978923|gb|EDU45549.1| flavoprotein monooxygenase [Pyrenophora tritici-repentis
  misc_feature (1)..(400): NCBI GI: 238840427 Blast Desc: oxidoreductase [Microsporum canis CBS 113480]
  misc_feature (1)..(400): NCBI GI: 39971379 Blast Desc: MGG_10710 [Magnaporthe grisea 70-15] gi|145009399|gb|EDJ94099.1| MGG_10710 [Magnaporthe grisea 70-15]
  misc_feature (7)..(415): NCBI GI: 154315431 Blast Desc: BC1G_04288 [Botryotinia fuckeliana B05.10] gi|150847228|gb|EDN22421.1| BC1G_04288 [Botryotinia fuckeliana B05.10]
  misc_feature (1)..(400): NCBI GI: 212539466 Blast Desc: monoxygenase, [Penicillium marneffei ATCC 18224] gi|210067187|gb|EEA21279.1| monoxygenase, [Penicillium marneffei ATCC 18224]
MPAIRALVVGASIAGPSTAYWLAKAGAKVTIIERFPSLRTGGQNIDIRTIGVEVMRKIPGMEAAVRAKKYDMDGMSLVRSDGRPYGVLKPTGNPDQQTLVSEYEILRGDLSKILFDLTKDNENIKYVFGEQVTAIQQPADGGPVTVEFANGLPASEYEMVVACDGTTSRTRAIGLGCGVRDYTVSTNCWGAYFSVPQDLLHGSKIGEGFNAPGGRMMAVAPNAPAGNRIFMMSVYPGGDPDATVPFREALKQGDQELKEFICRRYENSGWKDSQLLEALMTADDLYASEVMQVKAPHLYKGRFVMVGDAGYASGLTGVGTSLAMAGAYVLAGEISKHEGDISAGLQGYEERMKVLVDEVGQMPRFVTTFMAPQTAWGISLRNNIFAFVMWTGVLDFITRFMGSGFEKTNKDMLQHYSRIVGVST

SEQ ID NO: 24726 - DNA, 3157 bp, Muscodor strobelii
  misc_feature: SGI EST ID NO. CUFF.58206.1
  misc_feature: Variant of the nucleotide sequence at SEQ ID NO 24724
cggacgtcgagatgaaacgaacatccgtgtaatgacttgtatagatgacgtcgatgttaacctatggagctgcacctttccccgcatctagtggaaattattgcaaactcttcaaaaacttatagaagtgcgcgccatcgatatataccataagtagagcgattatatacacttggcttctcaagctaaattaacaggtagcaaaaagcaatggcaggtaaagagattccgacatgcagatggggcatcatcaccacggggttgatctcatcttggtttgtggcagaccttgtcatgcctcgaacagatgcaaaagcacatcacatcattcaagctatcgggtcttcaacgctcgataaaagtcgcgacttcgcatctaagcatttaagagatgctacggtgcagcccagtatctatgggagttatgacgaagtctacgcggaccccaatattgactgcatatacattggaagtccccacggattccacaagcgcgattgtctcgcagcaatcgcagccggaaaaaatgttctctgtgagaaagctttcactatcaatgcgcgtgaggcacgtgaggtgtttgatgcagcgaagaagaagggagtctatgtcgctgaggcaatgtggttacgacacaagccgctagcccttgatttgcaaaagctactacacgaagacaagatcattggggacgtctttcggacctcgtgtgattttcagatgtaccttgatatcgcaggactgccctctacttctcgatataaggacttgagattgggcgcaggcacactccttgatatcggaatctattcgcttacttggggtcttctcacgcttgaccctaaccctgtcgacaaagtcgagacacccaatatcatggcagcgcaaagcttcttcgacggggtagaagtgacgacaagtgctatattgcattacaagagtactggtcggcaaggtttagttacttcaaccagtgaacgtaggagggagaaaccacagattgttgccacaatcgacgggaccaatggctttatcgaagtcgagggcaatgcgccgtcccacccaactgcattcgtcgtgtatccacgatgcacgagcgatgagaaaccggcaccgatgaagcgtttcgattatgcgcgacctcagcagggcttccaatatgaggcagaccagaccgcgttggatctagctgcgggcagaaccgagagcgcgatcatgccttggtcagagacaattcgagtgatggaaatgatggacgagatcagaagacagggtggcactcggtatccgcaggatgaggcataggattcccggactttcaagcatcaaaatatcagttttgtccgacagtcaaatttccatgaatcgataaatggtacacggtctatgactggcgtagagtagcgtctagcatgggtagcatttcacagcgaatcgcgtgctgttctcggcctcttacaaactccgcgacccactgcgcacccgcgtcttggccgcctcagcgtcattgactctacaaaccgcatcgtgaagtcgcgatactgacattcgactcatttcatatatatatcaagtctataagtcgcacgatatgagtatgtcaagaatgatcaagcaatcttacacagttgagccccatcgcacttgcgttttcttcgaaccgatacaacttcttaatcccacagcacaatgcctgcgatacgagcactcgttgtcggggcctcgatagccggtccatcaacggcctactggctggccaaagcaggggccaaagtcactatcattgagcgcttcccatctctcagaaccggcggacagaatattgacattcgaacgatcggggttgaggtgatgcggaagatccccgggatggaagctgccgtgcgtgccaagaaatacgacatggacggcatgagcttggtccgtagtgatggaagaccatatggggtattaaaacccacgggcaatcccgaccaacagaccttagtctccgagtatgagatcttgcgaggcgatttgtcaaagatccttttcgacttgaccaaggacaacgaaaacattaaatatgtattcggagagcaggtaacagccattcaacagcctgcagatgggggcccggtcacagttgagttcgccaacggattaccggcttcagaatatgaaatggttgttgcttgcgacggaactacatcaaggactcgagcaattggtttaggatgtggcgtccgggattacacggtttcaaccaattgctggggtgcatatttcagtgtgccacaagatcttttacacggcagtaagatcggagaaggattcaacgcgcccggcggaaggatgatggctgtcgcaccgaatgcgccggcaggtaaccggattttcatgatgtcggtttacccaggtggagatcctgatgccacagtaccattccgggaggctctgaagcaaggcgatcaggaactcaaagaattcatttgccggcggtacgaaaattcaggttggaaggattcacaactactcgaagctctgatgacagcggatgacttgtatgccagcgaagtgatgcaggtcaaagcacctcatttgtacaaaggccggtttgtcatggtcggcgatgctggatacgccagtggtctgactggtgtgggcacaagccttgcgatggctggcgcttatgttttggctggcgagattagcaagcatgaaggagacatttctgcaggccttcaaggttacgaggagcgcatgaaagttctcgtcgacgaggtaggacagatgcctcggttcgtcacgactttcatggcgcctcaaacagcctggggaatatcgctacggaataacatttttgcttttgtgatgtggactggcgttcttgacttcattacgaggttcatggggagcgggtttgagaaaacgaacaaagacatgctacagcattacagcaggatagtgggagtgagtacttagaatccaggaactgtgagaataatgatactctcgtcgaataggagaatgagaatgatacctcacaggagttgaataggttcagttgctaaggaagcgcggctgcctggtagcgaagatctactctcttcatagtttatatatgatatttctatatgtcgaggactaggcagcaaaatcgaatcgtacgcgcgat

SEQ ID NO: 24727 - DNA, 1095 bp, Muscodor strobelii
  misc_feature: SGI cDNA ID NO. 568433
  misc_feature: Encodes the peptide sequence at SEQ ID NO 24728
atggcaggtaaagagattccgacatgcagatggggcatcatcaccacggggttgatctcatcttggtttgtggcagaccttgtcatgcctcgaacagatgcaaaagcacatcacatcattcaagctatcgggtcttcaacgctcgataaaagtcgcgacttcgcatctaagcatttaagagatgctacggtgcagcccagtatctatgggagttatgacgaagtctacgcggaccccaatattgactgcatatacattggaagtccccacggattccacaagcgcgattgtctcgcagcaatcgcagccggaaaaaatgttctctgtgagaaagctttcactatcaatgcgcgtgaggcacgtgaggtgtttgatgcagcgaagaagaagggagtctatgtcgctgaggcaatgtggttacgacacaagccgctagcccttgatttgcaaaagctactacacgaagacaagatcattggggacgtctttcggacctcgtgtgattttcagatgtaccttgatatcgcaggactgccctctacttctcgatataaggacttgagattgggcgcaggcacactccttgatatcggaatctattcgcttacttggggtcttctcacgcttgaccctaaccctgtcgacaaagtcgagacacccaatatcatggcagcgcaaagcttcttcgacggggtagaagtgacgacaagtgctatattgcattacaagagtactggtcggcaaggtttagttacttcaaccagtgaacgtaggagggagaaaccacagattgttgccacaatcgacgggaccaatggctttatcgaagtcgagggcaatgcgccgtcccacccaactgcattcgtcgtgtatccacgatgcacgagcgatgagaaaccggcaccgatgaagcgtttcgattatgcgcgacctcagcagggcttccaatatgaggcagaccagaccgcgttggatctagctgcgggcagaaccgagagcgcgatcatgccttggtcagagacaattcgagtgatggaaatgatggacgagatcagaagacagggtggcactcggtatccgcaggatgaggcatag

SEQ ID NO: 24728 - protein, 364 aa, Muscodor strobelii
  misc_feature: SGI Peptide ID NO. 568433
  misc_feature (9)..(138): Pfam Id: PF01408 Pfam Desc: Oxidoreductase family, NAD-binding Rossmann fold
  misc_feature (5)..(362): NCBI GI: 238493527 Blast Desc: dimeric dihydrodiol dehydrogenase, [Aspergillus flavus NRRL3357] gi|220696494|gb|EED52836.1| dimeric dihydrodiol dehydrogenase, [Aspergillus flavus NRRL3357]
  misc_feature (7)..(362): NCBI GI: 46135649 Blast Desc: FG09347.1 [Gibberella zeae PH-1]
  misc_feature (4)..(362): NCBI GI: 256729155 Blast Desc: NECHADRAFT_80118 [Nectria haematococca mpVI 77-13-4]
  misc_feature (4)..(362): NCBI GI: 67515509 Blast Desc: AN0036.2 [Aspergillus nidulans FGSC A4] gi|40746199|gb|EAA65355.1| AN0036.2 [Aspergillus nidulans FGSC A4] gi|259489779|tpe|CBF90331.1| TPA: conserved [Aspergillus FGSC
  misc_feature (6)..(362): NCBI GI: 255937021 Blast Desc: Pc13g11190 [Penicillium chrysogenum Wisconsin 54-1255] gi|211584157|emb|CAP92188.1| Pc13g11190 [Penicillium chrysogenum Wisconsin 54-1255]
  misc_feature (1)..(362): NCBI GI: 169600962 Blast Desc: SNOG_03335 [Phaeosphaeria nodorum SN15] gi|160705844|gb|EAT88540.2| SNOG_03335 [Phaeosphaeria nodorum SN15]
  misc_feature (7)..(360): NCBI GI: 261357894 Blast Desc: conserved [Verticillium albo-atrum VaMs.102]
  misc_feature (8)..(363): NCBI GI: 256721537 Blast Desc: NECHADRAFT_39702 [Nectria haematococca mpVI 77-13-4]
  misc_feature (5)..(298): NCBI GI: 169783698 Blast Desc: [Aspergillus oryzae RIB40] gi|83775055|dbj|BAE65178.1| protein product [Aspergillus oryzae]
  misc_feature (6)..(363): NCBI GI: 46139255 Blast Desc: FG11142.1 [Gibberella zeae PH-1]
  misc_feature (10)..(360): SWISSPROT Homolog: EC 1.3.1.20 Trans-1,2-dihydrobenzene-1,2-diol dehydrogenase
  misc_feature (10)..(360): SWISSPROT Homolog: EC 1.1.1.179 D-xylose 1-dehydrogenase (NADP(+))
MAGKEIPTCRWGIITTGLISSWFVADLVMPRTDAKAHHIIQAIGSSTLDKSRDFASKHLRDATVQPSIYGSYDEVYADPNIDCIYIGSPHGFHKRDCLAAIAAGKNVLCEKAFTINAREAREVFDAAKKKGVYVAEAMWLRHKPLALDLQKLLHEDKIIGDVFRTSCDFQMYLDIAGLPSTSRYKDLRLGAGTLLDIGIYSLTWGLLTLDPNPVDKVETPNIMAAQSFFDGVEVTTSAILHYKSTGRQGLVTSTSERRREKPQIVATIDGTNGFIEVEGNAPSHPTAFVVYPRCTSDEKPAPMKRFDYARPQQGFQYEADQTALDLAAGRTESAIMPWSETIRVMEMMDEIRRQGGTRYPQDEA

SEQ ID NO: 24729 - DNA, 3157 bp, Muscodor strobelii; identical to SEQ ID NO: 24726
  misc_feature: SGI EST ID NO. CUFF.58206.1
  misc_feature: Variant of the nucleotide sequence at SEQ ID NO 24727

SEQ ID NO: 24730 - DNA, 1134 bp, Muscodor strobelii
  misc_feature: SGI cDNA ID NO. 568434
  misc_feature: Elevated expression when VOC is produced
  misc_feature: Encodes the peptide sequence at SEQ ID NO 24731
atgcgcgctctcatcggcgatgattgccggccaccaatacccccaccggtgcgggcaaagctggccgagacgctgccaatcgataatttagacacagagcatctggagactttggctctggccttatcaaatctcttacgatccgatattgctgagatcactctagcacaaattgtcgacggctttccgacgctttcttctttcggtcaatcccactttgttgagctctcatcagatcatccattgtcggcacacgagaatctttgtccgggagttattgataaaacgcgtgagtttcgatcatcattcgatatcagatctttgagattcagtccgatagttctgcaggggtttcaaaatgagatgcctggtagcaaaacttttcagtttcgccttatagaattgctggccgtcgcatgccaccaaatcgccgcattcttgtttcaagcggatgagtcgaacaagcacaggaaagcttacgaagcttgggcttcaagatggaacgagctgaaagtatctggagacgagcgctacaccttcgaggacatgaagccaccgacaatattttatcatgattcttattgcgactacgagcagtacccacgcggtttgcccgatgttgttgggtactgggccgaatccaagattctcggaggtgtggttcttttcgatagaggagagtcagaagttgagtgcaacaacatttggctggacccaaatcataggcccggtccaataacgatgtactcccctaccgcagatcagctcgaacccgtgatagagttcttattgtctgatcaaagcgcaactgtgggatgtcctttgcccattcgagcatccactttgaatcggccacgattttatcgataccatgccactaaatactttcatatattccgtgataagtacgatagcagactaccggcttggtttttcgatgcgtctcgctgtgcgcgaaacccgagggatttcccggagcttgaagacgagcataagctgcttgatattacaatgttggcatatcagaatggaactcaaccggatgaacatggcattgccgctatcaaggaggatttaaagaatatcacgccatcatctccgttgtggccagctgatgaccctagatacaagtga

SEQ ID NO: 24731 - protein, 377 aa, Muscodor strobelii
  misc_feature: SGI Peptide ID NO. 568434
  misc_feature (22)..(376): NCBI GI: 256724889 Blast Desc: NECHADRAFT_66940 [Nectria haematococca mpVI 77-13-4]
  misc_feature (27)..(369): NCBI GI: 256722364 Blast Desc: NECHADRAFT_44324 [Nectria haematococca mpVI 77-13-4]
  misc_feature (25)..(349): NCBI GI: 116178988 Blast Desc: CHGG_00122 [Chaetomium globosum CBS 148.51] gi|88184419|gb|EAQ91887.1| CHGG_00122 [Chaetomium globosum CBS 148.51]
  misc_feature (27)..(369): NCBI GI: 46129238 Blast Desc: FG08804.1 [Gibberella zeae PH-1]
  misc_feature (27)..(369): NCBI GI: 256734154 Blast Desc: NECHADRAFT_35598 [Nectria haematococca mpVI 77-13-4]
  misc_feature (24)..(306): NCBI GI: 256734181 Blast Desc: NECHADRAFT_67600 [Nectria haematococca mpVI 77-13-4]
  misc_feature (30)..(307): NCBI GI: 46126925 Blast Desc: FG07840.1 [Gibberella zeae PH-1]
  misc_feature (18)..(330): NCBI GI: 256726319 Blast Desc: NECHADRAFT_82106 [Nectria haematococca mpVI 77-13-4]
  misc_feature (27)..(329): NCBI GI: 171683089 Blast Desc: protein product [Podospora anserina] gi|170941504|emb|CAP67156.1| protein product [Podospora anserina]
  misc_feature (7)..(308): NCBI GI: 171681353 Blast Desc: protein product [Podospora anserina] gi|170940635|emb|CAP65863.1| protein product [Podospora anserina]
  misc_feature: Useful for introducing or modulating the production of volatile compounds
MRALIGDDCRPPIPPPVRAKLAETLPIDNLDTEHLETLALALSNLLRSDIAEITLAQIVDGFPTLSSFGQSHFVELSSDHPLSAHENLCPGVIDKTREFRSSFDIRSLRFSPIVLQGFQNEMPGSKTFQFRLIELLAVACHQIAAFLFQADESNKHRKAYEAWASRWNELKVSGDERYTFEDMKPPTIFYHDSYCDYEQYPRGLPDVVGYWAESKILGGVVLFDRGESEVECNNIWLDPNHRPGPITMYSPTADQLEPVIEFLLSDQSATVGCPLPIRASTLNRPRFYRYHATKYFHIFRDKYDSRLPAWFFDASRCARNPRDFPELEDEHKLLDITMLAYQNGTQPDEHGIAAIKEDLKNITPSSPLWPADDPRYK

SEQ ID NO: 24732 - DNA, 1394 bp, Muscodor strobelii
  misc_feature: SGI EST ID NO. CUFF.58218.0
  misc_feature: Variant of the nucleotide sequence at SEQ ID NO 24730
tcccaatccttatttcttctaacctcacgacgatattcacacaacaaaatttgtcgcatctggcgcatcttctcacgggcaagcatgcgcgctctcatcggcgatgattgccggccaccaatacccccaccggtgcgggcaaagctggccgagacgctgccaatcgataatttagacacagagcatctggagactttggctctggccttatcaaatctcttacgatccgatattgctgagatcactctagcacaaattgtcgacggctttccgacgctttcttctttcggtcaatcccactttgttgagctctcatcagatcatccattgtcggcacacgagaatctttgtccgggagttattgataaaacgcgtgagtttcgatcatcattcgatatcagatctttgagattcagtccgatagttctgcaggggtttcaaaatgagatgcctggtagcaaaacttttcagtttcgccttatagaattgctggccgtcgcatgccaccaaatcgccgcattcttgtttcaagcggatgagtcgaacaagcacaggaaagcttacgaagcttgggcttcaagatggaacgagctgaaagtatctggagacgagcgctacaccttcgaggacatgaagccaccgacaatattttatcatgattcttattgcgactacgagcagtacccacgcggtttgcccgatgttgttgggtactgggccgaatccaagattctcggaggtgtggttcttttcgatagaggagagtcagaagttgagtgcaacaacatttggctggacccaaatcataggcccggtccaataacgatgtactcccctaccgcagatcagctcgaacccgtgatagagttcttattgtctgatcaaagcgcaactgtgggatgtcctttgcccattcgagcatccactttgaatcggccacgattttatcgataccatgccactaaatactttcatatattccgtgataagtacgatagcagactaccggcttggtttttcgatgcgtctcgctgtgcgcgaaacccgagggatttcccggagcttgaagacgagcataagctgcttgatattacaatgttggcatatcagaatggaactcaaccggatgaacatggcattgccgctatcaaggaggatttaaagaatatcacgccatcatctccgttgtggccagctgatgaccctagatacaagtgaaaattctcccccagtatagagatcacatcgaagttctgaatcgcggcaatatggtgacatggatatttgctagattagcgtcgtctatcatgctctaacgtgtgtactattgccgttttaatcatggccatttatgatattgctaacagccaaagcgaaatcaggtcgcatgatgt

SEQ ID NO: 24733 - DNA, 1029 bp, Muscodor strobelii
  misc_feature: SGI cDNA ID NO. 568435
  misc_feature: Encodes the peptide sequence at SEQ ID NO 24734
atggctacactaccttcatttgtttgcttccacgccaccacagagaacgccattgcgctctacaagacaatggagaaatctcacggtttcattggcactacagagggaatggccctactgatcgatgagattcacagtctcccaacttatcctccttctctgtatgttgacattgagggagtgacactgggtagacatgggtccatctcgatcatgcaactacatttcggcccaccgcgtcccaccaccttcggagacatcctccagtctgccgcaatcccaaaagtcttcttcgattgccgccacgactccgatgccttgtacgccaactttggcattgccctgcaaggcgttcatgacttgcagctcatggtgcttgccaaaaagatgaaggatacgggcagtgactgcacgggaggactgctgagtctcgtagtgtgcatcacaaaatatcttcgactctcagaggaagagagggccgaggccgagaaggtgaagacggagggcagacagctcttctatccgaagctaggtggaagatgggaaatattcaacgagcggccacttcccgacaagatctggcagtattgcgtccaagatgtacacttcatgccagaactctgggataaattcgtcatcaaagccgagaacgacacatacaaagagacatcccgagcatggacggagcgcattcgcgaagagtgggtggacaagctggagtacgcgaccaaagcgcgcatcgcagagtcgcagtctcccgactttcagggagatgacagagactacatgatgcaggtcccagagggatgggagtatcatgatccgtggaacggggctatgctcgcagctcagtacgcggcgctgtacggtgttcacatcccgcaagtctccaagtttccgaaggaaggaccccatccggagagggaggagccacgggtacccaagaaaaagtcaaagaagaagaaggatccacaaggatccagtgatggcgagacgacggcgacaagcggtctttacgatgtggattga

SEQ ID NO: 24734 - protein, 342 aa, Muscodor strobelii
  misc_feature: SGI Peptide ID NO. 568435
  misc_feature (27)..(272): NCBI GI: 170940093 Blast Desc: protein product [Podospora anserina]
  misc_feature (33)..(270): NCBI GI: 154315768 Blast Desc: BC1G_04456 [Botryotinia fuckeliana B05.10] gi|150846852|gb|EDN22045.1| BC1G_04456 [Botryotinia fuckeliana B05.10]
  misc_feature (33)..(270): NCBI GI: 156059756 Blast Desc: SS1G_03891 [Sclerotinia sclerotiorum 1980] gi|154701677|gb|EDO01416.1| SS1G_03891 [Sclerotinia sclerotiorum 1980]
  misc_feature (27)..(264): NCBI GI: 154277567 Blast Desc: [Ajellomyces capsulatus NAm1] gi|150413209|gb|EDN08592.1| [Ajellomyces capsulatus NAm1]
  misc_feature (27)..(264): NCBI GI: 240280394 Blast Desc: 3'-5' exonuclease [Ajellomyces capsulatus H143]
  misc_feature (29)..(226): NCBI GI: 189200661 Blast Desc: conserved [Pyrenophora tritici-repentis Pt-1C-BFP] gi|187983766|gb|EDU49254.1| conserved [Pyrenophora tritici-repentis Pt-1C-BFP]
  misc_feature (31)..(261): NCBI GI: 261196313 Blast Desc: 3'-5' exonuclease [Ajellomyces dermatitidis SLH14081] gi|239587693|gb|EEQ70336.1| 3'-5' exonuclease [Ajellomyces dermatitidis SLH14081] gi|239614653|gb|EEQ91640.1| 3'-5' ER-3]
  misc_feature (44)..(264): NCBI GI: 225561048 Blast Desc: 3'-5' exonuclease [Ajellomyces capsulatus G186AR]
  misc_feature (23)..(267): NCBI GI: 226277937 Blast Desc: conserved [Paracoccidioides brasiliensis Pb01]
  misc_feature (51)..(280): NCBI GI: 212545983 Blast Desc: PMAA_010410 [Penicillium marneffei ATCC 18224] gi|210064665|gb|EEA18760.1| PMAA_010410 [Penicillium marneffei ATCC 18224]
MATLPSFVCFHATTENAIALYKTMEKSHGFIGTTEGMALLIDEIHSLPTYPPSLYVDIEGVTLGRHGSISIMQLHFGPPRPTTFGDILQSAAIPKVFFDCRHDSDALYANFGIALQGVHDLQLMVLAKKMKDTGSDCTGGLLSLVVCITKYLRLSEEERAEAEKVKTEGRQLFYPKLGGRWEIFNERPLPDKIWQYCVQDVHFMPELWDKFVIKAENDTYKETSRAWTERIREEWVDKLEYATKARIAESQSPDFQGDDRDYMMQVPEGWEYHDPWNGAMLAAQYAALYGVHIPQVSKFPKEGPHPEREEPRVPKKKSKKKKDPQGSSDGETTATSGLYDVD

SEQ ID NO: 24735 - DNA, 1905 bp, Muscodor strobelii
  misc_feature: SGI cDNA ID NO. 568436
  misc_feature: Encodes the peptide sequence at SEQ ID NO 24736
atggaggctttcacagataagctccagcagatgaaggatgcgttcttgcaaatcgacctcgagaaagagcggagtattcgaggaatgcgaggagttgttgccatttacatcaatgggagtcgactctacaaggcgcgggtggatctaccagaagatatcgaagatatcgaagattccccccagggtaacttcgacgcagttgtcgtgttcaacaagcacaacgccattcaacgcttcctcgatggagaacgccgaaaactagcccgcttctgtcgccctagtcatagcgtcaacttgtacaatcagacgcctgacacggttaactggcaagtattctttggagatgtgtgtgacgcctggaagtatatcactggcgtgaaaccattccctcccgaggacccctctgaagaagaccatcttgtcgatcttcccagtacttccaaacctattgattctccccgtaccgcacaggatgcttcatcacgcgatgacacagacgcttctgattccaaaaaggaatcacgagacattgacactactcgcagctctgaaagtgactcgcatcctaatcaattgtcacaagaggttgtgactcaattcgaaaaaggttcagttgtcaaagaagctcgaggcacgcctgaattctcggctagtttctcgtcgtacaaagcgacgataacaggcctcgacaaacagattgttatcttcgtcaaagagagttcatatgcagtggatgaaaggaaagcggccgagaaagcagctagatactttccaaagcttgcaattccgcgcgctgcttccagtggcgagctgctgtacccattcggcgaatgtgtgagcaaattcgatcttcgtttagcatatatcaaggatggccgccgtgaccaagtttcagtcgagaggctgctgtacgccgagcttgtgcaagcagaggccacgctaagcatgtacagacattcgctatcgctccctaatgacacatccaaatcgcgacacaaccttcaacgcttgttccacgatcgcataattgacaataagagaatgacagaaaactacagcaaaggtgtgaagcttggcggacaagttgttccgttggacaaattactgtcgctccgctggaagatcaatggtcaggattatccatcattggacgaactcttcaacacagccaaatctgtaatagctcctgagtcacctgagatcttgtcatgtccgctcgtattcggacttggtaactgccatggcggcaacgttatgctgccgacccaattttctcgggaaggaggaggtacaagcgatattctgtttattgattacgaagtagcagggattcatccggttatgctcgaccttgcgaagccattgtataacgacgtgatgtttgagtttctttatcgacacttgctttcatcggaccccggaaacattacctacaccatcggcagcgaggacattactgttgaattggtccctacagtcgacactctgacacaagcaatacttgacatcaagctacgctatctcataaaaccgctctatgatgaggtcaaagctctaaagtacggcgagaacttgaacagtcatgttactctactgtcgactgcactattcttatgcggcacttttgggggcaacttcgctgcaaatgacatagcattagtgagcaacttcgcaattggcatgattctcttcggtgcaaataattgggaagatcttatggcaaaattgggatcacttgggttccaaggattcgaccttgaggatgtggagacaagtattgtcggcaaacttcctcaaagagagaaagctcaagctcaagctcaaccccagccccagcttcctttgaagcgattaccttcctttgaagcgatgagcgatcactttcctttgaagcgattatggtga

SEQ ID NO: 24736 - protein, 634 aa, Muscodor strobelii
  misc_feature: SGI Peptide ID NO. 568436
  misc_feature (180)..(508): NCBI GI: 240273881 Blast Desc: conserved [Ajellomyces capsulatus H143]
  misc_feature (271)..(539): NCBI GI: 158336044 Blast Desc: AM1_2903 [Acaryochloris marina MBIC11017] gi|158306285|gb|ABW27902.1| conserved [Acaryochloris marina MBIC11017]
  misc_feature (369)..(508): NCBI GI: 154286922 Blast Desc: [Ajellomyces capsulatus NAm1] gi|150407897|gb|EDN03438.1| [Ajellomyces capsulatus NAm1]
  misc_feature (293)..(549): NCBI GI: 13475924 Blast Desc: mlr7111 [Mesorhizobium loti MAFF303099] gi|14026684|dbj|BAB53280.1| mlr7111 [Mesorhizobium loti MAFF303099]
  misc_feature (284)..(562): NCBI GI: 16262668 Blast Desc: SMa0403 [Sinorhizobium meliloti 1021] gi|14523289|gb|AAK64873.1| SMa0403 [Sinorhizobium meliloti 1021]
  misc_feature (291)..(562): NCBI GI: 150378242 Blast Desc: Smed_6307 [Sinorhizobium medicae WSM419] gi|150032789|gb|ABR64904.1| conserved [Sinorhizobium medicae WSM419]
MEAFTDKLQQMKDAFLQIDLEKERSIRGMRGVVAIYINGSRLYKARVDLPEDIEDIEDSPQGNFDAVVVFNKHNAIQRFLDGERRKLARFCRPSHSVNLYNQTPDTVNWQVFFGDVCDAWKYITGVKPFPPEDPSEEDHLVDLPSTSKPIDSPRTAQDASSRDDTDASDSKKESRDIDTTRSSESDSHPNQLSQEVVTQFEKGSVVKEARGTPEFSASFSSYKATITGLDKQIVIFVKESSYAVDERKAAEKAARYFPKLAIPRAASSGELLYPFGECVSKFDLRLAYIKDGRRDQVSVERLLYAELVQAEATLSMYRHSLSLPNDTSKSRHNLQRLFHDRIIDNKRMTENYSKGVKLGGQVVPLDKLLSLRWKINGQDYPSLDELFNTAKSVIAPESPEILSCPLVFGLGNCHGGNVMLPTQFSREGGGTSDILFIDYEVAGIHPVMLDLAKPLYNDVMFEFLYRHLLSSDPGNITYTIGSEDITVELVPTVDTLTQAILDIKLRYLIKPLYDEVKALKYGENLNSHVTLLSTALFLCGTFGGNFAANDIALVSNFAIGMILFGANNWEDLMAKLGSLGFQGFDLEDVETSIVGKLPQREKAQAQAQPQPQLPLKRLPSFEAMSDHFPLKRLW

SEQ ID NO: 24737 - DNA, 933 bp, Muscodor strobelii
  misc_feature: SGI cDNA ID NO. 568437
  misc_feature: Encodes the peptide sequence at SEQ ID NO 24738
atggtgcgcttcgctgtaattgcatgggccacgacggccattgctctgaccgacatcgagcataaaccctttatgcggaagaacatcgatcctattgtctacccaggagaatatgtctcgcatatgcactccttctacgggtcagatgcggtgacgaaggatcttcctactacagcagacttacagaaaggctgcccgtcaggcgagaatccgaatgacctttcggtgtattgtctgacgtatgcaggggccccgacactatactacgtcaacggaaacacttacacagagatctatcctgctacattcaagacttactacgagcagattgatcatgcagagataccattcccaactgattttcatgccgtagctggcaatgtgagcgcaaggagccagtctgacattgacgagaaaatcaccgccataacctggtggtgcgacggcaacggacccgaagaccgaaatacgcgaccaagggcagctttcccacgtgtgacttgcagtgcgcatatgcaagccattctcagattcccagactgtgtcaatccaagtgatatcacacaatatacatatgcagcggccaacggcggacgatgtcccacaaacatgaagcgaatgccatcactccgcttctccattcgatacgatactcgcaaagctattccgcaaggatggaatggcgttccgcctttcaagctgtcctgtggcgagattggcgatggatactgtttccacggagacttcatcaatgggtggttcgacgacgccgcgaaaacgatgctacaggctaaaggacagggtttcatgaggattgatggggcgcatggaatgggcaagcagttcagtacttgtaaggcggttgacaaggaccccacgcacgggacgagtgactaccttacgagtattcagatgatgagtggtgccaagtag

SEQ ID NO: 24738 - protein, 310 aa, Muscodor strobelii
  misc_feature: SGI Peptide ID NO. 568437
  misc_feature (30)..(253): Pfam Id: PF09362 Pfam Desc: Domain of function (DUF1996)
  misc_feature (22)..(306): NCBI GI: 171676330 Blast Desc: protein product [Podospora anserina] gi|170936231|emb|CAP60890.1| protein product [Podospora anserina]
  misc_feature (1)..(244): NCBI GI: 171695694 Blast Desc: protein product [Podospora anserina] gi|170948089|emb|CAP60253.1| protein product [Podospora anserina]
  misc_feature (1)..(310): NCBI GI: 70986060 Blast Desc: short-chain dehydrogenase/reductase [Aspergillus fumigatus Af293] gi|66846159|gb|EAL86492.1| short-chain dehydrogenase/reductase, [Aspergillus fumigatus Af293]
  misc_feature (1)..(310): NCBI GI: 159128337 Blast Desc: short-chain dehydrogenase/reductase, [Aspergillus fumigatus A1163]
  misc_feature (1)..(310): NCBI GI: 119473975 Blast Desc: NFIA_003200 [Neosartorya fischeri NRRL 181] gi|119407016|gb|EAW16966.1| conserved [Neosartorya fischeri NRRL 181]
  misc_feature (14)..(306): NCBI GI: 70996730 Blast Desc: AFUA_1G17540 [Aspergillus fumigatus Af293] gi|66850755|gb|EAL91082.1| AFUA_1G17540 [Aspergillus fumigatus Af293] gi|159131853|gb|EDP56966.1| AFUB_016890 [Aspergillus
  misc_feature (1)..(309): NCBI GI: 67522701 Blast Desc: AN1807.2 [Aspergillus nidulans FGSC A4] gi|40745816|gb|EAA64972.1| AN1807.2 [Aspergillus nidulans FGSC A4] gi|259487153|tpe|CBF85598.1| TPA: short-chain AFUA_3G02100)
  misc_feature (24)..(307): NCBI GI: 169764629 Blast Desc: [Aspergillus oryzae RIB40] gi|83764640|dbj|BAE54784.1| protein product [Aspergillus oryzae]
  misc_feature (7)..(306): NCBI GI: 261356929 Blast Desc: conserved [Verticillium albo-atrum VaMs.102]
  misc_feature (23)..(307): NCBI GI: 189195718 Blast Desc: PTRG_03864 [Pyrenophora tritici-repentis Pt-1C-BFP] gi|187980076|gb|EDU46702.1| PTRG_03864 [Pyrenophora tritici-repentis Pt-1C-BFP]
MVRFAVIAWATTAIALTDIEHKPFMRKNIDPIVYPGEYVSHMHSFYGSDAVTKDLPTTADLQKGCPSGENPNDLSVYCLTYAGAPTLYYVNGNTYTEIYPATFKTYYEQIDHAEIPFPTDFHAVAGNVSARSQSDIDEKITAITWWCDGNGPEDRNTRPRAAFPRVTCSAHMQAILRFPDCVNPSDITQYTYAAANGGRCPTNMKRMPSLRFSIRYDTRKAIPQGWNGVPPFKLSCGEIGDGYCFHGDFINGWFDDAAKTMLQAKGQGFMRIDGAHGMGKQFSTCKAVDKDPTHGTSDYLTSIQMMSGAK

SEQ ID NO: 24739 - DNA, 1107 bp, Muscodor strobelii
  misc_feature: SGI cDNA ID NO. 568438
  misc_feature: Encodes the peptide sequence at SEQ ID NO 24740
atgttgttcttgaacaggtctcttatacttggcgcaggattggtcacgagtgcttcgtgcaagcgatccgtcgaagacctctacgtggagcgcgcccctgaccacgttcgcccatatgtgcttcagcactatgtagacacgagtgccgtcaacatctcttcgcaaatctaccgtttcgcggtgacaggcccatcatctgataatgcgttcactttaatatctacgaatgcgccggcaagcagtgccttgggagtcctgcctcacatacaccagcggcattacgagaacttcttcaactacaagggccgcgtgcaactatggggccagaaagacgatgctgagcagcagtctcgtttactgtatcccggggactatggctctatcgtccgaaatactacgcacactttcgagatgctcgaccctgataatgaacttttcggcgtaatcgttcccggtggcttcgaggaactcttctacgcgctcggagacaatttcacaactggatccgacacgatgtacgtacctgctccggaccttggcggcgcaggtcccgacggtgcagcgctctcgcaattggaagcgtttgacgtctacgcgcacctcgaattcgaaccccgatacgaccttgccaatagcacggctccagcaggatccgtgtggcactcgggacccaatgagctaggccaagtcggagatccctacttcattgcaaatgggtatggaccgaaggctctcaactccaagttcgggtaccagatcgtccagccgctcgttaccctcgagcagtcccaggaacttaatttcactatgtccactatcagtatcaacaagaagaagcataatgttacggctcctgagtattcgctctcgggtgcctgtgctttccaggttttggaaggattgcttagtattgagatcggcgaatatgagaaggctgttttggctggaggtgatgtggcttttgtacctcctggagtttctcttagatactggagcgatattccttttaccaaagtgctttatgtgggaaagagtcaagactcagtagataaccagatcatttcatctggtgaagcttgggatttcgtcacattccctgtgttctaa

SEQ ID NO: 24740 - protein, 368 aa, Muscodor strobelii
  misc_feature: SGI Peptide ID NO. 568438
  misc_feature (2)..(367): NCBI GI: 157139497 Blast Desc: quercetin 2,3-dioxygenase [Penicillium olsonii]
  misc_feature (10)..(368): NCBI GI: 255941428 Blast Desc: Pc16g11830 [Penicillium chrysogenum Wisconsin 54-1255] gi|211586106|emb|CAP93853.1| Pc16g11830 [Penicillium chrysogenum Wisconsin 54-1255]
  misc_feature (21)..(368): NCBI GI: 169778739 Blast Desc: [Aspergillus oryzae RIB40] gi|238499311|ref|XP_002380890.1| quercetin 2,3-dioxygenase, [Aspergillus flavus NRRL3357] gi|83772573|dbj|BAE62701.1| protein
  misc_feature (22)..(366): NCBI GI: 67541204 Blast Desc: AN6772.2 [Aspergillus nidulans FGSC A4] gi|40739400|gb|EAA58590.1| AN6772.2 [Aspergillus nidulans FGSC A4] gi|259480365|tpe|CBF71428.1| TPA: conserved [Aspergillus FGSC
  misc_feature (6)..(341): NCBI GI: 145228575 Blast Desc: An01g01560 [Aspergillus niger] gi|134054687|emb|CAK43528.1| protein product [Aspergillus niger]
  misc_feature (27)..(366): NCBI GI: 62287454 Blast Desc: An01g01560 [Aspergillus niger] gi|134054687|emb|CAK43528.1| protein product [Aspergillus niger]
  misc_feature (7)..(368): NCBI GI: 156040868 Blast Desc: SS1G_11412 [Sclerotinia sclerotiorum 1980] gi|154695796|gb|EDN95534.1| SS1G_11412 [Sclerotinia sclerotiorum 1980]
  misc_feature (7)..(368): NCBI GI: 154303944 Blast Desc: BC1G_08856 [Botryotinia fuckeliana B05.10] gi|150854440|gb|EDN29632.1| BC1G_08856 [Botryotinia fuckeliana B05.10]
  misc_feature (7)..(308): NCBI GI: 154303946 Blast Desc: BC1G_08857 [Botryotinia fuckeliana B05.10] gi|150854441|gb|EDN29633.1| BC1G_08857 [Botryotinia fuckeliana B05.10]
  misc_feature (23)..(367): NCBI GI: 169772203 Blast Desc: [Aspergillus oryzae RIB40] gi|83768430|dbj|BAE58569.1| protein product [Aspergillus oryzae]
  misc_feature (27)..(367): SWISSPROT Homolog: EC 1.13.11.24 Quercetin 2,3-dioxygenase
MLFLNRSLILGAGLVTSASCKRSVEDLYVERAPDHVRPYVLQHYVDTSAVNISSQIYRFAVTGPSSDNAFTLISTNAPASSALGVLPHIHQRHYENFFNYKGRVQLWGQKDDAEQQSRLLYPGDYGSIVRNTTHTFEMLDPDNELFGVIVPGGFEELFYALGDNFTTGSDTMYVPAPDLGGAGPDGAALSQLEAFDVYAHLEFEPRYDLANSTAPAGSVWHSGPNELGQVGDPYFIANGYGPKALNSKFGYQIVQPLVTLEQSQELNFTMSTISINKKKHNVTAPEYSLSGACAFQVLEGLLSIEIGEYEKAVLAGGDVAFVPPGVSLRYWSDIPFTKVLYVGKSQDSVDNQIISSGEAWDFVTFPVF

SEQ ID NO: 24741 - DNA, 1814 bp, Muscodor strobelii
  misc_feature: SGI EST ID NO. CUFF.58249.0
  misc_feature: Variant of the nucleotide sequence at SEQ ID NO 24739
cgtcagtggatctctcggccccggtggctctaccgtaattatctgccgtgcaagactacgcgtagggcctctcatttcccgcatcctatgaggatgctataccgaagtcgttaaggtggtggagatgggctcggtgaacaatattacgaggtcagagcacaacctggatatatgtacctacatatgtctctgcgtatttgagcatcatgttcgaactatcgtgggctatgataaagacgcgatcagttgattgctctttgctatgttgttcttgaacaggtctcttatacttggcgcaggattggtcacgagtgcttcgtgcaagcgatccgtcgaagacctctacgtggagcgcgcccctgaccacgttcgcccatatgtgcttcagcactatgtagacacgagtgccgtcaacatctcttcgcaaatctaccgtttcgcggtgacaggcccatcatctgataatgcgttcactttaatatctacgaatgcgccggcaagcagtgccttgggagtcctgcctcacatacaccagcggcattacgagaacttcttcaactacaagggccgcgtgcaactatggggccagaaagacgatgctgagcagcagtctcgtttactgtatcccggggactatggctctatcgtccgaaatactacgcacactttcgagatgctcgaccctgataatgaacttttcggcgtaatcgttcccggtggcttcgaggaactcttctacgcgctcggagacaatttcacaactggatccgacacgatgtacgtacctgctccggaccttggcggcgcaggtcccgacggtgcagcgctctcgcaattggaagcgtttgacgtctacgcgcacctcgaattcgaaccccgatacgaccttgccaatagcacggctccagcaggatccgtgtggcactcgggacccaatgagctaggccaagtcggagatccctacttcattgcaaatgggtatggaccgaaggctctcaactccaagttcgggtaccagatcgtccagccgctcgttaccctcgagcagtcccaggaacttaatttcactatgtccactatcagtatcaacaagaagaagcataatgttacggctcctgagtattcgctctcgggtgcctgtgctttccaggttttggaaggattgcttagtattgagatcggcgaatatgagaaggctgttttggctggaggtgatgtggcttttgtacctcctggagtttctcttagatactggagcgatattccttttaccaaagtgctttatgtgggaaagagtcaagactcagtagataaccagatcatttcatctggtgaagcttgggatttcgtcacattccctgtgttctaaactttcgggtggtcgtattcactttatagtaacatacgagattaataccgaacgttgaaactcgcgctctcccatcacgatgaacgccggcccgtgagacctctcccatctgtatcctctacttggcaccactcatcatctgaatactcgtaaggtagtcactcgtcccgtgcgtggggtccttgtcaaccgccttacaagtactgaactgcttgcccattccatgcgccccatcaatcctcatgaaaccctgtcctttagcctgtagcatcgttttcgcggcgtcgtcgaaccacccattgatgaagtctccgtggaaacagtatccatcgccaatctacctagtagtcagcacacaaccctttagaaaaaattcttcacatcgctcttcctgacatacctcgccacaggacagcttgaaaggcggaacgccattccatccttg

SEQ ID NO: 24742 - DNA, 2661 bp, Muscodor strobelii
  misc_feature: SGI cDNA ID NO. 568439
  misc_feature: Encodes the peptide sequence at SEQ ID NO 24743
atggagtacagcaagaggacctcgtccttgtccgccgcctccaatctggccgccatgcctactcccatacctccggttcctcgccagtcccgccacgcatcccgccgtaagattgacccttctctgcacctgaagctccgtgatcccagggacgaagagcgagatcgtcatatcccgcccgcctcaccggaggtcatatcctcccttattaccagtctgtcggctatctcacagccggccagcaaacatttcgacgatcccagcctatctctcccggcatcgccagctgagggcagctttggtgtagagtacggcggctacatccacgctctagaccgtctgcaagaggaagagctgaacctgaacgagctggcggccgcaccgcctgtcattcgaacgtcgaaaccgccttcaggcctctcgccccttacagccccgaaatctccgaaatccccccgccgcgagaactcaggtggcctcaaatctctcttgcgcagcgcgtccagaccgtcttccaagggctcggcttccgcggcgtcgcacgatgacacgcacagcattgggaacctttcgatcgaacgaggccagccaaccaccccagacctgcgccaacgtcgctctcaggacagctgggggactaaactaggcagaggttccaagagtttgatgagtgtggcctcgtcagatcgtctgcggccaaccgaattggaccacaagagctcaatgattagtgctgcaggctcgttgtctagtagcattcacaacccctacgtcagacctgaccagatgcgcacggcggcttccatcagcgaggaaccaagcgaagcgatcggaagggatacgctgtcagatcgaagcccgtctatcgactcgggagcttttctccgacctgttccactgcgcgactcgtccttgaggaagacgggccagaacgggaagagatcttctcggcgatcatcgagacacagaacagaagaaaccatggaggagactatcccggaggatactgatcttgcgaggccgagacgacgacagccagagcgctcgaaatccgaagctgacacgaagcaaagacgcgaagacatcttgatggccgacatcacatcctcgaaacgatctcatgttaaatcttctaccagaaagcacgatgccgacattgccgctggaaaagcaaccgaaatgtcaacggacgtgccggcagcagacgacggagccccattcccagcaatataccaaagccggcgacatagcgcacaaagtgccgatcgaaggaagtctggtcgaactactcccgatccaatggatatgctcaggtcaaagcgtagtagctctcgattaaagcgacgatcagcgggagcgaaaagccccgagcctctcgaaaacaacaaggaaacaagcgttgctgataatctagtgggctacgagcgacctggcagcgctgactccattgatgacgcggttgagtcgtatttgtgctcgcctcgtctgtctcagaagatacgacaccctcaaactggtcgtgtcatctccttctccgaagttggagattcggagggttcagcagtgttttgttgcgtcggcatgggtttgacccgctacattaccgccttctatgacgagctggccctgaccttgaagttacggttgattacaccagatcgaccaggcgttggagacagtgaagcacacgatggcaccgcgacacctctcggttggccagatgatgtttatgctatctgtcaggcactcaaaatcaccaaattttcgattttggctcattccgcaggtgcaatatacgccctagctacagcactacgcatgcctcagcatattcgaggtcgtattcaccttttagcaccttggataccgccatcacaaatgagtgtctttgggaccactcaagcccttccaccaacaaatgccatcccaacctcacagaagatattacgtgcactaccgacccctttcctaaaagcagccaatagttctttcatgacagcaacaagcagctcaatcacgagctcgctcccgaagaacagcccacggcgagggaagcgaaaatcgaacgcagaaaaaggccaaggccgcgaccgtgagacagccgcgcccaccaaggcagacgccatctctagtattgataaagagaatatcatggaaggtggtgatctgaagaactatgcgaatgaggacatgacgaaatcaaatcgacgacatactgcagcttcccaagatcctattgtctctgctgccgccgatgcggttgcagagaaggagcggcagatgacttatgatttgagactcacccacgcgatttgggatctcgcgactacaggtgccaacccagctgtcgatttgctcgtctgtctcgaacgtagacacaccattgggttccgttatgtggacatcacgcggtcagtggtcatccatcacggtagtaaggatactcgtgttcccgtggacaacgtgcgatggctgggcaaagccatgcgccggtgcgaagttcgtgtactcgagggcgagggtcacggattgatggcaagtgctagtgtcatgggctccgtgttgatggagatcagcaaagaatgggaggattggacgaggttgactacccctgtgaagcgcgctgaagagcgtggtaaacctggtcgtgccatgcgatga

SEQ ID NO: 24743 - protein, 886 aa, Muscodor strobelii
  misc_feature: SGI Peptide ID NO. 568439
  misc_feature (547)..(857): Pfam Id: PF00561 Pfam Desc: alpha/beta hydrolase fold
  misc_feature (547)..(771): Pfam Id: PF00561 Pfam Desc: alpha/beta hydrolase fold
  misc_feature (58)..(868): NCBI GI: 256723580 Blast Desc: NECHADRAFT_104614 [Nectria haematococca mpVI 77-13-4]
  misc_feature (23)..(886): NCBI GI: 46116270 Blast Desc: FG03977.1 [Gibberella zeae PH-1]
  misc_feature (60)..(882): NCBI GI: 261352914 Blast Desc: hydrolase [Verticillium albo-atrum VaMs.102]
  misc_feature (60)..(869): NCBI GI: 170940338 Blast Desc: protein product [Podospora anserina]
  misc_feature (50)..(878): NCBI GI: 116194976 Blast Desc: CHGG_04086 [Chaetomium globosum CBS 148.51] gi|88179999|gb|EAQ87467.1| CHGG_04086 [Chaetomium globosum CBS 148.51]
  misc_feature (23)..(880): NCBI GI: 145602145 Blast Desc: MGG_05160 [Magnaporthe grisea 70-15] gi|145010579|gb|EDJ95235.1| MGG_05160 [Magnaporthe grisea 70-15]
  misc_feature (289)..(873): NCBI GI: 154292090 Blast Desc: BC1G_14854 [Botryotinia fuckeliana B05.10] gi|150846281|gb|EDN21474.1| BC1G_14854 [Botryotinia fuckeliana B05.10]
  misc_feature (281)..(869): NCBI GI: 156062058 Blast Desc: SS1G_01143 [Sclerotinia sclerotiorum 1980] gi|154696481|gb|EDN96219.1| SS1G_01143 [Sclerotinia sclerotiorum 1980]
  misc_feature (56)..(866): NCBI GI: 225557755 Blast Desc: hydrolase [Ajellomyces capsulatus G186AR]
  misc_feature (56)..(866): NCBI GI: 240274131 Blast Desc: hydrolase [Ajellomyces capsulatus H143]
MEYSKRTSSLSAASNLAAMPTPIPPVPRQSRHASRRKIDPSLHLKLRDPRDEERDRHIPPASPEVISSLITSLSAISQPASKHFDDPSLSLPASPAEGSFGVEYGGYIHALDRLQEEELNLNELAAAPPVIRTSKPPSGLSPLTAPKSPKSPRRENSGGLKSLLRSASRPSSKGSASAASHDDTHSIGNLSIERGQPTTPDLRQRRSQDSWGTKLGRGSKSLMSVASSDRLRPTELDHKSSMISAAGSLSSSIHNPYVRPDQMRTAASISEEPSEAIGRDTLSDRSPSIDSGAFLRPVPLRDSSLRKTGQNGKRSSRRSSRHRTEETMEETIPEDTDLARPRRRQPERSKSEADTKQRREDILMADITSSKRSHVKSSTRKHDADIAAGKATEMSTDVPAADDGAPFPAIYQSRRHSAQSADRRKSGRTTPDPMDMLRSKRSSSRLKRRSAGAKSPEPLENNKETSVADNLVGYERPGSADSIDDAVESYLCSPRLSQKIRHPQTGRVISFSEVGDSEGSAVFCCVGMGLTRYITAFYDELALTLKLRLITPDRPGVGDSEAHDGTATPLGWPDDVYAICQALKITKFSILAHSAGAIYALATALRMPQHIRGRIHLLAPWIPPSQMSVFGTTQALPPTNAIPTSQKILRALPTPFLKAANSSFMTATSSSITSSLPKNSPRRGKRKSNAEKGQGRDRETAAPTKADAISSIDKENIMEGGDLKNYANEDMTKSNRRHTAASQDPIVSAAADAVAEKERQMTYDLRLTHAIWDLATTGANPAVDLLVCLERRHTIGFRYVDITRSVVIHHGSKDTRVPVDNVRWLGKAMRRCEVRVLEGEGHGLMASASVMGSVLMEISKEWEDWTRLTTPVKRAEERGKPGRAMR

SEQ ID NO: 24744 - DNA, 3646 bp, Muscodor strobelii
  misc_feature: SGI EST ID NO. CUFF.58252.0
  misc_feature: Variant of the nucleotide sequence at SEQ ID NO 24742
gagagcagtgtgcatcggtatcactggtgagattgtctcaattctgcgaacgaactgcctgagacgccattaatccccgatgaattaatctgcgaaaaatgtgatatcctcgtcgcattgcacgatactttcgcttcgcatgtactaacacgcccatcattggagcacgagatagtggacaagaactctaatactcaatattgtcacctcggacgaacacagacggctgcacaacatcttctgtagtcttggttgcccttctgttggagtacaagcgctgcagccatgctactgctctgcgtcgtttcgtgaaccgtacaagatcttcctgcagcgcctctgtgttgcattccacccatccagtcgtacttgcagaacctataatctgccgcccacccactaattacccgttgttggattctcgtgtgctcaccagtcgccgccctgtccgccgcctgttttaggtccagcttgcgccccctctggatcgtcgtcgaggtggtctctgcagcctctgcggcctgtgcagctcgttttcccgcctgcagctgtcgacgcgcagagcgaaaagcgagacagattaggcaaagaataccactgttccgtcctcgtggttggcggcgctgccactggcgcccagtgcaacacgatggagtacagcaagaggacctcgtccttgtccgccgcctccaatctggccgccatgcctactcccatacctccggttcctcgccagtcccgccacgcatcccgccgtaagattgacccttctctgcacctgaagctccgtgatcccagggacgaagagcgagatcgtcatatcccgcccgcctcaccggaggtcatatcctcccttattaccagtctgtcggctatctcacagccggccagcaaacatttcgacgatcccagcctatctctcccggcatcgccagctgagggcagctttggtgtagagtacggcggctacatccacgctctagaccgtctgcaagaggaagagctgaacctgaacgagctggcggccgcaccgcctgtcattcgaacgtcgaaaccgccttcaggcctctcgccccttacagccccgaaatctccgaaatccccccgccgcgagaactcaggtggcctcaaatctctcttgcgcagcgcgtccagaccgtcttccaagggctcggcttccgcggcgtcgcacgatgacacgcacagcattgggaacctttcgatcgaacgaggccagccaaccaccccagacctgcgccaacgtcgctctcaggacagctgggggactaaactaggcagaggttccaagagtttgatgagtgtggcctcgtcagatcgtctgcggccaaccgaattggaccacaagagctcaatgattagtgctgcaggctcgttgtctagtagcattcacaacccctacgtcagacctgaccagatgcgcacggcggcttccatcagcgaggaaccaagcgaagcgatcggaagggatacgctgtcagatcgaagcccgtctatcgactcgggagcttttctccgacctgttccactgcgcgactcgtccttgaggaagacgggccagaacgggaagagatcttctcggcgatcatcgagacacagaacagaagaaaccatggaggagactatcccggaggatactgatcttgcgaggccgagacgacgacagccagagcgctcgaaatccgaagctgacacgaagcaaagacgcgaagacatcttgatggccgacatcacatcctcgaaacgatctcatgttaaatcttctaccagaaagcacgatgccgacattgccgctggaaaagcaaccgaaatgtcaacggacgtgccggcagcagacgacggagccccattcccagcaatataccaaagccggcgacatagcgcacaaagtgccgatcgaaggaagtctggtcgaactactcccgatccaatggatatgctcaggtcaaagcgtagtagctctcgattaaagcgacgatcagcgggagcgaaaagccccgagcctctcgaaaacaacaaggaaacaagcgttgctgataatctagtgggctacgagcgacctggcagcgctgactccattgatgacgcggttgagtcgtatttgtgctcgcctcgtctgtctcagaagatacgacaccctcaaactggtcgtgtcatctccttctccgaagttggagattcggagggttcagcagtgttttgttgcgtcggcatgggtttgacccgctacattaccgccttctatgacgagctggccctgaccttgaagttacggttgattacaccagatcgaccaggcgttggagacagtgaagcacacgatggcaccgcgacacctctcggttggccagatgatgtttatgctatctgtcaggcactcaaaatcaccaaattttcgattttggctcattccgcaggtgcaatatacgccctagctacagcactacgcatgcctcagcatattcgaggtcgtattcaccttttagcaccttggataccgccatcacaaatgagtgtctttgggaccactcaagcccttccaccaacaaatgccatcccaacctcacagaagatattacgtgcactaccgacccctttcctaaaagcagccaatagttctttcatgacagcaacaagcagctcaatcacgagctcgctcccgaagaacagcccacggcgagggaagcgaaaatcgaacgcagaaaaaggccaaggccgcgaccgtgagacagccgcgcccaccaaggcagacgccatctctagtattgataaagagaatatcatggaaggtggtgatctgaagaactatgcgaatgaggacatgacgaaatcaaatcgacgacatactgcagcttcccaagatcctattgtctctgctgccgccgatgcggttgcagagaaggagcggcagatgacttatgatttgagactcacccacgcgatttgggatctcgcgactacaggtgccaacccagctgtcgatttgctcgtctgtctcgaacgtagacacaccattgggttccgttatgtggacatcacgcggtcagtggtcatccatcacggtagtaaggatactcgtgttcccgtggacaacgtgcgatggctgggcaaagccatgcgccggtgcgaagttcgtgtactcgagggcgagggtcacggattgatggcaagtgctagtgtcatgggctccgtgttgatggagatcagcaaagaatgggaggattggacgaggttgactacccctgtgaagcgcgctgaagagcgtggtaaacctggtcgtgccatgcgatgagcgatggtttctggcttccgcctcgcgttgtcgcagatgttcactaacgcaggcgaaatttcttcgtggagaagggttattgcatatagggacttggaggatttgcattcacaattggcatggaggcgcatgtaatggatcaggtgttcaaccaactgtcaaagaaaggtatgagtgtgcatccaatatatagaaactctgacgggaacggcatctgcaggcgctggttcgatctgtggctactcgcattttattgctccttattcacccttatacagctataggtggaagctgtgtatgtacgtagtcgtaatgtataaatcatgattccccaac

SEQ ID NO: 24745 - DNA, 1002 bp, Muscodor strobelii
  misc_feature: SGI cDNA ID NO. 568440
  misc_feature: Reduced expression when VOC is produced
  misc_feature: Encodes the peptide sequence at SEQ ID NO 24746
atggacgtgatactctcactccctatcgtgagctacttcgcagcgccgatgttgacctcatggtcgacgtcgctcaatctgctattcttctacatgacatggacaaccctcgtcatgtcgcactcaccgctcaagatcgagctagtcgggacatttgcggtgcgcatagtcttctggcttgtcccatcgctgttcttcttgctattcgacactctggtaccaagtctatccgagtccgtaaagctatacggctcagcatcaataccgcggcgcaactcatcagtactcgcgagacaaaccatcctcgccattttcaatctggctctattcagtgcgctccaggctggcatgtctattgcggcaacctcactcctgaatcgccccctgttcaaaacaagctcgacgcttccactaccatttcagatcatcaagaatatcattacgctttacactgcgcgtgaggtgctcacttattacatacatcgctatatcctacactcgcgtggcagcatcggcaagctacatatgcagtatgctcactcccgtaaaggcgccgcgccctactctcttatgctctacgccgaccaccctatccctctcatgctttatcgcttgcttcctgtgtacttaccatcgctggccatgcggccgcatctcctaacgtacttcctcttcacacttctcacgactatcgaggagatgctctcaatgtcagggtataccgccgtgccgggaataatcatgggcggtattacgaggcgtacggcatcgcattacgctagtggtgggcgaggaaactatggtgcttggggtctgctggattggatcaatgggacgagtgttgggaaggatctcattgaggatttccaggatgaggcggataagcatgaggtcaaacaaagaggacagaaggctgtcagcgatacgagtagccttgtctcagacactattgatgggttgaagaaaagtcgcaagggccggaagaagagatctgacgaatga

SEQ ID NO: 24746 - protein, 333 aa, Muscodor strobelii
  misc_feature: SGI Peptide ID NO. 568440
  misc_feature (1)..(333): NCBI GI: 261352913 Blast Desc: sterol desaturase family [Verticillium albo-atrum VaMs.102]
  misc_feature (1)..(326): NCBI GI: 46116272 Blast Desc: FG03978.1 [Gibberella zeae PH-1]
  misc_feature (1)..(322): NCBI GI: 256723493 Blast Desc: [Nectria haematococca mpVI 77-13-4]
  misc_feature (1)..(333): NCBI GI: 116194974 Blast Desc: CHGG_04085 [Chaetomium globosum CBS 148.51] gi|88179998|gb|EAQ87466.1| CHGG_04085 [Chaetomium globosum CBS 148.51]
  misc_feature (42)..(320): NCBI GI: 145602165 Blast Desc: MGG_12933 [Magnaporthe grisea 70-15] gi|145010598|gb|EDJ95254.1| MGG_12933 [Magnaporthe grisea 70-15]
  misc_feature (1)..(326): NCBI GI: 156062052 Blast Desc: SS1G_01140 [Sclerotinia sclerotiorum 1980] gi|154696478|gb|EDN96216.1| SS1G_01140 [Sclerotinia sclerotiorum 1980]
  misc_feature (1)..(333): NCBI GI: 170940339 Blast Desc: protein product [Podospora anserina]
  misc_feature (1)..(331): NCBI GI: 119184287 Blast Desc: CIMG_06964 [Coccidioides immitis RS]
  misc_feature (1)..(305): NCBI GI: 255936571 Blast Desc: Pc13g08870 [Penicillium chrysogenum Wisconsin 54-1255] gi|211583932|emb|CAP91956.1| Pc13g08870 [Penicillium chrysogenum Wisconsin 54-1255]
  misc_feature (1)..(332): NCBI GI: 85107706 Blast Desc: NCU07910 [Neurospora crassa OR74A] gi|28924032|gb|EAA33190.1| [Neurospora crassa OR74A]
  misc_feature: Useful for introducing or modulating the production of volatile compounds
MDVILSLPIVSYFAAPMLTSWSTSLNLLFFYMTWTTLVMSHSPLKIELVGTFAVRIVFWLVPSLFFLLFDTLVPSLSESVKLYGSASIPRRNSSVLARQTILAIFNLALFSALQAGMSIAATSLLNRPLFKTSSTLPLPFQIIKNIITLYTAREVLTYYIHRYILHSRGSIGKLHMQYAHSRKGAAPYSLMLYADHPIPLMLYRLLPVYLPSLAMRPHLLTYFLFTLLTTIEEMLSMSGYTAVPGIIMGGITRRTASHYASGGRGNYGAWGLLDWINGTSVGKDLIEDFQDEADKHEVKQRGQKAVSDTSSLVSDTIDGLKKSRKGRKKRSDE

SEQ ID NO: 24747 - DNA, 624 bp, Muscodor strobelii
  misc_feature: SGI cDNA ID NO. 568441
  misc_feature: Encodes the peptide sequence at SEQ ID NO 24748
atggtctccaaactccttctcacggcatccgtccttggcgcggtctcggcgcaggttccggccttactcaagcgggacgaactggagagaagacaagacggccttgacccatcgtgtcaatcggtgcttactgacctccaaaccatctacgccgacgcccctacacctcccgccgatcttatatccgtgaccgtgaccgacccatgctccgtgccaactttcaccggcaaggccgcatcagaattctcctcttatataaccgctgccgagtcgtggtatgaggagcacagcaaagaaatcgaaagcatcgttgaggcatgcacgcagtacgccactatgactgaggccatccccaccggaacggcgatcgactgctcttcgctcactggcgtgacttctttcccgacttcgacgagtggtagcgacgatgctagcaccactcctaccacttctggcgctactaccaaggccacctcgggctccggatctagctcagagtccacttccgcctcgggctctgacagcacaccctctcctaccacgggtggggcgtcgcgcgagacgggctttgttgccgttgctgctatggctgttggacttgttggtgccgttgccatcttataa

SEQ ID NO: 24748 - protein, 207 aa, Muscodor strobelii
  misc_feature: SGI Peptide ID NO. 568441
  misc_feature (5)..(207): NCBI GI: 39952071 Blast Desc: MGG_01678 [Magnaporthe grisea 70-15] gi|4732022|gb|AAD28558.1|AF118227_1 infection structure specific protein [Magnaporthe grisea] gi|145020482|gb|EDK04611.1| grisea
  misc_feature (6)..(191): NCBI GI: 46122937 Blast Desc: FG05846.1 [Gibberella zeae PH-1]
  misc_feature (1)..(191): NCBI GI: 256731186 Blast Desc: NECHADRAFT_105400 [Nectria haematococca mpVI 77-13-4]
  misc_feature (39)..(128): NCBI GI: 261356534 Blast Desc: conserved [Verticillium albo-atrum VaMs.102]
  misc_feature (34)..(128): NCBI GI: 256729393 Blast Desc: NECHADRAFT_84292 [Nectria haematococca mpVI 77-13-4]
  misc_feature (24)..(129): NCBI GI: 46114908 Blast Desc: FG03296.1 [Gibberella zeae PH-1]
  misc_feature (5)..(189): NCBI GI: 256725401 Blast Desc: NECHADRAFT_101132 [Nectria haematococca mpVI 77-13-4]
  misc_feature (53)..(143): NCBI GI: 46138971 Blast Desc: FG11000.1 [Gibberella zeae PH-1]
  misc_feature (23)..(124): NCBI GI: 256722416 Blast Desc: NECHADRAFT_64958 [Nectria haematococca mpVI 77-13-4]
MVSKLLLTASVLGAVSAQVPALLKRDELERRQDGLDPSCQSVLTDLQTIYADAPTPPADLISVTVTDPCSVPTFTGKAASEFSSYITAAESWYEEHSKEIESIVEACTQYATMTEAIPTGTAIDCSSLTGVTSFPTSTSGSDDASTTPTTSGATTKATSGSGSSSESTSASGSDSTPSPTTGGASRETGFVAVAAMAVGLVGAVAIL

SEQ ID NO: 24749 - DNA, 708 bp, Muscodor strobelii
  misc_feature: SGI cDNA ID NO. 568442
  misc_feature: Encodes the peptide sequence at SEQ ID NO 24750
atggccacacaacagcctcagcccgaagtttggtggctcgttctgaaaccggatacggcacttactaggttggacagcagattcatctatgagatgcgttcaaaagcaacagtaattcccgtccatacagtatctgaagcttctcgtcgattatctcaggatgcggcgccggctgctatgatcatcgattatagccaaatcatgagtgatagaattgggatggacgaactctggacagatgttctcagatacgtaggcagtggagggactgcagtgcttcttggcagcgacgacttaaacgcctacgacgactacggtctcgcccgtagtatggaccgatttcaaatacgtattcggccgactggcctgaaatggagagttcgtacattcattgccactcgtgggaactacaggttgaacaaacaggcagttggaccggacttagcatcagggctccaatcattctacaaatttccagtcacgatgctgaaggatgtcgatcgagaggaagtttggtatcaatcagacttactcgtagacgaccaaagtgctgtcgttgcaatggcgcatgttggcgatggcaagctcggctttgtgggcgataaaagcattgcatatgaacaatatcttgtcattgctgcgatgtgtggtattctgccgcgacaattggaagcgggagctcgtgggacggcgggacgtgggaactag

SEQ ID NO: 24750 - protein, 235 aa, Muscodor strobelii
  misc_feature: SGI Peptide ID NO. 568442
  misc_feature (5)..(219): NCBI GI: 116179140 Blast Desc: CHGG_00198 [Chaetomium globosum CBS 148.51] gi|88184495|gb|EAQ91963.1| CHGG_00198 [Chaetomium globosum CBS 148.51]
  misc_feature (2)..(219): NCBI GI: 256725157 Blast Desc: NECHADRAFT_55208 [Nectria haematococca mpVI 77-13-4]
  misc_feature (28)..(218): NCBI GI: 261361602 Blast Desc: conserved [Verticillium albo-atrum VaMs.102]
  misc_feature (51)..(219): NCBI GI: 238488175 Blast Desc: conserved [Aspergillus flavus NRRL3357] gi|220697713|gb|EED54053.1| conserved [Aspergillus flavus NRRL3357]
  misc_feature (51)..(201): NCBI GI: 169762402 Blast Desc: [Aspergillus oryzae RIB40] gi|83770129|dbj|BAE60262.1| protein product [Aspergillus oryzae]
MATQQPQPEVWWLVLKPDTALTRLDSRFIYEMRSKATVIPVHTVSEASRRLSQDAAPAAMIIDYSQIMSDRIGMDELWTDVLRYVGSGGTAVLLGSDDLNAYDDYGLARSMDRFQIRIRPTGLKWRVRTFIATRGNYRLNKQAVGPDLASGLQSFYKFPVTMLKDVDREEVWYQSDLLVDDQSAVVAMAHVGDGKLGFVGDKSIAYEQYLVIAAMCGILPRQLEAGARGTAGRGN

SEQ ID NO: 24751 - DNA, 433 bp, Muscodor strobelii
  misc_feature: SGI EST ID NO. CUFF.58266.0
  misc_feature: Variant of the nucleotide sequence at SEQ ID NO 24749
cagggctccaatcattctacaaatttccagtcacgatgctgaaggatgtcgatcgagaggaagtttggtatcaatcagacttactcgtagacgaccaaagtgctgtcgttgcaatggcgcatgttggcgatggcaagctcggctttgtgggcgataaaagcattgcatatgaacaatatcttgtcattgctgcgatgtgtggtattctgccgcgacaattggaagcgggagctcgtgggacggcgggacgtgggaactagctcattcagactactactactaccagaatatgatggtaccaactttagaaacaatttgtaaacgaattattgcgatgctctcggttattggtactcttcgtggaagcagatgtgcatcttagcgaatttgggaactgtcaatcagcgtcaagtggtaaccccgaaagctggtg

SEQ ID NO: 24752 - DNA, 582 bp, Muscodor strobelii
  misc_feature: SGI cDNA ID NO. 568443
  misc_feature: Reduced expression when VOC is produced
  misc_feature: Encodes the peptide sequence at SEQ ID NO 24753
atgatgttctcttcgcaagtcgtggctctcgccacatttgtctctctcgccgctgcatcgaatgcgacgggaccttttgccatacgaattaaaggcaaggaagatacctcgatcgacggttacgctagcgcaattcatgcaggagcggctatcgaggctcttggcttcaacgagttcttctacaactattctgcatacagccccgacacgggtgaagtgttccaaccaggctacattacctatttcctggagaccagcacaactcccattcccagcagcttgcagctaagtgcaaactggggttccaatgtctggcaaggcattctgtttccaggttattctggtgactacttcagcttctttgacaatggtacattttacatcaacggcggcgtcgacgactccaatttcaatgagacagttcctgtcaacccctcttatttgggtcccttgacgaacttctatttgtgctaccaatattacacaggatattattaccgttcaattgcttgggtcatagagccgcccgcccataacccgtcctgcgagccagtggacttgataatggagacaatctcatag

SEQ ID NO: 24753 - protein, 193 aa, Muscodor strobelii
  misc_feature: SGI Peptide ID NO. 568443
  misc_feature (21)..(189): NCBI GI: 171686266 Blast Desc: protein product [Podospora anserina] gi|170943094|emb|CAP68747.1| protein product [Podospora anserina]
  misc_feature (23)..(185): NCBI GI: 189193267 Blast Desc: conserved [Pyrenophora tritici-repentis Pt-1C-BFP] gi|187978536|gb|EDU45162.1| conserved [Pyrenophora tritici-repentis Pt-1C-BFP]
  misc_feature (24)..(182): NCBI GI: 164423958 Blast Desc: NCU07569 [Neurospora crassa OR74A] gi|157070305|gb|EAA29378.2| NCU07569 [Neurospora crassa OR74A]
  misc_feature (11)..(187): NCBI GI: 154321738 Blast Desc: BC1G_01016 [Botryotinia fuckeliana B05.10] gi|150850263|gb|EDN25456.1| BC1G_01016 [Botryotinia fuckeliana B05.10]
  misc_feature (2)..(181): NCBI GI: 209570344 Blast Desc: [Glomerella graminicola]
  misc_feature (20)..(187): NCBI GI: 156045912 Blast Desc: SS1G_09232 [Sclerotinia sclerotiorum 1980] gi|154693628|gb|EDN93366.1| SS1G_09232 [Sclerotinia sclerotiorum 1980]
  misc_feature (25)..(187): NCBI GI: 116192765 Blast Desc: CHGG_06100 [Chaetomium globosum CBS 148.51] gi|88182013|gb|EAQ89481.1| CHGG_06100 [Chaetomium globosum CBS 148.51]
  misc_feature (34)..(187): NCBI GI: 169606284 Blast Desc: SNOG_06180 [Phaeosphaeria nodorum SN15] gi|111064891|gb|EAT86011.1| SNOG_06180 [Phaeosphaeria nodorum SN15]
  misc_feature (44)..(188): NCBI GI: 169597451 Blast Desc: SNOG_01511 [Phaeosphaeria nodorum SN15] gi|160707524|gb|EAT91160.2| SNOG_01511 [Phaeosphaeria nodorum SN15]
  misc_feature: Useful for introducing or modulating the production of volatile compounds
MMFSSQVVALATFVSLAAASNATGPFAIRIKGKEDTSIDGYASAIHAGAAIEALGFNEFFYNYSAYSPDTGEVFQPGYITYFLETSTTPIPSSLQLSANWGSNVWQGILFPGYSGDYFSFFDNGTFYINGGVDDSNFNETVPVNPSYLGPLTNFYLCYQYYTGYYYRSIAWVIEPPAHNPSCEPVDLIMETIS

SEQ ID NO: 24754 - DNA, 1291 bp, Muscodor strobelii
  misc_feature: SGI EST ID NO. CUFF.58300.0
  misc_feature: Variant of the nucleotide sequence at SEQ ID NO 24752
tgccgttccaacaatttgacttcgtgttcgtggaccgatgtgacatggattgattgacgtcgaagatgctctgagatatataagcttcagaaagcccgctcgaagtgatgcaagttatctccatctccagtcacagcccgaatagaacccttattgctatctccatcctcctagaatacttttgagcatgatgttctcttcgcaagtcgtggctctcgccacatttgtctctctcgccgctgcatcgaatgcgacgggaccttttgccatacgaattaaaggcaaggaagatacctcgatcgacggttacgctagcgcaattcatgcaggagcggctatcgaggctcttggtaagtgatctgaactatcagatatgagaaaccagccctttgtcttaaagccccgggccgtgccgcggaatttcgtgaaaataactaacgcgacacctttctggctaccagcgtacagttcgggtcctgttactagcttcaacgagttcttctacaactattctgcatacagccccgacacgggtgaagtgttccaaccaggctacattacctatttcctggagaccagcacaactcccattcccagcagcttgcagctaagtgcaaactggggttccaatgtctggcaaggcattctgtttccaggttattctggtgactacttcagcttctttgacaatggtacattttacatcaacggcggcgtcgacgactccaatttcaatgagacagttcctgtcaacccctcttatttgggtcccttgacgaacttctatttgtgctaccaatattacacaggatattattaccgttcaattgcttgggtcatagagccgcccgcccataacccgtcctgcgagccagtggacttgataatggagacaatctcatagcttgatccacgtgatatcatctgagggcgcgattgttgatatagatcactcttcatatggacaaagactacacttcacggtatcatcggcagcttgcaaaaatggtggcgagagccagcatgttaattattaatatactgcacttaatttaatgacataaaagaaaggcgtgatggctgtggcctgtgtatgtggacggcaaagatctcagcagcacgtgagatttgttggggctgttattgcgagtctcttgttcccagtccgtagacagtgcgagctgtttttactgtttttagtcatctggaccatcgccgtaagattcaaactgtgtaatttcgactgttcaataccgactgtctgcattatatgttaccagctgtacacggg

SEQ ID NO: 24755 - DNA, 660 bp, Muscodor strobelii
  misc_feature: SGI cDNA ID NO. 568444
  misc_feature: Elevated expression when VOC is produced
  misc_feature: Encodes the peptide sequence at SEQ ID NO 24756
atgcacttgtctactctttttggcttcctcactgtggcacttgcaagccctgtgcccgttgtcgttgatcagtcgttggacacacgacaggtttcagctgaatcagacgaacttgtgaatggtgcctgccagcctgtcacattcattttcgcgaggggctctactgagcctggtaacatgggagttatcatcggccctccacttgggaaccagctaaaggcagatcgtgcagccaaaggcggcgtcgcagttcaaggagttgattacgctgccttactgtcaaccaattaccttccgggcggcacggatgcagtgtcaatggttgatctgctcaatcttgcaaacacgaagtgcccaaatacccagattatagttggtggatatagtcaaggggcggctgttgtacacggcgccattccgaaggtctcatctactgttatcaacaaaatcaagtccgttgtgcttttcggcgacacgcagaaaccttacactaacggtatgattgcaaaatatcccacgtcgcaactcaagattttctgcgacaatggtcttgatctagtttgcgctggcgatcttgaggcagctgtcctgccccctcacctttcctacggtgccaatgcgctcgaagcggcaagatttcttgaaaaattcttgtcttag

SEQ ID NO: 24756 - protein, 219 aa, Muscodor strobelii
  misc_feature: SGI Peptide ID NO. 568444
  misc_feature (41)..(219): Pfam Id: PF01083 Pfam Desc: Cutinase
  misc_feature (6)..(214): NCBI GI: 71001184 Blast Desc: cutinase [Aspergillus fumigatus Af293] gi|74675656|sp|Q4X1N0.1|CUTI1_ASPFU RecName: Full= cutinase 1; AltName: Full=Cutin hydrolase 1; Flags: Precursor cutinase,
  misc_feature (25)..(219): NCBI GI: 95025947 Blast Desc: cutinase [Emericella nidulans]
  misc_feature (6)..(214): NCBI GI: 119480811 Blast Desc: cutinase, [Neosartorya fischeri NRRL 181] gi|119408588|gb|EAW18537.1| cutinase, [Neosartorya fischeri NRRL 181]
  misc_feature (25)..(219): NCBI GI: 67901108 Blast Desc: AN7541.2 [Aspergillus nidulans FGSC A4] gi|40742931|gb|EAA62121.1| AN7541.2 [Aspergillus nidulans FGSC A4] gi|259483860|tpe|CBF79598.1| TPA: Cutinase [Aspergillus FGSC
  misc_feature (30)..(214): NCBI GI: 46138239 Blast Desc: FG10634.1 [Gibberella zeae PH-1]
  misc_feature (1)..(214): NCBI GI: 70981957 Blast Desc: cutinase [Aspergillus fumigatus Af293] gi|66844130|gb|EAL84469.1| cutinase, [Aspergillus fumigatus Af293] gi|159122267|gb|EDP47389.1| cutinase, [Aspergillus A1163]
  misc_feature (16)..(214): NCBI GI: 169782674 Blast Desc: [Aspergillus oryzae RIB40] gi|83774543|dbj|BAE64666.1| protein product [Aspergillus oryzae]
  misc_feature (26)..(214): NCBI GI: 255935839 Blast Desc: Pc13g05110 [Penicillium chrysogenum Wisconsin 54-1255] gi|211583566|emb|CAP91580.1| Pc13g05110 [Penicillium chrysogenum Wisconsin 54-1255]
  misc_feature (17)..(214): NCBI GI: 238492321 Blast Desc: cutinase, [Aspergillus flavus NRRL3357] gi|220695891|gb|EED52233.1| cutinase, [Aspergillus flavus NRRL3357]
  misc_feature (1)..(219): NCBI GI: 189210427 Blast Desc: cutinase precursor [Pyrenophora tritici-repentis Pt-1C-BFP] gi|187977638|gb|EDU44264.1| cutinase precursor [Pyrenophora tritici-repentis Pt-1C-BFP]
  misc_feature (6)..(214): SWISSPROT Homolog: EC 3.1.1.74 Cutinase
  misc_feature: Useful for introducing or modulating the production of volatile compounds
MHLSTLFGFLTVALASPVPVVVDQSLDTRQVSAESDELVNGACQPVTFIFARGSTEPGNMGVIIGPPLGNQLKADRAAKGGVAVQGVDYAALLSTNYLPGGTDAVSMVDLLNLANTKCPNTQIIVGGYSQGAAVVHGAIPKVSSTVINKIKSVVLFGDTQKPYTNGMIAKYPTSQLKIFCDNGLDLVCAGDLEAAVLPPHLSYGANALEAARFLEKFLS

SEQ ID NO: 24757 - DNA, 1535 bp, Muscodor strobelii
  misc_feature: SGI EST ID NO. CUFF.58287.0
  misc_feature: Variant of the nucleotide sequence at SEQ ID NO 24755
gagaacttttatagatgctcacgagaggtgttgccatgttcaacccctccttttccagatcatagttttagtagtctatgcgtgtgtcatgtgtctactaaaagcatcatcgcgatgctcgccagatctagtaatctagttcgaatgtccgacctatcaccagcattaccgaggtttaaagattcaaaacgaagtctattcaagccaagtacattaggatcactcatatttgggacaactcattgcatcgcgatgcttttgcatcgtcaagaaccgaggcatattgaggacatgtgtacggggatattgccagtttgtgcaatcgtatttcgagcaatgtcaaggtcggggtatgcggactgaggaagctctggctcgttgtagcaagtttcaaaaagtataaaaggatgagacatcttctctgttagggaataatgagggaacgtttcacagccacgaccacttccttctctccgcgagcgctctcgacagcacactcagccgacacagaatcagacgaatcgatcactactgtctttcattcttctacattgcaaccatgcacttgtctactctttttggcttcctcactgtggcacttgcaagccctgtgcccgttgtcgttgatcagtcgttggacacacgacaggtttcagctgaatcagacgaacttgtgaatggtgcctgccagcctgtcacattcattttcgcgaggggctctactgagcctggtaacatgggagttatcatcggccctccacttgggaaccagctaaaggcagatcgtgcagccaaaggcggcgtcgcagttcaaggagttgattacgctgccttactgtcaaccaattaccttccgggcggcacggatgcagtgtgagcgattttttgcttcggaccaaaggctcagcgcgcgagctatttccccgatttaacgtcttgatgggcaagctaacagacgttcatttcatagctcaattcagtcaatggttgatctgctcaatcttgcaaacacgaagtgcccaaatacccagattatagttggtggatatagtcaaggggcggctgttgtacacggcgccattccgaaggtctcatctactgttatcaacaaaatcaagtccgttgtgcttttcggcgacacgcagaaaccttacactaacggtatgattgcaaaatatcccacgtcgcaactcaagattttctgcgacaatggtcttgatctagtttgcgctggcgatcttgaggcagctgtcctgccccctcacctttcctacggtgccaatgcgctcgaagcggcaagatttcttgaaaaattcttgtcttagggctccgagctagtctcgtgatctaagctctttgtggtctggagagagaaggttgtgttacatgaggaatgctagctcctcgacggtcgctacagaaatgttgcaacatttgattagtgtcatttcgagaatcattatgactaccactcattaggaccagtacatagctcttttcccgtagtaacacgcgtatatacaactcttacccat

SEQ ID NO: 24758 - DNA, 1941 bp, Muscodor strobelii
  misc_feature: SGI cDNA ID NO. 568445
  misc_feature: Encodes the peptide sequence at SEQ ID NO 24759
atggcaggccaggcaccacacaacgatgtgctcttgcgcgaatttcaagcatttagagaagagatgagggacgagagaaaagagacgagagagttgctacagcagaaggatgtttctgtcgacgatttcaaaagccaaatgaataagttggaagatagtttcagttctaaaattgccgttattgcgaccgaaatcaaggcaggccaatatgaaagtagcgctgaggtagaaggtgggcttcatcagatccataactgtctatcgaggggtttcaaggatctgaaggaaacagcagagaagatccctttcacgaagcagtcaaacattgatcatctggcagatgttctcaaagctgcggtttccgacgtgctctcccaacacaaggggagtttgaagaccgccaataaagatgatcaagaatttgcagagtcgacagctgatgccgcgtatcagaaggaaatcatccaattgcggaatgcactccaatctaaacacgagtctcacgcgattcaagttttgaacgatcacttcactcagcaacacgctagatacactaaacaaattgctggaaacttgaccagtctaggctttgccaaagcgaagctgaaggattgcgaagcggacttgaaagatgccgaaacggaaattgaagagttgaaggagcaagtcgcttctcaaggtaccaacactcaagcagatccggctgaactcttgaagatggagctcgacatgaaggagatggacgaccggcataaagaacagatccgaatctttagcctgcgacacaaacagttgtttgatcaacttgccgatctcagaggcaatatccgggttcttgtcagaattcgccctggcgggcctggacaggatctgattaatttgacaaatcccgatgaagggtcctttcttccatggcaaagccttcgaatcacgaccgaggaaacgcaagtctctcatcacgagccgcggctcgacataaaaaactacgaaggattccaacgcgtcttcggcccgagcgaaaccaaccaggccatatttgatgagattgccgatatcgcgcagtctgctgtctatggaaagccatgtacagtcctggcttatggccagacaggctcaggaaagtctcacacgtttctggccgacgacggtatcgtgccccgctatttcgagcttatttttggtctatcacaatctggacaggaccaagatcattctttcgagtttgagttgtcggctgcagagatctatttgagcaaaattcatgacctattagatgactcgagtctcaagtctcaggggacaaagaaaattgagaaggtagttatcagcgattgggcccgtcgcacagagaggaaagtcgactctcttgaagttgcgaggaactacgtcgatatcattcttcgccaacgccaaaccgcggctaccaagggtaacccaacatcgagtcgatcacatctcgtcctttcacttagaattcgtagaatatccaagggagaggacatcaaaatcagcgactccgtgattaattttgtggatctcgctggcagcgaggcaccaggcaagaacaacgcacaaggtactgagtttgaagaagggaatgacattaacaagtctctaacggagctggggacaacgattcgtgggatgcgagacggtaaagtgaacgctgggagtcatccactaatcaaagtcctgaagaacacactcactgctgattcccgcatgctaatgatgtttatggtatctcctttgatgacgaacctccttcccacaaagaacactctcacgagggcagtagaagcctctggggctactgtttccagtaccagtcggcgagcaccttctacccccgcagcaaagagtcagacaccaagcaccaagacaccaaacaccaagactcctagcaccaagactcctagcacaccccgcggaaagaggtga

SEQ ID NO: 24759 - protein, 646 aa, Muscodor strobelii
  misc_feature: SGI Peptide ID NO. 568445
  misc_feature (281)..(605): Pfam Id: PF00225 Pfam Desc: Kinesin motor domain
  misc_feature (334)..(559): Pfam Id: PF00225 Pfam Desc: Kinesin motor domain
  misc_feature (204)..(602): NCBI GI: 29421232 Blast Desc: kinesin [Botryotinia fuckeliana]
  misc_feature (148)..(616): NCBI GI: 213404052 Blast Desc: kinesin-like protein [Schizosaccharomyces japonicus yFS275] gi|212000845|gb|EEB06505.1| kinesin-like protein [Schizosaccharomyces japonicus yFS275]
  misc_feature (204)..(595): NCBI GI: 154289877 Blast Desc: BC1G_15934 [Botryotinia fuckeliana B05.10] gi|150848742|gb|EDN23935.1| BC1G_15934 [Botryotinia fuckeliana B05.10]
  misc_feature (7)..(611): NCBI GI: 212527454 Blast Desc: kinesin family protein (KlpA), [Penicillium marneffei ATCC 18224] gi|210073282|gb|EEA27369.1| kinesin family protein (KlpA), [Penicillium marneffei ATCC 18224]
  misc_feature (213)..(595): NCBI GI: 67540340 Blast Desc: KLPA_EMENI KINESIN-LIKE PROTEIN KLPA [Aspergillus nidulans FGSC A4] gi|146345446|sp|P28739.2|KLPA_EMENI RecName: Full=Kinesin-like protein klpA gi|40739534|gb|EAA58724.1| PROTEIN
  misc_feature (213)..(595): NCBI GI: 2704 Blast Desc: KLPA [Emericella nidulans] gi|259479442|tpe|CBF69667.1| TPA: Kinesin-like protein klpA [Source:UniProtKB/Swiss-Prot;Acc:P28739] [Aspergillus nidulans
  misc_feature (88)..(610): NCBI GI: 126417154 Blast Desc: kinesin family member C1/zinc finger protein [Salmo salar] gi|148362138|gb|ABQ59663.1| KIFC1 [Salmo salar]
  misc_feature (106)..(613): NCBI GI: 171692427 Blast Desc: protein product [Podospora anserina] gi|170946162|emb|CAP72963.1| protein product [Podospora anserina]
  misc_feature (213)..(611): NCBI GI: 242783767 Blast Desc: kinesin family protein (KlpA), [Talaromyces stipitatus ATCC 10500] gi|218720399|gb|EED19818.1| kinesin family protein (KlpA), [Talaromyces stipitatus ATCC 10500]
  misc_feature (252)..(613): NCBI GI: 238490350 Blast Desc: kinesin family protein (KlpA), [Aspergillus flavus NRRL3357] gi|220696825|gb|EED53166.1| kinesin family protein (KlpA), [Aspergillus flavus NRRL3357]
MAGQAPHNDVLLREFQAFREEMRDERKETRELLQQKDVSVDDFKSQMNKLEDSFSSKIAVIATEIKAGQYESSAEVEGGLHQIHNCLSRGFKDLKETAEKIPFTKQSNIDHLADVLKAAVSDVLSQHKGSLKTANKDDQEFAESTADAAYQKEIIQLRNALQSKHESHAIQVLNDHFTQQHARYTKQIAGNLTSLGFAKAKLKDCEADLKDAETEIEELKEQVASQGTNTQADPAELLKMELDMKEMDDRHKEQIRIFSLRHKQLFDQLADLRGNIRVLVRIRPGGPGQDLINLTNPDEGSFLPWQSLRITTEETQVSHHEPRLDIKNYEGFQRVFGPSETNQAIFDEIADIAQSAVYGKPCTVLAYGQTGSGKSHTFLADDGIVPRYFELIFGLSQSGQDQDHSFEFELSAAEIYLSKIHDLLDDSSLKSQGTKKIEKVVISDWARRTERKVDSLEVARNYVDIILRQRQTAATKGNPTSSRSHLVLSLRIRRISKGEDIKISDSVINFVDLAGSEAPGKNNAQGTEFEEGNDINKSLTELGTTIRGMRDGKVNAGSHPLIKVLKNTLTADSRMLMMFMVSPLMTNLLPTKNTLTRAVEASGATVSSTSRRAPSTPAAKSQTPSTKTPNTKTPSTKTPSTPRGKR

SEQ ID NO: 24760 - DNA, 335 bp, Muscodor strobelii
  misc_feature: SGI EST ID NO. CUFF.58296.0
  misc_feature: Variant of the nucleotide sequence at SEQ ID NO 24758
caaaatcagcgactccgtgattaattttgtggatctcgctggcagcgaggcaccaggcaagaacaacgcacaaggtactgagtttgaagaagggaatgacattaacaagtctctaacggagctggggacaacgattcgtgggatgcgagacggtaaagtgaacgctgggagtcatccactaatcaaagtcctgaagaacacactcactgctgattcccgcatgctaatgatgtttatggtatctcctttgatgacgaacctccttcccacaaagaacactctcacgagggcagtagaagcctctggggctactgtttccagtaccagtcggcgag

SEQ ID NO: 24761 - DNA, 2157 bp, Muscodor strobelii
  misc_feature: SGI cDNA ID NO. 568446
  misc_feature: Encodes the peptide sequence at SEQ ID NO 24762
atgagtcgacttggtaactggtttcggggggcaaccccaaaagtgagtgccaaccccagcgcggctacatccgaggtcgatctccggacccagaccatcgccctgttgcaagatgctatggctggcgccgatttaatcatgaacgatgatatcgacggtgcggaagagagtctaaagaacggcgcttcaacttttcactcctttggaatgggagtgtgtaccttcatgcggtctattttgggctttgagaagtctatcatggccgaagctgcaacccgtctgagtggctgtgagacttcagcatggaacgatatcaagaaagccgagaaggatgccagagactcttctgctgaaaggatctacccgcccggaagcgagtacaatctagttcttgccgaggtctatctcatgtctgctattgtcggagtcctacatgagagtttgaccgaagctataaaaggcttctacaagatgagaaaggcatttctggctcttgactctatcatacaagcagaggaagcgtatctgaagaaacgcgggctcaagactagccccccgaaagaagctactcctttaccacctgcggaaaagatgcccggtgcctttgacgatgatgccgacctcgaattcgtcgatgcagatgaagcgcactcagggaagcaaacaccattgacatacgagggccatcttgcaactgcagacgaggaggcagaagcagaagcaaaacttcgtgaactgtctctggaaagtaaagagggccaagagagctcagtcccacttcaagaagcaccaacccgagctggtttccagggaggccccgaatcagacatatttgttgatcctcttgatgtcttcgttcattctggagcgaccatgtgtttcggcgtactccttttagttatttctctcgtcccaccggccttttctcgtttattgtccatcattgggtttaaaggcgaccgcgaacgtggcatcaagatgttgtggcaaagctctcaattcgacaatatcaacggcgctgttgccggactcatgctttgcgcctattacaacggacttcttggctttgcagacattttgccatccgatgaagatgcgaataagggcgccgttgttggatatcccaaggagaagctatccgcgcttctggtaaagcttcgagctcgttacccagacagcggcctctggcggctcgaagaagcccgcagccgggcaaatatgagagatctcacaggagccgtagacattcttaagaataacaattcgaagatgaagcaagtcgctgctatcaacaacttcgagctagctctcgacgtcacctacatccaggactggtcttgcgcgcgcgatacatatctccgatgcatcgagttgaatgagtggagtccggcgctgtactattacatggcgggaagcgcagagttggaaaactaccgcaacgccttcttcgcaaacccaagagacgagtcacagatcaagctgcacaagaaaaaggcggaggaactctaccggaaagtaccaactgtggctggaaagaagagattcatggcacgacccctaccatttgagcagttcgtttgccggaagctcgaaaaatgggaagagagagtgaaatccatgggcgttcagttggtagacgcaattggtgtcagcccggcacaggaaatggtatacttgtggaatggaatcaagaagatgtcccccgccgaactagaggcagccgatcgtgacttggcatgggagcgacttacctgttctgaagaagctcgagacaagatcaaagcagaagctgacgagaaagcactgcaagatctcttgcatgcaggcatacttcgcaatctgaataaatttgacgaggcaaaggacatattgaaagagttgatgaccattgacaggacgcttctcaaaggacctacgaaggacgattacgtcgtacctgccgcccactatgatatggctgtcatcagttggtttgagggacagaagttgaaggaggacgaaaagaagcgggttgaggatatactagcctgccaaggatggctggaaaaagtctcgcgttgggaggcctacgtactggatgctcgcattggaatgagagtaacaacgggtcaggatactctgagatggtataaaagggagcatggcatcacttcttaa

SEQ ID NO: 24762 - protein, 718 aa, Muscodor strobelii
  misc_feature: SGI Peptide ID NO. 568446
  misc_feature (1)..(715): NCBI GI: 170940340 Blast Desc: protein product [Podospora anserina]
  misc_feature (1)..(715): NCBI GI: 116194972 Blast Desc: CHGG_04084 [Chaetomium globosum CBS 148.51] gi|121927655|sp|Q2H2B2.1|IML2_CHAGB RecName: Full=Mitochondrial outer membrane protein IML2 gi|88179997|gb|EAQ87465.1| CHGG_04084
  misc_feature (21)..(715): NCBI GI: 85107710 Blast Desc: NCU07911 [Neurospora crassa OR74A] gi|74617028|sp|Q7SA06.1|IML2_NEUCR RecName: Full=Mitochondrial outer membrane protein iml-2 gi|28924033|gb|EAA33191.1| conserved
  misc_feature (1)..(717): NCBI GI: 256723581 Blast Desc: [Nectria haematococca mpVI 77-13-4]
  misc_feature (1)..(715): NCBI GI: 46116274 Blast Desc: FG03979.1 [Gibberella zeae PH-1]
  misc_feature (4)..(717): NCBI GI: 39940350 Blast Desc: MGG_05065 [Magnaporthe grisea 70-15] gi|189044732|sp|A4QTI0.1|IML2_MAGGR RecName: Full=Mitochondrial outer membrane protein IML2 gi|145010686|gb|EDJ95342.1| MGG_05065
  misc_feature (1)..(714): NCBI GI: 238498518 Blast Desc: conserved [Aspergillus flavus NRRL3357] gi|220693768|gb|EED50113.1| conserved [Aspergillus flavus NRRL3357]
  misc_feature (1)..(710): NCBI GI: 212542825 Blast Desc: conserved [Penicillium marneffei ATCC 18224] gi|210066474|gb|EEA20567.1| conserved [Penicillium marneffei ATCC 18224]
  misc_feature (1)..(718): NCBI GI: 115491369 Blast Desc: conserved [Aspergillus terreus NIH2624] gi|121743166|sp|Q0D1F8.1|IML2_ASPTN RecName: Full=Mitochondrial outer membrane protein iml2 gi|114197172|gb|EAU38872.1| conserved
  misc_feature (1)..(714): NCBI GI: 242767940 Blast Desc: conserved [Talaromyces stipitatus ATCC 10500] gi|218724665|gb|EED24082.1| conserved [Talaromyces stipitatus ATCC 10500]
MSRLGNWFRGATPKVSANPSAATSEVDLRTQTIALLQDAMAGADLIMNDDIDGAEESLKNGASTFHSFGMGVCTFMRSILGFEKSIMAEAATRLSGCETSAWNDIKKAEKDARDSSAERIYPPGSEYNLVLAEVYLMSAIVGVLHESLTEAIKGFYKMRKAFLALDSIIQAEEAYLKKRGLKTSPPKEATPLPPAEKMPGAFDDDADLEFVDADEAHSGKQTPLTYEGHLATADEEAEAEAKLRELSLESKEGQESSVPLQEAPTRAGFQGGPESDIFVDPLDVFVHSGATMCFGVLLLVISLVPPAFSRLLSIIGFKGDRERGIKMLWQSSQFDNINGAVAGLMLCAYYNGLLGFADILPSDEDANKGAVVGYPKEKLSALLVKLRARYPDSGLWRLEEARSRANMRDLTGAVDILKNNNSKMKQVAAINNFELALDVTYIQDWSCARDTYLRCIELNEWSPALYYYMAGSAELENYRNAFFANPRDESQIKLHKKKAEELYRKVPTVAGKKRFMARPLPFEQFVCRKLEKWEERVKSMGVQLVDAIGVSPAQEMVYLWNGIKKMSPAELEAADRDLAWERLTCSEEARDKIKAEADEKALQDLLHAGILRNLNKFDEAKDILKELMTIDRTLLKGPTKDDYVVPAAHYDMAVISWFEGQKLKEDEKKRVEDILACQGWLEKVSRWEAYVLDARIGMRVTTGQDTLRWYKREHGITS

SEQ ID NO: 24763 - DNA, 3058 bp, Muscodor strobelii
  misc_feature: SGI EST ID NO. CUFF.58306.0
  misc_feature: Variant of the nucleotide sequence at SEQ ID NO 24761
ttcgtctccaaacaatggctcaaatcgcctataccactattttccggatcaacgattgctgacatcgctgttccgttagtacatgcaggcgtatcgctacagtgtttaatgtcacatcacagtatcacttattttattcttggcctagcatgccagcactggtgagctgagccctttgtatcaccccacagtactaccgtcgtcagctcaaagtacatacgtcagtgatcgagtcttagggctattcatacaatccgccaaacctccacaacttagcggcgttccttttgcttcttaaatgagcttgcttgcttcttctcggccctaccggagatctacttgaaatgtgaaatgtcttaagcttcctttatgcttgccccctccaaaatcttcgctccctacatccttacatgcgactggcttggcattccagtacgccactcaagcgcatcgagtcccatctcaccagtcagcccgacgaattgcctcacttatcttcataactcaacgtactaagcagtcacaatctttctcctgaagcatatgacaactcatgtagaaggttcttgtttattaggaaagcagcgctacaactccacggctcaaaatgagtcgacttggtaactggtttcggggggcaaccccaaaagtgagtgccaaccccagcgcggctacatccgaggtcgatctccggacccagaccatcgccctgttgcaagatgctatggctggcgccgatttaatcatgaacgatgatatcgacggtgcggaagagagtctaaagaacggcgcttcaacttttcactcctttggaatgggagtgtgtaccttcatgcggtctattttgggctttgagaagtctatcatggccgaagctgcaacccgtctgagtggctgtgagacttcagcatggaacgatatcaagaaagccgagaaggatgccagagactcttctgctgaaaggatctacccgcccggaagcgagtacaatctagttcttgccgaggtctatctcatgtctgctattgtcggagtcctacatgagagtttgaccgaagctataaaaggcttctacaagatgagaaaggcatttctggctcttgactctatcatacaagcagaggaagcgtatctgaagaaacgcgggctcaagactagccccccgaaagaagctactcctttaccacctgcggaaaagatgcccggtgcctttgacgatgatgccgacctcgaattcgtcgatgcagatgaagcgcactcagggaagcaaacaccattgacatacgagggccatcttgcaactgcagacgaggaggcagaagcagaagcaaaacttcgtgaactgtctctggaaagtaaagagggccaagagagctcagtcccacttcaagaagcaccaacccgagctggtttccagggaggccccgaatcagacatatttgttgatcctcttgatgtcttcgttcattctggagcgaccatgtgtttcggcgtactccttttagttatttctctcgtcccaccggccttttctcgtttattgtccatcattgggtttaaaggcgaccgcgaacgtggcatcaagatgttgtggcaaagctctcaattcgacaatatcaacggcgctgttgccggactcatgctttgcgcctattacaacggacttcttggctttgcagacattttgccatccgatgaagatgcgaataagggcgccgttgttggatatcccaaggagaagctatccgcgcttctggtaaagcttcgagctcgttacccagacagcggcctctggcggctcgaagaagcccgcagccgggcaaatatgagagatctcacaggagccgtagacattcttaagaataacaattcgaagatgaagcaagtcgctgctatcaacaacttcgagctagctctcgacgtcacctacatccaggactggtcttgcgcgcgcgatacatatctccgatgcatcgagttgaatgagtggagtccggcgctgtactattacatggcgggaagcgcagagttggaaaactaccgcaacgccttcttcgcaaacccaagagacgagtcacagatcaagctgcacaagaaaaaggcggaggaactctaccggaaagtaccaactgtggctggaaagaagagattcatggcacgacccctaccatttgagcagttcgtttgccggaagctcgaaaaatgggaagagagagtgaaatccatgggcgttcagttggtagacgcaattggtgtcagcccggcacaggaaatggtatacttgtggaatggaatcaagaagatgtcccccgccgaactagaggcagccgatcgtgacttggcatgggagcgacttacctgttctgaagaagctcgagacaagatcaaagcagaagctgacgagaaagcactgcaagatctcttgcatgcaggcatacttcgcaatctgaataaatttgacgaggcaaaggacatattgaaagagttgatgaccattgacaggacgcttctcaaaggacctacgaaggacgattacgtcgtacctgccgcccactatgatatggctgtcatcagttggtttgagggacagaagttgaaggaggacgaaaagaagcgggttgaggatatactagcctgccaaggatggctggaaaaagtctcgcgttgggaggcctacgtactggatgctcgcattggaatgagagtaacaacgggtcaggatactctgagatggtataaaagggagcatggcatcacttcttaaatctgagcgttgcaggctagaaagtcacttgagatacatggggccaaataagaggtaaggaacatgtgaaaggcgtcttatagatgtggtatctacgaagcaataatagaggtagaccaccgctcggcatatgatgtaagactcgacaattgactgatattcatgagtcactatcatgtttctgcactcgtccgcaactagacgggcaatatctacgagcttgaaaatctcatcaacggataaatagaagcgttgtttcgaacccatagactttatttgagcttatctgccaaa

SEQ ID NO: 24764 - DNA, 291 bp, Muscodor strobelii
  misc_feature: SGI cDNA ID NO. 568447
  misc_feature: Encodes the peptide sequence at SEQ ID NO 24765
atggctgccacgaccgataaacccgctgacaagtctgctgcggccagcgacgctaagcccgagcaacagacacagcagaagtcggccgctgccctcgaggaggacgacgagtttgaggacttccctgtcgaggactggcccgctgaggagaccgagtcggcagcccagactgctaatggcaccacccagcatctgtgggaggagagctgggatgacgatgacaccagtgacgatttctctgcacagctccgtgacgaactgaaaaaagtcgaggcttctaagagaagatga

SEQ ID NO: 24765 - protein, 96 aa, Muscodor strobelii
  misc_feature: SGI Peptide ID NO. 568447
  misc_feature (22)..(90): Pfam Id: PF05160 Pfam Desc: DSS1/SEM1 family
  misc_feature (31)..(94): NCBI GI: 238498520 Blast Desc: 26 proteasome complex subunit Sem1, [Aspergillus flavus NRRL3357] gi|220693769|gb|EED50114.1| 26 proteasome complex subunit Sem1, [Aspergillus flavus NRRL3357]
  misc_feature (15)..(94): NCBI GI: 154280981 Blast Desc: [Ajellomyces capsulatus NAm1] gi|150411482|gb|EDN06870.1| [Ajellomyces capsulatus NAm1]
  misc_feature (21)..(93): NCBI GI: 146322560 Blast Desc: 26 proteasome complex subunit Sem1 [Aspergillus fumigatus Af293] gi|129557728|gb|EBA27404.1| 26 proteasome complex subunit Sem1, [Aspergillus fumigatus Af293] 26 proteasome
  misc_feature (21)..(93): NCBI GI: 119495922 Blast Desc: 26 proteasome complex subunit Sem1, [Neosartorya fischeri NRRL 181] gi|119412898|gb|EAW22839.1| 26 proteasome complex subunit Sem1, [Neosartorya fischeri NRRL 181]
  misc_feature (2)..(96): NCBI GI: 156061980 Blast Desc: [Sclerotinia sclerotiorum 1980] gi|154696442|gb|EDN96180.1| [Sclerotinia sclerotiorum 1980]
  misc_feature (8)..(96): NCBI GI: 154295772 Blast Desc: BC1G_12889 [Botryotinia fuckeliana B05.10] gi|150843922|gb|EDN19115.1| BC1G_12889 [Botryotinia fuckeliana B05.10]
  misc_feature (21)..(93): NCBI GI: 121701927 Blast Desc: 26 proteasome complex subunit Sem1, [Aspergillus clavatus NRRL 1] gi|119397371|gb|EAW07802.1| 26 proteasome complex subunit Sem1, [Aspergillus clavatus NRRL 1]
  misc_feature (4)..(95): NCBI GI: 238841324 Blast Desc: conserved [Microsporum canis CBS 113480]
  misc_feature (1)..(96): NCBI GI: 85107718 Blast Desc: NCU07913 [Neurospora crassa OR74A] gi|50401503|sp|Q7SA04.1|SEM1_NEUCR RecName: Full= 26S proteasome complex subunit sem-1 gi|28924035|gb|EAA33193.1| [Neurospora
  misc_feature (31)..(95): NCBI GI: 145239393 Blast Desc: An08g02270 [Aspergillus niger] gi|134076852|emb|CAK45272.1| protein product [Aspergillus niger]
MAATTDKPADKSAAASDAKPEQQTQQKSAAALEEDDEFEDFPVEDWPAEETESAAQTANGTTQHLWEESWDDDDTSDDFSAQLRDELKKVEASKRR

SEQ ID NO: 24766 - DNA, 809 bp, Muscodor strobelii
  misc_feature: SGI EST ID NO. CUFF.58436.1
  misc_feature: Variant of the nucleotide sequence at SEQ ID NO 24764
gcgcatgcccgtccctgcctagaaactacacagcttcactacacgcatcgagagatctctgcaagtaaacaaagagcaacgttcgccctttgagcatcgcgcagtcttgcttgatatcatacgacagccttttcacctcaaatccacctgcgcgaccatcaaccatggctgccacgaccgataaacccgctgacaagtctgctgcggccagcgacgctaagcccgagcaacagacacagcagaagtcggccgctgccctcgaggaggacgacgagtttgaggacttccctgtcgaggactggcccgctgaggagaccgagtcggcagcccagactgctaatggcaccacccagcatctgtgggaggagagctgggatgacgatgacaccagtgacgatttctctgcacagctccgtgacgaactgaaaaaagtcgaggcttctaagagaagatgaaccagcggccgaagccggagctatcacacaaactttcggccaccgccacatcattggggccatagacatcacccaaaatcacatcacgacttcaatgcgcaatgattagacgaggcagggaaggaaacgagaaatgggcggacggttgctctgcgtcatcaacgatcgctgcgtatgagttgctagttgtcaagtctgatatcccagactatgggaatggatgagagaagagatgcgttccatggcatacgcacactgaccagagggtcatcatcctacggtgcccaagggaacgccagcaatatacagataatgaatgacagctgaattaatgcaaacaaatgcagctcagtc

SEQ ID NO: 24767 - DNA, 1557 bp, Muscodor strobelii
  misc_feature: SGI cDNA ID NO. 568448
  misc_feature: Elevated expression when VOC is produced
  misc_feature: Encodes the peptide sequence at SEQ ID NO 24768
atgtcagaagtagagtcaaaacgcctcgatagcggcgacaagcaaccccaaccaccatttgtcgcatacacaacatggacaacactccagcgccgtctcttagtaattctcctaggatatctagccctagcatcatcgctaacagcaaacatatacttcccgctcatcgacctcatagcctcgcggtacagcgtttctgtacaagccatcaacctcacagtcacagtatacataatagtccaaggcattgtaccttcaatctggtcaccgatatccgacactctgagaagaagaccagtgtacctggtgacattcacaatcttcactatcgcttctttggctttgtctgtcattgatagaaattaccccgcgttactggtatttagggctttgcagagcgttggagcatcgggaatcgtttcattagcatatgcgagtgtagcagatgtcgtggttcactctgaaaggggcgcatatctgtcgccgcttctgacgatcacgaatgtcgggccggtaatcggtccagtcatcggtggtgccctagctctgccgtcaggggatccaagatggtgttttcgcactctggccatttttggtggaacgtctacgcttctgataggccttgctatgcctgagacgggacgatctgttgttggaaacggcgctttacaagcccagggcatttggcaaacgtggtggaggttgttggtcgggagaagtgcaggacctgatggagcgaagtcatcaactgggaatgtactcgaagcagggctaacaaacaaagggtcggacacaaatccagacccgaactcacgcgcaactggcagagggaggttttccatgccaaatttgtggcctgtaataagaattgtcttctaccccgatacatttctggttctgtggctagcgggttccccttcggccgtatggttctgcgtacaaacctcactttctcctatattcagtgaaaaatacggattcaacatcttagaagtcggactcagttttctcgctggcggtgttggtgtcatagtcgctggcttcgtagcaggacggctgatggaccacaactataaacatgttgccagagaggcaggcttttccatcgaccgaattcgcggtgatgatgtaaggaaattttctattgaaaaagccaggtctcgcgggacactgactatcattgtactgtctgttggacttatcatcgggtatggatgggttgtggaggcgaaggtgcatcctgccgttcccctgattctccaggggtttatcgggtgtcgatgtgcgacactccatcagacgtatggagcactcatcgttgacattttccctgaaaagacgggtgccgcagcggcgtcgaagaatatcgtgaggtgtacattggctggcattttcgttgctattctagatttattagtcggaaaacttggatatggctggacgttcacgtttttcggtctttttgatgctgttacctgtgtcattgctgtgctgagcctccagcgatggggtatgatgtggcgcacgcgacgtcaagaggctacgaaggttggatag

SEQ ID NO: 24768 - protein, 518 aa, Muscodor strobelii
  misc_feature: SGI Peptide ID NO. 568448
  misc_feature (38)..(467): Pfam Id: PF07690 Pfam Desc: Major Facilitator Superfamily
  misc_feature (23)..(505): NCBI GI: 67900580 Blast Desc: AN7277.2 [Aspergillus nidulans FGSC A4] gi|40741958|gb|EAA61148.1| AN7277.2 [Aspergillus nidulans FGSC A4]
  misc_feature (23)..(503): NCBI GI: 259483376 Blast Desc: TPA: conserved [Aspergillus nidulans FGSC A4]
  misc_feature (23)..(511): NCBI GI: 39944636 Blast Desc: MGG_04329 [Magnaporthe grisea 70-15] gi|145015068|gb|EDJ99636.1| MGG_04329 [Magnaporthe grisea 70-15]
  misc_feature (22)..(511): NCBI GI: 115391291 Blast Desc: conserved [Aspergillus terreus NIH2624] gi|114194074|gb|EAU35774.1| conserved [Aspergillus terreus NIH2624]
  misc_feature (1)..(511): NCBI GI: 255947864 Blast Desc: Pc22g06710 [Penicillium chrysogenum Wisconsin 54-1255] gi|211591716|emb|CAP97959.1| Pc22g06710 [Penicillium chrysogenum Wisconsin 54-1255]
  misc_feature (18)..(511): NCBI GI: 156031347 Blast Desc: SS1G_14095 [Sclerotinia sclerotiorum 1980] gi|154699497|gb|EDN99235.1| SS1G_14095 [Sclerotinia sclerotiorum 1980]
  misc_feature (22)..(511): NCBI GI: 70993750 Blast Desc: MFS transporter [Aspergillus fumigatus Af293] gi|66849356|gb|EAL89684.1| MFS transporter, [Aspergillus fumigatus Af293] gi|159125356|gb|EDP50473.1| MFS transporter,
  misc_feature (2)..(511): NCBI GI: 119500304 Blast Desc: MFS transporter, [Neosartorya fischeri NRRL 181] gi|119415074|gb|EAW25012.1| MFS transporter, [Neosartorya fischeri NRRL 181]
  misc_feature (13)..(510): NCBI GI: 256726048 Blast Desc: NECHADRAFT_43520 [Nectria haematococca mpVI 77-13-4]
  misc_feature (22)..(511): NCBI GI: 121707893 Blast Desc: MFS transporter, [Aspergillus clavatus NRRL 1] gi|119400118|gb|EAW10544.1| MFS transporter, [Aspergillus clavatus NRRL 1]
  misc_feature: Useful for introducing or modulating the production of volatile compounds
MSEVESKRLDSGDKQPQPPFVAYTTWTTLQRRLLVILLGYLALASSLTANIYFPLIDLIASRYSVSVQAINLTVTVYIIVQGIVPSIWSPISDTLRRRPVYLVTFTIFTIASLALSVIDRNYPALLVFRALQSVGASGIVSLAYASVADVVVHSERGAYLSPLLTITNVGPVIGPVIGGALALPSGDPRWCFRTLAIFGGTSTLLIGLAMPETGRSVVGNGALQAQGIWQTWWRLLVGRSAGPDGAKSSTGNVLEAGLTNKGSDTNPDPNSRATGRGRFSMPNLWPVIRIVFYPDTFLVLWLAGSPSAVWFCVQTSLSPIFSEKYGFNILEVGLSFLAGGVGVIVAGFVAGRLMDHNYKHVAREAGFSIDRIRGDDVRKFSIEKARSRGTLTIIVLSVGLIIGYGWVVEAKVHPAVPLILQGFIGCRCATLHQTYGALIVDIFPEKTGAAAASKNIVRCTLAGIFVAILDLLVGKLGYGWTFTFFGLFDAVTCVIAVLSLQRWGMMWRTRRQEATKVG

SEQ ID NO: 24769 - DNA, 1643 bp, Muscodor strobelii
  misc_feature: SGI EST ID NO. CUFF.58308.0
  misc_feature: Variant of the nucleotide sequence at SEQ ID NO 24767
atgctgcatacctgtcacaaccaacatggaagcatgccatgatcctgcctcatccagtcatcgcgaacaaaggaacataaaatataaatttgactagcaggacatcatgtcagaagtagagtcaaaacgcctcgatagcggcgacaagcaaccccaaccaccatttgtcgcatacacaacatggacaacactccagcgccgtctcttagtaattctcctaggatatctagccctagcatcatcgctaacagcaaacatatacttcccgctcatcgacctcatagcctcgcggtacagcgtttctgtacaagccatcaacctcacagtcacagtatacataatagtccaaggcattgtaccttcaatctggtcaccgatatccgacactctgagaagaagaccagtgtacctggtgacattcacaatcttcactatcgcttctttggctttgtctgtcattgatagaaattaccccgcgttactggtatttagggctttgcagagcgttggagcatcgggaatcgtttcattagcatatgcgagtgtagcagatgtcgtggttcactctgaaaggggcgcatatctgtcgccgcttctgacgatcacgaatgtcgggccggtaatcggtccagtcatcggtggtgccctagctctgccgtcaggggatccaagatggtgttttcgcactctggccatttttggtggaacgtctacgcttctgataggccttgctatgcctgagacgggacgatctgttgttggaaacggcgctttacaagcccagggcatttggcaaacgtggtggaggttgttggtcgggagaagtgcaggacctgatggagcgaagtcatcaactgggaatgtactcgaagcagggctaacaaacaaagggtcggacacaaatccagacccgaactcacgcgcaactggcagagggaggttttccatgccaaatttgtggcctgtaataagaattgtcttctaccccgatacatttctggttctgtggctagcgggttccccttcggccgtatggttctgcgtacaaacctcactttctcctatattcagtgaaaaatacggattcaacatcttagaagtcggactcagttttctcgctggcggtgttggtgtcatagtcgctggcttcgtagcaggacggctgatggaccacaactataaacatgttgccagagaggcaggcttttccatcgaccgaattcgcggtgatgatgtaaggaaattttctattgaaaaagccaggtctcgcgggacactgactatcattgtactgtctgttggacttatcatcgggtatggatgggttgtggaggcgaaggtgcatcctgccgttcccctgattctccaggggtttatcgggtgtcgatgtgcgacactccatcagacgtatggagcactcatcgttgacattttccctgaaaagacgggtgccgcagcggcgtcgaagaatatcgtgaggtgtacattggctggcattttcgttgctattctagatttattagtcggaaaacttggatatggctggacgttcacgtttttcggtctttttgatgctgttacctgtgtcattgctgtgctgagcctccagcgatggggtatgatgtggcgcacgcgacgtcaag

SEQ ID NO: 24770 - DNA, 930 bp, Muscodor strobelii
  misc_feature: SGI cDNA ID NO. 568449
  misc_feature: Elevated expression when VOC is produced
  misc_feature: Encodes the peptide sequence at SEQ ID NO 24771
atgagtagatcagctgaactcgcaattcaaaagcttctacctggagacagctcagagaaaaacgaagatgctgccaagtccgatatttcgaaggcgctacaagttgcttttgaacaaaatcgtcgaatagcatcccaagacaatactgagtttatcacggcggaacacaaatggtgcaagccgaccaatgtcccggaatacctcatacaatacgtcgatcagggtgtaattgacaaacttcctcctggaactagagttcagggaatatcacctagcggaatatcgaactgggctcgtaccgcgaagatcgaggcaaccgatgaagctggacgagcgacaaatttcttcatgaaggttcttcaatccgagcacgggagaaacatggtgtcttccgagttcaagaccatgtcgaagttgtatagtattatgcccgagcttgtggccgagcccattgcttggggtgcttactcacaaaaacctgagacgtacttcttcgtctgccgattttgcgaaatgtctggagcaataccagatctcgataagtttccaatgatgttagcagacatgcataaacgtggcgtgtcaccagacggcaagttcggtatgccgtatgtcgcgtatagtggacgcaatccgcaatatttcccgccgagtgagtcttgggagaagtgcttttcaaaaggccttggcttgatcttcgacatggaagaagagacacatggtccggacagcgagcttcaggaattgagagaagaaattatgacgaagaccatacctcgacttttgcgtcccctccaaacccatggtcgaactttgacaccttgcttggtacattccgacctttgggacggcaatactggtgttgataccagcacaggatctccgattatatttgacgggctgtgtttctatgcacacaatgaatgttag

SEQ ID NO: 24771 - protein, 309 aa, Muscodor strobelii
  misc_feature: SGI Peptide ID NO. 568449
  misc_feature (58)..(308): NCBI GI: 261356063 Blast Desc: conserved [Verticillium albo-atrum VaMs.102]
  misc_feature (72)..(308): NCBI GI: 256734177 Blast Desc: [Nectria haematococca mpVI 77-13-4]
  misc_feature (72)..(308): NCBI GI: 46135869 Blast Desc: FG09450.1 [Gibberella zeae PH-1]
  misc_feature (72)..(309): NCBI GI: 145256231 Blast Desc: An10g00710 [Aspergillus niger CBS 513.88] gi|134078637|emb|CAK40510.1| protein product [Aspergillus niger]
  misc_feature (72)..(308): NCBI GI: 169765035 Blast Desc: [Aspergillus oryzae RIB40] gi|83764843|dbj|BAE54987.1| protein product [Aspergillus oryzae]
  misc_feature (72)..(308): NCBI GI: 255946231 Blast Desc: Pc20g14050 [Penicillium chrysogenum Wisconsin 54-1255] gi|211588618|emb|CAP86734.1| Pc20g14050 [Penicillium chrysogenum Wisconsin 54-1255]
  misc_feature (80)..(308): NCBI GI: 238503680 Blast Desc: conserved [Aspergillus flavus NRRL3357] gi|220690543|gb|EED46892.1| conserved [Aspergillus flavus NRRL3357]
  misc_feature (80)..(308): NCBI GI: 115385086 Blast Desc: conserved [Aspergillus terreus NIH2624] gi|114196782|gb|EAU38482.1| conserved [Aspergillus terreus NIH2624]
  misc_feature (72)..(308): NCBI GI: 258563734 Blast Desc: [Uncinocarpus reesii 1704] gi|237908119|gb|EEP82520.1| [Uncinocarpus reesii 1704]
  misc_feature (72)..(308): NCBI GI: 240110347 Blast Desc: CPC735_063790 [Coccidioides posadasii C735 delta SOWgp]
  misc_feature: Useful for introducing or modulating the production of volatile compounds
MSRSAELAIQKLLPGDSSEKNEDAAKSDISKALQVAFEQNRRIASQDNTEFITAEHKWCKPTNVPEYLIQYVDQGVIDKLPPGTRVQGISPSGISNWARTAKIEATDEAGRATNFFMKVLQSEHGRNMVSSEFKTMSKLYSIMPELVAEPIAWGAYSQKPETYFFVCRFCEMSGAIPDLDKFPMMLADMHKRGVSPDGKFGMPYVAYSGRNPQYFPPSESWEKCFSKGLGLIFDMEEETHGPDSELQELREEIMTKTIPRLLRPLQTHGRTLTPCLVHSDLWDGNTGVDTSTGSPIIFDGLCFYAHNEC

SEQ ID NO: 24772 - DNA, 858 bp, Muscodor strobelii
  misc_feature: SGI EST ID NO. CUFF.58321.1
  misc_feature: Variant of the nucleotide sequence at SEQ ID NO 24770
ttctacctggagacagctcagagaaaaacgaagatgctgccaagtccgatatttcgaaggcgctacaagttgcttttgaacaaaatcgtcgaatagcatcccaagacaatactgagtttatcacggcggaacacaaatggtgcaagccgaccaatgtcccggaatacctcatacaatacgtcgatcagggtgtaattgacaaacttcctcctggaactagagttcagggaatatcacctagcggaatatcgaactgggctcgtaccgcgaagatcgaggcaaccgatgaagctggacgagcgacaaatttcttcatgaaggttcttcaatccgagcacgggagaaacatggtgtcttccgagttcaagaccatgtcgaagttgtatagtattatgcccgagcttgtggccgagcccattgcttggggtgcttactcacaaaaacctgagacgtacttcttcgtctgccgattttgcgaaatgtctggagcaataccagatctcgataagtttccaatgatgttagcagacatgcataaacgtggcgtgtcaccagacggcaagttcggtatgccgtatgtcgcgtatagtggacgcaatccgcaatatttcccgccgagtgagtcttgggagaagtgcttttcaaaaggccttggcttgatcttcgacatggaagaagagacacatggtccggacagcgagcttcaggaattgagagaagaaattatgacgaagaccatacctcgacttttgcgtcccctccaaacccatggtcgaactttgacaccttgcttggtacattccgacctttgggacggcaatactggtgttgataccagcacaggatctccgattatat

SEQ ID NO: 24773 - DNA, 933 bp, Muscodor strobelii
  misc_feature: SGI cDNA ID NO. 568450
  misc_feature: Elevated expression when VOC is produced
  misc_feature: Encodes the peptide sequence at SEQ ID NO 24774
atggcatccgtttcgccacccgtgtctgagggccaggtcgcgttctcaatcccaggcgtagagaagccgtgtcatacatggtacaaggtcataggagacatgggcactgtccctgcacttattattttgcatggcggaccaggctgcgagcacgggtacgtcgctgatctggccgctctaaacacgtcaaccggtgctccaattgtactctatgatcaagtcggctgtgggcgttcaactcgtttccgcgagaaaatgggagatgcggaattctggtccttcgatctcttctttacagagctaaacaatctcattgatcaccttgatctacgtaaaggaccgggcttcagcattctagggcacagctggggtggcactctaggaggtgcatatgcttcgacgcggccgttgggtctaaagaagctaatcatctatggagggccttgcgatattcctctctatgttaaaggtgtgaagcagtggatgacacagcttcctaccaacgttagacagacgatcgaggattgcaccaaccgaggggactatgaaaatgaagaatttgataaagctgcagctgtgtggaacgcgaaacatgtctgccgtcttgatccgtggccagaagagatcaccaagtgctttcaaaacgtgaaagcagatccgacggcatatgtcacaatacaaggaccagctgagtttgccgtcacaggctggattaagaattggagtggatggcaagaggctcacaacattgaggcggagacactactgctgaacggaaggtatgacgaggttcaggatatttcgatgtacccgtggtttgacgccattccgaaggtcaaatggatgacaatagaggatgcgagtcacataggtcatgttgaaaatagagagcgatttctagagctctgcagcgatttcctgtctcaagattga

SEQ ID NO: 24774 - protein, 310 aa, Muscodor strobelii
  misc_feature: SGI Peptide ID NO. 568450
  misc_feature (66)..(305): Pfam Id: PF00561 Pfam Desc: alpha/beta hydrolase fold
  misc_feature (7)..(307): NCBI GI: 154314339 Blast Desc: BC1G_05263 [Botryotinia fuckeliana B05.10] gi|150848908|gb|EDN24101.1| BC1G_05263 [Botryotinia fuckeliana B05.10]
  misc_feature (4)..(309): NCBI GI: 145252800 Blast Desc: An16g06070 [Aspergillus niger] gi|134083468|emb|CAK46945.1| protein product [Aspergillus niger]
  misc_feature (26)..(307): NCBI GI: 254406800 Blast Desc: proline imino-peptidase [Streptomyces sviceus ATCC 29083] gi|197716230|gb|EDY60264.1| proline imino-peptidase [Streptomyces sviceus ATCC 29083]
  misc_feature (5)..(309): NCBI GI: 259419279 Blast Desc: proline iminopeptidase [Silicibacter sp. TrichCH4B] gi|259345501|gb|EEW57355.1| proline iminopeptidase [Silicibacter sp. TrichCH4B]
  misc_feature (25)..(309): NCBI GI: 222106651 Blast Desc: hydrolases or acyltransferases (alpha/beta hydrolase superfamily) [Agrobacterium vitis S4] gi|221737830|gb|ACM38726.1| hydrolases or acyltransferases (alpha/beta hydrolase superfamily)
  misc_feature (17)..(308): NCBI GI: 260457388 Blast Desc: proline-specific peptidase [Streptomyces flavogriseus ATCC 33331] gi|260086610|gb|EEW70620.1| proline-specific peptidase [Streptomyces flavogriseus ATCC 33331]
  misc_feature (25)..(309): NCBI GI: 66047444 Blast Desc: peptidase S33, tricorn interacting factor 1 [Pseudomonas syringae pv. syringae B728a] gi|63258151|gb|AAY39247.1| Peptidase S33, tricorn interacting 1
  misc_feature (8)..(309): NCBI GI: 271501435 Blast Desc: proline-specific peptidase [Dickeya dadantii Ech586] gi|270344990|gb|ACZ77755.1| proline-specific peptidase [Dickeya dadantii Ech586]
  misc_feature (8)..(307): NCBI GI: 156036178 Blast Desc: SS1G_12775 [Sclerotinia sclerotiorum 1980] gi|154698183|gb|EDN97921.1| SS1G_12775 [Sclerotinia sclerotiorum 1980]
  misc_feature (26)..(308): NCBI GI: 282864984 Blast Desc: proline-specific peptidase [Streptomyces sp. ACTE] gi|282560409|gb|EFB65957.1| proline-specific peptidase [Streptomyces sp. ACTE]
  misc_feature (40)..(308): SWISSPROT Homolog: EC 3.4.11.5 Prolyl aminopeptidase
  misc_feature: Useful for introducing or modulating the production of volatile compounds
MASVSPPVSEGQVAFSIPGVEKPCHTWYKVIGDMGTVPALIILHGGPGCEHGYVADLAALNTSTGAPIVLYDQVGCGRSTRFREKMGDAEFWSFDLFFTELNNLIDHLDLRKGPGFSILGHSWGGTLGGAYASTRPLGLKKLIIYGGPCDIPLYVKGVKQWMTQLPTNVRQTIEDCTNRGDYENEEFDKAAAVWNAKHVCRLDPWPEEITKCFQNVKADPTAYVTIQGPAEFAVTGWIKNWSGWQEAHNIEAETLLLNGRYDEVQDISMYPWFDAIPKVKWMTIEDASHIGHVENRERFLELCSDFLSQD

SEQ ID NO: 24775 - DNA, 1276 bp, Muscodor strobelii
  misc_feature: SGI EST ID NO. CUFF.58328.0
  misc_feature: Variant of the nucleotide sequence at SEQ ID NO 24773
tatctgtcctcactttccgtctctccttgatctccagctcgagaaggtcatttttccaaaatggcatccgtttcgccacccgtgtctgagggccaggtcgcgttctcaatcccaggcgtagagaagccgtgtcatacatggtacaaggtcataggagacatgggcactgtccctgcacttattattttgcatggcggaccaggctgcgagcacgggtacgtcgctgatctggccgctctaaacacgtcaaccggtgctccaattgtactctatgatcaagtcggctgtgggcgttcaactcgtttccgcgagaaaatgggagatgcggaattctggtccttcgatctcttctttacagagctaaacaatctcattgatcaccttgatctacgtaaaggaccgggcttcagcattctagggcacagctggggtggcactctaggaggtgcatatgcttcgacgcggccgttgggtctaaagaagctaatcatctatggagggccttgcgatattcctctctatgttaaaggtgtgaagcagtggatgacacagcttcctaccaacgttagacagacgatcgaggattgcaccaaccgaggggactatgaaaatgaagaatttgataaagctgcagctgtgtggaacgcgaaacatgtctgccgtcttgatccgtggccagaagagatcaccaagtgctttcaaaacgtgaaagcagatccgacggcatatgtcacaatacaaggaccagctgagtttgccgtcacaggctggattaagaattggagtggatggcaagaggctcacaacattgaggcggagacactactgctgaacggaaggtatgacgaggttcaggatatttcgatgtacccgtggtttgacgccattccgaaggtcaaatggatgacaatagaggatgcgagtcacataggtcatgttgaaaatagagagcgatttctagagctctgcagcgatttcctgtctcaagattgagcaggggtgcgcattggaccctatccatgtcttacagatacgaacgactgaaataaagctcgctcaaactacgtagcctggtgaacgaactgaattgtagttatggaagagtttttttgaagcgggcgtttcggtgtgttgaacttttggatgtgagacggatgaaatacctaatgtggcagaggttgttggtagttcagcggcatttaaccccctgacgatccaataagaggtgggtggtaagcgctgcaagcttgtgacgcttcaacaccatacagataac

SEQ ID NO: 24776 - DNA, 261 bp, Muscodor strobelii
  misc_feature: SGI cDNA ID NO. 568451
  misc_feature: Encodes the peptide sequence at SEQ ID NO 24777
atgcgtttccacgccctcactcaaatcgctcttttgagctcgactgtccttgctattcctatagctcaggaacacgataatctcatggaatccaaaattgggggccgcaaagccacgaccctcgaccctcgcacaatcttcgtgcacgaggttggcaaatctgaagaacccaacgatcctaccatggaccgcagaaccatcttcgtccatgaagtcggcaagtccggagagtctgaggagcctaaaagttacatcatttga

SEQ ID NO: 24777 - protein, 86 aa, Muscodor strobelii
  misc_feature: SGI Peptide ID NO. 568451
MRFHALTQIALLSSTVLAIPIAQEHDNLMESKIGGRKATTLDPRTIFVHEVGKSEEPNDPTMDRRTIFVHEVGKSGESEEPKSYII

SEQ ID NO: 24778 - DNA, 1254 bp, Muscodor strobelii
  misc_feature: SGI cDNA ID NO. 568452
  misc_feature: Encodes the peptide sequence at SEQ ID NO 24779
atgtctctctctagcaagctgtcgatcactgatgttgatctcaagggcaagcgcgtcctcatccgtgtcgacttcaacgtacccctcgacgacaacaagaaggttacaaacaaccagcgcattgccggagctgtccccaccatcaagtatgccatcgacaacggtgccaaggctgttgtcctcatgtcccaccttggccgaccggacggcaaggtcaaccagaagtacagcttgaagcccgtcataccagagctcgagaagctcctaggcaagagcgtcgagtttgccccagactgcgttggctcagaagtcgaggccattgtcaacaacgcagataacggccaagttgtactcctcgagaacttgcgattccacgctgaggaggagggctcctccaaggacgccgatggaaagaaagtcaaggccgataaggccaaggtcgacgagttccgcaagggcctcactgccctcggagatgtctacgtcaacgatgctttcggtactgctcaccgcgctcactcttccatggtcggtgtcgatctccctcaaaaggccgccggtttcttgatgaagaaggagctcgactacttcgcccaggccctcgagtcccctaagcgacctttcctcgccattctcggcggctccaaggtctctgacaagatccaattgatcgacaacctcttggacaaagttaatagcctcgtcatcaccggcggtatggcattcactttcaagaagaccctcgagaacgtcaagatcggtagctcgctattcgacgaggaaggctccaaggttgttggccagctcatggacaaggccaagaagaacaatgtcaaggttactctgcctgttgactacgtgacggctaacaagtttggtgccgatgccgaggtcggcgctgccactgacaaggagggtattcctgacggctggttgggtcttgatgttggccccgagtccgttaagctatacaaggctgccatcgatgatgccaagaccatcttgtggaatggtcctgctggcgtcttcgagattgagaagttcgctagcggtaccaaggccacgctggatgctttcaccggcgcagttgccaacggtgctattggtatcatcggcggtggcgataccgccactgttgctgccaaatatggtgctgaagacaagtgctcacacgtctcgactggcggtggtgcctcccttgagctgcttgagggcaaggaacttcctggcgtaacggcactgagcacgaaatga

SEQ ID NO: 24779 - protein, 417 aa, Muscodor strobelii
  misc_feature: SGI Peptide ID NO. 568452
  misc_feature (3)..(414): Pfam Id: PF00162 Pfam Desc: Phosphoglycerate kinase
  misc_feature (1)..(417): NCBI GI: 242767930 Blast Desc: phosphoglycerate kinase PgkA, [Talaromyces stipitatus ATCC 10500] gi|218724663|gb|EED24080.1| phosphoglycerate kinase PgkA, [Talaromyces stipitatus ATCC 10500]
  misc_feature (1)..(417): NCBI GI: 170940342 Blast Desc: protein product [Podospora anserina]
  misc_feature (1)..(417): NCBI GI: 417486 Blast Desc: PGK_PENCI RecName: Full=Phosphoglycerate kinase gi|298258|gb|AAB25344.1| 3-phosphoglycerate kinase [Penicillium citrinum]
  misc_feature (1)..(417): NCBI GI: 255940110 Blast Desc: phosphoglycerate kinase pgkA-Penicillium chrysogenum [Penicillium chrysogenum Wisconsin 54-1255] gi|211585447|emb|CAP93143.1| phosphoglycerate kinase chrysogenum
  misc_feature (1)..(417): NCBI GI: 400757 Blast Desc: phosphoglycerate kinase pgkA-Penicillium chrysogenum [Penicillium chrysogenum Wisconsin 54-1255] gi|211585447|emb|CAP93143.1| phosphoglycerate kinase chrysogenum
  misc_feature (1)..(417): NCBI GI: 154295774 Blast Desc: phosphoglycerate kinase [Botryotinia fuckeliana B05.10] gi|150843923|gb|EDN19116.1| phosphoglycerate kinase [Botryotinia fuckeliana B05.10]
  misc_feature (1)..(417): NCBI GI: 256723128 Blast Desc: [Nectria haematococca mpVI 77-13-4]
  misc_feature (1)..(417): NCBI GI: 212542829 Blast Desc: phosphoglycerate kinase PgkA, [Penicillium marneffei ATCC 18224] gi|210066476|gb|EEA20569.1| phosphoglycerate kinase PgkA, [Penicillium marneffei ATCC 18224]
  misc_feature (1)..(417): NCBI GI: 156061982 Blast Desc: SS1G_01105 [Sclerotinia sclerotiorum 1980] gi|154696443|gb|EDN96181.1| SS1G_01105 [Sclerotinia sclerotiorum 1980]
  misc_feature (1)..(417): NCBI GI: 261352905 Blast Desc: phosphoglycerate kinase [Verticillium albo-atrum VaMs.102]
  misc_feature (1)..(417): SWISSPROT Homolog: EC 2.7.2.3 Phosphoglycerate kinase
MSLSSKLSITDVDLKGKRVLIRVDFNVPLDDNKKVTNNQRIAGAVPTIKYAIDNGAKAVVLMSHLGRPDGKVNQKYSLKPVIPELEKLLGKSVEFAPDCVGSEVEAIVNNADNGQVVLLENLRFHAEEEGSSKDADGKKVKADKAKVDEFRKGLTALGDVYVNDAFGTAHRAHSSMVGVDLPQKAAGFLMKKELDYFAQALESPKRPFLAILGGSKVSDKIQLIDNLLDKVNSLVITGGMAFTFKKTLENVKIGSSLFDEEGSKVVGQLMDKAKKNNVKVTLPVDYVTANKFGADAEVGAATDKEGIPDGWLGLDVGPESVKLYKAAIDDAKTILWNGPAGVFEIEKFASGTKATLDAFTGAVANGAIGIIGGGDTATVAAKYGAEDKCSHVSTGGGASLELLEGKELPGVTALSTK

SEQ ID NO: 24780 - DNA, 1698 bp, Muscodor strobelii
  misc_feature: SGI EST ID NO. CUFF.58348.0
  misc_feature: Variant of the nucleotide sequence at SEQ ID NO 24778
atcaacacttttctcacttcacatgcgtgcttttctctacctcacaccactttgtatattgctacaaatacgatctcctatcttacagaactatcgcctcttccgtgcgaattctgttgtatcgcttcccaatcgaaatattaccatttcgtccctccgatctctccgtatacaagtcaacatgtctctctctagcaagctgtcgatcactgatgttgatctcaagggcaagcgcgtcctcatccgtgtcgacttcaacgtacccctcgacgacaacaagaaggttacaaacaaccagcgcattgccggagctgtccccaccatcaagtatgccatcgacaacggtgccaaggctgttgtcctcatgtcccaccttggccgaccggacggcaaggtcaaccagaagtacagcttgaagcccgtcataccagagctcgagaagctcctaggcaagagcgtcgagtttgccccagactgcgttggctcagaagtcgaggccattgtcaacaacgcagataacggccaagttgtactcctcgagaacttgcgattccacgctgaggaggagggctcctccaaggacgccgatggaaagaaagtcaaggccgataaggccaaggtcgacgagttccgcaagggcctcactgccctcggagatgtctacgtcaacgatgctttcggtactgctcaccgcgctcactcttccatggtcggtgtcgatctccctcaaaaggccgccggtttcttgatgaagaaggagctcgactacttcgcccaggccctcgagtcccctaagcgacctttcctcgccattctcggcggctccaaggtctctgacaagatccaattgatcgacaacctcttggacaaagttaatagcctcgtcatcaccggcggtatggcattcactttcaagaagaccctcgagaacgtcaagatcggtagctcgctattcgacgaggaaggctccaaggttgttggccagctcatggacaaggccaagaagaacaatgtcaaggttactctgcctgttgactacgtgacggctaacaagtttggtgccgatgccgaggtcggcgctgccactgacaaggagggtattcctgacggctggttgggtcttgatgttggccccgagtccgttaagctatacaaggctgccatcgatgatgccaagaccatcttgtggaatggtcctgctggcgtcttcgagattgagaagttcgctagcggtaccaaggccacgctggatgctttcaccggcgcagttgccaacggtgctattggtatcatcggcggtggcgataccgccactgttgctgccaaatatggtgctgaagacaagtgctcacacgtctcgactggcggtggtgcctcccttgagctgcttgagggcaaggaacttcctggcgtaacggcactgagcacgaaatgaagggctggaacggtgcggctttgactggtaggcttcttagtctacttgatggagtcgtatctgaggtcaatgatataaattgaggatgcgaagtacgccgaggtagttgaccttgcaggacgggaattcaggggctccatcgctctagtcagggtagaccccgtctctacattactaggtcacgtataattattgactcgcttcgatttgagtagaatatcaaaataattcgaaatcgaacactcagattttcaatgcctcga

SEQ ID NO: 24781 - DNA, 819 bp, Muscodor strobelii
  misc_feature: SGI cDNA ID NO. 568453
  misc_feature: Encodes the peptide sequence at SEQ ID NO 24782
atgtcgtgggaactcactcgccgccgccttgtgagggccatcaacagcaaatacatattcgatcgcattccagttctccatgccatcatcttcttcatcgagatggccatcatcgcacgactcgcatcgcgcttcaatgcctactatgaccatcggccagtcctcaccatgatggtgaccaacgccgtcctcggtggcatcgccgacaccgtcgcccagactatcaccgccgtcaagacacggacgtcccgcaagaagacgggcgcgaaggacgacccgatatccattgagatccaggacatgagcaagaagggctggaacgacgacctcttcgccgacccccggtcccctgccacgcccttcgacttcgagcgcttgacgaggttcatggcctacggtttcgccatggcccccgtgcagttcaagtggttcggcttcttgtcccggaccttccccgtcaccaagaccagcgccttcgtccccgccctcaagcgcgtcgccgtcgatcaaatcgtcttcgccccggttagtgtcgccttgttcttctcggtcatgacgatcgctgagggcggtggacgccgggctgtgtcgctcaagctcaaggatatgtacctgcccaccctgaaggccaacttcatggtgtggcctgctgtgcagatcatcaacttccggttgatgcccatgcagttccagctgccctttgtgtctactatcggtatcgcatggacggcatatctgtcactctccaacgcatcggaagacgactcgctgtcgaaccagaacgtggctccttactctccaaacatccgcctggagtaa

SEQ ID NO: 24782 - protein, 272 aa, Muscodor strobelii
  misc_feature: SGI Peptide ID NO. 568453
  misc_feature (185)..(255): Pfam Id: PF04117 Pfam Desc: Mpv17 / PMP22 family
  misc_feature (1)..(271): NCBI GI: 39940356 Blast Desc: conserved [Magnaporthe grisea 70-15] gi|59802852|gb|AAX07641.1| [Magnaporthe grisea] gi|145010689|gb|EDJ95345.1| conserved [Magnaporthe grisea 70-15]
  misc_feature (1)..(254): NCBI GI: 256723129 Blast Desc: [Nectria haematococca mpVI 77-13-4]
  misc_feature (1)..(271): NCBI GI: 261352906 Blast Desc: vacuolar membrane protein [Verticillium albo-atrum VaMs.102]
  misc_feature (1)..(254): NCBI GI: 46116304 Blast Desc: FG03994.1 [Gibberella zeae PH-1]
  misc_feature (1)..(271): NCBI GI: 156061984 Blast Desc: SS1G_01106 [Sclerotinia sclerotiorum 1980] gi|154696444|gb|EDN96182.1| SS1G_01106 [Sclerotinia sclerotiorum 1980]
  misc_feature (1)..(271): NCBI GI: 116194964 Blast Desc: CHGG_04080 [Chaetomium globosum CBS 148.51] gi|88179993|gb|EAQ87461.1| CHGG_04080 [Chaetomium globosum CBS 148.51]
  misc_feature (1)..(271): NCBI GI: 85107726 Blast Desc: NCU07915 [Neurospora crassa OR74A] gi|28924037|gb|EAA33195.1| conserved [Neurospora crassa OR74A]
  misc_feature (1)..(254): NCBI GI: 170940343 Blast Desc: protein product [Podospora anserina]
  misc_feature (4)..(255): NCBI GI: 261194809 Blast Desc: integral membrane protein [Ajellomyces dermatitidis SLH14081] gi|239588347|gb|EEQ70990.1| integral membrane protein [Ajellomyces dermatitidis SLH14081] gi|239613375|gb|EEQ90362.1|
  misc_feature (7)..(255): NCBI GI: 115491363 Blast Desc: conserved [Aspergillus terreus NIH2624] gi|114197169|gb|EAU38869.1| conserved [Aspergillus terreus NIH2624]
MSWELTRRRLVRAINSKYIFDRIPVLHAIIFFIEMAIIARLASRFNAYYDHRPVLTMMVTNAVLGGIADTVAQTITAVKTRTSRKKTGAKDDPISIEIQDMSKKGWNDDLFADPRSPATPFDFERLTRFMAYGFAMAPVQFKWFGFLSRTFPVTKTSAFVPALKRVAVDQIVFAPVSVALFFSVMTIAEGGGRRAVSLKLKDMYLPTLKANFMVWPAVQIINFRLMPMQFQLPFVSTIGIAWTAYLSLSNASEDDSLSNQNVAPYSPNIRLE

SEQ ID NO: 24783 - DNA, 1615 bp, Muscodor strobelii
  misc_feature: SGI EST ID NO. CUFF.58351.0
  misc_feature: Variant of the nucleotide sequence at SEQ ID NO 24781
tagagttctaggtgatgttggacgtacagtagcgggcggcaaaaatagagtggcccggtgccgatcagtgacccatttcatccgtcaaccttgactcttaaatgctgagccagtaaggagggaaaagacgccctcgaggcagtgctgccttttcagacacgcaatgcaaatccgctccaacctccaacactgtcgcaatccatcatcacttttctttgccttgtcattctcgttctttcaacatctaccattttcatttaccgtcgccaaatctgtgaaacgaatctcatcgacacgaacacccctcctagtacgacgaccctgcgcacccgtatccgctgcgaccggggcttttcgcccgctaattgtcgtcatcgaagtctgaccacctgccgaaccttcgttcatactctttcctcacccttcccggcaacatgtcgtgggaactcactcgccgccgccttgtgagggccatcaacagcaaatacatattcgatcgcattccagttctccatgccatcatcttcttcatcgagatggccatcatcgcacgactcgcatcgcgcttcaatgcctactatgaccatcggccagtcctcaccatgatggtgaccaacgccgtcctcggtggcatcgccgacaccgtcgcccagactatcaccgccgtcaagacacggacgtcccgcaagaagacgggcgcgaaggacgacccgatatccattgagatccaggacatgagcaagaagggctggaacgacgacctcttcgccgacccccggtcccctgccacgcccttcgacttcgagcgcttgacgaggttcatggcctacggtttcgccatggcccccgtgcagttcaagtggttcggcttcttgtcccggaccttccccgtcaccaagaccagcgccttcgtccccgccctcaagcgcgtcgccgtcgatcaaatcgtcttcgccccggttagtgtcgccttgttcttctcggtcatgacgatcgctgagggcggtggacgccgggctgtgtcgctcaagctcaaggatatgtacctgcccaccctgaaggccaacttcatggtgtggcctgctgtgcagatcatcaacttccggttgatgcccatgcagttccagctgccctttgtgtctactatcggtatcgcatggacggcatatctgtcactctccaacgcatcggaagacgactcgctgtcgaaccagaacgtggctccttactctccaaacatccgcctggagtaaatgacttcacttttagtatatacggcactggcatgccgggacttacaattggcgaccatgctggtcgagtgtacggttgtcacattgcatttggcgtttggtggagttgtgaactgctttggtgtttgagaaagtgtcaatacgtagatagagtatgatatagtgggaaaagatgattctatgctctcatagtggcactctattttagtatgtacacgtgtatgggaatgggagtatagactccattcctagtaagttaatgcaacgctgtttgctatcatgacactttctgcaatttcgtctacgtccatgtgattcgtgccgaggatctgggcctgtacgcaacactgggcacatacgac

SEQ ID NO: 24784 - DNA, 987 bp, Muscodor strobelii
  misc_feature: SGI cDNA ID NO. 568454
  misc_feature: Elevated expression when VOC is produced
  misc_feature: Encodes the peptide sequence at SEQ ID NO 24785
atgaccggcaatttgaaacccttatcttccaggatatggccttggaccaatagaaatagctccaaagcaaaagcgatcattgaccagatcttggaagcacattcaaccttggttgatttgcccgatctacggccaagcgagactgtcaacaggacactaggaaaccttgtgtctctatgcatacagatctacgatatccatactactaaaatcgtcctcaataacccgaaagtccaaagtattctcccttcgttgcgccagatctgctcagatgcagaaagctgtctcgaacaccattgggccgtccgcatcacagaagctgaagacgaacatgaagcaactcgacgcttgcgcgactttccttactttgacaactatgaagagttggctcgtctcgaattatgtgctttgtcagctacgaacggcggcaatttacccagtcaaatcgctttcctcggtgctggccctttaccactgacgtccctgtcgattctgaagcagctgaggcacgacaagatcgacgacattcatagcttctccagtccgcctccatcgccaacgtcatcgactgatacgcaggatcctgtcgtactgaatgtcgatcgaaacaataaggcatacactgctgctaaagcgctatgcatacgacttggtgagggcggacgaggtatgaaatttgtatgtgaagatgcgggagcagtgggggaggacttgatggaatttgattctgtcttccttgctgctttagtaggcatcacacaagaggagaaggaagacatcatcattagtgtcgtcggcaagatgagcaaaggcgcgtttctcgtcattcgctctgcgtggggattgaggacttgtttataccctgaagtagatttgacgactgagaagatacaaagggtactccaggtactcgccgtcgtacacccttatgggaaggtggtgaactcggtcatcatcgctcgtgtgaaggaggccggcgagaaatga

SEQ ID NO: 24785 - protein, 328 aa, Muscodor strobelii
  misc_feature: SGI Peptide ID NO. 568454
  misc_feature (18)..(328): Pfam Id: PF03059 Pfam Desc: Nicotianamine synthase protein
  misc_feature (199)..(328): Pfam Id: PF03059 Pfam Desc: Nicotianamine synthase protein
  misc_feature (19)..(162): Pfam Id: PF03059 Pfam Desc: Nicotianamine synthase protein
  misc_feature (22)..(323): NCBI GI: 171694465 Blast Desc: protein product [Podospora anserina] gi|170947181|emb|CAP73986.1| protein product [Podospora anserina]
  misc_feature (17)..(323): NCBI GI: 116197557 Blast Desc: CHGG_06934 [Chaetomium globosum CBS 148.51] gi|88178213|gb|EAQ85681.1| CHGG_06934 [Chaetomium globosum CBS 148.51]
  misc_feature (19)..(310): NCBI GI: 85090360 Blast Desc: NCU09855 [Neurospora crassa OR74A] gi|28919737|gb|EAA29143.1| conserved [Neurospora crassa OR74A]
  misc_feature (106)..(323): NCBI GI: 27884573 Blast Desc: nicotianamine synthase [Podospora anserina]
  misc_feature (22)..(323): NCBI GI: 154294422 Blast Desc: BC1G_13731 [Botryotinia fuckeliana B05.10] gi|150844740|gb|EDN19933.1| BC1G_13731 [Botryotinia fuckeliana B05.10]
  misc_feature (17)..(323): NCBI GI: 156063220 Blast Desc: SS1G_01726 [Sclerotinia sclerotiorum 1980] gi|154697062|gb|EDN96800.1| SS1G_01726 [Sclerotinia sclerotiorum 1980]
  misc_feature (7)..(322): NCBI GI: 168060508 Blast Desc: [Physcomitrella patens subsp. patens] gi|162666250|gb|EDQ52909.1| [Physcomitrella patens subsp. patens]
  misc_feature (71)..(288): NCBI GI: 145601541 Blast Desc: MGG_01906 [Magnaporthe grisea 70-15] gi|145009597|gb|EDJ94253.1| MGG_01906 [Magnaporthe grisea 70-15]
  misc_feature (25)..(328): NCBI GI: 162458224 Blast Desc: NAS1 protein [Zea mays] gi|19911064|dbj|BAB87846.1| ZmNAS1 [Zea mays]
  misc_feature (25)..(325): NCBI GI: 162460235 Blast Desc: NAS2 protein [Zea mays] gi|20387262|dbj|BAB87847.2| ZmNAS2 [Zea mays]
  misc_feature (25)..(321): SWISSPROT Homolog: EC 2.5.1.43 Nicotianamine synthase
  misc_feature: Useful for introducing or modulating the production of volatile compounds
MTGNLKPLSSRIWPWTNRNSSKAKAIIDQILEAHSTLVDLPDLRPSETVNRTLGNLVSLCIQIYDIHTTKIVLNNPKVQSILPSLRQICSDAESCLEHHWAVRITEAEDEHEATRRLRDFPYFDNYEELARLELCALSATNGGNLPSQIAFLGAGPLPLTSLSILKQLRHDKIDDIHSFSSPPPSPTSSTDTQDPVVLNVDRNNKAYTAAKALCIRLGEGGRGMKFVCEDAGAVGEDLMEFDSVFLAALVGITQEEKEDIIISVVGKMSKGAFLVIRSAWGLRTCLYPEVDLTTEKIQRVLQVLAVVHPYGKVVNSVIIARVKEAGEK

SEQ ID NO: 24786 - DNA, 1644 bp, Muscodor strobelii
  misc_feature: SGI EST ID NO. CUFF.58412.1
  misc_feature: Variant of the nucleotide sequence at SEQ ID NO 24784
gtcggtgaggaccttgatggccgatcctgcagcaccaaacgtccaacagccaagcagaatcaagcagttagtgagcctactacccacattcacaacaaggcaaagaaaatatggaaagagaagtacatgaatgcatatggtgactgtctggtagactcagcagtggatcaaacagaggcgatgtatctaaaagcgcgaatttgttacatgccatacactttttgctcttctgttccctagaaaatcttaaagtattccgaacattagacttttgacagacccaatacttaacggtttccatacgaccgggttactattggcgggctagtaagacaagcctctgcttatagccctcaaggtagcaactactaggacaacaagcccaacaggcaccctttcgaccaaaatgaccggcaatttgaaacccttatcttccaggatatggccttggaccaatagaaatagctccaaagcaaaagcgatcattgaccagatcttggaagcacattcaaccttggttgatttgcccgatctacggccaagcgagactgtcaacaggacactaggaaaccttgtgtctctatgcatacagatctacgatatccatactactaaaatcgtcctcaataacccgaaagtccaaagtattctcccttcgttgcgccagatctgctcagatgcagaaagctgtctcgaacaccattgggccgtccgcatcacagaagctgaagacgaacatgaagcaactcgacgcttgcgcgactttccttactttgacaactatgaagagttggctcgtctcgaattatgtgctttgtcagctacgaacggcggcaatttacccagtcaaatcgctttcctcggtgctggccctttaccactgacgtccctgtcgattctgaagcagctgaggcacgacaagatcgacgacattcatagcttctccagtccgcctccatcgccaacgtcatcgactgatacgcaggatcctgtcgtactgaatgtcgatcgaaacaataaggcatacactgctgctaaagcgctatgcatacgacttggtgagggcggacgaggtatgaaatttgtatgtgaagatgcgggagcagtgggggaggacttgatggaatttgattctgtcttccttgctgctttagtaggcatcacacaagaggagaaggaagacatcatcattagtgtcgtcggcaagatgagcaaaggcgcgtttctcgtcattcgctctgcgtggggattgaggacttgtttataccctgaagtagatttgacgactgagaagatacaaagggtactccaggtactcgccgtcgtacacccttatgggaaggtggtgaactcggtcatcatcgctcgtgtgaaggaggccggcgagaaatgatcatagacgaattctgggcgaaaagggcctatcttgtgacttcgtaatattgagtcagacttgtatcgcatcgcatattatgctacatgacactacacacaacgctcgcattggtatcatcattcatatccgagtacaatacccttcggcctgggcaactcttggatcacgcaataaccgtatagctggtggcgctactgcacgaaacacactagaatctatgattctgtagattagtcaatacataccgt

SEQ ID NO: 24787 - DNA, 387 bp, Muscodor strobelii
  misc_feature: SGI cDNA ID NO. 568455
  misc_feature: Encodes the peptide sequence at SEQ ID NO 24788
atgcgcttcaccaccatcgccctcctaggctgcgtctcgctcgtctgcgccatgtccaaaacatcggacttctacctctgtgaccgtggcgacgtggagcagtactctgtctgcgacacggaatattcctttgctgtctgcgagggcaatgatctccgaatgatcggtgagtctactctctcccacttccacttccgcttccgtctctgcttccttcttggcatcaagatgatctacagaccgacccaaactatggccaactccccaaactcccatgttcactccggacctgaccactactgctgggtcaaccctgagaacgactatggtttttgcaatggcacttgtcctcctgatctgcatcacttgggtatctggaaggagtag

SEQ ID NO: 24788 - protein, 128 aa, Muscodor strobelii
  misc_feature: SGI Peptide ID NO. 568455
MRFTTIALLGCVSLVCAMSKTSDFYLCDRGDVEQYSVCDTEYSFAVCEGNDLRMIGESTLSHFHFRFRLCFLLGIKMIYRPTQTMANSPNSHVHSGPDHYCWVNPENDYGFCNGTCPPDLHHLGIWKE

SEQ ID NO: 24789 - DNA, 546 bp, Muscodor strobelii
  misc_feature: SGI cDNA ID NO. 568456
  misc_feature: Elevated expression when VOC is produced
  misc_feature: Encodes the peptide sequence at SEQ ID NO 24790
atgttgtccactactttcctccgcgcctcagtcgcagcccttctcatctccttcctctcagtcactcaagctgcaccactcgaatgcaatgtccctagatcagaggtcaccgacctggcgaatgcagtcaataagtggcgggccgacacaagcaccgtatcgcagtttctcagcacagcttcaggcctctctggctccaatctcgtcagtgcggcgaagaccgcactcgccgcggagaacgatgagcttctgcacaaagccgttatcgacaagtatctcggctcggattcggcaatccagggggcggacaacacattggttgggcaaaagaccttccagtctgttgtcgacaacttgcagaattttgtggataccggcgcttctaagactccagaggacgtcactaagctggtccaaaatacgaacgcagtccgatgtggctcagttttgcccgctattgatacgtatttcaaagttgcggctaacttcctgaacaacggtgtggcgtcgattgcagcaaggcccaacaactgccctgctcagtag

SEQ ID NO: 24790 - protein, 181 aa, Muscodor strobelii
  misc_feature: SGI Peptide ID NO. 568456
  misc_feature (38)..(178): NCBI GI: 169619201 Blast Desc: SNOG_12795 [Phaeosphaeria nodorum SN15] gi|160703770|gb|EAT79595.2| SNOG_12795 [Phaeosphaeria nodorum SN15]
  misc_feature (37)..(146): NCBI GI: 261353613 Blast Desc: [Verticillium albo-atrum VaMs.102]
  misc_feature (38)..(139): NCBI GI: 189207384 Blast Desc: [Pyrenophora tritici-repentis Pt-1C-BFP] gi|187976119|gb|EDU42745.1| [Pyrenophora tritici-repentis Pt-1C-BFP]
  misc_feature: Useful for introducing or modulating the production of volatile compounds
MLSTTFLRASVAALLISFLSVTQAAPLECNVPRSEVTDLANAVNKWRADTSTVSQFLSTASGLSGSNLVSAAKTALAAENDELLHKAVIDKYLGSDSAIQGADNTLVGQKTFQSVVDNLQNFVDTGASKTPEDVTKLVQNTNAVRCGSVLPAIDTYFKVAANFLNNGVASIAARPNNCPAQ

SEQ ID NO: 24791 - DNA, 1364 bp, Muscodor strobelii
  misc_feature: SGI EST ID NO. CUFF.58379.0
  misc_feature: Variant of the nucleotide sequence at SEQ ID NO 24789
gtgatccttcatctgaacagggatctagctagtattcgcttagtcgcgatgatgacgagccgaggggctgcttgctagaaatgccggatgtttatgtttcctgtctatttcggggcccgagctggtggtgtggtggtagaaacatttgggaatgtcgacattcactggtaaacgcatgccttgtgctttgttctttgcaatatctccattttcgcctaaagtattggcaggctcagcctcgtgtatgttcagtattgcccaatatcgatactcatgcatctattttcagcactgcgttgaccctgcaagatgggagtccgaccttctttgtccgttgagcctcattctggactccaaatggtgtatcgtgtaacacacgatcgcgctcgttgatgaagatataaagtgaaagatgcgcccagcttttggacctcatcaccagccctcatcagctatctcatctgctacagcttaccagccacttgaatcatattgactttattcaactgagatcctatcgtatcgcaaacgaaccaacatcttcactatcatcaccatgttgtccactactttcctccgcgcctcagtcgcagcccttctcatctccttcctctcagtcactcaagctgcaccactcgaatgcaatgtccctagatcagaggtcaccgacctggcgaatgcagtcaataagtggcgggccgacacaagcaccgtatcgcagtttctcagcacagcttcaggcctctctggctccaatctcgtcagtgcggcgaagaccgcactcgccgcggagaacgatgagcttctgcacaaagccgttatcgacaagtatctcggctcggattcggcaatccagggggcggacaacacattggttgggcaaaagaccttccagtctgttgtcgacaacttgcagaattttgtggataccggcgcttctaagactccagaggacgtcactaagctggtccaaaatacgaacgcagtccgatgtggctcagttttgcccgctattgatacgtatttcaaagttgcggctaacttcctgaacaacggtgtggcgtcgattgcagcaaggcccaacaactgccctgctcagtagtggcctttcaagggcagcgatgagactcggtatttattcacccagatcacggtgcccgactactgttgatatcgcttgggtgatggaacacaatatagatctagacgattcacatcggtagaatctctttctcgtttggcttgcgttgagttttcacaaattgcatctggttacttagggattaacgacattattgcattttgcgggcggtagcacattccttcatagtcgcatgaattaaatcgaaatatttttctcagat

SEQ ID NO: 24792 - DNA, 2646 bp, Muscodor strobelii
  misc_feature: SGI cDNA ID NO. 568457
  misc_feature: Encodes the peptide sequence at SEQ ID NO 24793
atgaaggctctaaatcttcaagccatgtttcatctgcgcataggtctttctcagctccaacagacgcctggagatgatgatttcgtggacgacgatgtcgcagagacgccattgctcgagttctacggaactatgaacaacaagattgtgggtgtacgatattacaatggaattgtgactccaggagaatcaatcatctgccgtcgcgaaccaagaaaccagtatgacgcaaatgctgtccgtattgacaacataatgggagaccaggttggccacttacctcgcaatctggtcaggaaacttgcaccttacttagatagagacgatgtcgtgcttgacggagttctcaacggtcacaaagggccatttgactgccccgtccggctgtatttctatggccctagtgatccctctgcacgttctacgctagagcagaagctcaaggacgacaaactcttgaaggccaccgaactcaagaacacgagaaaagaagctgaggctcagagggctattgctgatggcctgaagaatggcacgcctgctctcggtttggggtcgaccgatttgagctcgtcggcttctcaagtccttgaagacagcgaagaaacagatttccgtgcaaatccgggtgcttttgatgtccttaatatggacgaagctacactctctgcattgcccaaagccgctcaaccagatggagtcaagactaagctccttggacttgcatggcttgaatccaaagagcatccacaactcccggcccctggatctgacgatattgtgcagctatggaagcgaaaagatgcgaatcactttgaaaacttagcatcttgccatgtcacaaaccaacgacctaaacttctttctggcggcatcctaagtgacgatatgggcttgggaaagacgctgcaaacaattagcttgataatgaatggtggatttgatagtggcccaaccctcatcattgcgccgaaaggcgtcatgagcaattgggaacagcagtttgaggaacatgtgcaagctgataatttgccacgaatcttgaagtaccacggatctcccaaattcaaatcgttcaagaaggctgatttgatgaaatttgacgtcgttgtcaccagctatggcaagctaacaagcgagttcaatccatccaatccggcgaactctggtgcactgtttgacgtaagctggcgtcggatcgtgctagatgaagggcactgtatcagaaatccagcaacaaagactgcaaaagctgcttgtcatctagtcgctcaaactcgatggattttaagcggaacaccctttgtcaacaaagcaacagacttctggtcagctttgctatttctgaagatcaccggcggtatacaagaaagtggcctcttcaatgccaagatcgctcggccgcttgaagggctaatcaaggacaaaagtaacagtgctagattgaagctgcgtggggaagctcaagcactctttcaactgcttgtccaagacctgtgtcttcgccgcaagaagacaatggctttcatcaatttgaagatggtgcctaaaactgaatacgtgcataaagtccggttcacgaatctagagatgcagcgataccgaatgatgctcgtcgaggctcgtggagtcctacaacaattcctggcgaaatcctacaaagggaaagggaaaaatcggagtcgcaagactgatgacagcaaagaccaagttcagtttgccagtgtactcgaggcacttctgcgactcagacaaatgtgcgaccactggtctttgaccggaacacggatgaaagcaattttggaaaagcttgacggtcaagacattgttacactcacaccagaaagcgtccagattctgcttaatgctcttaccgaagcaattttcactaaagaggagtgcccgatctgctatgaccccattggacttcacgatccagtcatcactgcttgtaagcaccgttttggccgatcttgcattctgaatgctatcaagcagcaaaagaaatgccccatgtgtcgccaggaagtcacggaggacgatttgcttgatccccaccaaattgagaccaaggattccgagaacacagacgtggacgctgacaaggaggggcgaagctctaagacgactcaactagagatcatcgtggagaagcacttacgtgatccgaaatcaaagattgtcatattctctcagtggacttcatttcttaacatcgttcagaagattttcactgagaaaaacatcaagtgttgtcgcatcgatggcaccatggatacaaaacaccgggatcaagctgtgcaaagtctcaaagaagacccagaaacgagaatcatgcttgcaagtctacatgccgccggcgtaggtgtcaatttgacagctgctgatacgatcatattgacggattgctggtgggcgccagccattgaggaccaggcagttgaccgtgtgcatcgtattggtcaaacacgaccagtcaccgtttacaaattactagtggaaggctccgtcgagtattgtgtacttgacatccaagcggagaagcgaaagcttgttgcgctcgcgtttcaagatgaagatgacatcaagaacgagaccagcgccgtatctgacattgagcgcatactgtatgcggacgaagtctga

SEQ ID NO: 24793 - protein, 881 aa, Muscodor strobelii
  misc_feature: SGI Peptide ID NO. 568457
  misc_feature (42)..(136): Pfam Id: PF08797 Pfam Desc: HIRAN domain
  misc_feature (634)..(673): Pfam Id: PF00097 Pfam Desc: Zinc finger, C3HC4 type (RING finger)
  misc_feature (743)..(821): Pfam Id: PF00271 Pfam Desc: Helicase conserved C-terminal domain
  misc_feature (238)..(593): Pfam Id: PF00176 Pfam Desc: SNF2 family N-terminal domain
  misc_feature (289)..(450): Pfam Id: PF00176 Pfam Desc: SNF2 family N-terminal domain
  misc_feature (39)..(876): NCBI GI: 261198487 Blast Desc: SNF2 family helicase [Ajellomyces dermatitidis SLH14081] gi|239594797|gb|EEQ77378.1| SNF2 family helicase [Ajellomyces dermatitidis SLH14081]
  misc_feature (14)..(876): NCBI GI: 255956037 Blast Desc: Pc21g17740 [Penicillium chrysogenum Wisconsin 54-1255] gi|211590482|emb|CAP96671.1| Pc21g17740 [Penicillium chrysogenum Wisconsin 54-1255]
  misc_feature (14)..(880): NCBI GI: 212535616 Blast Desc: SNF2 family helicase, [Penicillium marneffei ATCC 18224] gi|210070363|gb|EEA24453.1| SNF2 family helicase, [Penicillium marneffei ATCC 18224]
  misc_feature (27)..(876): NCBI GI: 46136625 Blast Desc: FG09828.1 [Gibberella zeae PH-1]
  misc_feature (15)..(876): NCBI GI: 256726991 Blast Desc: NECHADRAFT_91099 [Nectria haematococca mpVI 77-13-4]
  misc_feature (37)..(876): NCBI GI: 164423632 Blast Desc: NCU07975 [Neurospora crassa OR74A] gi|157070175|gb|EAA33409.2| conserved [Neurospora crassa OR74A]
  misc_feature (37)..(876): NCBI GI: 118496046 Blast Desc: DNA repair and recombination protein RAD5B [Neurospora crassa]
  misc_feature (47)..(857): NCBI GI: 171688350 Blast Desc: protein product [Podospora anserina] gi|170944137|emb|CAP70247.1| protein product [Podospora anserina]
  misc_feature (37)..(857): NCBI GI: 261352386 Blast Desc: transcription termination factor 2 [Verticillium albo-atrum VaMs.102]
  misc_feature (39)..(876): NCBI GI: 240109081 Blast Desc: SNF2 family N-terminal domain containing protein [Coccidioides posadasii C735 delta SOWgp]
MKALNLQAMFHLRIGLSQLQQTPGDDDFVDDDVAETPLLEFYGTMNNKIVGVRYYNGIVTPGESIICRREPRNQYDANAVRIDNIMGDQVGHLPRNLVRKLAPYLDRDDVVLDGVLNGHKGPFDCPVRLYFYGPSDPSARSTLEQKLKDDKLLKATELKNTRKEAEAQRAIADGLKNGTPALGLGSTDLSSSASQVLEDSEETDFRANPGAFDVLNMDEATLSALPKAAQPDGVKTKLLGLAWLESKEHPQLPAPGSDDIVQLWKRKDANHFENLASCHVTNQRPKLLSGGILSDDMGLGKTLQTISLIMNGGFDSGPTLIIAPKGVMSNWEQQFEEHVQADNLPRILKYHGSPKFKSFKKADLMKFDVVVTSYGKLTSEFNPSNPANSGALFDVSWRRIVLDEGHCIRNPATKTAKAACHLVAQTRWILSGTPFVNKATDFWSALLFLKITGGIQESGLFNAKIARPLEGLIKDKSNSARLKLRGEAQALFQLLVQDLCLRRKKTMAFINLKMVPKTEYVHKVRFTNLEMQRYRMMLVEARGVLQQFLAKSYKGKGKNRSRKTDDSKDQVQFASVLEALLRLRQMCDHWSLTGTRMKAILEKLDGQDIVTLTPESVQILLNALTEAIFTKEECPICYDPIGLHDPVITACKHRFGRSCILNAIKQQKKCPMCRQEVTEDDLLDPHQIETKDSENTDVDADKEGRSSKTTQLEIIVEKHLRDPKSKIVIFSQWTSFLNIVQKIFTEKNIKCCRIDGTMDTKHRDQAVQSLKEDPETRIMLASLHAAGVGVNLTAADTIILTDCWWAPAIEDQAVDRVHRIGQTRPVTVYKLLVEGSVEYCVLDIQAEKRKLVALAFQDEDDIKNETSAVSDIERILYADEV

SEQ ID NO: 24794 - DNA, 3471 bp, Muscodor strobelii
  misc_feature: SGI EST ID NO. CUFF.58401.0
  misc_feature: Variant of the nucleotide sequence at SEQ ID NO 24792
acgcgttttttcttttttttcttttgcagtgtggcctcttcattctgtcggatacctcatgtaggtattttttgacttgtttgtgaacccaccgacctatccaaactgcactttcccactaggtgtctgattgaggcgcttcgcacggccatgacatccgccactcttccgcaatctacctagtcaatttcgacagtcaagaaaacttgcattggcgcaaaacaactctaggtatcgggaggttccctgaccatggctcctaaaaagcggactgtgtctcatgttgatctgaccgaaagtccgccaaataaagcagctcggcgtaattatgaaggctctaaatcttcaagccatgtttcatctgcgcataggtctttctcagctccaagtccgtctcagatcacaccaccttcgtcgataggatcttccagtcagctgaatcaaacccagcagacgcctggagatgatgatttcgtggacgacgatgtcgcagagacgccattgctcgagttctacggaactatgaacaacaagattgtgggtgtacgatattacaatggaattgtgactccaggagaatcaatcatctgccgtcgcgaaccaagaaaccagtatgacgcaaatgctgtccgtattgacaacataatgggagaccaggttggccacttacctcgcaatctggtcaggaaacttgcaccttacttagatagagacgatgtcgtgcttgacggagttctcaacggtcacaaagggccatttgactgccccgtccggctgtatttctatggccctagtgatccctctgcacgttctacgctagagcagaagctcaaggacgacaaactcttgaaggccaccgaactcaagaacacgagaaaagaagctgaggctcagagggctattgctgatggcctgaagaatggcacgcctgctctcggtttggggtcgaccgatttgagctcgtcggcttctcaagtccttgaagacagcgaagaaacagatttccgtgcaaatccgggtgcttttgatgtccttaatatggacgaagctacactctctgcattgcccaaagccgctcaaccagatggagtcaagactaagctccttgtatatcaacttcagggacttgcatggcttgaatccaaagagcatccacaactcccggcccctggatctgacgatattgtgcagctatggaagcgaaaagatgcgaatcactttgaaaacttagcatcttgccatgtcacaaaccaacgacctaaacttctttctggcggcatcctaagtgacgatatgggcttgggaaagacgctgcaaacaattagcttgataatgaatggtggatttgatagtggcccaaccctcatcattgcgccgaaaggcgtcatgagcaattgggaacagcagtttgaggaacatgtgcaagctgataatttgccacgaatcttgaagtaccacggatctcccaaattcaaatcgttcaagaaggctgatttgatgaaatttgacgtcgttgtcaccagctatggcaagctaacaagcgagttcaatccatccaatccggcgaactctggtgcactgtttgacgtaagctggcgtcggatcgtgctagatgaagggcactgtatcagaaatccagcaacaaagactgcaaaagctgcttgtcatctagtcgctcaaactcgatggattttaagcggaacaccctttgtcaacaaagcaacagacttctggtcagctttgctatttctgaagatcaccggcggtatacaagaaagtggcctcttcaatgccaagatcgctcggccgcttgaagggctaatcaaggacaaaagtaacagtgctagattgaagctgcgtggggaagctcaagcactctttcaactgcttgtccaagacctgtgtcttcgccgcaagaagacaatggctttcatcaatttgaagatggtgcctaaaactgaatacgtgcataaagtccggttcacgaatctagagatgcagcgataccgaatgatgctcgtcgaggctcgtggagtcctacaacaattcctggcgaaatcctacaaagggaaagggaaaaatcggagtcgcaagactgatgacagcaaagaccaagttcagtttgccagtgtactcgaggcacttctgcgactcagacaaatgtgcgaccactggtctttgaccggaacacggatgaaagcaattttggaaaagcttgacggtcaagacattgttacactcacaccagaaagcgtccagattctgcttaatgctcttaccgaagcaattttcactaaagaggagtgcccgatctgctatgaccccattggacttcacgatccagtcatcactgcttgtaagcaccgttttggccgatcttgcattctgaatgctatcaagcagcaaaagaaatgccccatgtgtcgccaggaagtcacggaggacgatttgcttgatccccaccaaattgagaccaaggattccgagaacacagacgtggacgctgacaaggaggggcgaagctctaagacgactcaactagagatcatcgtggagaagcacttacgtgatccgaaatcaaagattgtcatattctctcagtggacttcatttcttaacatcgttcagaagattttcactgagaaaaacatcaagtgttgtcgcatcgatggcaccatggatacaaaacaccgggatcaagctgtgcaaagtctcaaagaagacccagaaacgagaatcatgcttgcaagtctacatgccgccggcgtaggtgtcaatttgacagctgctgatacgatcatattgacggattgctggtgggcgccagccattgaggaccaggcagttgaccgtgtgcatcgtattggtcaaacacgaccagtcaccgtttacaaattactagtggaaggctccgtcgagtattgtgtacttgacatccaagcggagaagcgaaagcttgttgcgctcgcgtttcaagatgaagatgacatcaagaacgagaccagcgccgtatctgacattgagcgcatactgtatgcggacgaagtctgaactcgtgagctttgagctctacgacagacgtatgtgtaatattatgtgaacagcaaagctatcatctgctttgaggatagacacccctagagtcatatgctgcaaagcttgacagctgtaggaaaggattaggcgtacttgtgctagagggactagattcagacctcagaagagatagatgctggattccgttgcttagacagaaaggaccggagttcttgttttcataagtcacaaaaaccgacaagacgttataatcatacgatagctacaaaaaaaactacctaatcgtgaaatcacagggtttcgaaatgcacagaaaacagcagcctgttcacccgtgcatccatagatcactttgcttgttacagggatttaaagtggacaaatcaaaagtacgggcgtcaatttagctcttcg

SEQ ID NO: 24795 - DNA, 663 bp, Muscodor strobelii
  misc_feature: SGI cDNA ID NO. 568458
  misc_feature: Elevated expression when VOC is produced
  misc_feature: Encodes the peptide sequence at SEQ ID NO 24796
atgtcgttatttcgctccatgacttcgatggctcgtatgagtccctcaaggtttctcctcccggcacacgagatgcccgccgtcaccatgagtagatttcagatgcttgttggtgacatcaagaagagccttggcccatccggtctgacctcagacaaagtcaacgtccaggaattgtcgatgatgatggagcgctacatatcacagcctaaggactggacacgatacgccctatccaatgaccagatgccatacaccagaaatcttgttgatgattgcaacgatcaggccaatcttctggtactggtgtggactcccggcaaaggcagccccattcacgaccatggtaatgcccactgtttaatgaagatccttcatggcaacctcactgagactcgatacgacttcccgaatggtatcgagaaacccatgcaagtcaaatcggagagaacattaaaacaaaactctgttgcctatatggctgatgagttgggtttgcatcgtgtgtcaaatcagggcgacgactttgctgtctcccttcatctatacacgccaccaaatgttgccagacaaggttgtaatattttcaaccccgagacagggaagaagacacacattgctaaatgtggtaattattctgcattcggtcaacgattagcatag

SEQ ID NO: 24796 - protein, 220 aa, Muscodor strobelii
  misc_feature: SGI Peptide ID NO. 568458
  misc_feature (30)..(199): Pfam Id: PF05995 Pfam Desc: Cysteine dioxygenase type I
  misc_feature (52)..(199): Pfam Id: PF05995 Pfam Desc: Cysteine dioxygenase type I
  misc_feature (31)..(219): NCBI GI: 261352383 Blast Desc: cysteine dioxygenase [Verticillium albo-atrum VaMs.102]
  misc_feature (28)..(219): NCBI GI: 171690926 Blast Desc: protein product [Podospora anserina] gi|170945411|emb|CAP71523.1| protein product [Podospora anserina]
  misc_feature (33)..(219): NCBI GI: 39975957 Blast Desc: MGG_06095 [Magnaporthe grisea 70-15] gi|145011613|gb|EDJ96269.1| MGG_06095 [Magnaporthe grisea 70-15]
  misc_feature (28)..(215): NCBI GI: 116195778 Blast Desc: CHGG_04487 [Chaetomium globosum CBS 148.51] gi|88180400|gb|EAQ87868.1| CHGG_04487 [Chaetomium globosum CBS 148.51]
  misc_feature (31)..(219): NCBI GI: 256726983 Blast Desc: NECHADRAFT_33014 [Nectria haematococca mpVI 77-13-4]
  misc_feature (18)..(219): NCBI GI: 164425028 Blast Desc: cysteine dioxygenase [Neurospora crassa OR74A] gi|157070760|gb|EAA33131.2| cysteine dioxygenase [Neurospora crassa OR74A]
  misc_feature (33)..(219): NCBI GI: 269115514 Blast Desc: cysteine dioxygenase [Trichophyton mentagrophytes]
  misc_feature (25)..(218): NCBI GI: 169617263 Blast Desc: SNOG_11809 [Phaeosphaeria nodorum SN15] gi|160703372|gb|EAT80853.2| SNOG_11809 [Phaeosphaeria nodorum SN15]
  misc_feature (33)..(219): NCBI GI: 238838355 Blast Desc: cysteine dioxygenase [Microsporum canis CBS 113480]
  misc_feature (33)..(220): NCBI GI: 154298942 Blast Desc: BC1G_11718 [Botryotinia fuckeliana B05.10] gi|150857623|gb|EDN32815.1| BC1G_11718 [Botryotinia fuckeliana B05.10]
  misc_feature (30)..(219): SWISSPROT Homolog: EC 1.13.11.20 Cysteine dioxygenase
  misc_feature: Useful for introducing or modulating the production of volatile compounds
MSLFRSMTSMARMSPSRFLLPAHEMPAVTMSRFQMLVGDIKKSLGPSGLTSDKVNVQELSMMMERYISQPKDWTRYALSNDQMPYTRNLVDDCNDQANLLVLVWTPGKGSPIHDHGNAHCLMKILHGNLTETRYDFPNGIEKPMQVKSERTLKQNSVAYMADELGLHRVSNQGDDFAVSLHLYTPPNVARQGCNIFNPETGKKTHIAKCGNYSAFGQRLA

SEQ ID NO: 24797 - DNA, 2678 bp, Muscodor strobelii
  misc_feature: SGI EST ID NO. CUFF.58621.2
  misc_feature: Variant of the nucleotide sequence at SEQ ID NO 24795
gcacaattcaaaatatatttaattaaatatcaattaatctggtactgatgagacgagagtatagtagatttccgcctcgttcttgtcaaacggcaaagcagtggcatgttcgccgacatcgctccaagcatagggacgcactgtggttccttgcagcttggccctcttggcggactcacctactgtcctgaaggatacgaatacttacctaccaacataatctgacaatacgttctgtctcgattgcgtgattttggcataaatgaaaacagactctgtttatacttcgaaatgagcgtcttggttgtctcccatgttgaatcacattctcacgaatggaatagtaagatacgtttcgagtggtgttctcacctcttacctggattgccagtacgtatgcggcttacgcaggttagctagggtcgccacctaccttatctttcgtaatccgcaagttgcaggccggcaacttccccgcctgtttccggcgctcctctgtgcgtttaataaacaccgatatctaacacaacaacggtcttcaaagaatagtaatcctgatagagtgagaatcctgtaaagctcgcaattgagctcgtaaaatgacgtattttctgccgtcagcagcaaaatgaccaattctgtatcctctggatgtcggcgtgcggcgtaagggatgtcggcaaggatgtcgggcaacacccaatcgcgaaatgacccacttatttccacgggtcttccatgggcaatgcagtttcatagcctgctcccaaaaatacttgctatcgaagtattgattggaatgagagctttggattgtcggattctggcccgttgctggtacccaggcggggttcttcgtaaaatccggtaggtaagaggggcgctagtgccaatcccaatatcgtcgaacaatcaaagaaaagggacagtcatgtatgcccactgtcgggctagtcgacaatctgacgaagcccaattaagagtgtccgcacctagccatccaggtcatcccctcaccgaaggcaaaatgactctgaattgtcctttcttcatgtgttcacatgcaatccaaatccgcccggaatattcgaggatgttcctgtatatccgcggtataattcgaagtctcaattgcttgtcgattgccatacttgaaacaaatgttgtgatttgtttggagttctctggggtgttgtgtcgaagattgtgctgattgtgctatcggctaacatccttgtcatccgagcgcctgctgtcaatgtgagctcaccaagaagctccgccgcagatgtatgtgggtggcaggtacctcttagtaacaccgactattaaggaaccagtcatctgattcaatagtgaaggatatggattgcacccgccatttgtgaaaagcggacccggttcattgtcttgatcaaaaccttcacccaacagatcttcataccgccattctcccatctcgttccaaacagtatacagagactgcaagcaacgcaaaccacaagcaacacagacagcaacaacaacgccaagcacagccgtaaagatgtcgttatttcgctccatgacttcgatggctcgtatgagtccctcaaggtttctcctcccggcacacgagatgcccgccgtcaccatgagtagatttcagatgcttgttggtgacatcaagaagagccttggcccatccggtctgacctcagacaaagtcaacgtccaggaattgtcgatgatgatggagcgctacatatcacagcctaaggactggacacgatacgccctatccaatgaccagatgccatacaccagaaatcttgttgatgattgcaacgatcaggccaatcttctggtactggtgtggactcccggcaaaggcagccccattcacgaccatggtaatgcccactgtttaatgaagatccttcatggcaacctcactgagactcgatacgacttcccgaatggtatcgagaaacccatgcaagtcaaatcggagagaacattaaaacaaaactctgttgcctatatggctgatgagttgggtttgcatcgtgtgtcaaatcagggcgacgactttgctgtctcccttcatctatacacgccaccaaatgttgccagacaaggttgtaatattttcaaccccgagacagggaagaagacacacattgctaaatgtggtaattattctgcattcggtcaacgattagcatagttcttctatttgtttctttctgggactggttagcgtgtacactttagactcagcgtttttgctttgggttagcatcaccatagagaatgcagtgatatcaagacaactcttttgcagatgcacatcttcgtgtgatgagagaacggatcgtggtttagctcgtgcgtagagcgtgcttgggcctaggataggtcatgacaatacagtcggtgtgcttgtcgaaatacagattaaagcaaccctataccctggacgcgaatgttatgaacagaagattgatgtgatagtgtgaataaggcacgtagaaaatatattaaaaaatgtaaggctcgaagtccataggatagatgacgattatttgatgcggcaaagacggggagacgatttaaagtatttaagatataataacacttcccaaagtctgccgtagtaacaaatctgcgtttgcaggaactgacgttgaaagaag

SEQ ID NO: 24798 - DNA, 405 bp, Muscodor strobelii
  misc_feature: SGI cDNA ID NO. 568459
  misc_feature: Encodes the peptide sequence at SEQ ID NO 24799
atggatagtttaacacataacctcgaaaacagtctcaatgggtgcacatcgctcctggtgctatttggatacgctatagagagagccacgccacttgacaacgtggctgccttggtctacccgcctaaaacggaacaggtccagagacgtattactttgaaatcaggtcgaagcggcctactcggagttgatgacttcgtcgtcgaccctgagtccatcgagtccacatcgatggacctacgcgacgagcaaggacttgatacattgaactgctatgttcaaaagtactcagacttctatctaggtggtgtcgacaacggcgacttatcgactctcctcgggctcgaacattcagatgatttcacacaggctgtggacgctctctgtagaggctacatagtgtag

SEQ ID NO: 24799 - protein, 134 aa, Muscodor strobelii
  misc_feature: SGI Peptide ID NO. 568459
MDSLTHNLENSLNGCTSLLVLFGYAIERATPLDNVAALVYPPKTEQVQRRITLKSGRSGLLGVDDFVVDPESIESTSMDLRDEQGLDTLNCYVQKYSDFYLGGVDNGDLSTLLGLEHSDDFTQAVDALCRGYIV

SEQ ID NO: 24800 - DNA, 903 bp, Muscodor strobelii
  misc_feature: SGI cDNA ID NO. 568460
  misc_feature: Encodes the peptide sequence at SEQ ID NO 24801
atggtcatgaagataatgaaggcaatcgggttcgaagcaacgagcaagcagtatcgctatcagttgggcgataaatggggttggaagaaatacggacaggctgggaaaccaagtaaaaattccgaagatgaacacgaagatgagaccgagactgaaagtgaaaccgaagaagacttgcagcagactatctacaagagcgatcttcttgctcgcctatcggggatatgcaaaagtgagatgaacgccaattcgtcaaatttcatggattgcgcagataaaacttatgtcacattcgtgcgcaaaatgttcgtttggtgcgaatcacaactgagaagtcgaaatgctcatgtgacttggactctcatcgatattgccaccgacgataaggttaccgatgatgacgtcaatggcaaagttctacaatggactatatatatcttcatattccttttcgaccgattagctacgactccggatgtggcctggtgccagtcagccgatcaaaacttcaaagcttgtcctgtccaattactactaaagatggccgagcttatcatatgccttgctaacagtggactccttcgaagtcttgaaacggggcggactgatgccttgttacatcaaaacacttgcatggacatcgctttagaagttgccaagcgtggaatctcatacatcgacgttacggaacgtgaggattacctagccaaaatttttgctaatgaacttcgccaaccccacgatcacaatgttgcagcaaagattgaacatgttgtgcagggatacatccgcactcgacataccaaagagaatcctatggtcgaaccagattatgtgttcgacgagaattttgcatggaatgaaaatggaataggcagcggttttgaaacttcaacttgctga

SEQ ID NO: 24801 - protein, 300 aa, Muscodor strobelii
  misc_feature: SGI Peptide ID NO. 568460
MVMKIMKAIGFEATSKQYRYQLGDKWGWKKYGQAGKPSKNSEDEHEDETETESETEEDLQQTIYKSDLLARLSGICKSEMNANSSNFMDCADKTYVTFVRKMFVWCESQLRSRNAHVTWTLIDIATDDKVTDDDVNGKVLQWTIYIFIFLFDRLATTPDVAWCQSADQNFKACPVQLLLKMAELIICLANSGLLRSLETGRTDALLHQNTCMDIALEVAKRGISYIDVTEREDYLAKIFANELRQPHDHNVAAKIEHVVQGYIRTRHTKENPMVEPDYVFDENFAWNENGIGSGFETSTC

SEQ ID NO: 24802 - DNA, 1399 bp, Muscodor strobelii
  misc_feature: SGI EST ID NO. CUFF.58410.0
  misc_feature: Variant of the nucleotide sequence at SEQ ID NO 24800
cgttggaaatgccaataccctggtccatgtcaggcattctctattgctctaagcagagcctcagatccatcttggtatattaaatacaatgcagaacaggtaggaatatgcgtatgacttgcgtaagcgccgcatctcctgagacagccacggctgagatcaacattgcttgatattactgcaacagcccttggctaagcttagtcaatctaactgctatcgctattgctataaaaatcgtctcaacatacttcctgatatcatggggagggttcgcaccggtcgcgcgacacctaattggggtccacacaaacgaactcttcggaggttatacgtcaaacaaaagaatactcttccgatggtcatgaagataatgaaggcaatcgggttcgaagcaacgagcaagcagtatcgctatcagttgggcgataaatggggttggaagaaatacggacaggctgggaaaccaagtaaaaattccgaagatgaacacgaagatgagaccgagactgaaagtgaaaccgaagaagacttgcagcagactatctacaagagcgatcttcttgctcgcctatcggggatatgcaaaagtgagatgaacgccaattcgtcaaatttcatggattgcgcagataaaacttatgtcacattcgtgcgcaaaatgttcgtttggtgcgaatcacaactgagaagtcgaaatgctcatgtgacttggactctcatcgatattgccaccgacgataaggttaccgatgatgacgtcaatggcaaagttctacaatggactatatatatcttcatattccttttcgaccgattagctacgactccggatgtggcctggtgccagtcagccgatcaaaacttcaaagcttgtcctgtccaattactactaaagatggccgagcttatcatatgccttgctaacagtggactccttcgaagtcttgaaacggggcggactgatgccttgttacatcaaaacacttgcatggacatcgctttagaagttgccaagcgtggaatctcatacatcgacgttacggaacgtgaggattacctagccaaaatttttgctaatgaacttcgccaaccccacgatcacaatgttgcagcaaagattgaacatgttgtgcagggatacatccgcactcgacataccaaagagaatcctatggtcgaaccagattatgtgttcgacgagaattttgcatggaatgaaaatggaataggcagcggttttgaaacttcaacttgctgatgggaggcgccctgagcacatgtctccatagtatttgatgagataaataccccgcttgagggcaaagttagatgtgtatatctctgtattgttgaggaaagcgaggatgagatactgaatagaattataacgtcagag

SEQ ID NO: 24803 - DNA, 354 bp, Muscodor strobelii
  misc_feature: SGI cDNA ID NO. 568461
  misc_feature: Encodes the peptide sequence at SEQ ID NO 24804
atgtcggatctcgactccgcgtggctaaaccaactcaatatcgccttggagacattcacgaacgaaacagcctccccgaaactcttcgggtggtacgctgcggtcggcgatgccacctgcagtagtctagcagaacgctggtcacatcctgccataaaggagatccagcaactgggccaatcgcggctttcaggcaacgaggcagcatctgagccttcaggcagcagctataaacaagagtacacaggcaaattggaatacccatgggacacctatgctccagatcattgggcaaatgccaaccgctgtcagaagagtccaagtgttgagatgaggtcaggcaaaagttcatag

SEQ ID NO: 24804 - protein, 117 aa, Muscodor strobelii
  misc_feature: SGI Peptide ID NO. 568461
MSDLDSAWLNQLNIALETFTNETASPKLFGWYAAVGDATCSSLAERWSHPAIKEIQQLGQSRLSGNEAASEPSGSSYKQEYTGKLEYPWDTYAPDHWANANRCQKSPSVEMRSGKSS

SEQ ID NO: 24805 - DNA, 864 bp, Muscodor strobelii
  misc_feature: SGI cDNA ID NO. 568462
  misc_feature: Encodes the peptide sequence at SEQ ID NO 24806
atggagcgagttcaccaggtcaatcctttcgccaagcgagagtctcactccaaggacagcattatcacctacaaggcgttgactatcctcacctggcttctgtccgtcgtcgtcagcttctactacaccttcaacgctccggctgatggcgtctgggagcgccgcaccatctggcaccagaataatgtttggtatactgccttccgaatgaaccacatcattgcaagcatctactggatcgttcttttcgtactccaaggtggctatattgcccatctgttctctggcgatgtcgagcgtgtcaactctgcttgcgctgttggcagtcacttcattctcaacaatctcttccacttcgccttcgtcatgctctttacccgttccctgttcggctgggcagagctcatcatcatcctcaacttcatcaacctgtcatcgctgtacttccgacacccgggatatgctcgcttcatccatctgcctgtcgtgtccggaccgttagcctggacttttgttgcgatctactggaatggtgccatcatggttaggaaccccgagaatttagttgcccgtatcttcggcaacatcttcatctggagcatcctggtctatggattgttctttgtcattgtctacaaggattacacaatgggtttcaatctttcggttctgtccgccgcgatcggtgttgcacaatttttccgccaggtcatcgcgctgcagtggatctttgcattcacaatcatggcagttcttttcgtagccacgcttgtcatcgccgtgcccgctgcaacgggaagaactggatttgccagagcagcaggagccgaacctgagagggctcctcttctagcggacgactga

SEQ ID NO: 24806 - protein, 287 aa, Muscodor strobelii
  misc_feature: SGI Peptide ID NO. 568462
  misc_feature (191)..(285): Pfam Id: PF08611 Pfam Desc: Fungal protein of function (DUF1774)
  misc_feature (1)..(286): NCBI GI: 46136189 Blast Desc: FG09610.1 [Gibberella zeae PH-1]
  misc_feature (1)..(287): NCBI GI: 171683365 Blast Desc: protein product [Podospora anserina] gi|170941642|emb|CAP67296.1| protein product [Podospora anserina]
  misc_feature (1)..(287): NCBI GI: 85108666 Blast Desc: NCU06977 [Neurospora crassa OR74A] gi|28924227|gb|EAA33381.1| conserved [Neurospora crassa OR74A]
  misc_feature (1)..(284): NCBI GI: 39951637 Blast Desc: MGG_01461 [Magnaporthe grisea 70-15] gi|145020702|gb|EDK04831.1| MGG_01461 [Magnaporthe grisea 70-15]
  misc_feature (1)..(269): NCBI GI: 116194772 Blast Desc: CHGG_03984 [Chaetomium globosum CBS 148.51] gi|88179897|gb|EAQ87365.1| CHGG_03984 [Chaetomium globosum CBS 148.51]
  misc_feature (6)..(286): NCBI GI: 154303769 Blast Desc: BC1G_08769 [Botryotinia fuckeliana B05.10] gi|150854563|gb|EDN29755.1| BC1G_08769 [Botryotinia fuckeliana B05.10]
  misc_feature (6)..(206): NCBI GI: 156049819 Blast Desc: SS1G_08617 [Sclerotinia sclerotiorum 1980] gi|154693015|gb|EDN92753.1| SS1G_08617 [Sclerotinia sclerotiorum 1980]
  misc_feature (8)..(286): NCBI GI: 255936085 Blast Desc: Pc13g06350 [Penicillium chrysogenum Wisconsin 54-1255] gi|211583689|emb|CAP91704.1| Pc13g06350 [Penicillium chrysogenum Wisconsin 54-1255]
  misc_feature (6)..(287): NCBI GI: 189194057 Blast Desc: conserved [Pyrenophora tritici-repentis Pt-1C-BFP] gi|187978931|gb|EDU45557.1| conserved [Pyrenophora tritici-repentis Pt-1C-BFP]
  misc_feature (8)..(286): NCBI GI: 212535822 Blast Desc: conserved [Penicillium marneffei ATCC 18224] gi|210070466|gb|EEA24556.1| conserved [Penicillium marneffei ATCC 18224]
MERVHQVNPFAKRESHSKDSIITYKALTILTWLLSVVVSFYYTFNAPADGVWERRTIWHQNNVWYTAFRMNHIIASIYWIVLFVLQGGYIAHLFSGDVERVNSACAVGSHFILNNLFHFAFVMLFTRSLFGWAELIIILNFINLSSLYFRHPGYARFIHLPVVSGPLAWTFVAIYWNGAIMVRNPENLVARIFGNIFIWSILVYGLFFVIVYKDYTMGFNLSVLSAAIGVAQFFRQVIALQWIFAFTIMAVLFVATLVIAVPAATGRTGFARAAGAEPERAPLLADD

SEQ ID NO: 24807 - DNA, 5920 bp, Muscodor strobelii
  misc_feature: SGI EST ID NO. CUFF.58712.1
  misc_feature: Variant of the nucleotide sequence at SEQ ID NO 24805
acaggtacctaccttctctgaattgattggcatacaatcgatccaagattgcaatttccatattttgccttccagcctaatcctctgacaccaagaccgtccaaccaaggaggatcaataacaacatcgtcgcccatcatggagcgagttcaccaggtcaatcctttcgccaagcgagagtctcactccaaggacagcattatcacctacaaggcgttgactatcctcacctggcttctgtccgtcgtcgtcagcttctactacaccttcaacgctccggctgatggcgtctgggagcgccgcaccatctggcaccagaataatgtttggtatactgccttccgaatgaaccacatcattgcaagcatctactggatcgttcttttcgtactccaaggtggctatattgcccatctgttctctggcgatgtcgagcgtgtcaactctgcttgcgctgttggcagtcacttcattctcaacaatctcttccacttcgccttcgtcatgctctttacccgttccctgttcggctgggcagagctcatcatcatcctcaacttcatcaacctgtcatcgctgtacttccgacacccgggatatgctcgcttcatccatctgcctgtcgtgtccggaccgttagcctggacttttgttgcgatctactggaatggtgccatcatggttaggaaccccgagaatttagttgcccgtatcttcggcaacatcttcatctggagcatcctggtctatggattgttctttgtcattgtctacaaggattacacaatgggtttcaatctttcggttctgtccgccgcgatcggtgttgcacaatttttccgccaggtcatcgcgctgcagtggatctttgcattcacaatcatggcagttcttttcgtagccacgcttgtcatcgccgtgcccgctgcaacgggaagaactggatttgccagagcagcaggagccgaacctgagagggctcctcttctagcggacgactgagtgacttttctagccatgaaggtctgaaggatctgcatgagaaacgacacgagcctactgttttgcttgctatggagtcacagtgtctgggtttgctaaaggagcaacattgtcaaaaacaaaattgcatgagacaaaacgcacgttatggttgcgagggctattcaataatggttccgaatgcggttgggagtgcatcggacgctgtcatccggtttgatgaatgatcaggaactgatgaagggcgttacaaaagatgtatcatatcaactcatcatgttgtgacatgatgtaagcttgacagaacgagaattttgtgcagattaagagggcagattaatgaatttggtacttcttgccttgttgatggttatatgcattgaggagtcagggttgtcaggtcacctccacaatcgataagaaacgcgcctcaattcagcacgtggttgttggatacccaggtagtactttcaactttttctcattgcaagggaacattctcgaacaggccactactaaagagacaagccatataaaatacctacaactttctctgtaccatttctcttgactacttgtaagaatgggcttaagtggcctaccatatatcattggcaatgacatttgtcacataccgcggatcaagcatattctcaaatctaccaggagaggctttcagttcgtaaataaaatacttagcaaatcagaaatcgcgaatcctagaacagccgaaatcctacagcattggcttgaaaaacaagggaataatccctatcccgccaccattttggctgaacataggtacaacagggccgcagaatttatggctggaaggtttgcggcgaaagaagcagtcatcaaagcacatcctttgcacgccataacctggagacaagtccagattgttcctgcccggggggacagttctacctcgatagacgatgatgagactggtgcaaaaccaatgtccccagggccgcttatggcactgttcggccatgacggtctcaggcctgcatccgtgagcatcagtcacgatggagaatatgcaactgcagtttgtgtggcttgccaacgaccaaaacaaccacctcgcgacatcaaaaaggatatttcggagaatcacgacttgatttcaaaagccgatgccgttagagcatccatctcgagcctcacatctaggctcatgaaacagacagatttcaaaaggctgaattcagaggacgtccaacaaatggagcggatccttgaagaactacaaagtgtgacgcaggctatggattccgatctcgagttcgatcatgaagccgatgatacttcccatacgtcggaagacatctccaaactcaccgacaaggttcgcctcctgacgtcgcaactcgaacaacagactcatcagcaagaataaacaattgcataccgcagttaagaaaaagtaatgccagactatactttcaataatggcaccctattgaaggctgccccatgcctgttttacaggcgcatatctttcggtagtgtagcagagagaactacacgaaaccgtacagattatctgcgccaacctcatacgctacattcatttccctgggtgctgcaacaatgcaactcggccaagggcagggaactagggattttcacttcaactaccaagacacagtatagaaggactgtgccgaccttgatcatggagttcttagcggcagatcaagggtgggaggccctcagaacccattcaagtctcgtcttcctattcggactacgacacgatttcttgctatgggaaagccagtccaaatttctgggagcgctgaaacactcttgagcacgcggaatatcggatgaagcgaaaacgccgatgttgtcacgcaacgagtgacatacgtctccgcgattcgcatgggtgctatgtaaggaataaaaggtagagcgaagaagtaaacgactgtatatagcttctaggggctcaggatgatccgatcgctctgcgtttggggtgaggagccaattaccgatgtatttgcaacacagtgctttatttgtaaaatatactgtatttgagtctcatgggtcacagaccatgataagagctgacgccaacaacacccatcgtggccggttggcgcaatggtagcgcgtggtcctcctacgactgtaatacagtgcgagactgaggttgcgggttcgagtcccgtgctggtcgatattgctgggtttttttgcttttatttttctttatcttcctttttggtcgattctcgatgcatttctcgtcgatcagagaatgctcatgcgtttgtgacgggtacgggaaagtgcatgtacggatgataggattgtgggccttcaatactggctccttcttgtaataatgattcgttgggaggtagctacttagacagctccttccacttcaaattccacgtccaatgtgaccgagctttaattgtgcgaccacgcaagcttcttcgcactctcaacatctatgtgacagaacgacatcctcgctcttggctctctgccgcagagctcctccaatattcccactcagctatcgagatggcgactgatagcgaatcgcccctgcggcaggtgacgcccgtgcctgtgcccgtgccggcgccggcgccagcgatgccagcgacttcgctaccgcagaagcgcgcactcgaagacgaccatgtgccgcccgtctcgtcgcccctcaaccctaacagcctcgacaccaagatgcccaagacaccggcccacgatgacgtcgcagcagctatggcccgcgacaaacccgcccgcaccaagaaggagacgctcaagaagcgcgaatccaaggctggcgccgccaccgacagctccagagccacgcccgaccccaagaccaaagacaaggacaaggataaagataaagacaaggacacaactaccagcgaggcctcgccgctgcggtacaagctggcaccgcccaagccctccgacttcgatccggcgcgcggccctgtcttcgcccaccaccatgacatcttgggcaccgaggggtctaccgtccagttcttcgagacgtctgaacatgtgtacaacaagaagagctaccactacctccactgcatcgccgaccctgcctttccctcctcattctactaccgccagaccgaacccgagccctacggcccccacatcagcttcgaggatgcctctacacacatgtacttcgaccagtccggtcgctacataaccacagacaagggctttagaatggccagagcgaatgtagctgtgcgcgaggggacctggtactgggaatgcaagatcacccgaggaatactcaacagcaaagacggcacgacgactggacgaccgagcaaccccaccgacccccaacctcatgtgcgcatgggttttgcgagacgagaggcttccctagacgcaccagtcggcttcgacgcctatagttacggcttccgcgacgccgccgggcagaaggtgcacatgtctcgaccgaaagacttcttcccgccaggtgaggacatgaaagaaggcgacgtcattggcctcgagatctgcctcccgtccgaacagctacacaagaagatcgtcaccggacaatacaaccccgccgtcgatctatacgaggaggaatcaacagtagaagctagcaatatcgtgagagaccggatacccatcagatttaaggctcatatatatttcgagaagatagactatcacactactaaagacctcgaggatctgatgaacccgggtctcacgagcggtcagccaggcatgaggcctggtgataaaccgaatcctcatcatcaagtgcccgctttgaggacgttaccaaactcatatatcaaggtctacaagaacggcgtgttaatgggcacaccattcaccgacctcctcgcatttcttccgccagcctcaaagccacagccccaagtcggcgcgcgtgagggcatggacgacggaatgctaggttactacccagcgatcagtgtattccgcggaggagccgcagaagtgaatttcgggccgaacttctggtatccaccgcccgggtacggcaataaggagaccgatgtcgagatgatggatgtcgacgaggatacggtccgcgtcggcacgccgagacagaagaaactcgagaagactaagtccatctccgagcgctatgatgagcagatcgtggaggacatcgttgcggatatcgtcgatgaggttgatttctggatgcaggatggtgcgcgggtgctcgatcgtacgggaggacgggacgagaaagctgagcccgtgggcattgcgccggcgagcgaggagatcaaggagcttgtgcaagatgattagtgaaccctgtgcagttgatctccttcgctgttttgaaaggatggatgagagcgagtgctcatgttgggacgaggttctagatacccagctgatagatcctacggaatctatggattcgtatatatgcgaaacaacagctgaaaggagaaggacgaggaatgacagtgacgtagagtgttcttaccatcttctagtcgtagtcgaatctacatcgggatctggaacttcttcggccatcgggactaccttagaacttacaaatcatgaaaatcagacaagaaggtgacaatgatgggtttcaaggatgaatgcttggagagatgatcattttagttggcgggcctgacaatttttcccaggcacgagagaagtggcactgtggcaggtcttgggagggaagggacgctgttgctgacctcacttttgaaagatgctgctccctccttcactatgggactgtactcaatgatgccgatcgaagttgcatccatcaaggttatttcataatcaacatacttcaacctggaagcctcactgtgttgtacacccgccttacatctatctgccttgattgttt

SEQ ID NO: 24808 - DNA, 585 bp, Muscodor strobelii
  misc_feature: SGI cDNA ID NO. 568463
  misc_feature: Reduced expression when VOC is produced
  misc_feature: Encodes the peptide sequence at SEQ ID NO 24809
atggctggaaggtttgcggcgaaagaagcagtcatcaaagcacatcctttgcacgccataacctggagacaagtccagattgttcctgcccggggggacagttctacctcgatagacgatgatgagactggtgcaaaaccaatgtccccagggccgcttatggcactgttcggccatgacggtctcaggcctgcatccgtgagcatcagtcacgatggagaatatgcaactgcagtttgtgtggcttgccaacgaccaaaacaaccacctcgcgacatcaaaaaggatatttcggagaatcacgacttgatttcaaaagccgatgccgttagagcatccatctcgagcctcacatctaggctcatgaaacagacagatttcaaaaggctgaattcagaggacgtccaacaaatggagcggatccttgaagaactacaaagtgtgacgcaggctatggattccgatctcgagttcgatcatgaagccgatgatacttcccatacgtcggaagacatctccaaactcaccgacaaggttcgcctcctgacgtcgcaactcgaacaacagactcatcagcaagaataa

SEQ ID NO: 24809 - protein, 194 aa, Muscodor strobelii
  misc_feature: SGI Peptide ID NO. 568463
  misc_feature (1)..(85): NCBI GI: 269837221 Blast Desc: holo-acyl-carrier-protein synthase [Sphaerobacter thermophilus DSM 20745] gi|269786484|gb|ACZ38627.1| holo-acyl-carrier-protein synthase [Sphaerobacter thermophilus
  misc_feature: Useful for introducing or modulating the production of volatile compounds
MAGRFAAKEAVIKAHPLHAITWRQVQIVPARGDSSTSIDDDETGAKPMSPGPLMALFGHDGLRPASVSISHDGEYATAVCVACQRPKQPPRDIKKDISENHDLISKADAVRASISSLTSRLMKQTDFKRLNSEDVQQMERILEELQSVTQAMDSDLEFDHEADDTSHTSEDISKLTDKVRLLTSQLEQQTHQQE

SEQ ID NO: 24810 - DNA, 5920 bp, Muscodor strobelii; identical to SEQ ID NO: 24807
  misc_feature: SGI EST ID NO. CUFF.58712.1
  misc_feature: Variant of the nucleotide sequence at SEQ ID NO 24808

SEQ ID NO: 24811 - DNA, 1782 bp, Muscodor strobelii
  misc_feature: SGI cDNA ID NO. 568464
  misc_feature: Encodes the peptide sequence at SEQ ID NO 24812
atggcgactgatagcgaatcgcccctgcggcaggtgacgcccgtgcctgtgcccgtgccggcgccggcgccagcgatgccagcgacttcgctaccgcagaagcgcgcactcgaagacgaccatgtgccgcccgtctcgtcgcccctcaaccctaacagcctcgacaccaagatgcccaagacaccggcccacgatgacgtcgcagcagctatggcccgcgacaaacccgcccgcaccaagaaggagacgctcaagaagcgcgaatccaaggctggcgccgccaccgacagctccagagccacgcccgaccccaagaccaaagacaaggacaaggataaagataaagacaaggacacaactaccagcgaggcctcgccgctgcggtacaagctggcaccgcccaagccctccgacttcgatccggcgcgcggccctgtcttcgcccaccaccatgacatcttgggcaccgaggggtctaccgtccagttcttcgagacgtctgaacatgtgtacaacaagaagagctaccactacctccactgcatcgccgaccctgcctttccctcctcattctactaccgccagaccgaacccgagccctacggcccccacatcagcttcgaggatgcctctacacacatgtacttcgaccagtccggtcgctacataaccacagacaagggctttagaatggccagagcgaatgtagctgtgcgcgaggggacctggtactgggaatgcaagatcacccgaggaatactcaacagcaaagacggcacgacgactggacgaccgagcaaccccaccgacccccaacctcatgtgcgcatgggttttgcgagacgagaggcttccctagacgcaccagtcggcttcgacgcctatagttacggcttccgcgacgccgccgggcagaaggtgcacatgtctcgaccgaaagacttcttcccgccaggtgaggacatgaaagaaggcgacgtcattggcctcgagatctgcctcccgtccgaacagctacacaagaagatcgtcaccggacaatacaaccccgccgtcgatctatacgaggaggaatcaacagtagaagctagcaatatcgtgagagaccggatacccatcagatttaaggctcatatatatttcgagaagatagactatcacactactaaagacctcgaggatctgatgaacccgggtctcacgagcggtcagccaggcatgaggcctggtgataaaccgaatcctcatcatcaagtgcccgctttgaggacgttaccaaactcatatatcaaggtctacaagaacggcgtgttaatgggcacaccattcaccgacctcctcgcatttcttccgccagcctcaaagccacagccccaagtcggcgcgcgtgagggcatggacgacggaatgctaggttactacccagcgatcagtgtattccgcggaggagccgcagaagtgaatttcgggccgaacttctggtatccaccgcccgggtacggcaataaggagaccgatgtcgagatgatggatgtcgacgaggatacggtccgcgtcggcacgccgagacagaagaaactcgagaagactaagtccatctccgagcgctatgatgagcagatcgtggaggacatcgttgcggatatcgtcgatgaggttgatttctggatgcaggatggtgcgcgggtgctcgatcgtacgggaggacgggacgagaaagctgagcccgtgggcattgcgccggcgagcgaggagatcaaggagcttgtgcaagatgattag

SEQ ID NO: 24812 - protein, 593 aa, Muscodor strobelii
  misc_feature: SGI Peptide ID NO. 568464
  misc_feature (240)..(329): Pfam Id: PF00622 Pfam Desc: SPRY domain
  misc_feature (1)..(593): NCBI GI: 116194528 Blast Desc: CHGG_03862 [Chaetomium globosum CBS 148.51] gi|88179775|gb|EAQ87243.1| CHGG_03862 [Chaetomium globosum CBS 148.51]
  misc_feature (22)..(593): NCBI GI: 256727585 Blast Desc: COMPASS complex protein [Nectria haematococca mpVI 77-13-4]
  misc_feature (1)..(593): NCBI GI: 85108729 Blast Desc: NCU06993 [Neurospora crassa OR74A] gi|28924243|gb|EAA33397.1| conserved [Neurospora crassa OR74A]
  misc_feature (22)..(593): NCBI GI: 46136097 Blast Desc: FG09564.1 [Gibberella zeae PH-1]
  misc_feature (1)..(593): NCBI GI: 154293489 Blast Desc: BC1G_13896 [Botryotinia fuckeliana B05.10] gi|150845277|gb|EDN20470.1| BC1G_13896 [Botryotinia fuckeliana B05.10]
  misc_feature (29)..(593): NCBI GI: 171683501 Blast Desc: protein product [Podospora anserina] gi|170941710|emb|CAP67364.1| protein product [Podospora anserina]
  misc_feature (1)..(593): NCBI GI: 156057203 Blast Desc: SS1G_04332 [Sclerotinia sclerotiorum 1980] gi|154702118|gb|EDO01857.1| SS1G_04332 [Sclerotinia sclerotiorum 1980]
  misc_feature (3)..(593): NCBI GI: 261353088 Blast Desc: Set1 complex component ash2 [Verticillium albo-atrum VaMs.102]
  misc_feature (37)..(571): NCBI GI: 145613702 Blast Desc: MGG_01427 [Magnaporthe grisea 70-15] gi|145020739|gb|EDK04868.1| MGG_01427 [Magnaporthe grisea 70-15]
  misc_feature (3)..(561): NCBI GI: 189207899 Blast Desc: Ash2-trithorax family protein [Pyrenophora tritici-repentis Pt-1C-BFP] gi|187976376|gb|EDU43002.1| Ash2-trithorax family protein [Pyrenophora tritici-repentis
MATDSESPLRQVTPVPVPVPAPAPAMPATSLPQKRALEDDHVPPVSSPLNPNSLDTKMPKTPAHDDVAAAMARDKPARTKKETLKKRESKAGAATDSSRATPDPKTKDKDKDKDKDKDTTTSEASPLRYKLAPPKPSDFDPARGPVFAHHHDILGTEGSTVQFFETSEHVYNKKSYHYLHCIADPAFPSSFYYRQTEPEPYGPHISFEDASTHMYFDQSGRYITTDKGFRMARANVAVREGTWYWECKITRGILNSKDGTTTGRPSNPTDPQPHVRMGFARREASLDAPVGFDAYSYGFRDAAGQKVHMSRPKDFFPPGEDMKEGDVIGLEICLPSEQLHKKIVTGQYNPAVDLYEEESTVEASNIVRDRIPIRFKAHIYFEKIDYHTTKDLEDLMNPGLTSGQPGMRPGDKPNPHHQVPALRTLPNSYIKVYKNGVLMGTPFTDLLAFLPPASKPQPQVGAREGMDDGMLGYYPAISVFRGGAAEVNFGPNFWYPPPGYGNKETDVEMMDVDEDTVRVGTPRQKKLEKTKSISERYDEQIVEDIVADIVDEVDFWMQDGARVLDRTGGRDEKAEPVGIAPASEEIKELVQDD

SEQ ID NO: 24813 - DNA, 5920 bp, Muscodor strobelii; identical to SEQ ID NO: 24807
  misc_feature: SGI EST ID NO. CUFF.58712.1
  misc_feature: Variant of the nucleotide sequence at SEQ ID NO 24811

SEQ ID NO: 24814 - DNA, 1320 bp, Muscodor strobelii
  misc_feature: SGI cDNA ID NO. 568465
  misc_feature: Reduced expression when VOC is produced
  misc_feature: Encodes the peptide sequence at SEQ ID NO 24815
atgctggaatacttcagctacaaaaaggtgaagaagaataaggaagagaaggccgaaaaggaaaaacaagagaaagacaaggaagcagctacgaaagccgccaaagatgaagcagccccttcaccatcgactcccaaaatcatctccaaaccggacgatcctaaggtctcacctgaaggcacaccgatcctcgacgacgaagatgagaagttccttgaacacctcacctccaacgatcctagtccaaatgtcaacgacgacgacgacgagggcacccctccgcccctgcctcctcgcgtcaagacgcccgtcattgacatagacagcgacgtctcctccatcgcaagcaaacaagatgaagaggccccagacaaggacaagaaaggcaaaggcaaacagaaagaaacctcgcccaagcccgcggaaaagaacaaacgcttctccttcgtaacaaacctctcccgcaacatctccctccgccgcaaacccgcagccgccggcctgcacccagacaagctcgccgttccctccgcctcagaagccaagcacgaaaaaaatgacatggccaaagtcctcgacgacctgaacctctcagcatcaaacaacaaggccttctccctatctcaagaatccgcagagatggtacggaaattcacacaagtcctcaaagacctcgtgaacggagttccgacggcctacggcgacttggtgaaattgcttgaggatagagatggactgatagcccgtaactacgagaaactgcccaagtccctcaagaaactcgttgcgcaactcccagagaaactcaccggcagcttggcaccagagttattggcggttgctgcgcagacccagggactagctgttgccgaggctgaaggcgcgacgatcaagagtgctgctaagagtttgcttacgccgtctaatctgaaggagctggttacgaaaccgggcgcggttgcggggttgttgaagggtattgttaatgcgctgaagacacgattccctgcgttcattggcacgaatgtgttgtggagtcttgcggttttcttgcttttgagtatgctttggtattgttataagaggggtagggaggttagacttgagctggaggagaaggagaggggcaaggaaaaggaaggaggggagacgaatgatgagatgattgatggtaagcctagggttgaggaactgcctgatgatccgcagctggccgcccctgaggagagtggcatggacaaggggacggggaaagagatggaggaggatgcgaagggtaaggagaaggagaaagtggttgttactgagcccgcgaagtaa

SEQ ID NO: 24815 - protein, 439 aa, Muscodor strobelii
  misc_feature: SGI Peptide ID NO. 568465
  misc_feature (1)..(371): NCBI GI: 145613700 Blast Desc: MGG_01428 [Magnaporthe grisea 70-15] gi|145020738|gb|EDK04867.1| MGG_01428 [Magnaporthe grisea 70-15]
  misc_feature (1)..(368): NCBI GI: 154293499 Blast Desc: BC1G_13900 [Botryotinia fuckeliana B05.10] gi|150845281|gb|EDN20474.1| BC1G_13900 [Botryotinia fuckeliana B05.10]
  misc_feature (57)..(409): NCBI GI: 46136095 Blast Desc: FG09563.1 [Gibberella zeae PH-1]
  misc_feature (57)..(417): NCBI GI: 256727006 Blast Desc: NECHADRAFT_91121 [Nectria haematococca mpVI 77-13-4]
  misc_feature (1)..(368): NCBI GI: 156057207 Blast Desc: SS1G_04334 [Sclerotinia sclerotiorum 1980] gi|154702120|gb|EDO01859.1| SS1G_04334 [Sclerotinia sclerotiorum 1980]
  misc_feature (1)..(347): NCBI GI: 261353089 Blast Desc: conserved [Verticillium albo-atrum VaMs.102]
  misc_feature (30)..(371): NCBI GI: 67525365 Blast Desc: AN3140.2 [Aspergillus nidulans FGSC A4] gi|40744535|gb|EAA63711.1| AN3140.2 [Aspergillus nidulans FGSC A4] gi|259485907|tpe|CBF83329.1| TPA: [Aspergillus nidulans FGSC
  misc_feature (62)..(394): NCBI GI: 145233323 Blast Desc: An02g08990 [Aspergillus niger] gi|134056962|emb|CAK44309.1| protein product [Aspergillus niger]
  misc_feature (62)..(394): NCBI GI: 119490993 Blast Desc: NFIA_064240 [Neosartorya fischeri NRRL 181] gi|119411317|gb|EAW21260.1| conserved [Neosartorya fischeri NRRL 181]
  misc_feature (177)..(387): NCBI GI: 239607106 Blast Desc: conserved [Ajellomyces dermatitidis ER-3]
  misc_feature: Useful for introducing or modulating the production of volatile compounds
MLEYFSYKKVKKNKEEKAEKEKQEKDKEAATKAAKDEAAPSPSTPKIISKPDDPKVSPEGTPILDDEDEKFLEHLTSNDPSPNVNDDDDEGTPPPLPPRVKTPVIDIDSDVSSIASKQDEEAPDKDKKGKGKQKETSPKPAEKNKRFSFVTNLSRNISLRRKPAAAGLHPDKLAVPSASEAKHEKNDMAKVLDDLNLSASNNKAFSLSQESAEMVRKFTQVLKDLVNGVPTAYGDLVKLLEDRDGLIARNYEKLPKSLKKLVAQLPEKLTGSLAPELLAVAAQTQGLAVAEAEGATIKSAAKSLLTPSNLKELVTKPGAVAGLLKGIVNALKTRFPAFIGTNVLWSLAVFLLLSMLWYCYKRGREVRLELEEKERGKEKEGGETNDEMIDGKPRVEELPDDPQLAAPEESGMDKGTGKEMEEDAKGKEKEKVVVTEPAK

SEQ ID NO: 24816 - DNA, 1732 bp, Muscodor strobelii
  misc_feature: SGI EST ID NO. CUFF.58415.0
  misc_feature: Variant of the nucleotide sequence at SEQ ID NO 24814
cagaaagccaagatagaccctcccgaagcattcgcctctccgacgtacaccacactgaatggtgtgaggtttcagtgtcgggctggaactcaacacataaatcaagtttcggtactttcaacaatttgtaatctgatttgtttcagcttctttcggctttgtcctcaccagcattagcgaactgctacatcgtacctgcactttcccgtccatcacctatcgccaaaatgctggaatacttcagctacaaaaaggtgaagaagaataaggaagagaaggccgaaaaggaaaaacaagagaaagacaaggaagcagctacgaaagccgccaaagatgaagcagccccttcaccatcgactcccaaaatcatctccaaaccggacgatcctaaggtctcacctgaaggcacaccgatcctcgacgacgaagatgagaagttccttgaacacctcacctccaacgatcctagtccaaatgtcaacgacgacgacgacgagggcacccctccgcccctgcctcctcgcgtcaagacgcccgtcattgacatagacagcgacgtctcctccatcgcaagcaaacaagatgaagaggccccagacaaggacaagaaaggcaaaggcaaacagaaagaaacctcgcccaagcccgcggaaaagaacaaacgcttctccttcgtaacaaacctctcccgcaacatctccctccgccgcaaacccgcagccgccggcctgcacccagacaagctcgccgttccctccgcctcagaagccaagcacgaaaaaaatgacatggccaaagtcctcgacgacctgaacctctcagcatcaaacaacaaggccttctccctatctcaagaatccgcagagatggtacggaaattcacacaagtcctcaaagacctcgtgaacggagttccgacggcctacggcgacttggtgaaattgcttgaggatagagatggactgatagcccgtaactacgagaaactgcccaagtccctcaagaaactcgttgcgcaactcccagagaaactcaccggcagcttggcaccagagttattggcggttgctgcgcagacccagggactagctgttgccgaggctgaaggcgcgacgatcaagagtgctgctaagagtttgcttacgccgtctaatctgaaggagctggttacgaaaccgggcgcggttgcggggttgttgaagggtattgttaatgcgctgaagacacgattccctgcgttcattggcacgaatgtgttgtggagtcttgcggttttcttgcttttgagtatgctttggtattgttataagaggggtagggaggttagacttgagctggaggagaaggagaggggcaaggaaaaggaaggaggggagacgaatgatgagatgattgatggtaagcctagggttgaggaactgcctgatgatccgcagctggccgcccctgaggagagtggcatggacaaggggacggggaaagagatggaggaggatgcgaagggtaaggagaaggagaaagtggttgttactgagcccgcgaagtaatggacatggcgctctggttggcggttatgaggacatgagtatacgtttaattgtttgataccctcctttgtgggcgctcaatctagttgagttccctgcgtttatatagtatacattgtatttccaatatccatgctaagctctgtcaatcgaggtcacctcatgagagttcgtatgaattcgcg

SEQ ID NO: 24817 - DNA, 1011 bp, Muscodor strobelii
  misc_feature: SGI cDNA ID NO. 568466
  misc_feature: Encodes the peptide sequence at SEQ ID NO 24818
atgagcagcagcgacgaagaggaacgtgaggatgtctcgagtcactatgacgactcaaaccgcgccttcctgcaggcgttcatggcgcgagggaccatgacactaaaggacgcccagccaatccttgcaagcatattcacagcgcaagagaaagaaaacaacacacccgaacaaatcacacaagaagacctggactcatacatatccgctaccagagtagcaatctcgcccttcgacctagagatccgcagcacattccatcaactcaagagagacaaagtctacgcactcgtgaacacaacctcagatcccatgacacaactagctaccctacacacagcagatgagatagcattcgtgaaaagggtcatcgacgccatgttcgagaagtacaacacgcctcgcatggaagccatatgtctagacgacatgcaagccaacaagctgcgggccccaccacctccatcaaacgacgacttagacgcaggtgaaaacgctgaagcaccgactcaagtctcaaagggtctgagatcaagcgaagtcgagaccctgatgcgctccatggtggctgagggttggttcgaacgcagccgcgacgggttttactacctcagtccaagggcactaatggagctgcgctcctggctgatcgagtcgtataatgagcctgatgccgaggatggcgagtggcaacgtgtcaagttctgcgaggcctgtaaggagatcgtgactattgggcagcggtgcagggagagggattgtcttgttaggctacatgatcactgtacagatgcgttctttaggacgaggagggagaggacgtgtcctaagtgtacgagccagtggagtgggaaacattttgttggggagagggctgttactgagacggaggcttatcagagaggaaggaggaggtctaataaaggggggcggagtagtaatgttaatgaggagattatgcaggatggtgaggacgaggacgagggtgagggtgaagatgaggatgattga

SEQ ID NO: 24818 - protein, 336 aa, Muscodor strobelii
  misc_feature: SGI Peptide ID NO. 568466
  misc_feature (18)..(212): Pfam Id: PF07574 Pfam Desc: Nse1 non-SMC component of SMC5-6 complex
  misc_feature (236)..(278): Pfam Id: PF08746 Pfam Desc: RING-like domain
  misc_feature (16)..(330): NCBI GI: 46136093 Blast Desc: FG09562.1 [Gibberella zeae PH-1]
  misc_feature (13)..(315): NCBI GI: 119474041 Blast Desc: DNA repair protein Nse1, [Neosartorya fischeri NRRL 181] gi|119407049|gb|EAW16999.1| DNA repair protein Nse1, [Neosartorya fischeri NRRL 181]
  misc_feature (15)..(319): NCBI GI: 242814868 Blast Desc: FAD dependent oxidoreductase superfamily [Talaromyces stipitatus ATCC 10500] gi|218714797|gb|EED14220.1| FAD dependent oxidoreductase superfamily [Talaromyces stipitatus ATCC 10500]
  misc_feature (11)..(276): NCBI GI: 261353090 Blast Desc: conserved [Verticillium albo-atrum VaMs.102]
  misc_feature (16)..(313): NCBI GI: 70986130 Blast Desc: DNA repair protein Nse1 [Aspergillus fumigatus Af293] gi|66846191|gb|EAL86524.1| DNA repair protein Nse1, [Aspergillus fumigatus Af293] gi|159128304|gb|EDP53419.1| DNA repair protein
  misc_feature (15)..(323): NCBI GI: 256727005 Blast Desc: NECHADRAFT_32690 [Nectria haematococca mpVI 77-13-4]
  misc_feature (16)..(318): NCBI GI: 212545188 Blast Desc: DNA repair protein Nse1, [Penicillium marneffei ATCC 18224] gi|210065717|gb|EEA19811.1| DNA repair protein Nse1, [Penicillium marneffei ATCC 18224]
  misc_feature (16)..(325): NCBI GI: 169778679 Blast Desc: [Aspergillus oryzae RIB40] gi|83772543|dbj|BAE62671.1| protein product [Aspergillus oryzae]
  misc_feature (16)..(325): NCBI GI: 238499235 Blast Desc: DNA repair protein Nse1, [Aspergillus flavus NRRL3357] gi|220692605|gb|EED48951.1| DNA repair protein Nse1, [Aspergillus flavus NRRL3357]
  misc_feature (16)..(308): NCBI GI: 240281381 Blast Desc: DNA repair protein Nse1 [Ajellomyces capsulatus H143]
MSSSDEEEREDVSSHYDDSNRAFLQAFMARGTMTLKDAQPILASIFTAQEKENNTPEQITQEDLDSYISATRVAISPFDLEIRSTFHQLKRDKVYALVNTTSDPMTQLATLHTADEIAFVKRVIDAMFEKYNTPRMEAICLDDMQANKLRAPPPPSNDDLDAGENAEAPTQVSKGLRSSEVETLMRSMVAEGWFERSRDGFYYLSPRALMELRSWLIESYNEPDAEDGEWQRVKFCEACKEIVTIGQRCRERDCLVRLHDHCTDAFFRTRRERTCPKCTSQWSGKHFVGERAVTETEAYQRGRRRSNKGGRSSNVNEEIMQDGEDEDEGEGEDEDD

SEQ ID NO: 24819 - DNA, 1377 bp, Muscodor strobelii
  misc_feature: SGI EST ID NO. CUFF.58418.0
  misc_feature: Variant of the nucleotide sequence at SEQ ID NO 24817
ttcaaatcatcaatctcactgtcaccaaagaaaaccataatcaacttcttccacaaagtcgcaacaaacgcaataatggtgattgtttcatttcaattctagagagccttcatggtaaatcgcatactttaactgtctccccacaccaaagtcaatcatgagcagcagcgacgaagaggaacgtgaggatgtctcgagtcactatgacgactcaaaccgcgccttcctgcaggcgttcatggcgcgagggaccatgacactaaaggacgcccagccaatccttgcaagcatattcacagcgcaagagaaagaaaacaacacacccgaacaaatcacacaagaagacctggactcatacatatccgctaccagagtagcaatctcgcccttcgacctagagatccgcagcacattccatcaactcaagagagacaaagtctacgcactcgtgaacacaacctcagatcccatgacacaactagctaccctacacacagcagatgagatagcattcgtgaaaagggtcatcgacgccatgttcgagaagtacaacacgcctcgcatggaagccatatgtctagacgacatgcaagccaacaagctgcgggccccaccacctccatcaaacgacgacttagacgcaggtgaaaacgctgaagcaccgactcaagtctcaaagggtctgagatcaagcgaagtcgagaccctgatgcgctccatggtggctgagggttggttcgaacgcagccgcgacgggttttactacctcagtccaagggcactaatggagctgcgctcctggctgatcgagtcgtataatgagcctgatgccgaggatggcgagtggcaacgtgtcaagttctgcgaggcctgtaaggagatcgtgactattgggcagcggtgcagggagagggattgtcttgttaggctacatgatcactgtacagatgcgttctttaggacgaggagggagaggacgtgtcctaagtgtacgagccagtggagtgggaaacattttgttggggagagggctgttactgagacggaggcttatcagagaggaaggaggaggtctaataaaggggggcggagtagtaatgttaatgaggagattatgcaggatggtgaggacgaggacgagggtgagggtgaagatgaggatgattgatgatgggatgggatttgtgtatgattagcgaggccaaagttgggatagagaacttcacaatgaagccgtaggtggactatagcccgcgatgggctgagttgatgtgagataccccggagatgggcaagccatacgcaaaataatcattacagtgacaagctactgtcggaatcaatgacacacttacctttacctgacctacatatgtc

SEQ ID NO: 24820 - DNA, 1659 bp, Muscodor strobelii
  misc_feature: SGI cDNA ID NO. 568467
  misc_feature: Encodes the peptide sequence at SEQ ID NO 24821
atggatgataatctcgatggcggttcaggtcctcccgatcctcaggatttggagatggccaacagagccatgatacttggcaagcttgttaaccaaggattcgcttggatctttgtgaccccaggtgacgaaggatacatgttttcgatcaagttcgatctagaagacgaccggatgtgcgttcctgcacctaggcatccgatctttacgaaatcagcatttcccgacgatgaggaacgctttgtatcggaagatgacattcctgaatttcttttcagtggcgaatttgagcagttagaagatctcatcttcgaagagtgcgacgacaaagatgcattgcacaacggctgcgcgacgaatcacccaggttttgcgaagatcaaatttagcgggctaataggcagaatgatctccaagaaactcgaggagtccacaggaccggtgaagttgaacaatacagattccggcaacaaatctccataccgagaagaacttccattgtcatacgcacgggcatcagagatccgacagaccaaatggcttcttaggaaaactcatctactagaccttattcactctcccgtggacggagaagtatgggtcatggcgaggaagctgagccgagagggatatttctttgagttactgccggatctttggcgccagcgactcccgatcctcgacggcggcccttattctagctacgaggacgtactaatcgtgtttaaaatggcgcagaaatttctgtccgcgcttggaaacgccccgactttccaggttttgctgaaatccaatacgaagatctatcaagccctccacgcgcaaagaacgaagcgtcaaatccgatatttccaagagcttcgagactgtggaatctcctccgacacggagtcggttgtttcggatgtggaagacgagtatccaagtgatgggaaaccaattcgcgcccgcaaatatcgcatgtcagtccggcagaaaccttgccttggttcaagatggaacgaggattgtcaacaaggaaatgatgaattctcggaggctgttcgcgaaatcggaaaggatcaggatgtcgttgtcttgcggtcaagaatgcatgacatgcatcatcttccgcctggaaaccaccagccgcagcccgacaacttccaggtggaacttctgcctggtgaacggttatcctggaatgatcagatcacttggccagaagttatttcggacgagaaaaggatccgggcacaaacggagaaaaggaatgtggacgaggaggctggtttgtggtatcggttctggtcccaaagatcatcaagcttgtcaaatgatctcctccagcagcggcagcaaaagaaaagagaagggcagaaattgatgaactcccaaggagcagatattgcaagcgattcggaaatttcagacgatgatgcggaagaagaagacttccaatatgaatatccgccaatcacacctcccgagactccgccagggcttcgcgcagcaaagatgggaaatactcttcatctctctcgtctataccaacaagttaattcccaaagccgatgtatgctaatgagattgatccacagatcaatcttgaggcaaaatccgagcaaactattgctgggcctgtgctccgattggtcgaatctgctgatgctgagttaa

SEQ ID NO: 24821 - protein, 552 aa, Muscodor strobelii
  misc_feature: SGI Peptide ID NO. 568467
MDDNLDGGSGPPDPQDLEMANRAMILGKLVNQGFAWIFVTPGDEGYMFSIKFDLEDDRMCVPAPRHPIFTKSAFPDDEERFVSEDDIPEFLFSGEFEQLEDLIFEECDDKDALHNGCATNHPGFAKIKFSGLIGRMISKKLEESTGPVKLNNTDSGNKSPYREELPLSYARASEIRQTKWLLRKTHLLDLIHSPVDGEVWVMARKLSREGYFFELLPDLWRQRLPILDGGPYSSYEDVLIVFKMAQKFLSALGNAPTFQVLLKSNTKIYQALHAQRTKRQIRYFQELRDCGISSDTESVVSDVEDEYPSDGKPIRARKYRMSVRQKPCLGSRWNEDCQQGNDEFSEAVREIGKDQDVVVLRSRMHDMHHLPPGNHQPQPDNFQVELLPGERLSWNDQITWPEVISDEKRIRAQTEKRNVDEEAGLWYRFWSQRSSSLSNDLLQQRQQKKREGQKLMNSQGADIASDSEISDDDAEEEDFQYEYPPITPPETPPGLRAAKMGNTLHLSRLYQQVNSQSRCMLMRLIHRSILRQNPSKLLLGLCSDWSNLLMLS

SEQ ID NO: 24822 - DNA, 141 bp, Muscodor strobelii
  misc_feature: SGI EST ID NO. CUFF.58421.0
  misc_feature: Variant of the nucleotide sequence at SEQ ID NO 24820
tcccgatcctcgacggcggcccttattctagctacgaggacgtactaatcgtgtttaaaatggcgcagaaatttctgtccgcgcttggaaacgccccgactttccaggttttgctgaaatccaatacgaagatctatcaag

SEQ ID NO: 24823 - DNA, 1869 bp, Muscodor strobelii
  misc_feature: SGI cDNA ID NO. 568468
  misc_feature: Encodes the peptide sequence at SEQ ID NO 24824
atgccggacaactatattttctttgcaattgcaaagatcaataatcgctttcgcccgctcgctgttgtcagttgctcgctggcttcttaccacaaagttcttgatctctgtatccgactcatcaaaatctttcaagacgagaagaatcgacctctcctccagctggaactaaatcttgcggctaacttgctcgacaagacatgggtcgcaccaaagcacgcagtggacggcaaggacttggctctcaacgacgtcggggcactgttcccattcattgccacgtgcctgttgctaggtgtctcgctcaacccgagatctggtgactctatccctacttccatgttcagttttgtgaggctacctttgatcaccgaccctttctcttcaagcccagacggtgtgtttctggacttcacggaccaatacgacggcgtcgtgattttggacgtgaccgacccatctgccgttcgctacggttttgctgtccctggaaaatggtggagatgcatgcctgatcttatggcaaatgagcccgaattcactattctcaccgcatgggagtacagtctgctccgtatcgagagttttactgcgctacgtacccagccaatcatcaacacaacaatccatcgcgcaaatgtctcccaatcagcccgactgatagatgagaagacacttgaggagatctggcctggaaaatggctgctgagaagtgatcgcggtcttccatcgaacacagatctgttcattcctgcgaagacatctcgcattgagaacataggattggtcttagagcaaaatcaaaagtttcagcgatcgaacaaagtgtggtcaccctactatgtagagaagactaataacctccttaccagctccaagaatatacagatcgttcattgtgcagcacttggcagtattggatggctctgtaatatcaatcccaccaaacggcgcgatatttcgctattctgggagactggatcaggatgggcacttacaaacaaattctccctcgtgaccttaccactgggtgatgcagaactctctcctcccgcagcattaaatggtctcgccaattggctcttctcactgcaaagccgctcgcacgcacatgatgtcgccttccaattccacagacctaggacagacttggtcgccgccaacttggtcaaatgcttcgctcttggaggaccgcacttcgagatcgtgaagccgctaccgggccaggccctacgaagggtaacagacacctttcacggcagtggccagtggctgacggctaaggcggcgcctatgaaacctggggattggactattttgatctaccaacaagtcgagaacctggaggggcttcgatctttcatcgatccgaacagacctgtcgacgtcgagattggatttctcacctgcatttcggaggatggtttacaatttcgcaccgagctgcgtaccgcaagcgagttcctagcctcaagcaacgagctagaggcagaagacggattctacagcaaagacttggctaagttactcgacgagaacgggaaggtctgtggcggaataaaagtcgcaaacatgacttatgacagaatgaactggattacagaggcgggtgtggaatatgagaaaatcgaggacgacgctgtgaagaagggtatcagcccctggcagaatcttgctgaagtcgggcatatggaaaatagaaagaagatggagaaagagaaggcagagaaggaaaagcctatggaagccaagaaaaaggaaaagcaagacgaggatgacgagctgatggatgaagagctggcaaagccgaattcacagccttttgtcggttctgacgattatgacaccgatgctactataagcgactag

SEQ ID NO: 24824 - protein, 622 aa, Muscodor strobelii
  misc_feature: SGI Peptide ID NO. 568468
  misc_feature (1)..(160): NCBI GI: 256725318 Blast Desc: expressed protein [Nectria haematococca mpVI 77-13-4]
  misc_feature (1)..(160): NCBI GI: 261361600 Blast Desc: [Verticillium albo-atrum VaMs.102]
MPDNYIFFAIAKINNRFRPLAVVSCSLASYHKVLDLCIRLIKIFQDEKNRPLLQLELNLAANLLDKTWVAPKHAVDGKDLALNDVGALFPFIATCLLLGVSLNPRSGDSIPTSMFSFVRLPLITDPFSSSPDGVFLDFTDQYDGVVILDVTDPSAVRYGFAVPGKWWRCMPDLMANEPEFTILTAWEYSLLRIESFTALRTQPIINTTIHRANVSQSARLIDEKTLEEIWPGKWLLRSDRGLPSNTDLFIPAKTSRIENIGLVLEQNQKFQRSNKVWSPYYVEKTNNLLTSSKNIQIVHCAALGSIGWLCNINPTKRRDISLFWETGSGWALTNKFSLVTLPLGDAELSPPAALNGLANWLFSLQSRSHAHDVAFQFHRPRTDLVAANLVKCFALGGPHFEIVKPLPGQALRRVTDTFHGSGQWLTAKAAPMKPGDWTILIYQQVENLEGLRSFIDPNRPVDVEIGFLTCISEDGLQFRTELRTASEFLASSNELEAEDGFYSKDLAKLLDENGKVCGGIKVANMTYDRMNWITEAGVEYEKIEDDAVKKGISPWQNLAEVGHMENRKKMEKEKAEKEKPMEAKKKEKQDEDDELMDEELAKPNSQPFVGSDDYDTDATISD

SEQ ID NO: 24825 - DNA, 1674 bp, Muscodor strobelii
  misc_feature: SGI cDNA ID NO. 568469
  misc_feature: Elevated expression when VOC is produced
  misc_feature: Encodes the peptide sequence at SEQ ID NO 24826
atggcagaagacaaggcgattgtcatcgacgaaaagacttcacatttaatacctatcactgaggcgagaccgagtcaaacaagtagtgaaattactaacgaagctccgacaccttcaacagtcccgacatctgtggaaatcccaccaaaggacgccaccgacagcgcaccgccttacagcatctatactcatcgacagaagctatctatcgttattagcgcagctcttggcgctttcttcgcatcatggtcttcacacatatacttgccagctctgagcaatgttgcagaagacctgcacaccacaatcggtaaagccaatctcagcgtcacgacgtacatgatctttcagggtgtctctcccatcttcatcggcggctttgcagatgctctgggcagacgacctatctatcttttatgcttcactctttatatcgtcatctgcataaatctcgcctcatcaagttcatatgcaactctgttggccctccgctctatccagtcaatcacgatatcatcggctcaggctttgtgccagggcgttgtggctgacatcaccactcctgcagagcgaggcaaatatgctgcgtggacaactctacccgccgtgctcgggccaagtttagggcccgtcgtcggaggcactgtcactcaatattggggttggcgaaacatattttacgtcctggccatcgctgctggactggaactcctgctcataatattttacctgcctgaaacttgtcgtaaagtcgtcgatgatgggtcaattctgcctgctaagtggaatcgtacagtgctccagctctggcaacaacgtcatcaaggtcagcagcagccccatgatgatgtcgaatctgctatcgcgcagatagaagaaccaaagccaaaggaaaagggtgcgaaactcgcgtggggcagattcctggtggcactttcacttttgaaagagaaggagctcttgcctcttttcgtatatggcgggcttcactttgcaggcttgtttgccgtcggcactgccgcgcctactttgctacacaagaagtacgactttaacagtaccaagattggacttttatatcttcctcttgcgggtggatcggttctttctggcttgataacaggcaagcttctgggatggaattacaggcgccattgtaagcgccttgggattgaaccacagaaagacagatccatggatctgtcagatttcccaatcgagagagcgcgtatagaggtcattctcccgacgttcgtgctgagccttactgcgattgcgggatggggatgggcaatcgaagaagaggttcacatcagcctcgtcgtcgtcctgattttccttcttggattaggatttagtggcgtatcacaagttttcaatgccctcattgcagatctacgtcccaacaaagcagcatcagcatcagccgcgaacaatatcattaaattcgggttaggagcggccttttctgctttcatcgagccccttatcgaagccgtcaatgctggcaaagcattttctatcgtcgcaatattttatgtcgttgtgtcaccttgcttgatcattgtccttctcaagggaatgaaatggcggaaggaggcgagagagaaggaacgacgcaaaagtgagcagaaccagcctgcagaagtagaggttaagagctctgcaaaataa

SEQ ID NO: 24826 - protein, 557 aa, Muscodor strobelii
  misc_feature: SGI Peptide ID NO. 568469
  misc_feature (74)..(490): Pfam Id: PF07690 Pfam Desc: Major Facilitator Superfamily
  misc_feature (45)..(535): NCBI GI: 256726048 Blast Desc: NECHADRAFT_43520 [Nectria haematococca mpVI 77-13-4]
  misc_feature (49)..(546): NCBI GI: 46111151 Blast Desc: FG02457.1 [Gibberella zeae PH-1]
  misc_feature (18)..(531): NCBI GI: 85089437 Blast Desc: NCU04886 [Neurospora crassa OR74A] gi|28919240|gb|EAA28715.1| [Neurospora crassa OR74A]
  misc_feature (46)..(546): NCBI GI: 255944495 Blast Desc: Pc20g04730 [Penicillium chrysogenum Wisconsin 54-1255] gi|211587750|emb|CAP85802.1| Pc20g04730 [Penicillium chrysogenum Wisconsin 54-1255]
  misc_feature (59)..(549): NCBI GI: 171682992 Blast Desc: protein product [Podospora anserina] gi|170941455|emb|CAP67107.1| protein product [Podospora anserina]
  misc_feature (3)..(546): NCBI GI: 242779265 Blast Desc: bicyclomycin resistance protein, [Talaromyces stipitatus ATCC 10500] gi|218723028|gb|EED22446.1| bicyclomycin resistance protein, [Talaromyces stipitatus ATCC 10500]
  misc_feature (23)..(538): NCBI GI: 212543579 Blast Desc: conserved [Penicillium marneffei ATCC 18224] gi|210066851|gb|EEA20944.1| conserved [Penicillium marneffei ATCC 18224]
  misc_feature (34)..(538): NCBI GI: 154304903 Blast Desc: BC1G_09037 [Botryotinia fuckeliana B05.10] gi|150853899|gb|EDN29091.1| BC1G_09037 [Botryotinia fuckeliana B05.10]
  misc_feature (59)..(548): NCBI GI: 255950382 Blast Desc: Pc22g20580 [Penicillium chrysogenum Wisconsin 54-1255] gi|211592975|emb|CAP99346.1| Pc22g20580 [Penicillium chrysogenum Wisconsin 54-1255]
  misc_feature (59)..(555): NCBI GI: 169763636 Blast Desc: [Aspergillus oryzae RIB40] gi|83770746|dbj|BAE60879.1| protein product [Aspergillus oryzae]
  misc_feature: Useful for introducing or modulating the production of volatile compounds
MAEDKAIVIDEKTSHLIPITEARPSQTSSEITNEAPTPSTVPTSVEIPPKDATDSAPPYSIYTHRQKLSIVISAALGAFFASWSSHIYLPALSNVAEDLHTTIGKANLSVTTYMIFQGVSPIFIGGFADALGRRPIYLLCFTLYIVICINLASSSSYATLLALRSIQSITISSAQALCQGVVADITTPAERGKYAAWTTLPAVLGPSLGPVVGGTVTQYWGWRNIFYVLAIAAGLELLLIIFYLPETCRKVVDDGSILPAKWNRTVLQLWQQRHQGQQQPHDDVESAIAQIEEPKPKEKGAKLAWGRFLVALSLLKEKELLPLFVYGGLHFAGLFAVGTAAPTLLHKKYDFNSTKIGLLYLPLAGGSVLSGLITGKLLGWNYRRHCKRLGIEPQKDRSMDLSDFPIERARIEVILPTFVLSLTAIAGWGWAIEEEVHISLVVVLIFLLGLGFSGVSQVFNALIADLRPNKAASASAANNIIKFGLGAAFSAFIEPLIEAVNAGKAFSIVAIFYVVVSPCLIIVLLKGMKWRKEAREKERRKSEQNQPAEVEVKSSAK

SEQ ID NO: 24827 - DNA, 2690 bp, Muscodor strobelii
  misc_feature: SGI EST ID NO. CUFF.58519.0
  misc_feature: Variant of the nucleotide sequence at SEQ ID NO 24825
cactcggctacagcctgcatacatcctccttcattccttcaatcctaggcttattttaaaaactttaagaatcgcaattccattttcagccgttctagacttgataagcgctcgttctgtgttcatcgggcgactggcagtgatccaggcatctttctggacctccattctggcgcttgatttaatcctatctttcggtccttcgccattccgtggcgtcctgcatccgagactcccgccttaggttgtccgtcatggacatcgcaagttgcacaacctacgcgatgcaattggaggactatccttaacatcaacccctgccggtactctttaagcgattggggagtagtaagaagctcgttcctcttgctacatgctaaacgacgtgttactgcaagtcggctgcccttccctaaaacgctctgtactgtatcaagccgacagacgcgcgacgtagcaatgccgctcccgtaatcctcgactattgacgccgacctcataacatgccaccgaaaggttatcggggttaggacgtacttcgacataataattttgggatggagtaggtgtggcactccctgtgtatctgtctagcctggcttctaagtacagttagataagatagaatcagaagggcagtctcttacatacagtagacctatctctttcaacgcgaaccccgtcgtcccagggaacaatatgcgcatctaaaatatccttcgcccgagcatcaccggacacaatgatgaaaaaaccatctctctacttattttagtcattagcgttgttgcattgaatttttggtttaattctgttttcttctgagaatatttgtccatatctgcaaattactgggatggtcattagttccctctcgaacaattttttctttcgagaagcaggtcagcaatggcagaagacaaggcgattgtcatcgacgaaaagacttcacatttaatacctatcactgaggcgagaccgagtcaaacaagtagtgaaattactaacgaagctccgacaccttcaacagtcccgacatctgtggaaatcccaccaaaggacgccaccgacagcgcaccgccttacagcatctatactcatcgacagaagctatctatcgttattagcgcagctcttggcgctttcttcgcatcatggtcttcacacatatacttgccagctctgagcaatgttgcagaagacctgcacaccacaatcggtaaagccaatctcagcgtcacgacgtacatgatctttcagggtgtctctcccatcttcatcggcggctttgcagatgctctgggcagacgacctatctatcttttatgcttcactctttatatcgtcatctgcataaatctcgcctcatcaagttcatatgcaactctgttggccctccgctctatccagtcaatcacgatatcatcggctcaggctttgtgccagggcgttgtggctgacatcaccactcctgcagagcgaggcaaatatgctgcgtggacaactctacccgccgtgctcgggccaagtttagggcccgtcgtcggaggcactgtcactcaatattggggttggcgaaacatattttacgtcctggccatcgctgctggactggaactcctgctcataatattttacctgcctgaaacttgtcgtaaagtcgtcgatgatgggtcaattctgcctgctaagtggaatcgtacagtgctccagctctggcaacaacgtcatcaaggtcagcagcagccccatgatgatgtcgaatctgctatcgcgcagatagaagaaccaaagccaaaggaaaagggtgcgaaactcgcgtggggcagattcctggtggcactttcacttttgaaagagaaggagctcttgcctcttttcgtatatggcgggcttcactttgcaggcttgtttgccgtcggcactgccgcgcctactttgctacacaagaagtacgactttaacagtaccaagattggacttttatatcttcctcttgcgggtggatcggttctttctggcttgataacaggcaagcttctgggatggaattacaggcgccattgtaagcgccttgggattgaaccacagaaagacagatccatggatctgtcagatttcccaatcgagagagcgcgtatagaggtcattctcccgacgttcgtgctgagccttactgcgattgcgggatggggatgggcaatcgaagaagaggttcacatcagcctcgtcgtcgtcctgattttccttcttggattaggatttagtggcgtatcacaagttttcaatgccctcattgcagatctacgtcccaacaaagcagcatcagcatcagccgcgaacaatatcattaaattcgggttaggagcggccttttctgctttcatcgagccccttatcgaagccgtcaatgctggcaaagcattttctatcgtcgcaatattttatgtcgttgtgtcaccttgcttgatcattgtccttctcaagggaatgaaatggcggaaggaggcgagagagaaggaacgacgcaaaagtgagcagaaccagcctgcagaagtagaggttaagagctctgcaaaataacaatgtgtgcctccattaaacccaagtacataggtagattttagattttctctttaatgtttagatgaatagataatctccatatacgaaccaaacttgaagcagat

SEQ ID NO: 24828 - DNA, 1314 bp, Muscodor strobelii
  misc_feature: SGI cDNA ID NO. 568470
  misc_feature: Elevated expression when VOC is produced
  misc_feature: Encodes the peptide sequence at SEQ ID NO 24829
atggatcatcatctcgatattaccgactcccgtacagggaaaacctaccaaattccgatcaataacggatacattaatgcaacggatgtcgcaaagattgttgcaccagaatcagggctcgagagcgagaccgaacaggagtcaaagcttgagcagcctctccgcataatagccaagggattcgagaacaccgcagtagtcgaatcaaatattacttacgtggatggcaagcgaggcataatccgttacagagaacacgatattcagaaactctttcacgaatacgtcttcgaagatgttatgcaccttctcatctggggcaatctaccttctcaagcagagaaggaccatgttcgtgccttacaatgtcacgccatgaaccctcccgagtctgtccgtaaagttgtcgcagcttttcctcgaaatgccgacgtattggctatgatcagcgctactatgagcgctttcgcggcaacagatgagacggtttgtgccagtcaccagacgccaaagccaatgtttcagggtctcctagacgttgctgacggcgcaatcgtgaggctcatggcataccatgcttccactgttgcactcgtatattgccacaagaacaacaaggagttcactatgcccgagtctggccgctcactcattagcaatcttctgtggatgatgggtgtttcgcaagtaaaccccaaggcggaagagtgtcttaacaaattgtggattttgtatgcggaccacgagatgaccaactcgactgctgctgttttgcacttaggatccagtctcttggatccagtcttttcggggttgggaggcattatcgcaagctatgggcccctgcatggaggtgccattttacttgcatacaatcaactagcaatgatgggcaagccagaacttgtcccagcctatgtcgaagacttgaagaggaaaaaccgtagagtctatgggtatggccatcgcatctacaagacacgagatcctcgactttccctcattgaagaactcatggacaaatatcgggatgaggtcaatgccaacccgcttgttcgcgtggcttcagctctggataaatatgccagtcaagacccttactttgttgagagaaagttgcaggcaaatgcagacctgaagggctgttttctgtacacggcgctcggctttgagcccgatatgatacttgcaatcaccggcatttctagggcagctggatgcatggctcattggcgtgaaagtttgacccagcctatgaagctctggagaccactacagcagtatactggatcacctccagaccagacaccataa

SEQ ID NO: 24829 - protein, 437 aa, Muscodor strobelii
  misc_feature: SGI Peptide ID NO. 568470
  misc_feature (60)..(424): Pfam Id: PF00285 Pfam Desc: Citrate synthase
  misc_feature (5)..(428): NCBI GI: 242779316 Blast Desc: citrate synthase, [Talaromyces stipitatus ATCC 10500] gi|218723038|gb|EED22456.1| citrate synthase, [Talaromyces stipitatus ATCC 10500]
  misc_feature (5)..(430): NCBI GI: 169785489 Blast Desc: [Aspergillus oryzae RIB40] gi|83775953|dbj|BAE66072.1| protein product [Aspergillus oryzae]
  misc_feature (141)..(434): NCBI GI: 171682988 Blast Desc: protein product [Podospora anserina] gi|170941453|emb|CAP67105.1| protein product [Podospora anserina]
  misc_feature (5)..(430): NCBI GI: 145241097 Blast Desc: An08g10920 [Aspergillus niger] gi|134077724|emb|CAK45764.1| protein product [Aspergillus niger]
  misc_feature (5)..(430): NCBI GI: 226510201 Blast Desc: LOC100274406 [Zea mays] gi|194707756|gb|ACF87962.1| [Zea mays]
  misc_feature (5)..(430): NCBI GI: 238506493 Blast Desc: citrate synthase, [Aspergillus flavus NRRL3357] gi|220689161|gb|EED45512.1| citrate synthase, [Aspergillus flavus NRRL3357]
  misc_feature (5)..(430): NCBI GI: 212537045 Blast Desc: citrate synthase, [Penicillium marneffei ATCC 18224] gi|210068420|gb|EEA22511.1| citrate synthase, [Penicillium marneffei ATCC 18224]
  misc_feature (5)..(429): NCBI GI: 145230211 Blast Desc: An01g09940 [Aspergillus niger] gi|134055531|emb|CAK37177.1| protein product [Aspergillus niger]
  misc_feature (71)..(417): NCBI GI: 156064469 Blast Desc: SS1G_00242 [Sclerotinia sclerotiorum 1980] gi|154691104|gb|EDN90842.1| SS1G_00242 [Sclerotinia sclerotiorum 1980]
  misc_feature (2)..(430): NCBI GI: 242796591 Blast Desc: citrate synthase, [Talaromyces stipitatus ATCC 10500] gi|218719419|gb|EED18839.1| citrate synthase, [Talaromyces stipitatus ATCC 10500]
  misc_feature (4)..(430): SWISSPROT Homolog: EC 2.3.3.1 Citrate (Si)-synthase
  misc_feature: Useful for introducing or modulating the production of volatile compounds
MDHHLDITDSRTGKTYQIPINNGYINATDVAKIVAPESGLESETEQESKLEQPLRIIAKGFENTAVVESNITYVDGKRGIIRYREHDIQKLFHEYVFEDVMHLLIWGNLPSQAEKDHVRALQCHAMNPPESVRKVVAAFPRNADVLAMISATMSAFAATDETVCASHQTPKPMFQGLLDVADGAIVRLMAYHASTVALVYCHKNNKEFTMPESGRSLISNLLWMMGVSQVNPKAEECLNKLWILYADHEMTNSTAAVLHLGSSLLDPVFSGLGGIIASYGPLHGGAILLAYNQLAMMGKPELVPAYVEDLKRKNRRVYGYGHRIYKTRDPRLSLIEELMDKYRDEVNANPLVRVASALDKYASQDPYFVERKLQANADLKGCFLYTALGFEPDMILAITGISRAAGCMAHWRESLTQPMKLWRPLQQYTGSPPDQTP

SEQ ID NO: 24830 - DNA, 1207 bp, Muscodor strobelii
  misc_feature: SGI EST ID NO. CUFF.58443.0
  misc_feature: Variant of the nucleotide sequence at SEQ ID NO 24828
caagacctctcagtgacagttattgattcagaattcaactcaatccacaatctcaacttgcaatggatcatcatctcgatattaccgactcccgtacagggaaaacctaccaaattccgatcaataacggatacattaatgcaacggatgtcgcaaagattgttgcaccagaatcagggctcgagagcgagaccgaacaggagtcaaagcttgagcagcctctccgcataatagccaagggattcgagaacaccgcagtagtcgaatcaaatattacttacgtggatggcaagcgaggcataatccgttacagagaacacgatattcagaaactctttcacgaatacgtcttcgaagatgttatgcaccttctcatctggggcaatctaccttctcaagcagagaaggaccatgttcgtgccttacaatgtcacgccatgaaccctcccgagtctgtccgtaaagttgtcgcagcttttcctcgaaatgccgacgtattggctatgatcagcgctactatgagcgctttcgcggcaacagatgagacggtttgtgccagtcaccagacgccaaagccaatgtttcagggtctcctagacgttgctgacggcgcaatcgtgaggctcatggcataccatgcttccactgttgcactcgtatattgccacaagaacaacaaggagttcactatgcccgagtctggccgctcactcattagcaatcttctgtggatgatgggtgtttcgcaagtaaaccccaaggcggaagagtgtcttaacaaattgtggattttgtatgcggaccacgagatgaccaactcgactgctgctgttttgcacttaggatccagtctcttggatccagtcttttcggggttgggaggcattatcgcaagctatgggcccctgcatggaggtgccattttacttgcatacaatcaactagcaatgatgggcaagccagaacttgtcccagcctatgtcgaagacttgaagaggaaaaaccgtagagtctatgggtatggccatcgcatctacaagacacgagatcctcgactttccctcattgaagaactcatggacaaatatcgggatgaggtcaatgccaacccgcttgttcgcgtggcttcagctctggataaatatgccagtcaagacccttactttgttgagagaaagttgcaggcaaatgcagacctgaagggctg

SEQ ID NO: 24831 - DNA, 924 bp, Muscodor strobelii
  misc_feature: SGI cDNA ID NO. 568471
  misc_feature: Elevated expression when VOC is produced
  misc_feature: Encodes the peptide sequence at SEQ ID NO 24832
atggctgccgccgctgtttctacgtcgggcgtaattgggatgtggaatggcacccgtgatggaaaggaagtgggttttgtcgactggtcaaacggcaagactaatgtgaacaatcccaaagaggtcaaaattgaagtggaagatataagaactctgaaccctcagccaagttttggggcagacggctatgggcttatcgaacacgagacatctcttagtactgatcaattcctccagggcaacactcctgaaggcaaaaaatttattgaagatgtatacttcaaagaagtcgctgagctagtcaaacaagtcacagggtctaaagatgtcactccctatgtgtttcgcattcgtcaaaacaacatgcgtcctggcacattctcaacagagaaattatcgcatacagcccttcctgtagctcatgttgaccgtgataggtatgttgtacagttttccaatgtcgttttcgaaattgcccctcatgtgacgggcgagaacggcctgcgtgagctgcttggagatcgagcagaagacttgatcaagaaaggcactcgctatgcgcaagtcaacgtatggagaaccattggagaaccagttcaaaaatggccgctatgctttgtcaatcaccagtcagtgcccaattggcactatgacactcacatggccaaggtatatcccgagaatgacccgcgcgtggcgatccgaggagagaaaacacatgatagcgtgttgaaacacgatcctaactataagtatcactatgtcagcaagctcgaagtcaatgaagcactagtcttttcctcttttgattccgatatcaccaaggtcatcccacatggagcattttgggacgattctagtctagaggatgcgcctatccggcgttctattgaggttcgctcatgggtcgtatttgatgattag

SEQ ID NO: 24832 - protein, 307 aa, Muscodor strobelii
  misc_feature: SGI Peptide ID NO. 568471
  misc_feature (1)..(307): NCBI GI: 171682990 Blast Desc: protein product [Podospora anserina] gi|170941454|emb|CAP67106.1| protein product [Podospora anserina]
  misc_feature (1)..(307): NCBI GI: 242779305 Blast Desc: conserved [Talaromyces stipitatus ATCC 10500] gi|218723036|gb|EED22454.1| conserved [Talaromyces stipitatus ATCC 10500]
  misc_feature (7)..(300): NCBI GI: 242779311 Blast Desc: conserved [Talaromyces stipitatus ATCC 10500] gi|218723037|gb|EED22455.1| conserved [Talaromyces stipitatus ATCC 10500]
  misc_feature (7)..(305): NCBI GI: 212537039 Blast Desc: conserved [Penicillium marneffei ATCC 18224] gi|210068417|gb|EEA22508.1| conserved [Penicillium marneffei ATCC 18224]
  misc_feature (89)..(306): NCBI GI: 169856373 Blast Desc: CC1G_08491 [Coprinopsis cinerea okayama7#130] gi|116504125|gb|EAU87020.1| CC1G_08491 [Coprinopsis cinerea okayama7#130]
  misc_feature (26)..(307): NCBI GI: 212545757 Blast Desc: conserved [Penicillium marneffei ATCC 18224] gi|210064552|gb|EEA18647.1| conserved [Penicillium marneffei ATCC 18224]
  misc_feature (44)..(307): NCBI GI: 163794579 Blast Desc: BAL199_05179 [alpha proteobacterium BAL199] gi|159180303|gb|EDP64826.1| BAL199_05179 [alpha proteobacterium BAL199]
  misc_feature (26)..(307): NCBI GI: 242801911 Blast Desc: conserved [Talaromyces stipitatus ATCC 10500] gi|218717212|gb|EED16633.1| conserved [Talaromyces stipitatus ATCC 10500]
  misc_feature (89)..(306): NCBI GI: 170103655 Blast Desc: [Laccaria bicolor S238N-H82] gi|164641923|gb|EDR06181.1| [Laccaria bicolor S238N-H82]
  misc_feature (31)..(307): NCBI GI: 115399682 Blast Desc: [Aspergillus terreus NIH2624] gi|114192286|gb|EAU33986.1| [Aspergillus terreus NIH2624]
  misc_feature: Useful for introducing or modulating the production of volatile compounds
MAAAAVSTSGVIGMWNGTRDGKEVGFVDWSNGKTNVNNPKEVKIEVEDIRTLNPQPSFGADGYGLIEHETSLSTDQFLQGNTPEGKKFIEDVYFKEVAELVKQVTGSKDVTPYVFRIRQNNMRPGTFSTEKLSHTALPVAHVDRDRYVVQFSNVVFEIAPHVTGENGLRELLGDRAEDLIKKGTRYAQVNVWRTIGEPVQKWPLCFVNHQSVPNWHYDTHMAKVYPENDPRVAIRGEKTHDSVLKHDPNYKYHYVSKLEVNEALVFSSFDSDITKVIPHGAFWDDSSLEDAPIRRSIEVRSWVVFDD

SEQ ID NO: 24833 - DNA, 938 bp, Muscodor strobelii
  misc_feature: SGI EST ID NO. CUFF.58448.0
  misc_feature: Variant of the nucleotide sequence at SEQ ID NO 24831
ccgggaactaccataatgttattgttttgtcaaaaagctaacatatgtcaatgcataagatgtgacgggcgagaacggcctgcgtgagctgcttggagatcgagcagaagacttgatcaagaaaggcactcgctatgcgcaagtcaacgtatggagaaccattggagaaccagttcaaaaatggccgctatgctttgtcaatcaccagtcagtgcccaattggcactatgacactcacatggccaaggtatatcccgagaatgacccgcgcgtggcgatccgaggagagaaaacacatgatagcgtgttgaaacacgatcctaactataagtatcactatgtcagcaagctcgaagtcaatgaagcactagtcttttcctcttttgattccgatatcaccaaggtcatcccacatggagcattttgggacgattctagtctagaggatgcgcctatccggcgttctattgaggttcgctcatgggtcgtatttgatgattagagttcatacggtatttattagctcagtcaacaaattcgcagctgtgtgaagatgagagcccaaacaaaatatgtatcacccatcgaactgtggaatattagatagtggtttaatgcgagagaagtgttttcgagggacacatatgtatccgagtatatagctagatacctactttcagtccagaaaggtttaatctaatttagcgatcacgcgcatgtcatctactctgtctacagtgtacccttggccagctgtggttgattgataagattatgatccagatagcacgatatgagatgtagtcgctatcgaagtgaatctgcaatgcagctgcatgagcagtaggctattcatcacttttattgatgttgaagatcatggtaataaatgtcagcgtatacgaagaatccgtgaaccatgatctgacatctatttg

SEQ ID NO: 24834 - DNA, 3603 bp, Muscodor strobelii
  misc_feature: SGI cDNA ID NO. 568472
  misc_feature: Encodes the peptide sequence at SEQ ID NO 24835
atggaggctgctggcgctagcagcaacggcaacggcgctggtgctgggagcaagctggctgcgaagctcatcccgcagaagctggtagccaaacggcggtggaagaaacaagcttcgaacgagagtttcggatcgatgactagtagcatcgaggaccatggccgcggacggagcccaggcgcacgcgctagacggaggcccaagtcgacatcgaccacgcaatcgagcgaggtggcagaggaagacgatgaggaggaccacggcgaaagcgtcgaagatgccgaggatgacggcgctgacttgggtactccgcgcgatgcatctcgaaatgatccccagcacgagtctcccagcagaccaggcgcgccgtcgacgcatccctcgcagatcggccatttgacgacatcatcgcccatcattcaggccgaccaccttaccgcggtccacccgctggaccagcaggacgcagccgagagccactcgcctgctctcgaccctgccctgccactgtccaccaagtcgagcaagagtgccctgcagcccccgtccgagtcgtcctcgcgccgctccaagtcgcccgccggaaggttcagagacgctttcagaggcaagaagactgctcgcgctgccaccagttccgacagtttgaaccaagaagcgagcgttgctgcgtccgaccagtctgccaaagagtcgatttcccgccgtggctccgtagctcagtcccagtctgatgctggcgcacccggagtagcgtccagtgaccgtgatcgtggtcgtcgaaagaatagcatccctcctcttgcgctgtccggccgcccgcagactcctccctcttccaacactgggccagttatcgtgaacacgccgccaacccccaccgactcgacccactcccgagactcgcccgtgaagatcaacaatcctaatgtcgttgtttcaccctcgggtaacatgatatcacatagaagagcacgatcaggttctgcagctagcattggtccaagcaagctctccaacatcgtatccgcgcctttgaccccgactcccgaaaacgccgtcccctccactcctggcggcggcggtttcttttccagtgtcctctcggctgcccagaacgccgcgacgaccctgagcacgactatcacgaacactggcatcaacactaacccgaacaggcccaaaacgagtggatccagagactctgggcccattcccaatgagagcactggtgaagccggggcatcttcagaagacttgaaagactcaactatgggtggcaaagagcctgccgttaagacgctgggcatgggcgatttgagcctcagccagttgggaattcaagaggccgggagcgtatctaccacgcctacgacttccaagttctatgatgccgagtctagagcacgatcggaatctgcgcccaccgatgtcgattcttcaactatatacggcgacggacagtcggacgatttgaccataggccgacccaagtctttatacgagcctgccaacactaccccgccgactagtgtatacgagagtggaggaggtggcgtccatcgtagctcaagcatacgaagtgccatatcgaaaagacggaaacgtgggagcaccggaggtacagcaggtacagcaaatactggaacgacgattggcgctgctatcgctgctgccaatgcctcggtagcccatccttcagccgccggtagcacgccaaagttcacagggttcgctgtcgcaagtaagaagcggaatcgggacttccacacctttttcaagagtgtaccagatgacgactatctcatcgaagactacagctgtgccctgcaacgagagatccttgctcatggaaggctctatgtctccgagggccatatttgtttcagcagcaacattctcgggtgggtaacaactctggttatcagctttgatgaggttgtctcggtagagaaacgcagcaccgcgcttgtcttcaagaacggcctcatgatctcaacgttgcacgcgaaacatgtgttcgcgagtttcgcaagtcgtgattctacgtatgatctcatcgtcaacatctggaaactagggcatccttctctccgcagttccctcaatggcgtctcgctggatgagacgggaggagataagacggagaagattgatggcggagatggaggagatggtgaaggaggaagtcagaccggtggctcagcatccgagggcgaagacagcgacgaagatgacgacgatatctatgatgaggacatggaagacgatgatattcccgatgagactcagccgacggaaatgagcactcacgaaacggacggagagaaagtcgtatccagaaaggtctcaagtggagcagccctgaacggtgctggtgacaaggctgagggtgctgcgtcttctggtccagtggatttccccggtccagttactcatgggccgacggattgtggcgatgctaatgctcatttcgaggtaccgatcggagacgatattataggggcgccattgggcaaagtttacaatctcctattcggtcccgcgtccgtcaccttcatgagcaagtggctcaccaacgaacaaaaatgcacagatctacagatggaagacaagaaaggtttgacacaagacaataaaagtcgccaatactcctacatcaaaccattgtatgctcccattggaccgaagtcgacgaagtgtatcgtcaccgaaaccatcgagaacatcgatttagaaaaagccgtgaacgttcttgtcgtaacgcagacccccgacgtcccgagcggcaatgtcttcagtgtcaaaaccaaatactgtctattctgggcagagaacaactccactcgtgtcacgatgaactgtaccatagaatggaccggcaagagctggttgaaaggacccattgagaaaggtgcaaaggacggccaagccacatattggaaagatctgtacgcaagtataaaagccagtgtgaccactcgagctcgcgctgcaacaggaaccggggcaggcaagggtaagaagaagagggccaaaggcaagctcgacggcgcttctaaggaggacgctagaggtcctgctgccacggcatcctccaaaacacaagactggggtcttttcgagcctctccatggtgtacttgggcccgtatttgacatcctcaagccagtaatgactcccaatgtcgtatatggactacttgttggactcctcgtggcgacctggtttggatttggtctcaacggccaacgaagcggcggctttggccgggacatgggattcgccggataccccgacagagcagtggcttacgaagagatctggagacgtgaagagagcgatctgtgggattggctcgaagagagagttggtctgcatggaatgaacgaaggggctctgccgatccgcaaaagggtgatggaacccaaagtggttgaagataaattgcgggaggagcgtatgaatgaaagggaaatcgaggaagcgattaagatcacggaggagaaacttaatgttcttaagtcggttattgatcggaagaaggatgggaagactgcgcagaatgggaaatcgagtgctgagggcaagacggagaggtag

SEQ ID NO: 24835 - protein, 1200 aa, Muscodor strobelii
  misc_feature: SGI Peptide ID NO. 568472
  misc_feature (587)..(654): Pfam Id: PF02893 Pfam Desc: GRAM domain
  misc_feature (1)..(1185): NCBI GI: 116194586 Blast Desc: CHGG_03891 [Chaetomium globosum CBS 148.51] gi|88179804|gb|EAQ87272.1| CHGG_03891 [Chaetomium globosum CBS 148.51]
  misc_feature (150)..(1187): NCBI GI: 171683345 Blast Desc: protein product [Podospora anserina] gi|170941632|emb|CAP67286.1| protein product [Podospora anserina]
  misc_feature (73)..(1193): NCBI GI: 256727031 Blast Desc: NECHADRAFT_66583 [Nectria haematococca mpVI 77-13-4]
  misc_feature (111)..(1180): NCBI GI: 85108750 Blast Desc: NCU06999 [Neurospora crassa OR74A] gi|28924249|gb|EAA33403.1| [Neurospora crassa OR74A]
  misc_feature (124)..(1183): NCBI GI: 154322130 Blast Desc: BC1G_01212 [Botryotinia fuckeliana B05.10] gi|150850459|gb|EDN25652.1| BC1G_01212 [Botryotinia fuckeliana B05.10]
  misc_feature (118)..(1180): NCBI GI: 145613694 Blast Desc: MGG_11211 [Magnaporthe grisea 70-15] gi|145020730|gb|EDK04859.1| MGG_11211 [Magnaporthe grisea 70-15]
  misc_feature (110)..(1183): NCBI GI: 156060867 Blast Desc: SS1G_02576 [Sclerotinia sclerotiorum 1980] gi|154699980|gb|EDN99718.1| SS1G_02576 [Sclerotinia sclerotiorum 1980]
  misc_feature (290)..(1182): NCBI GI: 169619567 Blast Desc: SNOG_12982 [Phaeosphaeria nodorum SN15] gi|160703855|gb|EAT79782.2| SNOG_12982 [Phaeosphaeria nodorum SN15]
  misc_feature (367)..(1102): NCBI GI: 261352491 Blast Desc: GRAM domain-containing protein [Verticillium albo-atrum VaMs.102]
  misc_feature (278)..(1183): NCBI GI: 154283821 Blast Desc: conserved [Ajellomyces capsulatus NAm1] gi|150410886|gb|EDN06274.1| conserved [Ajellomyces capsulatus NAm1]
MEAAGASSNGNGAGAGSKLAAKLIPQKLVAKRRWKKQASNESFGSMTSSIEDHGRGRSPGARARRRPKSTSTTQSSEVAEEDDEEDHGESVEDAEDDGADLGTPRDASRNDPQHESPSRPGAPSTHPSQIGHLTTSSPIIQADHLTAVHPLDQQDAAESHSPALDPALPLSTKSSKSALQPPSESSSRRSKSPAGRFRDAFRGKKTARAATSSDSLNQEASVAASDQSAKESISRRGSVAQSQSDAGAPGVASSDRDRGRRKNSIPPLALSGRPQTPPSSNTGPVIVNTPPTPTDSTHSRDSPVKINNPNVVVSPSGNMISHRRARSGSAASIGPSKLSNIVSAPLTPTPENAVPSTPGGGGFFSSVLSAAQNAATTLSTTITNTGINTNPNRPKTSGSRDSGPIPNESTGEAGASSEDLKDSTMGGKEPAVKTLGMGDLSLSQLGIQEAGSVSTTPTTSKFYDAESRARSESAPTDVDSSTIYGDGQSDDLTIGRPKSLYEPANTTPPTSVYESGGGGVHRSSSIRSAISKRRKRGSTGGTAGTANTGTTIGAAIAAANASVAHPSAAGSTPKFTGFAVASKKRNRDFHTFFKSVPDDDYLIEDYSCALQREILAHGRLYVSEGHICFSSNILGWVTTLVISFDEVVSVEKRSTALVFKNGLMISTLHAKHVFASFASRDSTYDLIVNIWKLGHPSLRSSLNGVSLDETGGDKTEKIDGGDGGDGEGGSQTGGSASEGEDSDEDDDDIYDEDMEDDDIPDETQPTEMSTHETDGEKVVSRKVSSGAALNGAGDKAEGAASSGPVDFPGPVTHGPTDCGDANAHFEVPIGDDIIGAPLGKVYNLLFGPASVTFMSKWLTNEQKCTDLQMEDKKGLTQDNKSRQYSYIKPLYAPIGPKSTKCIVTETIENIDLEKAVNVLVVTQTPDVPSGNVFSVKTKYCLFWAENNSTRVTMNCTIEWTGKSWLKGPIEKGAKDGQATYWKDLYASIKASVTTRARAATGTGAGKGKKKRAKGKLDGASKEDARGPAATASSKTQDWGLFEPLHGVLGPVFDILKPVMTPNVVYGLLVGLLVATWFGFGLNGQRSGGFGRDMGFAGYPDRAVAYEEIWRREESDLWDWLEERVGLHGMNEGALPIRKRVMEPKVVEDKLREERMNEREIEEAIKITEEKLNVLKSVIDRKKDGKTAQNGKSSAEGKTER

SEQ ID NO: 24836 - DNA, 4329 bp, Muscodor strobelii
  misc_feature: SGI EST ID NO. CUFF.58761.0
  misc_feature: Variant of the nucleotide sequence at SEQ ID NO 24834
tgcggactggaagctccttttgatcgctaacatcaaattcggcattcttttcaatttctggcgtctagctttgtgaaccgcattcaagcgcgtgtctctctttatgatggtacattgtacaccaccatcgcgacccttgtccacaacgtcgagctctcttaatacatcagcaaaccgaggtatctaagcaacctaccgatccttgtccttgtatctcggcttggagcattccagcaatctagcatcttacctctcagttggggcgccgtttacttggattgtcattgcgcctaaaccgttctcgatacatgtttgtcactgttgttggcagaaatggaggctgctggcgctagcagcaacggcaacggcgctggtgctgggagcaagctggctgcgaagctcatcccgcagaagctggtagccaaacggcggtggaagaaacaagcttcgaacgagagtttcggatcgatgactagtagcatcgaggaccatggccgcggacggagcccaggcgcacgcgctagacggaggcccaagtcgacatcgaccacgcaatcgagcgaggtggcagaggaagacgatgaggaggaccacggcgaaagcgtcgaagatgccgaggatgacggcgctgacttgggtactccgcgcgatgcatctcgaaatgatccccagcacgagtctcccagcagaccaggcgcgccgtcgacgcatccctcgcagatcggccatttgacgacatcatcgcccatcattcaggccgaccaccttaccgcggtccacccgctggaccagcaggacgcagccgagagccactcgcctgctctcgaccctgccctgccactgtccaccaagtcgagcaagagtgccctgcagcccccgtccgagtcgtcctcgcgccgctccaagtcgcccgccggaaggttcagagacgctttcagaggcaagaagactgctcgcgctgccaccagttccgacagtttgaaccaagaagcgagcgttgctgcgtccgaccagtctgccaaagagtcgatttcccgccgtggctccgtagctcagtcccagtctgatgctggcgcacccggagtagcgtccagtgaccgtgatcgtggtcgtcgaaagaatagcatccctcctcttgcgctgtccggccgcccgcagactcctccctcttccaacactgggccagttatcgtgaacacgccgccaacccccaccgactcgacccactcccgagactcgcccgtgaagatcaacaatcctaatgtcgttgtttcaccctcgggtaacatgatatcacatagaagagcacgatcaggttctgcagctagcattggtccaagcaagctctccaacatcgtatccgcgcctttgaccccgactcccgaaaacgccgtcccctccactcctggcggcggcggtttcttttccagtgtcctctcggctgcccagaacgccgcgacgaccctgagcacgactatcacgaacactggcatcaacactaacccgaacaggcccaaaacgagtggatccagagactctgggcccattcccaatgagagcactggtgaagccggggcatcttcagaagacttgaaagactcaactatgggtggcaaagagcctgccgttaagacgctgggcatgggcgatttgagcctcagccagttgggaattcaagaggccgggagcgtatctaccacgcctacgacttccaagttctatgatgccgagtctagagcacgatcggaatctgcgcccaccgatgtcgattcttcaactatatacggcgacggacagtcggacgatttgaccataggccgacccaagtctttatacgagcctgccaacactaccccgccgactagtgtatacgagagtggaggaggtggcgtccatcgtagctcaagcatacgaagtgccatatcgaaaagacggaaacgtgggagcaccggaggtacagcaggtacagcaaatactggaacgacgattggcgctgctatcgctgctgccaatgcctcggtagcccatccttcagccgccggtagcacgccaaagttcacagggttcgctgtcgcaagtaagaagcggaatcgggacttccacacctttttcaagagtgtaccagatgacgactatctcatcgaagactacagctgtgccctgcaacgagagatccttgctcatggaaggctctatgtctccgagggccatatttgtttcagcagcaacattctcgggtgggtaacaactctggttatcagctttgatgaggttgtctcggtagagaaacgcagcaccgcgcttgtcttcaagaacggcctcatgatctcaacgttgcacgcgaaacatgtgttcgcgagtttcgcaagtcgtgattctacgtatgatctcatcgtcaacatctggaaactagggcatccttctctccgcagttccctcaatggcgtctcgctggatgagacgggaggagataagacggagaagattgatggcggagatggaggagatggtgaaggaggaagtcagaccggtggctcagcatccgagggcgaagacagcgacgaagatgacgacgatatctatgatgaggacatggaagacgatgatattcccgatgagactcagccgacggaaatgagcactcacgaaacggacggagagaaagtcgtatccagaaaggtctcaagtggagcagccctgaacggtgctggtgacaaggctgagggtgctgcgtcttctggtccagtggatttccccggtccagttactcatgggccgacggattgtggcgatgctaatgctcatttcgaggtaccgatcggagacgatattataggggcgccattgggcaaagtttacaatctcctattcggtcccgcgtccgtcaccttcatgagcaagtggctcaccaacgaacaaaaatgcacagatctacagatggaagacaagaaaggtttgacacaagacaataaaagtcgccaatactcctacatcaaaccattgtatgctcccattggaccgaagtcgacgaagtgtatcgtcaccgaaaccatcgagaacatcgatttagaaaaagccgtgaacgttcttgtcgtaacgcagacccccgacgtcccgagcggcaatgtcttcagtgtcaaaaccaaatactgtctattctgggcagagaacaactccactcgtgtcacgatgaactgtaccatagaatggaccggcaagagctggttgaaaggacccattgagaaaggtgcaaaggacggccaagccacatattggaaagatctgtacgcaagtataaaagccagtgtgaccactcgagctcgcgctgcaacaggaaccggggcaggcaagggtaagaagaagagggccaaaggcaagctcgacggcgcttctaaggaggacgctagaggtcctgctgccacggcatcctccaaaacacaagactggggtcttttcgagcctctccatggtgtacttgggcccgtatttgacatcctcaagccagtaatgactcccaatgtcgtatatggactacttgttggactcctcgtggcgacctggtttggatttggtctcaacggccaacgaagcggcggctttggccgggacatgggattcgccggataccccgacagagcagtggcttacgaagagatctggagacgtgaagagagcgatctgtgggattggctcgaagagagagttggtctgcatggaatgaacgaaggggctctgccgatccgcaaaagggtgatggaacccaaagtggttgaagataaattgcgggaggagcgtatgaatgaaagggaaatcgaggaagcgattaagatcacggaggagaaacttaatgttcttaagtcggttattgatcggaagaaggatgggaagactgcgcagaatgggaaatcgagtgctgagggcaagacggagaggtagcacgagggaaagcaagggggacgacacacagacacaggacactacctgtcttcttttacctatgacaatccgactacacagagagagagagacactcacaaactcactccacgacgacacgacgacgaagccagatctttttgttgagaatagtacatattactctgtattttaggtagcgaggaatggatgctctcagaagatttcgtgttcccacctatttggggttcagggaattgtgctgtgccttggacacagtacctgtagttgcgaaaaaatctaccaagtaatgagcatgggacttcaagaggtcttacaatcatgataaattaaacgactcccgagacggtcgccgtatactgtcacgggacaaatctatgatgtttatatgct

SEQ ID NO: 24837 - DNA, 1560 bp, Muscodor strobelii
  misc_feature: SGI cDNA ID NO. 568473
  misc_feature: Reduced expression when VOC is produced
  misc_feature: Encodes the peptide sequence at SEQ ID NO 24838
atggagtcttctcctctcatcaaagcgtacgaccatgccaaagcggcatctgcagcaacgcacactgccgacacgaccgtagccgtcaatgagcacaccaaggccgccggcgagtttgccaacgccgccaagaacaccacctcggtcgaagccctgcgcaccttgaagctgctcgagcagcaccatcgcagactgacagagcttctgcaagcgcccttacaacaccccaactcgtcccaggcgtcctccaacgagaatgattcccaggaagcagagaaggacgatgctgacacgtctcacgagcccacggcaaacagcaacgagaagagtcctccgcctctgcccactcttccgaggcaggcgagatacccttctcgcgatctaggcgcatctatcgccaacaatctggcctctgcccgcggcatccgctccaagtaccgatcgccccagccgctgagccctagcgtgtctaataccgaagcgccggggaacaatatggaggggacatctcgcaaagtggcctcacgatctagaatgcaagatatgctcaataacccttcgtctcccgatcgacttgctggcctgcccgaagatactgccgtaggggaatcctctgatgcgcctgctgcatcaaacgacgacggtttctccaagtggtatagcacatttggcagcatcatcaacagaatctcggcacctctagcttacgccggactgcccctcgtcaccgaagaacagcccgaggaacaagtcgcgcccccaccggtcgaaaccccagtacaaaggcagcgacccagatctcggccttctacttctacatctacggagcccgacctcaaaagactatattcaaaagccgcattgcgtgcagtggtccgcgacggccagtctaccaacgactcattctacgtagtcccaacaagtggacacacagcctcgtatgcaagcattctaacattcgcagacaaagaaaaacgtcgcatgggcgcatccgcacacggagccatgggttccctcccagaagatgccgaggaagacgatttcgtcgatgcccgggaatcgcagagaccgcactcacctaccctcaagaagcgggccgggaagcatagcaccgccgctgataaagatctatctaatatggtggaagaactctacctagagaacaaaagtctaaaggacatgctagataagttaagtaaaagactccacgcattcgagtccatgtcccagaattcggggatgaggttagcggagagcatgaggttgatgcgtcccggctcgcccatgtcgggaacggtcactggtgggagtaagtccgggagcgcggaggagatgatggcgaaagagttgagcgagttgagacaccaaaatcaggtgttggtggtgcagaatgaggagctggagaagagctatacgaaggctagggcgaacttgattaggtatagggagaagtgggatcagcttaaggcgggcgcgaaggcgaggagggctggtcagggacaggtaggtatggggagtgagatctcggaggggggtgcggcgagtccgaacttgggttga

SEQ ID NO: 24838 - protein, 519 aa, Muscodor strobelii
  misc_feature: SGI Peptide ID NO. 568473
  misc_feature (1)..(499): NCBI GI: 85108754 Blast Desc: NCU07000 [Neurospora crassa OR74A] gi|28924250|gb|EAA33404.1| [Neurospora crassa OR74A]
  misc_feature (1)..(500): NCBI GI: 46136177 Blast Desc: FG09604.1 [Gibberella zeae PH-1]
  misc_feature (1)..(500): NCBI GI: 256727604 Blast Desc: NECHADRAFT_58342 [Nectria haematococca mpVI 77-13-4]
  misc_feature (1)..(499): NCBI GI: 171683347 Blast Desc: protein product [Podospora anserina] gi|170941633|emb|CAP67287.1| protein product [Podospora anserina]
  misc_feature (1)..(505): NCBI GI: 145613692 Blast Desc: MGG_01436 [Magnaporthe grisea 70-15] gi|145020729|gb|EDK04858.1| MGG_01436 [Magnaporthe grisea 70-15]
  misc_feature (1)..(502): NCBI GI: 261352398 Blast Desc: conserved [Verticillium albo-atrum VaMs.102]
  misc_feature (1)..(496): NCBI GI: 154322128 Blast Desc: BC1G_01211 [Botryotinia fuckeliana B05.10] gi|150850458|gb|EDN25651.1| BC1G_01211 [Botryotinia fuckeliana B05.10]
  misc_feature (1)..(517): NCBI GI: 156060869 Blast Desc: SS1G_02577 [Sclerotinia sclerotiorum 1980] gi|154699981|gb|EDN99719.1| SS1G_02577 [Sclerotinia sclerotiorum 1980]
  misc_feature (50)..(505): NCBI GI: 116194584 Blast Desc: CHGG_03890 [Chaetomium globosum CBS 148.51] gi|88179803|gb|EAQ87271.1| CHGG_03890 [Chaetomium globosum CBS 148.51]
  misc_feature (1)..(510): NCBI GI: 119479887 Blast Desc: NFIA_080170 [Neosartorya fischeri NRRL 181] gi|119408126|gb|EAW18075.1| conserved [Neosartorya fischeri NRRL 181]
  misc_feature: Useful for introducing or modulating the production of volatile compounds
MESSPLIKAYDHAKAASAATHTADTTVAVNEHTKAAGEFANAAKNTTSVEALRTLKLLEQHHRRLTELLQAPLQHPNSSQASSNENDSQEAEKDDADTSHEPTANSNEKSPPPLPTLPRQARYPSRDLGASIANNLASARGIRSKYRSPQPLSPSVSNTEAPGNNMEGTSRKVASRSRMQDMLNNPSSPDRLAGLPEDTAVGESSDAPAASNDDGFSKWYSTFGSIINRISAPLAYAGLPLVTEEQPEEQVAPPPVETPVQRQRPRSRPSTSTSTEPDLKRLYSKAALRAVVRDGQSTNDSFYVVPTSGHTASYASILTFADKEKRRMGASAHGAMGSLPEDAEEDDFVDARESQRPHSPTLKKRAGKHSTAADKDLSNMVEELYLENKSLKDMLDKLSKRLHAFESMSQNSGMRLAESMRLMRPGSPMSGTVTGGSKSGSAEEMMAKELSELRHQNQVLVVQNEELEKSYTKARANLIRYREKWDQLKAGAKARRAGQGQVGMGSEISEGGAASPNLG

SEQ ID NO: 24839 - DNA, 1899 bp, Muscodor strobelii
  misc_feature: SGI EST ID NO. CUFF.58482.0
  misc_feature: Variant of the nucleotide sequence at SEQ ID NO 24837
taatagtttgcctgctcgcctggctgagactgaaacattggaacatgaaagaaacattcattctaccgtaaatgagagccattattgatcattgatcaccggtctacatccgtacttgcgcaattcatatgagtgccagcctctctttacggcgacattcatccactattcatcccccggaccttgacggacttataagatctaccgaaacgttcaatcgacagataattcttccagctggcttaccacaccgcaactatcctgttcgatactcgacattcgacacttgacaccgctcgccattggtattccgcaaatttcaggatggagtcttctcctctcatcaaagcgtacgaccatgccaaagcggcatctgcagcaacgcacactgccgacacgaccgtagccgtcaatgagcacaccaaggccgccggcgagtttgccaacgccgccaagaacaccacctcggtcgaagccctgcgcaccttgaagctgctcgagcagcaccatcgcagactgacagagcttctgcaagcgcccttacaacaccccaactcgtcccaggcgtcctccaacgagaatgattcccaggaagcagagaaggacgatgctgacacgtctcacgagcccacggcaaacagcaacgagaagagtcctccgcctctgcccactcttccgaggcaggcgagatacccttctcgcgatctaggcgcatctatcgccaacaatctggcctctgcccgcggcatccgctccaagtaccgatcgccccagccgctgagccctagcgtgtctaataccgaagcgccggggaacaatatggaggggacatctcgcaaagtggcctcacgatctagaatgcaagatatgctcaataacccttcgtctcccgatcgacttgctggcctgcccgaagatactgccgtaggggaatcctctgatgcgcctgctgcatcaaacgacgacggtttctccaagtggtatagcacatttggcagcatcatcaacagaatctcggcacctctagcttacgccggactgcccctcgtcaccgaagaacagcccgaggaacaagtcgcgcccccaccggtcgaaaccccagtacaaaggcagcgacccagatctcggccttctacttctacatctacggagcccgacctcaaaagactatattcaaaagccgcattgcgtgcagtggtccgcgacggccagtctaccaacgactcattctacgtagtcccaacaagtggacacacagcctcgtatgcaagcattctaacattcgcagacaaagaaaaacgtcgcatgggcgcatccgcacacggagccatgggttccctcccagaagatgccgaggaagacgatttcgtcgatgcccgggaatcgcagagaccgcactcacctaccctcaagaagcgggccgggaagcatagcaccgccgctgataaagatctatctaatatggtggaagaactctacctagagaacaaaagtctaaaggacatgctagataagttaagtaaaagactccacgcattcgagtccatgtcccagaattcggggatgaggttagcggagagcatgaggttgatgcgtcccggctcgcccatgtcgggaacggtcactggtgggagtaagtccgggagcgcggaggagatgatggcgaaagagttgagcgagttgagacaccaaaatcaggtgttggtggtgcagaatgaggagctggagaagagctatacgaaggctagggcgaacttgattaggtatagggagaagtgggatcagcttaaggcgggcgcgaaggcgaggagggctggtcagggacaggtaggtatggggagtgagatctcggaggggggtgcggcgagtccgaacttgggttgagcttgagggagaggg

SEQ ID NO: 24840 - DNA, 1569 bp, Muscodor strobelii
  misc_feature: SGI cDNA ID NO. 568474
  misc_feature: Reduced expression when VOC is produced
  misc_feature: Encodes the peptide sequence at SEQ ID NO 24841
atggttttctcctctcggaacggtagcgacaagtcgcccgctgtggctgaccccgagaaggacgccagccgcgaatcggacgaccggggacagaaacctgccgggggccttgcatcgtttcttgcggttgaggacggcgtcgtgtacgaacctgagagtgagaagcatacgaaatggtatcagctcatcttgaatgctggagttgaggagaatggcatcaaacccgtacccatcgagaagcggacgaatacgcagtacaacaacttattcactgtcttctttacgggtcttctgtgcatcctgccgataccaacgggtatgcttgcgacaactgtctttgcattgagtctgcgcgatgcgtctctcacaatcttgttcttctccatcatctgtactgcagttccggcctttatgggatgcggaggatacaagacgggtttacgccagctcatccaggcgcgatattcttggggcctctacattgttgtgattcctctgattctcaatgccgcgactgtcactgggttctccataatcgcagcaattgtgagcgggcagacgatcgcagctatcaaccccggtaatgtcagcgtatccgtcggcatcgttattgtgatcttaggcagctttgtgctgtcgctgctagggtatcgcatcttgcatatctgggaacggtaccaatggctgccaaacctgattgctcttacgattactgttggcgttggagggcgacacctagcgaatcagcaaacagtgcctccagcctctgcaccccaggtcttgtcttacggtggattaatcgctggctatttcattacgtttggaggcacggcttctgacttctcgatctatcatgatcccaaagcgcctctgcgcaagatcttcacatatatatatctcggcatgtttacgccttcagtgccgctcctgatcctcggcgcggccatgggcggtgcgatacccttagtagatggatgggccgatgcctacgactcctacggtgcagggggcgtaatggcagccatgctcgaaccagcaggcggctttgggaaatttgtgcttgtactgctcgccgtctcagtcattggcaatatcggcatttcgatgtatccagtgtcactgaacctgcagatgttgattcccgcgtttactaaagtgcctcggtttctattcagtctcgccgtcacggccattatgatcccgctctcgatcgcagcttccaatgcatgggaagcatcactcgagaacttccttgctgtgatcggatactgggctggtttctttgacgccatacttcttgtggagctgatcatattccgacgcttagactgggagacattcgatcactcaatttggaatgtcggacgaaaactgccgactgggcttgcggctctcttggcatcgctattgtcgcttgcattagttgtgcctggtatagacgaagcttggttcgttggtcctttcgcgaaaacgacgggcgacattggtttcgaattagcgttcttcggatccggtcttttctatatcccattgagatggctcgagatcaagtggagaggccatttataa

SEQ ID NO: 24841 - protein, 522 aa, Muscodor strobelii
  misc_feature: SGI Peptide ID NO. 568474
  misc_feature (75)..(486): Pfam Id: PF02133 Pfam Desc: Permease for cytosine/purines, uracil, thiamine, allantoin
  misc_feature (75)..(158): Pfam Id: PF02133 Pfam Desc: Permease for cytosine/purines, uracil, thiamine, allantoin
  misc_feature (21)..(522): NCBI GI: 256726894 Blast Desc: NECHADRAFT_33614 [Nectria haematococca mpVI 77-13-4]
  misc_feature (15)..(522): NCBI GI: 46121467 Blast Desc: FG05112.1 [Gibberella zeae PH-1]
  misc_feature (10)..(517): NCBI GI: 226279652 Blast Desc: purine-cytosine permease FCY22 [Paracoccidioides brasiliensis Pb01]
  misc_feature (44)..(522): NCBI GI: 238841863 Blast Desc: purine-cytosine permease FCY22 [Microsporum canis CBS 113480]
  misc_feature (2)..(522): NCBI GI: 119190117 Blast Desc: CIMG_05106 [Coccidioides immitis RS]
  misc_feature (2)..(522): NCBI GI: 240110968 Blast Desc: CPC735_068030 [Coccidioides posadasii C735 delta SOWgp]
  misc_feature (5)..(522): NCBI GI: 258565477 Blast Desc: conserved [Uncinocarpus reesii 1704] gi|237907184|gb|EEP81585.1| conserved [Uncinocarpus reesii 1704]
  misc_feature (6)..(517): NCBI GI: 261361296 Blast Desc: purine-cytosine permease FCY21 [Verticillium albo-atrum VaMs.102]
  misc_feature (41)..(521): NCBI GI: 169605147 Blast Desc: SNOG_05591 [Phaeosphaeria nodorum SN15] gi|111065535|gb|EAT86655.1| SNOG_05591 [Phaeosphaeria nodorum SN15]
  misc_feature (4)..(522): NCBI GI: 212539259 Blast Desc: purine-cytosine permease FCY2, [Penicillium marneffei ATCC 18224] gi|210069527|gb|EEA23618.1| purine-cytosine permease FCY2, [Penicillium marneffei ATCC 18224]
  misc_feature: Useful for introducing or modulating the production of volatile compounds
MVFSSRNGSDKSPAVADPEKDASRESDDRGQKPAGGLASFLAVEDGVVYEPESEKHTKWYQLILNAGVEENGIKPVPIEKRTNTQYNNLFTVFFTGLLCILPIPTGMLATTVFALSLRDASLTILFFSIICTAVPAFMGCGGYKTGLRQLIQARYSWGLYIVVIPLILNAATVTGFSIIAAIVSGQTIAAINPGNVSVSVGIVIVILGSFVLSLLGYRILHIWERYQWLPNLIALTITVGVGGRHLANQQTVPPASAPQVLSYGGLIAGYFITFGGTASDFSIYHDPKAPLRKIFTYIYLGMFTPSVPLLILGAAMGGAIPLVDGWADAYDSYGAGGVMAAMLEPAGGFGKFVLVLLAVSVIGNIGISMYPVSLNLQMLIPAFTKVPRFLFSLAVTAIMIPLSIAASNAWEASLENFLAVIGYWAGFFDAILLVELIIFRRLDWETFDHSIWNVGRKLPTGLAALLASLLSLALVVPGIDEAWFVGPFAKTTGDIGFELAFFGSGLFYIPLRWLEIKWRGHL

SEQ ID NO: 24842 - DNA, 1984 bp, Muscodor strobelii
  misc_feature: SGI EST ID NO. CUFF.58501.0
  misc_feature: Variant of the nucleotide sequence at SEQ ID NO 24840
tgaatttcgagttctgaaggcgtctcttgggcagtgttcgaaggtgcgacattgaagccgccgccgccaaacgccgctatggttttctcctctcggaacggtagcgacaagtcgcccgctgtggctgaccccgagaaggacgccagccgcgaatcggacgaccggggacagaaacctgccgggggccttgcatcgtttcttgcggttgaggacggcgtcgtgtacgaacctgagagtgagaagcatacgaaatggtatcagctcatcttgaatgctggagttgaggagaatggcatcaaacccgtacccatcgagaagcggacgaatacgcagtacaacaacttattcactgtcttctttacgggtcttctgtgcatcctgccgataccaacgggtatgcttgcgacaactgtctttgcattgagtctgcgcgatgcgtctctcacaatcttgttcttctccatcatctgtactgcagttccggcctttatgggatgcggaggatacaagacgggtttacgccagctcatccaggcgcgatattcttggggcctctacattgttgtgattcctctgattctcaatgccgcgactgtcactgggttctccataatcgcagcaattgtgagcgggcagacgatcgcagctatcaaccccggtaatgtcagcgtatccgtcggcatcgttattgtgatcttaggcagctttgtgctgtcgctgctagggtatcgcatcttgcatatctgggaacggtaccaatggctgccaaacctgattgctcttacgattactgttggcgttggagggcgacacctagcgaatcagcaaacagtgcctccagcctctgcaccccaggtcttgtcttacggtggattaatcgctggctatttcattacgtttggaggcacggcttctgacttctcgatctatcatgatcccaaagcgcctctgcgcaagatcttcacatatatatatctcggcatgtttacgccttcagtgccgctcctgatcctcggcgcggccatgggcggtgcgatacccttagtagatggatgggccgatgcctacgactcctacggtgcagggggcgtaatggcagccatgctcgaaccagcaggcggctttgggaaatttgtgcttgtactgctcgccgtctcagtcattggcaatatcggcatttcgatgtatccagtgtcactgaacctgcagatgttgattcccgcgtttactaaagtgcctcggtttctattcagtctcgccgtcacggccattatgatcccgctctcgatcgcagcttccaatgcatgggaagcatcactcgagaacttccttgctgtgatcggatactgggctggtttctttgacgccatacttcttgtggagctgatcatattccgacgcttagactgggagacattcgatcactcaatttggaatgtcggacgaaaactgccgactgggcttgcggctctcttggcatcgctattgtcgcttgcattagttgtgcctggtatagacgaagcttggttcgttggtcctttcgcgaaaacgacgggcgacattggtttcgaattagcgttcttcggatccggtcttttctatatcccattgagatggctcgagatcaagtggagaggccatttataatgaatagagatcctgagttccgagagtaataaattattgacagatgggagagagggggaaaatcggtgtgcgaagcagaggagttatgtttgtcatacaactttataccccgatagaaagcgacttcaacgaagcttcgacatagaatagacacaaaatttggtcatctctgatgaaagggatgcacagagtgctggattttcagattccatattattgttcaagaacctatatcctgtatataaataagaagcccattacgcgcgaggcagagacagagtggacggggcattatattcccaacacctcttgatatcaagttcaatgattatgtccc

SEQ ID NO: 24843 - DNA, 867 bp, Muscodor strobelii
  misc_feature: SGI cDNA ID NO. 568475
  misc_feature: Encodes the peptide sequence at SEQ ID NO 24844
atggcagaggatcccctctttttctctcactctgaggccaaacgcctagaacctcatttaccacccataccagcatcagcatctacgccggcatcctcgccaccctcatcactcccacatgtgaccctgacgttcgccacatccttggactcggccctctccctgggtccggggatccgtaccgcccttagcgggccccagtccaaggcaatgacgcactatctacgcagtcggcacgacgccatctgcatcggcgtagggactgccattgctgacgacccggggctcaactgccggcttgccgctggtattttgggctcgaaggatgaaaatcaaagtgaggagggccgatgcgccattacggatcgccagcctaggccaattgtcatcgatcctcacttgcgctggaacttcactctcgagagtaaggtcatacggctggcgcgattaggcaagggactcgcgccgtacatcataacttcggacgcggagccgcctacaaagaaaaagcagatattagaagatgtaggtgggaagttcattttcctccccggagcatcaactcaatcctcaggaatacagaggctcggctggtatgagatattgtcggctgtgcggagtgaaggtctcaatagcatcatgattgaaggcgggggtgaggtgattaactcgcttctcgcggttcacaataatggcctagtcaaccgtgtcatcgtgacgattgctccgacatggttaggacaggggggcgtggtcgtgagtccgcagaggacagctggggtggatggtccggctgcacgcctcactgataccatgtggatgcctctcggcgaggacgtggtgttgtgcggacgcctcgatcggtaa

SEQ ID NO: 24844 - protein, 288 aa, Muscodor strobelii
  misc_feature: SGI Peptide ID NO. 568475
  misc_feature (39)..(282): Pfam Id: PF01872 Pfam Desc: RibD C-terminal domain
  misc_feature (39)..(139): Pfam Id: PF01872 Pfam Desc: RibD C-terminal domain
  misc_feature (209)..(282): Pfam Id: PF01872 Pfam Desc: RibD C-terminal domain
  misc_feature (2)..(286): NCBI GI: 70985705 Blast Desc: riboflavin biosynthesis protein Rib7 [Aspergillus fumigatus Af293] gi|66845987|gb|EAL86320.1| riboflavin biosynthesis protein Rib7, [Aspergillus fumigatus Af293]
  misc_feature (2)..(286): NCBI GI: 119473533 Blast Desc: riboflavin biosynthesis protein Rib7, [Neosartorya fischeri NRRL 181] gi|119406795|gb|EAW16745.1| riboflavin biosynthesis protein Rib7, [Neosartorya fischeri NRRL 181]
  misc_feature (2)..(286): NCBI GI: 159128508 Blast Desc: riboflavin biosynthesis protein Rib7, [Aspergillus fumigatus A1163]
  misc_feature (3)..(286): NCBI GI: 121712499 Blast Desc: riboflavin biosynthesis protein Rib7, [Aspergillus clavatus NRRL 1] gi|119402013|gb|EAW12435.1| riboflavin biosynthesis protein Rib7, [Aspergillus clavatus NRRL 1]
  misc_feature (1)..(286): NCBI GI: 169781288 Blast Desc: [Aspergillus oryzae RIB40] gi|83773849|dbj|BAE63974.1| protein product [Aspergillus oryzae]
  misc_feature (4)..(286): NCBI GI: 145228651 Blast Desc: An01g01960 [Aspergillus niger] gi|134054726|emb|CAK43566.1| protein product [Aspergillus niger]
  misc_feature (1)..(286): NCBI GI: 238501136 Blast Desc: riboflavin biosynthesis protein Rib7, [Aspergillus flavus NRRL3357] gi|220692039|gb|EED48386.1| riboflavin biosynthesis protein Rib7, [Aspergillus flavus NRRL3357]
  misc_feature (3)..(286): NCBI GI: 255930967 Blast Desc: Pc12g01420 [Penicillium chrysogenum Wisconsin 54-1255] gi|211581659|emb|CAP79769.1| Pc12g01420 [Penicillium chrysogenum Wisconsin 54-1255]
  misc_feature (6)..(287): NCBI GI: 145607321 Blast Desc: MGG_12162 [Magnaporthe grisea 70-15] gi|145014902|gb|EDJ99470.1| MGG_12162 [Magnaporthe grisea 70-15]
  misc_feature (6)..(288): NCBI GI: 85108193 Blast Desc: NCU08313 [Neurospora crassa OR74A] gi|28924134|gb|EAA33290.1| NCU08313 [Neurospora crassa OR74A]
  misc_feature (39)..(286): SWISSPROT Homolog: EC 1.1.1.193 5-amino-6-(5-phosphoribosylamino)uracil reductase
MAEDPLFFSHSEAKRLEPHLPPIPASASTPASSPPSSLPHVTLTFATSLDSALSLGPGIRTALSGPQSKAMTHYLRSRHDAICIGVGTAIADDPGLNCRLAAGILGSKDENQSEEGRCAITDRQPRPIVIDPHLRWNFTLESKVIRLARLGKGLAPYIITSDAEPPTKKKQILEDVGGKFIFLPGASTQSSGIQRLGWYEILSAVRSEGLNSIMIEGGGEVINSLLAVHNNGLVNRVIVTIAPTWLGQGGVVVSPQRTAGVDGPAARLTDTMWMPLGEDVVLCGRLDR

SEQ ID NO: 24845 - DNA, 4376 bp, Muscodor strobelii
  misc_feature: SGI EST ID NO. CUFF.58565.0
  misc_feature: Variant of the nucleotide sequence at SEQ ID NO 24843
acacgttaggtcttatcaaacccacgtagtgcgagggcagcttccttgcatctgcgcccggctcggaagggcaatccttaagaacggaaataagcttgtgtacctaaattcaacttcataacattcgcgctcggtccgttgcccggcataatgaaggtgtttggcaaagacattccatgttactattaggaactgcccgagttctatcgtaacattcccaagagctaaaatccgccgctgagctccaactagtagattacagggtggcttccgccgacgtgccgtctctttcagccaataccagggtcatatctccctatgcgatgcggatggaaagttgatatccgattttcagtgagtcgctgctggaacatggcagaggatcccctctttttctctcactctgaggccaaacgcctagaacctcatttaccacccataccagcatcagcatctacgccggcatcctcgccaccctcatcactcccacatgtgaccctgacgttcgccacatccttggactcggccctctccctgggtccggggatccgtaccgcccttagcgggccccagtccaaggcaatgacgcactatctacgcagtcggcacgacgccatctgcatcggcgtagggactgccattgctgacgacccggggctcaactgccggcttgccgctggtattttgggctcgaaggatgaaaatcaaagtgaggagggccgatgcgccattacggatcgccagcctaggccaattgtcatcgatcctcacttgcgctggaacttcactctcgagagtaaggtcatacggctggcgcgattaggcaagggactcgcgccgtacatcataacttcggacgcggagccgcctacaaagaaaaagcagatattagaagatgtaggtgggaagttcattttcctccccggagcatcaactcaatcctcaggaatacagaggctcggctggtatgagatattgtcggctgtgcggagtgaaggtctcaatagcatcatgattgaaggcgggggtgaggtgattaactcgcttctcgcggttcacaataatggcctagtcaaccgtgtcatcgtgacgattgctccgacatggttaggacaggggggcgtggtcgtgagtccgcagaggacagctggggtggatggtccggctgcacgcctcactgataccatgtggatgcctctcggcgaggacgtggtgttgtgcggacgcctcgatcggtaatcgaaggttacaactatggaaaactacactggaacgatccagcttgcaattggcgtaaataacaccggtgccaaaggtatctgcatcgtggcttccgagcgcgataattgagtcagcgtattcatcgatgcgacttcgatttgctttagcacgtcaaactagccgtcgtatttgtgcatcatgtcaagattccgtattaggcttgtaatgctaaggagactatagagccagacacttatcaacgttacaccgtcgcagtgattcgaaacccccgaattcggggacatagtagttttgcgccttcctgaccatatttttcctatccacattcttgaaaccaataaaattctgcgcatccatccctcagtcgtggtgcgagggtcaagtagaactccaatatgtgcccaatgtctatttgttgttgttcgtatcccccattgtgcccttaagaaccgattgccgcgccccaagaaattttggttgtacagaggtatcaaattgggccagttgcccattcctgtctatcccagtgttgtcagattcgcaaaaacaagagacgaatccatcgccagaagtccgcaagaagctaaaaagatagctaaaaagatcatgacggttaaggcaatgccgaaaaatacgaagcattcgaaccggagtggccaaagattaaaagtctaagtcgtaaataaggcgttcatccgatgaaaagcagcaacgatgtggggaatatgagaggaaatgcgccgaaagaagccgaaagtaaagtctatcaaacgcctaaggagtccttcgaaaattcgacgtcgggaaaatgaactacgcaatcaaccggtcagaccgccggtgtctgatggtgttcctgagtcgtgtcctgaacacgagctggctcagcgacttccaagtcgcgatcatgggtgttgcgatcatcccctcttctatgagatagagaggctgggtccggtatctgaagacccacgaaagcaccggcgatggcaacgagagcactacaccaccatgcgagacctgagtagccagatttgaggccgagagcataaagaatgcctgagatcgttggcccaagagcacggctgagactcgccgtcgaagccgcgacgccgttgatggtaccgagtgccaggtggctaggagccgagtctgctgttaaaatcgcattactggggtacatcatgctggcgaaggtgcatttccagactagtatagccccaatgccaacaaaacggtacgcttttgtgagcaataccaaatatggagtgaccacatagagcaggaagtatgctacgaccacaaagcggaaaagacgtaaagcgccgaaacgtttgagaaaggcaggaacgagaaccagattgacgaaaagctggtagactccttggatgctaagaatgactccaacagtcttcgtgtcgaaggcgaatccgtctacaaatctgaatgggagagatgttgggatcttttcactcggctttactgctgtctcgaggaatactggcagtagctgatcgaatgtcatagtatgactgtatagcacgtgagctgtagattcacttttgctattcccagtagtacttacaaggctaaaataccaaatgatacgatattgagaacaactggtcgagtaaacgtccgagagatgccaacaccggtttgctggcggatgtgactcaaattgagtgagtcttggccgatagtcgctactgatgcagatcggagacgcggtgagctcgttggcgtattctcattggttcgatatgttggcaaatcttcatcatgatcaacaagcggtaggagctcgtcgtcgatagcagcaagcttggatttttcatctcgcgaatcggtacattttcggaaattcgggagtttagattgtatccattggccaatttctaatcctcggtcacggtccatcttcctctgggcatgtgtctcttcgaggaataagaatccattaattaccccgattagcacaatcaaggcactgaagagatttgggagtagatatggatatcgatcccagatagttccgcgcgcaaatatacttggatagctgatgcatggctgggcaagtgcgccaccgatcatcggacccacgatagatctatacatcctgtcaataaacctgactattacaggagcatttgaggcattcttaccctaatccccatacaactggcattatagtgtacgcacgagctgcagtccgatcagtttgagccgtctcatagaagtctgaagtacacccatgtttctagatgcagatgagcataccgtttgtattagcaattgaatatgaacatacccattcagaagccctccgattgctcgtgccagaagagcgactgtgagattcggagcaaagccaaatataagcacactcaaggcggtgccgaccaagcctgtgagcagtacaggttttcgtccaatcctatcgctgagacgtccccataagagcccggttaagaattcggcgaaggtgaatgctgatgtgaccatgccagcatagaaagagatcttcctctcgtcctcggtgatgtgaaaatctctgaccatgtaatacacataagggaaaatccccatgaaggcgattggctcacatatgcggcagattgctaagaaaatgggattagcctccgtgtttatcgggacactgatctggactcaccaaggacaagcatctgccgctttggaaatggagggacggaaacacgcatgtctcttaaagaggagccacgatttctggagaatgaactatgtgtcatggtagggactgaattgcgatactatggtcaaagtcggctacgcatggacagcttcacaacgacaaacccaggtagcagcaaaacaagtcaagatcaagatgatatgcaggctagtaaggatcgatagagttaaatcgagagatgacctgggggattcagggtcctagatcctttaagaatatggtatccagggagaagagtgaaggatagaaaagtcaagaaatccagtccgtagttataggaaaccgttatggcttagacgatatacgagtagacaacgcagagcccctagttgtcagaggcgggtagacaagcggtacgtaagatgaggtcagctgttgagaaccagggattgatatccgt

SEQ ID NO: 24846 - DNA, 1686 bp, Muscodor strobelii
  misc_feature: SGI cDNA ID NO. 568476
  misc_feature: Encodes the peptide sequence at SEQ ID NO 24847
atgcgtgtttccgtccctccatttccaaagcggcagatgcttgtccttgcaatctgccgcatatgtgagccaatcgccttcatggggattttcccttatgtgtattacatggtcagagattttcacatcaccgaggacgagaggaagatctctttctatgctggcatggtcacatcagcattcaccttcgccgaattcttaaccgggctcttatggggacgtctcagcgataggattggacgaaaacctgtactgctcacaggcttggtcggcaccgccttgagtgtgcttatatttggctttgctccgaatctcacagtcgctcttctggcacgagcaatcggagggcttctgaatggaaacatgggtgtacttcagactacagtcgcagaattagtcactgtcaaagaacatcaacctcgtgcgtacactataatgccagttgtatggggattaggatctatcgtgggtccgatgatcggtggcgcacttgcccagccatgcatcagctatccaagtatatttgcgcgcggaactatctgggatcgatatccatatctactcccaaatctcttcagtgccttgattgtgctaatcggggtaattaatggattcttattcctcgaagagacacatgcccagaggaagatggaccgtgaccgaggattagaaattggccaatggatacaatctaaactcccgaatttccgaaaatgtaccgattcgcgagatgaaaaatccaagcttgctgctatcgacgacgagctcctaccgcttgttgatcatgatgaagatttgccaacatatcgaaccaatgagaatacgccaacgagctcaccgcgtctccgatctgcatcagtagcgactatcggccaagactcactcaatttgagtcacatccgccagcaaaccggtgttggcatctctcggacgtttactcgaccagttgttctcaatatcgtatcatttggtattttagcctttcatactatgacattcgatcagctactgccagtattcctcgagacagcagtaaagccgagtgaaaagatcccaacatctctcccattcagatttgtagacggattcgccttcgacacgaagactgttggagtcattcttagcatccaaggagtctaccagcttttcgtcaatctggttctcgttcctgcctttctcaaacgtttcggcgctttacgtcttttccgctttgtggtcgtagcatacttcctgctctatgtggtcactccatatttggtattgctcacaaaagcgtaccgttttgttggcattggggctatactagtctggaaatgcaccttcgccagcatgatgtaccccagtaatgcgattttaacagcagactcggctcctagccacctggcactcggtaccatcaacggcgtcgcggcttcgacggcgagtctcagccgtgctcttgggccaacgatctcaggcattctttatgctctcggcctcaaatctggctactcaggtctcgcatggtggtgtagtgctctcgttgccatcgccggtgctttcgtgggtcttcagataccggacccagcctctctatctcatagaagaggggatgatcgcaacacccatgatcgcgacttggaagtcgctgagccagctcgtgttcaggacacgactcaggaacaccatcagacaccggcggtctga

SEQ ID NO: 24847 - protein, 561 aa, Muscodor strobelii
  misc_feature: SGI Peptide ID NO. 568476
  misc_feature (16)..(482): Pfam Id: PF07690 Pfam Desc: Major Facilitator Superfamily
  misc_feature (25)..(117): Pfam Id: PF00083 Pfam Desc: Sugar (and other) transporter
  misc_feature (6)..(535): NCBI GI: 39951685 Blast Desc: MGG_01485 [Magnaporthe grisea 70-15] gi|145020671|gb|EDK04800.1| MGG_01485 [Magnaporthe grisea 70-15]
  misc_feature (2)..(535): NCBI GI: 261352514 Blast Desc: conserved [Verticillium albo-atrum VaMs.102]
  misc_feature (5)..(551): NCBI GI: 171690442 Blast Desc: protein product [Podospora anserina] gi|170945169|emb|CAP71280.1| protein product [Podospora anserina]
  misc_feature (28)..(545): NCBI GI: 164423850 Blast Desc: NCU07668 [Neurospora crassa OR74A] gi|157070258|gb|EAA33074.2| conserved [Neurospora crassa OR74A]
  misc_feature (8)..(555): NCBI GI: 238484143 Blast Desc: MFS multidrug transporter, [Aspergillus flavus NRRL3357] gi|220701360|gb|EED57698.1| MFS multidrug transporter, [Aspergillus flavus NRRL3357]
  misc_feature (8)..(555): NCBI GI: 169767296 Blast Desc: [Aspergillus oryzae RIB40] gi|83765974|dbj|BAE56117.1| protein product [Aspergillus oryzae]
  misc_feature (6)..(550): NCBI GI: 116196174 Blast Desc: CHGG_04685 [Chaetomium globosum CBS 148.51] gi|88180598|gb|EAQ88066.1| CHGG_04685 [Chaetomium globosum CBS 148.51]
  misc_feature (8)..(541): NCBI GI: 67517227 Blast Desc: AN0890.2 [Aspergillus nidulans FGSC A4] gi|40746763|gb|EAA65919.1| AN0890.2 [Aspergillus nidulans FGSC A4]
  misc_feature (6)..(544): NCBI GI: 238837857 Blast Desc: conserved [Microsporum canis CBS 113480]
  misc_feature (8)..(541): NCBI GI: 259488824 Blast Desc: TPA: MFS multidrug transporter, (AFU_orthologue; AFUA_1G15490) [Aspergillus nidulans FGSC A4]
MRVSVPPFPKRQMLVLAICRICEPIAFMGIFPYVYYMVRDFHITEDERKISFYAGMVTSAFTFAEFLTGLLWGRLSDRIGRKPVLLTGLVGTALSVLIFGFAPNLTVALLARAIGGLLNGNMGVLQTTVAELVTVKEHQPRAYTIMPVVWGLGSIVGPMIGGALAQPCISYPSIFARGTIWDRYPYLLPNLFSALIVLIGVINGFLFLEETHAQRKMDRDRGLEIGQWIQSKLPNFRKCTDSRDEKSKLAAIDDELLPLVDHDEDLPTYRTNENTPTSSPRLRSASVATIGQDSLNLSHIRQQTGVGISRTFTRPVVLNIVSFGILAFHTMTFDQLLPVFLETAVKPSEKIPTSLPFRFVDGFAFDTKTVGVILSIQGVYQLFVNLVLVPAFLKRFGALRLFRFVVVAYFLLYVVTPYLVLLTKAYRFVGIGAILVWKCTFASMMYPSNAILTADSAPSHLALGTINGVAASTASLSRALGPTISGILYALGLKSGYSGLAWWCSALVAIAGAFVGLQIPDPASLSHRRGDDRNTHDRDLEVAEPARVQDTTQEHHQTPAV

SEQ ID NO: 24848 - DNA, 4272 bp, Muscodor strobelii
  misc_feature: SGI EST ID NO. CUFF.58566.1
  misc_feature: Variant of the nucleotide sequence at SEQ ID NO 24846
acggatatcaatccctggttctcaacagctgacctcatcttacgtaccgcttgtctacccgcctctgacaactaggggctctgcgttgtctactcgtatatcgtctaagccataacggtttcctataactacggactggatttcttgacttttctatccttcactcttctccctggataccatattcttaaaggatctaggaccctgaatcccccaggtcatctctcgatttaactctatcgatccttactagcctgcatatcatcttgatcttgacttgttttgctgctacctgggtttgtcgttgtgaagctgtccatgcgtagccgactttgaccatagtatcgcaattcagtccctaccatgacacatagttcattctccagaaatcgtggctcctctttaagagacatgcgtgtttccgtccctccatttccaaagcggcagatgcttgtccttgcaatctgccgcatatgtgagccaatcgccttcatggggattttcccttatgtgtattacatggtcagagattttcacatcaccgaggacgagaggaagatctctttctatgctggcatggtcacatcagcattcaccttcgccgaattcttaaccgggctcttatggggacgtctcagcgataggattggacgaaaacctgtactgctcacaggcttggtcggcaccgccttgagtgtgcttatatttggctttgctccgaatctcacagtcgctcttctggcacgagcaatcggagggcttctgaatggaaacatgggtgtacttcagactacagtcgcagaattagtcactgtcaaagaacatcaacctcgtgcgtacactataatgccagttgtatggggattaggatctatcgtgggtccgatgatcggtggcgcacttgcccagccatgcatcagctatccaagtatatttgcgcgcggaactatctgggatcgatatccatatctactcccaaatctcttcagtgccttgattgtgctaatcggggtaattaatggattcttattcctcgaagagacacatgcccagaggaagatggaccgtgaccgaggattagaaattggccaatggatacaatctaaactcccgaatttccgaaaatgtaccgattcgcgagatgaaaaatccaagcttgctgctatcgacgacgagctcctaccgcttgttgatcatgatgaagatttgccaacatatcgaaccaatgagaatacgccaacgagctcaccgcgtctccgatctgcatcagtagcgactatcggccaagactcactcaatttgagtcacatccgccagcaaaccggtgttggcatctctcggacgtttactcgaccagttgttctcaatatcgtatcatttggtattttagcctttcatactatgacattcgatcagctactgccagtattcctcgagacagcagtaaagccgagtgaaaagatcccaacatctctcccattcagatttgtagacggattcgccttcgacacgaagactgttggagtcattcttagcatccaaggagtctaccagcttttcgtcaatctggttctcgttcctgcctttctcaaacgtttcggcgctttacgtcttttccgctttgtggtcgtagcatacttcctgctctatgtggtcactccatatttggtattgctcacaaaagcgtaccgttttgttggcattggggctatactagtctggaaatgcaccttcgccagcatgatgtaccccagtaatgcgattttaacagcagactcggctcctagccacctggcactcggtaccatcaacggcgtcgcggcttcgacggcgagtctcagccgtgctcttgggccaacgatctcaggcattctttatgctctcggcctcaaatctggctactcaggtctcgcatggtggtgtagtgctctcgttgccatcgccggtgctttcgtgggtcttcagataccggacccagcctctctatctcatagaagaggggatgatcgcaacacccatgatcgcgacttggaagtcgctgagccagctcgtgttcaggacacgactcaggaacaccatcagacaccggcggtctgaccggttgattgcgtagttcattttcccgacgtcgaattttcgaaggactccttaggcgtttgatagactttactttcggcttctttcggcgcatttcctctcatattccccacatcgttgctgcttttcatcggatgaacgccttatttacgacttagacttttaatctttggccactccggttcgaatgcttcgtatttttcggcattgccttaaccgtcatgatctttttagctatctttttagcttcttgcggacttctggcgatggattcgtctcttgtttttgcgaatctgacaacactgggatagacaggaatgggcaactggcccaatttgatacctctgtacaaccaaaatttcttggggcgcggcaatcggttcttaagggcacaatgggggatacgaacaacaacaaatagacattgggcacatattggagttctacttgaccctcgcaccacgactgagggatggatgcgcagaattttattggtttcaagaatgtggataggaaaaatatggtcaggaaggcgcaaaactactatgtccccgaattcgggggtttcgaatcactgcgacggtgtaacgttgataagtgtctggctctatagtctccttagcattacaagcctaatacggaatcttgacatgatgcacaaatacgacggctagtttgacgtgctaaagcaaatcgaagtcgcatcgatgaatacgctgactcaattatcgcgctcggaagccacgatgcagatacctttggcaccggtgttatttacgccaattgcaagctggatcgttccagtgtagttttccatagttgtaaccttcgattaccgatcgaggcgtccgcacaacaccacgtcctcgccgagaggcatccacatggtatcagtgaggcgtgcagccggaccatccaccccagctgtcctctgcggactcacgaccacgcccccctgtcctaaccatgtcggagcaatcgtcacgatgacacggttgactaggccattattgtgaaccgcgagaagcgagttaatcacctcacccccgccttcaatcatgatgctattgagaccttcactccgcacagccgacaatatctcataccagccgagcctctgtattcctgaggattgagttgatgctccggggaggaaaatgaacttcccacctacatcttctaatatctgctttttctttgtaggcggctccgcgtccgaagttatgatgtacggcgcgagtcccttgcctaatcgcgccagccgtatgaccttactctcgagagtgaagttccagcgcaagtgaggatcgatgacaattggcctaggctggcgatccgtaatggcgcatcggccctcctcactttgattttcatccttcgagcccaaaataccagcggcaagccggcagttgagccccgggtcgtcagcaatggcagtccctacgccgatgcagatggcgtcgtgccgactgcgtagatagtgcgtcattgccttggactggggcccgctaagggcggtacggatccccggacccagggagagggccgagtccaaggatgtggcgaacgtcagggtcacatgtgggagtgatgagggtggcgaggatgccggcgtagatgctgatgctggtatgggtggtaaatgaggttctaggcgtttggcctcagagtgagagaaaaagaggggatcctctgccatgttccagcagcgactcactgaaaatcggatatcaactttccatccgcatcgcatagggagatatgaccctgcgtcacgacatgcaagtgttattacaaactcttggcgaacgtcactacaagcagaggagttgtgctccagatattcggttcttcctcgaacgggttcttacctggtattggctgaaagagacggcacgtcggcggaagccaccctgtaatctactagttggagctcagcggcggattttagctcttgggaatgttacgatagaactcgggcagttcctaatagtaacatggaatgtctttgccaaacaccttcattatgccgggcaacggaccgagcgcgaatgttatgaagttgaatttaggtacacaagcttatttccgttcttaaggattgcccttccgagccgggcgcagatgcaaggaagctgccctcgcactacgtgggtttgataagacctaacgtgt

SEQ ID NO: 24849 - DNA, 954 bp, Muscodor strobelii
  misc_feature: SGI cDNA ID NO. 568477
  misc_feature: Encodes the peptide sequence at SEQ ID NO 24850
atggtatctttacggtcgttttcaccaggcattcatccaccgtgcttgacctggttcaagaatgatgccactcaatcaatcgactgggatttacagaagaagcatatcgcctttctggtagaatctggcgttcaaggcgttgttctagcaggcacgaatggcgaggccgtgtgtatgacaaaagaagaaaagactcaacttatccgcctgacaaaggaaatcactgcgcaggctggcaaacctgatcttcctattacagttggatgtatcggtcagagtacccgagatgtcatcgcggatactgtcaacgccggagaagctggcgccgactttgccttggtcctttgcccaagttactttcactttgcaatgggcgaggacgccgtgattgcattcttcacagagcttgccgacgccagtccaattccaattgtcatttataacttccccgcagtcgccgccggaatcgacgtcaactcagagatgcttgccaaacttggtagtcatcccaatatcgtagctgtgaagcttacatgcggtggcattgctaaggtggccagaataaaggctcaattcgagcccaacgagtttgctgctatagctggtcaaagcgactggctgattcctgctatgatggtgggatctgttggctccgtcacgggagttgctaatctatacccaagggcttgtgtgcagctttatgatctatttaaccaaggaaagctcgccgaggcctcggcagcgcaaataaagttagcggaggtcgaatggggcttcggaaaaggcggtatcaacggtacaaaatgggttgtcgcgaagtttttaggatatccagagtccagttgccactgtcgacgtccatatccccagtttcttgactctaaaaaccgagactggattcagaaggttattgaacctctacaagcacttgaggcttcattgagcaaagcataa

SEQ ID NO: 24850 - protein, 317 aa, Muscodor strobelii
  misc_feature: SGI Peptide ID NO. 568477
  misc_feature (7)..(308): Pfam Id: PF00701 Pfam Desc: Dihydrodipicolinate synthetase family
  misc_feature (93)..(245): Pfam Id: PF00701 Pfam Desc: Dihydrodipicolinate synthetase family
  misc_feature (33)..(74): Pfam Id: PF00701 Pfam Desc: Dihydrodipicolinate synthetase family
  misc_feature (5)..(316): NCBI GI: 46110363 Blast Desc: FG02063.1 [Gibberella zeae PH-1]
  misc_feature (5)..(316): NCBI GI: 256728589 Blast Desc: [Nectria haematococca mpVI 77-13-4]
  misc_feature (2)..(316): NCBI GI: 39973257 Blast Desc: MGG_07923 [Magnaporthe grisea 70-15] gi|145012739|gb|EDJ97393.1| MGG_07923 [Magnaporthe grisea 70-15]
  misc_feature (6)..(314): NCBI GI: 169601926 Blast Desc: SNOG_03839 [Phaeosphaeria nodorum SN15] gi|111067924|gb|EAT89044.1| SNOG_03839 [Phaeosphaeria nodorum SN15]
  misc_feature (7)..(316): NCBI GI: 212535506 Blast Desc: dihydrodipicolinate synthetase family protein [Penicillium marneffei ATCC 18224] gi|210070308|gb|EEA24398.1| dihydrodipicolinate synthetase family protein [Penicillium ATCC
  misc_feature (10)..(316): NCBI GI: 261361019 Blast Desc: dihydrodipicolinate synthetase family protein [Verticillium albo-atrum VaMs.102]
  misc_feature (7)..(316): NCBI GI: 242793327 Blast Desc: dihydrodipicolinate synthetase family protein [Talaromyces stipitatus ATCC 10500] gi|218718727|gb|EED18147.1| dihydrodipicolinate synthetase family protein [Talaromyces ATCC
  misc_feature (5)..(316): NCBI GI: 70994218 Blast Desc: dihydrodipicolinate synthetase family protein [Aspergillus fumigatus Af293] gi|66849590|gb|EAL89918.1| dihydrodipicolinate synthetase family protein [Aspergillus Af293]
  misc_feature (5)..(314): NCBI GI: 119500794 Blast Desc: dihydrodipicolinate synthetase family protein [Neosartorya fischeri NRRL 181] gi|119415319|gb|EAW25257.1| dihydrodipicolinate synthetase family protein [Neosartorya NRRL
  misc_feature (2)..(314): NCBI GI: 189205413 Blast Desc: dihydrodipicolinate synthase [Pyrenophora tritici-repentis Pt-1C-BFP] gi|187975134|gb|EDU41760.1| dihydrodipicolinate synthase [Pyrenophora tritici-repentis
  misc_feature (10)..(253): SWISSPROT Homolog: EC 4.2.1.52 Dihydrodipicolinate synthase
MVSLRSFSPGIHPPCLTWFKNDATQSIDWDLQKKHIAFLVESGVQGVVLAGTNGEAVCMTKEEKTQLIRLTKEITAQAGKPDLPITVGCIGQSTRDVIADTVNAGEAGADFALVLCPSYFHFAMGEDAVIAFFTELADASPIPIVIYNFPAVAAGIDVNSEMLAKLGSHPNIVAVKLTCGGIAKVARIKAQFEPNEFAAIAGQSDWLIPAMMVGSVGSVTGVANLYPRACVQLYDLFNQGKLAEASAAQIKLAEVEWGFGKGGINGTKWVVAKFLGYPESSCHCRRPYPQFLDSKNRDWIQKVIEPLQALEASLSKA

SEQ ID NO: 24851 - DNA, 702 bp, Muscodor strobelii
  misc_feature: SGI EST ID NO. CUFF.58554.0
  misc_feature: Variant of the nucleotide sequence at SEQ ID NO 24849
cgcatactggtcggaagcgctagccacccgtcgggaaatgcgatcaataactagtcatttgtcgttgatcggactgaaattgtccccaatttggaagtggcagatgatatgagccttgaggcgtggtatcagcgcgtctcacgactgggacccggactgctatgtatatgtgaatatggaataggtcccgagctgtggacttctggccatcggcctacatagacgcccccttgtcggtgtcccgagacgatggtatcgcatagaatgaaaaccttcgagctcgagattgtaatttcttccaagcagccaatcccatcgtgactgcatcactctgcagaccacttgcgtatacgggcgagaaaacaatactataaatcaatatctagatattctgcgactatcatcatggtatctttacggtcgttttcaccaggcattcatccaccgtgcttgacctggttcaagaatgatgccactcaatcaatcgactgggatttacagaagaagcatatcgcctttctggtagaatctggcgttcaaggcgttgttctagcaggcacgaatggcgaggccgtgtgtatgacaaaagaagaaaagactcaacttatccgcctgacaaaggaaatcactgcgcaggctggcaaacctgatcttcctattacagttggatgtatcggtcagagtacccgagatgtcatcgcg

SEQ ID NO: 24852 - DNA, 852 bp, Muscodor strobelii
  misc_feature: SGI cDNA ID NO. 568478
  misc_feature: Encodes the peptide sequence at SEQ ID NO 24853
atgggcaatctgaatgaggttcagtcttctgagtcttcaaccatgaatgagggagctgctcctcccccatactcacagagcgcggctttttcaccggagtccgctccgccatatgagacagtcccatcaaatcccatcaacataccagccggagtcaagtccaaattcccaccagcattgaacggatacatatcaactgggtggaggaccaggattcatcttggggaatccaaggcaaatccactgttcgtggtggtcggtcattcggggatgactagcaaacccgagcttgagctcttcgatggcccagatgattccgcagctccgttgctggcaacagccacgcatgattcttggcggaagccaaagcagtcgattctcacagtttctaagcaagttggtactactcatgcggatgggcatgagcgcattattatgacgagtagctcaatgatgtcaaaacatgtaacctattcgtttgaagcacctgttggaatcggcaaggatatacagactgaacaatttgaatggaggacaagtcatggaagtgaggtaaaagcggtcgacggctattcctggggttggaagctcgttcgcttatcccagacaattggtgatcaaggagagggatcggcgcgttctattggctcaacaagtgacggtaaagaagtcgtcgcagcatgggcatttaacaacacaatgtctatgagcaaaacgttcaaattccagtttcagggaagcgctcttacgggagtaatgggcgacaggttcgcggcgctagcactgatctcagctctgagaatttataacatagagtatgcagttattacgactagtgctgctgctgcctga

SEQ ID NO: 24853 - protein, 283 aa, Muscodor strobelii
  misc_feature: SGI Peptide ID NO. 568478
  misc_feature (21)..(281): NCBI GI: 240105211 Blast Desc: CPC735_047740 [Coccidioides posadasii C735 delta SOWgp]
  misc_feature (21)..(281): NCBI GI: 119194669 Blast Desc: CIMG_01709 [Coccidioides immitis RS]
  misc_feature (3)..(272): NCBI GI: 255951174 Blast Desc: Pc22g24660 [Penicillium chrysogenum Wisconsin 54-1255] gi|211593371|emb|CAP99754.1| Pc22g24660 [Penicillium chrysogenum Wisconsin 54-1255]
  misc_feature (1)..(270): NCBI GI: 46134219 Blast Desc: FG09249.1 [Gibberella zeae PH-1]
  misc_feature (21)..(272): NCBI GI: 115433430 Blast Desc: [Aspergillus terreus NIH2624] gi|114189704|gb|EAU31404.1| [Aspergillus terreus NIH2624]
  misc_feature (99)..(277): NCBI GI: 169777689 Blast Desc: [Aspergillus oryzae RIB40] gi|83772047|dbj|BAE62177.1| protein product [Aspergillus oryzae]
  misc_feature (99)..(277): NCBI GI: 238494878 Blast Desc: conserved [Aspergillus flavus NRRL3357] gi|220695325|gb|EED51668.1| conserved [Aspergillus flavus NRRL3357]
  misc_feature (57)..(266): NCBI GI: 256723118 Blast Desc: NECHADRAFT_28588 [Nectria haematococca mpVI 77-13-4]
  misc_feature (3)..(272): NCBI GI: 39972603 Blast Desc: MGG_07603 [Magnaporthe grisea 70-15] gi|145016807|gb|EDK01237.1| MGG_07603 [Magnaporthe grisea 70-15]
  misc_feature (49)..(270): NCBI GI: 256730926 Blast Desc: NECHADRAFT_96110 [Nectria haematococca mpVI 77-13-4]
MGNLNEVQSSESSTMNEGAAPPPYSQSAAFSPESAPPYETVPSNPINIPAGVKSKFPPALNGYISTGWRTRIHLGESKANPLFVVVGHSGMTSKPELELFDGPDDSAAPLLATATHDSWRKPKQSILTVSKQVGTTHADGHERIIMTSSSMMSKHVTYSFEAPVGIGKDIQTEQFEWRTSHGSEVKAVDGYSWGWKLVRLSQTIGDQGEGSARSIGSTSDGKEVVAAWAFNNTMSMSKTFKFQFQGSALTGVMGDRFAALALISALRIYNIEYAVITTSAAAA

SEQ ID NO: 24854 - DNA, 1613 bp, Muscodor strobelii
  misc_feature: SGI EST ID NO. CUFF.58559.0
  misc_feature: Variant of the nucleotide sequence at SEQ ID NO 24852
tgatagtggcattcgagtctagagtgtccacataggccacgtggaaaccaagaaaatcaacatatggcatgacatcaggttcattagcgagtcgaaaaggccaaggatagcggcgctgacgtaaattgttgtatatgtgacctttcagtcgatttacacactactctgtcatacactgctatagctccgctcatttgttttctcttcaattttacagatttttccccctgacgcgaaatttagctgtgtcactgtataacgtaacagcaaacagaccaaaagatgggcaatctgaatgaggttcagtcttctgagtcttcaaccatgaatgagggagctgctcctcccccatactcacagagcgcggctttttcaccggagtccgctccgccatatgagacagtcccatcaaatcccatcaacataccagccggagtcaagtccaaattcccaccagcattgaacggatacatatcaactgggtggaggaccaggattcatcttggggaatccaaggcaaatccactgttcgtggtggtcggtcattcggggatgactagcaaacccgagcttgagctcttcgatggcccagatgattccgcagctccgttgctggcaacagccacgcatgattcttggcggaagccaaagcagtcgattctcacagtttctaagcaagttggtactactcatgcggatgggcatgagcgcattattatgacgagtagctcaatgatgtcaaaacatgtaacctattcgtttgaagcacctgttggaatcggcaaggatatacagactgaacaatttgaatggaggacaagtcatggaagtgaggtaaaagcggtcgacggctattcctggggttggaagctcgttcgcttatcccagacaattggtgatcaaggagagggatcggcgcgttctattggctcaacaagtgacggtaaagaagtcgtcgcagcatgggcatttaacaacacaatgtctatgagcaaaacgttcaaattccagtttcagggaagcgctcttacgggagtaatgggcgacaggttcgcggcgctagcactgatctcagctctgagaatttataacatagagtatgcagttattacgactagtgctgctgctgcctgaggaatgcagtatcaatacgacaatgaggcaagaaaactcttgctaaataattgttcagagtagcatgacgctacatagcctagactggagtaattgttcagccccattttgttacccagcctctttcaggttattgtcagtcgaagtccaccggactagggcaatcggtgagcattgctcttcgcattcctgtcttactcatacacacacaatactatcactgcccagtatgatgatgattttatgtattatagatgaatagcacctggctgacaaccagggcgcccttatagaagccttgttatgagctgccaatgatagaactattgcacgcgatcatccgtccctcaggaatatgctgaataggctttgctgaatgccaaaccagctaatgaagcagagcgaatcaagctggttcatctcgtttagctgacgtaatcaccacgagaggaaagacgcatcctttaggtactgatgat

SEQ ID NO: 24855 - DNA, 1359 bp, Muscodor strobelii
  misc_feature: SGI cDNA ID NO. 568479
  misc_feature: Encodes the peptide sequence at SEQ ID NO 24856
atggctaacgtcaaggacttgagaatttctgtcataggtgcaggcatgggtggcttggccacggccctcgcctttgccaagaagggcttcacaaggatcgatgtctacgaaacagcgtcaaatttggggttcgtaggtgctggtattcagctgtcgccaaatctagcgcgtgtattagatcgctgggggtgttgggataagatcctctccgaggctactcagatctcgtcgtcgagtattcgagaaggctccacgaacaaagaattgtctctcgtttcaatgcctaacatagaagaactctacggttatccacactgcgttggtcaccgagcgtctttagccggcggtctatacgaagcatgccagaaggagtcagccatctccttccacttttcaaccgcagttgagagtgtcagcgagttcgaggccaataaagtcgtattcgttgcaaaaccacgtgaaggcgaggcatacaaagtcgagactggtctacttcttgctgcggatggaatcaaatctgctgtgagatcatcgctgttgaaggtgatcaataactcggccgaagtcgaagatacaggccaagccgcataccgcatcatgttaaatcgagccgatatggagaatgacccagagatgctcgaactcctcgactctaactgcgcgctgcggtgggtgggcgagaagcgtcacatcgtcgcgtatccgattagcaataagaccatttacaacctctcgacatgccagccagacaccaacttcgcggaggcgcctagcattacatacactacgcgcgggagtaagagcgctatgctggatgtctatggtgacttctgtccgcttgttaaacgcatgctgaacctagttcccgagggggaagtttgcgaatggaaactgcgctcgcataaacggctagagacgtggaccctcggcggtgttgctctcatcggggatgcatgccatccaaccctaccgcatctcgcacagggcgctactatggcaattgaagatggtgccgtgctcgccgaggttgtcagcgcagcgccgagcaccgaccccgaagttcttgcccgcgccctgaaggtatacgagctcctgcgcaaagattggacgtataatctcgttgatctagctgcattctcaggacgaacgcttcacctcggcgagggtaaggcaagagaagagcgggatcgacagtttgaagaggcacggaagagtggcaaaccagttcccgataagtgggcgagtccggaggtgcagcagatgatttattcgaatgattgtgtcaagattgcacaggatagattcgacaaactgtacaatagtctggggcaaagcaacggcgtggcaagcatgatgtag

SEQ ID NO: 24856 - protein, 452 aa, Muscodor strobelii
  misc_feature: SGI Peptide ID NO. 568479
  misc_feature (6)..(377): Pfam Id: PF01494 Pfam Desc: FAD binding domain
  misc_feature (1)..(442): NCBI GI: 116196128 Blast Desc: CHGG_04662 [Chaetomium globosum CBS 148.51] gi|88180575|gb|EAQ88043.1| CHGG_04662 [Chaetomium globosum CBS 148.51]
  misc_feature (1)..(439): NCBI GI: 256727488 Blast Desc: [Nectria haematococca mpVI 77-13-4]
  misc_feature (8)..(449): NCBI GI: 156037342 Blast Desc: SS1G_12382 [Sclerotinia sclerotiorum 1980] gi|154697793|gb|EDN97531.1| SS1G_12382 [Sclerotinia sclerotiorum 1980]
  misc_feature (1)..(442): NCBI GI: 85108201 Blast Desc: NCU08315 [Neurospora crassa OR74A] gi|28924136|gb|EAA33292.1| NCU08315 [Neurospora crassa OR74A]
  misc_feature (1)..(442): NCBI GI: 46121369 Blast Desc: FG05063.1 [Gibberella zeae PH-1]
  misc_feature (7)..(442): NCBI GI: 39944310 Blast Desc: MGG_04166 [Magnaporthe grisea 70-15] gi|145014899|gb|EDJ99467.1| MGG_04166 [Magnaporthe grisea 70-15]
  misc_feature (3)..(447): NCBI GI: 212531703 Blast Desc: monooxygenase, [Penicillium marneffei ATCC 18224] gi|210071372|gb|EEA25461.1| monooxygenase, [Penicillium marneffei ATCC 18224]
  misc_feature (2)..(442): NCBI GI: 171690476 Blast Desc: protein product [Podospora anserina] gi|170945186|emb|CAP71297.1| protein product [Podospora anserina]
  misc_feature (1)..(444): NCBI GI: 256727324 Blast Desc: NECHADRAFT_90741 [Nectria haematococca mpVI 77-13-4]
  misc_feature (17)..(439): NCBI GI: 154293167 Blast Desc: BC1G_14568 [Botryotinia fuckeliana B05.10] gi|150845608|gb|EDN20801.1| BC1G_14568 [Botryotinia fuckeliana B05.10]
  misc_feature (27)..(385): SWISSPROT Homolog: EC 1.14.13.24 3-hydroxybenzoate 6-monooxygenase
MANVKDLRISVIGAGMGGLATALAFAKKGFTRIDVYETASNLGFVGAGIQLSPNLARVLDRWGCWDKILSEATQISSSSIREGSTNKELSLVSMPNIEELYGYPHCVGHRASLAGGLYEACQKESAISFHFSTAVESVSEFEANKVVFVAKPREGEAYKVETGLLLAADGIKSAVRSSLLKVINNSAEVEDTGQAAYRIMLNRADMENDPEMLELLDSNCALRWVGEKRHIVAYPISNKTIYNLSTCQPDTNFAEAPSITYTTRGSKSAMLDVYGDFCPLVKRMLNLVPEGEVCEWKLRSHKRLETWTLGGVALIGDACHPTLPHLAQGATMAIEDGAVLAEVVSAAPSTDPEVLARALKVYELLRKDWTYNLVDLAAFSGRTLHLGEGKAREERDRQFEEARKSGKPVPDKWASPEVQQMIYSNDCVKIAQDRFDKLYNSLGQSNGVASMM

SEQ ID NO: 24857 - DNA, 3924 bp, Muscodor strobelii
  misc_feature: SGI EST ID NO. CUFF.58673.0
  misc_feature: Variant of the nucleotide sequence at SEQ ID NO 24855
tcggtcttggagcctcaacctacggtatcaatggaggcacggattattgtctacaccgagactgaccacgcaatgcgacgtcgcatgacgcacgcgccggttatcttactggcaagaaggtcagaagaacaccaacttaatctactactattacacaatgaaatcatcctgcaaggcgaaatgattatcctagttgcatcgattgccgaaataggtgagatcttagagcccctcattatccaactggccgagttgtacccattttccccacatcattaacagccatatctacacccggtcctagtaccaagttctagccgggagtattaattgcccgcaccagatcatccatccgtagagcaatgggggtttcctatccgccgatgatggcttcgctgcttgttaaatgtgcatcaggtaatccgtgagccattcctgtgccgacaagctagactagagacgtatgaaaatcttcattcatcatggctaacgtcaaggacttgagaatttctgtcataggtgcaggcatgggtggcttggccacggccctcgcctttgccaagaagggcttcacaaggatcgatgtctacgaaacagcgtcaaatttggggttcgtaggtgctggtattcagctgtcgccaaatctagcgcgtgtattagatcgctgggggtgttgggataagatcctctccgaggctactcagatctcgtcgtcgagtattcgagaaggctccacgaacaaagaattgtctctcgtttcaatgcctaacatagaagaactctacggttatccacactgcgttggtcaccgagcgtctttagccggcggtctatacgaagcatgccagaaggagtcagccatctccttccacttttcaaccgcagttgagagtgtcagcgagttcgaggccaataaagtcgtattcgttgcaaaaccacgtgaaggcgaggcatacaaagtcgagactggtctacttcttgctgcggatggaatcaaatctgctgtgagatcatcgctgttgaaggtgatcaataactcggccgaagtcgaagatacaggccaagccgcataccgcatcatgttaaatcgagccgatatggagaatgacccagagatgctcgaactcctcgactctaactgcgcgctgcggtgggtgggcgagaagcgtcacatcgtcgcgtatccgattagcaataagaccatttacaacctctcgacatgccagccagacaccaacttcgcggaggcgcctagcattacatacactacgcgcgggagtaagagcgctatgctggatgtctatggtgacttctgtccgcttgttaaacgcatgctgaacctagttcccgagggggaagtttgcgaatggaaactgcgctcgcataaacggctagagacgtggaccctcggcggtgttgctctcatcggggatgcatgccatccaaccctaccgcatctcgcacagggcgctactatggcaattgaagatggtgccgtgctcgccgaggttgtcagcgcagcgccgagcaccgaccccgaagttcttgcccgcgccctgaaggtatacgagctcctgcgcaaagattggacgtataatctcgttgatctagctgcattctcaggacgaacgcttcacctcggcgagggtaaggcaagagaagagcgggatcgacagtttgaagaggcacggaagagtggcaaaccagttcccgataagtgggcgagtccggaggtgcagcagatgatttattcgaatgattgtgtcaagattgcacaggatagattcgacaaactgtacaatagtctggggcaaagcaacggcgtggcaagcatgatgtagtagtgtcaagtaaaaatattgaattgcgttcaggtagtattttcctgaatcgattaaggtagaatcacgattgatcttcaattttgtccctggtgaccgtgcgcctgtaccctgtcaatccctaacgcccacccttgatatcatgattgttcagagaaatgatgctaccgatgcctcctgccttcgcgtttgcaaaagcattggtcgcatgattcagaacgtaagccagtgacaatatctaccagcaatgaagcctttgttttgccatcagaaccctatttccgaatccggatgttgcctatttgcgggaggcctcccaatgaccaccgcgaaccactgtcaaatgtatctttaccatcgcagtatccgcctattcccgcgctgatgacgcctatgatgcatatttactatatgcatattcgtcagaatatggcgcaattctgtcgcctacaataacgacttcaactaattagaatatgaagtccaggcagcagcagcaagctaatgagcccaacaggaaacctagacatccatcgctactattgccgcgttgttgctggtagtaaccaggatgttgttgataataaggcccgggctgttgatagtagccttgttgctgatagtaggggccttggttgtaaccaccttgcggtgggtggcctctctgttgatacggtccatcttgcggatagaagccctgattttgcggcgcttgatagttcatcatttgtccttgctgatagccagggtagttggggtttccctgatatggctgctgatgcgtcggcgctggcgattgcgggccgggggagcctgggtaattcggaggagggtcatttttaggacccatggtgttttcagttcggggaaagtcttgttttgatggtcacgatggagttgatgaattggcctcgaaggcgaataggtttgcggagcctacaagtataatgtaccgcaatcacctctgtggtgtagattttaaggcgtaaagtgctccgcagctaagggattatttgtcgatgacgtcgtgatatgtgattgctgaggaacaggatgttgcgagggagacggcagtcaaatgaactatcaagaagagaagttttgtagaaggacaagcagaagaaggatggaattgtttattcactgcatgagtcggaagaccggaatggaagtgaactctaacacaaccctcggtggttcgagggtccgattagcagtaataagatacttgggatgtgtcgccccgtcgcatggcgaaggcaatcgctggcaaatggctgtggcggagcaagaatttattggagacgatcctcttgctagtcgtaggccgcgtgtgcgagaatttgatcataagctctttgcggtgcttggcttaaatgtcagatgcaagactgaggggtattatttggaatgtggcttcgtcgtgcaatcacaaacagttcatactcccagcaaacgactgattacattcagtatatgctcgagatcgatttgctctcattttgtacgatgaaatttcgaagatcgacattcgagaatatgcatacgaacagaatggattctgcgagattgtctgacacatgttttaagggtctcttactcctttgatccaagacccgatccagacaatctgcgccgcagatcctacgtaacggctctaaaactggggggctcggggctaccgcaagacatgttggggttgatagaaacccgaatgctacctaatgtgcagatttagcacggctggtcgagctggacagaacaaagactatcgatcctttcgatattcttcaacaggcaggcactggtcaattcaaaactacgtggtgagctaccggcagtcgagcaggcagtgcaggggcatcggacataagggcgtctaggggccaagcttgcgcacctgttttaatgtatcacttccccagtcctgccagcgatgccatgatgagggaatggtttgaactgtttcgatactttttaaggacgcatgctaggacacagcttcaattcaatccaattacttccaatcgcattgcatctactttgaaatataatgaaaccttaggagcttatataatcctcc

SEQ ID NO: 24858 - DNA, 969 bp, Muscodor strobelii
  misc_feature: SGI cDNA ID NO. 568480
  misc_feature: Encodes the peptide sequence at SEQ ID NO 24859
atggcgccctccagattctgtacccttcccgcgcttaggaggcagcaccttctcgccgaatttgctgggctcaagcaagcttgccccgaaggcgttttcgtgagcctcacacccggagacccaagtctatggtctggcgtcatcttcgtacgcgacggcccatacgctcccgccgttatgcgatttcagatatcttttccagattcttacccaagattgccgcctttggttacattctcgacggacatgtttcaccccttaatcacgcctctcagtacatacatgtactccaccgatgccgaagatgatggcactgttagtgcgactgatctcgagcggctaccacccggtggcttcagcctcatacatggatttcccgagtggtttagccgccgaggacgcgtcagggctgatgccaggcaaacgggtgccgtaccaggagcccaacaaactccgcatcggcctccaccacccactgatcctagcggcggaggctcgattggctctgccagttccgctctagaacagtctccaggcttcgcggataccaacagaagagagccgtccacttatgctgtcctaagatacatacgtagcacatttgatgacgaagatgttcttgacagcatacctattgaagccgccggaaacccaggcgcctggcatgcatggagaactcatcgtatcgacaatggcaagaattttggtgatgctaacaatgctcaggagatagcgagcacggatcactccatttcaaaacctagtacgggaagaaagcccggaaattggaattgggagggtgtttgggaagaaagagtcaacaaaggcatttcttctagtctgtcggaatctgttatgtttggcggtgctggagttgccgatgacgttttacgattctcaaatttgggggaagaggacgtggactcgattaaagagactctcttacgcacagtagatcacgatatatga

SEQ ID NO: 24859 - protein, 322 aa, Muscodor strobelii
  misc_feature: SGI Peptide ID NO. 568480
  misc_feature (44)..(88): Pfam Id: PF00179 Pfam Desc: Ubiquitin-conjugating enzyme
  misc_feature (1)..(318): NCBI GI: 256726891 Blast Desc: NECHADRAFT_103402 [Nectria haematococca mpVI 77-13-4]
  misc_feature (1)..(318): NCBI GI: 46121475 Blast Desc: FG05116.1 [Gibberella zeae PH-1]
  misc_feature (9)..(318): NCBI GI: 261352518 Blast Desc: conserved [Verticillium albo-atrum VaMs.102]
  misc_feature (6)..(297): NCBI GI: 145613612 Blast Desc: MGG_01483 [Magnaporthe grisea 70-15] gi|145020674|gb|EDK04803.1| MGG_01483 [Magnaporthe grisea 70-15]
  misc_feature (1)..(315): NCBI GI: 121700871 Blast Desc: ACLA_019790 [Aspergillus clavatus NRRL 1] gi|119396843|gb|EAW07274.1| ACLA_019790 [Aspergillus clavatus NRRL 1]
  misc_feature (1)..(317): NCBI GI: 225560268 Blast Desc: conserved [Ajellomyces capsulatus G186AR]
  misc_feature (1)..(317): NCBI GI: 154276600 Blast Desc: conserved [Ajellomyces capsulatus NAm1] gi|150414218|gb|EDN09583.1| conserved [Ajellomyces capsulatus NAm1]
  misc_feature (1)..(317): NCBI GI: 240279018 Blast Desc: ubiquitin-conjugating enzyme [Ajellomyces capsulatus H143]
  misc_feature (1)..(317): NCBI GI: 261200967 Blast Desc: ubiquitin-conjugating enzyme [Ajellomyces dermatitidis SLH14081] gi|239593956|gb|EEQ76537.1| ubiquitin-conjugating enzyme [Ajellomyces dermatitidis SLH14081]
  misc_feature (1)..(317): NCBI GI: 239607168 Blast Desc: ubiquitin-conjugating enzyme [Ajellomyces dermatitidis ER-3]
MAPSRFCTLPALRRQHLLAEFAGLKQACPEGVFVSLTPGDPSLWSGVIFVRDGPYAPAVMRFQISFPDSYPRLPPLVTFSTDMFHPLITPLSTYMYSTDAEDDGTVSATDLERLPPGGFSLIHGFPEWFSRRGRVRADARQTGAVPGAQQTPHRPPPPTDPSGGGSIGSASSALEQSPGFADTNRREPSTYAVLRYIRSTFDDEDVLDSIPIEAAGNPGAWHAWRTHRIDNGKNFGDANNAQEIASTDHSISKPSTGRKPGNWNWEGVWEERVNKGISSSLSESVMFGGAGVADDVLRFSNLGEEDVDSIKETLLRTVDHDI

SEQ ID NO: 24860 - DNA, 1847 bp, Muscodor strobelii
  misc_feature: SGI EST ID NO. CUFF.58608.1
  misc_feature: Variant of the nucleotide sequence at SEQ ID NO 24858
ttgcgggatcaaccatagccgcattgattgcaattcgacatacctttaggtacactgccaacctaaatgtaaggtaacgtgatttaataatgcatttcagtgcaaagacaacgacttaaataatgcaaacctatttcttatcacgctactgccaggactagctttcgactggttcgtaacatcaatattcggaacacacgagatgccgaaacggacaatgtgatgcaaggctctcatacaagaggtaaaccattatccgaggtgcaatgcggcatgcatatggcggggggattccgccatgttggcgctatcgataagctgtttcgtgcctcatagtgtctcatgatgaacagccaggaaagacaaccggtcgcaactattataatcttcaaaatatgatgagctcacagcaataaggatatctattttcgtggctcactagatcgcctttcgctcgttcaatgggcacgaataatacaagacgcgtgccattgagaatgcaacatggcgccctccagattctgtacccttcccgcgcttaggaggcagcaccttctcgccgaatttgctgggctcaagcaagcttgccccgaaggcgttttcgtgagcctcacacccggagacccaagtctatggtctggcgtcatcttcgtacgcgacggcccatacgctcccgccgttatgcgatttcagatatcttttccagattcttacccaagattgccgcctttggttacattctcgacggacatgtttcaccccttaatcacgcctctcagtacatacatgtactccaccgatgccgaagatgatggcactgttagtgcgactgatctcgagcggctaccacccggtggcttcagcctcatacatggatttcccgagtggtttagccgccgaggacgcgtcagggctgatgccaggcaaacgggtgccgtaccaggagcccaacaaactccgcatcggcctccaccacccactgatcctagcggcggaggctcgattggctctgccagttccgctctagaacagtctccaggcttcgcggataccaacagaagagagccgtccacttatgctgtcctaagatacatacgtagcacatttgatgacgaagatgttcttgacagcatacctattgaagccgccggaaacccaggcgcctggcatgcatggagaactcatcgtatcgacaatggcaagaattttggtgatgctaacaatgctcaggagatagcgagcacggatcactccatttcaaaacctagtacgggaagaaagcccggaaattggaattgggagggtgtttgggaagaaagagtcaacaaaggcatttcttctagtctgtcggaatctgttatgtttggcggtgctggagttgccgatgacgttttacgattctcaaatttgggggaagaggacgtggactcgattaaagagactctcttacgcacagtagatcacgatatatgattggtcatgcacgttgaaccttctacattgaagcatgagctctttcccaccttctctagcatctacagctcgcgcccactccttcttctacgtccagccagatttcaccagcgtatacccagtgatattagttttgctcgttcccgatgatcgtgtattatagggacatactacacattaatatagatcaccataccactgagcacttgaacgcattacaattgttgttttcccatattatctcattcataccaacccgttgtctctatcactcaaggagagggaattgcaatatagacgccaagtgaattagagacaaattctgagaagatgcgaaaatcccgtcgaattcagtcccaagctgcggatcatcc

SEQ ID NO: 24861 - DNA, 957 bp, Muscodor strobelii
  misc_feature: SGI cDNA ID NO. 568481
  misc_feature: Encodes the peptide sequence at SEQ ID NO 24862
atggcgtccaaggtcccctcgatcacggtcctgggatcgttaaacatggacgtagtatcctatgtctcttacatgccagccgccggcgagacgatggcctcaaactcctttgccgtgtcaccaggcggtaaaggcgccaaccaagccattgcctgcgccaaactctctcgctccaagtcatcgcccacaacagacgagagtgcgcacatccgcatgatcggggccgtaggcgcggatgcatatggcagccagttgacgtcgaatctcacggcccatggcgtagattgctcgggtgttactgcgtcaccggatctgcagactggtgtagctgtgatcattgtcgaggagccaacgggtcagaacagaattatcttctcggctcaggcaaataacagtttacaagcttcacaattcaccgtactgcctgatccgaagcccgacctacttatcatgcagctggagactccgctcccagttgtgttagcggctatgaaagccgcgctgaatgcatccgttcccgttctcctgaatccggcacctgcacagcccctaccggatgaagcgtacacaggacttgcgcatttgatagtgaacgagacggaagccgccattctctcgggctcgaaagaggcagatcttgagaccgagaacggtcttgagaaggcaggggagatttttctaaagcgtggtgtgcagaatgtgattatcacacttggtggtcgtggagtatactacgtgtctgccaaagacagcaagaagggcctggtccctgctgagaaggcgaaagttgtcgacacgactgctgcaggcgatacgtttgttggacggtatggtcttgaggttgtcggcggcgcgttcgatattgaggccgctgtgcgtgtggcaaatcgtgctgctgctaagacggtagagagactaggggcgcaggactctattccatggagagatgagctataa

SEQ ID NO: 24862 - protein, 318 aa, Muscodor strobelii
  misc_feature: SGI Peptide ID NO. 568481
  misc_feature (5)..(315): Pfam Id: PF00294 Pfam Desc: pfkB family carbohydrate kinase
  misc_feature (72)..(275): Pfam Id: PF00294 Pfam Desc: pfkB family carbohydrate kinase
  misc_feature (5)..(55): Pfam Id: PF00294 Pfam Desc: pfkB family carbohydrate kinase
  misc_feature (287)..(315): Pfam Id: PF00294 Pfam Desc: pfkB family carbohydrate kinase
  misc_feature (3)..(318): NCBI GI: 145603380 Blast Desc: MGG_06089 [Magnaporthe grisea 70-15] gi|145011620|gb|EDJ96276.1| MGG_06089 [Magnaporthe grisea 70-15]
  misc_feature (16)..(318): NCBI GI: 116196630 Blast Desc: CHGG_04913 [Chaetomium globosum CBS 148.51] gi|88180826|gb|EAQ88294.1| CHGG_04913 [Chaetomium globosum CBS 148.51]
  misc_feature (6)..(318): NCBI GI: 46121471 Blast Desc: FG05114.1 [Gibberella zeae PH-1]
  misc_feature (1)..(318): NCBI GI: 256721270 Blast Desc: NECHADRAFT_44621 [Nectria haematococca mpVI 77-13-4]
  misc_feature (32)..(318): NCBI GI: 164429494 Blast Desc: NCU04339 [Neurospora crassa OR74A] gi|157073499|gb|EAA27084.2| conserved [Neurospora crassa OR74A]
  misc_feature (6)..(318): NCBI GI: 46139645 Blast Desc: FG11337.1 [Gibberella zeae PH-1]
  misc_feature (1)..(318): NCBI GI: 171688398 Blast Desc: protein product [Podospora anserina] gi|170944161|emb|CAP70271.1| protein product [Podospora anserina]
  misc_feature (1)..(318): NCBI GI: 169615423 Blast Desc: SNOG_10869 [Phaeosphaeria nodorum SN15] gi|160702957|gb|EAT81368.2| SNOG_10869 [Phaeosphaeria nodorum SN15]
  misc_feature (32)..(318): NCBI GI: 261359878 Blast Desc: ribokinase [Verticillium albo-atrum VaMs.102]
  misc_feature (1)..(318): NCBI GI: 189210166 Blast Desc: ribokinase [Pyrenophora tritici-repentis Pt-1C-BFP] gi|187977508|gb|EDU44134.1| ribokinase [Pyrenophora tritici-repentis Pt-1C-BFP]
  misc_feature (7)..(313): SWISSPROT Homolog: EC 2.7.1.15 Ribokinase
MASKVPSITVLGSLNMDVVSYVSYMPAAGETMASNSFAVSPGGKGANQAIACAKLSRSKSSPTTDESAHIRMIGAVGADAYGSQLTSNLTAHGVDCSGVTASPDLQTGVAVIIVEEPTGQNRIIFSAQANNSLQASQFTVLPDPKPDLLIMQLETPLPVVLAAMKAALNASVPVLLNPAPAQPLPDEAYTGLAHLIVNETEAAILSGSKEADLETENGLEKAGEIFLKRGVQNVIITLGGRGVYYVSAKDSKKGLVPAEKAKVVDTTAAGDTFVGRYGLEVVGGAFDIEAAVRVANRAAAKTVERLGAQDSIPWRDEL

SEQ ID NO: 24863 - DNA, 1708 bp, Muscodor strobelii
  misc_feature: SGI EST ID NO. CUFF.58575.0
  misc_feature: Variant of the nucleotide sequence at SEQ ID NO 24861
cgcccaacagatgatactcagcacactctccaactattctagctcgtgttcattcactgtaccacacagtccagactttcaacctacccctctgtggagcgttgactaggtccactatcgacagctccttagcggtcgggacgacggccgagcacagctctgcggctcacatgtatttgcccacttacctatatccagatacatgcaaagactgtgagatctccaattgactgcgctccaaagaacatatcagtatcttgaaaagcaaaagacaccgctcgtctggtcgacatcccagccaatgaaaagagattaagcattggccaagcacctcatcagctcctcccgtcacaccagctctctacccattatggcgtccaaggtcccctcgatcacggtcctgggatcgttaaacatggacgtagtatcctatgtctcttacatgccagccgccggcgagacgatggcctcaaactcctttgccgtgtcaccaggcggtaaaggcgccaaccaagccattgcctgcgccaaactctctcgctccaagtcatcgcccacaacagacgagagtgcgcacatccgcatgatcggggccgtaggcgcggatgcatatggcagccagttgacgtcgaatctcacggcccatggcgtagattgctcgggtgttactgcgtcaccggatctgcagactggtgtagctgtgatcattgtcgaggagccaacgggtcagaacagaattatcttctcggctcaggcaaataacagtttacaagcttcacaattcaccgtactgcctgatccgaagcccgacctacttatcatgcagctggagactccgctcccagttgtgttagcggctatgaaagccgcgctgaatgcatccgttcccgttctcctgaatccggcacctgcacagcccctaccggatgaagcgtacacaggacttgcgcatttgatagtgaacgagacggaagccgccattctctcgggctcgaaagaggcagatcttgagaccgagaacggtcttgagaaggcaggggagatttttctaaagcgtggtgtgcagaatgtgattatcacacttggtggtcgtggagtatactacgtgtctgccaaagacagcaagaagggcctggtccctgctgagaaggcgaaagttgtcgacacgactgctgcaggcgatacgtttgttggacggtatggtcttgaggttgtcggcggcgcgttcgatattgaggccgctgtgcgtgtggcaaatcgtgctgctgctaagacggtagagagactaggggcgcaggactctattccatggagagatgagctataaagataagaaaatacgcgtaaaaataaattcaaaataaagcatgccacatttcaatctcactacgtttacatggtgactagtgcgttaaatatcaattttaagttgaacgataattctcttgagccagagaggcgagcatcgtcagtcaacgaaacacagcttggtagaactccaaagaccccgcgacacccttctatactagcaaacgtatgcacttcatccggaaccaagcaaagcagactacccctaacaaacattgttgctccttgctcacttcaccaccaacctcccaggctccatcggccgtcccttctactctcacgctcgggtgggacgttctctttcccagcgggatgggtcggcgagttttctttgctgccg

SEQ ID NO: 24864 - DNA, 912 bp, Muscodor strobelii
  misc_feature: SGI cDNA ID NO. 568482
  misc_feature: Elevated expression when VOC is produced
  misc_feature: Encodes the peptide sequence at SEQ ID NO 24865
atggacatcaatcttcaagacatacatgacaccctcatatcggttgcccatgaggcaggccgtatgatgttgtcggccaacccaaccgaccttgcaacagatactaagatcaactccgccgatatcgtcaccgaaacggacaaagcggttgaaacacttgtgtcatcccgcttaatggcacaatacccaaattttgacttcattggagaagaaacctataagccaggcatggagatcacaaacaagccaactttcattgttgatcccattgacgggactacaaacttcgtgcatggatttccgagtgcctgcatttcgctcgggctggcagtcgaccgccgacctgcggttggagttgtgtataacccctggcaagaccagttgttcacaggtattcgtggtcagggagcctacgtgacgacaggtgcgaattggggactggagggaggcaacggtcgacgtagtcaactgccgctagctaagaacccggcaccgttaaagggccttgatacttcgctgtgcggaattgaatggggcagtcacagagatggtaataattacaaggtgaagacggaggttttcaagaaactcgcggcagctaaagaggacggagggtcgatggtgcattccctccgtagtctcggcagtgcggcgctcaacctttgcatggtcgcagctggctcacttgacttgtattgggagggcggctgctgggcatgggatgtttgtgccgcgtggtgcattctgagcgaagcaggtgggatcatggccagcggaaacccgggtgactgggatcccaaaattgattcaaggaagtatttggccgtccgcggggcgccaagtggacagaaggaaattgtcgaagagctatggcgtgtcataggagatggaaggatggagtatgagagctga

SEQ ID NO: 24865 - protein, 303 aa, Muscodor strobelii
  misc_feature: SGI Peptide ID NO. 568482
  misc_feature (4)..(295): Pfam Id: PF00459 Pfam Desc: Inositol monophosphatase family
  misc_feature (2)..(301): NCBI GI: 46110170 Blast Desc: FG01967.1 [Gibberella zeae PH-1]
  misc_feature (2)..(302): NCBI GI: 85107485 Blast Desc: NCU06348 [Neurospora crassa OR74A] gi|28923987|gb|EAA33146.1| NCU06348 [Neurospora crassa OR74A]
  misc_feature (2)..(301): NCBI GI: 256720948 Blast Desc: [Nectria haematococca mpVI 77-13-4]
  misc_feature (2)..(301): NCBI GI: 145603258 Blast Desc: MGG_06165 [Magnaporthe grisea 70-15] gi|145011524|gb|EDJ96180.1| MGG_06165 [Magnaporthe grisea 70-15]
  misc_feature (3)..(303): NCBI GI: 154319744 Blast Desc: BC1G_02353 [Botryotinia fuckeliana B05.10] gi|150856011|gb|EDN31203.1| BC1G_02353 [Botryotinia fuckeliana B05.10]
  misc_feature (2)..(303): NCBI GI: 156046226 Blast Desc: myo-inositol-1-monophosphotase [Sclerotinia sclerotiorum 1980] gi|154693767|gb|EDN93505.1| myo-inositol-1-monophosphotase [Sclerotinia sclerotiorum 1980]
  misc_feature (3)..(301): NCBI GI: 242814744 Blast Desc: inositol monophosphatase, [Talaromyces stipitatus ATCC 10500] gi|218714770|gb|EED14193.1| inositol monophosphatase, [Talaromyces stipitatus ATCC 10500]
  misc_feature (2)..(302): NCBI GI: 116194554 Blast Desc: CHGG_03875 [Chaetomium globosum CBS 148.51] gi|88179788|gb|EAQ87256.1| CHGG_03875 [Chaetomium globosum CBS 148.51]
  misc_feature (4)..(301): NCBI GI: 212545132 Blast Desc: inositol monophosphatase, [Penicillium marneffei ATCC 18224] gi|210065689|gb|EEA19783.1| inositol monophosphatase, [Penicillium marneffei ATCC 18224]
  misc_feature (4)..(301): NCBI GI: 119179482 Blast Desc: CIMG_08486 [Coccidioides immitis RS]
  misc_feature (5)..(301): SWISSPROT Homolog: EC 3.1.3.25 Inositol-phosphate phosphatase
  misc_feature: Useful for introducing or modulating the production of volatile compounds
MDINLQDIHDTLISVAHEAGRMMLSANPTDLATDTKINSADIVTETDKAVETLVSSRLMAQYPNFDFIGEETYKPGMEITNKPTFIVDPIDGTTNFVHGFPSACISLGLAVDRRPAVGVVYNPWQDQLFTGIRGQGAYVTTGANWGLEGGNGRRSQLPLAKNPAPLKGLDTSLCGIEWGSHRDGNNYKVKTEVFKKLAAAKEDGGSMVHSLRSLGSAALNLCMVAAGSLDLYWEGGCWAWDVCAAWCILSEAGGIMASGNPGDWDPKIDSRKYLAVRGAPSGQKEIVEELWRVIGDGRMEYES

SEQ ID NO: 24866 - DNA, 1185 bp, Muscodor strobelii
  misc_feature: SGI EST ID NO. CUFF.58578.0
  misc_feature: Variant of the nucleotide sequence at SEQ ID NO 24864
cgtcaagtgtgctggcgttatagacacgctatcgccctcagaaaataaccccactatgacattcagcagtttattttgaacgatactgcgcaatcatctcagtatcattcttcaatatcaatcttacttacattggcaaaacaagtcaacatggacatcaatcttcaagacatacatgacaccctcatatcggttgcccatgaggcaggccgtatgatgttgtcggccaacccaaccgaccttgcaacagatactaagatcaactccgccgatatcgtcaccgaaacggacaaagcggttgaaacacttgtgtcatcccgcttaatggcacaatacccaaattttgacttcattggagaagaaacctataagccaggcatggagatcacaaacaagccaactttcattgttgatcccattgacgggactacaaacttcgtgcatggatttccgagtgcctgcatttcgctcgggctggcagtcgaccgccgacctgcggttggagttgtgtataacccctggcaagaccagttgttcacaggtattcgtggtcagggagcctacgtgacgacaggtgcgaattggggactggagggaggcaacggtcgacgtagtcaactgccgctagctaagaacccggcaccgttaaagggccttgatacttcgctgtgcggaattgaatggggcagtcacagagatggtaataattacaaggtgaagacggaggttttcaagaaactcgcggcagctaaagaggacggagggtcgatggtgcattccctccgtagtctcggcagtgcggcgctcaacctttgcatggtcgcagctggctcacttgacttgtattgggagggcggctgctgggcatgggatgtttgtgccgcgtggtgcattctgagcgaagcaggtgggatcatggccagcggaaacccgggtgactgggatcccaaaattgattcaaggaagtatttggccgtccgcggggcgccaagtggacagaaggaaattgtcgaagagctatggcgtgtcataggagatggaaggatggagtatgagagctgatttcgcccttaccttgacaagtctgaacgctagaagatatcttataactcgattgaagattgttatatagaaattataataaggttcaaagtacgtagcatgaactatctacaataaacccac

SEQ ID NO: 24867 - DNA, 762 bp, Muscodor strobelii
  misc_feature: SGI cDNA ID NO. 568483
  misc_feature: Encodes the peptide sequence at SEQ ID NO 24868
atgtccgagtttccttcccgcatggcggacttacgacgtcagggaaaggaacagggcgaggaatatctacttactgcgtttatgactgcagtcaccattctacatgagattggtcatgcggtgtactggagggaccgtcgttctctaacgcgaaacttacgagagcctttctacggcgcagatctggagatggaactcggcgacagctttgtagccgctgtttttggaggctggatacccgtaccagtaagaagcctttctaatcttcgcaacgatttcgggtttacggatggccttgcgtggaggcaagctctaagttgggattttcatcggatgagacccaagtatcgcgctcactactctattccggttgactacatcgcacgccttttcactgagaagacaatcgcagattttcactacgagggcgacgactggatttggaatcgccgacctggcgcttgtttccgaataccgcaatatgccggcgttgtatatccggatatcgagctcccagttgcaccggataacacgatcattgaaccaaccgcgagacatccacaccctgacttggccgccaaaccatccgaggaagtcgagcaaatacgatctgatgtcagatcagaagtgaggcccacggaaaagcgagtacagtccacgaaaatttgcactcgtaagtccgacaaagattccacaaccgactaccgcatcttcgcctggctctgttgcgagcccaccgataaccccgaggaagcgaaatag

SEQ ID NO: 24868 - protein, 253 aa, Muscodor strobelii
  misc_feature: SGI Peptide ID NO. 568483
  misc_feature (1)..(125): NCBI GI: 171683287 Blast Desc: protein product [Podospora anserina] gi|170941603|emb|CAP67257.1| protein product [Podospora anserina]
  misc_feature (23)..(133): NCBI GI: 154294590 Blast Desc: [Botryotinia fuckeliana B05.10] gi|150844644|gb|EDN19837.1| [Botryotinia fuckeliana B05.10]
  misc_feature (22)..(139): NCBI GI: 240109270 Blast Desc: CPC735_027750 [Coccidioides posadasii C735 delta SOWgp]
  misc_feature (14)..(139): NCBI GI: 258571653 Blast Desc: [Uncinocarpus reesii 1704] gi|237904900|gb|EEP79301.1| [Uncinocarpus reesii 1704]
  misc_feature (22)..(134): NCBI GI: 119182429 Blast Desc: [Coccidioides immitis RS]
  misc_feature (23)..(133): NCBI GI: 156045185 Blast Desc: [Sclerotinia sclerotiorum 1980] gi|154694176|gb|EDN93914.1| [Sclerotinia sclerotiorum 1980]
MSEFPSRMADLRRQGKEQGEEYLLTAFMTAVTILHEIGHAVYWRDRRSLTRNLREPFYGADLEMELGDSFVAAVFGGWIPVPVRSLSNLRNDFGFTDGLAWRQALSWDFHRMRPKYRAHYSIPVDYIARLFTEKTIADFHYEGDDWIWNRRPGACFRIPQYAGVVYPDIELPVAPDNTIIEPTARHPHPDLAAKPSEEVEQIRSDVRSEVRPTEKRVQSTKICTRKSDKDSTTDYRIFAWLCCEPTDNPEEAK

SEQ ID NO: 24869 - DNA, 1194 bp, Muscodor strobelii
  misc_feature: SGI cDNA ID NO. 568484
  misc_feature: Encodes the peptide sequence at SEQ ID NO 24870
atgatctcgagcgacggccagcttctggataacttacgagatagcagcagcagtcatcgattttcgtatgtctcttctggacagagaacgttggtcacgtcgaccggttcatccccagcttgttcgccgacccgagagagcttctccaaccaaaacgaagatctgccggacccctcggccgtttctgaagttcgtcttcgacccaacgctgcagctattgtgaaccgccggcaatccatgcaagctttgatatcttcctttgaatccaaaacatcattagacccaagctcacgcccccactccaacgtatcctccggcctgagtccggaaatcgaacggccgcaatggatgaacccgccgacggtcccgaacttcagcgtgccgcacacagccggaaagcggttttccttgaccgcacccgctacccatggatcgccgcgtgcttcccacgggttcgatcacgacaaagaaaaaagcgccaaattagctcgtaaaccccctcccacggcacttctgttgtcgcgcccgctctcaatagtaattgatcaaccttcgccccggtcaccgagttcgccaaactcgttgctatcaaaaacacttgagcagcatcaaccgtcgcctgccaaggaagatttcccttcgtctagaactacggtcgagaggtcacgcactggcggtagtgagagcgacaatgtctggtcgaagtcgaaatcgatcacattcgagactagtgcggagtctaagacaatgttgtacgaagccaaggctgatacgagccgacacgtaccccgatcaagttcagctatggattcgtacggctcacatcagcgaatatcatcgttcgcgcagagtaaagacatagggtataagcgagcaagttatttaggagcagttgactcaactcagcgccagtcccttgcgcatgtagacgagtggcgagccaacctagcggagacgtccagtttagcgctaccgccaacatgctcaccgaagcgatcaacatcctcacttcgcatctcttctcaaatctcaccaccgcatttcctttcgatcgatacgcaagcgaagtctattgcgcttagaagaagtatgcctcagcttgccgaagggccaccgccggcaccaccgccgaattatgcgctgcccccgattccgaagaagttctctacaacagagactcaaatcaaggcgtga

SEQ ID NO: 24870 - protein, 397 aa, Muscodor strobelii
  misc_feature: SGI Peptide ID NO. 568484
  misc_feature (1)..(390): NCBI GI: 171690618 Blast Desc: protein product [Podospora anserina] gi|170945257|emb|CAP71368.1| protein product [Podospora anserina]
  misc_feature (1)..(186): NCBI GI: 261352288 Blast Desc: peptidase family M20/M25/M40 protein [Verticillium albo-atrum VaMs.102]
  misc_feature (1)..(186): NCBI GI: 116196006 Blast Desc: CHGG_04601 [Chaetomium globosum CBS 148.51] gi|88180514|gb|EAQ87982.1| CHGG_04601 [Chaetomium globosum CBS 148.51]
  misc_feature (3)..(189): NCBI GI: 145612403 Blast Desc: MGG_07103 [Magnaporthe grisea 70-15] gi|145019572|gb|EDK03800.1| MGG_07103 [Magnaporthe grisea 70-15]
  misc_feature (3)..(187): NCBI GI: 156045295 Blast Desc: SS1G_09836 [Sclerotinia sclerotiorum 1980] gi|154694231|gb|EDN93969.1| SS1G_09836 [Sclerotinia sclerotiorum 1980]
  misc_feature (1)..(397): NCBI GI: 46123549 Blast Desc: FG06152.1 [Gibberella zeae PH-1]
  misc_feature (3)..(83): NCBI GI: 154305108 Blast Desc: BC1G_08644 [Botryotinia fuckeliana B05.10] gi|150853807|gb|EDN28999.1| BC1G_08644 [Botryotinia fuckeliana B05.10]
MISSDGQLLDNLRDSSSSHRFSYVSSGQRTLVTSTGSSPACSPTRESFSNQNEDLPDPSAVSEVRLRPNAAAIVNRRQSMQALISSFESKTSLDPSSRPHSNVSSGLSPEIERPQWMNPPTVPNFSVPHTAGKRFSLTAPATHGSPRASHGFDHDKEKSAKLARKPPPTALLLSRPLSIVIDQPSPRSPSSPNSLLSKTLEQHQPSPAKEDFPSSRTTVERSRTGGSESDNVWSKSKSITFETSAESKTMLYEAKADTSRHVPRSSSAMDSYGSHQRISSFAQSKDIGYKRASYLGAVDSTQRQSLAHVDEWRANLAETSSLALPPTCSPKRSTSSLRISSQISPPHFLSIDTQAKSIALRRSMPQLAEGPPPAPPPNYALPPIPKKFSTTETQIKA

SEQ ID NO: 24871 - DNA, 3893 bp, Muscodor strobelii
  misc_feature: SGI EST ID NO. CUFF.58611.0
  misc_feature: Variant of the nucleotide sequence at SEQ ID NO 24869
cggcagacccccgacacattctgtgctcggtgcttgcacgagtcaacgagcgtgaagacgacagggtctgcgcgaccagccgtccccagcagccctgtagaatggactatcgtctattcgggcagagctcggggcatcatcccatctgatggtgttctcctcgtcctcccactttcatcatgtttctctcacgcgcacataactattagctgtgttgcttgcgttgcattcctgatgtgagctcacaaatcctcctggaatcaaaggcgatctctgtgtttcgacaattatatagtatactttcataaaaaccgaccacgtttttctcagtccctaggtttcatacccggccgcagatattgtttcgttcccttttgtcgatcactgagattcctcgcttcaacagtacccggaccacggagacaagagataattcaacttcgcattcataagcaagccaagtccttgcctagacgtacctacctacgtgcttatttcttacgtgtactcgtagtgacgacagctttttggaaacgtcttgtgcattgatcctggaaccacatgggtctagtcgccgcgccttagaaaaggatccaggagcccttcgattaacacagggttgccttgaccaaaatcattgatgcacacacagactcaacttctcaatttaacacgaagtcacttattaatcacacttcggatctgcatgcaatcctctccggatcacttcacatatctttatcatcgacgagtctgaactacaatttataactttggactgtcatatgtggcgccactcatttttgcacccgcgcattcgattttggacccccattcgctaagtataaatcagccagatctttaacattacttggcttaaggggcatatctttgtggcaaccaaaacaatggcagaaataaagctccagaggtcgacgaatatcactttagatgcggctgatgagcgactcatagctcctcggcgaacacggccgcctaatattcatatcatagatgaagagaacaggatacctccgcgtacggacaagtcagtgaagagagagtccagaattgggctcaggggaatttttggcaggactaaaggtggaaaaaatgagaaagatgtcgaagagtcgttgtcgttacgggtgacgcaacgccctgcaggcattcgagcttcgttagcggatttcggaaactggccacataagctacaatcgtcacgttcagaagtgtcgctaatcagcacaccatcttttgattcacggccatcctcttcagaagtgttcagcccacctcagtcgcgacaaggcagttatgatgcagatcattttcatcaccacgcggcaacgatttgggacccgccgccactattcaaggtttatcctcaagcagtgaaacacgcaaggctcccagtatgcaacattcccgtggaggacctcacgaagaatgtcaaatttcttcaaaaaggtggcaaatttggactcgaacaagtcgatggaaaaataggtatgggaaagaagaagcaacggctgtctgtcctgaagagttcgttggactggagtgacgggatattcgtactcgttacatccggctatctacttcagtacactgcagaaggttccttaaatcgaacaccggagaaaatcttgcagctcacaaagtcgtctgccgcttatgcaagcgacctcattccaggcaaacattgggtacttcaagtggcctccgtagctgatgtcgatgggcatgcaccctcggacgcaaagcctctccgttctaagcgatcaataaaggcgaacgagaaaaggcaagtcacaaatatgctacttgtctttgaaagcccggaaaccatggacgattggctggcaatcttgcgccacgagatcgaagcacttggcgggagaagaaaattatccgagactggtataccggtgggtgaggagcagtccctgaagccccagcaaagtcatcggactatggttgcaagggatcctcatcgattctctcgtgttgtcacgcgagatttttcgtgcccacagaagaccatgtttatggattccgtagagagtgacggtttcgccttgaggcggttgtctggtcacacgatcgccaacagttcaccaacggccagcatgatctcgagcgacggccagcttctggataacttacgagatagcagcagcagtcatcgattttcgtatgtctcttctggacagagaacgttggtcacgtcgaccggttcatccccagcttgttcgccgacccgagagagcttctccaaccaaaacgaagatctgccggacccctcggccgtttctgaagttcgtcttcgacccaacgctgcagctattgtgaaccgccggcaatccatgcaagctttgatatcttcctttgaatccaaaacatcattagacccaagctcacgcccccactccaacgtatcctccggcctgagtccggaaatcgaacggccgcaatggatgaacccgccgacggtcccgaacttcagcgtgccgcacacagccggaaagcggttttccttgaccgcacccgctacccatggatcgccgcgtgcttcccacgggttcgatcacgacaaagaaaaaagcgccaaattagctcgtaaaccccctcccacggcacttctgttgtcgcgcccgctctcaatagtaattgatcaaccttcgccccggtcaccgagttcgccaaactcgttgctatcaaaaacacttgagcagcatcaaccgtcgcctgccaaggaagatttcccttcgtctagaactacggtcgagaggtcacgcactggcggtagtgagagcgacaatgtctggtcgaagtcgaaatcgatcacattcgagactagtgcggagtctaagacaatgttgtacgaagccaaggctgatacgagccgacacgtaccccgatcaagttcagctatggattcgtacggctcacatcagcgaatatcatcgttcgcgcagagtaaagacatagggtataagcgagcaagttatttaggagcagttgactcaactcagcgccagtcccttgcgcatgtagacgagtggcgagccaacctagcggagacgtccagtttagcgctaccgccaacatgctcaccgaagcgatcaacatcctcacttcgcatctcttctcaaatctcaccaccgcatttcctttcgatcgatacgcaagcgaagtctattgcgcttagaagaagtatgcctcagcttgccgaagggccaccgccggcaccaccgccgaattatgcgctgcccccgattccgaagaagttctctacaacagagactcaaatcaaggcgtgatacattttagtcatagccacaaatttttacctttcatttcttttttgggttctctgtactaccagcttacttcttcatgcttgacggttgtaacgaaatataatgatggaaatttatcaggattcaggatacggatccacagggtcatgacggcgtttttggcgactttgcaatgtgttgttgactcaagcaggataccacaacacggtcgatggtctggagcatttcgagtatgagcgtttgggcttctggagtctagaaggaaaagacctcggaggtcagatcagggttcccacccgtatacatcttattatttattcactattagcagtagttgagattatttcaacaacaacacccatttacatctgcgcatcgcctgttgtaagacttgtgtttccaaagataagaagggaaaatggatgcctcttggttaacaactaggtagtaggaggtgaactgatgggtaaaggtcctgcttgatgcatgtgataagggttgatcacttcgaatttgcgagagaaatccttggtcaagaaacctggcgacatgtagagagcaaaggtc

SEQ ID NO: 24872 - DNA, 2418 bp, Muscodor strobelii
  misc_feature: SGI cDNA ID NO. 568485
  misc_feature: Encodes the peptide sequence at SEQ ID NO 24873
atggcagaaataaagctccagaggtcgacgaatatcactttagatgcggctgatgagcgactcatagctcctcggcgaacacggccgcctaatattcatatcatagatgaagagaacaggatacctccgcgtacggacaagtcagtgaagagagagtccagaattgggctcaggggaatttttggcaggactaaaggtggaaaaaatgagaaagatgtcgaagagtcgttgtcgttacgggtgacgcaacgccctgcaggcattcgagcttcgttagcggatttcggaaactggccacataagctacaatcgtcacgttcagaagtgtcgctaatcagcacaccatcttttgattcacggccatcctcttcagaagtgttcagcccacctcagtcgcgacaaggcagttatgatgcagatcattttcatcaccacgcggcaacgatttgggacccgccgccactattcaaggtttatcctcaagcagtgaaacacgcaaggctcccagtatgcaacattcccgtggaggacctcacgaagaatgtcaaatttcttcaaaaaggtggcaaatttggactcgaacaagtcgatggaaaaataggtatgggaaagaagaagcaacggctgtctgtcctgaagagttcgttggactggagtgacgggatattcgtactcgttacatccggctatctacttcagtacactgcagaaggttccttaaatcgaacaccggagaaaatcttgcagctcacaaagtcgtctgccgcttatgcaagcgacctcattccaggcaaacattgggtacttcaagtggcctccgtagctgatgtcgatgggcatgcaccctcggacgcaaagcctctccgttctaagcgatcaataaaggcgaacgagaaaaggcaagtcacaaatatgctacttgtctttgaaagcccggaaaccatggacgattggctggcaatcttgcgccacgagatcgaagcacttggcgggagaagaaaattatccgagactggtataccggtgggtgaggagcagtccctgaagccccagcaaagtcatcggactatggttgcaagggatcctcatcgattctctcgtgttgtcacgcgagatttttcgtgcccacagaagaccatgtttatggattccgtagagagtgacggtttcgccttgaggcggttgtctggtcacacgatcgccaacagttcaccaacggccagcatgatctcgagcgacggccagcttctggataacttacgagatagcagcagcagtcatcgattttcgtatgtctcttctggacagagaacgttggtcacgtcgaccggttcatccccagcttgttcgccgacccgagagagcttctccaaccaaaacgaagatctgccggacccctcggccgtttctgaagttcgtcttcgacccaacgctgcagctattgtgaaccgccggcaatccatgcaagctttgatatcttcctttgaatccaaaacatcattagacccaagctcacgcccccactccaacgtatcctccggcctgagtccggaaatcgaacggccgcaatggatgaacccgccgacggtcccgaacttcagcgtgccgcacacagccggaaagcggttttccttgaccgcacccgctacccatggatcgccgcgtgcttcccacgggttcgatcacgacaaagaaaaaagcgccaaattagctcgtaaaccccctcccacggcacttctgttgtcgcgcccgctctcaatagtaattgatcaaccttcgccccggtcaccgagttcgccaaactcgttgctatcaaaaacacttgagcagcatcaaccgtcgcctgccaaggaagatttcccttcgtctagaactacggtcgagaggtcacgcactggcggtagtgagagcgacaatgtctggtcgaagtcgaaatcgatcacattcgagactagtgcggagtctaagacaatgttgtacgaagccaaggctgatacgagccgacacgtaccccgatcaagttcagctatggattcgtacggctcacatcagcgaatatcatcgttcgcgcagagtaaagacatagggtataagcgagcaagttatttaggagcagttgactcaactcagcgccagtcccttgcgcatgtagacgagtggcgagccaacctagcggagacgtccagtttagcgctaccgccaacatgctcaccgaagcgatcaacatcctcacttcgcatctcttctcaaatctcaccaccgcatttcctttcgatcgatacgcaagcgaagtctattgcgcttagaagaagtatgcctcagcttgccgaagggccaccgccggcaccaccgccgaattatgcgctgcccccgattccgaagaagttctctacaacagagactcaaatcaaggcgtga

SEQ ID NO: 24873 - protein, 805 aa, Muscodor strobelii
  misc_feature: SGI Peptide ID NO. 568485
  misc_feature (25)..(594): NCBI GI: 261352288 Blast Desc: peptidase family M20/M25/M40 protein [Verticillium albo-atrum VaMs.102]
  misc_feature (25)..(798): NCBI GI: 171690618 Blast Desc: protein product [Podospora anserina] gi|170945257|emb|CAP71368.1| protein product [Podospora anserina]
  misc_feature (25)..(594): NCBI GI: 116196006 Blast Desc: CHGG_04601 [Chaetomium globosum CBS 148.51] gi|88180514|gb|EAQ87982.1| CHGG_04601 [Chaetomium globosum CBS 148.51]
  misc_feature (13)..(594): NCBI GI: 256726889 Blast Desc: NECHADRAFT_90933 [Nectria haematococca mpVI 77-13-4]
  misc_feature (25)..(597): NCBI GI: 145612403 Blast Desc: MGG_07103 [Magnaporthe grisea 70-15] gi|145019572|gb|EDK03800.1| MGG_07103 [Magnaporthe grisea 70-15]
  misc_feature (25)..(594): NCBI GI: 46123549 Blast Desc: FG06152.1 [Gibberella zeae PH-1]
  misc_feature (50)..(489): NCBI GI: 85109037 Blast Desc: NCU08047 [Neurospora crassa OR74A] gi|28924328|gb|EAA33481.1| NCU08047 [Neurospora crassa OR74A] gi|39979173|emb|CAE85546.1| [Neurospora crassa]
  misc_feature (25)..(595): NCBI GI: 156045295 Blast Desc: SS1G_09836 [Sclerotinia sclerotiorum 1980] gi|154694231|gb|EDN93969.1| SS1G_09836 [Sclerotinia sclerotiorum 1980]
  misc_feature (11)..(360): NCBI GI: 154305108 Blast Desc: BC1G_08644 [Botryotinia fuckeliana B05.10] gi|150853807|gb|EDN28999.1| BC1G_08644 [Botryotinia fuckeliana B05.10]
  misc_feature (126)..(562): NCBI GI: 154281755 Blast Desc: [Ajellomyces capsulatus NAm1] gi|150411869|gb|EDN07257.1| [Ajellomyces capsulatus NAm1]
MAEIKLQRSTNITLDAADERLIAPRRTRPPNIHIIDEENRIPPRTDKSVKRESRIGLRGIFGRTKGGKNEKDVEESLSLRVTQRPAGIRASLADFGNWPHKLQSSRSEVSLISTPSFDSRPSSSEVFSPPQSRQGSYDADHFHHHAATIWDPPPLFKVYPQAVKHARLPVCNIPVEDLTKNVKFLQKGGKFGLEQVDGKIGMGKKKQRLSVLKSSLDWSDGIFVLVTSGYLLQYTAEGSLNRTPEKILQLTKSSAAYASDLIPGKHWVLQVASVADVDGHAPSDAKPLRSKRSIKANEKRQVTNMLLVFESPETMDDWLAILRHEIEALGGRRKLSETGIPVGEEQSLKPQQSHRTMVARDPHRFSRVVTRDFSCPQKTMFMDSVESDGFALRRLSGHTIANSSPTASMISSDGQLLDNLRDSSSSHRFSYVSSGQRTLVTSTGSSPACSPTRESFSNQNEDLPDPSAVSEVRLRPNAAAIVNRRQSMQALISSFESKTSLDPSSRPHSNVSSGLSPEIERPQWMNPPTVPNFSVPHTAGKRFSLTAPATHGSPRASHGFDHDKEKSAKLARKPPPTALLLSRPLSIVIDQPSPRSPSSPNSLLSKTLEQHQPSPAKEDFPSSRTTVERSRTGGSESDNVWSKSKSITFETSAESKTMLYEAKADTSRHVPRSSSAMDSYGSHQRISSFAQSKDIGYKRASYLGAVDSTQRQSLAHVDEWRANLAETSSLALPPTCSPKRSTSSLRISSQISPPHFLSIDTQAKSIALRRSMPQLAEGPPPAPPPNYALPPIPKKFSTTETQIKA

SEQ ID NO: 24874 - DNA, 3893 bp, Muscodor strobelii; identical to SEQ ID NO: 24871
  misc_feature: SGI EST ID NO. CUFF.58611.0
  misc_feature: Variant of the nucleotide sequence at SEQ ID NO 24872

SEQ ID NO: 24875 - DNA, 882 bp, Muscodor strobelii
  misc_feature: SGI cDNA ID NO. 568486
  misc_feature: Reduced expression when VOC is produced
  misc_feature: Encodes the peptide sequence at SEQ ID NO 24876
atggcttccgccaccaagaaccgagactgggccgatgacgacgacgtcgacgaggccgtcgtcgagctcccgccgccgcagacgatccagaacaaggacggcaccaagacgaccatcacataccgctacaacgagaacaaccagaaggtcaagacgacccgccgcatccgcatggtcacccaccgcgaggtcgtcaacccccgcgtcgccgagcgcaagacctggtccaagttcggcctgtccgagaaggacggcgccggcccccagatggacaccacctccgtcggcgagaacatcatcttccgcctcagcaccaactggcgcaaggacaccaaggacgaggccaaggaccccaacgccaacgccatgaaggagaagctcaaggacaagaccgtcaagtgccgcatctgcaacggcgagcatttcaccgcccgctgtccctacaaggacaccatggcccccgtcggcgccgagggcgctggcgacgttgctgccggcatgggtgacgagcccgctcccgctgctggcggtgctgctggcaagaagggcagctacgtcccccccgccctcagaggagaccgtgctggtgccgctggggagaggatgggcggcaagtacggcgagcgcgatgatctggctacgctgcgtgtcactaacgtctccgagatggctgaagagggtgagctgagggatatgttcgagcggttcggccgcgtcacacgtgtgttcttggccaaggaccgcgacactggtttggcaaagggattcgcattcatcagctttgcggatcggggtgatgcagtcaaggcttgttccaagatggatggctacggtttcaagcatctgattctacgtgtagagtttgctaagaaggctgcatag

SEQ ID NO: 24876 - protein, 293 aa, Muscodor strobelii
  misc_feature: SGI Peptide ID NO. 568486
  misc_feature (215)..(286): Pfam Id: PF00076 Pfam Desc: RNA recognition motif. (a.k.a. RRM, RBD, or RNP domain)
  misc_feature (1)..(292): NCBI GI: 261352287 Blast Desc: eukaryotic translation initiation factor 3 subunit G [Verticillium albo-atrum VaMs.102]
  misc_feature (1)..(292): NCBI GI: 46121373 Blast Desc: FG05065.1 [Gibberella zeae PH-1]
  misc_feature (1)..(292): NCBI GI: 156045113 Blast Desc: SS1G_09745 [Sclerotinia sclerotiorum 1980] gi|238686685|sp|A7EWN6.1|EIF3G_SCLS1 RecName: Full=Eukaryotic translation initiation factor 3 subunit G; Short=eIF3g; AltName:
  misc_feature (1)..(293): NCBI GI: 154298414 Blast Desc: eukaryotic translation initiation factor 3, subunit 4 [Botryotinia fuckeliana B05.10] gi|229463755|sp|A6SGN8.1|EIF3G_BOTFB RecName: Full=Eukaryotic 3 3
  misc_feature (1)..(293): NCBI GI: 171690620 Blast Desc: protein product [Podospora anserina] gi|170945258|emb|CAP71369.1| protein product [Podospora anserina]
  misc_feature (1)..(293): NCBI GI: 164423677 Blast Desc: NCU08046 [Neurospora crassa OR74A] gi|224488070|sp|Q6MFP4.2|EIF3G_NEUCR RecName: Full=Eukaryotic translation initiation factor 3 subunit G; Short=eIF3g; AltName:
  misc_feature (1)..(293): NCBI GI: 39979172 Blast Desc: related to translation initiation factor eIF3 subunit [Neurospora crassa]
  misc_feature (23)..(292): NCBI GI: 39971587 Blast Desc: MGG_07109 [Magnaporthe grisea 70-15] gi|224488025|sp|A4RHN3.1|EIF3G_MAGGR RecName: Full=Eukaryotic translation initiation factor 3 subunit G; Short=eIF3g; AltName:
  misc_feature (27)..(292): NCBI GI: 116196004 Blast Desc: CHGG_04600 [Chaetomium globosum CBS 148.51] gi|121937877|sp|Q2H0U6.1|EIF3G_CHAGB RecName: Full=Eukaryotic translation initiation factor 3 subunit G; Short=eIF3g; AltName:
  misc_feature (9)..(291): NCBI GI: 225554798 Blast Desc: eukaryotic translation initiation factor 3 [Ajellomyces capsulatus G186AR]
  misc_feature: Useful for introducing or modulating the production of volatile compounds
MASATKNRDWADDDDVDEAVVELPPPQTIQNKDGTKTTITYRYNENNQKVKTTRRIRMVTHREVVNPRVAERKTWSKFGLSEKDGAGPQMDTTSVGENIIFRLSTNWRKDTKDEAKDPNANAMKEKLKDKTVKCRICNGEHFTARCPYKDTMAPVGAEGAGDVAAGMGDEPAPAAGGAAGKKGSYVPPALRGDRAGAAGERMGGKYGERDDLATLRVTNVSEMAEEGELRDMFERFGRVTRVFLAKDRDTGLAKGFAFISFADRGDAVKACSKMDGYGFKHLILRVEFAKKAA

SEQ ID NO: 24877 - DNA, 1480 bp, Muscodor strobelii
  misc_feature: SGI EST ID NO. CUFF.58715.0
  misc_feature: Variant of the nucleotide sequence at SEQ ID NO 24875
agataattgccccacacagcgtgggatttcgcctcagaattctagccaaatcgcaaaaatccattatcgccagcgcgccctcgacgacaaatatccagcgatctcaaccacgaaccgatcaaccgcacctcgcaccgaattccagcaatcaagtatagcatcgcgcatcattgcaaccgccaatatggcttccgccaccaagaaccgagactgggccgatgacgacgacgtcgacgaggccgtcgtcgagctcccgccgccgcagacgatccagaacaaggacggcaccaagacgaccatcacataccgctacaacgagaacaaccagaaggtcaagacgacccgccgcatccgcatggtcacccaccgcgaggtcgtcaacccccgcgtcgccgagcgcaagacctggtccaagttcggcctgtccgagaaggacggcgccggcccccagatggacaccacctccgtcggcgagaacatcatcttccgcctcagcaccaactggcgcaaggacaccaaggacgaggccaaggaccccaacgccaacgccatgaaggagaagctcaaggacaagaccgtcaagtgccgcatctgcaacggcgagcatttcaccgcccgctgtccctacaaggacaccatggcccccgtcggcgccgagggcgctggcgacgttgctgccggcatgggtgacgagcccgctcccgctgctggcggtgctgctggcaagaagggcagctacgtcccccccgccctcagaggagaccgtgctggtgccgctggggagaggatgggcggcaagtacggcgagcgcgatgatctggctacgctgcgtgtcactaactgttgaggagagttcatctactttcttggtctacacttactgacctaactacgtaggtctccgagatggctgaagagggtgagctgagggatatgttcgagcggttcggccgcgtcacacgtgtgttcttggccaaggaccgcgacactggtttggcaaagggattcgcattcatcagctttgcggatcggggtgatgcagtcaaggcttgttccaagatggatggctacggtttcaagcatctgattctacgtgtagagtttgctaagaaggctgcatagaggggaatgcatgtgtggatgatgggttgataagatggtacgaaataaaggtttttgctaatacgatggcattggcattaatttacggcattttgtttgtttgtcgtacgctgctctgcatcgggttctaaggtctatggaacttatgaatgaacttcatgtgcttgagacttatcaacgttttgatggctggtgtaaaatggaaagacccctgctaattttcgaagtgtgtgctcgttagacaatctcccaaatcgccggaaggcttattcgaattcaatatcgttcgggtagaatactatgtctatctctgtttgaaactgtgtattatgaactgtttaacacaaatatcctggaa

SEQ ID NO: 24878 - DNA, 1101 bp, Muscodor strobelii
  misc_feature: SGI cDNA ID NO. 568487
  misc_feature: Encodes the peptide sequence at SEQ ID NO 24879
atgtcgtcaatatacacagcagaccgcgtgatcccaacctacgccgccgtaaccggcgtcgggctcttcttcacgggtctccgcctctgggtccgcacatcctaccggcggactaatcttgcagccgacgatgccttcgtagtcatcgccgcgatcttcgcggccgggtccacaggtctcgaaatcgcaaacgccgtcctcggcacagcgggtaacgacgtaaaatccgcggacacagaccgacgggctaggatctcactacagctcaactggataaatcccattcttgaagccttcggcttcgggttcatcaagctgagcttgtcgttcttctaccgtcggattttcggcgtacggcgagggttcagggtagtgaataacttcaatattgcgttgctcgtgggttatatcctggcgtttagcctcgcgcagctgtttctgtgcgggacgaatttctacttgatttggaaggatctggatcaacataccgctagggagaaatgcgcgcataggggacagcttcagttcgtgtttgcgcttttcagtgttttgacggatttcttggtcattgggcttccgcttgtgtttgtgggcaagttgcagatgagtagacggaagaagtgggccagttcgcttgtttttactttggggtttatatctactattgcctgcatattgcgattcatctataactctgtggccttacactatggatatttcgacttccactggacgccaaaacctggacaatcatctacgccctcgcctatcttcaagtacctgaatccgacgttgctcgcaacattggagatggagctggggctttggagcgcgaacttacctgctcttgctccattattgcacagtttccatcctattcgtactctcagcggagcgtacaagaagatgtcgtcttcgtggtcgacgtcgaccgctgttacttcgaggaagatgtcgactgctcctgtcagtgatgagaaggcgccgagaaagccttcggcggcatcttcgaatggtactgtggctcctattttgccttatagtcatggagggtctgatcgtgttggggatgcgtcgacaccgagtcttaattcttggtaa

SEQ ID NO: 24879 - protein, 366 aa, Muscodor strobelii
  misc_feature: SGI Peptide ID NO. 568487
  misc_feature (6)..(341): NCBI GI: 145244817 Blast Desc: An11g07030 [Aspergillus niger] gi|134079370|emb|CAK96999.1| protein product [Aspergillus niger]
  misc_feature (23)..(325): NCBI GI: 242809618 Blast Desc: conserved [Talaromyces stipitatus ATCC 10500] gi|218716033|gb|EED15455.1| conserved [Talaromyces stipitatus ATCC 10500]
  misc_feature (25)..(289): NCBI GI: 156057509 Blast Desc: [Sclerotinia sclerotiorum 1980] gi|154702271|gb|EDO02010.1| [Sclerotinia sclerotiorum 1980]
  misc_feature (26)..(338): NCBI GI: 156056697 Blast Desc: [Sclerotinia sclerotiorum 1980] gi|154701865|gb|EDO01604.1| [Sclerotinia sclerotiorum 1980]
  misc_feature (16)..(349): NCBI GI: 242816288 Blast Desc: conserved [Talaromyces stipitatus ATCC 10500] gi|218715084|gb|EED14507.1| conserved [Talaromyces stipitatus ATCC 10500]
  misc_feature (19)..(333): NCBI GI: 238482317 Blast Desc: integral membrane protein [Aspergillus flavus NRRL3357] gi|220700447|gb|EED56785.1| integral membrane protein [Aspergillus flavus NRRL3357]
  misc_feature (24)..(338): NCBI GI: 115402231 Blast Desc: [Aspergillus terreus NIH2624] gi|114189038|gb|EAU30738.1| [Aspergillus terreus NIH2624]
  misc_feature (18)..(303): NCBI GI: 39971085 Blast Desc: [Magnaporthe grisea 70-15] gi|149210643|ref|XP_001522696.1| MGCH7_ch7g794 [Magnaporthe grisea 70-15] gi|86196749|gb|EAQ71387.1| MGCH7_ch7g794 grisea
  misc_feature (39)..(326): NCBI GI: 226290980 Blast Desc: conserved [Paracoccidioides brasiliensis Pb18]
  misc_feature (13)..(365): NCBI GI: 119488560 Blast Desc: NFIA_113640 [Neosartorya fischeri NRRL 181] gi|119410888|gb|EAW20833.1| conserved [Neosartorya fischeri NRRL 181]
MSSIYTADRVIPTYAAVTGVGLFFTGLRLWVRTSYRRTNLAADDAFVVIAAIFAAGSTGLEIANAVLGTAGNDVKSADTDRRARISLQLNWINPILEAFGFGFIKLSLSFFYRRIFGVRRGFRVVNNFNIALLVGYILAFSLAQLFLCGTNFYLIWKDLDQHTAREKCAHRGQLQFVFALFSVLTDFLVIGLPLVFVGKLQMSRRKKWASSLVFTLGFISTIACILRFIYNSVALHYGYFDFHWTPKPGQSSTPSPIFKYLNPTLLATLEMELGLWSANLPALAPLLHSFHPIRTLSGAYKKMSSSWSTSTAVTSRKMSTAPVSDEKAPRKPSAASSNGTVAPILPYSHGGSDRVGDASTPSLNSW

SEQ ID NO: 24880 - DNA, 1739 bp, Muscodor strobelii
  misc_feature: SGI EST ID NO. CUFF.58614.0
  misc_feature: Variant of the nucleotide sequence at SEQ ID NO 24878
ggtttgggttactctggtttcatctttctggaattgcatcacatcacctcgcatcactaagtggctgaaggaacaaactgtttaggaacaatccaggaatcccagacagcagcggaacacatgatcataaatggaatgccaaaaccactcatgatggatttctatctgatttcctcgacggctgtcgaacctatgcggtactatttctccaggcctaatatcgacaaatgtcgtcaatatacacagcagaccgcgtgatcccaacctacgccgccgtaaccggcgtcgggctcttcttcacgggtctccgcctctgggtccgcacatcctaccggcggactaatcttgcagccgacgatgccttcgtagtcatcgccgcgatcttcgcggccgggtccacaggtctcgaaatcgcaaacgccgtcctcggcacagcgggtaacgacgtaaaatccgcggacacagaccgacgggctaggatctcactacagctcaactggataaatcccattcttgaagccttcggcttcgggttcatcaagctgagcttgtcgttcttctaccgtcggattttcggcgtacggcgagggttcagggtagtgaataacttcaatattgcgttgctcgtgggttatatcctggcgtttagcctcgcgcagctgtttctgtgcgggacgaatttctacttgatttggaaggatctggatcaacataccgctagggagaaatgcgcgcataggggacagcttcagttcgtgtttgcgcttttcagtgttttgacggatttcttggtcattgggcttccgcttgtgtttgtgggcaagttgcagatgagtagacggaagaagtgggccagttcgcttgtttttactttggggtttatatctactattgcctgcatattgcgattcatctataactctgtggccttacactatggatatttcgacttccactggacgccaaaacctggacaatcatctacgccctcgcctatcttcaagtacctgaatccgacgttgctcgcaacattggagatggagctggggctttggagcgcgaacttacctgctcttgctccattattgcacagtttccatcctattcgtactctcagcggagcgtacaagaagatgtcgtcttcgtggtcgacgtcgaccgctgttacttcgaggaagatgtcgactgctcctgtcagtgatgagaaggcgccgagaaagccttcggcggcatcttcgaatggtactgtggctcctattttgccttatagtcatggagggtctgatcgtgttggggatgcgtcgacaccgagtcttaattcttggtaacgttggtctgagtgtattagtattgtatggtacgtcacattctgcttgtaagtaaatagatgcgtagaaataaatacatcttttgttcgatcgaagcaacgttggtttcttcaccaagcgctaatgtattgatgtcctattcaaaagtgacaggtcatttcacatgaggttttctgtttcactctattggcaccataagctagatctgtcttcttgcatggccaagctagctgatgcccattcaccgcagttttgataccgtcccgaaagaggtatgcccaaaatgttcgtgtagaaaagtgtccagttgtaatcaaatcggcgcttttcatctctagaacatattccgatcgatatgtaccttcgtaacgttgagcgattcttgtctggagacgctgcggtagtttgata

SEQ ID NO: 24881 - DNA, 660 bp, Muscodor strobelii
  misc_feature: SGI cDNA ID NO. 568488
  misc_feature: Encodes the peptide sequence at SEQ ID NO 24882
atgtcgtcaatatacacagcagaccgcgtgatcccaacctacgccgccgtaaccggcgtcgggctcttcttcacgggtctccgcctctgggtccgcacatcctaccggcggactaatcttgcagccgacgatgccttcgtagtcatcgccgcgatcttcgcggccgggtccacaggtctcgaaatcgcaaacgccgtcctcggcacagcgggtaacgacgtaaaatccgcggacacagaccgacgggctaggatctcactacagctcaactggataaatcccattcttgaagccttcggcttcgggttcatcaagctgagcttgtcgttcttctaccgtcggattttcggcgtacggcgagggttcagggtagtgaataacttcaatattgcgttgctcgtgggttatatcctggcgtttagcctcgcgcagctgtttctgtgcgggacgaatttctacttgatttggaaggatctggatcaacataccgctagggagaaatgcgcgcataggggacagcttcagttcgtgtttgcgcttttcagtgttttgacggatttcttggtcattgggcttccgcttgtgtttgtgggcaagttgcagatgagtagacggaagaagtgggccagttcgcttgtttttactttggggtttatgtga

SEQ ID NO: 24882 - protein, 219 aa, Muscodor strobelii
  misc_feature: SGI Peptide ID NO. 568488
  misc_feature (6)..(217): NCBI GI: 145244817 Blast Desc: An11g07030 [Aspergillus niger] gi|134079370|emb|CAK96999.1| protein product [Aspergillus niger]
  misc_feature (26)..(219): NCBI GI: 156056697 Blast Desc: [Sclerotinia sclerotiorum 1980] gi|154701865|gb|EDO01604.1| [Sclerotinia sclerotiorum 1980]
  misc_feature (26)..(217): NCBI GI: 156057509 Blast Desc: [Sclerotinia sclerotiorum 1980] gi|154702271|gb|EDO02010.1| [Sclerotinia sclerotiorum 1980]
  misc_feature (23)..(217): NCBI GI: 242809618 Blast Desc: conserved [Talaromyces stipitatus ATCC 10500] gi|218716033|gb|EED15455.1| conserved [Talaromyces stipitatus ATCC 10500]
  misc_feature (48)..(218): NCBI GI: 169611618 Blast Desc: SNOG_08924 [Phaeosphaeria nodorum SN15] gi|111062972|gb|EAT84092.1| SNOG_08924 [Phaeosphaeria nodorum SN15]
  misc_feature (27)..(194): NCBI GI: 154324046 Blast Desc: [Botryotinia fuckeliana B05.10] gi|150842651|gb|EDN17844.1| [Botryotinia fuckeliana B05.10]
  misc_feature (24)..(217): NCBI GI: 169621825 Blast Desc: SNOG_14125 [Phaeosphaeria nodorum SN15] gi|160704631|gb|EAT78362.2| SNOG_14125 [Phaeosphaeria nodorum SN15]
  misc_feature (43)..(217): NCBI GI: 119488560 Blast Desc: NFIA_113640 [Neosartorya fischeri NRRL 181] gi|119410888|gb|EAW20833.1| conserved [Neosartorya fischeri NRRL 181]
  misc_feature (15)..(218): NCBI GI: 261195116 Blast Desc: CFEM domain-containing protein [Ajellomyces dermatitidis SLH14081] gi|239587834|gb|EEQ70477.1| CFEM domain-containing protein [Ajellomyces dermatitidis SLH14081]
  misc_feature (15)..(218): NCBI GI: 239610678 Blast Desc: CFEM domain-containing protein [Ajellomyces dermatitidis ER-3]
MSSIYTADRVIPTYAAVTGVGLFFTGLRLWVRTSYRRTNLAADDAFVVIAAIFAAGSTGLEIANAVLGTAGNDVKSADTDRRARISLQLNWINPILEAFGFGFIKLSLSFFYRRIFGVRRGFRVVNNFNIALLVGYILAFSLAQLFLCGTNFYLIWKDLDQHTAREKCAHRGQLQFVFALFSVLTDFLVIGLPLVFVGKLQMSRRKKWASSLVFTLGFM

SEQ ID NO: 24883 - DNA, 1739 bp, Muscodor strobelii; identical to SEQ ID NO: 24880
  misc_feature: SGI EST ID NO. CUFF.58614.0
  misc_feature: Variant of the nucleotide sequence at SEQ ID NO 24881

SEQ ID NO: 24884 - DNA, 2907 bp, Muscodor strobelii
  misc_feature: SGI cDNA ID NO. 568489
  misc_feature: Reduced expression when VOC is produced
  misc_feature: Encodes the peptide sequence at SEQ ID NO 24885
atggccaccattgaccctgccgcaactgagttgcgtcgcagacaagtcaaccccaatgcagatgctgaccaggacaattcccctcaacgtcatgcggagaaccatgaactgcattcagatgacgccgacgaccaatcgtcgagcgaaaagcctagaaaggtgcttggtcgcacccgtggcggcactgcctttgtggttcctgtgacgcacgatcgaatcccgcagatgcttgaccccagacagccaaaaaatctgggagacatcatagtcctcgctgtccttggtattcacgtgctagcactatatgcgctacctgcttcataccgtaaacctgtctttgctgtcgtctacctgttgtggcgtgctgcgtacaatgccggcattggcctcttgctccgttggcagtccaatgataataccctggtaaactgggcgcagaagtggcagttattcgagttgccgtcaacaggcaagaacccgaggccatggctatacaatctactcaagcgagaatcggcaaccgagatctacagcgaattcgacttcgacagcgccccaattgagtacaatacatggcttttgtttcgccgtttcgtggaccttgtgctcttgggtgatttcgtgtcctattgtctgttcgcaatcgcctgcgcccacacgcctgaaggtgaagctttacctcttacgcttggccgctgggttcttggactatccatcattggcttcaacttctgggtcaaaatcgacgcattgcgggttatcaaggactatgcatggtactggggagacttcttttttctcgtcgagcaagaactcacgttcgatggggttttcgagatggctcctcatccgatgtactcgattggctacgcgggctactatggtatctccatgattgccggtagctatgccgttctcttcatttccatccttgcccatgcttgccagttcgccttcttagtccttgttgaaaatcctcacattgagaaaacgtacaatccaccaacacctcgcaagcgtgacgaggcagacgtgggcaatatgacgccgctttcgcgaaacatttcacaagaatcaatagattcctttacgtcaattgacccgccttcgcccacgcagatacataaattgctgggctttgagaatattgacatgttccgcaacaccgacttatctacttgcctactggtcttgtacttcgccatactcaccgttatcacgcctcgtggcccaatatggcaagtcttgttcgttgcccacgcgcttacgtggcgaatgtggtactccattggactcggctcgattttgcatcgtcaatcgaaggacaagatgtggacccgtcatttcctgaaatttggcgacaccacaaacgaggcatggagacaatggaaaggaatgtatcacatctctcagatattatgctactctgctttcgttggcgcctgctggaagatgtattcagtacccagcgactggcataacgggttcgtcttgctccgccatgtgatcggaaccagcctcattgccctgcaaatttggactgctatgagcatctatgagtcgctgggagaattcgggtggtttttcggagacttctttttcgaccgcggtgtcaagttgaactacacctctatctatcggtttttgaacaaccctgaaagaatcatgggcaccgctggtctttggggtgctgcacttatcacatggagcagatctgttttcatcctggctttagtcagccatcttctcaccattggattcctccaatttgttgagcaaccccacatgcaaaaggtttacggccgaaatctgcgtgatgaagctggcctcaccaaattcattaagaagtctcttccaccctatgtttctgaatggcagagcagggtgaaccgcttcatggatcagacttctcagttcgtcgaagacatgcttgacgctcttcgaccgaaactggctgccagtgtctcaaacatcgtgaagaatacggctcgtttcaatcctgcccggctcactataggtcagatttcgtcagacgttagtgatcttgaacccaatcactactctgtgacagtccagggcgagagctcatctggatctgcactaacggagagagcaagtggtaaagaaggtacagccgcaaggtttccgaatgatcttaaaacgatgattctcgaatacggtgcgcctattaaggtgaagtggaccgcgccagcaaatcatggcaagaaggactggataggcctatatatggtcgcggataaccggacgagggacctcactgaagtctcttcattaggccgctggattccaacgaccgcacgacaatacgaatcgagtgtcgctgacaagggtatactcgtatcggatgaacctgttgagagttcaaaacctaccgacatcgatctcgttagaggcgagatggtattctcgggggataagctctggtggacgcaaggcgttttcgagttccgataccaccacgatggtggtcacaacgtgttggcgatctctcagccattcgagattcacattgcacgattcgacgatgacgatgtggtcacattcggtacagacgcccaggccatgtatcagaaggctgtcgagtctgctttacttccagtcattcagaattgtcttgatcgcgatcccgatattgcgccttccaagcccatcgaaccgtggggcagtcatgtcgagcgagacggcaagtacgctaagaggattgtgtacgctgtacaccatctcttcggtgtggaatttgctcctgctgtcgtccctgccgatgggaacgtgaagaatcttgcttggagaattagtaatgcgaagcaggttctggctccatatagtatgtcgcattctaagggaacgaccacgccggccaacgagaagatgcctcccagtccttga

SEQ ID NO: 24885 - protein, 968 aa, Muscodor strobelii
  misc_feature: SGI Peptide ID NO. 568489
  misc_feature (11)..(952): NCBI GI: 46121375 Blast Desc: FG05066.1 [Gibberella zeae PH-1]
  misc_feature (5)..(964): NCBI GI: 85109033 Blast Desc: NCU08045 [Neurospora crassa OR74A] gi|28924326|gb|EAA33479.1| NCU08045 [Neurospora crassa OR74A] gi|39979171|emb|CAE85544.1| related to phosphatidyl-ethanolamine
  misc_feature (2)..(967): NCBI GI: 116196000 Blast Desc: CHGG_04598 [Chaetomium globosum CBS 148.51] gi|88180511|gb|EAQ87979.1| CHGG_04598 [Chaetomium globosum CBS 148.51]
  misc_feature (7)..(963): NCBI GI: 39971589 Blast Desc: MGG_07110 [Magnaporthe grisea 70-15] gi|145019578|gb|EDK03806.1| MGG_07110 [Magnaporthe grisea 70-15]
  misc_feature (13)..(959): NCBI GI: 154303715 Blast Desc: BC1G_08742 [Botryotinia fuckeliana B05.10] gi|150854536|gb|EDN29728.1| BC1G_08742 [Botryotinia fuckeliana B05.10]
  misc_feature (2)..(968): NCBI GI: 171690622 Blast Desc: protein product [Podospora anserina] gi|170945259|emb|CAP71370.1| protein product [Podospora anserina]
  misc_feature (39)..(963): NCBI GI: 169762718 Blast Desc: [Aspergillus oryzae RIB40] gi|238488535|ref|XP_002375505.1| phosphatidylethanolamine methyltransferase Pem1, [Aspergillus flavus NRRL3357] protein
  misc_feature (13)..(963): NCBI GI: 212535544 Blast Desc: phosphatidylethanolamine methyltransferase [Penicillium marneffei ATCC 18224] gi|210070327|gb|EEA24417.1| phosphatidylethanolamine methyltransferase [Penicillium marneffei
  misc_feature (45)..(963): NCBI GI: 121716691 Blast Desc: phosphatidylethanolamine methyltransferase [Aspergillus clavatus NRRL 1] gi|119404039|gb|EAW14456.1| phosphatidylethanolamine methyltransferase [Aspergillus clavatus
  misc_feature (50)..(962): NCBI GI: 255953041 Blast Desc: Pc21g02080 [Penicillium chrysogenum Wisconsin 54-1255] gi|211588984|emb|CAP95105.1| Pc21g02080 [Penicillium chrysogenum Wisconsin 54-1255]
  misc_feature (8)..(948): SWISSPROT Homolog: EC 2.1.1.17 Phosphatidylethanolamine N-methyltransferase
  misc_feature: Useful for introducing or modulating the production of volatile compounds
MATIDPAATELRRRQVNPNADADQDNSPQRHAENHELHSDDADDQSSSEKPRKVLGRTRGGTAFVVPVTHDRIPQMLDPRQPKNLGDIIVLAVLGIHVLALYALPASYRKPVFAVVYLLWRAAYNAGIGLLLRWQSNDNTLVNWAQKWQLFELPSTGKNPRPWLYNLLKRESATEIYSEFDFDSAPIEYNTWLLFRRFVDLVLLGDFVSYCLFAIACAHTPEGEALPLTLGRWVLGLSIIGFNFWVKIDALRVIKDYAWYWGDFFFLVEQELTFDGVFEMAPHPMYSIGYAGYYGISMIAGSYAVLFISILAHACQFAFLVLVENPHIEKTYNPPTPRKRDEADVGNMTPLSRNISQESIDSFTSIDPPSPTQIHKLLGFENIDMFRNTDLSTCLLVLYFAILTVITPRGPIWQVLFVAHALTWRMWYSIGLGSILHRQSKDKMWTRHFLKFGDTTNEAWRQWKGMYHISQILCYSAFVGACWKMYSVPSDWHNGFVLLRHVIGTSLIALQIWTAMSIYESLGEFGWFFGDFFFDRGVKLNYTSIYRFLNNPERIMGTAGLWGAALITWSRSVFILALVSHLLTIGFLQFVEQPHMQKVYGRNLRDEAGLTKFIKKSLPPYVSEWQSRVNRFMDQTSQFVEDMLDALRPKLAASVSNIVKNTARFNPARLTIGQISSDVSDLEPNHYSVTVQGESSSGSALTERASGKEGTAARFPNDLKTMILEYGAPIKVKWTAPANHGKKDWIGLYMVADNRTRDLTEVSSLGRWIPTTARQYESSVADKGILVSDEPVESSKPTDIDLVRGEMVFSGDKLWWTQGVFEFRYHHDGGHNVLAISQPFEIHIARFDDDDVVTFGTDAQAMYQKAVESALLPVIQNCLDRDPDIAPSKPIEPWGSHVERDGKYAKRIVYAVHHLFGVEFAPAVVPADGNVKNLAWRISNAKQVLAPYSMSHSKGTTTPANEKMPPSP

SEQ ID NO: 24886 - DNA, 3695 bp, Muscodor strobelii
  misc_feature: SGI EST ID NO. CUFF.58820.0
  misc_feature: Variant of the nucleotide sequence at SEQ ID NO 24884
tgtaattccatgtatcgtgtcccccaaaaatcttccaacgtacagccaataagatcctgagtcatcgaccagatcggactcacaaacacacagctggctgtgtagaatcgccctcatttatttctctccttttcgcactcgttctatgcaatttcacctatgaatccatagccccatcattcaacactttatctcgcatttgcgagtccaagacgaaagttcaacacctttcgtcatcctaacctaccacccatccaccttcgccttaacctagcggactgccccaccaatcatggccaccattgaccctgccgcaactgagttgcgtcgcagacaagtcaaccccaatgcagatgctgaccaggacaattcccctcaacgtcatgcggagaaccatgaactgcattcagatgacgccgacgaccaatcgtcgagcgaaaagcctagaaaggtgcttggtcgcacccgtggcggcactgcctttgtggttcctgtgacgcacgatcgaatcccgcagatgcttgaccccagacagccaaaaaatctgggagacatcatagtcctcgctgtccttggtattcacgtgctagcactatatgcgctacctgcttcataccgtaaacctgtctttgctgtcgtctacctgttgtggcgtgctgcgtacaatgccggcattggcctcttgctccgttggcagtccaatgataataccctggtaaactgggcgcagaagtggcagttattcgagttgccgtcaacaggcaagaacccgaggccatggctatacaatctactcaagcgagaatcggcaaccgagatctacagcgaattcgacttcgacagcgccccaattgagtacaatacatggcttttgtttcgccgtttcgtggaccttgtgctcttgggtgatttcgtgtcctattgtctgttcgcaatcgcctgcgcccacacgcctgaaggtgaagctttacctcttacgcttggccgctgggttcttggactatccatcattggcttcaacttctgggtcaaaatcgacgcattgcgggttatcaaggactatgcatggtactggggagacttcttttttctcgtcgagcaagaactcacgttcgatggggttttcgagatggctcctcatccgatgtactcgattggctacgcgggctactatggtatctccatgattgccggtagctatgccgttctcttcatttccatccttgcccatgcttgccagttcgccttcttagtccttgttgaaaatcctcacattgagaaaacgtacaatccaccaacacctcgcaagcgtgacgaggcagacgtgggcaatatgacgccgctttcgcgaaacatttcacaagaatcaatagattcctttacgtcaattgacccgccttcgcccacgcagatacataaattgctgggctttgagaatattgacatgttccgcaacaccgacttatctacttgcctactggtcttgtacttcgccatactcaccgttatcacgcctcgtggcccaatatggcaagtcttgttcgttgcccacgcgcttacgtggcgaatgtggtactccattggactcggctcgattttgcatcgtcaatcgaaggacaagatgtggacccgtcatttcctgaaatttggcgacaccacaaacgaggcatggagacaatggaaaggaatgtatcacatctctcagatattatgctactctgctttcgttggcgcctgctggaagatgtattcagtacccagcgactggcataacgggttcgtcttgctccgccatgtgatcggaaccagcctcattgccctgcaaatttggactgctatgagcatctatgagtcgctgggagaattcgggtggtttttcggagacttctttttcgaccgcggtgtcaagttgaactacacctctatctatcggtttttgaacaaccctgaaagaatcatgggcaccgctggtctttggggtgctgcacttatcacatggagcagatctgttttcatcctggctttagtcagccatcttctcaccattggattcctccaatttgttgagcaaccccacatgcaaaaggtttacggccgaaatctgcgtgatgaagctggcctcaccaaattcattaagaagtctcttccaccctatgtttctgaatggcagagcagggtgaaccgcttcatggatcagacttctcagttcgtcgaagacatgcttgacgctcttcgaccgaaactggctgccagtgtctcaaacatcgtgaagaatacggctcgtttcaatcctgcccggctcactataggtcagatttcgtcagacgttagtgatcttgaacccaatcactactctgtgacagtccagggcgagagctcatctggatctgcactaacggagagagcaagtggtaaagaaggtacagccgcaaggtttccgaatgatcttaaaacgatgattctcgaatacggtgcgcctattaaggtgaagtggaccgcgccagcaaatcatggcaagaaggactggataggcctatatatggtcgcggataaccggacgagggacctcactgaagtctcttcattaggccgctggattccaacgaccgcacgacaatacgaatcgagtgtcgctgacaagggtatactcgtatcggatgaacctgttgagagttcaaaacctaccgacatcgatctcgttagaggcgagatggtattctcgggggataagctctggtggacgcaaggcgttttcgagttccgataccaccacgatggtggtcacaacgtgttggcgatctctcagccattcgagattcacattgcacgattcgacgatgacgatgtggtcacattcggtacagacgcccaggccatgtatcagaaggctgtcgagtctgctttacttccagtcattcagaattgtcttgatcgcgatcccgatattgcgccttccaagcccatcgaaccgtggggcagtcatgtcgagcgagacggcaagtacgctaagaggattgtgtacgctgtacaccatctcttcggtgtggaatttgctcctgctgtcgtccctgccgatgggaacgtgaagaatcttgcttggagaattagtaatgcgaagcaggttctggtaagcacatctctctatgtcaatcaacacgggatccggtttaccgtgatgccaggtacgagatgctgcgagtactaatggatccgtcgttatataggctccatatagtatgtcgcattctaagggaacgaccacgccggccaacgagaagatgcctcccagtccttgaacagagctgagatggttttattactgtcactattaagtggatgattataatgtgagacgaagatgatgcagcattgagaaaaagagtcacgcgagcgagcgaaaaaagaaaagcatggcgccatggtgcatccccgtcagtatatacagcagcgatgcctcgcggcgggatcggcgttgggaacaaaaaaatgttgatcggatctttaatggactggcaattgcatcacggtctcaggcgctgggtagagactaagtagaattcccgtcaataagtctacaagaatagataccatacagtgtttatgacgttgtgcaatcccgctcgtcatatgtttccctacataattccaaaatattacgtctcacgttcttgggaggctaacattttgggaagcag

SEQ ID NO: 24887 - DNA, 597 bp, Muscodor strobelii
  misc_feature: SGI cDNA ID NO. 568490
  misc_feature: Encodes the peptide sequence at SEQ ID NO 24888
atgtcttctatgtcttcttcatctggacctgggtctgcacccgtttctcccaggtctacttctcctagactttcaaactcaaacgaatttgaagcaatcgagctcacaccgcctgcttctatccaccagagtactgctggctctgaggacagccaggagagccaagttccagacttccctctagacgtgctagatgcactgttcgccgaagacgatgctcgaagagcggaagatgaggagagagacagaggtgagtcgagcaatcccggtccttctggtgcaggtggttcttccgctccagtgtctcctagacaaatgcctactcctccgtcttcccctcccccacgggttagagtcccgactcgcgaccaagggagaatcgcattcgacattgaagacgccttcaagaatgggctcgatataccgtcgtcgcccgttctaaaccatctgtacggtctcgaggatcttctgctggttcacctaggtcgcctaggcagccagggtcgcttccggcgctcagctccccttcatccaatgattctcccgcaagtgattctcctccgactccttctctcccgagtgcttctccgccaatag

SEQ ID NO: 24888 - protein, 198 aa, Muscodor strobelii
  misc_feature: SGI Peptide ID NO. 568490
MSSMSSSSGPGSAPVSPRSTSPRLSNSNEFEAIELTPPASIHQSTAGSEDSQESQVPDFPLDVLDALFAEDDARRAEDEERDRGESSNPGPSGAGGSSAPVSPRQMPTPPSSPPPRVRVPTRDQGRIAFDIEDAFKNGLDIPSSPVLNHLYGLEDLLLVHLGRLGSQGRFRRSAPLHPMILPQVILLRLLLSRVLLRQ

SEQ ID NO: 24889 - DNA, 474 bp, Muscodor strobelii
  misc_feature: SGI cDNA ID NO. 568491
  misc_feature: Encodes the peptide sequence at SEQ ID NO 24890
aggccccaggaggtccaggaggcccagacgggccaggttgacctgttagatctggaggaccacccagcggaggatggagagctaggggcgatagaggtatcaagggagatcgagggaccaggggtggtagaggaactaggggcgccggcggtgctgggggtgctggaggaggagaagctagagcaggacgaggagaagctggagcaggaggaggtcctacgtatggaggaggttcgatcagaggcaggactacccacgggaacgccaatgaggagcgcgctgtcagtggaagagccgctagacgaagacccacccgtagcagagctactagacgaagagccatcggatgaagaggaactagacgaagagctctcgggaggaggactgctcgatgaagaagtactcgaggaatgctcactcccgaaagaacggcttgatgacgaatcactcgacgaaccacccgatggaggatag

SEQ ID NO: 24890 - protein, 157 aa, Muscodor strobelii
  misc_feature: SGI Peptide ID NO. 568491
RPQEVQEAQTGQVDLLDLEDHPAEDGELGAIEVSREIEGPGVVEELGAPAVLGVLEEEKLEQDEEKLEQEEVLRMEEVRSEAGLPTGTPMRSALSVEEPLDEDPPVAELLDEEPSDEEELDEELSGGGLLDEEVLEECSLPKERLDDESLDEPPDGG

SEQ ID NO: 24891 - DNA, 3111 bp, Muscodor strobelii
  misc_feature: SGI cDNA ID NO. 568492
  misc_feature: Reduced expression when VOC is produced
  misc_feature: Encodes the peptide sequence at SEQ ID NO 24892
cacgtcgaccaggacaaggccgacctcctcaagagcgccctgaaggctttcgagcaggccaccaaggtctcccagggcaagaacctgctcgccctcatgggcaaggcccgtgtgctgttcggcctgggcaactacagagagtctctcaccacctatcaagacgtcctcgccaagtgccccgacctgaccgacccagatccccgtgtcggcatcggctgctgcttctggcagctgggctacaaggacgacgccaggtccgcctgggctagggctctcgagctgaacccagagtccaagatcgcgaccatccttctcggcctctactatctggacgcgagcagccaggtgcccaccaacagccccgagttcatcaagctttacaagaaagccatgaccgaatacacgcaaaagtccttcaaaatcgacaagaaccagcccctgacttgcgccacgttcgcaagctacttcctgtccagcaagaatcttgcccacgtcgattcactcgccaacaaggccatacagtacaccgacatcaacgccgttgccagtgacggctggtacctcctggcgagaaaggagcactacagcggcaacgtgcaaaccgcgacggactactatcgacgcgctgatgaggctagaggaggcctggaaagagggtatctacctgccaagtttggtgtagcccagttgtcggtgctgaacaatgatctcggcgaggcgaaattgcgcctcgagaaaatcatccagcccgccggaaggaacgagcgcaactacgaggccatgatccttctcggtaccttgtatgcagaggaagtatttgccaaccagtttgctgccacaaaagaggacaaatcagcggagctgcgcaaagcaatcgactacctagagcaggttcgggctgcatggaaagaccccaagaaaaacctttcccctgacgccgccattctcttgaatctcgcacggctctatgagaacagtagcccggagaaggccctgcaatgtcttttgcaagtagagcagctcgaactggaccagatcccgtctaccgagtacccatccgggcttgcggaaggtgatgatgccttgcgcagcgctctccgaaagaacctgccgccccagcttctcaataacatcggctgcttctactcccaggccgacaaacatgggcttgctagtgagatgttcgaagccgctctgggttcgtgtgtgcgcattggtgagaagggcgaagatatcgacaccgatgccctcattacgacaatcagtttcaatctggggaggagttacgagtcacaaggcctcacagacaaggcgatcgacgtgtacgagaaattagaagcccgccacaacgactatacagatgcccaggcacggatagcctatatcaaacttcgcacaaatccaaataaggagggcccagatgccgttgccaagctttaccaggccaactctgctgacctagaagttcgggcgctgtacggttggtatctaggccgcgtcaattcgcgtaaacggcccgcgaacatcaacgaagaccccgagttgagacactacaaacacacactccagaactatgacaagcatgacaggtatgctctcgtagggatgggcaatctctacatgatggcggcacgagagatgcgacgagagacggatcaggagaaacaaaagagatccgccacgtacactcgtgcggtagagttctttgataaggcgcttcagttggatcccaaaaatgctcatgccgcgcagggtgttgccatcgccctagttgaagacaaaaaggactactccaatgcactcccaatctttttaaaggtccgcgagaccttgaaagaccccaacatattcgtcaatatcgggcacacgtatgctgaactgcgccaattttccaaggcgattgagaactatgagattgcgttatcaaaggagggcaaggccgatgatgctggcatccttgcgtgcttgggtcggacttggctcaacagaggccgccatgagcggaacttggaggctttcaagacagcgttgaaattcgcgaagaaggctctcgaagtctcaccagaacaggttcatttcaaatttaacgtggcgttcgcccagattcaactagttcagcacattatgagtgtaccagatacgcagcggagcctggtacagttggatgaggcatcggatggcctcgaggcggctattgtcgcccttgatgagatcgcccagcactcccagccgccgtatcccaaggttgatctagagcagcgtgccagcatggctcgaaatacacagcgcaagcaactggggcgacagattgagaggcaaagggaatacgaagaagagaacaaagagagacttgccgccataatggagaaacggcaagctgaggctaagcgacgcgaagaagacaagcagagagcgttggctgctgagcaagaaaggcaggataagatccgcaaagagcgcgaggaaatggcagcgaaggacagggagcgtgacgaagctctaaaagcagaaatggatgctgagatgaccacggatgcggaaaccggagaacgggtgaagcgaaagcgtaaaccagccagaccccggggagagggcccttccaaaccccgctctcagaagaagaaaaaggcgaagcgcgacgacgacgatgaatccgacgacgaaagccagccgaagaagaagaggcgactggctaagaaagacaacaagcaatacaagtctgcagaaattgtcgttgacagttcagatgaggccaacgaagattatgatgccctcgatgctgcggagaagtctctgggagatcgtagctctccactctctgatgctgacgctgacgacgcatctacggccgacacgagggaggaccggatggatgtcgatgagacggcggctgatcaagatgatgacgaagatgagccggccgcacgcactacatctaaacgcgctagacgtggcagagtgttggaagacagcgacgaggacgaggagggagaaggcgacgacagaagtccacggcaaactcagaacgacgccgacgatgatgacagagggaacgcaggtgcggctgacaccagtatgaccgaagccggcgatcgtgacgatgatgaatga

SEQ ID NO: 24892 - protein, 1036 aa, Muscodor strobelii
  misc_feature: SGI Peptide ID NO. 568492
  misc_feature (614)..(647): Pfam Id: PF00515 Pfam Desc: Tetratricopeptide repeat
  misc_feature (562)..(579): Pfam Id: PF00515 Pfam Desc: Tetratricopeptide repeat
  misc_feature (657)..(690): Pfam Id: PF00515 Pfam Desc: Tetratricopeptide repeat
  misc_feature (2)..(988): NCBI GI: 85083950 Blast Desc: NCU00095 [Neurospora crassa OR74A] gi|28918307|gb|EAA27983.1| NCU00095 [Neurospora crassa OR74A]
  misc_feature (2)..(988): NCBI GI: 39977119 Blast Desc: MGG_06462 [Magnaporthe grisea 70-15] gi|145016120|gb|EDK00610.1| MGG_06462 [Magnaporthe grisea 70-15]
  misc_feature (2)..(1031): NCBI GI: 46125141 Blast Desc: FG06948.1 [Gibberella zeae PH-1]
  misc_feature (2)..(1036): NCBI GI: 256733154 Blast Desc: RNA polymerase II-associated protein [Nectria haematococca mpVI 77-13-4]
  misc_feature (2)..(1035): NCBI GI: 171686578 Blast Desc: protein product [Podospora anserina] gi|170943250|emb|CAP68903.1| protein product [Podospora anserina]
  misc_feature (2)..(859): NCBI GI: 116208102 Blast Desc: CHGG_03344 [Chaetomium globosum CBS 148.51] gi|88183941|gb|EAQ91409.1| CHGG_03344 [Chaetomium globosum CBS 148.51]
  misc_feature (2)..(699): NCBI GI: 154299238 Blast Desc: BC1G_11797 [Botryotinia fuckeliana B05.10] gi|150857500|gb|EDN32692.1| BC1G_11797 [Botryotinia fuckeliana B05.10]
  misc_feature (5)..(947): NCBI GI: 159126221 Blast Desc: RNA polymerase II transcription elongation factor (Ctr9), [Aspergillus fumigatus A1163]
  misc_feature (5)..(947): NCBI GI: 70998646 Blast Desc: RNA polymerase II transcription elongation factor (Ctr9), [Aspergillus fumigatus Af293] gi|66851681|gb|EAL92007.1| RNA polymerase II transcription elongation factor (Ctr9), Af293]
  misc_feature (5)..(947): NCBI GI: 119498583 Blast Desc: RNA polymerase II transcription elongation factor (Ctr9), [Neosartorya fischeri NRRL 181] gi|119414213|gb|EAW24152.1| RNA polymerase II transcription NRRL
  misc_feature: Useful for introducing or modulating the production of volatile compounds
HVDQDKADLLKSALKAFEQATKVSQGKNLLALMGKARVLFGLGNYRESLTTYQDVLAKCPDLTDPDPRVGIGCCFWQLGYKDDARSAWARALELNPESKIATILLGLYYLDASSQVPTNSPEFIKLYKKAMTEYTQKSFKIDKNQPLTCATFASYFLSSKNLAHVDSLANKAIQYTDINAVASDGWYLLARKEHYSGNVQTATDYYRRADEARGGLERGYLPAKFGVAQLSVLNNDLGEAKLRLEKIIQPAGRNERNYEAMILLGTLYAEEVFANQFAATKEDKSAELRKAIDYLEQVRAAWKDPKKNLSPDAAILLNLARLYENSSPEKALQCLLQVEQLELDQIPSTEYPSGLAEGDDALRSALRKNLPPQLLNNIGCFYSQADKHGLASEMFEAALGSCVRIGEKGEDIDTDALITTISFNLGRSYESQGLTDKAIDVYEKLEARHNDYTDAQARIAYIKLRTNPNKEGPDAVAKLYQANSADLEVRALYGWYLGRVNSRKRPANINEDPELRHYKHTLQNYDKHDRYALVGMGNLYMMAAREMRRETDQEKQKRSATYTRAVEFFDKALQLDPKNAHAAQGVAIALVEDKKDYSNALPIFLKVRETLKDPNIFVNIGHTYAELRQFSKAIENYEIALSKEGKADDAGILACLGRTWLNRGRHERNLEAFKTALKFAKKALEVSPEQVHFKFNVAFAQIQLVQHIMSVPDTQRSLVQLDEASDGLEAAIVALDEIAQHSQPPYPKVDLEQRASMARNTQRKQLGRQIERQREYEEENKERLAAIMEKRQAEAKRREEDKQRALAAEQERQDKIRKEREEMAAKDRERDEALKAEMDAEMTTDAETGERVKRKRKPARPRGEGPSKPRSQKKKKAKRDDDDESDDESQPKKKRRLAKKDNKQYKSAEIVVDSSDEANEDYDALDAAEKSLGDRSSPLSDADADDASTADTREDRMDVDETAADQDDDEDEPAARTTSKRARRGRVLEDSDEDEEGEGDDRSPRQTQNDADDDDRGNAGAADTSMTEAGDRDDDE

SEQ ID NO: 24893 - DNA, 3473 bp, Muscodor strobelii
  misc_feature: SGI EST ID NO. CUFF.58636.0
  misc_feature: Variant of the nucleotide sequence at SEQ ID NO 24891
cacgtcgaccaggacaaggccgacctcctcaagagcgccctgaaggctttcgagcaggccaccaaggtctcccagggcaagaacctgctcgccctcatgggcaaggcccgtgtgctgttcggcctgggcaactacagagagtctctcaccacctatcaagacgtcctcgccaagtgccccgacctgaccgacccagatccccgtgtcggcatcggctgctgcttctggcagctgggctacaaggacgacgccaggtccgcctgggctagggctctcgagctgaacccagagtccaagatcgcgaccatccttctcggcctctactatctggacgcgagcagccaggtgcccaccaacagccccgagttcatcaagctttacaagaaagccatgaccgaatacacgcaaaagtccttcaaaatcgacaagaaccagcccctgacttgcgccacgttcgcaagctacttcctgtccagcaagaatcttgcccacgtcgattcactcgccaacaaggccatacagtacaccgacatcaacgccgttgccagtgacggctggtacctcctggcgagaaaggagcactacagcggcaacgtgcaaaccgcgacggactactatcgacgcgctgatgaggctagaggaggcctggaaagagggtatctacctgccaagtttggtgtagcccagttgtcggtgctgaacaatgatctcggcgaggcgaaattgcgcctcgagaaaatcatccagcccgccggaaggaacgagcgcaactacgaggccatgatccttctcggtaccttgtatgcagaggaagtatttgccaaccagtttgctgccacaaaagaggacaaatcagcggagctgcgcaaagcaatcgactacctagagcaggttcgggctgcatggaaagaccccaagaaaaacctttcccctgacgccgccattctcttgaatctcgcacggctctatgagaacagtagcccggagaaggccctgcaatgtcttttgcaagtagagcagctcgaactggaccagatcccgtctaccgagtacccatccgggcttgcggaaggtgatgatgccttgcgcagcgctctccgaaagaacctgccgccccagcttctcaataacatcggctgcttctactcccaggccgacaaacatgggcttgctagtgagatgttcgaagccgctctgggttcgtgtgtgcgcattggtgagaagggcgaagatatcgacaccgatgccctcattacgacaatcagtttcaatctggggaggagttacgagtcacaaggcctcacagacaaggcgatcgacgtgtacgagaaattagaagcccgccacaacgactatacagatgcccaggcacggatagcctatatcaaacttcgcacaaatccaaataaggagggcccagatgccgttgccaagctttaccaggccaactctgctgacctagaagttcgggcgctgtacggttggtatctaggccgcgtcaattcgcgtaaacggcccgcgaacatcaacgaagaccccgagttgagacactacaaacacacactccagaactatgacaagcatgacaggtatgctctcgtagggatgggcaatctctacatgatggcggcacgagagatgcgacgagagacggatcaggagaaacaaaagagatccgccacgtacactcgtgcggtagagttctttgataaggcgcttcagttggatcccaaaaatgctcatgccgcgcagggtgttgccatcgccctagttgaagacaaaaaggactactccaatgcactcccaatctttttaaaggtccgcgagaccttgaaagaccccaacatattcgtcaatatcgggcacacgtatgctgaactgcgccaattttccaaggcgattgagaactatgagattgcgttatcaaaggagggcaaggccgatgatgctggcatccttgcgtgcttgggtcggacttggctcaacagaggccgccatgagcggaacttggaggctttcaagacagcgttgaaattcgcgaagaaggctctcgaagtctcaccagaacaggttcatttcaaatttaacgtggcgttcgcccagattcaactagttcagcacattatgagtgtaccagatacgcagcggagcctggtacagttggatgaggcatcggatggcctcgaggcggctattgtcgcccttgatgagatcgcccagcactcccagccgccgtatcccaaggttgatctagagcagcgtgccagcatggctcgaaatacacagcgcaagcaactggggcgacagattgagaggcaaagggaatacgaagaagagaacaaagagagacttgccgccataatggagaaacggcaagctgaggctaagcgacgcgaagaagacaagcagagagcgttggctgctgagcaagaaaggcaggataagatccgcaaagagcgcgaggaaatggcagcgaaggacagggagcgtgacgaagctctaaaagcagaaatggatgctgagatgaccacggatgcggaaaccggagaacgggtgaagcgaaagcgtaaaccagccagaccccggggagagggcccttccaaaccccgctctcagaagaagaaaaaggcgaagcgcgacgacgacgatgaatccgacgacgaaagccagccgaagaagaagaggcgactggctaagaaagacaacaagcaatacaagtctgcagaaattgtcgttgacagttcagatgaggccaacgaagattatgatgccctcgatgctgcggagaagtctctgggagatcgtagctctccactctctgatgctgacgctgacgacgcatctacggccgacacgagggaggaccggatggatgtcgatgagacggcggctgatcaagatgatgacgaagatgagccggccgcacgcactacatctaaacgcgctagacgtggcagagtgttggaagacagcgacgaggacgaggagggagaaggcgacgacagaagtccacggcaaactcagaacgacgccgacgatgatgacagagggaacgcaggtgcggctgacaccagtatgaccgaagccggcgatcgtgacgatgatgaatgagaatatacatttacgaaatgtgacagtcacaataccacgacccggaaccgacctctaagactctgattggctcacccaaaggtagcgaaccaagcagctcagatgcattgacagtgcacattcaatcgccgtatttgagattccagaagttttgcgggcaatttgagaatatgagagccacctcacatcttcatcacaatgtaatcttaacccttaatacaaagcgtgactcagattgccagtctgcctgtacataaacaaaaagcttaaacgttgtatgctcttgctttacagtatgattgtggtgtaggatttatatgtgttcaacaaaaatcatccccaattcaaatcacggatacgcc

SEQ ID NO: 24894 - DNA, 768 bp, Muscodor strobelii
  misc_feature: SGI cDNA ID NO. 568493
  misc_feature: Encodes the peptide sequence at SEQ ID NO 24895
atgggctccctgggcacagaggcccccgtccggctggccattctcgaggccgacaccccgatgaaggggatccatgccaagtacggtggctacggcggtgtcttcacttacatgttcgaacgtgcctgcgctgctctggaccccccggccccccttgggtcacagttggacctgtcttcgcacgacgtcgtcaacgaccttggctcctacccagaccctgacaccgtcgatgctatcctcatcaccggctccaagcatgattctttcgagagcgacgagtggatcgtccgtctagtccaatacaccaagcgctgtctcgagacgggtcgcgttcgagtgattggcgtctgctttggccaccagatcatcgctcgtgcgatgggcgccgaggtaggcaggaacccgcacggctgggagatcagcgccgtccccatcgacctcacgcccgagggaaagcaggtctttggcagagagtcattagccatctaccaaatgcatcgcgacgccgtgctcacgttccccccaggcgtcatctcgctggcagagacagatatctgcccgaaccaggccatgtacacccctcgacgaatgatctcggtgcaaggtcatcctgagttcacagtagatatgatgacagaaatcatagagacgcgcaagtatggcggtatcctcaataaagacatatcagaggatggtctgaaccgtgttggtaacaagcaggatggcgttgccatcgcacaagtctttatacaattcctgcgcgagtag

SEQ ID NO: 24895 - protein, 255 aa, Muscodor strobelii
  misc_feature: SGI Peptide ID NO. 568493
  misc_feature (31)..(222): Pfam Id: PF00117 Pfam Desc: Glutamine amidotransferase class-I
  misc_feature (113)..(207): Pfam Id: PF00117 Pfam Desc: Glutamine amidotransferase class-I
  misc_feature (4)..(255): NCBI GI: 256729787 Blast Desc: NECHADRAFT_73803 [Nectria haematococca mpVI 77-13-4]
  misc_feature (9)..(255): NCBI GI: 156049101 Blast Desc: SS1G_08257 [Sclerotinia sclerotiorum 1980] gi|154692656|gb|EDN92394.1| SS1G_08257 [Sclerotinia sclerotiorum 1980]
  misc_feature (7)..(255): NCBI GI: 154299812 Blast Desc: BC1G_11532 [Botryotinia fuckeliana B05.10] gi|150857222|gb|EDN32414.1| BC1G_11532 [Botryotinia fuckeliana B05.10]
  misc_feature (1)..(255): NCBI GI: 116198959 Blast Desc: CHGG_07635 [Chaetomium globosum CBS 148.51] gi|88178914|gb|EAQ86382.1| CHGG_07635 [Chaetomium globosum CBS 148.51]
  misc_feature (9)..(255): NCBI GI: 116195480 Blast Desc: CHGG_04338 [Chaetomium globosum CBS 148.51] gi|88180251|gb|EAQ87719.1| CHGG_04338 [Chaetomium globosum CBS 148.51]
  misc_feature (8)..(255): NCBI GI: 255953699 Blast Desc: Pc21g05560 [Penicillium chrysogenum Wisconsin 54-1255] gi|211589313|emb|CAP95453.1| Pc21g05560 [Penicillium chrysogenum Wisconsin 54-1255]
  misc_feature (4)..(254): NCBI GI: 39949701 Blast Desc: MGG_08802 [Magnaporthe grisea 70-15] gi|145009358|gb|EDJ94069.1| MGG_08802 [Magnaporthe grisea 70-15]
  misc_feature (9)..(253): NCBI GI: 145228693 Blast Desc: An01g02170 [Aspergillus niger] gi|134054747|emb|CAK43587.1| protein product [Aspergillus niger]
  misc_feature (8)..(254): NCBI GI: 170940262 Blast Desc: protein product [Podospora anserina]
  misc_feature (9)..(255): NCBI GI: 46121257 Blast Desc: FG05007.1 [Gibberella zeae PH-1]
MGSLGTEAPVRLAILEADTPMKGIHAKYGGYGGVFTYMFERACAALDPPAPLGSQLDLSSHDVVNDLGSYPDPDTVDAILITGSKHDSFESDEWIVRLVQYTKRCLETGRVRVIGVCFGHQIIARAMGAEVGRNPHGWEISAVPIDLTPEGKQVFGRESLAIYQMHRDAVLTFPPGVISLAETDICPNQAMYTPRRMISVQGHPEFTVDMMTEIIETRKYGGILNKDISEDGLNRVGNKQDGVAIAQVFIQFLRE

SEQ ID NO: 24896 - DNA, 2383 bp, Muscodor strobelii
  misc_feature: SGI EST ID NO. CUFF.58742.1
  misc_feature: Variant of the nucleotide sequence at SEQ ID NO 24894
cgtgcattgcatgccctgaggcggcgttgcgccgaagcatgcatgctccagtcgaccaggtcgaccggcctatcagactcgtaacctcgtcgactagaaggtactcggccgcactcttgcgccagggctcgggacttcatgttcgataccgactcgcatcgaagcagcgaagcaaagttacgcgcgtgtattgtaggtgccaagtacattatccaactggctcttgcagagtggaacgacacaggctcgacagccccgactagatgatattggtgtaagatagaaacgaagctctatgtacccagactcgccatgatgacaagggcatcattcatctctagaactaaccatctctggtgaatcttgatgcgcctaggataatcatcgcttctcaatattcatattgcagtcaatattgcacattgaatacagcacatcacgattggactgtggagttattaccccagaatcacgctacctaccctggaccgggagcgaggaaggatgccgtcaagtggtggaggggctgcagactcacaggagatggcggggcaggcaaatcggaggggctgtcaggtcggttcaccacgcgcgtgcgcatggcagttcgactggattggaactgactgacttgcccttcggcccaaaagtcctatccatcccaggtctccatccgtgcttggatccgtcaacgccgcctcgtccaaaacctgcccgccgtccctctgcgttgtggcatgcccggccgtctccccgcgacctttgtgagctggcagtctctgtccgtcgagatattattcatatacgtaatatctacgtgcatataaatacgggcggccgggcatcgtcgcactcgctagtccaagatccctctctcaccttcgagtcctgaacgctcacttacttctgggagcattgcgcccctagcgcccgcgcacctccgtgttatcgtcttcacctgcccgatatcgctatcttcccatcgtcacttccgacactcccttccctctcgcctctgctcttgctcctgtcatcgacgacccctgacccttggctgccctctcaggccctgcagcgcctccaatctacgttctgccgtcgccaatctcaaccggcgggtcacccagttcacccactgcgggcttaccggctgtgcagacatcatcatgggctccctgggcacagaggcccccgtccggctggccattctcgaggccgacaccccgatgaaggggatccatgccaagtacggtggctacggcggtgtcttcacttacatgttcgaacgtgcctgcgctgctctggaccccccggccccccttgggtcacagttggacctgtcttcgcacgacgtcgtcaacgaccttggctcctacccagaccctgacaccgtcgatgctatcctcatcaccggctccaagcatgattctttcgagagcgacgagtggatcgtccgtctagtccaatacaccaagcgctgtctcgagacgggtcgcgttcgagtgattggcgtctgctttggccaccagatcatcgctcgtgcgatgggcgccgaggtaggcaggaacccgcacggctgggagatcagcgccgtccccatcgacctcacgcccgagggaaagcaggtctttggcagagagtcattagccatctaccaaatgcatcgcgacgccgtgctcacgttccccccaggcgtcatctcgctggcagagacagatatctgcccgaaccaggccatgtacacccctcgacgaatgatctcggtgcaaggtcatcctgagttcacagtagatatgatgacagaaatcatagagacgcgcaagtatggcggtatcctcaataaagacatatcagaggatggtctgaaccgtgttggtaacaagcaggatggcgttgccatcgcacaagtctttatacaattcctgcgcgagtagatactcatctcggatcatctcggatcatctcggagattctgatcatcggcacgggatcgagcaacattcatctatatagtcactgatgaagtaaatgcagcggcaaagcagagggagggcgagagggagaatgggggatgtgagagtgagaagaggaatatgaataatttcgggtttggactggaagactatcaaattgccatagtatgtagccgatcatggaaccaatcccggtcagccatttgacccaatacgtcgcgcaggtcgacagttcgggtcactacggttgtatctattgcaacatcgctctgagtcagatgtgcaatgcaacgcgagctgtcagactgggccgtcttgtcgccaactgcctaagctttggtgtgcaatcgctcaaattgattggacaagttacttcaaccataagtcttggttatatgcatgtgaagcgc

SEQ ID NO: 24897 - DNA, 888 bp, Muscodor strobelii
  misc_feature: SGI cDNA ID NO. 568494
  misc_feature: Encodes the peptide sequence at SEQ ID NO 24898
atgaccgcgcgaccggaatctgaacagtcgacagtcgacatatcacaaatcgagaagagcttcccgttgccaccacggtcgagacacggtgaccgtaagactctaccgccgctaccgccgctagctgagactgaaagagaggccgcaattgcggcggcattggaagacgaacgatccaaaaccggaaagggcttgaagacgtctgcaccaacgctggaacggctggataaagcgctaccgctaccgtttgggcttgccaattcaaagctgtcaaggcccgtaccagacagtgaatcaaggcctgccacggcttccacgaagagaacctcattcacgagcatagacccaaagcgtaatctgaagcgtggcataggcaaatatgccacagtcgtgctatgtccgcagccaagtgacgatgtacaagaccctttgaactggccaccctggaagaagaatcttcattttatcgcgctgttatccatggtagctatcgtcggtccaatgaagacggcctttatcagcaatcacggctcccttgctgcgcagttcggtattagctacatgcgggtactcactttgacgggtgtgcctttactgatgtctgcggtgtctggaatggtcagcatgattgttgcgaagctatacggcaagcgtccagtgtacttgctttctgcgatcctttgtttcttcggttctgccttggatatgaatgcgggcagaagttttgcgcaagttacgagtgcaagagtttttcagggcctgggttggggtgctttcgacacccttgtgcttggctcgattttggacacatactttgtaaggcccctcaactcgtatcctgctattttcactgctcactttgcgcttacctatcgccaaggaacatga

SEQ ID NO: 24898 - protein, 295 aa, Muscodor strobelii
  misc_feature: SGI Peptide ID NO. 568494
  misc_feature (48)..(277): NCBI GI: 261352608 Blast Desc: MFS1 family protein [Verticillium albo-atrum VaMs.102]
  misc_feature (97)..(272): NCBI GI: 39945794 Blast Desc: MGG_08017 [Magnaporthe grisea 70-15] gi|145019251|gb|EDK03479.1| MGG_08017 [Magnaporthe grisea 70-15]
  misc_feature (93)..(277): NCBI GI: 170940208 Blast Desc: protein product [Podospora anserina]
  misc_feature (92)..(274): NCBI GI: 256732387 Blast Desc: NECHADRAFT_41544 [Nectria haematococca mpVI 77-13-4]
  misc_feature (130)..(274): NCBI GI: 240106576 Blast Desc: Major Facilitator Superfamily protein [Coccidioides posadasii C735 delta SOWgp]
  misc_feature (138)..(272): NCBI GI: 154296141 Blast Desc: BC1G_12800 [Botryotinia fuckeliana B05.10] gi|150843761|gb|EDN18954.1| BC1G_12800 [Botryotinia fuckeliana B05.10]
  misc_feature (81)..(274): NCBI GI: 212536662 Blast Desc: cycloheximide resistance protein, [Penicillium marneffei ATCC 18224] gi|210070886|gb|EEA24976.1| cycloheximide resistance protein, [Penicillium marneffei ATCC 18224]
  misc_feature (130)..(274): NCBI GI: 156057327 Blast Desc: SS1G_04394 [Sclerotinia sclerotiorum 1980] gi|154702180|gb|EDO01919.1| SS1G_04394 [Sclerotinia sclerotiorum 1980]
  misc_feature (130)..(274): NCBI GI: 119185208 Blast Desc: CIMG_07310 [Coccidioides immitis RS]
  misc_feature (85)..(274): NCBI GI: 225562308 Blast Desc: conserved [Ajellomyces capsulatus G186AR]
MTARPESEQSTVDISQIEKSFPLPPRSRHGDRKTLPPLPPLAETEREAAIAAALEDERSKTGKGLKTSAPTLERLDKALPLPFGLANSKLSRPVPDSESRPATASTKRTSFTSIDPKRNLKRGIGKYATVVLCPQPSDDVQDPLNWPPWKKNLHFIALLSMVAIVGPMKTAFISNHGSLAAQFGISYMRVLTLTGVPLLMSAVSGMVSMIVAKLYGKRPVYLLSAILCFFGSALDMNAGRSFAQVTSARVFQGLGWGAFDTLVLGSILDTYFVRPLNSYPAIFTAHFALTYRQGT

SEQ ID NO: 24899 - DNA, 1872 bp, Muscodor strobelii
  misc_feature: SGI EST ID NO. CUFF.58666.0
  misc_feature: Variant of the nucleotide sequence at SEQ ID NO 24897
gcttgaagacgtctgcaccaacgctggaacggctggataaagcgctaccgctaccgtttgggcttgccaattcaaagctgtcaaggcccgtaccagacagtgaatcaaggcctgccacggcttccacgaagagaacctcattcacgagcatagacccaaagcgtaatctgaagcgtggcataggcaaatatgccacagtcgtgctatgtccgcagccaagtgacgatgtacaagaccctttgaactggccaccctggaagaagaatcttcattttatcgcgctgttatccatggtagctatcgtcggtccaatgaagacggcctttatcagcaatcacggctcccttgctgcgcagttcggtattagctacatgcgggtactcactttgacgggtgtgcctttactgatgtctgcggtgtctggaatggtcagcatgattgttgcgaagctatacggcaagcgtccagtgtacttgctttctgcgatcctttgtttcttcggttctgccttggatatgaatgcgggcagaagttttgcgcaagttacgagtgcaagagtttttcagggcctgggttggggtgctttcgacacccttgtgcttggctcgattttggacacatactttgaacatgaacgaaaatataaaatcataatctataaagcagtcacaacttcagcaacatggggcgccccagtgcttgtcggcgctgtctcctcgtctcgtggaggcttggtccagttcgaaattctcacttcgttctcgattatatcggtgttgttgattgtacttggggcacccgagactaactacatgcgatcgaattttgggaatgacgatggtctcttctcaaaactcactcgtcctcagtcgacgtttcctagaatcgagctcagcaaagatgcagcccgaagatatgcgcgaaaaaacttgaggatccggtcttacaaagcactcgtgatcgatcaaggcttgatcatgcaaggacctatggccgcgattgcgccatctacgctattgctcttcatagctactttccttccgttcggggcgttatggagtttaacgagctctctgtcgctactattctcctccccgcctattctactttccgaatcctcaatcggcttgctcctcttgggtcccgtcattctgtcgactgtagcagtaatcggaactacactacttctccacagcaaaggcatgtcgcctacatatcattttaccactttcattggcggaacaatatttttgtcgactggagtcttggtttttgggctgtatgtcgtcgattatcctcgagatagaatcagctttcctgtcatctcgcttttgctcggcttcgtagccttgggctgctcatgtttggacagcacagttgcgtacgtggttcaacagtcgacagattttacgtcgtcgacagtgaacgtagctctccgcaacacggcagatatgcaggcaggacttacatgtctacggacatttgtcacgggtatttttgtcttgacattgcctaccactttagcggggaacagagacctcaagtcttcctccattgggattcccattgcacagatcgtcatcactgctggagttactgtggggtatcattacatgaagggatcaataaagagactcgatgggagagtcatgagacttgtggacctatcgagcttgaaacagcgtgggagtttctccgatgtaggataacacctgaagaatcttgaaacctaaaaccgctgtcgttttgttgctcaatctgtgcgatcacttcattgataatgtgaaacgtcgatcattttataattcgtccacttttttttcttgactcgaatggaccattaaagctccagtgacaaatcgtttcgtcgcc

SEQ ID NO: 24900 - DNA, 516 bp, Muscodor strobelii
  misc_feature: SGI cDNA ID NO. 568495
  misc_feature: Encodes the peptide sequence at SEQ ID NO 24901
atgagccaacacgctgttcccacaacccatcaagtggttccgggtgcgcgtgtcagcattgttttgaaagttgatcagccaactggccgtgaagtagccggcgtcgtccgcgatgtcttgacgaggggcaatcatcaccgcgggatcaaagtgcgacttgctgacggacgtatcgggagggtgcaaaggatgttagcagcggccggatcggaacctaatccattatctacaggtgcagcggttccagaggcccgacggccacggcaccgtggcggagacggtgatgacgccgaacccgcagttcaggtggacctagcgtcatacattgtgccctctaaacgtaaaggcaaagacaggaaacgtaaccagcaaacagaagatgctgctcactcgagcgacagtcatgttctggagacagatatcgtttctgcaatagcgacatgtcctgtatgtggtgaatttgacggcgatgagactgctgtcgctcaccatgtctcaaaacattttggatcttga

SEQ ID NO: 24901 - protein, 171 aa, Muscodor strobelii
  misc_feature: SGI Peptide ID NO. 568495
  misc_feature (1)..(169): NCBI GI: 171680650 Blast Desc: protein product [Podospora anserina] gi|170939952|emb|CAP65178.1| protein product [Podospora anserina]
  misc_feature (6)..(169): NCBI GI: 169773127 Blast Desc: [Aspergillus oryzae RIB40] gi|83768893|dbj|BAE59030.1| protein product [Aspergillus oryzae]
  misc_feature (6)..(169): NCBI GI: 261352704 Blast Desc: conserved [Verticillium albo-atrum VaMs.102]
  misc_feature (6)..(169): NCBI GI: 145614106 Blast Desc: MGG_11288 [Magnaporthe grisea 70-15] gi|145021077|gb|EDK05206.1| MGG_11288 [Magnaporthe grisea 70-15]
  misc_feature (6)..(169): NCBI GI: 116178818 Blast Desc: CHGG_00037 [Chaetomium globosum CBS 148.51] gi|88184334|gb|EAQ91802.1| CHGG_00037 [Chaetomium globosum CBS 148.51]
  misc_feature (6)..(167): NCBI GI: 46122481 Blast Desc: FG05618.1 [Gibberella zeae PH-1]
  misc_feature (6)..(169): NCBI GI: 238491076 Blast Desc: AFLA_109060 [Aspergillus flavus NRRL3357] gi|220697188|gb|EED53529.1| AFLA_109060 [Aspergillus flavus NRRL3357]
  misc_feature (5)..(171): NCBI GI: 169622958 Blast Desc: SNOG_14704 [Phaeosphaeria nodorum SN15] gi|111056776|gb|EAT77896.1| SNOG_14704 [Phaeosphaeria nodorum SN15]
  misc_feature (6)..(167): NCBI GI: 256729833 Blast Desc: NECHADRAFT_47081 [Nectria haematococca mpVI 77-13-4]
  misc_feature (6)..(170): NCBI GI: 255938953 Blast Desc: Pc15g00180 [Penicillium chrysogenum Wisconsin 54-1255] gi|211584868|emb|CAP82904.1| Pc15g00180 [Penicillium chrysogenum Wisconsin 54-1255]
MSQHAVPTTHQVVPGARVSIVLKVDQPTGREVAGVVRDVLTRGNHHRGIKVRLADGRIGRVQRMLAAAGSEPNPLSTGAAVPEARRPRHRGGDGDDAEPAVQVDLASYIVPSKRKGKDRKRNQQTEDAAHSSDSHVLETDIVSAIATCPVCGEFDGDETAVAHHVSKHFGS

SEQ ID NO: 24902 - DNA, 1497 bp, Muscodor strobelii
  misc_feature: SGI EST ID NO. CUFF.58679.0
  misc_feature: Variant of the nucleotide sequence at SEQ ID NO 24900
tttgcaagagacagcttcgcatggctcactcgtacttggatatgcagtattcggagtatcttaatagaggggtaaaaactgcatgcatatgacgacactaaagtcaccacctgttggagagctttcatattgctagtgcaaatttccagagcgactctaatgtatgcctcaccgatcgattaccactgcatttaaggaagcgtctctgcctgagagcaaataaaccctaaggctgtaggcaaacgccatgagccaacacgctgttcccacaacccatcaagtggttccgggtgcgcgtgtcagcattgttttgaaagttgatcagccaactggccgtgaagtagccggcgtcgtccgcgatgtcttgacgaggggcaatcatcaccgcgggatcaaagtgcgacttgctgacggacgtatcgggagggtgcaaaggatgttagcagcggccggatcggaacctaatccattatctacaggtgcagcggttccagaggcccgacggccacggcaccgtggcggagacggtgatgacgccgaacccgcagttcaggtggacctagcgtcatacattgtgccctctaaacgtaaaggcaaagacaggaaacgtaaccagcaaacagaagatgctgctcactcgagcgacagtcatgttctggagacagatatcgtttctgcaatagcgacatgtcctgtatgtggtgaatttgacggcgatgagactgctgtcgctcaccatgtctcaaaacattttggatcttgagtgcctccacgccgcgctctccactcttaacagccaagctgatcctgagctcacctactccagctcaactgtgctgcctcacggctttcacattccaagggctgccctggtaatgagaaaccacgacggcttgtctgtagcgtctgcaatctgacaaccttcaatgatacggcttcttccctgaaatctgttcattcggtctgagcacttgcgaatagtccactttggctaatttcattccgagggactctctctatataacgtcggcacaactcgatcttacttcgatggggtttacaggatttgcattaccgctcagcatcaggtaaataaatttaatgagccaaatttcaacaattaccagcacgagaaagcgttcgcgaaacacgataggcaaggtccatctttcttaacctgaccacaatacctgattagtacttcgtctacgtccaagggatggcgaaggacacaatcttgtaataaggatgaccattatcggagatgacgcgtggattaaaacattgatgcgctcacgaagtaaatcatggctaatcgattcacaaagagtcaagcacctatgccaaaacgccccacacgtccgaatacattgcaaacacattcattataatcctatccatgtgtagctagaatgagagtagagatatcttcatcgtgaacggctaccaactttgcgagatatgctaccacagcgcgacttattcttcgagctcgtg

SEQ ID NO: 24903 - DNA, 1584 bp, Muscodor strobelii
  misc_feature: SGI cDNA ID NO. 568496
  misc_feature: Elevated expression when VOC is produced
  misc_feature: Encodes the peptide sequence at SEQ ID NO 24904
atggaaccgcctccaaaatgtggagtggaagccatacatgtccacgatgtgctaattgtcggtgctggtcccgcgggcttggctgttgctgcaagattgtccgagaagatgcccgccgccaacttcactgatgacgagcatcgtcgatttcattggatcaatcagcatcgcggtaaaacgagtcttttgaaggtccgcaagaatggcttggtccaacaacatcacatctctccagctagtaatacggagctggatattcttgctattgatgaatattccaccacatggatggctaaatggaagcgttactttggagtcttcgatattcctttccttcgaagcccgatgttttttcatatcgatcccgccgagcgagatggacttctctcgtatgcatacacgtctggcagagaagccgagctgcgcgagctcgacggctgcgtcggcaaggaattgagcaaacacgagaggaaaaagagagaaaagagtagaagacaaccgaaatcagaacccaccgtcgacgaacgagatcgtttcgattatttcgtgccttcaactccgctgttcttcgaccagtgcaaagatatcgcgaagagatataagctcggtaacctactacaagagaaatgtcaggatattcagttcaagcacattccagagttctccaaagatcaaaaaatcttcaccattgagacggacaagaagcttcactgttgcccccttacccccgccgaggctgaaggtggcacacacgtgatgcacatcaaagacgacatgccctctccacacacgaagcagaagatggcagctggtgccgaaactaatatcctcgtggttggaggcgggctcgacacgacatctgcgcagatttccgacttggccattcggcgaggcgtgaccaaggtatttctgatcatgcgaggcccgctcaagatcaagcactttgatatcgggctagagtgggtaggcaaattccgcaacgtcgagcatgccatcttctggaattcggattccagcgaggaacgatggcaaaaatggatgtcggccagaaacgggggcagcatcacaccgtattacaagaagatcgtggagaaacaaatagcggcaggccgcttgagcatgtcgctacacaccactatcgagagcaagaaatgggatcccgtgtccaagacatgggacgtgacgttggctggggacacgcagcaactcccgcccatcgaccacatctactgggctacgggagttggcacagacttcaagagcctgcgcttcctccagaccatgctccgtgactacccagtagaagactgcggaggattcccttgcatcaacgagaagatggcatggaaagacgatgtacccatgttcgtcgcaggtcggttcgcggggctgcagcttggtcccggtgcacccaatctgatcggagctcggatcggagcggacaggatcgcgtgggccatccaggaagtgctagaaagcgaagaagccgatgaggcgccagcctggagcgaagagaggttcaactacattacaggccgaggtagccggttcgaagcgttgggggccgatgggattgccgtataa

SEQ ID NO: 24904 - protein, 527 aa, Muscodor strobelii
  misc_feature: SGI Peptide ID NO. 568496
  misc_feature (16)..(35): Pfam Id: PF01266 Pfam Desc: FAD dependent oxidoreductase
  misc_feature (16)..(36): Pfam Id: PF00890 Pfam Desc: FAD binding domain
  misc_feature (16)..(41): Pfam Id: PF05834 Pfam Desc: Lycopene cyclase protein
  misc_feature (16)..(33): Pfam Id: PF07992 Pfam Desc: Pyridine nucleotide-disulphide oxidoreductase
  misc_feature (14)..(522): NCBI GI: 212526332 Blast Desc: FAD binding domain protein [Penicillium marneffei ATCC 18224] gi|210072721|gb|EEA26808.1| FAD binding domain protein [Penicillium marneffei ATCC 18224]
  misc_feature (12)..(520): NCBI GI: 169602811 Blast Desc: SNOG_04409 [Phaeosphaeria nodorum SN15] gi|160706263|gb|EAT88169.2| SNOG_04409 [Phaeosphaeria nodorum SN15]
  misc_feature (14)..(523): NCBI GI: 46122693 Blast Desc: FG05724.1 [Gibberella zeae PH-1]
  misc_feature (14)..(522): NCBI GI: 212526334 Blast Desc: FAD binding domain protein [Penicillium marneffei ATCC 18224] gi|210072722|gb|EEA26809.1| FAD binding domain protein [Penicillium marneffei ATCC 18224]
  misc_feature (14)..(521): NCBI GI: 242780573 Blast Desc: FAD binding domain protein [Talaromyces stipitatus ATCC 10500] gi|218719771|gb|EED19190.1| FAD binding domain protein [Talaromyces stipitatus ATCC 10500]
  misc_feature (14)..(524): NCBI GI: 39951445 Blast Desc: MGG_01365 [Magnaporthe grisea 70-15] gi|145020811|gb|EDK04940.1| MGG_01365 [Magnaporthe grisea 70-15]
  misc_feature (16)..(521): NCBI GI: 115396272 Blast Desc: conserved [Aspergillus terreus NIH2624] gi|114193344|gb|EAU35044.1| conserved [Aspergillus terreus NIH2624]
  misc_feature (14)..(523): NCBI GI: 256726743 Blast Desc: NECHADRAFT_32708 [Nectria haematococca mpVI 77-13-4]
  misc_feature (16)..(521): NCBI GI: 238486946 Blast Desc: FAD binding domain protein [Aspergillus flavus NRRL3357] gi|220699590|gb|EED55929.1| FAD binding domain protein [Aspergillus flavus NRRL3357]
  misc_feature (8)..(521): NCBI GI: 154299226 Blast Desc: BC1G_11791 [Botryotinia fuckeliana B05.10] gi|150857494|gb|EDN32686.1| BC1G_11791 [Botryotinia fuckeliana B05.10]
  misc_feature: Useful for introducing or modulating the production of volatile compounds
MEPPPKCGVEAIHVHDVLIVGAGPAGLAVAARLSEKMPAANFTDDEHRRFHWINQHRGKTSLLKVRKNGLVQQHHISPASNTELDILAIDEYSTTWMAKWKRYFGVFDIPFLRSPMFFHIDPAERDGLLSYAYTSGREAELRELDGCVGKELSKHERKKREKSRRQPKSEPTVDERDRFDYFVPSTPLFFDQCKDIAKRYKLGNLLQEKCQDIQFKHIPEFSKDQKIFTIETDKKLHCCPLTPAEAEGGTHVMHIKDDMPSPHTKQKMAAGAETNILVVGGGLDTTSAQISDLAIRRGVTKVFLIMRGPLKIKHFDIGLEWVGKFRNVEHAIFWNSDSSEERWQKWMSARNGGSITPYYKKIVEKQIAAGRLSMSLHTTIESKKWDPVSKTWDVTLAGDTQQLPPIDHIYWATGVGTDFKSLRFLQTMLRDYPVEDCGGFPCINEKMAWKDDVPMFVAGRFAGLQLGPGAPNLIGARIGADRIAWAIQEVLESEEADEAPAWSEERFNYITGRGSRFEALGADGIAV

SEQ ID NO: 24905 - DNA, 1658 bp, Muscodor strobelii
  misc_feature: SGI EST ID NO. CUFF.58727.0
  misc_feature: Variant of the nucleotide sequence at SEQ ID NO 24903
ctagaataccgattcaatgcggatgatgacgaaatcgggaaagaggaaaagggagaaactagatttgacatttcacaacaccagttgcccccttacccccgccgaggctgaaggtggcacacacgtgatgcacatcaaagacgacatgccctctccacacacgaagcagaagatggcagctggtgccgaaactaatatcctcgtggttggaggcgggctcggtatgtgtagaaagacatcacgcgagttattaattgatcatattcttaagacacggtactgacttttgaataacatctgcgcagatttccgacttggccattcggcgaggcgtgaccaaggtatttctgatcatgcgaggcccgctcaagatcaagcactttgatatcgggctagagtgggtaggcaaattccgcaacgtcgagcatgccatcttctggaattcggattccagcgaggaacgatggcaaaaatggatgtcggccagaaacgggggcagcatcacaccgtattacaagaagatcgtggagaaacaaatagcggcaggccgcttgagcatgtcgctacacaccactatcgagagcaagaaatgggatcccgtgtccaagacatgggacgtgacgttggctggggacacgcagcaactcccgcccatcgaccacatctactgggctacgggagttggcacagacttcaagagcctgcgcttcctccagaccatgctccgtgactacccagtagaagactgcggaggattcccttgcatcaacgagaagatggcatggaaagacgatgtacccatgttcgtcgcaggtcggttcgcggggctgcagcttggtcccggtgcacccaatctgatcggagctcggatcggagcggacaggatcgcgtgggccatccaggaagtgctagaaagcgaagaagccgatgaggcgccagcctggagcgaagagaggttcaactacattacaggccgaggtagccggttcgaagcgttgggggccgatgggattgccgtataagtttaccatgggtagaatcgggcggtgatggattggtgcaagtgaaatgccgcggtagtaacaggcagtagtgctgaatgatggtcgagtatgagatgatgttgacgcttggttccgtctcagggtatgatagggtataattaacgtgtcagcgctctgactgatctctaaatgaaattgttgaagacaacaatcggccgagaaaagcgacgatccgtcgcaccatggtccatcccttacacatgccagagtgcctgcaggtgtctcctattgctcccatcgctcgcccgagaggagtggatgcgcctggtcgagctcgctgtggtattagtcaaatcgcctagcttcataagcacgttctacaaagcacgactagcgcataggacaggcacggccaggctctgattgccattgttgagtctagatctgttcttgatcaatgtctcgtttcatgggtccacaatctgagccaggaaatcatcgtctatatctacaagtccaaatgtggctctggtagcagacacatcttcaggccgccagtggcgtgtgcgtctctctccttctccttatctctctctctccgtctctctctcttctccccttcgtccggatagagccttcgtgtggtagatacag

SEQ ID NO: 24906 - DNA, 2451 bp, Muscodor strobelii
  misc_feature: SGI cDNA ID NO. 568497
  misc_feature: Reduced expression when VOC is produced
  misc_feature: Encodes the peptide sequence at SEQ ID NO 24907
atgccttcccaactaggccgtgggctggccaaggcgctcggcatcagattggcagagccagagtcggagagagtcactcgaggagaatctgtattctcgaatcacacggcagattccttcattgaggatcagccttcagtcaaagaggttctacgcgatctggtaccgactagaaggaatattgttgattacatatggtctctatttcctttcctacactggatcggattctataatctacaatggttcctcggagatctcgtagctggtatcaccatcggtgccgtcgtcgtacctcagggtatgtcatacgccaagctagctgaactacccgtggaattcggtctctattcatcgttcgttggcgtggtgatctactggttctttgcgacatcaaaggacatcacaatcgggcctgtcgcagtcctatcccaagttacgggtacggtggtccttcaagttgtggacaaactcccacagtacgacgattcgaggttcattatcgcttcatcgctttcagtcatctgcggcgccattgttgttacaataggattattgcggtggggctggatcgtcgagttaattcccgttgtctctcttctggcctacatgactggttcagccctcagcattgcgtcggggcaagttgctgggcttctcggcatcaagggtgttaacaccagaggcgccacgtatcgtgtcatcatcgacaccctaaaggctttgcctttgacaaagctagacgctgctctaggtctcacagcgctattcttgctttatgcaattcgatcagtatgcaactatttggccaagaagtatccagaacgccgaaagctgttcttcttcctcaacacgttgagatcagtttttgtcgtccttctgtacaccttgatcagttggctagtgaacatgaatcaccgaagcaaccctcgttttgccatcctcggtaaagttccacgcgggtttcaacacgctgcagtaccgactctcgatgcggaactcattggagcatacctcaatgaaattccggcgactgtaatcgtgatgctcatcgagcatattgccatcgcgaaggcattcggtcgcatcaataattacagaatcaacccgtcacaggaaatggttgccatcggagttacgaatctcatcggcccattcttgggcggttacccagccacaggttcttttagtcgaacggctatcaaatcaaaggctggtgttcggacaccatttgctggtcttatcacgggacttgttgtgcttctggctatttacgcgctgattgcagtcttcttctacattccaaacgcctctctatccgccatcattattcacgctgtgggtgatctcatcacgccacctgacacagtgtatcaattgtggcgtgttaatcccctagaaccgattatcttcttcatcagcgtccttgtcatcgtcttttcgagtatcgagatcggtatctacgtcagcatatccgtttcgtttgcggtgttccttgtgcgtaacctcaaagccaagggcacattcctcggcaaggtccaagtccactctgtcgttggtgaccatgttattggcattgacgatcgggtggctggcgaatatggtacattcggcacgtctgatcctagtgtctctgcgcctaagcgcggcgtatttctacccatcgaccacagagacggctcgaaccctgaagttctactgaccaatccttaccctggaatctttatataccgcttctccgaacttctcaattatcctagcgctgcaagttcgcttgagtacatggtcgaatatgtcacgactgctactcgtgcgacgacgctagactcattcaaacgaccaggcgatcgaccatggaacgatcccggcccgaagaaaggtgaacaagtcaatactgatatgccaacacttaaggccatcatcctggatttcagctccgtcaataacatcgacgcgacttcgacgcagttgttgattgacataaggaatcagctggataggtacacggcgccagatgtcgtggattggcacatcgcatgcatcaacaaccgatggacgaagcgagcacttgtatctgccggcttcggctaccccaccgaacgccaagacggcggtcacacacgctggaagtccatttttagcatcgctgagatgggcggttcagactccgctgctgctgttgccgagcgtgaggcgaacgagaaagactttgcgcaatcagtctcgcggttcgacaatccagaactcggacataagaacgagttgggcagtggtggatcgagcacgtctggttcgtccccgaaggccactgcctcaaacccattattggggagaagagctgttgtgcatggcattaatcgtccgctcttccacattgatctcacaagtgcactgcagagcgctattgccaatgtggaagctaggggagaggctagaaccgactctgactaa

SEQ ID NO: 24907 - protein, 816 aa, Muscodor strobelii
  misc_feature: SGI Peptide ID NO. 568497
  misc_feature (183)..(502): Pfam Id: PF00916 Pfam Desc: Sulfate transporter family
  misc_feature (565)..(667): Pfam Id: PF01740 Pfam Desc: STAS domain
  misc_feature (3)..(810): NCBI GI: 261357472 Blast Desc: sulfate permease [Verticillium albo-atrum VaMs.102]
  misc_feature (4)..(810): NCBI GI: 85117820 Blast Desc: NCU03235 [Neurospora crassa OR74A] gi|28927142|gb|EAA36099.1| NCU03235 [Neurospora crassa OR74A]
  misc_feature (3)..(808): NCBI GI: 39945316 Blast Desc: MGG_04640 [Magnaporthe grisea 70-15] gi|145011302|gb|EDJ95958.1| MGG_04640 [Magnaporthe grisea 70-15]
  misc_feature (3)..(808): NCBI GI: 154319412 Blast Desc: BC1G_02187 [Botryotinia fuckeliana B05.10] gi|150855845|gb|EDN31037.1| BC1G_02187 [Botryotinia fuckeliana B05.10]
  misc_feature (3)..(808): NCBI GI: 156030885 Blast Desc: SS1G_14223 [Sclerotinia sclerotiorum 1980] gi|154700614|gb|EDO00353.1| SS1G_14223 [Sclerotinia sclerotiorum 1980]
  misc_feature (4)..(800): NCBI GI: 239609340 Blast Desc: sulfate permease II [Ajellomyces dermatitidis ER-3]
  misc_feature (3)..(807): NCBI GI: 225563007 Blast Desc: sulfate permease [Ajellomyces capsulatus G186AR]
  misc_feature (3)..(807): NCBI GI: 240279826 Blast Desc: sulfate permease [Ajellomyces capsulatus H143]
  misc_feature (5)..(810): NCBI GI: 189203039 Blast Desc: sulfate permease 2 [Pyrenophora tritici-repentis Pt-1C-BFP] gi|187984954|gb|EDU50442.1| sulfate permease 2 [Pyrenophora tritici-repentis Pt-1C-BFP]
  misc_feature (3)..(809): NCBI GI: 212540054 Blast Desc: sulfate transporter, [Penicillium marneffei ATCC 18224] gi|210067481|gb|EEA21573.1| sulfate transporter, [Penicillium marneffei ATCC 18224]
  misc_feature: Useful for introducing or modulating the production of volatile compounds
MPSQLGRGLAKALGIRLAEPESERVTRGESVFSNHTADSFIEDQPSVKEVLRDLVPTRRNIVDYIWSLFPFLHWIGFYNLQWFLGDLVAGITIGAVVVPQGMSYAKLAELPVEFGLYSSFVGVVIYWFFATSKDITIGPVAVLSQVTGTVVLQVVDKLPQYDDSRFIIASSLSVICGAIVVTIGLLRWGWIVELIPVVSLLAYMTGSALSIASGQVAGLLGIKGVNTRGATYRVIIDTLKALPLTKLDAALGLTALFLLYAIRSVCNYLAKKYPERRKLFFFLNTLRSVFVVLLYTLISWLVNMNHRSNPRFAILGKVPRGFQHAAVPTLDAELIGAYLNEIPATVIVMLIEHIAIAKAFGRINNYRINPSQEMVAIGVTNLIGPFLGGYPATGSFSRTAIKSKAGVRTPFAGLITGLVVLLAIYALIAVFFYIPNASLSAIIIHAVGDLITPPDTVYQLWRVNPLEPIIFFISVLVIVFSSIEIGIYVSISVSFAVFLVRNLKAKGTFLGKVQVHSVVGDHVIGIDDRVAGEYGTFGTSDPSVSAPKRGVFLPIDHRDGSNPEVLLTNPYPGIFIYRFSELLNYPSAASSLEYMVEYVTTATRATTLDSFKRPGDRPWNDPGPKKGEQVNTDMPTLKAIILDFSSVNNIDATSTQLLIDIRNQLDRYTAPDVVDWHIACINNRWTKRALVSAGFGYPTERQDGGHTRWKSIFSIAEMGGSDSAAAVAEREANEKDFAQSVSRFDNPELGHKNELGSGGSSTSGSSPKATASNPLLGRRAVVHGINRPLFHIDLTSALQSAIANVEARGEARTDSD

SEQ ID NO: 24908 - DNA, 3637 bp, Muscodor strobelii
  misc_feature: SGI EST ID NO. CUFF.58697.0
  misc_feature: Variant of the nucleotide sequence at SEQ ID NO 24906
cgagacggcggacgctgtgaaactaagctccgaagggcaaggagtcgatggcgccatagctcgactgaccaatctggcagctccaccgataacgattgtgtcccccgttgtctccgtagatcaccaagtactgggatcataggtacttgaggtagagctggacaagagacgatattttatccattgtattgcgcgttcctctcatctgtagacccccggtctactccatcctctcaacatacaatacttcgagcatttctatcgcttaataaatggcacgtgttacctatcttgcttcgaaacgtcctacccgttctagctacatgcataatagcttagtataagaccatccgagtatacttcgtcagatctcgtcagcatcatatctgaacaactcgactttcgttctcttcctaagtgaatagtcactgtatcatcagcgccatattgtcagtcgagttcgttcattcagatcaatatttcacgcgtggtacgactcttcaaatctctcagtcacgccacaagtccacggctcgaaataatcaccacgtgaatacttgtaccctaccactgaaagaacaccaacttcaatgtcaaagagatgaatgcatgggaggcttgagcacgccatacagcctgtagtacttcttgggccaatcaaggcccggccctatcctagtctgcagggttcgcgtgtggtggttgttgcactcgtaaactcagcttgccctctctgcctcgtcccttgccaagtatatacacttggctctaccctcccgcagctcacggtcgcaaatccaacctcttagcatctctggaatcaaccatgccttcccaactaggccgtgggctggccaaggcgctcggcatcagattggcagagccagagtcggagagagtcactcgaggagaatctgtattctcgaatcacacggcagattccttcattgaggatcagccttcagtcaaagaggttctacgcgatctggtaccgactagaaggaatattgttgattacatatggtctctatttcctttcctacactggatcggattctataatctacaatggttcctcggagatctcgtagctggtatcaccatcggtgccgtcgtcgtacctcagggtatgtcatacgccaagctagctgaactacccgtggaattcggtctctattcatcgttcgttggcgtggtgatctactggttctttgcgacatcaaaggacatcacaatcgggcctgtcgcagtcctatcccaagttacgggtacggtggtccttcaagttgtggacaaactcccacagtacgacgattcgaggttcattatcgcttcatcgctttcagtcatctgcggcgccattgttgttacaataggattattgcggtggggctggatcgtcgagttaattcccgttgtctctcttctggcctacatgactggttcagccctcagcattgcgtcggggcaagttgctgggcttctcggcatcaagggtgttaacaccagaggcgccacgtatcgtgtcatcatcgacaccctaaaggctttgcctttgacaaagctagacgctgctctaggtctcacagcgctattcttgctttatgcaattcgatcagtatgcaactatttggccaagaagtatccagaacgccgaaagctgttcttcttcctcaacacgttgagatcagtttttgtcgtccttctgtacaccttgatcagttggctagtgaacatgaatcaccgaagcaaccctcgttttgccatcctcggtaaagttccacgcgggtttcaacacgctgcagtaccgactctcgatgcggaactcattggagcatacctcaatgaaattccggcgactgtaatcgtgatgctcatcgagcatattgccatcgcgaaggcattcggtcgcatcaataattacagaatcaacccgtcacaggaaatggttgccatcggagttacgaatctcatcggcccattcttgggcggttacccagccacaggttcttttagtcgaacggctatcaaatcaaaggctggtgttcggacaccatttgctggtcttatcacgggacttgttgtgcttctggctatttacgcgctgattgcagtcttcttctacattccaaacgcctctctatccgccatcattattcacgctgtgggtgatctcatcacgccacctgacacagtgtatcaattgtggcgtgttaatcccctagaaccgattatcttcttcatcagcgtccttgtcatcgtcttttcgagtatcgagatcggtatctacgtcagcatatccgtttcgtttgcggtgttccttgtgcgtaacctcaaagccaagggcacattcctcggcaaggtccaagtccactctgtcgttggtgaccatgttattggcattgacgatcgggtggctggcgaatatggtacattcggcacgtctgatcctagtgtctctgcgcctaagcgcggcgtatttctacccatcgaccacagagacggctcgaaccctgaagttctactgaccaatccttaccctggaatctttatataccgcttctccgaacttctcaattatcctagcgctgcaagttcgcttgagtacatggtcgaatatgtcacgactgctactcgtgcgacgacgctagactcattcaaacgaccaggcgatcgaccatggaacgatcccggcccgaagaaaggtgaacaagtcaatactgatatgccaacacttaaggccatcatcctggatttcagctccgtcaataacatcgacgcgacttcgacgcagttgttgattgacataaggaatcagctggataggtacacggcgccagatgtcgtggattggcacatcgcatgcatcaacaaccgatggacgaagcgagcacttgtatctgccggcttcggctaccccaccgaacgccaagacggcggtcacacacgctggaagtccatttttagcatcgctgagatgggcggttcagactccgctgctgctgttgccgagcgtgaggcgaacgagaaagactttgcgcaatcagtctcgcggttcgacaatccagaactcggacataagaacgagttgggcagtggtggatcgagcacgtctggttcgtccccgaaggccactgcctcaaacccattattggggagaagagctgttgtgcatggcattaatcgtccgctcttccacattgatctcacaagtgcactgcagagcgctattgccaatgtggaagctaggggagaggctagaaccgactctgactaagtggtcgcatatcagctatgtctttatttccatttagatttgtttggcggtctcgactcgatagagagcagaataaatagatgctcgtggattttggtcacttggttccaattgtttgcatagcccagcgatggctttttgtatggctgttttgtggtcgttgacaccactcacgattttcagatacccaaactacaatgaagatgcagagaacgtttctagcaagcatatttcatgacgaaaagatatgaatactatgtgaatgaaactggtgtctcctgctactttctttccaagagcaccaataccacgtttaacatgtatttcaaacttttcaagtatggaaatagcgagacgaag

SEQ ID NO: 24909 - DNA, 1398 bp, Muscodor strobelii
  misc_feature: SGI cDNA ID NO. 568498
  misc_feature: Encodes the peptide sequence at SEQ ID NO 24910
atgtccgtcccagttgagcgtatgggtctgctttctcttgagagcatgtcgaccccatccacttctcggcctcgacggcgagaggagtattttgttagttccgtttatgattcggatgcagagtcgagcgtcgatgacgacccgggctttgagtacgacgagactcttgatgttgcgacatttccgtcaggaaagagatactcattgcgcgaactcgacatgaatacccacgatgccgttatcagatctatcaatacctcgtcaaaactctccctaagacgatgtcatgctcgggaggacacatacttctttcttgttaccgaatcaagagagtatcatgtgcggatggcagcagattctcagagcccgtggtttagtccaagttgttcatgccggcaagacaacgaagacaccgttggcgcctaccctcagcatccgtgtcgccatacactttgggtttgtgatcaagtcgctggtcaaatccttgcccaccagaaggacccctacacgctcagtctagatggctacacgaaggaggaagggaatttgtgccaatacattgccgattatgactttgcgatcctagccaatggtctcaactgcgaactccagtcagaggccccaagcgctcgaagaataaggacagcgcgagaaattcttaccacattaaacggaacgtctatcgaccgaaccacaaacgacgtaggaagtgaccaagaagttattgtagaaggtgacctcgagcaaacgatttttcgtatgcttctacaaaataattctttctactcatattttctttccgcgatgcgccacttcaagcacctcaacgcacgttttcgtttattccgagagcaagttgactcgactctagtcaaatttgatggcattgtcgaacaaccttcgcagaatagtcacacgcaatttgacatgtgtgtgaagcgatttcgacatattgaacagcagatcctgtccttcatactttattctgatccggaaagagagctagacgaagctgatcaaatcgccgcggtgtatacattagtatactgtctcgaacgaactctggcatacaaccaagatcacattctcaccgcgggaaagatgccaataacggttaatctttgcgacactcttatcaatcaagagaaaaacaactatattctcgatgttatcagcaaatttagcaacgaaataatccgtcatctacttcctgatctgacgagagtcgaagagcagctagctgatgtaaatttctctcgtacctaccatgagaaattcgcagatatactcgggattgctcgaggtgaagactcacgcaccacttccgaggccgcagaaaactctaggaagcgtgcaagccaacacgatcgggacgcagacgccaaacgagtcaaataa

SEQ ID NO: 24910 - protein, 465 aa, Muscodor strobelii
  misc_feature: SGI Peptide ID NO. 568498
  misc_feature (62)..(435): NCBI GI: 256734521 Blast Desc: NECHADRAFT_74867 [Nectria haematococca mpVI 77-13-4]
  misc_feature (62)..(392): NCBI GI: 46107304 Blast Desc: FG00535.1 [Gibberella zeae PH-1]
  misc_feature (53)..(465): NCBI GI: 261357471 Blast Desc: conserved [Verticillium albo-atrum VaMs.102]
  misc_feature (102)..(434): NCBI GI: 145602963 Blast Desc: MGG_04635 [Magnaporthe grisea 70-15] gi|145011307|gb|EDJ95963.1| MGG_04635 [Magnaporthe grisea 70-15]
  misc_feature (58)..(452): NCBI GI: 171695098 Blast Desc: protein product [Podospora anserina] gi|170947791|emb|CAP59954.1| protein product [Podospora anserina]
  misc_feature (88)..(451): NCBI GI: 261190712 Blast Desc: conserved [Ajellomyces dermatitidis SLH14081] gi|239591188|gb|EEQ73769.1| conserved [Ajellomyces dermatitidis SLH14081]
  misc_feature (42)..(465): NCBI GI: 119482666 Blast Desc: NFIA_025370 [Neosartorya fischeri NRRL 181] gi|119409516|gb|EAW19464.1| conserved [Neosartorya fischeri NRRL 181]
  misc_feature (88)..(465): NCBI GI: 239614875 Blast Desc: conserved [Ajellomyces dermatitidis ER-3]
  misc_feature (89)..(290): NCBI GI: 116182496 Blast Desc: CHGG_01876 [Chaetomium globosum CBS 148.51] gi|88186173|gb|EAQ93641.1| CHGG_01876 [Chaetomium globosum CBS 148.51]
  misc_feature (63)..(362): NCBI GI: 121711327 Blast Desc: conserved [Aspergillus clavatus NRRL 1] gi|119401430|gb|EAW11853.1| conserved [Aspergillus clavatus NRRL 1]
MSVPVERMGLLSLESMSTPSTSRPRRREEYFVSSVYDSDAESSVDDDPGFEYDETLDVATFPSGKRYSLRELDMNTHDAVIRSINTSSKLSLRRCHAREDTYFFLVTESREYHVRMAADSQSPWFSPSCSCRQDNEDTVGAYPQHPCRHTLWVCDQVAGQILAHQKDPYTLSLDGYTKEEGNLCQYIADYDFAILANGLNCELQSEAPSARRIRTAREILTTLNGTSIDRTTNDVGSDQEVIVEGDLEQTIFRMLLQNNSFYSYFLSAMRHFKHLNARFRLFREQVDSTLVKFDGIVEQPSQNSHTQFDMCVKRFRHIEQQILSFILYSDPERELDEADQIAAVYTLVYCLERTLAYNQDHILTAGKMPITVNLCDTLINQEKNNYILDVISKFSNEIIRHLLPDLTRVEEQLADVNFSRTYHEKFADILGIARGEDSRTTSEAAENSRKRASQHDRDADAKRVK

SEQ ID NO: 24911 - DNA, 1790 bp, Muscodor strobelii
  misc_feature: SGI EST ID NO. CUFF.58701.0
  misc_feature: Variant of the nucleotide sequence at SEQ ID NO 24909
cggatgcagagtcgagcgtcgatgacgacccgggctttgagtacgacgagactcttgatgttgcgacatttccgtcaggaaagagatactcattgcgcgaactcgacatgaatacccacgatgccgttatcagatctatcaatacctcgtcaaaactctccctaagacgatgtcatgctcgggaggacacatacttctttcttgttaccgaatcaagagagtatcatgtgcggatggcagcagattctcagagcccgtggtttagtccaagttgttcatgccggcaagacaacgaagacaccgttggcgcctaccctcagcatccgtgtcgccatacactttgggtttgtgatcaagtcgctggtcaaatccttgcccaccagaaggacccctacacgctcagtctagatggctacacgaaggaggaagggaatttgtgccaatacattgccgattatgactttgcgatcctagccaatggtctcaactgcgaactccagtcagaggccccaagcgctcgaagaataaggacagcgcgagaaattcttaccacattaaacggaacgtctatcgaccgaaccacaaacgacgtaggaagtgaccaagaagttattgtagaaggtgacctcgagcaaacgatttttcgtatgcttctacaaaataattctttctactcatattttctttccgcgatgcgccacttcaagcacctcaacgcacgttttcgtttattccgagagcaagttgactcgactctagtcaaatttgatggcattgtcgaacaaccttcgcagaatagtcacacgcaatttgacatgtgtgtgaagcgatttcgacatattgaacagcagatcctgtccttcatactttattctgatccggaaagagagctagacgaagctgatcaaatcgccgcggtgtatacattagtatactgtctcgaacgaactctggcatacaaccaagatcacattctcaccgcgggaaagatgccaataacggttaatctttgcgacactcttatcaatcaagagaaaaacaactatattctcgatgttatcagcaaatttagcaacgaaataatccgtcatctacttcctgatctgacgagagtcgaagagcagctagctgatgtaaatttctctcgtacctaccatgagaaattcgcagatatactcgggattgctcgaggtgaagactcacgcaccacttccgaggccgcagaaaactctaggaagcgtgcaagccaacacgatcgggacgcagacgccaaacgagtcaaataaatggtccctaaacgttactcaagaccgagcgatggaattaggaactattaggaactagggcatctcatatcaacccttcgctccataagagccggtctctctaggacatgttatgttgaacgcgagccctgtgtacagtatcgcaattgggctcgtgccggattacaacgagtctttttcacttctcgactatcattcagaattgacctgtccaattgcgtctctccttcagcgatcactcgcgttcgctctggaagttgaactgcccgcgcccagtcaatcaatatttctacctcttttcccacttaacttgtcgggctatgatatcttagattgacaatatccacaacacctcgtgtaaaaaacttcgaagactttagatacaaaacccacgttttagagtagcaattacaacatcttagctgatagttcatgtatatatgcatatgcaattcttcgtaacgcggagctagaatcctaagatgcctcattcttcacgctcgg

SEQ ID NO: 24912 - DNA, 1725 bp, Muscodor strobelii
  misc_feature: SGI cDNA ID NO. 568499
  misc_feature: Encodes the peptide sequence at SEQ ID NO 24913
atggaactcacctcgggagcaatagaagaagtagtacatcctaccgcagcgtttctgcaggtgccgagccacaatcggcgtgatgctctcaaaacggagtttacaccccatcccatgtgggaagaatctctcttgaatcccaaaaacaggatagatagcctcgaccttccagaaaatgctatgtggcgggtagatgggtgtacaggattaggtacccagtactacacagtccccgtctgccttgcccaggtaccaccaatgcgtatcgatgttttcataccagagaatcaacccatatggattcgagagcaactcgaccttcacaaggcattccatactaaggatgggcatcgtgtctctaggcttgctatcaccagacacatcatcagggcattacagtattggacccaatccacattcaggaccctggaagatttcggtcacttttacagatctgttccttttggttctcgaatagtcttcgagcgtctttccctcaacagcaatcagattgacatcaaaattggccagaaccataaccttgagctgaaacttctctcgctctcaagcttaaccagtctgtggggaacatcattttcattcctcaagctggttgacattttcgaggtgcaagtcgttaccatactacacgatagtgtgtgcgttgttcgtatttcgggccagctattcatcctcaaagcgctgataagcgataccaccaagtatctttatcacgagttgaaaacgttgtgcacgatcgagccccattgcaacatcattggccgaccgattcatttgatcaagaagcctagtaatttcggaggaaaaaacgcaatcgttggctttaccactttctatcattcccagggaagtcttcgagaccttttgccccaacttcggattcatggccaactacaacgagatcaacagttcaaatggtccattcagttaactcgggctctaattcatattcgcactcgctcgtcgctatattatcctgacttgcgtcttgacaatatcgtactctccgaaaatctcgatgtagtcatggttgatttcgagcagcgaggagtgtggtgcgagttcgcggcccctgaagtcaatgctattgaatatgtacgcctcgtcgccattgacgaacggatgccagataatgtaagagcgaaatatcggcgaataatgctagatttggtgcctgaatttgaagagctccagagggatcagtacacaaacccctgcaatggctataacaccacatggattgctcttagctccgaagagcacgaagcggcagaggtctacatgttaggccgtgttctttggtgtatattcgaaggtgtcagtggaccgcaaaaagcggcagtttggcaatcgtaccgttgggaatcagatcttgaatttccagactatagtcgaacacctgccgctatgagagacctcattgatcgctgcacgcgaggcagacgaccgaaccttggtagtattattgccagacaccagagccaattagttctacgacatcaacatgttggcatgcaagagccaattcacgttcaagcggctgcgagcgccttttggttggccgaactggattgggcggagagttttctgcgcatgagacgctcttgtcaagaactcggggattggcgaaataatcactatggtagaccaagccttcaagacgtcctgtcagatctcacgaccattcaagcattggaagggtaa

SEQ ID NO: 24913 - protein, 574 aa, Muscodor strobelii
  misc_feature: SGI Peptide ID NO. 568499
  misc_feature (1)..(574): NCBI GI: 46107302 Blast Desc: FG00534.1 [Gibberella zeae PH-1]
  misc_feature (1)..(574): NCBI GI: 256735234 Blast Desc: NECHADRAFT_90115 [Nectria haematococca mpVI 77-13-4]
  misc_feature (1)..(570): NCBI GI: 164427189 Blast Desc: NCU03250 [Neurospora crassa OR74A] gi|157071644|gb|EAA34529.2| conserved [Neurospora crassa OR74A]
  misc_feature (1)..(571): NCBI GI: 145611266 Blast Desc: MGG_00535 [Magnaporthe grisea 70-15] gi|145018566|gb|EDK02845.1| MGG_00535 [Magnaporthe grisea 70-15]
  misc_feature (1)..(566): NCBI GI: 171695168 Blast Desc: protein product [Podospora anserina] gi|170947826|emb|CAP59989.1| protein product [Podospora anserina]
  misc_feature (1)..(314): NCBI GI: 116182484 Blast Desc: CHGG_01870 [Chaetomium globosum CBS 148.51] gi|88186167|gb|EAQ93635.1| CHGG_01870 [Chaetomium globosum CBS 148.51]
  misc_feature (23)..(568): NCBI GI: 67527898 Blast Desc: AN4196.2 [Aspergillus nidulans FGSC A4] gi|40740105|gb|EAA59295.1| AN4196.2 [Aspergillus nidulans FGSC A4] gi|259481201|tpe|CBF74507.1| TPA: conserved [Aspergillus FGSC
  misc_feature (1)..(570): NCBI GI: 171677257 Blast Desc: protein product [Podospora anserina] gi|170936696|emb|CAP61355.1| protein product [Podospora anserina]
  misc_feature (1)..(567): NCBI GI: 256723499 Blast Desc: NECHADRAFT_81144 [Nectria haematococca mpVI 77-13-4]
  misc_feature (1)..(287): NCBI GI: 261357470 Blast Desc: conserved [Verticillium albo-atrum VaMs.102]
MELTSGAIEEVVHPTAAFLQVPSHNRRDALKTEFTPHPMWEESLLNPKNRIDSLDLPENAMWRVDGCTGLGTQYYTVPVCLAQVPPMRIDVFIPENQPIWIREQLDLHKAFHTKDGHRVSRLAITRHIIRALQYWTQSTFRTLEDFGHFYRSVPFGSRIVFERLSLNSNQIDIKIGQNHNLELKLLSLSSLTSLWGTSFSFLKLVDIFEVQVVTILHDSVCVVRISGQLFILKALISDTTKYLYHELKTLCTIEPHCNIIGRPIHLIKKPSNFGGKNAIVGFTTFYHSQGSLRDLLPQLRIHGQLQRDQQFKWSIQLTRALIHIRTRSSLYYPDLRLDNIVLSENLDVVMVDFEQRGVWCEFAAPEVNAIEYVRLVAIDERMPDNVRAKYRRIMLDLVPEFEELQRDQYTNPCNGYNTTWIALSSEEHEAAEVYMLGRVLWCIFEGVSGPQKAAVWQSYRWESDLEFPDYSRTPAAMRDLIDRCTRGRRPNLGSIIARHQSQLVLRHQHVGMQEPIHVQAAASAFWLAELDWAESFLRMRRSCQELGDWRNNHYGRPSLQDVLSDLTTIQALEG

SEQ ID NO: 24914 - DNA, 3394 bp, Muscodor strobelii
  misc_feature: SGI EST ID NO. CUFF.58706.0
  misc_feature: Variant of the nucleotide sequence at SEQ ID NO 24912
cggctttactgaggagcatattcggatttctcgttccatttggagtattcctgcagaatcaacagatatgtcaggtcacttatttcgatttagcatagcatcatggaactttcaatgatctcatcgaattcatatttccacattccgtcctggttaccgcagaaaatcatcgagtcaggctctcttcacgagattgtcggcggtccagatgtacacacatcatggaactcacctcgggagcaatagaagaagtagtacatcctaccgcagcgtttctgcaggtgccgagccacaatcggcgtgatgctctcaaaacggagtttacaccccatcccatgtgggaagaatctctcttgaatcccaaaaacaggatagatagcctcgaccttccagaaaatgctatgtggcgggtagatgggtgtacaggattaggtacccagtactacacagtccccgtctgccttgcccaggtaccaccaatgcgtatcgatgttttcataccagagaatcaacccatatggattcgagagcaactcgaccttcacaaggcattccatactaaggatgggcatcgtgtctctaggcttgctatcaccagacacatcatcagggcattacagtattggacccaatccacattcaggaccctggaagatttcggtcacttttacagatctgttccttttggttctcgaatagtcttcgagcgtctttccctcaacagcaatcagattgacatcaaaattggccagaaccataaccttgagctgaaacttctctcgctctcaagcttaaccagtctgtggggaacatcattttcattcctcaagctggttgacattttcgaggtgcaagtcgttaccatactacacgatagtgtgtgcgttgttcgtatttcgggccagctattcatcctcaaagcgctgataagcgataccaccaagtatctttatcacgagttgaaaacgttgtgcacgatcgagccccattgcaacatcattggccgaccgattcatttgatcaagaagcctagtaatttcggaggaaaaaacgcaatcgttggctttaccactttctatcattcccagggaagtcttcgagaccttttgccccaacttcggattcatggccaactacaacgagatcaacagttcaaatggtccattcagttaactcgggctctaattcatattcgcactcgctcgtcgctatattatcctgacttgcgtcttgacaatatcgtactctccgaaaatctcgatgtagtcatggttgatttcgagcagcgaggagtgtggtgcgagttcgcggcccctgaagtcaatgctattgaatatgtacgcctcgtcgccattgacgaacggatgccagataatgtaagagcgaaatatcggcgaataatgctagatttggtgcctgaatttgaagagctccagagggatcagtacacaaacccctgcaatggctataacaccacatggattgctcttagctccgaagagcacgaagcggcagaggtctacatgttaggccgtgttctttggtgtatattcgaaggtgtcagtggaccgcaaaaagcggcagtttggcaatcgtaccgttgggaatcagatcttgaatttccagactatagtcgaacacctgccgctatgagagacctcattgatcgctgcacgcgaggcagacgaccgaaccttggtagtattattgccagacaccagagccaattagttctacgacatcaacatgttggcatgcaagagccaattcacgttcaagcggctgcgagcgccttttggttggccgaactggattgggcggagagttttctgcgcatgagacgctcttgtcaagaactcggggattggcgaaataatcactatggtagaccaagccttcaagacgtcctgtcagatctcacgaccattcaagcattggaagggtaatgagctcggactggattcctggttcgcaacaggtgccactttgtcatgatcaaatagcgcaagatgatgtgacacttccaatgaagagtccaattctgtagagggaaagatccactggctacattgttggtagcgtaatactatatgtgatctcggcttggtctacgaaagtagtcaagttttgtaagtcgaacaagaggggaaagaaccgcctaaagttcaagttacgatcgacttaagtatcgattagtgtgctgtatgcccctaaacgctacctggaatcgacgaggccaagctgacaagaggaatgatcacattgaaggacagcaacaaaaatgcaagaacgtattccagcgccctgttatcgcacgaactattccaaaccctccacatagtttaaaggagcataccattgtcataccacacaatgagagagtgtcccgagctcgacggtgtagtctagatggtacacatggcgggatggagggtctacggagaactggagaatttttggtcttgcaatagtgtgagtcactaccgtgcggcctgaattaaatccgttcttttgttttcacaattaggaacctgtctgtgttttccattctgacagcggtctctaatattccgggtaagataatgaatgaccaactgtatttgtcctagaccaacgagccgcatgtattgctgaccagttaaaaaagtatttcattcgatgagagatggagataacagtatataaggttcttgttgaagaagcatctggaaagcactcatctgatttctctgtttcttcgagtacggcgctccagaatagagcctaggccgttgtttttcggggagcaagggcgcgaatcgatagccataacgttccaacataagttactaaaacgtctagttcttcacaggaacaggtgagcgtaacaggaggcgtcatgccaatgtaactcttatctgacgtgtaaaaaccaaacccgtaccagaggttcaaaactccagcaactcgactttaaacttccctattggcccgcagccggtaactagacaatatagccgacctaagcatggatcagaagaattgagtcagaagtgaccttggaaccttggtcaggtctacggtataatcattacccctattccgttggttccagtagaaaatccatatgttcatgcataccacacaatgtctactatcggtgctcgaagctccttcgcaacttggatcggtgctgtggtattcgtatcctcagttgctcctcaaggcccgcgcattccgcttgctcgtggatgttcatcgtctaactaaggtacctatgccctaagtatcggcggtgtatggttgtagtgcagtaaagccgtcagcatgagccttctggatgtactgaatgctcgcatagcacaagagcaatctcgacaaaatgatggccgtcctgggcagtcgcaatttcaat

SEQ ID NO: 24915 - DNA, 2067 bp, Muscodor strobelii
  misc_feature: SGI cDNA ID NO. 568500
  misc_feature: Encodes the peptide sequence at SEQ ID NO 24916
atgaataatcctaatttcagaaaacgtcgcccctatggccacgaggaggcccatgcggtgcctctggcccatgatccttcgctctctacagctacatctacggtgcagagcttctcaccgaattttgcaacaatgccatcacaagaaaaaccttcaccacttgagcaaaataattttggtcatcatggcgggtccattggcggcttcatgagcctggactcatcccgcctagatccatcacgcctgacacagtactttactagcttcaatatgtgttcgccttgcatgacctgcgaaccgcaaggctttgctggtattcctgcgaccagtccctatgactacgcctcttcacggccctatcttgatgcgagaccagcacctcctcttcctgtaccaagtactctctctgagaaccagcaagggacctatgctgctcatgatggttctattacgcagcaaatcttcccaggctatccagtaatgcagccagatcgtccaaccgcgatccagcctattacaagtcctgatgagatggtctacccagtgcccgggccaagtagaaattactctgagcagtctgaagtccaatatagctccccagactcttctagtagcactaaaactattgtcaaatcccatcaagcagcgtcacctgatcaatctgtggggcagacgagacgatatactacgaataagacgtcggtagacttgagcgatgaagcaactcatccatccaagcaggcctcagacttagacgttgttcagtcgaatcagcggcctcctccggcaagaaggggaccgttcaaaagtcaggatgcaagggaaagaacagctgagactcggagaatcggaagctgtattcgatgccgaatgcagagaataagatgtgaaaccaatcaagatgatgctcgcggatgttgcttgacttgtgagcgggtttctaatgtcaaagtatggagactaccgtgtctacgctataaaattaccgaagtgaagcttttcaaaaagccgggccaagtgccgggttacgaatggacacagcgatggcagaaaggcgtaacggacgatatttcgacgtgggatccgactgacatggagatcaaaaaaattcgattgacggaggggtatatcgagcgaacgatcgaccttcgagtcagaaaattcattccccaggacggagattcaacgcatcgatcctgggtagtcaacgggcataagagaagtgtcaaaatacccagttacgccattgtgaacctcgaggaagccaaaagtacctattctagctacatcagccgaaacataacagaattttgcaagagtgcactgtcaggaaaagataaattgatcggcggtacttacacttttgcaatgaaattggtgcgagatccgagggtcgacgagaaagagaaagacatgttaaagaaggcactggagctgtggatggcgattcgcatgactactaagtcgacggttatcgtcggtgaagagacgcttggtatgaagcctgatattatggacgaaacaagtccattgcaaggaaagattcctctccctccggtcatgggagcccaaatcgagctggttttgattcaccagatccagtccagcctccgacgtgagattctggaaagcttgcaaagcatgacgcaagcgaataagcagcaaacatggttcacaacgtacctgatcacgtttatactgctgcataacgttgctctcctttgtgaccatgacgctggctatgctaagaagcacggaatgaagactcgatttgcgagactcacaaacgtcagagagtatcaggaaggggccaacattctattggcgtacttccactattgcaacaagggtatctacccgttttctgcagaatgtaaagaccaggacttaaagaatctggctgggctcgatgacctaagaatgaaattcatcaagtacacgagatcgatgatagcacaacatcgtccacaatgggacagaatgcggcaaaaaaacgagtacgaaaatgatttttattacataagtcagctctatgaagagaattggatgcctctcgaggttgtctga

SEQ ID NO: 24916 - protein, 688 aa, Muscodor strobelii
  misc_feature: SGI Peptide ID NO. 568500
  misc_feature (91)..(684): NCBI GI: 164427191 Blast Desc: NCU03248 [Neurospora crassa OR74A] gi|157071645|gb|EAA34527.2| [Neurospora crassa OR74A]
  misc_feature (128)..(684): NCBI GI: 171695170 Blast Desc: protein product [Podospora anserina] gi|170947827|emb|CAP59990.1| protein product [Podospora anserina]
  misc_feature (99)..(684): NCBI GI: 256734522 Blast Desc: NECHADRAFT_31799 [Nectria haematococca mpVI 77-13-4]
  misc_feature (102)..(684): NCBI GI: 46107298 Blast Desc: FG00532.1 [Gibberella zeae PH-1]
  misc_feature (91)..(624): NCBI GI: 261357469 Blast Desc: conserved [Verticillium albo-atrum VaMs.102]
  misc_feature (370)..(680): NCBI GI: 145611264 Blast Desc: MGG_11561 [Magnaporthe grisea 70-15] gi|145018565|gb|EDK02844.1| MGG_11561 [Magnaporthe grisea 70-15]
  misc_feature (264)..(684): NCBI GI: 67527901 Blast Desc: AN4197.2 [Aspergillus nidulans FGSC A4] gi|40740106|gb|EAA59296.1| AN4197.2 [Aspergillus nidulans FGSC A4] gi|259481200|tpe|CBF74505.1| TPA: conserved [Aspergillus FGSC
  misc_feature (265)..(687): NCBI GI: 261360531 Blast Desc: conserved [Verticillium albo-atrum VaMs.102]
  misc_feature (262)..(688): NCBI GI: 170940211 Blast Desc: protein product [Podospora anserina]
  misc_feature (271)..(678): NCBI GI: 171692495 Blast Desc: protein product [Podospora anserina] gi|170946196|emb|CAP72997.1| protein product [Podospora anserina]
MNNPNFRKRRPYGHEEAHAVPLAHDPSLSTATSTVQSFSPNFATMPSQEKPSPLEQNNFGHHGGSIGGFMSLDSSRLDPSRLTQYFTSFNMCSPCMTCEPQGFAGIPATSPYDYASSRPYLDARPAPPLPVPSTLSENQQGTYAAHDGSITQQIFPGYPVMQPDRPTAIQPITSPDEMVYPVPGPSRNYSEQSEVQYSSPDSSSSTKTIVKSHQAASPDQSVGQTRRYTTNKTSVDLSDEATHPSKQASDLDVVQSNQRPPPARRGPFKSQDARERTAETRRIGSCIRCRMQRIRCETNQDDARGCCLTCERVSNVKVWRLPCLRYKITEVKLFKKPGQVPGYEWTQRWQKGVTDDISTWDPTDMEIKKIRLTEGYIERTIDLRVRKFIPQDGDSTHRSWVVNGHKRSVKIPSYAIVNLEEAKSTYSSYISRNITEFCKSALSGKDKLIGGTYTFAMKLVRDPRVDEKEKDMLKKALELWMAIRMTTKSTVIVGEETLGMKPDIMDETSPLQGKIPLPPVMGAQIELVLIHQIQSSLRREILESLQSMTQANKQQTWFTTYLITFILLHNVALLCDHDAGYAKKHGMKTRFARLTNVREYQEGANILLAYFHYCNKGIYPFSAECKDQDLKNLAGLDDLRMKFIKYTRSMIAQHRPQWDRMRQKNEYENDFYYISQLYEENWMPLEVV

SEQ ID NO: 24917 - DNA, 7875 bp, Muscodor strobelii
  misc_feature: SGI EST ID NO. CUFF.58974.1
  misc_feature: Variant of the nucleotide sequence at SEQ ID NO 24915
cttgattcttcaacttcaaccctccttcgttcttagcctcgccctaggctccggaccgacagagtcctctttcggcgcgataccaccaaaccccctgacagttcccacagaatcgggcacgaatacaaggttgcgatggtacgattatgatggtgatgatgcaggcgaccatcctacaagagaagggcttcaaactgttccgactgtgcttcttgttttgcaacctgcccagtactaactaggcttggaaatcattgcgaggatagcttaaaaactgatcggcacagtcgcagcccactcacagagcaaaagacgccgtcggcctcagtaatagtgttaattgactatttagcttaattaagagacataaatgggcaccgaagtattgcattgtgcgtgatagcgtgggcgtgtctatttgggacacggcccatgatgctacctacagtacagtacagtacagtaggtgctgctcgtacttgacatgcatatcatcacaggtagaaccctagattgatcttgcaaggacggacaaactccatcaatcaccaacacatgtgcccgggtgtgggatccatagatgcaaaagtcgacaattggtgttgttcatgcctgtccccctgcctcatctactcaaccctccctccttgcagcagacccccatcaccccagcacacagtaccgttccgcagaggatgcctgcggactgtggtgttctttgcgctctgtctgcggtctacccaacactctgtgccaatggagatgaatgtgcctctgaacaacaggccacgaccctgtcgcgataaaataaggaccgcaaagagaaaattccgaccctcacgcccgattctgaccctcgcatggtgccttggtggcacaattcgcccagcctattactatctggttgtcagcacggattattacggtttgatcatcccaattgccacgaaatttgctcgttgtacaagacgcagttcccagctggtcacccctctttaaaccggtcaagacgccggctcacaacgaccgccctgatacttcttcaccgagtctcttgactgactgagcggctctttgctcccttccaatcactgttcatcccgctgtcctcgccggcagcaccgcgtgtgcgtgtctttgaatgacttggccttccctgcgctggcattggcattcccttgcgttctctttctgagggccgccgcacccgctgttgcgccgccgccgccgccgctggcttgctgctgctgctgctgctgttgcgctgctaatctagccccggctgagagtgccctcttttcttgggcgacatctcgcattgcacagcgcagaacgaaaccatacgaacatagcacgacgcgtgttatcgcatctgtctttttccccaagacccttgttgccttgtgcgaggcaatggcactcgtgagacactaacacaggtcatcttctctacccaccccacctcctagacttgacttgaggcgcaacgctcgccacgacgctggtgctggctgcccgccgaccggttggctggctggagctgctgccaccgctggtcgtacttgttgtgccatagtttgccttctaccagattgatacacacatcgatgcgcgccaaagtacaaaccctgtctttgcgccgctagacctattgtcttgtccaacccaccttctataaacgttcctgtctaagtaacgcacgatgaataatcctaatttcagaaaacgtcgcccctatggccacgaggaggcccatgcggtgcctctggcccatgatccttcgctctctacagctacatctacggtgcagagcttctcaccgacttcaatatgtgttcgccttgcatgacctgcgaaccgcaaggctttgctggtattcctgcgaccagtccctatgactacgcctcttcacggccctatcttgatgcgagaccagcacctcctcttcctgtaccaagtactctctctgagaaccagcaagggacctatgctgctcatgatggttctattacgcagcaaatcttcccaggctatccagtaatgcagccagatcgtccaaccgcgatccagcctattacaagtcctgatgagatggtctacccagtgcccgggccaagtagaaattactctgagcagtctgaagtccaatatagctccccagactcttctagtagcactaaaactattgtcaaatcccatcaagcagcgtcacctgatcaatctgtggggcagacgagacgatatactacgaataagacgtcggtagacttgagcgatgaagcaactcatccatccaagcaggcctcagacttagacgttgttcagtcgaatcagcggcctcctccggcaagaaggggaccgttcaaaagtcaggatgcaagggaaagaacagctgagactcggagaatcggaagctgtattcgatgccgaatgcagagaataagatgtgaaaccaatcaagatgatgctcgcggatgttgcttgacttgtgagcgggtttctaatgtcaaagtatggagactaccgtgtctacgctataaaattaccgaagtgaagcttttcaaaaagccgggccaagtgccgggttacgaatggacacagcgatggcagaaaggcgtaacggacgatatttcgacgtgggatccgactgacatggagatcaaaaaaattcgattgacggaggggtatatcgagcgaacgatcgaccttcgagtcagaaaattcattccccaggacggagattcaacgcatcgatcctgggtagtcaacgggcataagagaagtgtcaaaatacccagttacgccattgtgaacctcgaggaagccaaaagtacctattctagctacatcagccgaaacataacagaattttgcaagagtgcactgtcaggaaaagataaattgatcggcggtacttacacttttgcaatgaaattggtgcgagatccgagggtcgacgagaaagagaaagacatgttaaagaaggcactggagctgtggatggcgattcgcatgactactaagtcgacggttatcgtcggtgaagagacgcttggtatgaagcctgatattatggacgaaacaagtccattgcaaggaaagattcctctccctccggtcatgggagcccaaatcgagctggttttgattcaccagatccagtccagcctccgacgtgagattctggaaagcttgcaaagcatgacgcaagcgaataagcagcaaacatggttcacaacgtacctgatcacgtttatactgctgcataacgttgctctcctttgtgaccatgacgctggctatgctaagaagcacggaatgaagactcgatttgcgagactcacaaacgtcagagagtatcaggaaggggccaacattctattggcgtacttccactattgcaacaagggtatctacccgttttctgcagaatgtaaagaccaggacttaaagaatctggctgggctcgatgacctaagaatgaaattcatcaagtacacgagatcgatgatagcacaacatcgtccacaatgggacagaatgcggcaaaaaaacgagtacgaaaatgatttttattacataagtcagctctatgaagagaattggatgcctctcgaggttgtctgaggaagtgagtattgatggattattgcggttgacccgaccacgaaagacaagaaataattggggcggtgatagcgtaatttgtcctgcagatgagctactcaccttgtgggaatgtgcatgaatcaaacatggttgcatggggcatgcattgcatataaggacactgaaaacatgaaagtattccgggaaatagagacgaacagcaaggctactcactggtgtacgggactgttgattccttgcgggcggcattcacatggtggtcatcttggggaaagatgaggatctgagaaattgtacgaggaagtggagtgcagaagtatcaaggtcaccaagttcgagatcactcgaggactggcttcagacgcaggtcttatgtgcgtttgtggattcggccggaagtaattggagtcggagacgagggccaagtaatttggactttgcgtgagtccttgcatctctctgtatgcctgcgtgtcgaaggtaaaagcatagagtgaaagacaaataatgacaacaacggcgacgccgacaactacgacgacgacgattaagacgatggcgttgaagacagtgactaatgactatattaatgaggaagatgaagaagagggggggagaaatgtgcgaccaaaatctcgttcttcgttattcgtttgacagcccggccattgtgacccatgagccaattacgggcacctgcaagtctgctggccatccgaacagcgatcccggcgcgattccgctaacccgttcaccgggggaggggccaagacgtctcggaaggattagctgcaagtggccttatatgattttatgtttgtggattattaatctgccgctttgcatcgctctgcatcgctctgcatctcctcctgcctctcctcctcctcctgccacgctctgcccatcgaagaagatgtacatgtaggtacttatgccaacgaggagccgggaaccaggataagaccgtgcagttgtccggccattccaaatgtgggatcgtcctttccagtttgtcggctaagctccgcagtcgtcgaactagccctccacatcattcacatccaatccgaacgagaatccaaggtctctcatctgattagctgcgcaggctggacatgctacgaggatctgatccatgcgagctgtgctggtggccctatgctccctgcacttagcatattccgctcgtggtctgcttggagattgcaggcatgctgagagagagcatggagtaggtagacggtgccgtgagggtatgcagccagccagggaagcacattgctatagtagactggctgcttcgcggcatgtgtgtctgcaatgcatacttgcggctctcctgggtggagacgatgttctccaagatagttcagatcgggcacgatccgggcccagagattcgtctgccgcgccccggtcgactgtgagactctattactagctaagctgctaggggcatcttatttagtgtggcgttggttcattctaaaagaacgtaatagtaagagccatgctgctttcaacagaacggggcctccccgtcaccacgagttctataggaacagcgatatggtgcggctgtacagaatcgatctttctttgtaaacggcaggtcgatggaggaacagcaatgcggatcggttcctggcaacgtgcaggctcatacaactccaaccatcccaccactattttctgaacactccaatataccgttgaagcgaatccgcacaggacaacactgacaagaaccacccctttgtctcaccttgccatcgggatgctaatggacaacgggtgattgggcttcaacgaccccaaacacagtagtatactgtaaattacgctggctcatcggttgccggcctccctcgttctcgtcatccgttccgattttgtccctaccgagtaggaacgaaacagctaggcagcgtcgtgacaccttgatgcttgctgtgtcggtacaccgagtcgatatcgtacgtatctcggaacttcgttattgaaagctatcataatcactactatttatgaagtgctcgtcttctaatattgatacgttcattctccttccgctccgatatatcactccgcaagctataaattgtttagtcctatggtcactttatcaaatcattctacttctcggtttgagccttttataaagacgtgctactgtctgtagctcttgattttacgacctgactgctccgggttttgagatctccagtttccacgcttgcagtgcgctttgattttggcttaagttggagcatccccaaatccccatatctcgtgaacaggactcacctcagtgtgtaccacgtcattggccacgacagatcaatcccagtacgaaatggggacctacaaacatgccggaccagtgattgctgcccttgcgaatcatgtttccctctcagagcatctccacggttcatggtcgggccctggccaagatagtttgagtgatcttccaagcggttttccatctcgcctggatcaacaatttgcttggacaggggttgacttcgtcgacgaggccaggttcgtccatcatctatctccggaagagcaggcagagttacatctggccaaggatcacttcaaagctttggagctggatggcatacttgttagcaaggagaacttccctctcccaactctgggctgcaaactggagaaactgggatatgacgtccattttggcaagggtttccacgtggtccgcggtctcaaccctcgcgactattctgtcgaagacctcacgatcatttggttaggtattcaagcgtacattgctgatgagcgcggtcgtcaagatcatcgaggaaatatgctagttcatattattgccgataattcatctgaaatcaaactcagtcatcaccgtcactctacctccgcgatttcgttccacaatgaggagaccggcgatgtgattagctggctaactcgcagcacagcggctgctggaggcaggtgcattctggcatcagtttacacaatatacaatatccttgcgactcatcgccccgatattattcgaacgctggtcaagtcagactggccatttgcactgccgcagtttcaatgtcgaccggtgatgttttatgaagattccaagctcatgatgaatttcgggcgcacacctcttctaggcaatgccacccacactagaccagagcatttacccaagctcaatgatcgccaacgcgaagctctggacacgatagagtcactggctcaagctgctcaattagagtttcgcactcaaagtggcgatatacatttcatcaacaacttcgccatactccaccgacgtgaagggttcgttgatggtgccgctcccgaagagaagcgccatctagttcgtatgagattacgtagctccagtatgggatgggctatcccagaagcgctccaccaagagtggtctaatgccttcggaaaaaatggttgccaaacgtggcatttagagccgatgccaggagacgcttttccactccgcaagtacacaaactagaccgtctcatttgatacaggcgttagtttcccgttttcggaaatcgtcgaggtttctcatttctcattagcacggagttcaggctcttactgcatgatcccggcacagacagggctggaaaagtttcgcgcttgtcttaggtattgagattgcaatatggtcactcggtaatggtcaagaggtttgggtgagatgcacagctagcacttgttgagttccgatgctgtctttacgtcgtatctttgtaatgatgatggggggaacgaacgatgtcaacgttatcaccccacaatcaaggacaaattcacctgcatgcatcgaaaacgggaacagaaacttcttggcactcagctagttccacaggtctcacaggctctgagatctacaacaagggaggccaagagcagggcagtggccgacatacttgccatttcaattgctggacgctattagcagcatcccttgcagagagactcgatatatattatagatgtctcgtataaggcctcgcctcgtatgtaagcatcggctaagttagcacgtgtatgaatttgaatttctctggggctcgtctaaatatcaggcgtgattcggccaatagtctggctcttatgggctaggcgtcactgtaagttgcaagctgagccacgaccgtactagtagtaaaagaaaagataagaacaaatcagcaatgaatgcaaggcattaggtaatcattt

SEQ ID NO: 24918 - DNA, 1215 bp, Muscodor strobelii
  misc_feature: SGI cDNA ID NO. 568501
  misc_feature: Encodes the peptide sequence at SEQ ID NO 24919
atggggacctacaaacatgccggaccagtgattgctgcccttgcgaatcatgtttccctctcagagcatctccacggttcatggtcgggccctggccaagatagtttgagtgatcttccaagcggttttccatctcgcctggatcaacaatttgcttggacaggggttgacttcgtcgacgaggccaggttcgtccatcatctatctccggaagagcaggcagagttacatctggccaaggatcacttcaaagctttggagctggatggcatacttgttagcaaggagaacttccctctcccaactctgggctgcaaactggagaaactgggatatgacgtccattttggcaagggtttccacgtggtccgcggtctcaaccctcgcgactattctgtcgaagacctcacgatcatttggttaggtattcaagcgtacattgctgatgagcgcggtcgtcaagatcatcgaggaaatatgctaggtaaagactacaaaacgccaactgatttcacagcttatgcctcgatagttcatattattgccgataattcatctgaaatcaaactcagtcatcaccgtcactctacctccgcgatttcgttccacaatgaggagaccggcgatgtgattagctggctaactcgcagcacagcggctgctggaggcaggtgcattctggcatcagtttacacaatatacaatatccttgcgactcatcgccccgatattattcgaacgctggtcaagtcagactggccatttgcactgccgcagtttcaatgtcgaccggtgatgttttatgaagattccaagctcatgatgaatttcgggcgcacacctcttctaggcaatgccacccacactagaccagagcatttacccaagctcaatgatcgccaacgcgaagctctggacacgatagagtcactggctcaagctgctcaattagagtttcgcactcaaagtggcgatatacatttcatcaacaacttcgccatactccaccgacgtgaagggttcgttgatggtgccgctcccgaagagaagcgccatctagttcgtatgagattacgtagctccagtatgggatgggctatcccagaagcgctccaccaagagtggtctaatgccttcggaaaaaatggttgccaaacgtggcatttagagccgatgccaggagacgcttttccactccgcaagtacacaaactag

SEQ ID NO: 24919 - protein, 404 aa, Muscodor strobelii
  misc_feature: SGI Peptide ID NO. 568501
  misc_feature (84)..(365): Pfam Id: PF02668 Pfam Desc: Taurine catabolism dioxygenase TauD, TfdA family
  misc_feature (161)..(365): Pfam Id: PF02668 Pfam Desc: Taurine catabolism dioxygenase TauD, TfdA family
  misc_feature (39)..(404): NCBI GI: 85111075 Blast Desc: NCU03247 [Neurospora crassa OR74A] gi|28925490|gb|EAA34526.1| conserved [Neurospora crassa OR74A]
  misc_feature (39)..(404): NCBI GI: 171695172 Blast Desc: protein product [Podospora anserina] gi|170947828|emb|CAP59991.1| protein product [Podospora anserina]
  misc_feature (34)..(404): NCBI GI: 256734523 Blast Desc: [Nectria haematococca mpVI 77-13-4]
  misc_feature (34)..(404): NCBI GI: 46107296 Blast Desc: FG00531.1 [Gibberella zeae PH-1]
  misc_feature (7)..(404): NCBI GI: 116182476 Blast Desc: CHGG_01866 [Chaetomium globosum CBS 148.51] gi|88186163|gb|EAQ93631.1| CHGG_01866 [Chaetomium globosum CBS 148.51]
  misc_feature (31)..(404): NCBI GI: 145611262 Blast Desc: MGG_11560 [Magnaporthe grisea 70-15] gi|145018564|gb|EDK02843.1| MGG_11560 [Magnaporthe grisea 70-15]
  misc_feature (39)..(400): NCBI GI: 67527903 Blast Desc: AN4198.2 [Aspergillus nidulans FGSC A4] gi|40740107|gb|EAA59297.1| AN4198.2 [Aspergillus nidulans FGSC A4] gi|259481199|tpe|CBF74503.1| TPA: conserved [Aspergillus FGSC
  misc_feature (37)..(379): NCBI GI: 171677350 Blast Desc: protein product [Podospora anserina] gi|170936743|emb|CAP61401.1| protein product [Podospora anserina]
  misc_feature (37)..(400): NCBI GI: 261352682 Blast Desc: taurine catabolism dioxygenase TauD [Verticillium albo-atrum VaMs.102]
  misc_feature (43)..(397): NCBI GI: 171677255 Blast Desc: protein product [Podospora anserina] gi|170936695|emb|CAP61354.1| protein product [Podospora anserina]
MGTYKHAGPVIAALANHVSLSEHLHGSWSGPGQDSLSDLPSGFPSRLDQQFAWTGVDFVDEARFVHHLSPEEQAELHLAKDHFKALELDGILVSKENFPLPTLGCKLEKLGYDVHFGKGFHVVRGLNPRDYSVEDLTIIWLGIQAYIADERGRQDHRGNMLGKDYKTPTDFTAYASIVHIIADNSSEIKLSHHRHSTSAISFHNEETGDVISWLTRSTAAAGGRCILASVYTIYNILATHRPDIIRTLVKSDWPFALPQFQCRPVMFYEDSKLMMNFGRTPLLGNATHTRPEHLPKLNDRQREALDTIESLAQAAQLEFRTQSGDIHFINNFAILHRREGFVDGAAPEEKRHLVRMRLRSSSMGWAIPEALHQEWSNAFGKNGCQTWHLEPMPGDAFPLRKYTN

SEQ ID NO: 24920 - DNA, 7875 bp, Muscodor strobelii; identical to SEQ ID NO: 24917
  misc_feature: SGI EST ID NO. CUFF.58974.1
  misc_feature: Variant of the nucleotide sequence at SEQ ID NO 24918

SEQ ID NO: 24921 - DNA, 1617 bp, Muscodor strobelii
  misc_feature: SGI cDNA ID NO. 568502
  misc_feature: Encodes the peptide sequence at SEQ ID NO 24922
atgtcgtatcagccatcctatccgtggacgggcgcgccgaccgtgttcaacggtactggtgagcttggaggagattccaaaacagaaaatctgaatcaatggtatcagagtggcgaccaggcatacatcatcatttccgcatgcatggtcttgctgatggtacccggcattgcgttcttatactcgggcttgtcgcggagaaaatcagcgctttcgctcatatgggtcaccatgatgtccttttccgtcgtcattttccagtggtatttttggggatattcgctcgcattcagtagcaccgcgacgaacggtttcattgggaatttgcatcatttcggtcttctcaacactttggctgtgccatccccgggctccccgctcattcccgagcttctatattcattttaccagatgatgttttgcgccgtaacggctgctcttgtgatcggtgccgtcgctgaacgtggtcgcgtgcttcccgccatgatattcgtgttcttctggtgcacaatcgtttattgccctcttgcgtgctgggtttggaatatcaatggttgggccttcaattatggtgtgctagactatgcgggaggcggtcccgtcgagatcggttctggaatgtccgcacttgcatattcctggattctaggtcgtcgtcacgagaaaatgatgcttaatttccgaccgcataacgtgtcgctcatcactctcggcactacccttctgtggtttggttggctcggtttcaacggtggctcttcatttggtgcgaacctgcgtgctactgttgcctgttggaactcatgcctcacggccatgtttgccgcgataacctggtgcctccttgactttcgacttgctaagaagtggtccatggttggatggtgctctggcacaatatctggtcttgtcgcggcaacccctgcgtctggcttcattcccccatgggcatcgataatcctgggcgtagttgccggtatctgctgtaactttggaaccaaggttaaattcctagtcaatatcgacgattcgcttgatgtgttcgctgagcacgcaataggtggtattgtagggctcattttcaatgcactctttggcgcaaactacatcattgggctcgacggtgtaaataatggggtgtttccagggggctgggtcgaccaccactacgcgcaattgtatattcagattgcgtacatcgttgcggcttgcggctattcgtttgttgtatcggccattcttgctaagcttatcgacctcgtccctggtttacatctgcgtgcgtctgaagaagccgaacttatgggcatggacgacgaccagctcggcgagtttgcgtacgattacgtcgaggtgcgtagggacttcttggcctggaccccagcgaaagaggagcctattgccgacggacaccgaatcgtgcctcagcatgggatcgaggaacatcagcatatggctaataccaacggtcactcacctccgtcaccttctcttctacaggctgagcaagaaaaaattggcgtttcagctcgtgctccggccaaagaacgaggcgcggagattgctgcagaaaatgaaaacagctcgtcgatgccggcatcgagggattcggactag

SEQ ID NO: 24922 - protein, 538 aa, Muscodor strobelii
  misc_feature: SGI Peptide ID NO. 568502
  misc_feature (41)..(447): Pfam Id: PF00909 Pfam Desc: Ammonium Transporter Family
  misc_feature (6)..(520): NCBI GI: 39974633 Blast Desc: MGG_00537 [Magnaporthe grisea 70-15] gi|145018563|gb|EDK02842.1| MGG_00537 [Magnaporthe grisea 70-15]
  misc_feature (6)..(519): NCBI GI: 85112788 Blast Desc: ammonium transporter MEP1 [Neurospora crassa OR74A] gi|28926191|gb|EAA35174.1| ammonium transporter MEP1 [Neurospora crassa OR74A]
  misc_feature (2)..(495): NCBI GI: 156057541 Blast Desc: SS1G_04502 [Sclerotinia sclerotiorum 1980] gi|154702287|gb|EDO02026.1| SS1G_04502 [Sclerotinia sclerotiorum 1980]
  misc_feature (2)..(531): NCBI GI: 154324010 Blast Desc: BC1G_00404 [Botryotinia fuckeliana B05.10] gi|150842633|gb|EDN17826.1| BC1G_00404 [Botryotinia fuckeliana B05.10]
  misc_feature (6)..(503): NCBI GI: 256735235 Blast Desc: [Nectria haematococca mpVI 77-13-4]
  misc_feature (6)..(498): NCBI GI: 46107292 Blast Desc: FG00529.1 [Gibberella zeae PH-1]
  misc_feature (6)..(493): NCBI GI: 212274871 Blast Desc: LOC100191646 [Zea mays] gi|194689446|gb|ACF78807.1| [Zea mays]
  misc_feature (6)..(510): NCBI GI: 212528862 Blast Desc: ammonium transporter MeaA [Penicillium marneffei ATCC 18224] gi|210073986|gb|EEA28073.1| ammonium transporter MeaA [Penicillium marneffei ATCC 18224]
  misc_feature (6)..(532): NCBI GI: 121715270 Blast Desc: ammonium transporter MeaA [Aspergillus clavatus NRRL 1] gi|119403401|gb|EAW13818.1| ammonium transporter MeaA [Aspergillus clavatus NRRL 1]
  misc_feature (6)..(524): NCBI GI: 67900952 Blast Desc: AN7463.2 [Aspergillus nidulans FGSC A4] gi|18693013|gb|AAL73117.1| ammonium transporter MEAA [Emericella nidulans] gi|40742853|gb|EAA62043.1| AN7463.2 [Aspergillus FGSC ;
MSYQPSYPWTGAPTVFNGTGELGGDSKTENLNQWYQSGDQAYIIISACMVLLMVPGIAFLYSGLSRRKSALSLIWVTMMSFSVVIFQWYFWGYSLAFSSTATNGFIGNLHHFGLLNTLAVPSPGSPLIPELLYSFYQMMFCAVTAALVIGAVAERGRVLPAMIFVFFWCTIVYCPLACWVWNINGWAFNYGVLDYAGGGPVEIGSGMSALAYSWILGRRHEKMMLNFRPHNVSLITLGTTLLWFGWLGFNGGSSFGANLRATVACWNSCLTAMFAAITWCLLDFRLAKKWSMVGWCSGTISGLVAATPASGFIPPWASIILGVVAGICCNFGTKVKFLVNIDDSLDVFAEHAIGGIVGLIFNALFGANYIIGLDGVNNGVFPGGWVDHHYAQLYIQIAYIVAACGYSFVVSAILAKLIDLVPGLHLRASEEAELMGMDDDQLGEFAYDYVEVRRDFLAWTPAKEEPIADGHRIVPQHGIEEHQHMANTNGHSPPSPSLLQAEQEKIGVSARAPAKERGAEIAAENENSSSMPASRDSD

SEQ ID NO: 24923 - DNA, 3420 bp, Muscodor strobelii
  misc_feature: SGI EST ID NO. CUFF.58827.1
  misc_feature: Variant of the nucleotide sequence at SEQ ID NO 24921
tttgtatccccattaatgataataataaggtgcggtcattgttatcactcacctcactacttctagacatctaggcacgcccgagccagacgagttcagcgcggacagtggacactatactattgtatgcccacttacatggacttgcctgtaaacaatacctacagtaacacccgaaccgatatcgcaaaagagccattcgtcccttcgtcccttcgtccatcgagatgctatctccgctccttcacaacttattcgaaattgtcccagttttgactcgtctaaactacacacaagatagtgatctcacctgtgctcagcccgtggctactctagcttggcgatctctctttgcttagctctgtcaatgccttggtcactatttcacttcaagatgggggtcgtgtgtgccactaccaaattctatccatgaccccgggattatctcagcccatccgcgggactttgtacccagctcttatctttaccttagcttattggtccgaacggtagtccatgtcttcatatgcaactcctaaaccctgacatatgtgagtctactgcagtagcgttatatgtaacttgacgttgatcgctacgacgccaagacgctccgaatctggcgagcctggcgagctggactccatcttcttgtctcgtcgtatgaatatatagccagagtctgcgctgcatccgcgctctcattctcgtatctaagcttctccacccaattccacccggtagttgcccgattgaactcttggatcccttgagttctggtccaagacggctcgggccaaagagacggcatctcgactaagtaaactctgataagcctatcctataccttattaacggatttcgcctcatttccctaaattttggaacgccctccttctcctggacacagaatcggcatcatgtcgtatcagccatcctatccgtggacgggcgcgccgaccgtgttcaacggtactggtgagcttggaggagattccaaaacagaaaatctgaatcaatggtatcagagtggcgaccaggcatacatcatcatttccgcatgcatggtcttgctgatggtacccggcattgcgttcttatactcgggcttgtcgcggagaaaatcagcgctttcgctcatatgggtcaccatgatgtccttttccgtcgtcattttccagtggtatttttggggatattcgctcgcattcagtagcaccgcgacgaacggtttcattgggaatttgcatcatttcggtcttctcaacactttggctgtgccatccccgggctccccgctcattcccgagcttctatattcattttaccagatgatgttttgcgccgtaacggctgctcttgtgatcggtgccgtcgctgaacgtggtcgcgtgcttcccgccatgatattcgtgttcttctggtgcacaatcgtttattgccctcttgcgtgctgggtttggaatatcaatggttgggccttcaattatggtgtgctagactatgcgggaggcggtcccgtcgagatcggttctggaatgtccgcacttgcatattcctggattctaggtcgtcgtcacgagaaaatgatgcttaatttccgaccgcataacgtgtcgctcatcactctcggcactacccttctgtggtttggttggctcggtttcaacggtggctcttcatttggtgcgaacctgcgtgctactgttgcctgttggaactcatgcctcacggccatgtttgccgcgataacctggtgcctccttgactttcgacttgctaagaagtggtccatggttggatggtgctctggcacaatatctggtcttgtcgcggcaacccctgcgtctggcttcattcccccatgggcatcgataatcctgggcgtagttgccggtatctgctgtaactttggaaccaaggttaaattcctagtcaatatcgacgattcgcttgatgtgttcgctgagcacgcaataggtggtattgtagggctcattttcaatgcactctttggcgcaaactacatcattgggctcgacggtgtaaataatggggtgtttccagggggctgggtcgaccaccactacgcgcaattgtatattcagattgcgtacatcgttgcggcttgcggctattcgtttgttgtatcggccattcttgctaagcttatcgacctcgtccctggtttacatctgcgtgcgtctgaagaagccgaacttatgggcatggacgacgaccagctcggcgagtttgcgtacgattacgtcgaggtgcgtagggacttcttggcctggaccccagcgaaagaggagcctattgccgacggacaccgaatcgtgcctcagcatgggatcgaggaacatcagcatatggctaataccaacggtcactcacctccgtcaccttctcttctacaggctgagcaagaaaaaattggcgtttcagctcgtgctccggccaaagaacgaggcgcggagattgctgcagaaaatgaaaacagctcgtcgatgccggcatcgagggattcggactagataagtgtaatgtaaatgaagatgtaagcgcggaaatgtcttttgatacccccaatatatgtattatcaaggataaagaaaatagccttcaaatttcgtatatattctatgtgtctaattatgccatgtttttgtctgttgagtcttcctgtcttctggtcatcatagacgctcgtaatcaactcgcacattctggatgctatgtcagtgcaacaacttaagggacttcattttatcacttttgcaagagaacggattaggcgcagattttttgacaccaacaggtgtcacgagaatccacacgtcgtgcgggtgcttgttgcattatataatggcatcgtataaaaccttagcgccttgacgatattagtccgaggcattcagaacaggtttccatatccctacgatcaggtccacaaaataaaacttccgaaagagactatggcattgtgaaactatctaaggataatatatccatcattaaatcgaggtgttcgtcatttgaaacaattccattgtgctatatactatctaacagagaagggcattggaacgagaagtacggatataaacagatattccaacggccttacgaatacaccgtatttttgttcttgtaaatatcatcagaacgagtatcttgaagtatcggaaagtcattgatcagtccttcgagaactcggcagtaatgggtgatgatgttctcattctaggcctacttgtgcttcgtcactaacaatacttcgagtgagacttctcacttttcgcgagtcaaccgttgaaacgttacctacctgtcgatacgagatctagaagccagaagagagctctattagacgcatcgcgcgagtcagtcaccgcgtaagggtgtggtaggacatgg

SEQ ID NO: 24924 - DNA, 1626 bp, Muscodor strobelii
  misc_feature: SGI cDNA ID NO. 568503
  misc_feature: Encodes the peptide sequence at SEQ ID NO 24925
atggcgggctccaagctacacattgggccatgccatttggaaaccggacgctctaggcatcgtgttccaccccacatcacgattccatgggaagctccggccacgacttttgagccgtttttattccccgctgatgaagaagagggcgatgacgcagagacagacaacatgaatggcagtgctcatgaagaagaatcagatgctgctcatgacgactctgatgaaggcgacgaggaattcgatggttttattgacccagaaaacaatacagatgaccatgtaaatgaggatgaaaatgagcttcccggcattggtcaatgtcgtctcaatcttacgtccctgtctcaacgctataatatgtacatcgttgcgtacaagtggacaattcatggtatgcacttcctagacaatagacgtcaccttagccatacggtgtcttcgtatctgagcagaaagagactgacagggcatgtttctcttcaacagtatcccgtgttcggagctgcattttacacaagcttcccaacaaacctgacatcgaactgtgagtgctatttaatcagttctaagaccgggcactctcgggaaatcaaaacacataccgattcgattcaacggacttacgcatctccacgcactaggaaaccgccacaaagtgaagaagcaaagaatgtcattgggcatatggtaccactcttcccgcaccaagtgaatcagctcattattggagaactcggcgataaggaagtgctcatacttgtctacgacgatggcgatgttattgcttattacatcgatcatcttgaaaccgagctactcaatctcgaatcaatctacccttctcaagtacgacgtgccatacaaccgttcttccacgaaaatgttggcctgtcagcctggggggttgccgtccacaaagaatcccggttgattgctgttggcaccaacagacatgaagtccatgtgtttgcattcggaattaagaacgctgttgcaacttctccaccacacgtagttttgcccagtgagctttttcggactattgtcaaagatcaccatggggaaataaaatgttcacctgaagtccttgaggcttttcgccaagacagagagcccactatcttccgaccagagtccgaagttcctcggcgtttcaactggcgtatcattttcaagacagggccaaacggtacaaacattccgaatgtatctttcggcagcaatgactctctagctggatatgctacacacatcattgctgtcgatattagcggcaagctctggaagtttgctttatggacgagtcgcctatctgaaccaaacatctgcatgggtctccatgagatgcatcggcattataaagaacacctcgaaggatatggcggcaccatagcaaactatccacgaggctggggtgtacttttcctaccagagagcagcttcttaccgacaaaggatttctatgattctctcggattaagcccagcagaggctgctcaaatcgttgaaaaatcttctgagagctccaataatcagttatcatcatccgaagcaccgcccgtcaatgacacagcatcatggcaagctgttggtcaccatacctctattggcgcacatgggttctaa

SEQ ID NO: 24925 - protein, 541 aa, Muscodor strobelii
  misc_feature: SGI Peptide ID NO. 568503
  misc_feature (233)..(493): NCBI GI: 116182468 Blast Desc: CHGG_01862 [Chaetomium globosum CBS 148.51] gi|88186159|gb|EAQ93627.1| CHGG_01862 [Chaetomium globosum CBS 148.51]
  misc_feature (173)..(500): NCBI GI: 171695110 Blast Desc: protein product [Podospora anserina] gi|170947797|emb|CAP59960.1| protein product [Podospora anserina]
  misc_feature (215)..(481): NCBI GI: 145611256 Blast Desc: MGG_00541 [Magnaporthe grisea 70-15] gi|145018558|gb|EDK02837.1| MGG_00541 [Magnaporthe grisea 70-15]
  misc_feature (234)..(492): NCBI GI: 154319526 Blast Desc: BC1G_02244 [Botryotinia fuckeliana B05.10] gi|150855902|gb|EDN31094.1| BC1G_02244 [Botryotinia fuckeliana B05.10]
  misc_feature (225)..(492): NCBI GI: 261357465 Blast Desc: conserved [Verticillium albo-atrum VaMs.102]
  misc_feature (240)..(493): NCBI GI: 156061605 Blast Desc: SS1G_02948 [Sclerotinia sclerotiorum 1980] gi|154700349|gb|EDO00088.1| SS1G_02948 [Sclerotinia sclerotiorum 1980]
  misc_feature (215)..(418): NCBI GI: 256735236 Blast Desc: NECHADRAFT_74873 [Nectria haematococca mpVI 77-13-4]
  misc_feature (227)..(510): NCBI GI: 159122446 Blast Desc: conserved [Aspergillus fumigatus A1163]
  misc_feature (227)..(510): NCBI GI: 70984286 Blast Desc: conserved [Aspergillus fumigatus Af293] gi|66845286|gb|EAL85621.1| conserved [Aspergillus fumigatus Af293]
  misc_feature (227)..(510): NCBI GI: 119467634 Blast Desc: NFIA_050710 [Neosartorya fischeri NRRL 181] gi|119405775|gb|EAW15726.1| conserved [Neosartorya fischeri NRRL 181]
MAGSKLHIGPCHLETGRSRHRVPPHITIPWEAPATTFEPFLFPADEEEGDDAETDNMNGSAHEEESDAAHDDSDEGDEEFDGFIDPENNTDDHVNEDENELPGIGQCRLNLTSLSQRYNMYIVAYKWTIHGMHFLDNRRHLSHTVSSYLSRKRLTGHVSLQQYPVFGAAFYTSFPTNLTSNCECYLISSKTGHSREIKTHTDSIQRTYASPRTRKPPQSEEAKNVIGHMVPLFPHQVNQLIIGELGDKEVLILVYDDGDVIAYYIDHLETELLNLESIYPSQVRRAIQPFFHENVGLSAWGVAVHKESRLIAVGTNRHEVHVFAFGIKNAVATSPPHVVLPSELFRTIVKDHHGEIKCSPEVLEAFRQDREPTIFRPESEVPRRFNWRIIFKTGPNGTNIPNVSFGSNDSLAGYATHIIAVDISGKLWKFALWTSRLSEPNICMGLHEMHRHYKEHLEGYGGTIANYPRGWGVLFLPESSFLPTKDFYDSLGLSPAEAAQIVEKSSESSNNQLSSSEAPPVNDTASWQAVGHHTSIGAHGF

SEQ ID NO: 24926 - DNA, 2539 bp, Muscodor strobelii
  misc_feature: SGI EST ID NO. CUFF.58755.0
  misc_feature: Variant of the nucleotide sequence at SEQ ID NO 24924
tcaaaacacataccgattcgattcaacggacttacgcatctccacgcactaggaaaccgccacaaagtgaagaagcaaagaatgtcattgggcatatggtaccactcttcccgcaccaagtgaatcagctcattattggagaactcggcgataaggaagtgctcatacttgtctacgacgatggcgatgttattgcttattacatcgatcatcttgaaaccgagctactcaatctcgaatcaatctacccttctcaagtacgacgtgccatacaaccgttcttccacgaaaatgttggcctgtcagcctggggggttgccgtccacaaagaatcccggttgattgctgttggcaccaacagacatgaagtccatgtgtttgcattcggaattaagaacgctgttgcaacttctccaccacacgtagttttgcccagtgagctttttcggactattgtcaaagatcaccatggggaaataaaatgttcacctgaagtccttgaggcttttcgccaagacagagagcccactatcttccgaccagagtccgaagttcctcggcgtttcaactggcgtatcattttcaagacagggccaaacggtacaaacattccgaatgtatctttcggcagcaatgactctctagctggatatgctacacacatcattgctgtcgatattagcggcaagctctggaagtttgctttatggacgagtcgcctatctgaaccaaacatctgcatgggtctccatgagatgcatcggcattataaagaacacctcgaaggatatggcggcaccatagcaaactatccacgaggctggggtgtacttttcctaccagagagcagcttcttaccgacaaaggatttctatgattctctcggattaagcccagcagaggctgcgtacgttttggtgagtgttgcagtctccatctttattgggacaacatgttgtgatatcccaagcagaggctaatatgtttccagtaagtcaaatcgttgaaaaatcttctgagagctccaataatcagttatcatcatccgaagcaccgcccgtcaatgacacagcatcatggcaagctgttggtcaccatacctctattggcgcacatgggttctaacatcctcagccataattattcagtccaccccattcttgcactgttgtctctctattcactctttgctgattgctatcttcctcaagtcacaccaatctactttgctttgtatttagatacgctgtcttcctatgctagcttttggatcgtaaattgtgatcgtatgaaagatacaacatcgtctaacagttcgtagtcgcccagatattggccacttcattgacacaaagcgctctttacaacacatacagaacaattcaaatttccacccatggattcgatcccgccagatgcacaggttttttgatccgtcgcatatcgagtccgtaccttatcacaacgattggtatcatgtgggtgataagacaagaagctggtcagctttcgaagattctaatgtagaccaagaaagcatccgctcttcaacacgcaaaagacagatgacattacatctagaaactaaggattctaggcgtacctctaagggtctggaaaaaccaacaccaaacctctcgctacagaacatgctgtcggacagccaatatagtattatgcgaacatacgaaactggaatcgaactgtgtggaggaaatggtcaagtcgggatcatgcttgaccacgccatataccagactcgacctcggagaggcttcatgccgggactgccctgggctccggagcgattgagtaaccttgttcatataccggagttatttttggtcgctgctggttctctctgtggcagagtggccctcattactctcactcgtcccatgaatccacgttattcattccgtcgagggttcaagatagaagcaatcttaccgacagccgcagacgaggacaaattcctcagacccatatgcccgcttctaggcgtcgccgttggtccagtattctcgtctagcgatgacaatccattcgacgcacgtcgctatcgagtcatgatacattactatgatctcagaattctcagctatgaaatctaccgcgatcctctcggcggtgagatttgtatcgtgtaatactggcatcaacgagacagtaagctcagccgaaatgctgcaggcttgcgacttaggtccacgacattcttagccctccggcctacggaatgatctggttgttattcgggatacggaagaatatggtgaagcacttattccacgtctgtggtccttgtgttgcattcactcggctagaaaggatgggtatcatcagtaatctccataagaaagggaacttcggcggtgcatcaaacggagcatttggcaggcgtctcgtgctcgtctttgcgacacttcatgctttcaaaaaggagaaagtactgtacgataagggacttaattggtagagtactgactacaataaatgaaaccgctgtactacatactacgataaacaaatgaaaaac

SEQ ID NO: 24927 - DNA, 2352 bp, Muscodor strobelii
  misc_feature: SGI cDNA ID NO. 568504
  misc_feature: Reduced expression when VOC is produced
  misc_feature: Encodes the peptide sequence at SEQ ID NO 24928
atggcgggctccaagctacacattgggccatgccatttggaaaccggacgctctaggcatcgtgttccaccccacatcacgattccatgggaagctccggccacgacttttgagccgtttttattccccgctgatgaagaagagggcgatgacgcagagacagacaacatgaatggcagtgctcatgaagaagaatcagatgctgctcatgacgactctgatgaaggcgacgaggaattcgatggttttattgacccagaaaacaatacagatgaccatgtaaatgaggatgaaaatgagcttcccggcattggtcaatgtcgtctcaatcttacgtccctgtctcaacgctataatatgtacatcgttgcgtacaagtggacaattcatggtatgcacttcctagacaatagacgtcaccttagccatacggtgtcttcgtatctgagcagaaagagactgacagggcatgtttctcttcaacagtatcccgtgttcggagctgcattttacacaagcttcccaacaaacctgacatcgaactgtgagtgctatttaatcagttctaagaccgggcactctcgggaaatcaaaacacataccgattcgattcaacggacttacgcatctccacgcactaggaaaccgccacaaagtgaagaagcaaagaatgtcattgggcatatggtaccactcttcccgcaccaagtgaatcagctcattattggagaactcggcgataaggaagtgctcatacttgtctacgacgatggcgatgttattgcttattacatcgatcatcttgaaaccgagctactcaatctcgaatcaatctacccttctcaagtacgacgtgccatacaaccgttcttccacgaaaatgttggcctgtcagcctggggggttgccgtccacaaagaatcccggttgattgctgttggcaccaacagacatgaagtccatgtgtttgcattcggaattaagaacgctgttgcaacttctccaccacacgtagttttgcccagtgagctttttcggactattgtcaaagatcaccatggggaaataaaatgttcacctgaagtccttgaggcttttcgccaagacagagagcccactatcttccgaccagagtccgaagttcctcggcgtttcaactggcgtatcattttcaagacagggccaaacggtacaaacattccgaatgtatctttcggcagcaatgactctctagctggatatgctacacacatcattgctgtcgatattagcggcaagctctggaagtttgctttatggacgagtcgcctatctgaaccaaacatctgcatgggtctccatgagatgcatcggcattataaagaacacctcgaaggatatggcggcaccatagcaaactatccacgaggctggggtgtacttttcctaccagagagcagcttcttaccgacaaaggatttctatgattctctcggattaagcccagcagaggctgcgtacgttttgaggctaatatgtttccatcgcccagatattggccacttcattgacacaaagcgctctttacaacacatacagaacaattcaaatttccacccatggattcgatcccgccagatgcacaggttttttgatccgtcgcatatcgagtccgtaccttatcacaacgattggtatcatgtgggtgataagacaagaagctggtcagctttcgaagattctaatgtagaccaagaaagcatccgctcttcaacacgcaaaagacagatgacattacatctagaaactaaggattctaggcgtacctctaagggtctggaaaaaccaacaccaaacctctcgctacagaacatgctgtcggacagccaatatagtattatgcgaacatacgaaactggaatcgaactgtgtggaggaaatggtcaagtcgggatcatgcttgaccacgccatataccagactcgacctcggagaggcttcatgccgggactgccctgggctccggagcgattgagtaaccttgttcatataccggagttatttttggtcgctgctggttctctctgtggcagagtggccctcattactctcactcgtcccatgaatccacgttattcattccgtcgagggttcaagatagaagcaatcttaccgacagccgcagacgaggacaaattcctcagacccatatgcccgcttctaggcgtcgccgttggtccagtattctcgtctagcgatgacaatccattcgacgcacgtcgctatcgagtcatgatacattactatgatctcagaattctcagctatgaaatctaccgcgatcctctcggcggtgagatttgtatcgtgtaa

SEQ ID NO: 24928 - protein, 783 aa, Muscodor strobelii
  misc_feature: SGI Peptide ID NO. 568504
  misc_feature (215)..(771): NCBI GI: 145611256 Blast Desc: MGG_00541 [Magnaporthe grisea 70-15] gi|145018558|gb|EDK02837.1| MGG_00541 [Magnaporthe grisea 70-15]
  misc_feature (227)..(774): NCBI GI: 154319526 Blast Desc: BC1G_02244 [Botryotinia fuckeliana B05.10] gi|150855902|gb|EDN31094.1| BC1G_02244 [Botryotinia fuckeliana B05.10]
  misc_feature (240)..(763): NCBI GI: 156061605 Blast Desc: SS1G_02948 [Sclerotinia sclerotiorum 1980] gi|154700349|gb|EDO00088.1| SS1G_02948 [Sclerotinia sclerotiorum 1980]
  misc_feature (233)..(509): NCBI GI: 116182468 Blast Desc: CHGG_01862 [Chaetomium globosum CBS 148.51] gi|88186159|gb|EAQ93627.1| CHGG_01862 [Chaetomium globosum CBS 148.51]
  misc_feature (173)..(506): NCBI GI: 171695110 Blast Desc: protein product [Podospora anserina] gi|170947797|emb|CAP59960.1| protein product [Podospora anserina]
  misc_feature (225)..(528): NCBI GI: 261357465 Blast Desc: conserved [Verticillium albo-atrum VaMs.102]
  misc_feature (215)..(418): NCBI GI: 256735236 Blast Desc: NECHADRAFT_74873 [Nectria haematococca mpVI 77-13-4]
  misc_feature (227)..(541): NCBI GI: 159122446 Blast Desc: conserved [Aspergillus fumigatus A1163]
  misc_feature (227)..(541): NCBI GI: 70984286 Blast Desc: conserved [Aspergillus fumigatus Af293] gi|66845286|gb|EAL85621.1| conserved [Aspergillus fumigatus Af293]
  misc_feature (227)..(517): NCBI GI: 238840660 Blast Desc: conserved [Microsporum canis CBS 113480]
  misc_feature: Useful for introducing or modulating the production of volatile compounds
MAGSKLHIGPCHLETGRSRHRVPPHITIPWEAPATTFEPFLFPADEEEGDDAETDNMNGSAHEEESDAAHDDSDEGDEEFDGFIDPENNTDDHVNEDENELPGIGQCRLNLTSLSQRYNMYIVAYKWTIHGMHFLDNRRHLSHTVSSYLSRKRLTGHVSLQQYPVFGAAFYTSFPTNLTSNCECYLISSKTGHSREIKTHTDSIQRTYASPRTRKPPQSEEAKNVIGHMVPLFPHQVNQLIIGELGDKEVLILVYDDGDVIAYYIDHLETELLNLESIYPSQVRRAIQPFFHENVGLSAWGVAVHKESRLIAVGTNRHEVHVFAFGIKNAVATSPPHVVLPSELFRTIVKDHHGEIKCSPEVLEAFRQDREPTIFRPESEVPRRFNWRIIFKTGPNGTNIPNVSFGSNDSLAGYATHIIAVDISGKLWKFALWTSRLSEPNICMGLHEMHRHYKEHLEGYGGTIANYPRGWGVLFLPESSFLPTKDFYDSLGLSPAEAAYVLRLICFHRPDIGHFIDTKRSLQHIQNNSNFHPWIRSRQMHRFFDPSHIESVPYHNDWYHVGDKTRSWSAFEDSNVDQESIRSSTRKRQMTLHLETKDSRRTSKGLEKPTPNLSLQNMLSDSQYSIMRTYETGIELCGGNGQVGIMLDHAIYQTRPRRGFMPGLPWAPERLSNLVHIPELFLVAAGSLCGRVALITLTRPMNPRYSFRRGFKIEAILPTAADEDKFLRPICPLLGVAVGPVFSSSDDNPFDARRYRVMIHYYDLRILSYEIYRDPLGGEICIV

SEQ ID NO: 24929 - DNA, 2539 bp, Muscodor strobelii; identical to SEQ ID NO: 24926
  misc_feature: SGI EST ID NO. CUFF.58755.0
  misc_feature: Variant of the nucleotide sequence at SEQ ID NO 24927

SEQ ID NO: 24930 - DNA, 3138 bp, Muscodor strobelii
  misc_feature: SGI cDNA ID NO. 568505
  misc_feature: Reduced expression when VOC is produced
  misc_feature: Encodes the peptide sequence at SEQ ID NO 24931
atggctccgaactccacgcccaaggtcaagaccgagaaggagctcgagaaggagcgcaagaaggccgagaagcaggccaagttcgaacagaagaaagccaagaccgcccagcctgccaccaccgacgccgcgcccaagaaggaaaagaaggtcaagccgcccaagcccgaggaagaggtgctacccccctacgtcgagaacacgcctctcggcgagaagaagcagctgcgacccctggacgacccccagatgaaagcctacaaccccatcgctgtcgagtctgcctggtacgagtggtgggagaagtctggctttttcaagccccagttcaagcaagacggaagcgtgaaagacgagggctccttcgtcatcgtcatcccgcctcctaatgtcacaggagcgctgcacatgggccacgccctgggttacgccctgcaggataccatgatcagatacaaccgcatgttgggcaagactactctttggcttcccgggtgtgaccatgccggcattgccacgcagtcagtcgttgagaacatgctcatccgcagggagggaaagaccagacacgacctcggccgtaagaagttcgttgagaccgtctgggaatggaaagaggactaccacaagaggatcaacaacgccacgcgcaaaatgtgcgcctctgtcgattgggaccgcgaggcctttacaatggacgccaatctcagcgccgctgtcactgagaccttttgcaaactccacgaggagggtatcatctaccgagcgaaccgtctcgtcaactggtgtactaagctaaacacggctctgtcgaatttggaggtgaccaacgtggacttgaatggaagaacgctcatgagtgttcctggatacgataagaagattgaatttggtgtcatctgtcacttcaagtatcctatcaagggcagcgacgaattcatcgaggtcgccacaacacgtgttgagaccatgctgggcgacacgggaatcgcagtgcatcctaaggacgagcggtacaagcacctagtcggaaaggaggccgttcatccgttcatcccagaccgcgttatcaggatcgtagctgacgattacgttgatcctgaattcggtactggatgtgtcaaaatcacccctgctcacgatcctaatgatttcgcgctgggacagagacacaacatggaatttattaacatcttgaccgatgacggcaagatgaatcagaacgcagggccgtatcagggtcagaaacgtttcgatgtgcggtacgccatcgaaggagccctgaaagaaaaggggttgtgggttgataagaaagataacgccatgaaagtgcctctttgcgagagatcgaaagatatcatcgagcctctcctcaaaccccagtggtggatgagaatgaaggaccttgctgcacccgctattgatgttgtgaaaaggggagaaatcaagattctcccagagtcggcagagcggtcctactacagatggatggaaaacatcaacgattggtgtctcagccgccagctttggtggggacatcaatgtcccgtctactacgcccaggtcgaaggtgagccaacggacaaggctaatgatagcctatggttctctggaaggacactagaggaggctcaagccaaggccgaaaaggccttgcccggcaaatctttcacattggagcgcgatgaagacgttctggatacgtggttctcgtctggtctctggcctttttccactctcggctggccaaatcagactgccgatctggataggttgtatcccacgagcatccttgagacaggctgggacattctcttcttctggattgccagaatgatcatgctgggtatcaagatggcaggaaaggtacctttcaaagaggtctactgccatactctcgtcagagactccgaaggacggaagatgtccaagtctcttggcaatgtcatagatccattggacgtgattagtggcatagaattggataagctccatgagaagttggcagtcggcaatctacacccatccgaagtcgaaaaggcgaagaaataccaaaagagcgcatttccagacggtataccatcgtgtggtgccgatgctatgcgattctgcttggtgaactacactacaggtggtggtgatattaacttcgatatcaatgttatgcatgggtaccgaaaattcgccaacaagatctaccaagcaacaaaattcgttcttggcaagattgatcaggatttcgttccttatccaacggaaaaactcagcggcaaggagtcacttgctgagaaatggatcttacataagaagaatgcttgcgccaaaatcatgaacgaggcgatcaatgccagggagttctcgaagtcaacatctgcgatctattcttattgttattatgagctctttgatgtcttcattgaaaattcaaaggccattattcaggatggtgctcctgaggagaagctgtctgcggtcaatacactctacaccgctcttgaaagcgccttgagaatgatacacccattcatgcccttcctcagcgaggagctgtggcaacgtctgcctcgtcggcctggtgatgagacgccttctatcgtgattgcaaaataccctgcctacgatccagaactcgataatacttccgccgaggcagcttacgagcttgtaatggactgtgccaagggtatccgatccctcgtggcagaatataatctcaaatccgaagccaaggtcttcgtccagacgttcgatgagacagcactgcaaactgctaccgagcaactccagtccatcaagtccctgagtcacaaagctgttactggcatacagatcattccgggctcggagggtcgccctgccggctctgtaacttatcccgtctccagcgcagcgtcagtctttttagaaattaaaggtcgtgtggaccttgatggcgaaatcgaaaaagcgaacaagaaactagagaagacccgcgctgctcttaccaaacagcaaaagctcatctccgatccgaaatatcaggagaaggtaaccgaatcactcaaggagcaggaccgccagaaacttgcggatctgcaagctcaggccgaaggctttgaaggaaccattaagcaatttgagcagctgaagctagaatag

SEQ ID NO: 24931 - protein, 1045 aa, Muscodor strobelii
  misc_feature: SGI Peptide ID NO. 568505
  misc_feature (763)..(916): Pfam Id: PF08264 Pfam Desc: Anticodon-binding domain
  misc_feature (95)..(718): Pfam Id: PF00133 Pfam Desc: tRNA synthetases class I (I, L, M and V)
  misc_feature (638)..(656): Pfam Id: PF09334 Pfam Desc: tRNA synthetases class I (M)
  misc_feature (5)..(1044): NCBI GI: 119195573 Blast Desc: valyl-tRNA synthetase, mitochondrial precursor [Coccidioides immitis RS]
  misc_feature (8)..(1045): NCBI GI: 169603023 Blast Desc: SNOG_04517 [Phaeosphaeria nodorum SN15] gi|160706311|gb|EAT88277.2| SNOG_04517 [Phaeosphaeria nodorum SN15]
  misc_feature (5)..(1044): NCBI GI: 240110417 Blast Desc: valyl-tRNA synthetase, mitochondrial precursor, [Coccidioides posadasii C735 delta SOWgp]
  misc_feature (8)..(1045): NCBI GI: 156056993 Blast Desc: SS1G_04227 [Sclerotinia sclerotiorum 1980] gi|154702013|gb|EDO01752.1| SS1G_04227 [Sclerotinia sclerotiorum 1980]
  misc_feature (86)..(1045): NCBI GI: 238483187 Blast Desc: valyl-tRNA synthetase [Aspergillus flavus NRRL3357] gi|220700882|gb|EED57220.1| valyl-tRNA synthetase [Aspergillus flavus NRRL3357]
  misc_feature (86)..(1045): NCBI GI: 169766466 Blast Desc: [Aspergillus oryzae RIB40] gi|83765559|dbj|BAE55702.1| protein product [Aspergillus oryzae]
  misc_feature (86)..(1044): NCBI GI: 258575681 Blast Desc: valyl-tRNA synthetase [Uncinocarpus reesii 1704] gi|237902288|gb|EEP76689.1| valyl-tRNA synthetase [Uncinocarpus reesii 1704]
  misc_feature (8)..(1044): NCBI GI: 226290958 Blast Desc: valyl-tRNA synthetase [Paracoccidioides brasiliensis Pb18]
  misc_feature (43)..(1044): NCBI GI: 164429584 Blast Desc: valyl-tRNA synthetase, mitochondrial precursor [Neurospora crassa OR74A] gi|157073538|gb|EAA35093.2| valyl-tRNA synthetase, mitochondrial precursor [Neurospora crassa OR74A]
  misc_feature (8)..(1044): NCBI GI: 226278127 Blast Desc: valyl-tRNA synthetase [Paracoccidioides brasiliensis Pb01]
  misc_feature (67)..(1044): SWISSPROT Homolog: EC 6.1.1.9 Valine--tRNA ligase
  misc_feature: Useful for introducing or modulating the production of volatile compounds
MAPNSTPKVKTEKELEKERKKAEKQAKFEQKKAKTAQPATTDAAPKKEKKVKPPKPEEEVLPPYVENTPLGEKKQLRPLDDPQMKAYNPIAVESAWYEWWEKSGFFKPQFKQDGSVKDEGSFVIVIPPPNVTGALHMGHALGYALQDTMIRYNRMLGKTTLWLPGCDHAGIATQSVVENMLIRREGKTRHDLGRKKFVETVWEWKEDYHKRINNATRKMCASVDWDREAFTMDANLSAAVTETFCKLHEEGIIYRANRLVNWCTKLNTALSNLEVTNVDLNGRTLMSVPGYDKKIEFGVICHFKYPIKGSDEFIEVATTRVETMLGDTGIAVHPKDERYKHLVGKEAVHPFIPDRVIRIVADDYVDPEFGTGCVKITPAHDPNDFALGQRHNMEFINILTDDGKMNQNAGPYQGQKRFDVRYAIEGALKEKGLWVDKKDNAMKVPLCERSKDIIEPLLKPQWWMRMKDLAAPAIDVVKRGEIKILPESAERSYYRWMENINDWCLSRQLWWGHQCPVYYAQVEGEPTDKANDSLWFSGRTLEEAQAKAEKALPGKSFTLERDEDVLDTWFSSGLWPFSTLGWPNQTADLDRLYPTSILETGWDILFFWIARMIMLGIKMAGKVPFKEVYCHTLVRDSEGRKMSKSLGNVIDPLDVISGIELDKLHEKLAVGNLHPSEVEKAKKYQKSAFPDGIPSCGADAMRFCLVNYTTGGGDINFDINVMHGYRKFANKIYQATKFVLGKIDQDFVPYPTEKLSGKESLAEKWILHKKNACAKIMNEAINAREFSKSTSAIYSYCYYELFDVFIENSKAIIQDGAPEEKLSAVNTLYTALESALRMIHPFMPFLSEELWQRLPRRPGDETPSIVIAKYPAYDPELDNTSAEAAYELVMDCAKGIRSLVAEYNLKSEAKVFVQTFDETALQTATEQLQSIKSLSHKAVTGIQIIPGSEGRPAGSVTYPVSSAASVFLEIKGRVDLDGEIEKANKKLEKTRAALTKQQKLISDPKYQEKVTESLKEQDRQKLADLQAQAEGFEGTIKQFEQLKLE

SEQ ID NO: 24932 - DNA, 4063 bp, Muscodor strobelii
  misc_feature: SGI EST ID NO. CUFF.58770.0
  misc_feature: Variant of the nucleotide sequence at SEQ ID NO 24930
aacgcaaagtcttagcaggattccgtggatcatccgctccgaagacgcgatacagcgggcttgcaccgagctccagcactctgacgcacactgacacacactgcaacgccgctggagcaggccgtacctccgtacctaccacagcacgactggagaagacatatctgcacccctccaatgccacctctcgctccccgcgaatttctccatcaacaccgccaagttgtctagactactcctcgtccgggcattctgggtgcgcaggtcgccatacagacaaactcttcgcttcttccacgctacgatggctaccaacagtgcccgtggtaaccccattgatgccgccgacgctcccaacggcggcaaaaccgcccctcccccgtcgccaacgatgtgatatctgccgtgaaggacgctgctggacaggccgccggcgccggcgtccacagctccggccagcagaacggcatggctccgaactccacgcccaaggtcaagaccgagaaggagctcgagaaggagcgcaagaaggccgagaagcaggccaagttcgaacagaagaaagccaagaccgcccagcctgccaccaccgacgccgcgcccaagaaggaaaagaaggtcaagccgcccaagcccgaggaagaggtgctacccccctacgtcgagaacacgcctctcggcgagaagaagcagctgcgacccctggacgacccccagatgaaagcctacaaccccatcgctgtcgagtctgcctggtacgagtggtgggagaagtctggctttttcaagccccagttcaagcaagacggaagcgtgaaagacgagggctccttcgtcatcgtcatcccgcctcctaatgtcacaggagcgctgcacatgggccacgccctgggttacgccctgcaggataccatgatcagatacaaccgcatgttgggcaagactactctttggcttcccgggtgtgaccatgccggcattgccacgcagtcagtcgttgagaacatgctcatccgcagggagggaaagaccagacacgacctcggccgtaagaagttcgttgagaccgtctgggaatggaaagaggactaccacaagaggatcaacaacgccacgcgcaaaatgtgcgcctctgtcgattgggaccgcgaggcctttacaatggacgccaatctcagcgccgctgtcactgagaccttttgcaaactccacgaggagggtatcatctaccgagcgaaccgtctcgtcaactggtgtactaagctaaacacggctctgtcgaatttggaggtgaccaacgtggacttgaatggaagaacgctcatgagtgttcctggatacgataagaagattgaatttggtgtcatctgtcacttcaagtatcctatcaagggcagcgacgaattcatcgaggtcgccacaacacgtgttgagaccatgctgggcgacacgggaatcgcagtgcatcctaaggacgagcggtacaagcacctagtcggaaaggaggccgttcatccgttcatcccagaccgcgttatcaggatcgtagctgacgattacgttgatcctgaattcggtactggatgtgtcaaaatcacccctgctcacgatcctaatgatttcgcgctgggacagagacacaacatggaatttattaacatcttgaccgatgacggcaagatgaatcagaacgcagggccgtatcagggtcagaaacgtttcgatgtgcggtacgccatcgaaggagccctgaaagaaaaggggttgtgggttgataagaaagataacgccatgaaagtgcctctttgcgagagatcgaaagatatcatcgagcctctcctcaaaccccagtggtggatgagaatgaaggaccttgctgcacccgctattgatgttgtgaaaaggggagaaatcaagattctcccagagtcggcagagcggtcctactacagatggatggaaaacatcaacgattggtgtctcagccgccagctttggtggggacatcaatgtcccgtctactacgcccaggtcgaaggtgagccaacggacaaggctaatgatagcctatggttctctggaaggacactagaggaggctcaagccaaggccgaaaaggccttgcccggcaaatctttcacattggagcgcgatgaagacgttctggatacgtggttctcgtctggtctctggcctttttccactctcggctggccaaatcagactgccgatctggataggttgtatcccacgagcatccttgagacaggctgggacattctcttcttctggattgccagaatgatcatgctgggtatcaagatggcaggaaaggtacctttcaaagaggtctactgccatactctcgtcagagactccgaaggacggaagatgtccaagtctcttggcaatgtcatagatccattggacgtgattagtggcatagaattggataagctccatgagaagttggcagtcggcaatctacacccatccgaagtcgaaaaggcgaagaaataccaaaagagcgcatttccagacggtataccatcgtgtggtgccgatgctatgcgattctgcttggtgaactacactacaggtggtggtgatattaacttcgatatcaatgttatgcatgggtaccgaaaattcgccaacaagatctaccaagcaacaaaattcgttcttggcaagattgatcaggatttcgttccttatccaacggaaaaactcagcggcaaggagtcacttgctgagaaatggatcttacataagaagaatgcttgcgccaaaatcatgaacgaggcgatcaatgccagggagttctcgaagtcaacatctgcgatctattcttattgttattatgagctctttgatgtcttcattgaaaattcaaaggccattattcaggatggtgctcctgaggagaagctgtctgcggtcaatacactctacaccgctcttgaaagcgccttgagaatgatacacccattcatgcccttcctcagcgaggagctgtggcaacgtctgcctcgtcggcctggtgatgagacgccttctatcgtgattgcaaaataccctgcctacgatccagaactcgataatacttccgccgaggcagcttacgagcttgtaatggactgtgccaagggtatccgatccctcgtggcagaatataatctcaaatccgaagccaaggtcttcgtccagacgttcgatgagacagcactgcaaactgctaccgagcaactccagtccatcaagtccctgagtcacaaagctgttactggcatacagatcattccgggctcggagggtcgccctgccggctctgtaacttatcccgtctccagcgcagcgtcagtctttttagaaattaaaggtcgtgtggaccttgatggcgaaatcgaaaaagcgaacaagaaactagagaagacccgcgctgctcttaccaaacagcaaaagctcatctccgatccgaaatatcaggagaaggtaaccgaatcactcaaggagcaggaccgccagaaacttgcggatctgcaagctcaggccgaaggctttgaaggaaccattaagcaatttgagcagctgaagctagaatagatgagatgttttgctattgcgtgcaacttacttactccctgtattggtcaatagacagtgatgggtcacatagtgctttttccaagacgcataaaagagcgaggcttgtgtggtatcgttgaaaataccgggcgggttaaattaaggaaagggttccatgacggaagacttaatggacatttcaacatgatcccgagtactcgcgtctccctcgcgttgtctcatgttgcgatacttgtaaagaagactggaataaaatcacaaacatcaataaataatgagttctgctaataaggatgccgatattgattttcgcacaagtgggatgtagggcctccatcatctgcattaacttagcatgatcaaattcgacggcattgatagttgtggtctggcacgtgagatttgttgggatgattgttatggtgagtctgttgttccccagttagaagtagag

SEQ ID NO: 24933 - DNA, 1284 bp, Muscodor strobelii
  misc_feature: SGI cDNA ID NO. 568506
  misc_feature: Reduced expression when VOC is produced
  misc_feature: Encodes the peptide sequence at SEQ ID NO 24934
atgatgtccagacgcatcctcaccgctgcgcgcgtcctgcgccagcccacacgccagacgctgcgcagccagctgcccttggctgtccttgccgcccagctgcccagatacgcccacaccgtcgtcaaggtgccccagatggccgagtccatcaccgagggcacgctaaagcagtggaacaagcaggtcggcgactacgtcgagcttgacgaggagatcgccaccatcgagactgacaagatcgatgtcgccgtcaacgcccccgaggccggcatcctcaaagagctcctcgccaacgaggaggacaccgtcactgtcgaccaggagatcgcaaagatcgagcccggcagcgcccccgagggcggcgacaagaagcccgccgacaaggaggccccgaagcaggaagagacgaagcccgcgcccgccgacaaggaaagcaagcctgagcccaaggccgaatcgaaaccagagcccgcgtccaagccatccccgccccccgagcccaagaaggagtcttcgcccaagccgtccgagcccaagggtgcgtccgcccctgctggtcccgtcctcggcagccgcgaggagcgacgcgtcaagatgaaccgcatgcgcctccgcatcgccgaacgtctcaagcagtcccagaacaccgccgcctccctgaccaccttcaacgaggtcgacatgtcctcgctgatggacctgcgcaagctctacaaggacgagatcctcaagaagacgggcgtcaagctcggcttcatgagcgccttctctcgcgccagtgtcctcgccatgcgcgacatccccgccgtcaacgcgtccatcgagggcgagaacggcggcgacaccatcgtctaccgcgactacgtcgatatcagcgtcgcagtggctaccgagaagggtcttgtcacgcctgtcgtgcgcaacgccgagtccatggatatggtgggcatcgagaaggccatcgccgacatgggcaagaaggcccgcgacaacaagctcacgatcgaggatatggctggtggtactttcaccatcagcaacggaggcgtcttcggctctctcatgggcacccccatcatcaacctgccccagagcgccgtgctcggcctgcacgcgatcaaggagcggcccgtggctgtcaacggcaaggtcgagatccgccccatgatgtacctcgccctgacctatgatcaccggctcctcgacggcagggaagccgtccagtttctagtcaaggtcaaggagtatattgaggaccctcgcaagatgctgctgggctga

SEQ ID NO: 24934 - protein, 427 aa, Muscodor strobelii
  misc_feature: SGI Peptide ID NO. 568506
  misc_feature (192)..(426): Pfam Id: PF00198 Pfam Desc: 2-oxoacid dehydrogenases acyltransferase (catalytic domain)
  misc_feature (40)..(113): Pfam Id: PF00364 Pfam Desc: Biotin-requiring enzyme
  misc_feature (1)..(426): NCBI GI: 156042320 Blast Desc: SS1G_10957 [Sclerotinia sclerotiorum 1980] gi|154695344|gb|EDN95082.1| SS1G_10957 [Sclerotinia sclerotiorum 1980]
  misc_feature (7)..(427): NCBI GI: 242814581 Blast Desc: dihydrolipoamide succinyltransferase, [Talaromyces stipitatus ATCC 10500] gi|218714735|gb|EED14158.1| dihydrolipoamide succinyltransferase, [Talaromyces stipitatus
  misc_feature (1)..(426): NCBI GI: 39942138 Blast Desc: MGG_03149 [Magnaporthe grisea 70-15] gi|145015874|gb|EDK00364.1| MGG_03149 [Magnaporthe grisea 70-15]
  misc_feature (3)..(427): NCBI GI: 115403019 Blast Desc: dihydrolipoyllysine-residue succinyltransferase component of 2-oxoglutarate dehydrogenase complex, mitochondrial precursor [Aspergillus terreus NIH2624] succinyltransferase of
  misc_feature (33)..(426): NCBI GI: 189194551 Blast Desc: dihydrolipoamide succinyltransferase [Pyrenophora tritici-repentis Pt-1C-BFP] gi|187979178|gb|EDU45804.1| dihydrolipoamide succinyltransferase [Pyrenophora Pt-1C-BFP]
  misc_feature (4)..(427): NCBI GI: 121704598 Blast Desc: dihydrolipoamide succinyltransferase, [Aspergillus clavatus NRRL 1] gi|119398708|gb|EAW09136.1| dihydrolipoamide succinyltransferase, [Aspergillus clavatus NRRL 1]
  misc_feature (24)..(426): NCBI GI: 85092528 Blast Desc: NCU02438 [Neurospora crassa OR74A] gi|28920866|gb|EAA30207.1| NCU02438 [Neurospora crassa OR74A]
  misc_feature (14)..(427): NCBI GI: 212545080 Blast Desc: dihydrolipoamide succinyltransferase, [Penicillium marneffei ATCC 18224] gi|210065663|gb|EEA19757.1| dihydrolipoamide succinyltransferase, [Penicillium marneffei ATCC
  misc_feature (1)..(426): NCBI GI: 46127185 Blast Desc: FG07970.1 [Gibberella zeae PH-1]
  misc_feature (4)..(427): NCBI GI: 5706601 Blast Desc: dihydrolipoamide succinyltransferase [Aspergillus fumigatus]
  misc_feature (192)..(426): SWISSPROT Homolog: EC 2.3.1.61 Dihydrolipoyllysine-residue succinyltransferase
  misc_feature: Useful for introducing or modulating the production of volatile compounds
MMSRRILTAARVLRQPTRQTLRSQLPLAVLAAQLPRYAHTVVKVPQMAESITEGTLKQWNKQVGDYVELDEEIATIETDKIDVAVNAPEAGILKELLANEEDTVTVDQEIAKIEPGSAPEGGDKKPADKEAPKQEETKPAPADKESKPEPKAESKPEPASKPSPPPEPKKESSPKPSEPKGASAPAGPVLGSREERRVKMNRMRLRIAERLKQSQNTAASLTTFNEVDMSSLMDLRKLYKDEILKKTGVKLGFMSAFSRASVLAMRDIPAVNASIEGENGGDTIVYRDYVDISVAVATEKGLVTPVVRNAESMDMVGIEKAIADMGKKARDNKLTIEDMAGGTFTISNGGVFGSLMGTPIINLPQSAVLGLHAIKERPVAVNGKVEIRPMMYLALTYDHRLLDGREAVQFLVKVKEYIEDPRKMLLG

SEQ ID NO: 24935 - DNA, 2007 bp, Muscodor strobelii
  misc_feature: SGI EST ID NO. CUFF.58831.0
  misc_feature: Variant of the nucleotide sequence at SEQ ID NO 24933
ctgcaccagtcccggctgcatgtcacgctctgagctattctcgtcccggccctggtgctatgtaatgaaaacactcgttcgggaaaaaagacctcgctctcctgcatgaacctgccatctccatcgtaatactcgctcgtaataccctcaccctcaccctcaccctccatcctgccctctttctcgctctctcgctctctcgacacccaacaagctcgagctgctgcatgctgtcctccgcatcctcccgccttcctccctcgtgcttttcgtaagacgtgctgctgcgagctgtgctgcgagtcgtgtgtcgcttgacgttgctgtcgtctccaacaagcaaaaccacaaccccaacaagaccccctaaccactcttctgcacgcctgcccgcccgcctgcccgccatgatgtccagacgcatcctcaccgctgcgcgcgtcctgcgccagcccacacgccagacgctgcgcagccagctgcccttggctgtccttgccgcccagctgcccagatacgcccacaccgtcgtcaaggtgccccagatggccgagtccatcaccgagggcacgctaaagcagtggaacaagcaggtcggcgactacgtcgagcttgacgaggagatcgccaccatcgagactgacaagatcgatgtcgccgtcaacgcccccgaggccggcatcctcaaagagctcctcgccaacgaggaggacaccgtcactgtcgaccaggagatcgcaaagatcgagcccggcagcgcccccgagggcggcgacaagaagcccgccgacaaggaggccccgaagcaggaagagacgaagcccgcgcccgccgacaaggaaagcaagcctgagcccaaggccgaatcgaaaccagagcccgcgtccaagccatccccgccccccgagcccaagaaggagtcttcgcccaagccgtccgagcccaagggtgcgtccgcccctgctggtcccgtcctcggcagccgcgaggagcgacgcgtcaagatgaaccgcatgcgcctccgcatcgccgaacgtctcaagcagtcccagaacaccgccgcctccctgaccaccttcaacgaggtcgacatgtcctcgctgatggacctgcgcaagctctacaaggacgagatcctcaagaagacgggcgtcaagctcggcttcatgagcgccttctctcgcgccagtgtcctcgccatgcgcgacatccccgccgtcaacgcgtccatcgagggcgagaacggcggcgacaccatcgtctaccgcgactacgtcgatatcagcgtcgcagtggctaccgagaagggtcttgtcacgcctgtcgtgcgcaacgccgagtccatggatatggtgggcatcgagaaggccatcgccgacatgggcaagaaggcccgcgacaacaagctcacgatcgaggatatggctggtggtactttcaccatcagcaacggaggcgtcttcggctctctcatgggcacccccatcatcaacctgccccagagcgccgtgctcggcctgcacgcgatcaaggagcggcccgtggctgtcaacggcaaggtcgagatccgccccatgatgtacctcgccctgacctatgatcaccggctcctcgacggcagggaagccgtccagtttctagtcaaggtcaaggagtatattgaggaccctcgcaagatgctgctgggctgatcttagggggcgagggacggtcgtgggtctcgtgaaggctcatccgaggagcagccatgtctgcgttttgtacattgttcattcatcaggtcacgcgtcgtaatgtcagtctagagtgtacagtagtaatcatgtggcacggcgccgctgggtttgggagctgaacgtatgaatatacacgtatatacgagatccattcacatcggccatttcctacttgctggctgcgtggctgagtccttgaagacggtatggtaatggattggggaccagtttctaagttcctctttatgcttttcatttgaaagactccgct

SEQ ID NO: 24936 - DNA, 300 bp, Muscodor strobelii
  misc_feature: SGI cDNA ID NO. 568507
  misc_feature: Reduced expression when VOC is produced
  misc_feature: Encodes the peptide sequence at SEQ ID NO 24937
atgtctaaccgccaggcggccttgtcgctctaccgccgctccctgaagctcgccctcgactgggctgtccaccggcatctatggcgtggccaggccctctacatccgctccctcttcgaggccaaccgcaatctcacagactccaagaagacgagggcattgttgagcgagacggagaagctgcttgagacatggaaacatcccgacccctactgccaccccaccgcccccggaggttctaaatatgagagaaatctccctgtccacaacacaaacccaccgccgccactcaaattctag

SEQ ID NO: 24937 - protein, 99 aa, Muscodor strobelii
  misc_feature: SGI Peptide ID NO. 568507
  misc_feature (2)..(67): Pfam Id: PF05347 Pfam Desc: Complex 1 protein (LYR family)
  misc_feature (1)..(99): NCBI GI: 189091758 Blast Desc: [Podospora anserina] gi|188219232|emb|CAP49212.1| protein product [Podospora anserina]
  misc_feature (1)..(94): NCBI GI: 209735780 Blast Desc: NADH dehydrogenase 1 beta subcomplex subunit 9 [Salmo salar]
  misc_feature (1)..(95): NCBI GI: 46140227 Blast Desc: FG11628.1 [Gibberella zeae PH-1]
  misc_feature (1)..(97): NCBI GI: 169622767 Blast Desc: SNOG_14610 [Phaeosphaeria nodorum SN15] gi|160704852|gb|EAT78150.2| SNOG_14610 [Phaeosphaeria nodorum SN15]
  misc_feature (6)..(88): NCBI GI: 259485540 Blast Desc: TPA: conserved [Aspergillus nidulans FGSC A4]
  misc_feature (1)..(94): NCBI GI: 119195513 Blast Desc: CIMG_02131 [Coccidioides immitis RS] gi|240110402|gb|EER28560.1| complex 1 protein (LYR family) protein [Coccidioides posadasii C735 delta SOWgp]
  misc_feature (6)..(90): NCBI GI: 121704596 Blast Desc: LYR family protein [Aspergillus clavatus NRRL 1] gi|119398707|gb|EAW09135.1| LYR family protein [Aspergillus clavatus NRRL 1]
  misc_feature (1)..(95): NCBI GI: 189194553 Blast Desc: conserved [Pyrenophora tritici-repentis Pt-1C-BFP] gi|187979179|gb|EDU45805.1| conserved [Pyrenophora tritici-repentis Pt-1C-BFP]
  misc_feature (7)..(90): NCBI GI: 242814591 Blast Desc: conserved [Talaromyces stipitatus ATCC 10500] gi|218714737|gb|EED14160.1| conserved [Talaromyces stipitatus ATCC 10500]
  misc_feature (1)..(94): NCBI GI: 154300252 Blast Desc: BC1G_11315 [Botryotinia fuckeliana B05.10] gi|150856638|gb|EDN31830.1| BC1G_11315 [Botryotinia fuckeliana B05.10]
  misc_feature: Useful for introducing or modulating the production of volatile compounds
MSNRQAALSLYRRSLKLALDWAVHRHLWRGQALYIRSLFEANRNLTDSKKTRALLSETEKLLETWKHPDPYCHPTAPGGSKYERNLPVHNTNPPPPLKF

SEQ ID NO: 24938 - DNA, 850 bp, Muscodor strobelii
  misc_feature: SGI EST ID NO. CUFF.58959.0
  misc_feature: Variant of the nucleotide sequence at SEQ ID NO 24936
gccgtggatgctcgaacgtccgaaaccacgctgggcgagaccaagctttgccattgagcattcccgaatagcttcattgacgcccacgccgccgccctcccacggcaccgcctctcgaccctctccactcccttgtcccccgtctctgcctcgcactccagcaccggcatccaagcgacctgcacgccgacggacacacggcggctcacaggaacgcggtcgccacgctgcccgtcctgccatcataacaccgcaacccgcatagcccccgtcaccaccgctgtccgtcgcgccggccacatctttcatcatgtctaaccgccaggcggccttgtcgctctaccgccgctccctgaagctcgccctcgactgggctgtccaccggcatctatggcgtggccaggccctctacatccgctccctcttcgaggccaaccgcaatctcacagactccaagaagacgagggcattgttgagcgagacggagaagctgcttgagacatggaaacatcccgacccctactgccaccccaccgcccccggaggttctaaatatgagagaaatctccctgtccacaacacaaacccaccgccgccactcaaattctagacgacatatcttgcgacatatcttgcatgctcgagaggagggatgtggcatccatctgtacatagactttgtaatctgcccatagaaagaatgagtaaaagtagccaccaatggccgcacatttcacattggacttgcaacacgcgccgtcacattccgcttcccatgaccaaacagccgaatgatacgctcaagtcgagcgtggctgctcattcgcaacatgtgcaccgactacgcatg

SEQ ID NO: 24939 - DNA, 408 bp, Muscodor strobelii
  misc_feature: SGI cDNA ID NO. 568508
  misc_feature: Reduced expression when VOC is produced
  misc_feature: Encodes the peptide sequence at SEQ ID NO 24940
atgactggaggcggcaaatccggcggcaaggccagcggtgccaagaacgctcaatcccgatcttccaaggctggtctggctttccccgtcggccgtgtccaccgtctgctccgcaagggcaactacgctcagcgtgtcggtgctggtgctcctgtctacctcgctgccgtccttgagtacctcgctgctgagattctcgagctggctggcaatgctgcccgtgacaacaagaagacccgtatcatcccccgccatctccagcttgccatccgcaacgatgaggagttgaacaagcttctcggccacgtcaccatcgcccagggtggtgttctccccaacatccaccagaatcttctccccaagaagacgtccaagcccggcaagaacgctggtagccaggagttgtaa

SEQ ID NO: 24940 - protein, 135 aa, Muscodor strobelii
  misc_feature: SGI Peptide ID NO. 568508
  misc_feature (20)..(93): Pfam Id: PF00125 Pfam Desc: Core histone H2A/H2B/H3/H4
  misc_feature (1)..(135): NCBI GI: 158327647 Blast Desc: histone H2A-EYFP fusion protein [Reporter vector pYH2A]
  misc_feature (16)..(135): NCBI GI: 145245639 Blast Desc: histone H2A httA-Aspergillus niger gi|229890274|sp|P0C953.1|H2A_ASPNC RecName: Full=Histone H2A gi|229890275|sp|P0C952.1|H2A_ASPNG RecName: Full=Histone H2A H2A
  misc_feature (4)..(117): NCBI GI: 71000767 Blast Desc: histone H2A [Aspergillus fumigatus Af293] gi|66852702|gb|EAL93027.1| histone H2A [Aspergillus fumigatus Af293] gi|159128079|gb|EDP53194.1| histone H2A [Aspergillus
  misc_feature (16)..(135): NCBI GI: 85092526 Blast Desc: histone H2A [Neurospora crassa OR74A] gi|30315841|sp|Q8X132.3|H2A_NEUCR RecName: Full=Histone H2A gi|17644129|gb|AAL38970.1| histone H2A [Neurospora crassa] H2A
  misc_feature (16)..(135): NCBI GI: 189091760 Blast Desc: [Podospora anserina] gi|74620192|sp|Q875B8.3|H2A_PODAN RecName: Full=Histone H2A gi|27802990|emb|CAD60693.1| protein product [Podospora anserina] gi|188219233|emb|CAP49213.1| protein
  misc_feature (16)..(135): NCBI GI: 256732862 Blast Desc: histone 2A [Nectria haematococca mpVI 77-13-4]
  misc_feature (16)..(135): NCBI GI: 226294407 Blast Desc: histone H2a [Paracoccidioides brasiliensis Pb18]
  misc_feature (16)..(135): NCBI GI: 67526021 Blast Desc: H2A_EMENI Histone H2A [Aspergillus nidulans FGSC A4] gi|255945229|ref|XP_002563382.1| Pc20g08590 [Penicillium chrysogenum Wisconsin 54-1255] gi|121996|sp|P08844.2|H2A_EMENI
  misc_feature (16)..(135): NCBI GI: 261361135 Blast Desc: histone H2A [Verticillium albo-atrum VaMs.102]
  misc_feature (1)..(135): NCBI GI: 154300254 Blast Desc: histone H2A [Botryotinia fuckeliana B05.10] gi|160332370|sp|O74268.4|H2A_BOTFB RecName: Full=Histone H2A gi|150856639|gb|EDN31831.1| histone H2A [Botryotinia fuckeliana
  misc_feature: Useful for introducing or modulating the production of volatile compounds
MTGGGKSGGKASGAKNAQSRSSKAGLAFPVGRVHRLLRKGNYAQRVGAGAPVYLAAVLEYLAAEILELAGNAARDNKKTRIIPRHLQLAIRNDEELNKLLGHVTIAQGGVLPNIHQNLLPKKTSKPGKNAGSQEL

SEQ ID NO: 24941 - DNA, 1027 bp, Muscodor strobelii
  misc_feature: SGI EST ID NO. CUFF.59828.0
  misc_feature: Variant of the nucleotide sequence at SEQ ID NO 24939
gagtgatcgcaattgtaggtgcgccaactgtagtgtagcgaccgtgatctgattgtgatttctgatttcgcagacgcgcccccagcatacataagctaccacctcccccaccaaccttcaacctttcttccattccctctcccatatccatcttccgcttccaccaccacaacaactcacgcatctcatctgcactcagcatctgctattcaagcagttcattcacaaccacaacaacactttccaccttttcaaccaaccccaacaatcatcaacatgactggaggcggcaaatccggcggcaaggccagcggtgccaagaacgctcaatcccgatcttccaaggctggtctggctttccccgtcggccgtgtccaccgtctgctccgcaagggcaactacgctcagcgtgtcggtgctggtaagtacattgtcttatgtggtctcggcttatgtgtcatgtcttgcatgactaacgcgacttccccgtcacaggtgctcctgtctacctcgctgccgtccttgagtacctcgctgctgagattctcgagctggctggcaatgctgcccgtgacaacaagaagacccgtatcatcccccgccatctccagcttgccatccgcaacgatgaggagttgaacaagcttctcggccacgtcaccatcgcccagggtggtgttctccccaacatccaccagaatcttctccccaagaagacgtccaagcccggcaagaacgctggtagccaggagttgtaattggagagcgttgttttctgttttctggttggtcgtttgggacgtctttcatgaaaccacggggtcacggctgggcacggtttgatttttaatgcgtacgggttgtacattacacgtaatccatagggacatggatcacacgaatgagaattactgaacaaacaaaacacattcacaacactatcttgttttctgtgctttttcttcttgacgtgactgtttcattgttcactgcatttcttcaggtacagttacaactagcactcgag

SEQ ID NO: 24942 - DNA, 411 bp, Muscodor strobelii
  misc_feature: SGI cDNA ID NO. 568509
  misc_feature: Reduced expression when VOC is produced
  misc_feature: Encodes the peptide sequence at SEQ ID NO 24943
atgcctcccaaagctgctgacaagaagcccgccgccaaggcccctgttgcctccaaggctcctgagaagaaggacgccggcaagaagactgctgcttctggcgagaagaagaagcgcaccaaggcccgcaaggagacttactcctcctacatctacaaggtcctcaagcaggtccaccccgacaccggtatctccaaccgtgccatgagcattctcaactccttcgtcaacgacatcttcgagcgcgtcgccaccgaggcctccaagcttgccgcctacaacaagaagtccaccatctcatcccgcgagatccagacctcagtccgcctcatccttcccggcgagctggccaagcacgccgtctccgagggcaccaaggccgtcaccaagtactcctcgtcaacgaagtaa

SEQ ID NO: 24943 - protein, 136 aa, Muscodor strobelii
  misc_feature: SGI Peptide ID NO. 568509
  misc_feature (41)..(111): Pfam Id: PF00125 Pfam Desc: Core histone H2A/H2B/H3/H4
  misc_feature (1)..(136): NCBI GI: 189091764 Blast Desc: [Podospora anserina] gi|74620191|sp|Q875B7.3|H2B_PODAN RecName: Full=Histone H2B gi|27802991|emb|CAD60694.1| protein product [Podospora anserina] gi|188219235|emb|CAP49215.1| protein
  misc_feature (1)..(136): NCBI GI: 85092522 Blast Desc: histone H2B [Neurospora crassa OR74A] gi|30316334|sp|P37210.4|H2B_NEUCR RecName: Full=Histone H2B gi|17644130|gb|AAL38971.1| histone H2B [Neurospora crassa] H2B
  misc_feature (1)..(136): NCBI GI: 256732423 Blast Desc: histone 2B [Nectria haematococca mpVI 77-13-4]
  misc_feature (1)..(136): NCBI GI: 116179676 Blast Desc: histone H2B [Chaetomium globosum CBS 148.51] gi|110279006|sp|Q2HH38.3|H2B_CHAGB RecName: Full=Histone H2B gi|88184763|gb|EAQ92231.1| histone H2B [Chaetomium globosum CBS
  misc_feature (1)..(133): NCBI GI: 158327643 Blast Desc: histone H2B-ECFP fusion protein [Reporter vector pCH2B]
  misc_feature (1)..(136): NCBI GI: 119195517 Blast Desc: histone H2B [Coccidioides immitis RS] gi|258566561|ref|XP_002584025.1| histone H2B [Uncinocarpus reesii 1704] gi|121932133|sp|Q1E5N0.1|H2B_COCIM RecName: Full=Histone
  misc_feature (1)..(136): NCBI GI: 39942996 Blast Desc: histone H2B [Magnaporthe grisea 70-15] gi|74588282|sp|Q5G577.3|H2B_MAGGR RecName: Full=Histone H2B gi|58257463|gb|AAW69353.1| histone H2B-like protein [Magnaporthe
  misc_feature (1)..(136): NCBI GI: 154281229 Blast Desc: histone H2b [Ajellomyces capsulatus NAm1] gi|51701478|sp|Q7Z9J4.3|H2B_AJECA RecName: Full=Histone H2B gi|32140475|gb|AAP69672.1| histone H2B [Ajellomyces capsulatus]
  misc_feature (1)..(136): NCBI GI: 46140223 Blast Desc: H2B_NEUCR Histone H2B [Gibberella zeae PH-1] gi|110279007|sp|Q4HTT2.3|H2B_GIBZE RecName: Full=Histone H2B
  misc_feature (16)..(136): NCBI GI: 51701481 Blast Desc: H2B_ROSNE RecName: Full=Histone H2B gi|27531291|dbj|BAC54259.1| histone H2B [Rosellinia necatrix]
  misc_feature: Useful for introducing or modulating the production of volatile compounds
MPPKAADKKPAAKAPVASKAPEKKDAGKKTAASGEKKKRTKARKETYSSYIYKVLKQVHPDTGISNRAMSILNSFVNDIFERVATEASKLAAYNKKSTISSREIQTSVRLILPGELAKHAVSEGTKAVTKYSSSTK

SEQ ID NO: 24944 - DNA, 3730 bp, Muscodor strobelii
  misc_feature: SGI EST ID NO. CUFF.58833.0
  misc_feature: Variant of the nucleotide sequence at SEQ ID NO 24942
ccagcatcagcgcacctggcagcaggaatcaatcagtcaatcagtaacaagagctagcgcgaccacatcccacgtacataaggcctctcaccacccacacccttcctcccgtcaacatctttgacttctccatctcacaactcacattcttccaccaccacgaccagtgctaccagcatctccggatatctatccattcaccatattcacaacacaacacatcaacaacccacatctttcactatgcctcccaaagctgctgacaagaagcccgccgccaaggcccctgttgcctccaaggctcctgagaagaaggacgccggcaagaagactgctgcttctggcgagaagaagaagcgcaccaaggcccgcaaggagacttactcctcctacatctacaaggtcctcaagcaggtccaccccgacaccggtatctccaaccgtgccatgagcattctcaactccttcgtcaacgacatcttcgagcgcgtcgccaccgaggcctccaagcttgccgcctacaacaagaagtccaccatctcatcccgcgagatccagacctcagtccgcctcatccttcccggcgagctggccaagcacgccgtctccgagggcaccaaggccgtcaccaagtactcctcgtcaacgaagtaaggggtgcatggtggttagatggtctgcttctggttttctctttgggcgtgggactagtttcttttgctttggcatcatgacgagacagggccaaagtctatcaggtcccagcatttctgcgggagtctcataatgcgttacggatggtctgcttttcacagggggcaaatgtcttcacaacacggtacggggttcgagggttgtacaatacaattgccgatagggtttcggaaatgagaatctgaacatgaacaaaaacaaaccacacatacttctttccccccaagtgctttattcttcttgtgtatactgacatcgtaattcatgattgttgagctcaacgaagctaatcattctgatgttgatctggcggcacaatgtccgtgttgctaatagcccatctgaaggaatttgcaactgctccttgatgttaccccccggggcgtcgtttttgaggcgcaggaatgatgcatcgccatcacctctggcggaggttagcagggaagttggcaggaattgccatactgtctttcctgagtgtggttcatcttgagttgctgacgatacttgttgccaacaattctatatttcctatttaatccatggccaattttatggaatactcgcaaatagcaaaattggcatttgcttttcgaagaaacatgatacgtgtatgcttgacccttgacctctaatatgcagtagttcttctcatatcatgttttatgtgtcgcccagtccagccttggtcttcttgactacatgcattagtggcaccgtgatgcccttgttctcatcagtccccagagacatgcccttgctccaacccatcttttctaggatcgtcctacctctgttctcgacgccaatctcggccgcgtgctggccaactacgtcgccctcgcgaagggtcagggtctgtttgctggtgcgcgtcttgcgaaccggggcttcggtacgctttagaatgcgcgtctctcggactaccttctcgtccacgtccactcgagggaaccatgaccttcgcacacgaccgaagaccacctcaaacctgttcgcatcaaacggccatgtggccttggaacggtacagcacgggataccttgcggttcccttccccgctgattgcgatttgattctgagctggttcgcgatgctgtgaattgtctggcgtgctgccttgtccagaggcggtaagctgagcctaggttctgggttagcatcgccaccatagcaaaatagacgccacagagtacaacgcactgttcttgggtacctagcaagaacgcttcgaactcgttggctacgtcgtccagagacatgccaccgcggtatttgacgcgggggtcgtcaggattcgcgttcttgccaagcaatccgtgtgctcggagctcctcacgagcctttttcttttctgccttcttcaagcggtctttctttacagccacattcaaggcatcctctagttccgagtcggaaaagtcaagagacacatgtcccttcttggttcgtcgcatgcgagcgtcttgtaaatccaggagttcgagttcatcaaaagcctcggccattttggtagcgcttggaaactggctaccctggtgaaacattctagatttcttggaagcacctttgttcttacgagggttgacgtgcatagatgctggaaaccactctccaccatccgcaccgtcaagaagtataacgtcatctccacccagaccgagctcttcctgtttggccagcagacgggccaaccgttcgtcttctgattccagactgggaaagtatctttcttcggtcagagcattgttttcatcctcatcatgggcaagcacaccgtccaactcagcgtcactagatggctggctgggaatagcttcgctatctgtgccgcctaggtcgcgcaggatgctgaagggcggaatgcccaagccggggtgtgcatcatcttctccgtcaacgtcactcgagtcagcttgcatgttggcgatgtaatcagcaatgatggcggcttcttcgtcaccttcgtcaccatcttgatcgctgtgagtgacttggcgtcggctgcgcgtagatcgctttgacttgcgccttgtctccagcgatatgaaactttcgtctattttctcagttatctcaccctctctctgttctacctcgacttttgtggcgtgggccacgaggccgacagtctcaccaagttggacaggctcgacattggtgctgacctggggtttgggaccggacgagtcggcccgtggtggaggggcatttcggcctttgaataggataacctcatcactcgaatccgaatctgcgcctgactcatcaggttctggcaatagctgggtcagagctgctggcttgatctgcgcgtcagcctctagggccaaggtgcgagacgaagctttttcgtcatgctcatccggaacgagaccgatggcaactgggaaagcgctcggcgtggcttggcgggggaaatgaagtccatcgagaggattcatcagaccggcgctcatgaaagtgacgggctggtaacgtagcctggcatcttgccctctcatgccgcgacggttgctagccgtgtttctagcttcttctgcaagggacatgccgtgtggatgagagaagggagcaccatctgtgttattgggagtgcctcgtccgggcctacggggctgccggcgggctagtgcactcttcgaattagaacccggtgtggcattcttctttttaggcatcacgacggtttggtgctcatgtatctataagttaccatttattgtttgagtggttgcgtgaagtacgaggcgggaaaaagaggatcaagttggaataaaagggatgggctttgaaatggactcgatctgagcataagggggcatttcctcggggtaaaaagtggcaaagagcaaccaagggtgttagactcagaataggagagaagtggatagatagaactttccgagctgtttcatcgtagactgatagtctgaggaaacaagagagaagtttgcagatcagcttgagaacgagcctagaagtagccgtcgcaaagaacgatgcagatatcggc

SEQ ID NO: 24945 - DNA, 1959 bp, Muscodor strobelii
  misc_feature: SGI cDNA ID NO. 568510
  misc_feature: Encodes the peptide sequence at SEQ ID NO 24946
atgcctaaaaagaagaatgccacaccgggttctaattcgaagagtgcactagcccgccggcagccccgtaggcccggacgaggcactcccaataacacagatggtgctcccttctctcatccacacggcatgtcccttgcagaagaagctagaaacacggctagcaaccgtcgcggcatgagagggcaagatgccaggctacgttaccagcccgtcactttcatgagcgccggtctgatgaatcctctcgatggacttcatttcccccgccaagccacgccgagcgctttcccagttgccatcggtctcgttccggatgagcatgacgaaaaagcttcgtctcgcaccttggccctagaggctgacgcgcagatcaagccagcagctctgacccagctattgccagaacctgatgagtcaggcgcagattcggattcgagtgatgaggttatcctattcaaaggccgaaatgcccctccaccacgggccgactcgtccggtcccaaaccccaggtcagcaccaatgtcgagcctgtccaacttggtgagactgtcggcctcgtggcccacgccacaaaagtcgaggtagaacagagagagggtgagataactgagaaaatagacgaaagtttcatatcgctggagacaaggcgcaagtcaaagcgatctacgcgcagccgacgccaagtcactcacagcgatcaagatggtgacgaaggtgacgaagaagccgccatcattgctgattacatcgccaacatgcaagctgactcgagtgacgttgacggagaagatgatgcacaccccggcttgggcattccgcccttcagcatcctgcgcgacctaggcggcacagatagcgaagctattcccagccagccatctagtgacgctgagttggacggtgtgcttgcccatgatgaggatgaaaacaatgctctgaccgaagaaagatactttcccagtctggaatcagaagacgaacggttggcccgtctgctggccaaacaggaagagctcggtctgggtggagatgacgttatacttcttgacggtgcggatggtggagagtggtttccagcatctatgcacgtcaaccctcgtaagaacaaaggtgcttccaagaaatctagaatgtttcaccagggtagccagtttccaagcgctaccaaaatggccgaggcttttgatgaactcgaactcctggatttacaagacgctcgcatgcgacgaaccaagaagggacatgtgtctcttgacttttccgactcggaactagaggatgccttgaatgtggctgtaaagaaagaccgcttgaagaaggcagaaaagaaaaaggctcgtgaggagctccgagcacacggattgcttggcaagaacgcgaatcctgacgacccccgcgtcaaataccgcggtggcatgtctctggacgacgtagccaacgagttcgaagcgttcttgctaggtacccaagaacagctcagcttaccgcctctggacaaggcagcacgccagacaattcacagcatcgcgaaccagctcagaatcaaatcgcaatcagcggggaagggaaccgcaaggtatcccgtgctgtaccgttccaaggccacatggccgtttgatgcgaacaggtttgaggtggtcttcggtcgtgtgcgaaggtcatggttccctcgagtggacgtggacgagaaggtagtccgagagacgcgcattctaaagcgtaccgaagccccggttcgcaagacgcgcaccagcaaacagaccctgacccttcgcgagggcgacgtagttggccagcacgcggccgagattggcgtcgagaacagaggtaggacgatcctagaaaagatgggttggagcaagggcatgtctctggggactgatgagaacaagggcatcacggtgccactaatgcatgtagtcaagaagaccaaggctggactgggcgacacataa

SEQ ID NO: 24946 - protein, 652 aa, Muscodor strobelii
  misc_feature: SGI Peptide ID NO. 568510
  misc_feature (607)..(652): Pfam Id: PF01585 Pfam Desc: G-patch domain
  misc_feature (480)..(534): Pfam Id: PF01424 Pfam Desc: R3H domain
  misc_feature (44)..(650): NCBI GI: 164427122 Blast Desc: NCU02434 [Neurospora crassa OR74A] gi|157071617|gb|EAA30203.2| conserved [Neurospora crassa OR74A]
  misc_feature (133)..(652): NCBI GI: 189091766 Blast Desc: [Podospora anserina] gi|74620190|sp|Q875B6.1|SQS1_PODAN RecName: Full=Protein SQS1 gi|27802992|emb|CAD60695.1| protein product [Podospora anserina]
  misc_feature (43)..(650): NCBI GI: 46136687 Blast Desc: FG09859.1 [Gibberella zeae PH-1]
  misc_feature (146)..(650): NCBI GI: 39942998 Blast Desc: MGG_03579 [Magnaporthe grisea 70-15] gi|145009852|gb|EDJ94508.1| MGG_03579 [Magnaporthe grisea 70-15]
  misc_feature (238)..(650): NCBI GI: 116179674 Blast Desc: CHGG_00465 [Chaetomium globosum CBS 148.51] gi|88184762|gb|EAQ92230.1| CHGG_00465 [Chaetomium globosum CBS 148.51]
  misc_feature (131)..(650): NCBI GI: 261361137 Blast Desc: conserved [Verticillium albo-atrum VaMs.102]
  misc_feature (327)..(650): NCBI GI: 156042328 Blast Desc: SS1G_10961 [Sclerotinia sclerotiorum 1980] gi|154695348|gb|EDN95086.1| SS1G_10961 [Sclerotinia sclerotiorum 1980]
  misc_feature (327)..(650): NCBI GI: 261195785 Blast Desc: R3H and G-patch domain-containing protein [Ajellomyces dermatitidis SLH14081] gi|239587429|gb|EEQ70072.1| R3H and G-patch domain-containing protein [Ajellomyces dermatitidis
  misc_feature (323)..(650): NCBI GI: 226294410 Blast Desc: conserved [Paracoccidioides brasiliensis Pb18]
  misc_feature (323)..(650): NCBI GI: 225685096 Blast Desc: conserved [Paracoccidioides brasiliensis Pb03]
MPKKKNATPGSNSKSALARRQPRRPGRGTPNNTDGAPFSHPHGMSLAEEARNTASNRRGMRGQDARLRYQPVTFMSAGLMNPLDGLHFPRQATPSAFPVAIGLVPDEHDEKASSRTLALEADAQIKPAALTQLLPEPDESGADSDSSDEVILFKGRNAPPPRADSSGPKPQVSTNVEPVQLGETVGLVAHATKVEVEQREGEITEKIDESFISLETRRKSKRSTRSRRQVTHSDQDGDEGDEEAAIIADYIANMQADSSDVDGEDDAHPGLGIPPFSILRDLGGTDSEAIPSQPSSDAELDGVLAHDEDENNALTEERYFPSLESEDERLARLLAKQEELGLGGDDVILLDGADGGEWFPASMHVNPRKNKGASKKSRMFHQGSQFPSATKMAEAFDELELLDLQDARMRRTKKGHVSLDFSDSELEDALNVAVKKDRLKKAEKKKAREELRAHGLLGKNANPDDPRVKYRGGMSLDDVANEFEAFLLGTQEQLSLPPLDKAARQTIHSIANQLRIKSQSAGKGTARYPVLYRSKATWPFDANRFEVVFGRVRRSWFPRVDVDEKVVRETRILKRTEAPVRKTRTSKQTLTLREGDVVGQHAAEIGVENRGRTILEKMGWSKGMSLGTDENKGITVPLMHVVKKTKAGLGDT

SEQ ID NO: 24947 - DNA, 1704 bp, Muscodor strobelii
  misc_feature: SGI cDNA ID NO. 568511
  misc_feature: Encodes the peptide sequence at SEQ ID NO 24948
atgtatccatcaagcagccagatgttgttcttcctggcaatatgtgtccggcttgcctttgggctgcttccaacaacacatgtgcaagtcgttgatgaggtcagtgacacgacacttgcggcactcgcagatccaagtgataatctcacgggcatagcatattttgatcaatacattgatcacggaaacccggaacttggtatattctctcagacgtggtggtataacgcgacgttttggaagggccccggctcaccgatcgtcatacttacacctggagaggttgctgccaagggatacatgtcgtatctctcctcggacgctctcaccggtatggtagcgcaggaaatcggcgctgccgttgtccttgttgagcatcgatattggggaaatagtacaccattcgcgaatcaaactacaaagaacttacaatatctcactctcaatcaatcggtttctgactttgttcatttcgcacgaacagtgaaactgccgttcgacgatgcaggatcttcaaatgctccgcaagcgccatggatatggatcggtggttcgtactcaggggccctcggagcatggattgagagtctcgcgtcaggcaccatgtgggcgacgcatgctagcagcgcaccggttcaggtcatatatgattattggcagtatttcgacccgattcgtcagggcatgcctcagaactgttctcaagattactctaagatcattgatcatattgacagcatcttgctggagggcaccgacaaggaacaagatgacttgaagaagatgttcgggctagaggatctaacacataaagatgatatcgccagtgcaatctcttcccccatatggctttggcagggcattcagtttacgtcgggctactcgcaattttaccagatgtgcgatgctattcaaggagtcatgcagaatattacgcactttcctaacgacggggttggcttggcgcgggcgctccctaattttgccaaatggttcaagtcaaactatctgccgaattattgcttcgataactatagatactctgactggaaagatcctatgagcatcggttgtttcgactcgtacaataagtcgaatccaggctttaccgactggacggctaacaacgcatttgacagaccatgggtctggatgacatgcaacgaacctctattttactatcaaacaggggccccggccacccggcaaaccgtgttctcccgtctagtcgacgcgcagtactatcaaaggcagtgtgaactgttcttcccaaaagaaggcaactacacatacgctagcgccgaaggccgcacagaagacgacgtgaacaagcttaccaagggttgggatctccctaatgttctcggcgataagtcgaggataatctgggtgaatggagaatttgatccatggcgttctgcttctgtggccagcgagtttagaactggcagtcccgtggtgtcgacgcctgatgaaccttatgtgctgatacctgaggcgagacattgtaatgatctcagaaagcgaaacggggatgcgagttggaatgtagcgattgcgcagggttatgtcacgagtcagatgagcacttggacggatgagttctatagctcgaagaaaatgtctagaccggatcctgaggctgcttcatccatctcacatatgctcttcgttttagacgtaagaatcattgaggtcaattga

SEQ ID NO: 24948 - protein, 567 aa, Muscodor strobelii
  misc_feature: SGI Peptide ID NO. 568511
  misc_feature (57)..(524): Pfam Id: PF05577 Pfam Desc: Serine carboxypeptidase S28
  misc_feature (57)..(223): Pfam Id: PF05577 Pfam Desc: Serine carboxypeptidase S28
  misc_feature (23)..(535): NCBI GI: 121711132 Blast Desc: serine peptidase, [Aspergillus clavatus NRRL 1] gi|119401332|gb|EAW11756.1| serine peptidase, [Aspergillus clavatus NRRL 1]
  misc_feature (50)..(540): NCBI GI: 119497857 Blast Desc: serine peptidase, [Neosartorya fischeri NRRL 181] gi|119413850|gb|EAW23789.1| serine peptidase, [Neosartorya fischeri NRRL 181]
  misc_feature (47)..(540): NCBI GI: 171676507 Blast Desc: protein product [Podospora anserina] gi|170936320|emb|CAP60978.1| protein product [Podospora anserina]
  misc_feature (40)..(540): NCBI GI: 146322738 Blast Desc: serine peptidase [Aspergillus fumigatus Af293] gi|129556778|gb|EAL87223.2| serine peptidase, [Aspergillus fumigatus Af293]
  misc_feature (40)..(540): NCBI GI: 159128675 Blast Desc: serine peptidase, [Aspergillus fumigatus A1163]
  misc_feature (50)..(537): NCBI GI: 145239841 Blast Desc: serine peptidase, [Aspergillus fumigatus A1163]
  misc_feature (35)..(537): NCBI GI: 156058698 Blast Desc: SS1G_03361 [Sclerotinia sclerotiorum 1980] gi|154701148|gb|EDO00887.1| SS1G_03361 [Sclerotinia sclerotiorum 1980]
  misc_feature (28)..(544): NCBI GI: 154303088 Blast Desc: BC1G_09564 [Botryotinia fuckeliana B05.10] gi|150855027|gb|EDN30219.1| BC1G_09564 [Botryotinia fuckeliana B05.10]
  misc_feature (53)..(540): NCBI GI: 39942514 Blast Desc: MGG_03337 [Magnaporthe grisea 70-15] gi|145015650|gb|EDK00140.1| MGG_03337 [Magnaporthe grisea 70-15]
  misc_feature (46)..(536): NCBI GI: 238490204 Blast Desc: serine peptidase, [Aspergillus flavus NRRL3357] gi|220696752|gb|EED53093.1| serine peptidase, [Aspergillus flavus NRRL3357]
MYPSSSQMLFFLAICVRLAFGLLPTTHVQVVDEVSDTTLAALADPSDNLTGIAYFDQYIDHGNPELGIFSQTWWYNATFWKGPGSPIVILTPGEVAAKGYMSYLSSDALTGMVAQEIGAAVVLVEHRYWGNSTPFANQTTKNLQYLTLNQSVSDFVHFARTVKLPFDDAGSSNAPQAPWIWIGGSYSGALGAWIESLASGTMWATHASSAPVQVIYDYWQYFDPIRQGMPQNCSQDYSKIIDHIDSILLEGTDKEQDDLKKMFGLEDLTHKDDIASAISSPIWLWQGIQFTSGYSQFYQMCDAIQGVMQNITHFPNDGVGLARALPNFAKWFKSNYLPNYCFDNYRYSDWKDPMSIGCFDSYNKSNPGFTDWTANNAFDRPWVWMTCNEPLFYYQTGAPATRQTVFSRLVDAQYYQRQCELFFPKEGNYTYASAEGRTEDDVNKLTKGWDLPNVLGDKSRIIWVNGEFDPWRSASVASEFRTGSPVVSTPDEPYVLIPEARHCNDLRKRNGDASWNVAIAQGYVTSQMSTWTDEFYSSKKMSRPDPEAASSISHMLFVLDVRIIEVN

SEQ ID NO: 24949 - DNA, 681 bp, Muscodor strobelii
  misc_feature: SGI cDNA ID NO. 568512
  misc_feature: Encodes the peptide sequence at SEQ ID NO 24950
atgtcaatacaaacgggagactactccagaccaacaacatggcaaccagcgccgtgtacgagcaatccagacaaagtggaatgtgtcacgatagaacttccgccagcatctttggcagacgatgaagcttctgtactggagatagctacaatgatcaatgtcaactttcgctggggcgaaggtggtatcgttgtagatggcacccagcgcacgcaatggtcggagctcgtaaaccagctacgcgctcgcgagtttctcgttgtctttcatgaatttcctggtcgccgccgccgggctgttggctgcctcgcagcgaaggtgtggagcaaggatcgtggaactttaagacttttggcggtggataaagcatacaacgggagaggcctcgctagcgatcttttcaaatacggagaggattatactcgcgatgtgctaggaagagagatcatgcgactcgaggtgcttgtaccgaagtcatgggtgtctccgcacaaggaacgcctctgttcgtggtatgtgaggcgcgggtacacaatgactgggtctgatgattttggtactgagtatccgcaaatgatcccgttacttctcggccccacggactatcgaatttacgagaagaatctcaatgaagaggtgcagatagagaagagcatgagtaagcgtagtttgaagctgtga

SEQ ID NO: 24950 - protein, 226 aa, Muscodor strobelii
  misc_feature: SGI Peptide ID NO. 568512
  misc_feature (91)..(178): Pfam Id: PF00583 Pfam Desc: Acetyltransferase (GNAT) family
  misc_feature (98)..(178): Pfam Id: PF00583 Pfam Desc: Acetyltransferase (GNAT) family
  misc_feature (29)..(213): NCBI GI: 256724046 Blast Desc: NECHADRAFT_51322 [Nectria haematococca mpVI 77-13-4]
  misc_feature (29)..(209): NCBI GI: 261355311 Blast Desc: conserved [Verticillium albo-atrum VaMs.102]
  misc_feature (48)..(209): NCBI GI: 46115280 Blast Desc: FG03482.1 [Gibberella zeae PH-1]
  misc_feature (31)..(210): NCBI GI: 256668160 Blast Desc: StAA4_13475 [Streptomyces sp. AA4]
  misc_feature (47)..(209): NCBI GI: 167626298 Blast Desc: Fphi_0077 [Francisella philomiragia subsp. philomiragia ATCC 25017] gi|167596299|gb|ABZ86297.1| Fphi_0077 [Francisella philomiragia subsp. philomiragia ATCC 25017]
  misc_feature (48)..(209): NCBI GI: 241668739 Blast Desc: FphipA2_08225 [Francisella philomiragia subsp. philomiragia ATCC 25015] gi|254877270|ref|ZP_05249980.1| [Francisella philomiragia subsp. philomiragia ATCC 25015] subsp.
  misc_feature (31)..(209): NCBI GI: 85096702 Blast Desc: NCU07126 [Neurospora crassa OR74A] gi|28921796|gb|EAA31073.1| [Neurospora crassa OR74A]
  misc_feature (38)..(217): NCBI GI: 219117345 Blast Desc: [Phaeodactylum tricornutum CCAP 1055/1] gi|217409358|gb|EEC49290.1| [Phaeodactylum tricornutum CCAP 1055/1]
  misc_feature (42)..(182): NCBI GI: 167537830 Blast Desc: [Monosiga brevicollis MX1] gi|163770878|gb|EDQ84555.1| [Monosiga brevicollis MX1]
MSIQTGDYSRPTTWQPAPCTSNPDKVECVTIELPPASLADDEASVLEIATMINVNFRWGEGGIVVDGTQRTQWSELVNQLRAREFLVVFHEFPGRRRRAVGCLAAKVWSKDRGTLRLLAVDKAYNGRGLASDLFKYGEDYTRDVLGREIMRLEVLVPKSWVSPHKERLCSWYVRRGYTMTGSDDFGTEYPQMIPLLLGPTDYRIYEKNLNEEVQIEKSMSKRSLKL

SEQ ID NO: 24951 - DNA, 1527 bp, Muscodor strobelii
  misc_feature: SGI cDNA ID NO. 568513
  misc_feature: Encodes the peptide sequence at SEQ ID NO 24952
atggagtcatcccagcatattgttacatctttgctctcgtccgcaagggcggaccccttagtagtcgtgctatttctcatcggagcgtacatgttgcattcgtactattatcatgggcttaacaagatacccggtccctttatagcgagtcagacgagtctctggaagtggaataaagtccgtcgagaagaaatgcataccgtgagcgctgaattgcacgacaaattcggaccgctagttaggattgggcccaaccacgtttctgcttctagtgcggaagcaattcaagttgttcacagagctaggagcgggttcaacaaggctccaatgtatggcattttacagccattgtacgagggatcggacttgcataacatcttctcaacgcaagatccagagtaccatgcggcactcaagcgtaccatggggaatctatacacgactacggctgtgatgcctcttgagcaccaccttgacgcatgtactaaggtgttcatcgaaaaaatggatggtatcataggctctaacaaattttcgcccgttgatctagccggctggctccagtattatacgttcgactctcttggaatgattaacttctcccagatgatggggtttatggatgctggtgttgacttacagggtatctgccactacgatcacgatcaaatgctgtattttgccatatggggccagatcgctaccgctgagcggatttggtcaaaaacgaagaacttgttccagggtgccaagaaggagaaccctctgtttcattttgtcgtaaaaattatcaaagagcgccagaataaccctacagacgatgtagacatgttgaactcttttctggcgcttcaccaagccgcgccgacaaaattcactgccagagatttattagcagctgcatacattaatgttgtcactgcccatgacgtcgttgcaatcacgatgcgaggtgtcgtctattggctcgcgagacatcctgatgttcaaaagaaacttcagagagagatcgcagacatggatgccgcgggaaaactctcaacaccatctcaatatgccgagattaccacgatgccttatgtactcgctgttgtaaatgagacccttcgatatcacccaagcactggtatcatctttgagcgtgtcactcccaaaggcggcgtcaccttacatgggcagtatatcccagaaaacactcatataggtgtcaatgcatgggttatcaacagggacaaagatatcttcggagaggatgccgaagtcttccgtcctgagcgatggatcgaaagcgatccaaaagctgtgacgaaaatgaaaatgaatttgttcaccttcggggctgggcaaaggcactgcattggaaggaatcttgccatgatgcagcttacgaaggtggtcgttgagatgtaccgacactatgatatcatgctagcaaacccggagcgggagtggaaaatctcaggaggctggttaactcggcaaagcgacatgggcatgatcattggcaagaaggggtcattgatctaa

SEQ ID NO: 24952 - protein, 508 aa, Muscodor strobelii
  misc_feature: SGI Peptide ID NO. 568513
  misc_feature (44)..(502): Pfam Id: PF00067 Pfam Desc: Cytochrome P450
  misc_feature (259)..(502): Pfam Id: PF00067 Pfam Desc: Cytochrome P450
  misc_feature (21)..(504): NCBI GI: 240278833 Blast Desc: benzoate 4-monooxygenase cytochrome P450 [Ajellomyces capsulatus H143]
  misc_feature (8)..(504): NCBI GI: 261203485 Blast Desc: cytochrome P450 oxidoreductase [Ajellomyces dermatitidis SLH14081] gi|239586741|gb|EEQ69384.1| cytochrome P450 oxidoreductase [Ajellomyces dermatitidis SLH14081]
  misc_feature (19)..(504): NCBI GI: 116200402 Blast Desc: CHGG_10746 [Chaetomium globosum CBS 148.51] gi|88175460|gb|EAQ82928.1| CHGG_10746 [Chaetomium globosum CBS 148.51]
  misc_feature (21)..(504): NCBI GI: 225560082 Blast Desc: benzoate 4-monooxygenase cytochrome P450 [Ajellomyces capsulatus G186AR]
  misc_feature (8)..(504): NCBI GI: 239608228 Blast Desc: cytochrome P450 oxidoreductase [Ajellomyces dermatitidis ER-3]
  misc_feature (1)..(497): NCBI GI: 171693327 Blast Desc: protein product [Podospora anserina] gi|170946612|emb|CAP73414.1| protein product [Podospora anserina]
  misc_feature (11)..(504): NCBI GI: 226281574 Blast Desc: pisatin demethylase [Paracoccidioides brasiliensis Pb01]
  misc_feature (20)..(488): NCBI GI: 225679581 Blast Desc: pisatin demethylase [Paracoccidioides brasiliensis Pb03]
  misc_feature (9)..(497): NCBI GI: 146323235 Blast Desc: cytochrome P450 oxidoreductase [Aspergillus fumigatus Af293] gi|129556532|gb|EAL86627.2| cytochrome P450 oxidoreductase, [Aspergillus fumigatus Af293] cytochrome P450
  misc_feature (9)..(497): NCBI GI: 119474443 Blast Desc: cytochrome P450 pisatin demethylase, [Neosartorya fischeri NRRL 181] gi|119407250|gb|EAW17200.1| cytochrome P450 pisatin demethylase, [Neosartorya fischeri NRRL 181]
  misc_feature (40)..(504): SWISSPROT Homolog: EC 1.14.13.12 Benzoate 4-monooxygenase
MESSQHIVTSLLSSARADPLVVVLFLIGAYMLHSYYYHGLNKIPGPFIASQTSLWKWNKVRREEMHTVSAELHDKFGPLVRIGPNHVSASSAEAIQVVHRARSGFNKAPMYGILQPLYEGSDLHNIFSTQDPEYHAALKRTMGNLYTTTAVMPLEHHLDACTKVFIEKMDGIIGSNKFSPVDLAGWLQYYTFDSLGMINFSQMMGFMDAGVDLQGICHYDHDQMLYFAIWGQIATAERIWSKTKNLFQGAKKENPLFHFVVKIIKERQNNPTDDVDMLNSFLALHQAAPTKFTARDLLAAAYINVVTAHDVVAITMRGVVYWLARHPDVQKKLQREIADMDAAGKLSTPSQYAEITTMPYVLAVVNETLRYHPSTGIIFERVTPKGGVTLHGQYIPENTHIGVNAWVINRDKDIFGEDAEVFRPERWIESDPKAVTKMKMNLFTFGAGQRHCIGRNLAMMQLTKVVVEMYRHYDIMLANPEREWKISGGWLTRQSDMGMIIGKKGSLI

SEQ ID NO: 24953 - DNA, 1195 bp, Muscodor strobelii
  misc_feature: SGI EST ID NO. CUFF.58806.0
  misc_feature: Variant of the nucleotide sequence at SEQ ID NO 24951
gatcgctaccgctgagcggatttggtcaaaaacgaagaacttgttccagggtgccaagaaggagaaccctctgtttcattttgtcgtaaaaattatcaaagagcgccagaataaccctacagacgatgtagacatgttgaactcttttctggcgcttcaccaagccgcgccgacaaaattcactgccagagatttattagcagctgcatacattaatgtgtaagtcctccatccagatttggtccacctcatggtcctcacaaatgcgattcccagtgtcactgcccatgacgtcgttgcaatcacgatgcgaggtgtcgtctattggctcgcgagacatcctgatgttcaaaagaaacttcagagagagatcgcagacatggatgccgcgggaaaactctcaacaccatctcaatatgccgagattaccacgatgccttatgtactcgctgttgtaaatgagacccttcgatatcacccaagcactggtatcatctttgagcgtgtcactcccaaaggcggcgtcaccttacatgggcagtatatcccagaaaacactcatataggtgtcaatgcatgggttatcaacagggacaaagatatcttcggagaggatgccgaagtcttccgtcctgagcgatggatcgaaagcgatccaaaagctgtgacgaaaatgaaaatgaatttgttcaccttcggggctgggcaaaggcactgcattggaaggaatcttgccatgatgcagcttacgaaggtggtcgttgagatgtaccgacactatgatatcatgctagcaaacccggagcgggagtggaaaatctcaggaggctggttaactcggcaaagcgacatgggcatgatcattggcaagaaggggtcattgatctaatcgttgattcaggaataatggatatttgaattgttctcccaaagttgttcttccaacggcctttcaacgtgcggaaattttgcgccatggggggtcatggggtacaaatgctacagaagatgaacccaggccatagatcgcggtggtaaatttgctgctgcattcattctgtcctttcttacctcatatcaccgaatagatttccaatgcttctcggacgccgcaggttcgagatgatcgatgaggtcagctcagctgagtcattacagagtagtgttactaagcgcatgtattaacatgccttcg

SEQ ID NO: 24954 - DNA, 1050 bp, Muscodor strobelii
  misc_feature: SGI cDNA ID NO. 568514
  misc_feature: Encodes the peptide sequence at SEQ ID NO 24955
atgacagatgatggcactcccgccgagcttagctgggattggggcacaaaagatgggccacccaccatacgatactctattgagcccattgggcttgaagctggaacagaacttgacccaggaaatctcaaagtcggaccaattttccaggagcagcttgtccgttccttgcctgacagcagattagagtggtttaaacacttttacagattcttcaatgataatgatgctggagaaaacgggtttgtcaatgacatgaaagatcataacacctccatcttctacgcgttcgacttatctcctatcgaagtcacggcaaaagtctacttctttccgaagatgagagcccaaagtacgggacaatcaaacctacaaatcctttcacaagctgtagcaagtgccccatactgtacaagcaaaaatctaaaggcttgggactcgtggtgcgacttctctgctggcttgaaaggagcgagagcattggagtacgagatgttggcgatcgacctcattaatccagttgattctcgactgaaaatatacttccgatcacgggaaacgtctttcacttcggtcatggctatcatgacacgtggaggtttgatcacaaatcctcacttatatcagggacttcaagatctcaggcgtctttggaaggctcttttcaattgcgatcccgatcaaccactaacggacgttggtcatcgaacggcaggcatgctttacaacatcgagtttaggctaggtgaatgcgtcccagttgctaagatctatttgcctgtgcgtcactatgcaatcagcgacgaagcaataattcagggcctagatcaatactttcagcatcaccaaagaggaaaatatatgccgaaatatcttgaggctatgcaaacactcttctcccccaccgcgttgcagacgagtaccggcgtacacacttatattggctgtacagttcggccaaatgggagcttgagagttgtgtcgtacttcaaaccagcagtcacgcataatgtcaatgccacatccgaagtcgattgcctgctagtctaa

SEQ ID NO: 24955 - protein, 349 aa, Muscodor strobelii
  misc_feature: SGI Peptide ID NO. 568514
  misc_feature (1)..(299): NCBI GI: 169610840 Blast Desc: SNOG_08527 [Phaeosphaeria nodorum SN15] gi|111062575|gb|EAT83695.1| SNOG_08527 [Phaeosphaeria nodorum SN15]
  misc_feature (1)..(343): NCBI GI: 145248147 Blast Desc: An13g01840 [Aspergillus niger] gi|134081071|emb|CAK41583.1| protein product [Aspergillus niger]
  misc_feature (1)..(334): NCBI GI: 238842425 Blast Desc: SirD [Microsporum canis CBS 113480]
  misc_feature (1)..(284): NCBI GI: 256720078 Blast Desc: NECHADRAFT_15792 [Nectria haematococca mpVI 77-13-4]
  misc_feature (1)..(336): NCBI GI: 169777917 Blast Desc: [Aspergillus oryzae RIB40] gi|83772161|dbj|BAE62291.1| protein product [Aspergillus oryzae]
  misc_feature (1)..(336): NCBI GI: 238495152 Blast Desc: dimethylallyl tryptophan synthase, [Aspergillus flavus NRRL3357] gi|220695462|gb|EED51805.1| dimethylallyl tryptophan synthase, [Aspergillus flavus NRRL3357]
  misc_feature (1)..(334): NCBI GI: 157382477 Blast Desc: dimethylallyl transferase [Hypocrea virens]
  misc_feature (1)..(336): NCBI GI: 46403064 Blast Desc: SirD [Leptosphaeria maculans]
  misc_feature (1)..(330): NCBI GI: 119491023 Blast Desc: dimethylallyl tryptophan synthase GliD2 [Neosartorya fischeri NRRL 181] gi|119411332|gb|EAW21275.1| dimethylallyl tryptophan synthase GliD2 [Neosartorya fischeri NRRL 181]
  misc_feature (1)..(330): NCBI GI: 154968291 Blast Desc: 7-dimethylallyltryptophan synthase [Aspergillus fumigatus]
  misc_feature (1)..(321): SWISSPROT Homolog: EC 2.5.1.34 Tryptophan dimethylallyltransferase
MTDDGTPAELSWDWGTKDGPPTIRYSIEPIGLEAGTELDPGNLKVGPIFQEQLVRSLPDSRLEWFKHFYRFFNDNDAGENGFVNDMKDHNTSIFYAFDLSPIEVTAKVYFFPKMRAQSTGQSNLQILSQAVASAPYCTSKNLKAWDSWCDFSAGLKGARALEYEMLAIDLINPVDSRLKIYFRSRETSFTSVMAIMTRGGLITNPHLYQGLQDLRRLWKALFNCDPDQPLTDVGHRTAGMLYNIEFRLGECVPVAKIYLPVRHYAISDEAIIQGLDQYFQHHQRGKYMPKYLEAMQTLFSPTALQTSTGVHTYIGCTVRPNGSLRVVSYFKPAVTHNVNATSEVDCLLV

SEQ ID NO: 24956 - DNA, 348 bp, Muscodor strobelii
  misc_feature: SGI EST ID NO. CUFF.58811.0
  misc_feature: Variant of the nucleotide sequence at SEQ ID NO 24954
gctaagatctatttgcctgtgcgtcactatgcaatcagcgacgaagcaataattcagggcctagatcaatactttcagcatcaccaaagaggaaaatatatgccgaaatatcttgaggctatgcaaacactcttctcccccaccgcgttgcagacgagtaccggcgtacacacttatattggctgtacagttcggccaaatgggagcttgagagttgtgtcgtacttcaaaccagcagtcacgcataatgtcaatgccacatccgaagtcgattgcctgctagtctaatagggagattgaggaagagatacgctcctacaaaactcaattactcaatttatattgtag

SEQ ID NO: 24957 - DNA, 1266 bp, Muscodor strobelii
  misc_feature: SGI cDNA ID NO. 568515
  misc_feature: Reduced expression when VOC is produced
  misc_feature: Encodes the peptide sequence at SEQ ID NO 24958
atggctcctgaacgtgtttgccttgcctactctggcggcctagatacttccactattctcaagtggctcgtaattcaaggctatgaggtggtgtgtttcctcggcgactgcggccaggaggaagacttcgatgccgtcaaggctaaggcgctgaagctcggcgctgagaagatggtcatcgagaacgtccagcaggagctgattgacgacttggtgtggcccgccatccagtgcaacgctatctatgaaggacaatacctactcggcacaagcctagcccggccggtattggccagggcaatggtgcaagttgcgaaggataacaactgcacgatcctcagccatggatgtactggcaagggcagtgatgcaactaccaaatccggcttcgagctggcgttcaaggcatgtgaccctaagatgaagattctggccccctggcgcctccctgcgttcttcaaccgattccagggacgtgccgatcttctcaagttcgccgaggagcagaacatccccgtcagctcaactccaaaggccccctggtctatggacgacaacatcatccactgctcatacgaggccggtattctcgagcaaacagatatggagcctccgaagaacatgtggaagcgcacagttgatccgctggacgctcccgacgagcccactcgcttcaccgtccactttgctgagggtgttcccattaagcttgaagttgggggcaaggccgttaccggctccttggagatcttcaaggaggccaacgagctgggccgtgctaacggtattggacgcgaggacatggtacgtatagaaagatcccacgcgagattaaaatctcgtggttgctacgatacccccggtctgactattttacgcaagctgcatcaaaacctggagggtctcgttatggatagcaaagtgcgcatcattcgcgaccgtctctcagatgactgggcgcaatgtatatacaacggaatgtactttacgcctgagcgcgagttcgttcagcagtcgatctctatcagccagaagcaggttgatggcaaggtcgaagctctggcatataagggcaacgttatcatcgttggccgctccagcgagacatccaatctctacagcgaagaagaaagcagcatggacactctaaaaatggattggagtgtcgaagacgcaactgggtttataaacgtgaatgctatacgcatcgccaagtatggcgagcgcaagatcagggatggcgagcccctttccaagcgtaaatag

SEQ ID NO: 24958 - protein, 421 aa, Muscodor strobelii
  misc_feature: SGI Peptide ID NO. 568515
  misc_feature (7)..(409): Pfam Id: PF00764 Pfam Desc: Arginosuccinate synthase
  misc_feature (13)..(421): NCBI GI: 256727017 Blast Desc: NECHADRAFT_91137 [Nectria haematococca mpVI 77-13-4]
  misc_feature (1)..(418): NCBI GI: 46110160 Blast Desc: FG01962.1 [Gibberella zeae PH-1]
  misc_feature (1)..(419): NCBI GI: 145612487 Blast Desc: conserved [Magnaporthe grisea 70-15] gi|145019644|gb|EDK03872.1| conserved [Magnaporthe grisea 70-15]
  misc_feature (1)..(419): NCBI GI: 46123441 Blast Desc: FG06098.1 [Gibberella zeae PH-1]
  misc_feature (1)..(419): NCBI GI: 145612495 Blast Desc: conserved [Magnaporthe grisea 70-15] gi|145019648|gb|EDK03876.1| conserved [Magnaporthe grisea 70-15]
  misc_feature (13)..(419): NCBI GI: 171689612 Blast Desc: protein product [Podospora anserina] gi|170944768|emb|CAP70879.1| protein product [Podospora anserina]
  misc_feature (5)..(419): NCBI GI: 85111521 Blast Desc: argininosuccinate synthase [Neurospora crassa OR74A] gi|28925731|gb|EAA34740.1| argininosuccinate synthase [Neurospora crassa OR74A]
  misc_feature (4)..(417): NCBI GI: 256730895 Blast Desc: NECHADRAFT_71647 [Nectria haematococca mpVI 77-13-4]
  misc_feature (1)..(417): NCBI GI: 255932933 Blast Desc: Pc12g11190 [Penicillium chrysogenum Wisconsin 54-1255] gi|211582556|emb|CAP80746.1| Pc12g11190 [Penicillium chrysogenum Wisconsin 54-1255]
  misc_feature (1)..(417): NCBI GI: 156057843 Blast Desc: argininosuccinate synthetase [Sclerotinia sclerotiorum 1980] gi|154702438|gb|EDO02177.1| argininosuccinate synthetase [Sclerotinia sclerotiorum 1980]
  misc_feature (1)..(418): SWISSPROT Homolog: EC 6.3.4.5 Argininosuccinate synthase
  misc_feature: Useful for introducing or modulating the production of volatile compounds
MAPERVCLAYSGGLDTSTILKWLVIQGYEVVCFLGDCGQEEDFDAVKAKALKLGAEKMVIENVQQELIDDLVWPAIQCNAIYEGQYLLGTSLARPVLARAMVQVAKDNNCTILSHGCTGKGSDATTKSGFELAFKACDPKMKILAPWRLPAFFNRFQGRADLLKFAEEQNIPVSSTPKAPWSMDDNIIHCSYEAGILEQTDMEPPKNMWKRTVDPLDAPDEPTRFTVHFAEGVPIKLEVGGKAVTGSLEIFKEANELGRANGIGREDMVRIERSHARLKSRGCYDTPGLTILRKLHQNLEGLVMDSKVRIIRDRLSDDWAQCIYNGMYFTPEREFVQQSISISQKQVDGKVEALAYKGNVIIVGRSSETSNLYSEEESSMDTLKMDWSVEDATGFINVNAIRIAKYGERKIRDGEPLSKRK

SEQ ID NO: 24959 - DNA, 763 bp, Muscodor strobelii
  misc_feature: SGI EST ID NO. CUFF.58837.3
  misc_feature: Variant of the nucleotide sequence at SEQ ID NO 24957
aatacctttctggctaccagagtcgagtcaagatttatcggattaaaatctcgtggttgctacgatacccccggtctgactattttacgcaagctgcatcaaaacctggagggtctcgttatggatagcaaagtgcgcatcattcgcgaccgtctctcagatgactgggcgcaatgtatatacaacggaatgtactttacgcctgagcgcgagttcgttcagcagtcgatctctatcagccagaagcaggttgatggcaaggtcgaagctctggcatataagggcaacgttatcatcgttggccgctccagcgagacatccaatctctacagcgaagaagaaagcagcatggacactctaaaaatggattggagtgtcgaagacgcaactgggtttataaacgtgaatgctatacgcatcgccaagtatggcgagcgcaagatcagggatggcgagcccctttccaagcgtaaatagacagacttacaatgctagccttccagagctacaggagttgttggtaaacggaggaaaatcggcgagaatggaatgttttactttgtgcctaaacatcacaaatagaaagaacaataagaaaagctgcatcctgagcgacgtctttcctcaatgctattttcatcgaattctctacggcgcgacatagttagtataaattcatctctagatacagaccaaatttgaccctgcgccaccggcggcgttctaggaattctggtctgtggccggaaggggctaaaaccag

SEQ ID NO: 24960 - DNA, 1284 bp, Muscodor strobelii
  misc_feature: SGI cDNA ID NO. 568516
  misc_feature: Reduced expression when VOC is produced
  misc_feature: Encodes the peptide sequence at SEQ ID NO 24961
atggctcctgaacgtgtttgccttgcctactctggcggcctagatacttccactattctcaagtggctcgtaattcaaggctatgaggtggtgtgtttcctcggcgactgcggccaggaggaagacttcgatgccgtcaaggctaaggcgctgaagctcggcgctgagaagatggtcatcgagaacgtccagcaggagctgattgacgacttggtgtggcccgccatccagtgcaacgctatctatgaaggacaatacctactcggcacaagcctagcccggccggtattggccagggcaatggtgcaagttgcgaaggataacaactgcacgatcctcagccatggatgtactggcaagggcagtgatgcaactaccaaatccggcttcgagctggcgttcaaggcatgtgaccctaagatgaagattctggccccctggcgcctccctgcgttcttcaaccgattccagggacgtgccgatcttctcaagttcgccgaggagcagaacatccccgtcagctcaactccaaaggccccctggtctatggacgacaacatcatccactgctcatacgaggccggtattctcgagcaaacagatatggagcctccgaagaacatgtggaagcgcacagttgatccgctggacgctcccgacgagcccactcgcttcaccgtccactttgctgagggtgttcccattaagcttgaagttgggggcaaggccgttaccggctccttggagatcttcaaggaggccaacgagctgggccgtgctaacggtattggacgcgaggacatgagtcgagtcaagatttatcggattaaaatctcgtggttgctacgatacccccggtctgactattttacgcaagctgcatcaaaacctggaggactccagttgacgattgctcagggtctcgttatggatagcaaagtgcgcatcattcgcgaccgtctctcagatgactgggcgcaatgtatatacaacggaatgtactttacgcctgagcgcgagttcgttcagcagtcgatctctatcagccagaagcaggttgatggcaaggtcgaagctctggcatataagggcaacgttatcatcgttggccgctccagcgagacatccaatctctacagcgaagaagaaagcagcatggacactctaaaaatggattggagtgtcgaagacgcaactgggtttataaacgtgaatgctatacgcatcgccaagtatggcgagcgcaagatcagggatggcgagcccctttccaagcgtaaatag

SEQ ID NO: 24961 - protein, 427 aa, Muscodor strobelii
  misc_feature: SGI Peptide ID NO. 568516
  misc_feature (7)..(415): Pfam Id: PF00764 Pfam Desc: Arginosuccinate synthase
  misc_feature (7)..(268): Pfam Id: PF00764 Pfam Desc: Arginosuccinate synthase
  misc_feature (307)..(415): Pfam Id: PF00764 Pfam Desc: Arginosuccinate synthase
  misc_feature (13)..(427): NCBI GI: 256727017 Blast Desc: NECHADRAFT_91137 [Nectria haematococca mpVI 77-13-4]
  misc_feature (1)..(424): NCBI GI: 46110160 Blast Desc: FG01962.1 [Gibberella zeae PH-1]
  misc_feature (1)..(425): NCBI GI: 46123441 Blast Desc: FG06098.1 [Gibberella zeae PH-1]
  misc_feature (1)..(425): NCBI GI: 145612487 Blast Desc: conserved [Magnaporthe grisea 70-15] gi|145019644|gb|EDK03872.1| conserved [Magnaporthe grisea 70-15]
  misc_feature (1)..(425): NCBI GI: 145612495 Blast Desc: conserved [Magnaporthe grisea 70-15] gi|145019648|gb|EDK03876.1| conserved [Magnaporthe grisea 70-15]
  misc_feature (13)..(425): NCBI GI: 171689612 Blast Desc: protein product [Podospora anserina] gi|170944768|emb|CAP70879.1| protein product [Podospora anserina]
  misc_feature (5)..(425): NCBI GI: 85111521 Blast Desc: argininosuccinate synthase [Neurospora crassa OR74A] gi|28925731|gb|EAA34740.1| argininosuccinate synthase [Neurospora crassa OR74A]
  misc_feature (4)..(423): NCBI GI: 256730895 Blast Desc: NECHADRAFT_71647 [Nectria haematococca mpVI 77-13-4]
  misc_feature (1)..(423): NCBI GI: 255932933 Blast Desc: Pc12g11190 [Penicillium chrysogenum Wisconsin 54-1255] gi|211582556|emb|CAP80746.1| Pc12g11190 [Penicillium chrysogenum Wisconsin 54-1255]
  misc_feature (1)..(423): NCBI GI: 156057843 Blast Desc: argininosuccinate synthetase [Sclerotinia sclerotiorum 1980] gi|154702438|gb|EDO02177.1| argininosuccinate synthetase [Sclerotinia sclerotiorum 1980]
  misc_feature (1)..(424): SWISSPROT Homolog: EC 6.3.4.5 Argininosuccinate synthase
  misc_feature: Useful for introducing or modulating the production of volatile compounds
MAPERVCLAYSGGLDTSTILKWLVIQGYEVVCFLGDCGQEEDFDAVKAKALKLGAEKMVIENVQQELIDDLVWPAIQCNAIYEGQYLLGTSLARPVLARAMVQVAKDNNCTILSHGCTGKGSDATTKSGFELAFKACDPKMKILAPWRLPAFFNRFQGRADLLKFAEEQNIPVSSTPKAPWSMDDNIIHCSYEAGILEQTDMEPPKNMWKRTVDPLDAPDEPTRFTVHFAEGVPIKLEVGGKAVTGSLEIFKEANELGRANGIGREDMSRVKIYRIKISWLLRYPRSDYFTQAASKPGGLQLTIAQGLVMDSKVRIIRDRLSDDWAQCIYNGMYFTPEREFVQQSISISQKQVDGKVEALAYKGNVIIVGRSSETSNLYSEEESSMDTLKMDWSVEDATGFINVNAIRIAKYGERKIRDGEPLSKRK

SEQ ID NO: 24962 - DNA, 763 bp, Muscodor strobelii; identical to SEQ ID NO: 24959
  misc_feature: SGI EST ID NO. CUFF.58837.3
  misc_feature: Variant of the nucleotide sequence at SEQ ID NO 24960

SEQ ID NO: 24963 - DNA, 1263 bp, Muscodor strobelii
  misc_feature: SGI cDNA ID NO. 568517
  misc_feature: Reduced expression when VOC is produced
  misc_feature: Encodes the peptide sequence at SEQ ID NO 24964
atgtcatcacgaagatccgctcgtatcagtgccgccactgagcttaaggcggcattggcaccgccgacgctcatgccaccgccgccccttccggtgcctgtgaagcagagtcgcaaaaggaaagctgctgtaacaagcgccgccagtgatataacgacagatgccttgattgatgctgctgctgctgctttacctaaaacaccatcgccgagaaagcggcgcgctcctcgggccagtacgcctccgccattggcaacaccaacaccaagcaatgccaagttgatgggcgagcctgccagtgacggcattgaaccaagaacaccagaggccaaaaaaccgcgcgcaagaggcgccactcgtctcgcgcccccaaatgccactctagcaacactcgtctcgcctgaaacgtcacgcattgtgacgagcaaagatgccacacgagcgcaatccgtttcaccaatgaagcagcccgctgaactcctgctcggcgccattcctccgctccctaagcctacgactacggcaaacattcttgaggaagcatgcagacatcttattgccgtcgacccgcgaatgaaaccgctggttgaggctcatcattgcagagtattctctcccgagggccttgccgagcaaattgacccgttcgagtcgatttgcagcggtatcttgtcgcagcaggtctcaggcgctgctgcgaaggcaatcaagaagcgattcgtcactttattctacccggaagatgccgcagcgcaacaagctaccgagcagacgaagggagactgggatgacgtggtgaagacggacccgcgatttccgcacccttctcaagtgattacgaagtccatagaagagcttcgcacagcagggctctcacagcgcaaggccgagtatattctaggactagcggagaaattcgtcaacggcgaactgtcggcgcagaaactggcagatgcaccgtatgatgacctgatcgagatgctcacctctgttcggggcctaggcgtctggtctgcggagatgtttgccttcttcggattgaagcgcatggatgttttctctctcggggatttgggcgttcagcgcggcatggccgcgtttagtgggaaggacgtctcgaagctgaagaacaataagggcaagtggaagtacatgagtgaagaggacatgactgccatgggcgagagatacaagccatatcgcagcctattcatgtggtatatgtggcgcgttgaaggcacggatgtcagtacgatggagtaa

SEQ ID NO: 24964 - protein, 420 aa, Muscodor strobelii
  misc_feature: SGI Peptide ID NO. 568517
  misc_feature (220)..(383): Pfam Id: PF00730 Pfam Desc: HhH-GPD superfamily base excision DNA repair protein
  misc_feature (282)..(364): Pfam Id: PF00730 Pfam Desc: HhH-GPD superfamily base excision DNA repair protein
  misc_feature (220)..(251): Pfam Id: PF00730 Pfam Desc: HhH-GPD superfamily base excision DNA repair protein
  misc_feature (2)..(420): NCBI GI: 145603222 Blast Desc: MGG_06190 [Magnaporthe grisea 70-15] gi|145011497|gb|EDJ96153.1| MGG_06190 [Magnaporthe grisea 70-15]
  misc_feature (1)..(406): NCBI GI: 171694385 Blast Desc: protein product [Podospora anserina] gi|170947141|emb|CAP73946.1| protein product [Podospora anserina]
  misc_feature (107)..(420): NCBI GI: 46137149 Blast Desc: FG10090.1 [Gibberella zeae PH-1]
  misc_feature (1)..(420): NCBI GI: 164423749 Blast Desc: NCU08938 [Neurospora crassa OR74A] gi|157070220|gb|EAA31569.2| NCU08938 [Neurospora crassa OR74A]
  misc_feature (111)..(420): NCBI GI: 28950140 Blast Desc: conserved [Neurospora crassa]
  misc_feature (1)..(420): NCBI GI: 116197677 Blast Desc: CHGG_06994 [Chaetomium globosum CBS 148.51] gi|88178273|gb|EAQ85741.1| CHGG_06994 [Chaetomium globosum CBS 148.51]
  misc_feature (124)..(420): NCBI GI: 242765840 Blast Desc: DNA-3-methyladenine glycosylase, [Talaromyces stipitatus ATCC 10500] gi|218724251|gb|EED23668.1| DNA-3-methyladenine glycosylase, [Talaromyces stipitatus ATCC
  misc_feature (124)..(420): NCBI GI: 212528646 Blast Desc: DNA-3-methyladenine glycosylase, [Penicillium marneffei ATCC 18224] gi|210073878|gb|EEA27965.1| DNA-3-methyladenine glycosylase, [Penicillium marneffei ATCC
  misc_feature (1)..(420): NCBI GI: 226293001 Blast Desc: conserved [Paracoccidioides brasiliensis Pb18]
  misc_feature (124)..(420): NCBI GI: 70994738 Blast Desc: DNA-3-methyladenine glycosylase [Aspergillus fumigatus Af293] gi|66849780|gb|EAL90108.1| DNA-3-methyladenine glycosylase, [Aspergillus fumigatus Af293] DNA-3-methyladenine
  misc_feature (181)..(419): SWISSPROT Homolog: EC 3.2.2.21 DNA-3-methyladenine glycosylase II
  misc_feature: Useful for introducing or modulating the production of volatile compounds
MSSRRSARISAATELKAALAPPTLMPPPPLPVPVKQSRKRKAAVTSAASDITTDALIDAAAAALPKTPSPRKRRAPRASTPPPLATPTPSNAKLMGEPASDGIEPRTPEAKKPRARGATRLAPPNATLATLVSPETSRIVTSKDATRAQSVSPMKQPAELLLGAIPPLPKPTTTANILEEACRHLIAVDPRMKPLVEAHHCRVFSPEGLAEQIDPFESICSGILSQQVSGAAAKAIKKRFVTLFYPEDAAAQQATEQTKGDWDDVVKTDPRFPHPSQVITKSIEELRTAGLSQRKAEYILGLAEKFVNGELSAQKLADAPYDDLIEMLTSVRGLGVWSAEMFAFFGLKRMDVFSLGDLGVQRGMAAFSGKDVSKLKNNKGKWKYMSEEDMTAMGERYKPYRSLFMWYMWRVEGTDVSTME

SEQ ID NO: 24965 - DNA, 939 bp, Muscodor strobelii
  misc_feature: SGI cDNA ID NO. 568518
  misc_feature: Reduced expression when VOC is produced
  misc_feature: Encodes the peptide sequence at SEQ ID NO 24966
atgcttcttcccaagggcggaatgacgtggaagtcggcaaaggcccagctgcctcccacgagagcggtgtggcatttcttcgcccggacccgcgtgatcctgaccctggccgtcgccggcgtcatattactgctgtggcgcggcatcagttcctcggccagcgagatgcagagtttctactgctggggcccctcgaaagcgccgatggagatgaccctgaacgagcagcacacctggaacgcccacatgcagacgcccgtcatcttcaaccaccacaagcccatcaaagtcgacgagtccaccatccagcacgtggatctgaacaccgtcaagtcgacacagcaggccgtcgacaacaaggagcgcatcctgatcctgacgcccctcaaggacgccgccccttacctggccaagtacttcgatctcctgacccagctgacatacccccactcgctcatcgacctcggctttcttgtcggtgactccaacgacgacaccctcgctgtgcttagcgccgagctcgctcgcatccagaagcagaagggagacaaagccttcaacagcgtcgtcatcgtcgagaaggacttcggcgccatcgtgggccagagtgtcgaggaccgtcacggcttcgaggcccagggaccccgccggaaagccatgggccgtgccagaaactacctgctttctgccaccctgaagccagagcattcgtgggtctactggcgcgacgtcgacatcgtcgagaaccccgccagcattctcgaggacttcatctcccggaatcgcgacatcatcgttcccaatatctggtttcatcgctacgaaaacaacagagacatcgagggcagatttgattacaattcatggatcgaatctcccaaggcactgaagctcgcaagcaagctcgacaagaatgtggtcttggctgaaggcgagtag

SEQ ID NO: 24966 - protein, 312 aa, Muscodor strobelii
  misc_feature: SGI Peptide ID NO. 568518
  misc_feature (71)..(312): Pfam Id: PF03452 Pfam Desc: Anp1
  misc_feature (90)..(303): Pfam Id: PF03452 Pfam Desc: Anp1
  misc_feature (1)..(311): NCBI GI: 164423751 Blast Desc: NCU08939 [Neurospora crassa OR74A] gi|157070221|gb|EAA31570.2| NCU08939 [Neurospora crassa OR74A]
  misc_feature (1)..(311): NCBI GI: 28950141 Blast Desc: ANP1 protein [Neurospora crassa]
  misc_feature (1)..(311): NCBI GI: 39975765 Blast Desc: conserved [Magnaporthe grisea 70-15] gi|145011496|gb|EDJ96152.1| conserved [Magnaporthe grisea 70-15]
  misc_feature (1)..(311): NCBI GI: 171694383 Blast Desc: protein product [Podospora anserina] gi|170947140|emb|CAP73945.1| protein product [Podospora anserina]
  misc_feature (1)..(311): NCBI GI: 115398267 Blast Desc: mannan polymerase II complex ANP1 subunit [Aspergillus terreus NIH2624] gi|114192916|gb|EAU34616.1| mannan polymerase II complex ANP1 subunit [Aspergillus terreus NIH2624]
  misc_feature (1)..(311): NCBI GI: 258568242 Blast Desc: UREG_05554 [Uncinocarpus reesii 1704] gi|237906311|gb|EEP80712.1| UREG_05554 [Uncinocarpus reesii 1704]
  misc_feature (1)..(311): NCBI GI: 116197679 Blast Desc: CHGG_06995 [Chaetomium globosum CBS 148.51] gi|88178274|gb|EAQ85742.1| CHGG_06995 [Chaetomium globosum CBS 148.51]
  misc_feature (1)..(311): NCBI GI: 70994724 Blast Desc: N-glycosyl-transferase [Aspergillus fumigatus Af293] gi|66849773|gb|EAL90101.1| N-glycosyl-transferase [Aspergillus fumigatus Af293] gi|159124946|gb|EDP50063.1| [Aspergillus A1163]
  misc_feature (1)..(311): NCBI GI: 240107951 Blast Desc: Anp1 family protein [Coccidioides posadasii C735 delta SOWgp]
  misc_feature (1)..(311): NCBI GI: 261197225 Blast Desc: mannan polymerase II complex ANP1 subunit [Ajellomyces dermatitidis SLH14081] gi|239595645|gb|EEQ78226.1| mannan polymerase II complex ANP1 subunit [Ajellomyces dermatitidis II
  misc_feature: Useful for introducing or modulating the production of volatile compounds
MLLPKGGMTWKSAKAQLPPTRAVWHFFARTRVILTLAVAGVILLLWRGISSSASEMQSFYCWGPSKAPMEMTLNEQHTWNAHMQTPVIFNHHKPIKVDESTIQHVDLNTVKSTQQAVDNKERILILTPLKDAAPYLAKYFDLLTQLTYPHSLIDLGFLVGDSNDDTLAVLSAELARIQKQKGDKAFNSVVIVEKDFGAIVGQSVEDRHGFEAQGPRRKAMGRARNYLLSATLKPEHSWVYWRDVDIVENPASILEDFISRNRDIIVPNIWFHRYENNRDIEGRFDYNSWIESPKALKLASKLDKNVVLAEGE

SEQ ID NO: 24967 - DNA, 2642 bp, Muscodor strobelii
  misc_feature: SGI EST ID NO. CUFF.59198.0
  misc_feature: Variant of the nucleotide sequence at SEQ ID NO 24965
ctcgggtcccaggccaggcctctaatcatgcatcaggcccccctgtcatcacgcctgcaaattattcttcggtaggcagtagagaatcttggcaagggtaggagagagagatacgaccagagcgacgttgcagagagcggcacgacaatctccagcgctatcaggtcatctcagatactcgagctggtgcaattcgcgcgttgccgctgctctctttcccgcatccaattttcagcttcatcgtcccgaccgcgatcccgcccatcccgcggcggccaacaaccaccgctgcctttccctcgctttggcacccggcaacgattactcacggcttcgaccacgcgcatcttacgaccccttctcgccatcgccatcagcatcagcatctcatcgtcaccagccctcgccctcgccctcgccgttgcccctttcaattcgacgcgaccctcgaatttccacacacgagctgtacttctcataagcatccatccggcactgtcatccagccatctctgctctcaggcgcacgacgtccactctcccccaagacccctaattcgaactctgtcttcgctgcatagcaagggtggtgtgcagagccgcccggagagctcgtcatgcttcttcccaagggcggaatgacgtggaagtcggcaaaggcccagctgcctcccacgagagcggtgtggcatttcttcgcccggacccgcgtgatcctgaccctggccgtcgccggcgtcatattactgctgtggcgcggcatcagttcctcggccagcgagatgcagagtttctactgctggggcccctcgaaagcgccgatggagatgaccctgaacgagcagcacacctggaacgcccacatgcagacgcccgtcatcttcaaccaccacaagcccatcaaagtcgacgagtccaccatccagcacgtggatctgaacaccgtcaagtcgacacagcaggccgtcgacaacaaggagcgcatcctgatcctgacgcccctcaaggacgccgccccttacctggccaagtacttcgatctcctgacccagctgacatacccccactcgctcatcgacctcggctttcttgtcggtgactccaacgacgacaccctcgctgtgcttagcgccgagctcgctcgcatccagaagcagaagggagacaaagccttcaacagcgtcgtcatcgtcgagaaggacttcggcgccatcgtgggccagagtgtcgaggaccgtcacggcttcgaggcccagggaccccgccggaaagccatgggccgtgccagaaactacctgctttctgccaccctgaagccagagcattcgtgggtctactggcgcgacgtcgacatcgtcgagaaccccgccagcattctcgaggacttcatctcccggaatcgcgacatcatcgttcccaatatctggtttcatcgctacgaaaacaacagagacatcgagggcagatttgattacaattcatggatcgaatctcccaaggcactgaagctcgcaagcaagctcgacaagaatgtggtcttggctgaaggctacaaacagtacgacacgggcagaaattacatggcactcatgggcgacagaggagcaaatcaaatggaagagatcgagctcgatggtatcggcggtgtcagcattttggtcaaggccgatgtccaccgatcaggtctgtgccatttgcactactcatcccccggcacctactgacagcttgcaggtatcaatttccccgcgtacgcgtttgagaaccaagcagagaccgagggcttcgccaagatggccaaaagagccggatacgaagtcatcggcctgccgaactacgttgtctggcacatcgacaccgaagagaagcctggtaacatgctttagacgagtcgacatggaaatattccactctgcttttgacatgccatcaccttgcatcatctcgatcataactgcatttctttcagcctgagctgtctcgatgtgatattgggaacataagcacctgtacgaaaagtcacgacacgcgcattcagccatcggatttgcaaccgatttggcccagcggagtttgaaggggatttggggctgtgtttttttgacttgcttttatccgtttctggtagaccattgctgagctatcggcgctcgacctgctggcatctctcatattatcccttcagctcagtctgtgccttgcgaactatccgaagtaatggtttggataggttgcccgtgcatattcccactggagggccagctagcgtgctgatatgcgctctattgcgcgaatgagacacgaagctagagtttgttccgcatgtcgacggtacgtgacgactacggcgtcatgggtccgggacagaagacatgaaacaggggtgcggcagccacaagagacaactgactaattaatatataccatgtactattgttacgatagtatagctggaagctgtgtataagtacgagaagtactgggtagagcaacccctgcggagtattgttttaggcatagagagtttgggggctatggtatcaataaattgttctcgattaattgaatatgtcgatctgtgcactactgccgactgatggatgcccaggtttcgaacaacgaaatgataaagcacaatcgaa

SEQ ID NO: 24968 - DNA, 1218 bp, Muscodor strobelii
  misc_feature: SGI cDNA ID NO. 568519
  misc_feature: Encodes the peptide sequence at SEQ ID NO 24969
atgcttcttcccaagggcggaatgacgtggaagtcggcaaaggcccagctgcctcccacgagagcggtgtggcatttcttcgcccggacccgcgtgatcctgaccctggccgtcgccggcgtcatattactgctgtggcgcggcatcagttcctcggccagcgagatgcagagtttctactgctggggcccctcgaaagcgccgatggagatgaccctgaacgagcagcacacctggaacgcccacatgcagacgcccgtcatcttcaaccaccacaagcccatcaaagtcgacgagtccaccatccagcacgtggatctgaacaccgtcaagtcgacacagcaggccgtcgacaacaaggagcgcatcctgatcctgacgcccctcaaggacgccgccccttacctggccaagtacttcgatctcctgacccagctgacatacccccactcgctcatcgacctcggctttcttgtcggtgactccaacgacgacaccctcgctgtgcttagcgccgagctcgctcgcatccagaagcagaagggagacaaagccttcaacagcgtcgtcatcgtcgagaaggacttcggcgccatcgtgggccagagtgtcgaggaccgtcacggcttcgaggcccagggaccccgccggaaagccatgggccgtgccagaaactacctgctttctgccaccctgaagccagagcattcgtgggtctactggcgcgacgtcgacatcgtcgagaaccccgccagcattctcgaggacttcatctcccggaatcgcgacatcatcgttcccaatatctggtttcatcgctacgaaaacaacagagacatcgagggcagatttgattacaattcatggatcgaatctcccaaggcactgaagctcgcaagcaagctcgacaagaatgtggtcttggctgaaggctacaaacagtacgacacgggcagaaattacatggcactcatgggcgacagaggagcaaatcaaatggaagagatcgagctcgatggtatcggcggtgtcagcattttggtcaaggccgatgtccaccgatcaggtatcaatttccccgcgtacgcgtttgagaaccaagcagagaccgagggcttcgccaagatggccaaaagagccggatacgaagtcatcggcctgccgaactacgttgtctggcacatcgacaccgaagagaagcctggtaacatgctttag

SEQ ID NO: 24969 - protein, 405 aa, Muscodor strobelii
  misc_feature: SGI Peptide ID NO. 568519
  misc_feature (71)..(399): Pfam Id: PF03452 Pfam Desc: Anp1
  misc_feature (90)..(399): Pfam Id: PF03452 Pfam Desc: Anp1
  misc_feature (1)..(403): NCBI GI: 28950141 Blast Desc: ANP1 protein [Neurospora crassa]
  misc_feature (1)..(404): NCBI GI: 39975765 Blast Desc: conserved [Magnaporthe grisea 70-15] gi|145011496|gb|EDJ96152.1| conserved [Magnaporthe grisea 70-15]
  misc_feature (1)..(404): NCBI GI: 171694383 Blast Desc: protein product [Podospora anserina] gi|170947140|emb|CAP73945.1| protein product [Podospora anserina]
  misc_feature (1)..(404): NCBI GI: 115398267 Blast Desc: mannan polymerase II complex ANP1 subunit [Aspergillus terreus NIH2624] gi|114192916|gb|EAU34616.1| mannan polymerase II complex ANP1 subunit [Aspergillus terreus NIH2624]
  misc_feature (1)..(404): NCBI GI: 258568242 Blast Desc: UREG_05554 [Uncinocarpus reesii 1704] gi|237906311|gb|EEP80712.1| UREG_05554 [Uncinocarpus reesii 1704]
  misc_feature (1)..(404): NCBI GI: 70994724 Blast Desc: N-glycosyl-transferase [Aspergillus fumigatus Af293] gi|66849773|gb|EAL90101.1| N-glycosyl-transferase [Aspergillus fumigatus Af293] gi|159124946|gb|EDP50063.1| [Aspergillus A1163]
  misc_feature (1)..(403): NCBI GI: 164423751 Blast Desc: NCU08939 [Neurospora crassa OR74A] gi|157070221|gb|EAA31570.2| NCU08939 [Neurospora crassa OR74A]
  misc_feature (1)..(404): NCBI GI: 145256708 Blast Desc: An04g01260 [Aspergillus niger] gi|134058398|emb|CAK38583.1| protein product [Aspergillus niger]
  misc_feature (1)..(404): NCBI GI: 116197679 Blast Desc: CHGG_06995 [Chaetomium globosum CBS 148.51] gi|88178274|gb|EAQ85742.1| CHGG_06995 [Chaetomium globosum CBS 148.51]
  misc_feature (1)..(404): NCBI GI: 261197225 Blast Desc: mannan polymerase II complex ANP1 subunit [Ajellomyces dermatitidis SLH14081] gi|239595645|gb|EEQ78226.1| mannan polymerase II complex ANP1 subunit [Ajellomyces dermatitidis II
MLLPKGGMTWKSAKAQLPPTRAVWHFFARTRVILTLAVAGVILLLWRGISSSASEMQSFYCWGPSKAPMEMTLNEQHTWNAHMQTPVIFNHHKPIKVDESTIQHVDLNTVKSTQQAVDNKERILILTPLKDAAPYLAKYFDLLTQLTYPHSLIDLGFLVGDSNDDTLAVLSAELARIQKQKGDKAFNSVVIVEKDFGAIVGQSVEDRHGFEAQGPRRKAMGRARNYLLSATLKPEHSWVYWRDVDIVENPASILEDFISRNRDIIVPNIWFHRYENNRDIEGRFDYNSWIESPKALKLASKLDKNVVLAEGYKQYDTGRNYMALMGDRGANQMEEIELDGIGGVSILVKADVHRSGINFPAYAFENQAETEGFAKMAKRAGYEVIGLPNYVVWHIDTEEKPGNML

SEQ ID NO: 24970 - DNA, 2642 bp, Muscodor strobelii; identical to SEQ ID NO: 24967
  misc_feature: SGI EST ID NO. CUFF.59198.0
  misc_feature: Variant of the nucleotide sequence at SEQ ID NO 24968

SEQ ID NO: 24971 - DNA, 255 bp, Muscodor strobelii
  misc_feature: SGI cDNA ID NO. 568520
  misc_feature: Reduced expression when VOC is produced
  misc_feature: Encodes the peptide sequence at SEQ ID NO 24972
atggcactcatgggcgacagaggagcaaatcaaatggaagagatcgagctcgatggtatcggcggtgtcagcattttggtcaaggccgatgtccaccgatcaggtatcaatttccccgcgtacgcgtttgagaaccaagcagagaccgagggcttcgccaagatggccaaaagagccggatacgaagtcatcggcctgccgaactacgttgtctggcacatcgacaccgaagagaagcctggtaacatgctttag

SEQ ID NO: 24972 - protein, 84 aa, Muscodor strobelii
  misc_feature: SGI Peptide ID NO. 568520
  misc_feature (13)..(78): Pfam Id: PF03452 Pfam Desc: Anp1
  misc_feature (1)..(82): NCBI GI: 261352077 Blast Desc: MNN9 [Verticillium albo-atrum VaMs.102]
  misc_feature (1)..(82): NCBI GI: 154300992 Blast Desc: BC1G_10634 [Botryotinia fuckeliana B05.10] gi|150856382|gb|EDN31574.1| BC1G_10634 [Botryotinia fuckeliana B05.10]
  misc_feature (1)..(82): NCBI GI: 156043145 Blast Desc: SS1G_10575 [Sclerotinia sclerotiorum 1980] gi|154694963|gb|EDN94701.1| SS1G_10575 [Sclerotinia sclerotiorum 1980]
  misc_feature (4)..(83): NCBI GI: 255949848 Blast Desc: Pc22g17820 [Penicillium chrysogenum Wisconsin 54-1255] gi|211592708|emb|CAP99070.1| Pc22g17820 [Penicillium chrysogenum Wisconsin 54-1255]
  misc_feature (4)..(83): NCBI GI: 145256708 Blast Desc: An04g01260 [Aspergillus niger] gi|134058398|emb|CAK38583.1| protein product [Aspergillus niger]
  misc_feature (1)..(83): NCBI GI: 225560483 Blast Desc: N-glycosyl-transferase [Ajellomyces capsulatus G186AR]
  misc_feature (1)..(83): NCBI GI: 240280042 Blast Desc: mannosyltransferase complex subunit [Ajellomyces capsulatus H143]
  misc_feature (4)..(83): NCBI GI: 259482794 Blast Desc: TPA: N-glycosyl-transferase (AFU_orthologue; AFUA_4G06870) [Aspergillus nidulans FGSC A4]
  misc_feature (4)..(83): NCBI GI: 242765855 Blast Desc: N-glycosyl-transferase [Talaromyces stipitatus ATCC 10500] gi|218724254|gb|EED23671.1| N-glycosyl-transferase [Talaromyces stipitatus ATCC 10500]
  misc_feature (1)..(83): NCBI GI: 242765860 Blast Desc: N-glycosyl-transferase [Talaromyces stipitatus ATCC 10500] gi|218724255|gb|EED23672.1| N-glycosyl-transferase [Talaromyces stipitatus ATCC 10500]
  misc_feature: Useful for introducing or modulating the production of volatile compounds
MALMGDRGANQMEEIELDGIGGVSILVKADVHRSGINFPAYAFENQAETEGFAKMAKRAGYEVIGLPNYVVWHIDTEEKPGNML

SEQ ID NO: 24973 - DNA, 2591 bp, Muscodor strobelii
  misc_feature: SGI EST ID NO. CUFF.59198.1
  misc_feature: Variant of the nucleotide sequence at SEQ ID NO 24971
ctcgggtcccaggccaggcctctaatcatgcatcaggcccccctgtcatcacgcctgcaaattattcttcggtaggcagtagagaatcttggcaagggtaggagagagagatacgaccagagcgacgttgcagagagcggcacgacaatctccagcgctatcaggtcatctcagatactcgagctggtgcaattcgcgcgttgccgctgctctctttcccgcatccaattttcagcttcatcgtcccgaccgcgatcccgcccatcccgcggcggccaacaaccaccgctgcctttccctcgctttggcacccggcaacgattactcacggcttcgaccacgcgcatcttacgaccccttctcgccatcgccatcagcatcagcatctcatcgtcaccagccctcgccctcgccctcgccgttgcccctttcaattcgacgcgaccctcgaatttccacacacgagctgtacttctcataagcatccatccggcactgtcatccagccatctctgctctcaggcgcacgacgtccactctcccccaagacccctaattcgaactctgtcttcgctgcatagcaagggtggtgtgcagagccgcccggagagctcgtcatgcttcttcccaagggcggaatgacgtggaagtcggcaaaggcccagctgcctcccacgagagcggtgtggcatttcttcgcccggacccgcgtgatcctgaccctggccgtcgccggcgtcatattactgctgtggcgcggcatcagttcctcggccagcgagatgcagagtttctactgctggggcccctcgaaagcgccgatggagatgaccctgaacgagcagcacacctggaacgcccacatgcagacgcccgtcatcttcaaccaccacaagcccatcaaagtcgacgagtccaccatccagcacgtggatctgaacaccgtcaagtcgacacagcaggccgtcgacaacaaggagcgcatcctgatcctgacgcccctcaaggacgccgccccttacctggccaagtacttcgatctcctgacccagctgacatacccccactcgctcatcgacctcggctttcttgtcggtgactccaacgacgacaccctcgctgtgcttagcgccgagctcgctcgcatccagaagcagaagggagacaaagccttcaacagcgtcgtcatcgtcgagaaggacttcggcgccatcgtgggccagagtgtcgaggaccgtcacggcttcgaggcccagggaccccgccggaaagccatgggccgtgccagaaactacctgctttctgccaccctgaagccagagcattcgtgggtctactggcgcgacgtcgacatcgtcgagaaccccgccagcattctcgaggacttcatctcccggaatcgcgacatcatcgttcccaatatctggtttcatcgctacgaaaacaacagagacatcgagggcagatttgattacaattcatggatcgaatctcccaaggcactgaagctcgcaagcaagctcgacaagaatgtggtcttggctgaaggctacaaacagtacgacacgggcagaaattacatggcactcatgggcgacagaggagcaaatcaaatggaagagatcgagctcgatggtatcggcggtgtcagcattttggtcaaggccgatgtccaccgatcaggtatcaatttccccgcgtacgcgtttgagaaccaagcagagaccgagggcttcgccaagatggccaaaagagccggatacgaagtcatcggcctgccgaactacgttgtctggcacatcgacaccgaagagaagcctggtaacatgctttagacgagtcgacatggaaatattccactctgcttttgacatgccatcaccttgcatcatctcgatcataactgcatttctttcagcctgagctgtctcgatgtgatattgggaacataagcacctgtacgaaaagtcacgacacgcgcattcagccatcggatttgcaaccgatttggcccagcggagtttgaaggggatttggggctgtgtttttttgacttgcttttatccgtttctggtagaccattgctgagctatcggcgctcgacctgctggcatctctcatattatcccttcagctcagtctgtgccttgcgaactatccgaagtaatggtttggataggttgcccgtgcatattcccactggagggccagctagcgtgctgatatgcgctctattgcgcgaatgagacacgaagctagagtttgttccgcatgtcgacggtacgtgacgactacggcgtcatgggtccgggacagaagacatgaaacaggggtgcggcagccacaagagacaactgactaattaatatataccatgtactattgttacgatagtatagctggaagctgtgtataagtacgagaagtactgggtagagcaacccctgcggagtattgttttaggcatagagagtttgggggctatggtatcaataaattgttctcgattaattgaatatgtcgatctgtgcactactgccgactgatggatgcccaggtttcgaacaacgaaatgataaagcacaatcgaa

SEQ ID NO: 24974 - DNA, 369 bp, Muscodor strobelii
  misc_feature: SGI cDNA ID NO. 568521
  misc_feature: Reduced expression when VOC is produced
  misc_feature: Encodes the peptide sequence at SEQ ID NO 24975
atggtgtctctcgcccccttcgtctccaagcgcccttggctgctcaagatgctgcagcccatcgccggctggtacgccaatgccgccggctaccgccagctcggcctccgcgccgacgacttgatcatcgaggagaacgagaccgtcatcgccgccctcaagcgtctcccgccccaggagtcttacgaccgcgtctaccgcctgcgtcgcgccctgcagtgctccgtctcccacaagctgctgcccaaggaccagtggaccaagcccgaggaggatatgccatacctctcccccatcatcgcccagatccaagccgccgaggccgagaaggaagacctcgacagcctgactatcgtcaagaaccattaa

SEQ ID NO: 24975 - protein, 122 aa, Muscodor strobelii
  misc_feature: SGI Peptide ID NO. 568521
  misc_feature (8)..(112): Pfam Id: PF02271 Pfam Desc: Ubiquinol-cytochrome C reductase complex 14kD subunit
  misc_feature (3)..(121): NCBI GI: 85099543 Blast Desc: ubiquinol-cytochrome c reductase complex 14 kDa protein [Neurospora crassa OR74A] gi|51702003|sp|Q871K1.1|QCR7_NEUCR RecName: Full=Cytochrome b-c1
  misc_feature (8)..(122): NCBI GI: 116197681 Blast Desc: CHGG_06996 [Chaetomium globosum CBS 148.51] gi|88178275|gb|EAQ85743.1| CHGG_06996 [Chaetomium globosum CBS 148.51]
  misc_feature (3)..(120): NCBI GI: 189196786 Blast Desc: ubiquinol-cytochrome c reductase complex 14 kDa protein [Pyrenophora tritici-repentis Pt-1C-BFP] gi|187980610|gb|EDU47236.1| ubiquinol-cytochrome c reductase 14
  misc_feature (3)..(120): NCBI GI: 169604618 Blast Desc: SNOG_05323 [Phaeosphaeria nodorum SN15] gi|111066594|gb|EAT87714.1| SNOG_05323 [Phaeosphaeria nodorum SN15]
  misc_feature (3)..(122): NCBI GI: 46137555 Blast Desc: FG10293.1 [Gibberella zeae PH-1]
  misc_feature (3)..(119): NCBI GI: 39975763 Blast Desc: ubiquinol-cytochrome C reductase-like protein [Magnaporthe grisea 70-15] gi|59802885|gb|AAX07655.1| ubiquinol-cytochrome C reductase-like protein [Magnaporthe C
  misc_feature (3)..(118): NCBI GI: 226281825 Blast Desc: PAAG_07672 [Paracoccidioides brasiliensis Pb01]
  misc_feature (3)..(116): NCBI GI: 171694381 Blast Desc: protein product [Podospora anserina] gi|170947139|emb|CAP73944.1| protein product [Podospora anserina]
  misc_feature (3)..(118): NCBI GI: 225683648 Blast Desc: [Paracoccidioides brasiliensis Pb03] gi|226293002|gb|EEH48422.1| conserved [Paracoccidioides brasiliensis Pb18]
  misc_feature (3)..(121): NCBI GI: 212528648 Blast Desc: ubiquinol-cytochrome c reductase complex 14 kDa protein [Penicillium marneffei ATCC 18224] gi|210073879|gb|EEA27966.1| ubiquinol-cytochrome c reductase 14
  misc_feature: Useful for introducing or modulating the production of volatile compounds
MVSLAPFVSKRPWLLKMLQPIAGWYANAAGYRQLGLRADDLIIEENETVIAALKRLPPQESYDRVYRLRRALQCSVSHKLLPKDQWTKPEEDMPYLSPIIAQIQAAEAEKEDLDSLTIVKNH

SEQ ID NO: 24976 - DNA, 883 bp, Muscodor strobelii
  misc_feature: SGI EST ID NO. CUFF.58942.1
  misc_feature: Variant of the nucleotide sequence at SEQ ID NO 24974
ccatagctggcgcgattttgagtgcagaacgcaagcagagcaatccatcgcaacctcaaagcgacccttcgccgacgacgaccgtctctccacaaccacctcgtcaatcccgttcatcgactccgaatcgcccacaatggtgtctctcgcccccttcgtctccaagcgcccttggctgctcaagatgctgcagcccatcgccggctggtacgccaatgccgccggctaccgccagctcggcctccgcgccgacgacttgatcatcgaggagaacgagaccgtcatcgccgccctcaagcgtctcccgccccaggagtcttacgaccgcgtctaccgcctgcgtcgcgccctgcagtgctccgtctcccacaagctgctgcccaaggaccagtggaccaagcccgaggaggatatgccatacctctcccccatcatcgcccagatccaagccgccgaggccgagaaggaagacctcgacagcctgactatcgtcaagaaccattaaaccaccttccgccgtcatacgcaaccccccagcgaagaagacatcaatgacagcgctgtaaacaagtacgagcaggcagacagcgacgggcagggccatagaaacggaggatggatgaatggccgaattactactatcatgtacaataccagtcaatatcccccactgcatagagatcggatcaaatcgaggcaatagacgagttccttttgtgaggcatacagatacatgactttttacaagatgatgcaaatcaaaagctgacgtatatcatccttttgttgagagatcactgtgcgcctataggcatacctcctcagcatgggacccgttctgggctatttgatatctcgattttatatttatctcgaaattcgc

SEQ ID NO: 24977 - DNA, 1344 bp, Muscodor strobelii
  misc_feature: SGI cDNA ID NO. 568522
  misc_feature: Reduced expression when VOC is produced
  misc_feature: Encodes the peptide sequence at SEQ ID NO 24978
atgtctcacggcgaatccgccaagggccgtcccgctgctgaaagctcctcgactgactctccggaatatggggtgttctccaatcgctcgtccccttcgactaccgcctcccccggtgcgtcggaaaacgcccactcgtctctcgcatcgtctgctgtagctgctatggatctccgcgacgcaaggggcttgagcccgctgcagcgctgggcggccggtgcctcggacacccaattcaatgcactctccggtgccatcggcggcttcacttccggcgttgtcacgtgtcctctcgacgtcatcaagaccaagctgcaagcccagggtggctttttaccagtatctaagggtaggcatgtcggtcatcacaaggtgtattcgggtctcgtcggcacaacgagggtcatatggaaagaagaaggactgcgcggcatgtatcgaggtttggggcccatcatcttgggatatctacctacatgggccgtttggttcaccgtctacaacaagagcaagaagttcatggcagataatcatgtgcacaatcagtttgctatcaacttctggtcctcgattgtggccggagccagcagcacgatagtcacgaaccccatatgggtcatcaaaaccaggctcatgtcccagtcatccaaaggctataaccgagagatgtcggtatttcccaggtcaggaaacaccccgacgtcaagaccaactatcaactcgccttggcattatcactccacaatcgacgccgctcgcaagatgtactcatccgagggcatattatccttctactccggtctcaccccggcactgcttggtctcacacacgtcgccgttcaattccccgcatacgagtttctccgaaagaagtttacaggccaaggcatgggtgaaatgacagacgacaacacacagcaaacacactggctcggcgtgctatcagcttcgatattatcaaagatcatggccagctcagccacatacccccacgaagtcatccgaacgcggctccagacacagaggcggcccacgccgggcgtcgaatacctgcagggccttggcgttagcgaaagtggtcaaggccaggcgtctaacggagcgaagggcatgaaccacgagccgaaatacagaggcgtcgtcatgaccttccggacgatattacgtgaggagggctggagggcgttctacgccggcatgggtgtcaacatgatgcgcgctgtcccggcggccaccgtcactatgatgacgtatgagtttgccatgaagagcctgcatcacgcgcagtctgaggggcggcggaagatggctgagggtatttcgggggtcatacctgagccttaa

SEQ ID NO: 24978 - protein, 447 aa, Muscodor strobelii
  misc_feature: SGI Peptide ID NO. 568522
  misc_feature (76)..(178): Pfam Id: PF00153 Pfam Desc: Mitochondrial carrier protein
  misc_feature (309)..(429): Pfam Id: PF00153 Pfam Desc: Mitochondrial carrier protein
  misc_feature (186)..(296): Pfam Id: PF00153 Pfam Desc: Mitochondrial carrier protein
  misc_feature (11)..(439): NCBI GI: 171694379 Blast Desc: protein product [Podospora anserina] gi|170947138|emb|CAP73943.1| protein product [Podospora anserina]
  misc_feature (62)..(438): NCBI GI: 39975761 Blast Desc: MGG_06193 [Magnaporthe grisea 70-15] gi|145011494|gb|EDJ96150.1| MGG_06193 [Magnaporthe grisea 70-15]
  misc_feature (38)..(438): NCBI GI: 46137559 Blast Desc: FG10295.1 [Gibberella zeae PH-1]
  misc_feature (5)..(436): NCBI GI: 261352079 Blast Desc: NAD+ transporter [Verticillium albo-atrum VaMs.102]
  misc_feature (64)..(438): NCBI GI: 256731838 Blast Desc: NECHADRAFT_40983 [Nectria haematococca mpVI 77-13-4]
  misc_feature (11)..(438): NCBI GI: 85099548 Blast Desc: NCU08941 [Neurospora crassa OR74A] gi|28922333|gb|EAA31572.1| conserved [Neurospora crassa OR74A] gi|28950143|emb|CAD71001.1| related to folate transporter/carrier
  misc_feature (41)..(438): NCBI GI: 154300996 Blast Desc: BC1G_10636 [Botryotinia fuckeliana B05.10] gi|150856384|gb|EDN31576.1| BC1G_10636 [Botryotinia fuckeliana B05.10]
  misc_feature (28)..(419): NCBI GI: 156043149 Blast Desc: SS1G_10577 [Sclerotinia sclerotiorum 1980] gi|154694965|gb|EDN94703.1| SS1G_10577 [Sclerotinia sclerotiorum 1980]
  misc_feature (65)..(440): NCBI GI: 256723344 Blast Desc: NECHADRAFT_51812 [Nectria haematococca mpVI 77-13-4]
  misc_feature (60)..(436): NCBI GI: 121706612 Blast Desc: mitochondrial carrier protein, [Aspergillus clavatus NRRL 1] gi|119399716|gb|EAW10142.1| mitochondrial carrier protein, [Aspergillus clavatus NRRL 1]
  misc_feature: Useful for introducing or modulating the production of volatile compounds
MSHGESAKGRPAAESSSTDSPEYGVFSNRSSPSTTASPGASENAHSSLASSAVAAMDLRDARGLSPLQRWAAGASDTQFNALSGAIGGFTSGVVTCPLDVIKTKLQAQGGFLPVSKGRHVGHHKVYSGLVGTTRVIWKEEGLRGMYRGLGPIILGYLPTWAVWFTVYNKSKKFMADNHVHNQFAINFWSSIVAGASSTIVTNPIWVIKTRLMSQSSKGYNREMSVFPRSGNTPTSRPTINSPWHYHSTIDAARKMYSSEGILSFYSGLTPALLGLTHVAVQFPAYEFLRKKFTGQGMGEMTDDNTQQTHWLGVLSASILSKIMASSATYPHEVIRTRLQTQRRPTPGVEYLQGLGVSESGQGQASNGAKGMNHEPKYRGVVMTFRTILREEGWRAFYAGMGVNMMRAVPAATVTMMTYEFAMKSLHHAQSEGRRKMAEGISGVIPEP

SEQ ID NO: 24979 - DNA, 2745 bp, Muscodor strobelii
  misc_feature: SGI EST ID NO. CUFF.58935.1
  misc_feature: Variant of the nucleotide sequence at SEQ ID NO 24977
cagcaagttggagagattttaggtgaatgatggtagagcaaagagatatggcataagtcgactataattcacgcgaacccttagaatgaaacctttattccgtaaggccatttgcacaattgaaatatccgtctttgttggactagggagtagtagcactattgtttccatgtattgataagaaaggtacctacaccacgtaactcgatcatcgacatctcaacaaatagagacgaagcgtcccacgacagaaacgaagactaaatagttgcacgagtcgcacgccgaggcttaaaaccgcatcatccagctgtctgttcatttatctcgtcgctttcaatcggctcctcgcgacttcgaaaggaagggcagtagacgaccaagatctaagaagtccccagtcgcacgagagagagagagagagacgagacccgctccccaagactccaaagcccggttccgataatctccatctcacctctgcgcatcttttcgcagctagagctgccgcttgctactcatcacgcaaccacctacggttcacctcccattctctctttttcgtcctatcccctttaacaatccttatctcacatttccggcgacttattcaccctcagacgaaatatttataactcggcgaccattttatcggctcgaatccacaatatctctcgctcacctgtggacgtcaatggcatgcagtagacggtagctatcgtgtcgacggtggacttgcgagggtcgttccccgcacaccgcacgatcaccaccaccaccaccaccaccaccacgacggctatctactgctccatactccgcccctgcagcctctttgacgaccgctgagctcacggccagctgcacgcgaccaccgaccactcgttcgcttcacatgagcctactccgcaggctttctcttctgtccctgcaaccctgaccgactccgagcaacgtccttcaacagctcttcggggcctctatctgtctctagaggccccaattgtccccggcttgcaccgtcctggtctggactgccttaccagcgaagaggaatgtctcacggcgaatccgccaagggccgtcccgctgctgaaagctcctcgactgactctccggaatatggggtgttctccaatcgctcgtccccttcgactaccgcctcccccggtgcgtcggaaaacgcccactcgtctctcgcatcgtctgctgtagctgctatggatctccgcgacgcaaggggcttgagcccgctgcagcgctgggcggccggtgcctcggacacccaattcaatgcactctccggtgccatcggcggcttcacttccggcgttgtcacgtgtcctctcgacgtcatcaagaccaagctgcaagcccagggtggctttttaccagtatctaagggtaggcatgtcggtcatcacaaggtgtattcgggtctcgtcggcacaacgagggtcatatggaaagaagaaggactgcgcggcatgtatcgaggtttggggcccatcatcttgggatatctacctacatgggccgtttggttcaccgtctacaacaagagcaagaagttcatggcagataatcatgtgcacaatcagtttgctatcaacttctggtcctcgattgtggccggagccagcagcacgatagtcacgaaccccatatgggtcatcaaaaccaggctcatgtcccagtcatccaaaggctataaccgagagatgtcggtatttcccaggtcaggaaacaccccgacgtcaagaccaactatcaactcgccttggcattatcactccacaatcgacgccgctcgcaagatgtactcatccgagggcatattatccttctactccggtctcaccccggcactgcttggtctcacacacgtcgccgttcaattccccgcatacgagtttctccgaaagaagtttacaggccaaggcatgggtgaaatgacagacgacaacacacagcaaacacactggctcggcgtgctatcagcttcgatattatcaaagatcatggccagctcagccacatacccccacgaagtcatccgaacgcggctccagacacagaggcggcccacgccgggcgtcgaatacctgcagggccttggcgttagcgaaagtggtcaaggccaggcgtctaacggagcgaagggcatgaaccacgagccgaaatacagaggcgtcgtcatgaccttccggacgatattacgtgaggagggctggagggcgttctacgccggcatgggtgtcaacatgatgcgcgctgtcccggcggccaccgtcactatgatgacgtatgagtttgccatgaagagcctgcatcacgcgcagtctgaggggcggcggaagatggctgagggtatttcgggggtcatacctgagccttaatgactgacattctgagcttgaagccttgaggagcagctgaaataagacttagtggggtttcaagaagatgtgtttagaggatgatcaacaaacaaagttgaatgtttattatggacaaatacctagtcttttttgcgtacataaagcagagcaagagaaacagaaagaggcagatctggggattgcatgggatggggacaggagagataggggttggttcctatctacttggtgatacgatacccattctttgtaggtatagacgcacaatgcaaactgcgatgcaatgcgaactcaagaactgaagccttcttcgtgatttaagacagaaacaaagtagagacga

SEQ ID NO: 24980 - DNA, 441 bp, Muscodor strobelii
  misc_feature: SGI cDNA ID NO. 568523
  misc_feature: Encodes the peptide sequence at SEQ ID NO 24981
atgcagttcctcactactctcgccgctctcgtcgccacgcttggcctcggtgccaacgccttgcctcagcctgaggtcggtcgcgtcaattctttcgagggaacctgcaagaacatgcagattgatgacgtacaacccagtgaaagcacatggctttacgcagactgcaagaccgagcgtggtgactggatcacatctatgcttggcctgcaactgtgcattgctaacatgggcggtaccttggttggtgcgtccaatggcgacttccgcaagagctgcagggacgtcgatatcagggtcgacactaccatcacagccacttgtgaggatggcaagcccaatggacatacgaatgctcagattcggctcagcgacttcgtctacaaccagaacggtttcctgggatgcttcgacaacgttggcgaaaagaagcccttctga

SEQ ID NO: 24981 - protein, 146 aa, Muscodor strobelii
  misc_feature: SGI Peptide ID NO. 568523
  misc_feature (31)..(136): Pfam Id: PF08881 Pfam Desc: CVNH domain
  misc_feature (1)..(141): NCBI GI: 240106706 Blast Desc: CPC735_014910 [Coccidioides posadasii C735 delta SOWgp]
  misc_feature (1)..(141): NCBI GI: 119174136 Blast Desc: [Coccidioides immitis RS]
  misc_feature (22)..(137): NCBI GI: 145611548 Blast Desc: [Magnaporthe grisea 70-15] gi|145018814|gb|EDK03093.1| [Magnaporthe grisea 70-15]
  misc_feature (66)..(143): NCBI GI: 171687967 Blast Desc: protein product [Podospora anserina] gi|170943945|emb|CAP69597.1| protein product [Podospora anserina]
  misc_feature (57)..(143): NCBI GI: 261357524 Blast Desc: [Verticillium albo-atrum VaMs.102]
  misc_feature (20)..(137): NCBI GI: 46138215 Blast Desc: FG10622.1 [Gibberella zeae PH-1]
  misc_feature (32)..(99): NCBI GI: 46109612 Blast Desc: FG01688.1 [Gibberella zeae PH-1]
  misc_feature (1)..(142): NCBI GI: 119174132 Blast Desc: [Coccidioides immitis RS]
MQFLTTLAALVATLGLGANALPQPEVGRVNSFEGTCKNMQIDDVQPSESTWLYADCKTERGDWITSMLGLQLCIANMGGTLVGASNGDFRKSCRDVDIRVDTTITATCEDGKPNGHTNAQIRLSDFVYNQNGFLGCFDNVGEKKPF

SEQ ID NO: 24982 - DNA, 181 bp, Muscodor strobelii
  misc_feature: SGI EST ID NO. CUFF.58852.0
  misc_feature: Variant of the nucleotide sequence at SEQ ID NO 24980
tcggctcagcgacttcgtctacaaccagaacggtttcctgggatgcttcgacaacgttggcgaaaagaagcccttctgaggggacagtgagtgctcttgattgcagtaccggatattattgagattgcctgctctttctatccactggcggctgcaaagagaggatggggtttctgagagc

SEQ ID NO: 24983 - DNA, 927 bp, Muscodor strobelii
  misc_feature: SGI cDNA ID NO. 568524
  misc_feature: Encodes the peptide sequence at SEQ ID NO 24984
atggacgcacaagacaaacccaattacaagctagcctccgatgctgtctggttcatcactggatgctcgtctggtattggccaatctctggccgaagtcatctcccagtcttcaaaccgggtcgtcgccaccgctcggaagatctctgcactagcgagcattccggaaagcgaccgagttctgaaactcgaactggatgtgacatctcaaaagcagatcgatgccgctttcgaggctagcatcgcgaaatttggtcgcatcgatgtcatcgtcaacaatgccgggtatacgcttgcaggtgatactgagggcgccggagatggagaggctcgcgcactcatggacaccaatttctggggaatggtagacgttactaaaaaggctttacctgttcttagagaagtgaacccaaaaacgggacagcaaggcggtgtaattatcaacattagctcaatgggaggctggacgggttatccaggccaggccttctatcacgcctccaaatttgccatggaagggttcaccgaagctcttgccaaggaattgccagcctcttggaatatccacttgaccaatattgagcccggaggcgttaagaccaactacgcaacttcatcactgaaaccaatggccaatagacaccacgcgtattctcagccagactcgccaacaaatatgttgctttcttacatgcaaagcgagcagggacgtgccatgtgggcagaaccacgtgcgctagccgccgctatctatgaggtcgtcaatcgtggacagagaattcctattcgcgttcccctaggggcagatgcttggggaatgatcgcaaaggatctggaagataccaaggctgatctcgaagaagttaagagcattagtcttagcgtaggtgacgaaagacagctcgatacgatcaattttctgaagtaa

SEQ ID NO: 24984 - protein, 308 aa, Muscodor strobelii
  misc_feature: SGI Peptide ID NO. 568524
  misc_feature (15)..(183): Pfam Id: PF00106 Pfam Desc: short chain dehydrogenase
  misc_feature (1)..(294): NCBI GI: 39944586 Blast Desc: MGG_04304 [Magnaporthe grisea 70-15] gi|145015044|gb|EDJ99612.1| MGG_04304 [Magnaporthe grisea 70-15]
  misc_feature (13)..(290): NCBI GI: 115402205 Blast Desc: [Aspergillus terreus NIH2624] gi|114189025|gb|EAU30725.1| [Aspergillus terreus NIH2624]
  misc_feature (26)..(304): NCBI GI: 154319734 Blast Desc: BC1G_02348 [Botryotinia fuckeliana B05.10] gi|150856006|gb|EDN31198.1| BC1G_02348 [Botryotinia fuckeliana B05.10]
  misc_feature (4)..(307): NCBI GI: 156046230 Blast Desc: SS1G_09374 [Sclerotinia sclerotiorum 1980] gi|154693769|gb|EDN93507.1| SS1G_09374 [Sclerotinia sclerotiorum 1980]
  misc_feature (11)..(296): NCBI GI: 242767199 Blast Desc: 3-oxoacyl-[acyl-carrier-protein] reductase, [Talaromyces stipitatus ATCC 10500] gi|218724519|gb|EED23936.1| 3-oxoacyl-[acyl-carrier-protein] reductase, [Talaromyces ATCC
  misc_feature (1)..(292): NCBI GI: 156051630 Blast Desc: SS1G_07222 [Sclerotinia sclerotiorum 1980] gi|154705000|gb|EDO04739.1| SS1G_07222 [Sclerotinia sclerotiorum 1980]
  misc_feature (1)..(292): NCBI GI: 116182590 Blast Desc: CHGG_01923 [Chaetomium globosum CBS 148.51] gi|88186220|gb|EAQ93688.1| CHGG_01923 [Chaetomium globosum CBS 148.51]
  misc_feature (2)..(292): NCBI GI: 154312790 Blast Desc: BC1G_05096 [Botryotinia fuckeliana B05.10] gi|150849798|gb|EDN24991.1| BC1G_05096 [Botryotinia fuckeliana B05.10]
  misc_feature (11)..(295): NCBI GI: 212528146 Blast Desc: 3-oxoacyl-[acyl-carrier-protein] reductase, [Penicillium marneffei ATCC 18224] gi|210073628|gb|EEA27715.1| 3-oxoacyl-[acyl-carrier-protein] reductase, [Penicillium ATCC
  misc_feature (9)..(293): NCBI GI: 39968489 Blast Desc: MGG_02337 [Magnaporthe grisea 70-15] gi|145014085|gb|EDJ98726.1| MGG_02337 [Magnaporthe grisea 70-15]
  misc_feature (16)..(202): SWISSPROT Homolog: EC 1.1.1.62 Estradiol 17-beta-dehydrogenase
MDAQDKPNYKLASDAVWFITGCSSGIGQSLAEVISQSSNRVVATARKISALASIPESDRVLKLELDVTSQKQIDAAFEASIAKFGRIDVIVNNAGYTLAGDTEGAGDGEARALMDTNFWGMVDVTKKALPVLREVNPKTGQQGGVIINISSMGGWTGYPGQAFYHASKFAMEGFTEALAKELPASWNIHLTNIEPGGVKTNYATSSLKPMANRHHAYSQPDSPTNMLLSYMQSEQGRAMWAEPRALAAAIYEVVNRGQRIPIRVPLGADAWGMIAKDLEDTKADLEEVKSISLSVGDERQLDTINFLK

SEQ ID NO: 24985 - DNA, 1312 bp, Muscodor strobelii
  misc_feature: SGI EST ID NO. CUFF.58860.0
  misc_feature: Variant of the nucleotide sequence at SEQ ID NO 24983
gagttttcggacttggtcggatttaatgcagaattgaggacttaacaggggcactccggatagctctgcaccaggtcatgatggacttacatgaaacaagtaaagaatacctatataaacaatcagatctaactttgggctgtttaatctttttttatcaaggcaagacctcagtcgcgcattttcctcatactaaacttcttgtgtcttgacttacatcgtaacaatggacgcacaagacaaacccaattacaagctagcctccgatgctgtctggttcatcactggatgctcgtctggtattggccaatctctggccgaagtcatctcccagtcttcaaaccgggtcgtcgccaccgctcggaagatctctgcactagcgagcattccggaaagcgaccgagttctgaaactcgaactggatgtgacatctcaaaagcagatcgatgccgctttcgaggctagcatcgcgaaatttggtcgcatcgatgtcatcgtcaacaatgccgggtatacgcttgcaggtgatactgagggcgccggagatggagaggctcgcgcactcatggacaccaatttctggggaatggtagacgttactaaaaaggctttacctgttcttagagaagtgaacccaaaaacgggacagcaaggcggtgtaattatcaacattagctcaatgggaggctggacgggttatccaggccaggccttctatcacgcctccaaatttgccatggaagggttcaccgaagctcttgccaaggaattgccagcctcttggaatatccacttgaccaatattgagcccggaggcgttaagaccaactacgcaacttcatcactgaaaccaatggccaatagacaccacgcgtattctcagccagactcgccaacaaatatgttgctttcttacatgcaaagcgagcagggacgtgccatgtgggcagaaccacgtgcgctagccgccgctatctatgaggtcgtcaatcgtggacagagaattcctattcgcgttcccctaggggcagatgcttggggaatgatcgcaaaggatctggaagataccaaggctgatctcgaagaagttaagagcattagtcttagcgtaggtgacgaaagacagctcgatacgatcaattttctgaagtaaaaacataatgggcaagttgatgcgcaccttaaaaatgataagtagggcttatcccagcgaggaagatggataccagtcggttcagaagaggtggaaacagcctacattctcccccccccttcatgtccaactcacatgtacgagttgggtattgttaag

SEQ ID NO: 24986 - DNA, 2118 bp, Muscodor strobelii
  misc_feature: SGI cDNA ID NO. 568525
  misc_feature: Encodes the peptide sequence at SEQ ID NO 24987
atggacaaggcgaatgcagacatcgcaccgtttttgtatcgcgatctcgaggggccgcttccttttcgcttactcctcattcacgctggggaaggcgatgcgcctcttgagacttcattggtgcccacaacgatcgacgaggccaagggatcatacgaagcaacttcatatacttggggcgcaccagagaatctcatccagattaaatgtgacgactcgcagctatgggtgcaaagaaacgccttctctatgatgttagatttccgacgaaaggatgagtcgagaagagtatggatagatgcgatttgcatcaatcaatgcgattttgacgaaagggcggctcaggtagctatcatgtaccagatatatcagaatgcggcatctgtccttatctggctggggcagcccgatgagcacagctctgcggccatggaatatgccgcttcactgaacagcaaacagctgatccaagagtttcatgattgtgattttggctcgaactggtacaagttcgctcaaaagtcttatttctttgactcgtcgcgaaagccaagtcaggagacaagcgagccggacaacttgtcagcggccatcgttgaatttctaaatcgaccttggtattctcgtgtttggattcaacaggaagcttcgtcttgtcttgatacacaagttatatgtggtcctcattgtatacggtgggagaatctgtttgcacttgcatggctcatgtgccctccctataccgtcacttggccaagtcatattcacgacaagctcgatcgcacaatcaacaatattcaagcaatgagaataattcaacgagcacgtcactactacttcccagagttatatggtcgaaacgaaatgatagtcacattcgcaggtttggtcgagtttgtatctcgttatggagcaacagatccacgggacagaatctatgctgttggaaatatcgcgcgtgaatgtacagaatggttcgaggttgattatcgtattccgtggcaagtcttatatgccgatatcgcgcgtcgatttctggcagccgattctttgaagttcttgaaaaacgcaggcagggttagacaaagctctgacactatcctcccttcgtgggtaccggactatacatacaaggaagaaagcgattacatgatcgctcagccagtgctatggaaagcaggaggaaacagtattgttccctataccgcaaatactaataaagcacaagacaagatatgtccaatacccaagaagaaacaacggcgtgttgccatgccagaaagcgtgcgcctttggaaagatcctcgcaaagcccttcttcagagttctgcatcatttcgctgcttgatgtctgatgagatcatatatgttggtgacttggtggacgttgataatcctcacttggaaatgaatgttaggggcatagccaaaagcattagaaaagatatcgagtacatcgcaacattggagtttcctgactacataaatggagataatctcatcgatgcataccgtctcacactcatcatgggatgcgatgcaaaccaggagatcatcggtgccgagtacgttcaagagcattgggacaagtggtatagctggtatgagaatggctgccccgggtattgggacgaaaagacaccggcgccagctatgaacgcagcattcgagtcctccggagcaacaaccaaattccgcttggcggtcacgaaatacggatatttctgcttagtcccgcgaattgtcgaagtaggagacgaagtcgcaattcttcaatcgtacgaactagcagtcatattgaggcgtcagagaacaacatcaccaccaagtgccgccctggcccagacagcgacaaataagaaaagatcggcggaaatgagcgaccctcctttcttcgagcttctcggcgatggctacatacacggcatgatggaaaatgaagcgcgctgcatcaatgatgagttcaattgcaaatacgaacctgcaccagcgcagtgggaaaagattctgaaagcatccgacggcggtcttggtgagtcctggaagacccttggtctcgatgggaggtatagcagaatattagcaactctggggccaaggccggttcgagtgatctag

SEQ ID NO: 24987 - protein, 705 aa, Muscodor strobelii
  misc_feature: SGI Peptide ID NO. 568525
  misc_feature (52)..(215): Pfam Id: PF06985 Pfam Desc: Heterokaryon incompatibility protein (HET)
  misc_feature (1)..(385): NCBI GI: 256722966 Blast Desc: NECHADRAFT_86875 [Nectria haematococca mpVI 77-13-4]
  misc_feature (22)..(375): NCBI GI: 256728445 Blast Desc: NECHADRAFT_54320 [Nectria haematococca mpVI 77-13-4]
  misc_feature (47)..(655): NCBI GI: 46114550 Blast Desc: FG03117.1 [Gibberella zeae PH-1]
  misc_feature (22)..(377): NCBI GI: 256721799 Blast Desc: NECHADRAFT_53281 [Nectria haematococca mpVI 77-13-4]
  misc_feature (14)..(385): NCBI GI: 154305655 Blast Desc: BC1G_07642 [Botryotinia fuckeliana B05.10] gi|150853161|gb|EDN28353.1| BC1G_07642 [Botryotinia fuckeliana B05.10]
  misc_feature (12)..(375): NCBI GI: 116182272 Blast Desc: CHGG_01764 [Chaetomium globosum CBS 148.51] gi|88186061|gb|EAQ93529.1| CHGG_01764 [Chaetomium globosum CBS 148.51]
  misc_feature (12)..(410): NCBI GI: 145234110 Blast Desc: An02g12950 [Aspergillus niger] gi|134057368|emb|CAK37923.1| protein product [Aspergillus niger]
  misc_feature (32)..(648): NCBI GI: 39976385 Blast Desc: MGG_05881 [Magnaporthe grisea 70-15] gi|145011873|gb|EDJ96529.1| MGG_05881 [Magnaporthe grisea 70-15]
  misc_feature (12)..(376): NCBI GI: 115449831 Blast Desc: [Aspergillus terreus NIH2624] gi|114187656|gb|EAU29356.1| [Aspergillus terreus NIH2624]
  misc_feature (12)..(375): NCBI GI: 256721216 Blast Desc: NECHADRAFT_101059 [Nectria haematococca mpVI 77-13-4]
MDKANADIAPFLYRDLEGPLPFRLLLIHAGEGDAPLETSLVPTTIDEAKGSYEATSYTWGAPENLIQIKCDDSQLWVQRNAFSMMLDFRRKDESRRVWIDAICINQCDFDERAAQVAIMYQIYQNAASVLIWLGQPDEHSSAAMEYAASLNSKQLIQEFHDCDFGSNWYKFAQKSYFFDSSRKPSQETSEPDNLSAAIVEFLNRPWYSRVWIQQEASSCLDTQVICGPHCIRWENLFALAWLMCPPYTVTWPSHIHDKLDRTINNIQAMRIIQRARHYYFPELYGRNEMIVTFAGLVEFVSRYGATDPRDRIYAVGNIARECTEWFEVDYRIPWQVLYADIARRFLAADSLKFLKNAGRVRQSSDTILPSWVPDYTYKEESDYMIAQPVLWKAGGNSIVPYTANTNKAQDKICPIPKKKQRRVAMPESVRLWKDPRKALLQSSASFRCLMSDEIIYVGDLVDVDNPHLEMNVRGIAKSIRKDIEYIATLEFPDYINGDNLIDAYRLTLIMGCDANQEIIGAEYVQEHWDKWYSWYENGCPGYWDEKTPAPAMNAAFESSGATTKFRLAVTKYGYFCLVPRIVEVGDEVAILQSYELAVILRRQRTTSPPSAALAQTATNKKRSAEMSDPPFFELLGDGYIHGMMENEARCINDEFNCKYEPAPAQWEKILKASDGGLGESWKTLGLDGRYSRILATLGPRPVRVI

SEQ ID NO: 24988 - DNA, 2458 bp, Muscodor strobelii
  misc_feature: SGI EST ID NO. CUFF.58875.0
  misc_feature: Variant of the nucleotide sequence at SEQ ID NO 24986
cacatactgcggtattttgaggaggccagctcttgattccaagttcctacgactcgaccaattgcatgcgtcgaatatgacttagaaaagattaatggtaaaagtagcatctgctatagaattcaattctgagctaaaccgcttgcgcactcaatcattcagggacatcttctgattaatataggtctatgtccaggagcaacgaagaggcctaggtcttcatcatggacaaggcgaatgcagacatcgcaccgtttttgtatcgcgatctcgaggggccgcttccttttcgcttactcctcattcacgctggggaaggcgatgcgcctcttgagacttcattggtgcccacaacgatcgacgaggccaagggatcatacgaagcaacttcatatacttggggcgcaccagagaatctcatccagattaaatgtgacgactcgcagctatgggtgcaaagaaacgccttctctatgatgttagatttccgacgaaaggatgagtcgagaagagtatggatagatgcgatttgcatcaatcaatgcgattttgacgaaagggcggctcaggtagctatcatgtaccagatatatcagaatgcggcatctgtccttatctggctggggcagcccgatgagcacagctctgcggccatggaatatgccgcttcactgaacagcaaacagctgatccaagagtttcatgattgtgattttggctcgaactggtacaagttcgctcaaaagtcttatttctttgactcgtcgcgaaagccaagtcaggagacaagcgagccggacaacttgtcagcggccatcgttgaatttctaaatcgaccttggtattctcgtgtttggattcaacaggaagcttcgtcttgtcttgatacacaagttatatgtggtcctcattgtatacggtgggagaatctgtttgcacttgcagtatgcgtttagctccagaatttccctctgagattccgaatactcatcattgtggcatagtggctcatgtgccctccctataccgtcacttggccaagtcatattcacgacaagctcgatcgcacaatcaacaatattcaagcaatgagaataattcaacgagcacgtcactactacttcccagagttatatggtcgaaacgaaatgatagtcacattcgcaggtttggtcgagtttgtatctcgttatggagcaacagatccacgggacagaatctatgctgttggaaatatcgcgcgtgaatgtacagaatggttcgaggttgattatcgtattccgtggcaagtcttatatgccgatatcgcgcgtcgatttctggcagccgattctttgaagttcttgaaaaacgcaggcagggttagacaaagctctgacactatcctcccttcgtgggtaccggactatacatacaaggaagaaagcgattacatgatcgctcagccagtgctatggaaagcaggaggaaacagtattgttccctataccgcaaatactaataaagcacaagacaagatatgtccaatacccaagaagaaacaacggcgtgttgccatgccagaaagcgtgcgcctttggaaagatcctcgcaaagcccttcttcagagttctgcatcatttcgctgcttgatgtctgatgagatcatatatgttggtgacttggtggacgttgataatcctcacttggaaatgaatgttaggggcatagccaaaagcattagaaaagatatcgagtacatcgcaacattggagtttcctgactacataaatggagataatctcatcgatgcataccgtctcacactcatcatgggatgcgatgcaaaccaggagatcatcggtgccgagtacgttcaagagcattgggacaagtggtatagctggtatgagaatggctgccccgggtattgggacgaaaagacaccggcgccagctatgaacgcagcattcgagtcctccggagcaacaaccaaattccgcttggcggtcacgaaatacggatatttctgcttagtcccgcgaattgtcgaagtaggagacgaagtcgcaattcttcaatcgtacgaactagcagtcatattgaggcgtcagagaacaacatcaccaccaagtgccgccctggcccagacagcgacaaataagaaaagatcggcggaaatgagcgaccctcctttcttcgagcttctcggcgatggctacatacacggcatgatggaaaatgaagcgcgctgcatcaatgatgagttcaattgcaaatacgaacctgcaccagcgcagtgggaaaagattctgaaagcatccgacggcggtcttggtgagtcctggaagacccttggtctcgatgggaggtatagcagaatattagcaactctggggccaaggccggttcgagtgatctagatagcatcaagatactagacaaggcaaagggtatgcttaatgataacgaaaccagc

SEQ ID NO: 24989 - DNA, 1263 bp, Muscodor strobelii
  misc_feature: SGI cDNA ID NO. 568526
  misc_feature: Encodes the peptide sequence at SEQ ID NO 24990
atggcgccctccgcagcgtcgacggtgacgagcacgccgagggccgtccagcagaagacgattcgtgtcaatggcaaacgacaagacacagctcaagacacagctgcggctccagacgacatcccccgcgatcccatagaagtcaaataccgagatttcttctggacatacaccgaagagccacaccggacacgacgactggagatcatcaaggcgcacccagaggcaagtgaccatcttttcgcgtgcaggcaggcatctcatacttcacatgacttacatcttgtccaccaacaggtaacgaagctctgcggtccagaacccttgaccaaatacgtcgttgccctcgtggtatccatccagctcctcgccgcctactcagtccgaagcactcctttctcctccccctacttctgggttctcgcctacgtcgtcggcgcaaccgcaaaccagaacctcttcctcgccatccacgagatctcccacaatctcgccttccgggctccctcgctaaaccgcgtcttcgccatattcgccaatctccccatcggcatcccctactctgcctctttcaggccataccacctgacccaccacaaatccttgggcgtcgacgggctcgacaccgatctccctactgcgctcgaggccatattcctcgactccatcctcggcaaggcattcttctgcaccttccaaatcctcttctacgccatccgacccatggccgtatactcggtgcccttcacatccatctcgttcttcaacctcgtcacccaactcgcattcgacgctgtcatctacaagaccctcggtcttcactcgctcctctacttcatagcgtcctccttcctcgccggcagtttgcacccctgtgcaggccactttatcgcagagcactacgtctacgccacgacaagcccctctcaatccaacccttcgaataaaatccccataccagagacatacagctactacgggccgctcaacattctgacgtacaatgtcggactgcataacgaacatcatgatttccccgctattccatggacccgactgccaaagctgaacgaaatcgcgaaggaattctacgatgagctgccgtgccacacgagctggacctacgtcatttggcgattcatctttgacgagagcgttggtatccggtcaagagtcaagaggaaagaaggagggagattagtaggtcagaccaagagcgggaagacggtaggagagtggagggaggatgagcttgagtcttga

SEQ ID NO: 24990 - protein, 420 aa, Muscodor strobelii
  misc_feature: SGI Peptide ID NO. 568526
  misc_feature (142)..(364): Pfam Id: PF00487 Pfam Desc: Fatty acid desaturase
  misc_feature (48)..(110): Pfam Id: PF08557 Pfam Desc: Sphingolipid Delta4-desaturase (DES)
  misc_feature (48)..(75): Pfam Id: PF08557 Pfam Desc: Sphingolipid Delta4-desaturase (DES)
  misc_feature (43)..(420): NCBI GI: 145603232 Blast Desc: MGG_13187 [Magnaporthe grisea 70-15] gi|145011505|gb|EDJ96161.1| MGG_13187 [Magnaporthe grisea 70-15]
  misc_feature (6)..(420): NCBI GI: 116197643 Blast Desc: conserved [Chaetomium globosum CBS 148.51] gi|88178256|gb|EAQ85724.1| conserved [Chaetomium globosum CBS 148.51]
  misc_feature (4)..(395): NCBI GI: 261352088 Blast Desc: dihydroceramide delta(4)-desaturase [Verticillium albo-atrum VaMs.102]
  misc_feature (1)..(420): NCBI GI: 154316494 Blast Desc: BC1G_04178 [Botryotinia fuckeliana B05.10] gi|150845978|gb|EDN21171.1| BC1G_04178 [Botryotinia fuckeliana B05.10]
  misc_feature (1)..(420): NCBI GI: 256732264 Blast Desc: [Nectria haematococca mpVI 77-13-4]
  misc_feature (30)..(420): NCBI GI: 46137717 Blast Desc: FG10374.1 [Gibberella zeae PH-1]
  misc_feature (46)..(420): NCBI GI: 156043279 Blast Desc: SS1G_10642 [Sclerotinia sclerotiorum 1980] gi|154695030|gb|EDN94768.1| SS1G_10642 [Sclerotinia sclerotiorum 1980]
  misc_feature (5)..(420): NCBI GI: 171694415 Blast Desc: protein product [Podospora anserina] gi|170947156|emb|CAP73961.1| protein product [Podospora anserina]
  misc_feature (20)..(420): NCBI GI: 238838672 Blast Desc: dihydroceramide delta(4)-desaturase [Microsporum canis CBS 113480]
  misc_feature (18)..(389): NCBI GI: 85098418 Blast Desc: dihydroceramide delta(4)-desaturase [Neurospora crassa OR74A] gi|28922115|gb|EAA31373.1| dihydroceramide delta(4)-desaturase [Neurospora crassa OR74A] related to fatty
MAPSAASTVTSTPRAVQQKTIRVNGKRQDTAQDTAAAPDDIPRDPIEVKYRDFFWTYTEEPHRTRRLEIIKAHPEASDHLFACRQASHTSHDLHLVHQQVTKLCGPEPLTKYVVALVVSIQLLAAYSVRSTPFSSPYFWVLAYVVGATANQNLFLAIHEISHNLAFRAPSLNRVFAIFANLPIGIPYSASFRPYHLTHHKSLGVDGLDTDLPTALEAIFLDSILGKAFFCTFQILFYAIRPMAVYSVPFTSISFFNLVTQLAFDAVIYKTLGLHSLLYFIASSFLAGSLHPCAGHFIAEHYVYATTSPSQSNPSNKIPIPETYSYYGPLNILTYNVGLHNEHHDFPAIPWTRLPKLNEIAKEFYDELPCHTSWTYVIWRFIFDESVGIRSRVKRKEGGRLVGQTKSGKTVGEWREDELES

SEQ ID NO: 24991 - DNA, 1669 bp, Muscodor strobelii
  misc_feature: SGI EST ID NO. CUFF.58878.0
  misc_feature: Variant of the nucleotide sequence at SEQ ID NO 24989
ttggggttgccgcatgctaaatggcgtggggatgagtgtttgaagaggcgacttttacctcgaatttgacatttcctatgctcgtctcctatcttccatattctccaacttcaccttctcttatccgactctatctccaccagttactgtccagcttagattcccaatagcagacgacagcagctctctcccacagtcaagatggcgccctccgcagcgtcgacggtgacgagcacgccgagggccgtccagcagaagacgattcgtgtcaatggcaaacgacaagacacagctcaagacacagctgcggctccagacgacatcccccgcgatcccatagaagtcaaataccgagatttcttctggacatacaccgaagagccacaccggacacgacgactggagatcatcaaggcgcacccagaggtaacgaagctctgcggtccagaacccttgaccaaatacgtcgttgccctcgtggtatccatccagctcctcgccgcctactcagtccgaagcactcctttctcctccccctacttctgggttctcgcctacgtcgtcggcgcaaccgcaaaccagaacctcttcctcgccatccacgagatctcccacaatctcgccttccgggctccctcgctaaaccgcgtcttcgccatattcgccaatctccccatcggcatcccctactctgcctctttcaggccataccacctgacccaccacaaatccttgggcgtcgacgggctcgacaccgatctccctactgcgctcgaggccatattcctcgactccatcctcggcaaggcattcttctgcaccttccaaatcctcttctacgccatccgacccatggccgtatactcggtgcccttcacatccatctcgttcttcaacctcgtcacccaactcgcattcgacgctgtcatctacaagaccctcggtcttcactcgctcctctacttcatagcgtcctccttcctcgccggcagtttgcacccctgtgcaggccactttatcgcagagcactacgtctacgccacgacaagcccctctcaatccaacccttcgaataaaatccccataccagagacatacagctactacgggccgctcaacattctgacgtacaatgtcggactgcataacgaacatcatgatttccccgctattccatggacccgactgccaaagctgaacgaaatcgcgaaggaattctacgatgagctgccgtgccacacgagctggacctacgtcatttggcgattcatctttgacgagagcgttggtatccggtcaagagtcaagaggaaagaaggagggagattagtaggtcagaccaagagcgggaagacggtaggagagtggagggaggatgagcttgagtcttgatttcatatttaatgatgtgtgaaatggttgggcttgggcagtatgaagtagagtttgcctggaaagcgaaaggctcgatgaacatagaagtcatgaagtagtatagaccatgattagaccgaggacgaaaaagagaagcatcctcccgcgacagaaggccgtggttctgtacgcggtgcagtcgcagcatccatacgtacatacttatatattgatatgcatgcattgcattagatcttcatcataataattaccgtattgtccggtaatacatacc

SEQ ID NO: 24992 - DNA, 1191 bp, Muscodor strobelii
  misc_feature: SGI cDNA ID NO. 568527
  misc_feature: Reduced expression when VOC is produced
  misc_feature: Encodes the peptide sequence at SEQ ID NO 24993
atggcgccctccgcagcgtcgacggtgacgagcacgccgagggccgtccagcagaagacgattcgtgtcaatggcaaacgacaagacacagctcaagacacagctgcggctccagacgacatcccccgcgatcccatagaagtcaaataccgagatttcttctggacatacaccgaagagccacaccggacacgacgactggagatcatcaaggcgcacccagaggtaacgaagctctgcggtccagaacccttgaccaaatacgtcgttgccctcgtggtatccatccagctcctcgccgcctactcagtccgaagcactcctttctcctccccctacttctgggttctcgcctacgtcgtcggcgcaaccgcaaaccagaacctcttcctcgccatccacgagatctcccacaatctcgccttccgggctccctcgctaaaccgcgtcttcgccatattcgccaatctccccatcggcatcccctactctgcctctttcaggccataccacctgacccaccacaaatccttgggcgtcgacgggctcgacaccgatctccctactgcgctcgaggccatattcctcgactccatcctcggcaaggcattcttctgcaccttccaaatcctcttctacgccatccgacccatggccgtatactcggtgcccttcacatccatctcgttcttcaacctcgtcacccaactcgcattcgacgctgtcatctacaagaccctcggtcttcactcgctcctctacttcatagcgtcctccttcctcgccggcagtttgcacccctgtgcaggccactttatcgcagagcactacgtctacgccacgacaagcccctctcaatccaacccttcgaataaaatccccataccagagacatacagctactacgggccgctcaacattctgacgtacaatgtcggactgcataacgaacatcatgatttccccgctattccatggacccgactgccaaagctgaacgaaatcgcgaaggaattctacgatgagctgccgtgccacacgagctggacctacgtcatttggcgattcatctttgacgagagcgttggtatccggtcaagagtcaagaggaaagaaggagggagattagtaggtcagaccaagagcgggaagacggtaggagagtggagggaggatgagcttgagtcttga

SEQ ID NO: 24993 - protein, 396 aa, Muscodor strobelii
  misc_feature: SGI Peptide ID NO. 568527
  misc_feature (118)..(340): Pfam Id: PF00487 Pfam Desc: Fatty acid desaturase
  misc_feature (48)..(86): Pfam Id: PF08557 Pfam Desc: Sphingolipid Delta4-desaturase (DES)
  misc_feature (43)..(396): NCBI GI: 145603232 Blast Desc: MGG_13187 [Magnaporthe grisea 70-15] gi|145011505|gb|EDJ96161.1| MGG_13187 [Magnaporthe grisea 70-15]
  misc_feature (6)..(396): NCBI GI: 116197643 Blast Desc: conserved [Chaetomium globosum CBS 148.51] gi|88178256|gb|EAQ85724.1| conserved [Chaetomium globosum CBS 148.51]
  misc_feature (4)..(371): NCBI GI: 261352088 Blast Desc: dihydroceramide delta(4)-desaturase [Verticillium albo-atrum VaMs.102]
  misc_feature (1)..(396): NCBI GI: 154316494 Blast Desc: BC1G_04178 [Botryotinia fuckeliana B05.10] gi|150845978|gb|EDN21171.1| BC1G_04178 [Botryotinia fuckeliana B05.10]
  misc_feature (1)..(396): NCBI GI: 256732264 Blast Desc: [Nectria haematococca mpVI 77-13-4]
  misc_feature (30)..(396): NCBI GI: 46137717 Blast Desc: FG10374.1 [Gibberella zeae PH-1]
  misc_feature (5)..(396): NCBI GI: 171694415 Blast Desc: protein product [Podospora anserina] gi|170947156|emb|CAP73961.1| protein product [Podospora anserina]
  misc_feature (46)..(396): NCBI GI: 156043279 Blast Desc: SS1G_10642 [Sclerotinia sclerotiorum 1980] gi|154695030|gb|EDN94768.1| SS1G_10642 [Sclerotinia sclerotiorum 1980]
  misc_feature (20)..(396): NCBI GI: 238838672 Blast Desc: dihydroceramide delta(4)-desaturase [Microsporum canis CBS 113480]
  misc_feature (18)..(365): NCBI GI: 85098418 Blast Desc: dihydroceramide delta(4)-desaturase [Neurospora crassa OR74A] gi|28922115|gb|EAA31373.1| dihydroceramide delta(4)-desaturase [Neurospora crassa OR74A] related to fatty
  misc_feature: Useful for introducing or modulating the production of volatile compounds
MAPSAASTVTSTPRAVQQKTIRVNGKRQDTAQDTAAAPDDIPRDPIEVKYRDFFWTYTEEPHRTRRLEIIKAHPEVTKLCGPEPLTKYVVALVVSIQLLAAYSVRSTPFSSPYFWVLAYVVGATANQNLFLAIHEISHNLAFRAPSLNRVFAIFANLPIGIPYSASFRPYHLTHHKSLGVDGLDTDLPTALEAIFLDSILGKAFFCTFQILFYAIRPMAVYSVPFTSISFFNLVTQLAFDAVIYKTLGLHSLLYFIASSFLAGSLHPCAGHFIAEHYVYATTSPSQSNPSNKIPIPETYSYYGPLNILTYNVGLHNEHHDFPAIPWTRLPKLNEIAKEFYDELPCHTSWTYVIWRFIFDESVGIRSRVKRKEGGRLVGQTKSGKTVGEWREDELES

SEQ ID NO: 24994 - DNA, 1669 bp, Muscodor strobelii; identical to SEQ ID NO: 24991
  misc_feature: SGI EST ID NO. CUFF.58878.0
  misc_feature: Variant of the nucleotide sequence at SEQ ID NO 24992

SEQ ID NO: 24995 - DNA, 810 bp, Muscodor strobelii
  misc_feature: SGI cDNA ID NO. 568528
  misc_feature: Encodes the peptide sequence at SEQ ID NO 24996
atgtctgtcgagatcgatccccaggagctgggcttccaccgcccctttaccgtcgaggtcctcgagaacctgagaatccgcaaccccaacacccaccccgtggccttcaaggtcaaaactaccgcacctaaacaatattgtgtcagaccgaactctggccgtgtcgagccgggcaaggaggtggaggtccaagtcatcctccaggccatgaaggcagagcctgccccgggtacgaagtgcagagataagttcctcgtgcagtcggtggccatcactggagacaaagagttcgacaacctcgcctctatctgggacaccatcgacaagtcctccatacaagagaagaagatccgcgtcatctttcaagaccccaagaccggcgcctccaacaccctccagaccccggttaagaagcaggctcccaatggcgttgaagatacaccggaagcccctcccgcctacactccccccagtgcttacgctgcccccgttaaggacgaggagtcgcccaccgaagcccccgcatcttcttcgttcgccgcacccgtcgccgccgccgtgacccggaatagcgacgccagcaacgaggagcttagggaacagcttctgcaggccgagaagatgatcgcacagctcaaggcggaccagagcggcctgagacagcgcaagggcgcatcggaggacaagcccgccaccagcaaacccgctcagctcgcccagcaggccgcacgtggcactgagggagtgcctatccacatcacggctctgctctgtctgctcagcttcctgctagcctatgtctttttctag

SEQ ID NO: 24996 - protein, 269 aa, Muscodor strobelii
  misc_feature: SGI Peptide ID NO. 568528
  misc_feature (2)..(109): Pfam Id: PF00635 Pfam Desc: MSP (Major sperm protein) domain
  misc_feature (1)..(269): NCBI GI: 171694411 Blast Desc: protein product [Podospora anserina] gi|170947154|emb|CAP73959.1| protein product [Podospora anserina]
  misc_feature (1)..(269): NCBI GI: 85098872 Blast Desc: NCU08956 [Neurospora crassa OR74A] gi|28922195|gb|EAA31444.1| [Neurospora crassa OR74A] gi|28950157|emb|CAD71015.1| related to (VAMP)-associated protein
  misc_feature (1)..(269): NCBI GI: 189196814 Blast Desc: MSP domain containing protein [Pyrenophora tritici-repentis Pt-1C-BFP] gi|187980624|gb|EDU47250.1| MSP domain containing protein [Pyrenophora tritici-repentis
  misc_feature (1)..(269): NCBI GI: 145603230 Blast Desc: MGG_06183 [Magnaporthe grisea 70-15] gi|145011504|gb|EDJ96160.1| MGG_06183 [Magnaporthe grisea 70-15]
  misc_feature (1)..(269): NCBI GI: 156043275 Blast Desc: SS1G_10640 [Sclerotinia sclerotiorum 1980] gi|154695028|gb|EDN94766.1| SS1G_10640 [Sclerotinia sclerotiorum 1980]
  misc_feature (1)..(269): NCBI GI: 46137715 Blast Desc: FG10373.1 [Gibberella zeae PH-1]
  misc_feature (1)..(269): NCBI GI: 116197667 Blast Desc: CHGG_06989 [Chaetomium globosum CBS 148.51] gi|88178268|gb|EAQ85736.1| CHGG_06989 [Chaetomium globosum CBS 148.51]
  misc_feature (1)..(269): NCBI GI: 212528510 Blast Desc: integral ER membrane protein Scs2, [Penicillium marneffei ATCC 18224] gi|210073810|gb|EEA27897.1| integral ER membrane protein Scs2, [Penicillium marneffei ATCC 18224]
  misc_feature (1)..(269): NCBI GI: 242766274 Blast Desc: integral ER membrane protein Scs2, [Talaromyces stipitatus ATCC 10500] gi|218724335|gb|EED23752.1| integral ER membrane protein Scs2, [Talaromyces stipitatus ATCC 10500]
  misc_feature (1)..(269): NCBI GI: 256731876 Blast Desc: NECHADRAFT_80691 [Nectria haematococca mpVI 77-13-4]
MSVEIDPQELGFHRPFTVEVLENLRIRNPNTHPVAFKVKTTAPKQYCVRPNSGRVEPGKEVEVQVILQAMKAEPAPGTKCRDKFLVQSVAITGDKEFDNLASIWDTIDKSSIQEKKIRVIFQDPKTGASNTLQTPVKKQAPNGVEDTPEAPPAYTPPSAYAAPVKDEESPTEAPASSSFAAPVAAAVTRNSDASNEELREQLLQAEKMIAQLKADQSGLRQRKGASEDKPATSKPAQLAQQAARGTEGVPIHITALLCLLSFLLAYVFF

SEQ ID NO: 24997 - DNA, 1754 bp, Muscodor strobelii
  misc_feature: SGI EST ID NO. CUFF.59006.0
  misc_feature: Variant of the nucleotide sequence at SEQ ID NO 24995
cgagctgagtgaaatgaacaccagcgtcagtgctcctcgacgcaatcctggccacatttccaccctcacttcccacttgcgtcattccactcttgtcactctgttgcaaccgttgtttactctctacccctctgtgtcagcgccccggtagtatagccttctctgttcacttgttgttgtcaatatacgcccttgccgtctttgagcacatctgcgactgcctgttactgtgtccctcggcatctccaacttcgccgaccagtcccttcttgcagcctctgcccctcgccgagcaatccgagtcccatatatacatttcccctagtgtcttaggtagccaacatgtctgtcgagatcgatccccaggagctgggcttccaccgcccctttaccgtcgaggtcctcgagaacctgagaatccgcaaccccaacacccaccccgtggccttcaaggtcaaaactaccgcacctaaacaatattgtgtcagaccgaactctggccgtgtcgagccgggcaaggaggtggaggtccaagtcatcctccaggccatgaaggcagagcctgccccgggtacgaagtgcagagataagttcctcgtgcagtcggtggccatcactggagacaaagagttcgacaacctcgcctctatctgggacaccatcgacaagtcctccatacaagagaagaagatccgcgtcatctttcaagaccccaagaccggcgcctccaacaccctccagaccccggttaagaagcaggctcccaatggcgtacgtgtccgcctgtgatttgcgacggcaatgacaacactgtattttctaacgcagtacatacaggttgaagatacaccggaagcccctcccgcctacactccccccagtgcttacgctgcccccgttaaggacgaggagtcgcccaccgaagcccccgcatcttcttcgttcgccgcacccgtcgccgccgccgtgacccggaatagcgacgccagcaacgaggagcttagggaacagcttctgcaggccgagaagatgatcgcacagctcaaggcggaccagagcggcctgagacagcgcaagggcgcatcggaggacaagcccgccaccagcaaacccgctcagctcgcccagcaggccgcacgtggcactgagggagtgcctatccacatcacggctctgctctgtctgctcagcttcctgctagcctatgtctttttctaggagattcaatctggatttggtaggaagcagctctgggaggtcatatgccacatgtgaggagagtgggcatcggattgtggatatttcttctcccaccagccgtgcacgatcatcactttggcgaatgtgtcatactgattgtcgactttccaatggatgtgggggaaaacaacaagacggggaggtgagaggagtgagaagagaagtaacgaggcaacgaagactagtaccagtaatagacagatggatggactgatggataggctgtctcaacgagctgagaggggagatctatccatccgacgagaagagatttcaggatttctgactgtggagtagaaagagagaaagagccactattattgtggttatgaggtggtatgggtgaggcagataaatgctgagacagagcggatggtgctgtctggtcttgcttatgccccgtactgtagtttacatagctgagttgcttatggttacttgagaataagtcccttttgttaccggaatgaaaatactgttcaactgagctgtgt

SEQ ID NO: 24998 - DNA, 792 bp, Muscodor strobelii
  misc_feature: SGI cDNA ID NO. 568529
  misc_feature: Reduced expression when VOC is produced
  misc_feature: Encodes the peptide sequence at SEQ ID NO 24999
atgcttaccaacccatgcaaaggcccctttaccgtcgaggtcctcgagaacctgagaatccgcaaccccaacacccaccccgtggccttcaaggtcaaaactaccgcacctaaacaatattgtgtcagaccgaactctggccgtgtcgagccgggcaaggaggtggaggtccaagtcatcctccaggccatgaaggcagagcctgccccgggtacgaagtgcagagataagttcctcgtgcagtcggtggccatcactggagacaaagagttcgacaacctcgcctctatctgggacaccatcgacaagtcctccatacaagagaagaagatccgcgtcatctttcaagaccccaagaccggcgcctccaacaccctccagaccccggttaagaagcaggctcccaatggcgttgaagatacaccggaagcccctcccgcctacactccccccagtgcttacgctgcccccgttaaggacgaggagtcgcccaccgaagcccccgcatcttcttcgttcgccgcacccgtcgccgccgccgtgacccggaatagcgacgccagcaacgaggagcttagggaacagcttctgcaggccgagaagatgatcgcacagctcaaggcggaccagagcggcctgagacagcgcaagggcgcatcggaggacaagcccgccaccagcaaacccgctcagctcgcccagcaggccgcacgtggcactgagggagtgcctatccacatcacggctctgctctgtctgctcagcttcctgctagcctatgtctttttctag

SEQ ID NO: 24999 - protein, 263 aa, Muscodor strobelii
  misc_feature: SGI Peptide ID NO. 568529
  misc_feature (1)..(103): Pfam Id: PF00635 Pfam Desc: MSP (Major sperm protein) domain
  misc_feature (7)..(103): Pfam Id: PF00635 Pfam Desc: MSP (Major sperm protein) domain
  misc_feature (7)..(263): NCBI GI: 171694411 Blast Desc: protein product [Podospora anserina] gi|170947154|emb|CAP73959.1| protein product [Podospora anserina]
  misc_feature (18)..(263): NCBI GI: 85098872 Blast Desc: NCU08956 [Neurospora crassa OR74A] gi|28922195|gb|EAA31444.1| [Neurospora crassa OR74A] gi|28950157|emb|CAD71015.1| related to (VAMP)-associated protein
  misc_feature (27)..(263): NCBI GI: 116197667 Blast Desc: CHGG_06989 [Chaetomium globosum CBS 148.51] gi|88178268|gb|EAQ85736.1| CHGG_06989 [Chaetomium globosum CBS 148.51]
  misc_feature (7)..(263): NCBI GI: 189196814 Blast Desc: MSP domain containing protein [Pyrenophora tritici-repentis Pt-1C-BFP] gi|187980624|gb|EDU47250.1| MSP domain containing protein [Pyrenophora tritici-repentis
  misc_feature (7)..(263): NCBI GI: 145603230 Blast Desc: MGG_06183 [Magnaporthe grisea 70-15] gi|145011504|gb|EDJ96160.1| MGG_06183 [Magnaporthe grisea 70-15]
  misc_feature (7)..(263): NCBI GI: 46137715 Blast Desc: FG10373.1 [Gibberella zeae PH-1]
  misc_feature (9)..(263): NCBI GI: 156043275 Blast Desc: SS1G_10640 [Sclerotinia sclerotiorum 1980] gi|154695028|gb|EDN94766.1| SS1G_10640 [Sclerotinia sclerotiorum 1980]
  misc_feature (9)..(263): NCBI GI: 212528510 Blast Desc: integral ER membrane protein Scs2, [Penicillium marneffei ATCC 18224] gi|210073810|gb|EEA27897.1| integral ER membrane protein Scs2, [Penicillium marneffei ATCC 18224]
  misc_feature (7)..(263): NCBI GI: 242766274 Blast Desc: integral ER membrane protein Scs2, [Talaromyces stipitatus ATCC 10500] gi|218724335|gb|EED23752.1| integral ER membrane protein Scs2, [Talaromyces stipitatus ATCC 10500]
  misc_feature (7)..(263): NCBI GI: 256731876 Blast Desc: NECHADRAFT_80691 [Nectria haematococca mpVI 77-13-4]
  misc_feature: Useful for introducing or modulating the production of volatile compounds
MLTNPCKGPFTVEVLENLRIRNPNTHPVAFKVKTTAPKQYCVRPNSGRVEPGKEVEVQVILQAMKAEPAPGTKCRDKFLVQSVAITGDKEFDNLASIWDTIDKSSIQEKKIRVIFQDPKTGASNTLQTPVKKQAPNGVEDTPEAPPAYTPPSAYAAPVKDEESPTEAPASSSFAAPVAAAVTRNSDASNEELREQLLQAEKMIAQLKADQSGLRQRKGASEDKPATSKPAQLAQQAARGTEGVPIHITALLCLLSFLLAYVFF

SEQ ID NO: 25000 - DNA, 1754 bp, Muscodor strobelii; identical to SEQ ID NO: 24997
  misc_feature: SGI EST ID NO. CUFF.59006.0
  misc_feature: Variant of the nucleotide sequence at SEQ ID NO 24998

SEQ ID NO: 25001 - DNA, 939 bp, Muscodor strobelii
  misc_feature: SGI cDNA ID NO. 568530
  misc_feature: Reduced expression when VOC is produced
  misc_feature: Encodes the peptide sequence at SEQ ID NO 25002
atgtctcagtcagtattagaccagctcctcgagatgggcttcgacaaggagcgggccgagctcgccgtcaagcgctccgatggcttacccgatgccatggattggctggagaagacccaagacacacccctagatgaactgatcgccgaggaggaggcgggtgctaccaacgtggccaaggtcgaaggaggcgaagccgccatgtccctcctctgtcaagaatgcggcaagaagttccgcacccagggcgaagccgagttccacgccggcaagtccggacacacagacttcgccgaatccacagacgtcatcgcacctctcacggaagaagagaagaaagccaagctagccgaactacgtgaacgcgtcaaggccaagcgagccaaccaggccgtcgccgacaaagaggacgagaagcgcaacgagaagatcagacagaaggccacgaaggagacgcaggatctcaaagaggagatggccaagaaggaacagatcaagatcgccgcgcagaagagacaggagaaggctgatgatgccgaggccaagaaacggatcaaggccaagatcgaggcggataaggaggagagacgacggaaggctgaggaggctaaggctctgcgtgaggggagggctcctcctgctacttctgcttccgtaccagctgctgctgctcctgctcctgctcctgtggctaaaccgacgacaaaccataatgaggcccgacttcgactgcagacgagtaatgggaacgtgatgaagactcttccggcagatacgacgctctttgaggtggcccagatgctggagcatgaggacggcgtgactgtgagcaaattcgtacagaatttcccgcggaaggtgttcgagggttccctcgacttcggtaagacgctcaaagaggctggtttaacgccgagtgccgcgctcatcgtgcagtaa

SEQ ID NO: 25002 - protein, 312 aa, Muscodor strobelii
  misc_feature: SGI Peptide ID NO. 568530
  misc_feature (1)..(36): Pfam Id: PF00627 Pfam Desc: UBA/TS-N domain
  misc_feature (278)..(312): Pfam Id: PF00789 Pfam Desc: UBX domain
  misc_feature (1)..(312): NCBI GI: 39975779 Blast Desc: MGG_06184 [Magnaporthe grisea 70-15] gi|145011503|gb|EDJ96159.1| MGG_06184 [Magnaporthe grisea 70-15]
  misc_feature (1)..(312): NCBI GI: 261352086 Blast Desc: DNA-binding protein [Verticillium albo-atrum VaMs.102]
  misc_feature (4)..(312): NCBI GI: 46137707 Blast Desc: FG10369.1 [Gibberella zeae PH-1]
  misc_feature (4)..(312): NCBI GI: 256732262 Blast Desc: NECHADRAFT_69661 [Nectria haematococca mpVI 77-13-4]
  misc_feature (1)..(310): NCBI GI: 212528508 Blast Desc: UBX domain protein, [Penicillium marneffei ATCC 18224] gi|210073809|gb|EEA27896.1| UBX domain protein, [Penicillium marneffei ATCC 18224]
  misc_feature (1)..(310): NCBI GI: 171694409 Blast Desc: protein product [Podospora anserina] gi|170947153|emb|CAP73958.1| protein product [Podospora anserina]
  misc_feature (1)..(311): NCBI GI: 28950156 Blast Desc: conserved [Neurospora crassa]
  misc_feature (4)..(312): NCBI GI: 255949892 Blast Desc: Pc22g18040 [Penicillium chrysogenum Wisconsin 54-1255] gi|211592730|emb|CAP99092.1| Pc22g18040 [Penicillium chrysogenum Wisconsin 54-1255]
  misc_feature (6)..(312): NCBI GI: 225680193 Blast Desc: conserved [Paracoccidioides brasiliensis Pb03]
  misc_feature (1)..(312): NCBI GI: 121706656 Blast Desc: UBX domain protein, [Aspergillus clavatus NRRL 1] gi|119399734|gb|EAW10160.1| UBX domain protein, [Aspergillus clavatus NRRL 1]
  misc_feature: Useful for introducing or modulating the production of volatile compounds
MSQSVLDQLLEMGFDKERAELAVKRSDGLPDAMDWLEKTQDTPLDELIAEEEAGATNVAKVEGGEAAMSLLCQECGKKFRTQGEAEFHAGKSGHTDFAESTDVIAPLTEEEKKAKLAELRERVKAKRANQAVADKEDEKRNEKIRQKATKETQDLKEEMAKKEQIKIAAQKRQEKADDAEAKKRIKAKIEADKEERRRKAEEAKALREGRAPPATSASVPAAAAPAPAPVAKPTTNHNEARLRLQTSNGNVMKTLPADTTLFEVAQMLEHEDGVTVSKFVQNFPRKVFEGSLDFGKTLKEAGLTPSAALIVQ

SEQ ID NO: 25003 - DNA, 2484 bp, Muscodor strobelii
  misc_feature: SGI EST ID NO. CUFF.58884.0
  misc_feature: Variant of the nucleotide sequence at SEQ ID NO 25001
atgtaattggccttttgattgtttgggcctgagcattcgtaagactcaacgggaaacgttgagtggctttttctcccaggggcataaatagaccttttcagacgaacctttctctattgcaatctatagacacacccacattctctcatctatcctcttacacaagatccgcccctcactccgatccccttgcaaacaaactcacgaatttcacacaaccacactccctaatcaacgcccgaccggacctctcagcatacccctactaccttcctcacacagaatcatctcacaatacatcaacatgtctcagtcagtattagaccagctcctcgagatgggcttcgacaaggagcgggccgagctcgccgtcaagcgctccgatggcttacccgatgccatggattggctggagaagacccaagacacacccctagatgaactgatcgccgaggaggaggcgggtgctaccaacgtggccaaggtcgaaggaggcgaagccgccatgtccctcctctgtcaagaatgcggcaagaagttccgcacccagggcgaagccgagttccacgccggcaagtccggacacacagacttcgccgaatccacagacgtcatcgcacctctcacggaagaagagaagaaagccaagctagccgaactacgtgaacgcgtcaaggccaagcgagccaaccaggccgtcgccgacaaagaggacgagaagcgcaacgagaagatcagacagaaggccacgaaggagacgcaggatctcaaagaggagatggccaagaaggaacagatcaagatcgccgcgcagaagagacaggagaaggctgatgatgccgaggccaagaaacggatcaaggccaagatcgaggcggataaggaggagagacgacggaaggctgaggaggctaaggctctgcgtgaggggagggctcctcctgctacttctgcttccgtaccagctgctgctgctcctgctcctgctcctgtggctaaaccgacgacaaaccataatgaggcccgacttcgactgcagacgagtaatgggaacgtgatgaagactcttccggcagatacgacgctctttgaggtggcccagatgctggagcatgaggacggcgtgactgtgagcaaattcgtacagaatttcccgcggaaggtgttcgagggttccctcgacttcggtaagacgctcaaagaggctggtttaacgccgagtgccgcgctcatcgtgcagtaaaagctgcgcctgggctaggggtggatgagtatgtcattatgtaatggggcagggcgttgaggggggaaagggcatgaggaaaatcggacattcaatgtgatgatagaaaacgtctaccacataatcggatagcccagaagttacactaccaaacaaacacgacaaatgatgttcggatactcgctcggcagtttggtgggactgggcttcgaataactcattacatacacatacacgtcagagagggactagacaatcagcatgggccggtatggttatatatgtatgcattcatagtccaagagacaaaaaggcgagaagggaacgataagcccagcctacggtcagaaatatgtcattcatcataggtgaagttggcaaattcgaaattcgcgacatcatgtcgatcatgttcgtccgaccattgacaaagtgaccaacacagtcgagcagacattcatagccccatgagcggcggattgacagtgagaatatagaagtttgtagtcaaattgagtcattccctggtggtacagaatggtaattgggaatagattcaagcaaccacaagatcgcgcggtatgacctaggatcgttgattacctgaatcgttcaacttattcacgtaaccatcttgcagtaaagctagacagcagacgaccaaccatcgggacctagcggatatctgcatctagctcattgacgagtcagacggaaatgggaatgcgtgtagttagaagtcgtcatatttctcatgaggtatcccttaggtagtctacggcacacatagctctcccatcaagtcccccttttcgtcattgttcacattcgcaggctcattgggttcgaagtaggcgggcgagattggtttcggttcgcagaagcattgtcatattaaccctatgacgaaagtgatgcatcgaaattgccctatgggcggcatcattcagatttcttttgatatctctaagtgtgcctgtgcctgctccctcgcgcccacacacctttgtcgttggtgcgtaatgtaaccccgagccatgccatatgatcaagtacaaagggaacaagtagtcgtcgttgtcgcggatgtggaagaagtggtggtagtcgtttagtcgaagagaccgaagcccatgtcctcgtcggactcctccttctctgcagtggttgtcagtatgatcgatcgtcgtaatgcgctcgtatattcgcttgaaagacgtaccctcttccttctcctcggc

SEQ ID NO: 25004 - DNA, 624 bp, Muscodor strobelii
  misc_feature: SGI cDNA ID NO. 568531
  misc_feature: Encodes the peptide sequence at SEQ ID NO 25005
atgcctgtcgcttttggattcagcgttggagatttcctggctctgattgagctcattgtgaagacctgcgaagcactcgatgatgcatcgggctcatcacaggaatatcaagatgtggtatgcgagttgaagaactttatttctatgttcgcagaacggcatgaattcggtgtttcgcaaggtgttatgggcaatgcgaggcagacagaagctacagtcatttcgagtgaggattctaagcaatatggcgctgctatccgttatgcagcaaaatatgcacaggacttgattgcatttttaatgttgagcgtcaaagatgacccaacactcagtttactcgttggctccaacagtatttggctatttacaccagggcgccaacaagatgattggtggtatttgatccaagaagcggactggcaacagattgcgcgccctggaatgactcttggcatgtcaatcagaccactgagcttatgccccgaccaccaattagagcatcagtatcacagccaaaatgagctgaaagacgaagtcgatctttttccttcctgtgtccatttcgtcaaaccgctgccgcagagcttcacgtatgatcctgacaccaagtttcgatatctgtaa

SEQ ID NO: 25005 - protein, 207 aa, Muscodor strobelii
  misc_feature: SGI Peptide ID NO. 568531
MPVAFGFSVGDFLALIELIVKTCEALDDASGSSQEYQDVVCELKNFISMFAERHEFGVSQGVMGNARQTEATVISSEDSKQYGAAIRYAAKYAQDLIAFLMLSVKDDPTLSLLVGSNSIWLFTPGRQQDDWWYLIQEADWQQIARPGMTLGMSIRPLSLCPDHQLEHQYHSQNELKDEVDLFPSCVHFVKPLPQSFTYDPDTKFRYL

SEQ ID NO: 25006 - DNA, 242 bp, Muscodor strobelii
  misc_feature: SGI EST ID NO. CUFF.58891.0
  misc_feature: Variant of the nucleotide sequence at SEQ ID NO 25004
gcaatatggcgctgctatccgttatgcagcaaaatatgcacagcaatgcgataaacgatacacggggagaagtcataagcatcaagaacgaagtatcgcgtcaaatccagcaaagcatacaggctgttcaattacacgtcactccttctatcaatactccatatgaccagcagccgatcaaatttcaagatgcaaaagggcggcgatatccaatcccactggaaatcagctcaacgttcaag

SEQ ID NO: 25007 - DNA, 894 bp, Muscodor strobelii
  misc_feature: SGI cDNA ID NO. 568532
  misc_feature: Encodes the peptide sequence at SEQ ID NO 25008
atggggaaatcgcaaaccgtctcctcaaacgaggtgcccaaagagccaccaccagactacgatacctcaacccgcgaacatggctcactaccaatccgcccagcgcctcctcaaggccgtcgtccacccccaatagcacccctcgatctgcccatcgtgcaatacatgaaaacccaccgcgtaattctcgcctccgcctcaccacgccggcgccagctcctcggacaaatcggcctcacgaacatcgagatcaaaccctccacgaaacccgagaacctgcctaaggaatccctgggagcattcgaatacgtatcagcgaccgccgcccaaaaagccctagacatctaccaaactaccctcgcagccaccgaagcagcagcagaagcaaacggcgacgacgccgaaccctcacagaaagaccccgatctcgtcatcgcagcagataccgtgatagtcacgcgcgacggcaagatcctcgagaaaccttcatctgcacaagcacataagcacatgcttcagcatctgcgcgacacacgtgtgcaccgcgtgctcacggcagtatgctgtatagcgcccaaggctgatgcttcgttccccggttactcgatggtgagccataccgaagagacgaaggtcacgtttgccaaagcgtcggatgggctgccggatgatgtcattgatgcttatgtaaggacgagagagggtgttgataaagctggtggttatgccgtgcagggcattggcgggagtgtgctgattgagaagattgatggcggagttgataatgttattgggttgccggtcaggaaaacgttgcagctttgtgagaaggtcgtctttaagcaggaggaggagagtgatgaggaggaagaggaggatatcattgggttctag

SEQ ID NO: 25008 - protein, 297 aa, Muscodor strobelii
  misc_feature: SGI Peptide ID NO. 568532
  misc_feature (59)..(280): Pfam Id: PF02545 Pfam Desc: Maf-like protein
  misc_feature (59)..(274): Pfam Id: PF02545 Pfam Desc: Maf-like protein
  misc_feature (9)..(297): NCBI GI: 256735489 Blast Desc: NECHADRAFT_75378 [Nectria haematococca mpVI 77-13-4]
  misc_feature (11)..(290): NCBI GI: 46107736 Blast Desc: FG00751.1 [Gibberella zeae PH-1]
  misc_feature (27)..(293): NCBI GI: 39951349 Blast Desc: MGG_01317 [Magnaporthe grisea 70-15] gi|145020867|gb|EDK04996.1| MGG_01317 [Magnaporthe grisea 70-15]
  misc_feature (15)..(282): NCBI GI: 85116062 Blast Desc: NCU03130 [Neurospora crassa OR74A] gi|28926788|gb|EAA35753.1| NCU03130 [Neurospora crassa OR74A] gi|38567274|emb|CAE76564.1| related to septum formation maf
  misc_feature (13)..(282): NCBI GI: 116180492 Blast Desc: CHGG_00874 [Chaetomium globosum CBS 148.51] gi|88185171|gb|EAQ92639.1| CHGG_00874 [Chaetomium globosum CBS 148.51]
  misc_feature (6)..(284): NCBI GI: 156053866 Blast Desc: SS1G_05781 [Sclerotinia sclerotiorum 1980] gi|154703561|gb|EDO03300.1| SS1G_05781 [Sclerotinia sclerotiorum 1980]
  misc_feature (44)..(292): NCBI GI: 261358830 Blast Desc: septum formation protein Maf [Verticillium albo-atrum VaMs.102]
  misc_feature (20)..(231): NCBI GI: 171687747 Blast Desc: protein product [Podospora anserina] gi|170943835|emb|CAP69487.1| protein product [Podospora anserina]
  misc_feature (37)..(281): NCBI GI: 212531715 Blast Desc: acetylserotonin methytransferase-like protein (ASMTL), [Penicillium marneffei ATCC 18224] gi|210071378|gb|EEA25467.1| acetylserotonin methytransferase-like protein (ASMTL), marneffei
  misc_feature (56)..(288): NCBI GI: 189197637 Blast Desc: conserved [Pyrenophora tritici-repentis Pt-1C-BFP] gi|187981104|gb|EDU47730.1| conserved [Pyrenophora tritici-repentis Pt-1C-BFP]
MGKSQTVSSNEVPKEPPPDYDTSTREHGSLPIRPAPPQGRRPPPIAPLDLPIVQYMKTHRVILASASPRRRQLLGQIGLTNIEIKPSTKPENLPKESLGAFEYVSATAAQKALDIYQTTLAATEAAAEANGDDAEPSQKDPDLVIAADTVIVTRDGKILEKPSSAQAHKHMLQHLRDTRVHRVLTAVCCIAPKADASFPGYSMVSHTEETKVTFAKASDGLPDDVIDAYVRTREGVDKAGGYAVQGIGGSVLIEKIDGGVDNVIGLPVRKTLQLCEKVVFKQEEESDEEEEEDIIGF

SEQ ID NO: 25009 - DNA, 1625 bp, Muscodor strobelii
  misc_feature: SGI EST ID NO. CUFF.58899.0
  misc_feature: Variant of the nucleotide sequence at SEQ ID NO 25007
cttcgagctcgacacgaccagtttgaagtgccataaagacatgataagcaagattatctgatgtagtgaagagatacctgtgtgaagaccccttattgtcttacgtcgatttaagcttatggggaaacccctgtcccccgcagcatcgaactctccccaaggcctggagtcagacacccctcattatgtaattcatatggaattcatccttgccaactttcaattttacaaagcttgaactacacgcaaacatctttgactacactgacaaacggcagcttcgggacttcatttaagcatcaattgagccatcttcttttcacagctatattcgatcgacagggaacacagtcacaatggggaaatcgcaaaccgtctcctcaaacgaggtgcccaaagagccaccaccagactacgatacctcaacccgcgaacatggctcactaccaatccgcccagcgcctcctcaaggccgtcgtccacccccaatagcacccctcgatctgcccatcgtgcaatacatgaaaacccaccgcgtaattctcgcctccgcctcaccacgccggcgccagctcctcggacaaatcggcctcacgaacatcgagatcaaaccctccacgaaacccgagaacctgcctaaggaatccctgggagcattcgaatacgtatcagcgaccgccgcccaaaaagccctagacatctaccaaactaccctcgcagccaccgaagcagcagcagaagcaaacggcgacgacgccgaaccctcacagaaagaccccgatctcgtcatcgcagcagataccgtgatagtcacgcgcgacggcaagatcctcgagaaaccttcatctgcacaagcacataagcacatgcttcagcatctgcgcgacacacgtgtgcaccgcgtgctcacggcagtatgctgtatagcgcccaaggctgatgcttcgttccccggttactcgatggtgagccataccgaagagacgaaggtcacgtttgccaaagcgtcggatgggctgccggatgatgtcattgatgcttatgtaaggacgagagagggtgttgataaagctggtggttatgccgtgcagggcattggcgggagtgtgctgattgagaagattgatggcggagttgataatgttattgggttgccggtcaggaaaacgttgcagctttgtgagaaggtcgtctttaagcaggaggaggagagtgatgaggaggaagaggaggatatcattgggttctaggtggtggagagaagtgcattaagggaatgggtatgatggatagacgggtatatatggtatggtatttgaaaataataggctatggccgtatgacatagaggaagaaaaggcattgtttcctgatgagcatcataatggcgacaatttcacggcccaacaggtccaagcttgtctatgtctttattatatatatcagaacgctgacacgttcttcacctgctggcttgagtattttgcctgcatacatgtacctaatccatttggctgccgcatcgggagaactctctttttacaataaaagtaccgtgacatagctgctaagggtgagctgtccaaggcccttgccatcaatgctttcgcggatcaccatctcga

SEQ ID NO: 25010 - DNA, 345 bp, Muscodor strobelii
  misc_feature: SGI cDNA ID NO. 568533
  misc_feature: Encodes the peptide sequence at SEQ ID NO 25011
atggggaaatcgcaaaccgtctcctcaaacgaggtgcccaaagagccaccaccagactacgatacctcaacccgcgaacatggctcactaccaatccgcccagcgcctcctcaaggccgtcgtccacccccaatagcacccctcgatctgcccatcgtgcaatacatgaaaacccaccgcgtaattctcgcctccgcctcaccacgccggcgccagctcctcggacaaatcggcctcacgaacatcgagatcaaaccctccacgaaacccgagaacctgcctaaggaatccctgggagcattcgaatacgtatcagcgaccgccgcccaaaaagccctagacatc

SEQ ID NO: 25011 - protein, 115 aa, Muscodor strobelii
  misc_feature: SGI Peptide ID NO. 568533
  misc_feature (59)..(113): Pfam Id: PF02545 Pfam Desc: Maf-like protein
  misc_feature (9)..(115): NCBI GI: 256735489 Blast Desc: NECHADRAFT_75378 [Nectria haematococca mpVI 77-13-4]
  misc_feature (11)..(115): NCBI GI: 46107736 Blast Desc: FG00751.1 [Gibberella zeae PH-1]
  misc_feature (6)..(115): NCBI GI: 156053866 Blast Desc: SS1G_05781 [Sclerotinia sclerotiorum 1980] gi|154703561|gb|EDO03300.1| SS1G_05781 [Sclerotinia sclerotiorum 1980]
  misc_feature (27)..(115): NCBI GI: 39951349 Blast Desc: MGG_01317 [Magnaporthe grisea 70-15] gi|145020867|gb|EDK04996.1| MGG_01317 [Magnaporthe grisea 70-15]
  misc_feature (13)..(115): NCBI GI: 116180492 Blast Desc: CHGG_00874 [Chaetomium globosum CBS 148.51] gi|88185171|gb|EAQ92639.1| CHGG_00874 [Chaetomium globosum CBS 148.51]
  misc_feature (20)..(112): NCBI GI: 171687747 Blast Desc: protein product [Podospora anserina] gi|170943835|emb|CAP69487.1| protein product [Podospora anserina]
  misc_feature (15)..(115): NCBI GI: 85116062 Blast Desc: NCU03130 [Neurospora crassa OR74A] gi|28926788|gb|EAA35753.1| NCU03130 [Neurospora crassa OR74A] gi|38567274|emb|CAE76564.1| related to septum formation maf
  misc_feature (41)..(115): NCBI GI: 212531715 Blast Desc: acetylserotonin methytransferase-like protein (ASMTL), [Penicillium marneffei ATCC 18224] gi|210071378|gb|EEA25467.1| acetylserotonin methytransferase-like protein (ASMTL), marneffei
  misc_feature (34)..(112): NCBI GI: 226278799 Blast Desc: septum formation protein Maf [Paracoccidioides brasiliensis Pb01]
  misc_feature (8)..(112): NCBI GI: 261194402 Blast Desc: maf-like protein c [Ajellomyces dermatitidis SLH14081] gi|239588620|gb|EEQ71263.1| maf-like protein c [Ajellomyces dermatitidis SLH14081] gi|239612812|gb|EEQ89799.1| maf-like c
MGKSQTVSSNEVPKEPPPDYDTSTREHGSLPIRPAPPQGRRPPPIAPLDLPIVQYMKTHRVILASASPRRRQLLGQIGLTNIEIKPSTKPENLPKESLGAFEYVSATAAQKALDI

SEQ ID NO: 25012 - DNA, 1625 bp, Muscodor strobelii; identical to SEQ ID NO: 25009
  misc_feature: SGI EST ID NO. CUFF.58899.0
  misc_feature: Variant of the nucleotide sequence at SEQ ID NO 25010

SEQ ID NO: 25013 - DNA, 2211 bp, Muscodor strobelii
  misc_feature: SGI cDNA ID NO. 568534
  misc_feature: Encodes the peptide sequence at SEQ ID NO 25014
atggccgaaatagtcggcactgcgggctcagttattggtatcgttgatgttggtttaaagctagccattacgcttcagacgtacatcgagactgtagctaaggcccggaaacgactcagcgagattacgagcgacgtcaatgctactgctggtgctttgaagcaactccacattatcctagagtctgacaaggccgttgtacagggccaagacaacggaggcaatggcgatactgatcattcctcctcgctttcaccttgtgcatttcccgtttttaacgagaccggacgtcgagaaatcgaaagtcttgcagccaaatgcgagattgtatacaacgccatcaacgttatagtcagggaagctgctggcttagatgataacgaccctagcggcatcgtatcagagcaaaccctggccgcgaatcctttgggactccggagacgcatgaagtggccgtggctacagccacggatctctcagtgcgaaactcgacttcatggtctcaagatcactctcatccttcaactatcaatcgccgacctagcccaattccagatcaatcgcccggtaaaaggctctggaacattcgagaaagaacaaaatctacgggaaacagccgaagcgctaagaaacaaacatgtaaattatgtggaaaaaatcgcttcgaaatcaagagccactccagcttcgaagactcataggggcacaaccatttcagcggatcgtccggccactcagccgcagcaagagttatcctcatggacaggctcttcgaaccaggtgcagcaagagccaatcagagcagatgcagattctgctatgcacagcacagaaaccggacagaagcgacgcgttgagaatacggaacaaggctcaatacaaatgtcgtcattgacaccggtgctatcgttgagcccagggccaattgatgcaaaacaagaaccatcgactgtgacatgctctgttttaccggaaaacaagaaacccgagagcttcagctctatacagagcgcaacggcagacttcaatgcccaaggctaccatgggagtcccaccagtgcattcaacatgaatgtcaccacgagcgataccccaggatttgcacaagctactccgaccaatgacggacggggcaacaaggatattctggaggcatacattatcgattcctgtagtatcaaagcgcgccgactagagatcaacattgagcagctgcatgaatctttgaagaagatacaaactctaaatcgagattctctagtggagagattcatgtctttgagcaggcattgtaggttttacatccaaaaatggattaccgagaccaactccatcagtccataccctgcgattctcttagatatccttgtccgaccatcgacagatgacagtgcttccgacgacgccgttgtgctcttctttagtcgccgtacagccccgctcgagcttattcgattgaatgatgtcgcgaagagaaagaccttcgacgtgccacttcagcaatgtcgcacttgggacaaaatgaggaatttcgtatctaatcacgtcgctcggcctggtgagcccggagatgatgacctgcggaatggccactttgatctgtgcgttgcaggcgcccagggcgaaaagagaacacacgtcttactcccacagtcatgggcgacaacgatccgttctggcatgggaatcaatattatgcgtcgagattaccgggccccttgtgttcctttctatttacaacacgttccatacgatgacgatatgtgcgggtgcgagcattgccgctcacaagttcagtctcgtgcaaataccacccagctcccccccgtccaaacccctccccgaaattcggccgcagctctgaagggaacagcgagccgccgttcttctaataggccttttgctgcttccgttgcaagcaacctcttcacttcgcaaggccagagcctcttcacttcgcatggccatgccgatagcgacaccgagagctgttcgagtcagatcgataatgatttcagcatcagtgagcatggtgaagacgtagtcggtaatgcagaccaagatatggttgccttactcggtaaccttgattttgagagtgagctccctgcgaccacactcaatctcgatcagctactagataggtggaccaacgcacattatacaatcggcgccgagtcagacataagttcgcaaagcgagatcacatga

SEQ ID NO: 25014 - protein, 736 aa, Muscodor strobelii
  misc_feature: SGI Peptide ID NO. 568534
  misc_feature (10)..(245): NCBI GI: 46139473 Blast Desc: FG11251.1 [Gibberella zeae PH-1]
  misc_feature (3)..(182): NCBI GI: 121714070 Blast Desc: conserved [Aspergillus clavatus NRRL 1] gi|119402799|gb|EAW13220.1| conserved [Aspergillus clavatus NRRL 1]
  misc_feature (3)..(250): NCBI GI: 255953051 Blast Desc: Pc21g02130 [Penicillium chrysogenum Wisconsin 54-1255] gi|211588989|emb|CAP95110.1| Pc21g02130 [Penicillium chrysogenum Wisconsin 54-1255]
  misc_feature (3)..(193): NCBI GI: 242787026 Blast Desc: conserved [Talaromyces stipitatus ATCC 10500] gi|218721068|gb|EED20487.1| conserved [Talaromyces stipitatus ATCC 10500]
MAEIVGTAGSVIGIVDVGLKLAITLQTYIETVAKARKRLSEITSDVNATAGALKQLHIILESDKAVVQGQDNGGNGDTDHSSSLSPCAFPVFNETGRREIESLAAKCEIVYNAINVIVREAAGLDDNDPSGIVSEQTLAANPLGLRRRMKWPWLQPRISQCETRLHGLKITLILQLSIADLAQFQINRPVKGSGTFEKEQNLRETAEALRNKHVNYVEKIASKSRATPASKTHRGTTISADRPATQPQQELSSWTGSSNQVQQEPIRADADSAMHSTETGQKRRVENTEQGSIQMSSLTPVLSLSPGPIDAKQEPSTVTCSVLPENKKPESFSSIQSATADFNAQGYHGSPTSAFNMNVTTSDTPGFAQATPTNDGRGNKDILEAYIIDSCSIKARRLEINIEQLHESLKKIQTLNRDSLVERFMSLSRHCRFYIQKWITETNSISPYPAILLDILVRPSTDDSASDDAVVLFFSRRTAPLELIRLNDVAKRKTFDVPLQQCRTWDKMRNFVSNHVARPGEPGDDDLRNGHFDLCVAGAQGEKRTHVLLPQSWATTIRSGMGINIMRRDYRAPCVPFYLQHVPYDDDMCGCEHCRSQVQSRANTTQLPPVQTPPRNSAAALKGTASRRSSNRPFAASVASNLFTSQGQSLFTSHGHADSDTESCSSQIDNDFSISEHGEDVVGNADQDMVALLGNLDFESELPATTLNLDQLLDRWTNAHYTIGAESDISSQSEIT

SEQ ID NO: 25015 - DNA, 814 bp, Muscodor strobelii
  misc_feature: SGI EST ID NO. CUFF.58911.0
  misc_feature: Variant of the nucleotide sequence at SEQ ID NO 25013
ggggcacaaccatttcagcggatcgtccggccactcagccgcagcaagagttatcctcatggacaggctcttcgaaccaggtgcagcaagagccaatcagagcagatgcagattctgctatgcacagcacagaaaccggacagaagcgacgcgttgagaatacggaacaaggctcaatacaaatgtcgtcattgacaccggtgctatcgttgagcccagggccaattgatgcaaaacaagaaccatcgactgtgacatgctctgttttaccggaaaacaagaaacccgagagcttcagctctatacagagcgcaacggcagacttcaatgcccaaggctaccatgggagtcccaccagtgcattcaacatgaatgtcaccacgagcgataccccaggatttgcacaagctactccgaccaatgacggacggggcaacaaggatattctggaggcatacattatcgattcctgtagtatcaaagcgcgccgactagagatcaacattgagcagctgcatgaatctttgaagaagatacaaactctaaatcgagattctctagtggagagattcatgtctttgagcaggcattgtaggttttacatccaaaaatggattaccgagaccaactccatcagtccataccctgcgattctcttagatatccttgtccgaccatcgacagatgacagtgcttccgacgacgccgttgtgctcttctttagtcgccgtacagccccgctcgagcttattcgattgaatgatgtcgcgaagagaaagaccttcgacgtgccacttcagcaatgtcgcacttg

SEQ ID NO: 25016 - DNA, 2436 bp, Muscodor strobelii
  misc_feature: SGI cDNA ID NO. 568535
  misc_feature: Encodes the peptide sequence at SEQ ID NO 25017
atggtctcacccaaggtctgcaagaaatgcgaaaaggagctcttcaacaaaaaggctttcaagcaggcgttactggagaatttcggacacgacgcaaacagctgcagcatgtcatggactgcaaatgaggtgtcccccacatgcgacttttgtgctttcgcatgctatgctacacaggagaacctgccgttccctggccaggagcatgtgctaggagaagagaacccagagatagaaaccttggcggggaagcggcttcaattcatcaacgcgtctgttgaaccgacagaagactatagcattggcgaaggcttagcgcttatgaaaacagtctcgtccaagaccatgtactggactgtgtcaactacagccgatgacccgatggccaaatccatccgttatagaccagtccagcgccatttactgtcaatcgaaaatcatcgtttactctccgcttcgatcagtaaatgtgtcaagcgtcatcgcctttgtcgtcgcgagatggcacgactgccaactagggtcatcgaagtgctaccgagctcctcttccgctccttcagcacagagttttggattgcgtcttcatgaggtagctccgggcgagatgggcaactacgccgccctcagctattgctggggtggtaaccaacccttccaaaccacaacgagcaatgtggaggagtacaagcagtccattgacccagcctttgttccgcctaccatccgtgatgccatcgtagtcacgcagctgctcggtctcaaattcctttgggtcgactcattttgcatcatccaggactcggaaacggacaagacgaatgaactccctaggatgcactcgatttatcgacaatcgtttgttacgatcgctgcgacagacgcaaaagccgcaacagaggggtttctccgttgtgaaggaaaatcccttccaaggacctttcaactaccttgttttgacgccaaagggagaaagggctccatgtacctgacgccttgcactccggtagaaaagctggcgatcaatcagcgggcgtggtgtatggtagaacacatactgagttctcgttatcttgcctttgacgccgctcaaagaacgatgaacttccattgccggcaggctaggaccgagaacggcggtatgaaaaagctacttggattcgaaagctcgcaaactcaacttcaggctgctttcttccgacgtcagaagaagatggggaagagtgttaaggtctcatcagactcgacaggctcaagaacgggctcggaagacagcgagtggagtgacgactctgatgagccgagcgaggattctgatgagtcaagcgacatctcaagctcttcaaccgattctgttgtcgcacagaagctcaagttagaagtttggtggtaccacttagtgaccgattattccgccagaaagcttacgaatccgagcgataggctgcctgcatttttcggtatcgcagatgcatttagcatgatatggaagtctagctatacagctggtatgtgggagcaccatttcccgcgctgtctccggtggaagatggcagccacgcctaaatcttcagacacttcggatgattcggatgaagattcggattcagacctggacgaagatatgccatacaacggtattgaggacccctacgaaaagggcggctcggcgactacaggtctgcgtcccactgatgcggcgggagccaagttgttgagggcgcccacttggtcttgggcaagcatagaaggtcctgtcgagtttcacaatctcaagcagctaactgaagatgcgtttgatggcgatacgagctcgttcggcgacgacatgctcttggacgtcattgatcacaaacagagacgatgggttgcgaaagtaaaaccaatactctgctcttgggaagcagagcctgtgaatcctgggttgccgtttggagatacacgtttcgcaaagatcgtcatcgagggtgtcatagtcaggccgccaaaacacttcaagtggtttaaccatggaacaggtcgcaatcagacgaaactcaataggcaaagcaccgaacccgagggtagtaacggtgatgcaaacaagatcacagacaaccgtagcccgtcgggcaatatgagcaaaagtgatgacgatggcagcgacgaggtgtctgctacctcaacccgcgagtctgggtctgaatcagaagcagactccgagaactccagagccgatgggtgcctgagtggcatcggttatttagacgtgcctcatgaaatacctcgccctggctccgaaatcaagtgcttgctattggaaatggatcactccgagacattcggtctgcttctttctagagaacgaggcaatgatagttggcagcgcatcggacactttgaagatattccttgggggttcttcaaagttgaaagacagcgagttgaaatcgtgtga

SEQ ID NO: 25017 - protein, 811 aa, Muscodor strobelii
  misc_feature: SGI Peptide ID NO. 568535
  misc_feature (206)..(350): Pfam Id: PF06985 Pfam Desc: Heterokaryon incompatibility protein (HET)
  misc_feature (206)..(292): Pfam Id: PF06985 Pfam Desc: Heterokaryon incompatibility protein (HET)
  misc_feature (111)..(601): NCBI GI: 256723935 Blast Desc: NECHADRAFT_78444 [Nectria haematococca mpVI 77-13-4]
  misc_feature (206)..(586): NCBI GI: 238585000 Blast Desc: MPER_09943 [Moniliophthora perniciosa FA553] gi|215454498|gb|EEB91665.1| MPER_09943 [Moniliophthora perniciosa FA553]
  misc_feature (4)..(506): NCBI GI: 115388139 Blast Desc: [Aspergillus terreus NIH2624] gi|114195659|gb|EAU37359.1| [Aspergillus terreus NIH2624]
  misc_feature (121)..(607): NCBI GI: 168041122 Blast Desc: [Physcomitrella patens subsp. patens] gi|162675588|gb|EDQ62081.1| [Physcomitrella patens subsp. patens]
  misc_feature (120)..(588): NCBI GI: 238502093 Blast Desc: conserved [Aspergillus flavus NRRL3357] gi|220691090|gb|EED47438.1| conserved [Aspergillus flavus NRRL3357]
  misc_feature (154)..(675): NCBI GI: 171690690 Blast Desc: protein product [Podospora anserina] gi|170945293|emb|CAP71405.1| protein product [Podospora anserina]
  misc_feature (125)..(516): NCBI GI: 46137909 Blast Desc: FG10469.1 [Gibberella zeae PH-1]
  misc_feature (125)..(587): NCBI GI: 256723310 Blast Desc: NECHADRAFT_86482 [Nectria haematococca mpVI 77-13-4]
  misc_feature (120)..(588): NCBI GI: 256725880 Blast Desc: NECHADRAFT_82031 [Nectria haematococca mpVI 77-13-4]
  misc_feature (126)..(590): NCBI GI: 256728052 Blast Desc: NECHADRAFT_23862 [Nectria haematococca mpVI 77-13-4]
MVSPKVCKKCEKELFNKKAFKQALLENFGHDANSCSMSWTANEVSPTCDFCAFACYATQENLPFPGQEHVLGEENPEIETLAGKRLQFINASVEPTEDYSIGEGLALMKTVSSKTMYWTVSTTADDPMAKSIRYRPVQRHLLSIENHRLLSASISKCVKRHRLCRREMARLPTRVIEVLPSSSSAPSAQSFGLRLHEVAPGEMGNYAALSYCWGGNQPFQTTTSNVEEYKQSIDPAFVPPTIRDAIVVTQLLGLKFLWVDSFCIIQDSETDKTNELPRMHSIYRQSFVTIAATDAKAATEGFLRCEGKSLPRTFQLPCFDAKGRKGSMYLTPCTPVEKLAINQRAWCMVEHILSSRYLAFDAAQRTMNFHCRQARTENGGMKKLLGFESSQTQLQAAFFRRQKKMGKSVKVSSDSTGSRTGSEDSEWSDDSDEPSEDSDESSDISSSSTDSVVAQKLKLEVWWYHLVTDYSARKLTNPSDRLPAFFGIADAFSMIWKSSYTAGMWEHHFPRCLRWKMAATPKSSDTSDDSDEDSDSDLDEDMPYNGIEDPYEKGGSATTGLRPTDAAGAKLLRAPTWSWASIEGPVEFHNLKQLTEDAFDGDTSSFGDDMLLDVIDHKQRRWVAKVKPILCSWEAEPVNPGLPFGDTRFAKIVIEGVIVRPPKHFKWFNHGTGRNQTKLNRQSTEPEGSNGDANKITDNRSPSGNMSKSDDDGSDEVSATSTRESGSESEADSENSRADGCLSGIGYLDVPHEIPRPGSEIKCLLLEMDHSETFGLLLSRERGNDSWQRIGHFEDIPWGFFKVERQRVEIV

SEQ ID NO: 25018 - DNA, 2865 bp, Muscodor strobelii
  misc_feature: SGI EST ID NO. CUFF.58917.0
  misc_feature: Variant of the nucleotide sequence at SEQ ID NO 25016
gggagatcagcattgatagaggttcttgaaaccccgcacgagctccacagtgcaatgattgcaggtatcaatgctgccgttgagatattgattatttctatgtaacatgtctccccctttttgcttctcgatttgaagaacatctcgtgcgccttatttaagcaatttacgtcgtacatttcgtctccctgcactcctccttgtaccagcgtaatggtctcacccaaggtctgcaagaaatgcgaaaaggagctcttcaacaaaaaggctttcaagcaggcgttactggagaatttcggacacgacgcaaacagctgcagcatgtcatggactgcaaatgaggtgtcccccacatgcgacttttgtgctttcgcatgctatgctacacaggagaacctgccgttccctggccaggagcatgtgctaggagaagagaacccagagatagaaaccttggcggggaagcggcttcaattcatcaacgcgtctgttgaaccgacagaagactatagcattggcgaaggcttagcgcttatgaaaacagtctcgtccaagaccatgtactggactgtgtcaactacagccgatgacccgatggccaaatccatccgttatagaccagtccagcgccatttactgtcaatcgaaaatcatcgtttactctccgcttcgatcagtaaatgtgtcaagcgtcatcgcctttgtcgtcgcgagatggcacgactgccaactagggtcatcgaagtgctaccgagctcctcttccgctccttcagcacagagttttggattgcgtcttcatgaggtagctccgggcgagatgggcaactacgccgccctcagctattgctggggtggtaaccaacccttccaaaccacaacgagcaatgtggaggagtacaagcagtccattgacccagcctttgttccgcctaccatccgtgatgccatcgtagtcacgcagctgctcggtctcaaattcctttgggtcgactcattttgcatcatccaggactcggaaacggacaagacgaatgaactccctaggatgcactcgatttatcgacaatcgtttgttacgatcgctgcgacagacgcaaaagccgcaacagaggggtttctccgttgtgaaggaaaatcccttccaaggacctttcaactaccttgttttgacgccaaagggagaaagggctccatgtacctgacgccttgcactccggtagaaaagctggcgatcaatcagcgggcgtggtgtatggtagaacacatactgagttctcgttatcttgcctttgacgccgctcaaagaacgatgaacttccattgccggcaggctaggaccgagaacggcggtatgaaaaagctacttggattcgaaagctcgcaaactcaacttcaggctgctttcttccgacgtcagaagaagatggggaagagtgttaaggtctcatcagactcgacaggctcaagaacgggctcggaagacagcgagtggagtgacgactctgatgagccgagcgaggattctgatgagtcaagcgacatctcaagctcttcaaccgattctgttgtcgcacagaagctcaagttagaagtttggtggtaccacttagtgaccgattattccgccagaaagcttacgaatccgagcgataggctgcctgcatttttcggtatcgcagatgcatttagcatgatatggaagtctagctatacagctggtatgtgggagcaccatttcccgcgctgtctccggtggaagatggcagccacgcctaaatcttcagacacttcggatgattcggatgaagattcggattcagacctggacgaagatatgccatacaacggtattgaggacccctacgaaaagggcggctcggcgactacaggtctgcgtcccactgatgcggcgggagccaagttgttgagggcgcccacttggtcttgggcaagcatagaaggtcctgtcgagtttcacaatctcaagcagctaactgaagatgcgtttgatggcgatacgagctcgttcggcgacgacatgctcttggacgtcattgatcacaaacagagacgatgggttgcgaaagtaaaaccaatactctgctcttgggaagcagagcctgtgaatcctgggttgccgtttggagatacacgtttcgcaaagatcgtcatcgagggtgtcatagtcaggccgccaaaacacttcaagtggtttaaccatggaacaggtcgcaatcagacgaaactcaataggcaaagcaccgaacccgagggtagtaacggtgatgcaaacaagatcacagacaaccgtagcccgtcgggcaatatgagcaaaagtgatgacgatggcagcgacgaggtgtctgctacctcaacccgcgagtctgggtctgaatcagaagcagactccgagaactccagagccgatgggtgcctgagtggcatcggttatttagacgtgcctcatgaaatacctcgccctggctccgaaatcaagtgcttgctattggaaatggatcactccgagacattcggtctgcttctttctagagaacgaggcaatgatagttggcagcgcatcggacactttgaagatattccttgggggttcttcaaagttgaaagacagcgagttgaaatcgtgtgaatggcaatctgttcccggatctgaagcttcgttgcaattataggagactactctcctgcagctcaatgtgttgccggttttgattcatgtgtcgatacaatgcgcagtgaagaaatcacctaaaataaatactaattgacttttgcagaggcgtggcagcaagcttcttcacttgctacctaaatcatcctccctcgcctaataattcaggctttc

SEQ ID NO: 25019 - DNA, 813 bp, Muscodor strobelii
  misc_feature: SGI cDNA ID NO. 568536
  misc_feature: Encodes the peptide sequence at SEQ ID NO 25020
atgtcacgagccggtaatacgccggcagtagcagccgctgggggctcacgccaagaagaatccggaaccgaaattctctatttcgcctatggctccaacctttcagacacacagatgcaacagcgatgccctgatagtcctgccgttggcctagcgcacgtttccggattcgaatggatcatcaacgagcgcgggtatgcgaatattatagagatcggaggaacaggggtgtcgcctaagctgatccgggatcatatttctaacataaactctgctctccgtgaaggcaaagctggagataacaatgctagcggcggtgaccaagagtcacaggcatctggggagaagaatcaagaagaacacagaggccggggtgtttacggcgtagtctatcgcctacatccactcgacggcgaagcactggacatatgcgaaggcgcgccgtacatctacgcgcgggaggcagttaacggtgtctggatcgatgacttccgtgacctcgacaagaaccaaaaccaaggtacagacaagagcataaataaccgacaaatgcccaagaccaaatcctggaaaagcgattcacaagggcgagcagagcccaaggcgcggaagggtgagcgagagacagaggggaaagctgttcgtctcatagcatacatcgaccgcaataacgtgacaccgtcggcgcctaagatggagtatatcgggcgcatcaatcgcggcatcagagaggcggcggcccagtatcggttgcctgatgattatgtcgatagggttattcggaagttcattccaaaagatgatgagcactga

SEQ ID NO: 25020 - protein, 270 aa, Muscodor strobelii
  misc_feature: SGI Peptide ID NO. 568536
  misc_feature (1)..(263): NCBI GI: 256729909 Blast Desc: NECHADRAFT_46522 [Nectria haematococca mpVI 77-13-4]
  misc_feature (21)..(269): NCBI GI: 189194165 Blast Desc: conserved [Pyrenophora tritici-repentis Pt-1C-BFP] gi|187978985|gb|EDU45611.1| conserved [Pyrenophora tritici-repentis Pt-1C-BFP]
  misc_feature (27)..(265): NCBI GI: 39976875 Blast Desc: MGG_06340 [Magnaporthe grisea 70-15] gi|145016260|gb|EDK00750.1| MGG_06340 [Magnaporthe grisea 70-15]
  misc_feature (1)..(266): NCBI GI: 46122215 Blast Desc: FG05485.1 [Gibberella zeae PH-1]
  misc_feature (27)..(269): NCBI GI: 116192855 Blast Desc: CHGG_06145 [Chaetomium globosum CBS 148.51] gi|88182058|gb|EAQ89526.1| CHGG_06145 [Chaetomium globosum CBS 148.51]
  misc_feature (26)..(268): NCBI GI: 169618966 Blast Desc: SNOG_12675 [Phaeosphaeria nodorum SN15] gi|111058853|gb|EAT79973.1| SNOG_12675 [Phaeosphaeria nodorum SN15]
  misc_feature (26)..(265): NCBI GI: 121709121 Blast Desc: conserved [Aspergillus clavatus NRRL 1] gi|119400463|gb|EAW10888.1| conserved [Aspergillus clavatus NRRL 1]
  misc_feature (26)..(267): NCBI GI: 67904194 Blast Desc: AN9084.2 [Aspergillus nidulans FGSC A4] gi|40742727|gb|EAA61917.1| AN9084.2 [Aspergillus nidulans FGSC A4]
  misc_feature (26)..(265): NCBI GI: 259485505 Blast Desc: TPA: ER glycosyl hydrolase (Edem), (AFU_orthologue; AFUA_7G02290) [Aspergillus nidulans FGSC A4]
  misc_feature (25)..(266): NCBI GI: 212546067 Blast Desc: conserved [Penicillium marneffei ATCC 18224] gi|210064707|gb|EEA18802.1| conserved [Penicillium marneffei ATCC 18224]
MSRAGNTPAVAAAGGSRQEESGTEILYFAYGSNLSDTQMQQRCPDSPAVGLAHVSGFEWIINERGYANIIEIGGTGVSPKLIRDHISNINSALREGKAGDNNASGGDQESQASGEKNQEEHRGRGVYGVVYRLHPLDGEALDICEGAPYIYAREAVNGVWIDDFRDLDKNQNQGTDKSINNRQMPKTKSWKSDSQGRAEPKARKGERETEGKAVRLIAYIDRNNVTPSAPKMEYIGRINRGIREAAAQYRLPDDYVDRVIRKFIPKDDEH

SEQ ID NO: 25021 - DNA, 6599 bp, Muscodor strobelii
  misc_feature: SGI EST ID NO. CUFF.58927.0
  misc_feature: Variant of the nucleotide sequence at SEQ ID NO 25019
ctcttgctataggccacacctcattgcgtgaccctattatatgtctaggcatcgcggctgcttctccacatcaataacgcaagaaataggccattttccatcacacaaaatccaggcactgcactgcgtgctttgaggggtttgaatcggcctcgaaacttataggttgatgcgatttgcattgatccgtcggtaaatattgagaagggaccaggtcgagcggattggagatgtgtttcataaggcaactcgcgtcattgcttggctggggcgcgaagagaacgacagcagtgggtttaggcgatggcaatggcggtggcggtgctgtgcggctgtgtctcatcctgtacatctctgacgtccggaaccatcgctgggtgttcagccgctgcgaacctgcgttacgggaaatagagtcgggatgacctggttgccttgtctgcctcaaaactcatccaaggcccaccaggctccgagcatatttgggtatgtccttgtcttcgccagagttaaccttattgcccatgccttatcacttatctcatggcatcgctcggaaagttgaccaatgcgttcctgcaagcatcccaagagacgacgctcaccttggccaacttgaacttcaatttcgctcttatcaagtatgacgcacccgaggaataccgcagcctcggggagtctctctccactcgccggaagatagctggcgaggatggtcccattcacatagcagcccgcaagttgacggcgctcttccagagcatcattcctcctgttccaaacctcatacgggcctacggggtgcgggccagtgaggttgcggcgctgtccaatctcaacccgcgcgggaatgcaagacaggcgatgttcgctgaacatgtcggcgctgacgggacaagtatctgggcctcggctacttctggaaaggacgccgttaccatgcatctacttgcctgcatgctggcaaggatctggaaaagagagcaagcggttgctatctggacggagcttgtcgagcagagaaaagcatttcttactacggttgcagaaaccagcgaaccgttccaggtgtctgatcaggcagcgtctcgcattgagctgagcaggagcgagctggacgaatgggactcaagcgcaagagcttggcttgaaaccgccgatgcgggccaaaaacttcgccagactcaactgaggctcattgttgataacatctcattgccagtctctacgagcaacagtatatactcagcaatcacggatgcctggaccggtgccatgcaagccctcgagagtctgattaagggcgcaccgcagcgcatcaacaacggcgcggttctactaggtctatcggcgtggcatttgtaccccaacatggttcttgctggtacaaatcagcacatcaatcaatcggatcccttggttaatccagggggcatcatcacggtcgggctgcaaaacacagctgaaaatagcaaaggggtagtctggtcgcttcccttaacccaggcgaggtactatggtgagcctgtcatgacaacacggcatgcgggtgtcagagaatcacaagtttctttcgaagaatccatgcttgttgttgtcggcagcgttctgggatcctgtcaactaaaggcaccggatattgacaatgcactagagctagtgaaaattattgcatgcgcggcaaaatctttcagccactcgccgaaaacacccaatcccctccgaaattggaatggacaagatttggttgcatgtctatcattgttgggaacatctgccgagtattattcaggggcggctggcgtcgagaaacagaatctaaatcgtcttatcaggtacggtcagcggaactgctccagacttctgtctacgcgagaggcatatccagcgcctgcatttggcttgaccgactttcgagtgcttcttacttccttcgggcgcaagtctgaggatcgaatatccttcctccgtaagtgggcaattagagaacttgacccaagcatcgtcaccaatgcgattatccggtacaaaaaaggtcagcatgccaagtatcactacgccaatatcgttaaggaccgcgagcctccgaccaaacgacgcagaggtgaagtcacgtcggggagaggtagcattggcgttattagtctacattggaccatagagcatgctctacccgaggcagatcaagacacctttgacgttgctgttgagtcggaagacgggcctgtcgacatgccgcctggacctggatgcgagccattaccgcatatatttgcgtgtggcgacccggtctcagcggcaatctacattccatcttccctcgtatccaaaaatcccgttaaggataactgtatgactgccatgcagctatacgcttgcgtcaaagaaggcgatatcaccaacaaacacattgcgcacgtactcgaagagaaccgcatgtcttggtctaagacaaaagcatattacgagtctctctctgctattgaagtttccagtaggatctaccgcaaccttcctggtgccagcgtaaacttgcagaccatgtcccttactgtaagcagagcgaaatggtggcaaagtatgaagacatccgggtcagacaagctgcaggcaatcatgagctgcatagcatactttgaaaccggaacattggatataaacccggaagatcttggaaaacacacctttgccgtttgtcatgggacatcgatctttgtagcaagccgacttttaggcgacccggttgacagtaccctagagcactcggttgagagaataattgggaatgttggcaagcctggattatcatttctcgtcaccccgccagatccaaaaggacaacacttcgatccttcatcctggcacttaattgcccatgagaaatatgacgggaagatacaggatagcttccaaggaacgtccttgcacctttccttcaccggctatagccatcctctcggagtcagccagcgcagcatgcgagatgttcctgcacaattgctcgagactgctatatctgtatacgataaggataaatggatagcagacctggacattctagtagcgtctcttcattggaatatagcaccagaagcatcatgctcgcaccctccgggcaccatgggtgaggccgctgacatatccctcatatcagtggacacatggttggaagttcttgatccgcctcgacttggtcaatatggcgttgtacgcgccagcggtaatcccattgcaagacttgcaacagcgacttttgctgttcaaaagggtcgaagggtcttgattcttccagaaagaacatgctggcattgtcaaggggagtcatttatctttgggcgccgccatactgcacgacatagcactgtcgaggccaatgacttcgctactctattcgggtctcatgacaaatccaataatgaagacagcttcgactttgaagctactgcgagttccgatggggtacaatcggagtacgcaaatgacgaaatgatgcgctcggaaaatgcttctagcaaagaagacgctgaaagcacggatgccgcggatgcggttctttttgttatttattgacagggttgtgaatttagtctgtagtcattaagtgtagtcttagaccctggatgtatcttagtggagtcgcctgcccgacggtgcccccctagtacagcacccccaaacccctaatcattcccccaagtgcccttataacacgccgtagagcggacatgttcaatcattagatagcttagcgtctgcccctcatgaccgttcggccatgttgttcatgtttcggggtcagaaactcaatgcgtgaatataaaacagggcgagcctgtgtaattggtaatcatgagatggttactcacgtgaccaaaggtgctccgaccgatctgttagatcatctagactccataattattcctgtccacaagccatcttcacttatagatcaaacagcatactggaccaactgttccttaatttgcgaatctgggaccagaattcaccgtgactgactgactcacaataactcagagagcaagcgttgtacccataagaattggatgagacactacgttgagcttcggcagcccatgcagtgagccgataaacacctacctcctcatgactcataattgagcaggcagctatgttatctcttcgttaaggagtatctcaccactatgaattgttaattctctacctcgctcctcgtctcattctcactcatctcttaacttcctggagacacggcatgtcacgagccggtaatacgccggcagtagcagccgctgggggctcacgccaagaagaatccggaaccgaaattctctatttcgcctatggctccaacctttcagacacacagatgcaacagcgatgccctgatagtcctgccgttggcctagcgcacgtttccggattcgaatggatcatcaacgagcgcgggtatgcgaatattatagagatcggaggaacaggggtgtcgcctaagctgatccgggatcatatttctaacataaactctgctctccgtgaaggcaaagctggagataacaatgctagcggcggtgaccaagagtcacaggcatctggggagaagaatcaagaagaacacagaggccggggtgtttacggcgtagtctatcgcctacatccactcgacggcgaagcactggacatatgcgaaggcgcgccgtacatctacgcgcgggaggcagttaacggtgtctggatcgatgacttccgtgacctcgacaagaaccaaaaccaaggtacagacaagagcataaataaccgacaaatgcccaagaccaaatcctggaaaagcgattcacaagggcgagcagagcccaaggcgcggaagggtgagcgagagacagaggggaaagctgttcgtctcatagcatacatcgaccgcaataacgtgacaccgtcggcgcctaagatggagtatatcgggcgcatcaatcgcggcatcagagaggcggcggcccagtatcggttgcctgatgattatgtcgatagggttattcggaagttcattccaaaagatgatgagcactgaggtcgagagcagaagagatcaggcgatatagccgaaaagattgcgcattggcgccttgcgtcatcaaagggcctttggagaagcggcgtcataacgagctgaacgacagtcgtgacccgtactgcatcgatttcctgattacgctcgtcgcgtccttttgagtgcaatctggagcccgtccccgttcagacatttctagattgtttcgtaagcatcggcgtgtcgtgtatgaaggctatggacggtatcttgctagtattgtattcgttggcagagagtcgaggagaaccatagagctattgtgattgaccgtgtagaaggggcagaagcgacaggcctgacgaaatcgcgatgagggtgcagcgtttgagtccaaggatttgacaatcgacaaaaaaggtttcggaaccgatgcgatgaagtcctccaataatgtgacgacatgcgctccgtcatcccgaattgataaggcacgcagaccacaaatgggagcatgttccaatgtctcttcccagtgactctggataagagaatcaagagaccagatcattcgagtgtctcaaagccgctgctgcagatgagataatcaggtgtgtagtattgtcagttaggacctgcagcaagaacttgtacaaggccaagccttgaccggcctgactgtgagacactttataccataattatcaaggctaacaagacctttgcatttgcaaacagatctggtccctacgaagacaaaaaaattcagttttcaaaacatcaactggcagatttagtcctattatcttgtctcctgtgtcatcaaggatcaaccaagcaagaaaccaagccttgtggccatgagcgcttgacgacagacgacacgtcggacacagggtcctaagtatcactcaatgctacacaattactggcagctcatgcagcaacccgatagacacgttcttccccgcttctcataagtgaacaggcaatgcttgacttggaaaacatctcacatgtgggatagtgagtagacgacgtccaccgagaaattcctcacgtctatctcgaactgatcatcacgatgttgactgtcaatgctttcaatgcttaaacatcaatttgctctataacttagaatcgctgtggtcaagcatcatgcaccaaaggaataaaagtgaaaaagaaaaaaaaaaaaaaaaaaggagcggagatgaggccaccatgacacatatcctaatgcagccgtagagactgataggtgacgccttatctcgggtattacaacggctcgaacacgagaccttctggaagagcaggttggctaatcctgacaacttaccactgcactaccccgctatgttggtgatacgactgatatccaagcctatagctacggtgctgggagatgccccactgcagactgacaagaggaaggtgcgatggttgctaaggcagcacctgccctcacagcagcatgagtcgacccaagcgcaccaagcacatcaagcactgtctctgtctccacgtaacaccctagacgctcaaaaag

SEQ ID NO: 25022 - DNA, 3027 bp, Muscodor strobelii
  misc_feature: SGI cDNA ID NO. 568537
  misc_feature: Encodes the peptide sequence at SEQ ID NO 25023
atggcatcgctcggaaagttgaccaatgcgttcctgcaagcatcccaagagacgacgctcaccttggccaacttgaacttcaatttcgctcttatcaagtatgacgcacccgaggaataccgcagcctcggggagtctctctccactcgccggaagatagctggcgaggatggtcccattcacatagcagcccgcaagttgacggcgctcttccagagcatcattcctcctgttccaaacctcatacgggcctacggggtgcgggccagtgaggttgcggcgctgtccaatctcaacccgcgcgggaatgcaagacaggcgatgttcgctgaacatgtcggcgctgacgggacaagtatctgggcctcggctacttctggaaaggacgccgttaccatgcatctacttgcctgcatgctggcaaggatctggaaaagagagcaagcggttgctatctggacggagcttgtcgagcagagaaaagcatttcttactacggttgcagaaaccagcgaaccgttccaggtgtctgatcaggcagcgtctcgcattgagctgagcaggagcgagctggacgaatgggactcaagcgcaagagcttggcttgaaaccgccgatgcgggccaaaaacttcgccagactcaactgaggctcattgttgataacatctcattgccagtctctacgagcaacagtatatactcagcaatcacggatgcctggaccggtgccatgcaagccctcgagagtctgattaagggcgcaccgcagcgcatcaacaacggcgcggttctactaggtctatcggcgtggcatttgtaccccaacatggttcttgctggtacaaatcagcacatcaatcaatcggatcccttggttaatccagggggcatcatcacggtcgggctgcaaaacacagctgaaaatagcaaaggggtagtctggtcgcttcccttaacccaggcgaggtactatggtgagcctgtcatgacaacacggcatgcgggtgtcagagaatcacaagtttctttcgaagaatccatgcttgttgttgtcggcagcgttctgggatcctgtcaactaaaggcaccggatattgacaatgcactagagctagtgaaaattattgcatgcgcggcaaaatctttcagccactcgccgaaaacacccaatcccctccgaaattggaatggacaagatttggttgcatgtctatcattgttgggaacatctgccgagtattattcaggggcggctggcgtcgagaaacagaatctaaatcgtcttatcaggtacggtcagcggaactgctccagacttctgtctacgcgagaggcatatccagcgcctgcatttggcttgaccgactttcgagtgcttcttacttccttcgggcgcaagtctgaggatcgaatatccttcctccgtaagtgggcaattagagaacttgacccaagcatcgtcaccaatgcgattatccggtacaaaaaaggtcagcatgccaagtatcactacgccaatatcgttaaggaccgcgagcctccgaccaaacgacgcagaggtgaagtcacgtcggggagaggtagcattggcgttattagtctacattggaccatagagcatgctctacccgaggcagatcaagacacctttgacgttgctgttgagtcggaagacgggcctgtcgacatgccgcctggacctggatgcgagccattaccgcatatatttgcgtgtggcgacccggtctcagcggcaatctacattccatcttccctcgtatccaaaaatcccgttaaggataactgtatgactgccatgcagctatacgcttgcgtcaaagaaggcgatatcaccaacaaacacattgcgcacgtactcgaagagaaccgcatgtcttggtctaagacaaaagcatattacgagtctctctctgctattgaagtttccagtaggatctaccgcaaccttcctggtgccagcgtaaacttgcagaccatgtcccttactgtaagcagagcgaaatggtggcaaagtatgaagacatccgggtcagacaagctgcaggcaatcatgagctgcatagcatactttgaaaccggaacattggatataaacccggaagatcttggaaaacacacctttgccgtttgtcatgggacatcgatctttgtagcaagccgacttttaggcgacccggttgacagtaccctagagcactcggttgagagaataattgggaatgttggcaagcctggattatcatttctcgtcaccccgccagatccaaaaggacaacacttcgatccttcatcctggcacttaattgcccatgagaaatatgacgggaagatacaggatagcttccaaggaacgtccttgcacctttccttcaccggctatagccatcctctcggagtcagccagcgcagcatgcgagatgttcctgcacaattgctcgagactgctatatctgtatacgataaggataaatggatagcagacctggacattctagtagcgtctcttcattggaatatagcaccagaagcatcatgctcgcaccctccgggcaccatgggtgaggccgctgacatatccctcatatcagtggacacatggttggaagttcttgatccgcctcgacttggtcaatatggcgttgtacgcgccagcggtaatcccattgcaagacttgcaacagcgacttttgctgttcaaaagggtcgaagggtcttgattcttccagaaagaacatgctggcattgtcaaggggagtcatttatctttgggcgccgccatactgcacgacatagcactgtcgaggccaatgacttcgctactctattcgggtctcatgacaaatccaataatgaagacagcttcgactttgaagctactgcgagttccgatggggtacaatcggagtacgcaaatgacgaaatgatgcgctcggaaaatgcttctagcaaagaagacgctgaaagcacggatgccgcggatgcggttctttttgttatttattga

SEQ ID NO: 25023 - protein, 1008 aa, Muscodor strobelii
  misc_feature: SGI Peptide ID NO. 568537
  misc_feature (3)..(907): NCBI GI: 169605903 Blast Desc: SNOG_05984 [Phaeosphaeria nodorum SN15] gi|111065928|gb|EAT87048.1| SNOG_05984 [Phaeosphaeria nodorum SN15]
  misc_feature (12)..(923): NCBI GI: 145244114 Blast Desc: An11g05770 [Aspergillus niger] gi|134079251|emb|CAK40734.1| [Aspergillus niger]
  misc_feature (1)..(928): NCBI GI: 46137867 Blast Desc: FG10449.1 [Gibberella zeae PH-1]
  misc_feature (3)..(923): NCBI GI: 115492241 Blast Desc: [Aspergillus terreus NIH2624] gi|114197608|gb|EAU39308.1| [Aspergillus terreus NIH2624]
  misc_feature (3)..(923): NCBI GI: 255945597 Blast Desc: Pc20g10770 [Penicillium chrysogenum Wisconsin 54-1255] gi|211588301|emb|CAP86406.1| Pc20g10770 [Penicillium chrysogenum Wisconsin 54-1255]
  misc_feature (3)..(926): NCBI GI: 145609608 Blast Desc: MGG_09129 [Magnaporthe grisea 70-15] gi|145017020|gb|EDK01383.1| MGG_09129 [Magnaporthe grisea 70-15]
  misc_feature (3)..(926): NCBI GI: 149210921 Blast Desc: MGCH7_ch7g933 [Magnaporthe grisea 70-15] gi|86196888|gb|EAQ71526.1| MGCH7_ch7g933 [Magnaporthe grisea 70-15]
  misc_feature (1)..(494): NCBI GI: 238844746 Blast Desc: conserved [Microsporum canis CBS 113480]
  misc_feature (3)..(373): NCBI GI: 169604668 Blast Desc: SNOG_05349 [Phaeosphaeria nodorum SN15] gi|160706620|gb|EAT87740.2| SNOG_05349 [Phaeosphaeria nodorum SN15]
  misc_feature (1)..(519): NCBI GI: 256731930 Blast Desc: NECHADRAFT_80807 [Nectria haematococca mpVI 77-13-4]
MASLGKLTNAFLQASQETTLTLANLNFNFALIKYDAPEEYRSLGESLSTRRKIAGEDGPIHIAARKLTALFQSIIPPVPNLIRAYGVRASEVAALSNLNPRGNARQAMFAEHVGADGTSIWASATSGKDAVTMHLLACMLARIWKREQAVAIWTELVEQRKAFLTTVAETSEPFQVSDQAASRIELSRSELDEWDSSARAWLETADAGQKLRQTQLRLIVDNISLPVSTSNSIYSAITDAWTGAMQALESLIKGAPQRINNGAVLLGLSAWHLYPNMVLAGTNQHINQSDPLVNPGGIITVGLQNTAENSKGVVWSLPLTQARYYGEPVMTTRHAGVRESQVSFEESMLVVVGSVLGSCQLKAPDIDNALELVKIIACAAKSFSHSPKTPNPLRNWNGQDLVACLSLLGTSAEYYSGAAGVEKQNLNRLIRYGQRNCSRLLSTREAYPAPAFGLTDFRVLLTSFGRKSEDRISFLRKWAIRELDPSIVTNAIIRYKKGQHAKYHYANIVKDREPPTKRRRGEVTSGRGSIGVISLHWTIEHALPEADQDTFDVAVESEDGPVDMPPGPGCEPLPHIFACGDPVSAAIYIPSSLVSKNPVKDNCMTAMQLYACVKEGDITNKHIAHVLEENRMSWSKTKAYYESLSAIEVSSRIYRNLPGASVNLQTMSLTVSRAKWWQSMKTSGSDKLQAIMSCIAYFETGTLDINPEDLGKHTFAVCHGTSIFVASRLLGDPVDSTLEHSVERIIGNVGKPGLSFLVTPPDPKGQHFDPSSWHLIAHEKYDGKIQDSFQGTSLHLSFTGYSHPLGVSQRSMRDVPAQLLETAISVYDKDKWIADLDILVASLHWNIAPEASCSHPPGTMGEAADISLISVDTWLEVLDPPRLGQYGVVRASGNPIARLATATFAVQKGRRVLILPERTCWHCQGESFIFGRRHTARHSTVEANDFATLFGSHDKSNNEDSFDFEATASSDGVQSEYANDEMMRSENASSKEDAESTDAADAVLFVIY

SEQ ID NO: 25024 - DNA, 6599 bp, Muscodor strobelii; identical to SEQ ID NO: 25021
  misc_feature: SGI EST ID NO. CUFF.58927.0
  misc_feature: Variant of the nucleotide sequence at SEQ ID NO 25022

SEQ ID NO: 25025 - DNA, 312 bp, Muscodor strobelii
  misc_feature: SGI cDNA ID NO. 568538
  misc_feature: Encodes the peptide sequence at SEQ ID NO 25026
atggggctcctcccgagcgcgagtctctgcgggattccggacactgcagtgccttccatctgtgaaccaattcatggcagcgcgccgggtacatcagtaaaaaggattatcaatcccattgccaccatcctttctatagccatgatgttccggtactctttaaatcttgcccacgaggctaaaatcatcgaggacgcgttcagcgccgccatcgacgccgggctaagaactaaggacatgggcggtaacacgggcaccatagaagcaggagatgtaatcgttgctaagccggtcaagattcttaaagcgtga

SEQ ID NO: 25026 - protein, 103 aa, Muscodor strobelii
  misc_feature: SGI Peptide ID NO. 568538
  misc_feature (1)..(93): Pfam Id: PF00180 Pfam Desc: Isocitrate/isopropylmalate dehydrogenase
  misc_feature (1)..(103): NCBI GI: 256720918 Blast Desc: NECHADRAFT_49896 [Nectria haematococca mpVI 77-13-4]
  misc_feature (1)..(103): NCBI GI: 225877958 Blast Desc: beta-isopropylmalate dehydrogenase [Gibberella fujikuroi]
  misc_feature (1)..(103): NCBI GI: 261360272 Blast Desc: 3-isopropylmalate dehydrogenase [Verticillium albo-atrum VaMs.102]
  misc_feature (26)..(103): NCBI GI: 116196122 Blast Desc: CHGG_04659 [Chaetomium globosum CBS 148.51] gi|88180572|gb|EAQ88040.1| CHGG_04659 [Chaetomium globosum CBS 148.51]
  misc_feature (1)..(103): NCBI GI: 46124595 Blast Desc: FG06675.1 [Gibberella zeae PH-1]
  misc_feature (1)..(103): NCBI GI: 4204106 Blast Desc: beta-isopropylmalate dehydrogenase [Neurospora crassa]
  misc_feature (1)..(103): NCBI GI: 85109778 Blast Desc: 3-isopropylmalate dehydrogenase [Neurospora crassa OR74A] gi|67476658|sp|P34738.2|LEU3_NEUCR RecName: Full=3-isopropylmalate dehydrogenase; Short=3-IPM-DH; Short=IMDH;
  misc_feature (1)..(103): NCBI GI: 740013 Blast Desc: 3-isopropylmalate dehydrogenase [Neurospora crassa OR74A] gi|67476658|sp|P34738.2|LEU3_NEUCR RecName: Full=3-isopropylmalate dehydrogenase; Short=3-IPM-DH; Short=IMDH;
  misc_feature (1)..(103): NCBI GI: 54036194 Blast Desc: LEU3_SORMA RecName: Full=3-isopropylmalate dehydrogenase; Short=3-IPM-DH; Short=IMDH; AltName: Full=Beta-IPM dehydrogenase gi|37223191|gb|AAQ90189.1| beta-isopropylmalate
  misc_feature (1)..(102): NCBI GI: 156051390 Blast Desc: SS1G_07102 [Sclerotinia sclerotiorum 1980] gi|154704880|gb|EDO04619.1| SS1G_07102 [Sclerotinia sclerotiorum 1980]
  misc_feature (1)..(103): SWISSPROT Homolog: EC 1.1.1.85 3-isopropylmalate dehydrogenase
MGLLPSASLCGIPDTAVPSICEPIHGSAPGTSVKRIINPIATILSIAMMFRYSLNLAHEAKIIEDAFSAAIDAGLRTKDMGGNTGTIEAGDVIVAKPVKILKA

SEQ ID NO: 25027 - DNA, 3009 bp, Muscodor strobelii
  misc_feature: SGI cDNA ID NO. 568539
  misc_feature: Encodes the peptide sequence at SEQ ID NO 25028
tccgccgcgtcgagcgcctcaacagccagaacttccagttctccctcgccatcaccaacctggaacgccatctcccaggacgccgccaaggacaaggaccgcaacgaccttcgtgagcagcggatcaccatccagctcgccggcagccgccaggcctgcgagcgcttctgcgatggcctcaagaagggcctccgcggcgccgtcggcaacgtcggcaagctcaagaaggtcatctccgagtgctactccgagtatctgctgcggcccgaggacaagaagagtgccccctcgcccgacgccgggctcggcatggtcttcaaatatcccggcgaccccaagaagctgcgggaccgagccaagatgcgcctgtgggccgagtatctgcgagacaacggccgcaatgccaccctgatacgccagcctaccttccacaagctcatccgcgtcggcctgcccaaccgtctgaggggagagatgtgggagctgacctcgggctctctgtatctgcgcctcgagacgcccagcttgtacgccgacaccctcgccaagttctccggcagggagtctctcgccatcgacgagatcgagaaggacctgaaccgcagcttgcctgaataccccggcttccagagcgaggatgggatcaataggctccgccgtgtgctgaccgcctacagttggatcaatcccgaggtgggctactgccaggccatgaacatcgttgtcgccgccctcctgatctacatgtccgaggcccaggccttcttcttgctgtccgccctctgcgaccgacttgtgccgggatactactcgtctaccatgtacggcaccctgctcgatcagaaagtgttcgagtcgctcgtcgagaagacgatgcccatcttgtgggaacacctcgtcaagagcgacgtgcagctctccgtcgtatcgctcccttggtttttatcgctctacatcaactccatgcctttggtgtttgcttttcgagttctggacgtcttttttgtagaagggcccaaggtcctcttccaggtcggcttggctattctgcgtatcaacggcgaagagctgctcgacgctaccgacgacggtgcatttatctccgtcttaaagtcttacttctcgcgccttgatgaatctgcgcatcccaaatctgaaaatcctaaactgcgggccattaaccgcttccaagaactcatggtcgtcgcctttaaagaattctccgccatcacgcacagcagcatccaagagctgcggctcaagaacaaggacgcagttctcaataacattgagaacttcgccaaacgcactgccatccggaacctgggccctgatagtaagctcttgagccccgaagagctcggttctctgtatgaccgtttctacggcatcctttacgagcggcaacaacgtgacagcatcatccaggaagagcagcgtcgccgggccaaggcgagcagaacaagagccaacgaggccttctctgaccatcacgatcatagcgtcgagaagggtcgtgtcggtctgggccctagtactagcctgatggactacgacgccttccgcgagttcctcgctagcgtatccaaatgggccatttccgacgcgcccgcatcatcgcctcggcgtggtcaacctaccgacaaagactataatccctatttcgggagcttcagacgctcagatcctaacctgctttctccatggggtgcgggcccagaaccagcagaacacgaattcattcagaggttattccatcgatgggacgtggactccagctcaagcttgacattacaaaatgtcgtgaccggactggcgcagatcaaggggaagaaagacataatgggcaccatcacctactttttcgaactttacgatgatgacggggatgggaaggtagaccgtgaaggcattctacgcatctccgaggccctgttgttcctgtcaagacgcggactcgagggttcactgagcacctctaactccactgcaaatctagatgggatggtaagtccggatggcgcttcattaagcccatctatgaccggaaccgtcagcgaacgcttcctagccagcgttagtgccttcatcaggcgatgcttcgaatacgccgaccctgatcactctgccaccgaacacgccggatccgctcgggagacttcgacttcgaccacttctaataacgagggaaaggccgatgacaatgcttttgccatcggcgatgatgaggatgaggacgaagaagatctcgtggcctttgaagatcctgcgagagacgcgagaccgacaaagaaaaagcccgaacttgaatctatccaagcggccatcggcaagccttcacgggaggactcgggcagaagcgtatccaaagcccaatctgagaaggcaaacgtggcattggatccttcccatcctttacatattactctacccaccttccgtatggtggtccttgcggacgagctcttagaacaattcttcgagtcgtcgttcccaacatcgctccacattatggatggcctaccacctatcaccagacagtcatcttcatccttaactactttttccggtctgaattttaaccggccgcctggcatatcaccatcccttccgccgccgggcttggccggtgcaggccgaggtctccgcggcgtattagataatattgttacagacgcgtcacgtgtggcggccgaagtacgccgaaggatggaggaagcacagcgtgaattggaaagaaatgcagcccccggtcagggagatgaagacgacgaagaggatgaagaccaggtttctatcaaaccttccggcggctacgccggagaccccgagcgacggagcgtgcgatcttccgatagagaccttttagacggtgcagatgccgatgccggtgctaccaaagggcaagaaggctccagcgagtctcttcttgatactgatatcgctccagaagagggcgcggataaacctaataccgcgacgcaaagaattgtggagttcgagagttga

SEQ ID NO: 25028 - protein, 1002 aa, Muscodor strobelii
  misc_feature: SGI Peptide ID NO. 568539
  misc_feature (147)..(360): Pfam Id: PF00566 Pfam Desc: TBC domain
  misc_feature (20)..(1002): NCBI GI: 119182141 Blast Desc: CIMG_06116 [Coccidioides immitis RS]
  misc_feature (20)..(961): NCBI GI: 226291103 Blast Desc: GTPase-activating protein GYP2 [Paracoccidioides brasiliensis Pb18]
  misc_feature (20)..(961): NCBI GI: 225679381 Blast Desc: GTPase-activating protein [Paracoccidioides brasiliensis Pb03]
  misc_feature (40)..(961): NCBI GI: 169777997 Blast Desc: [Aspergillus oryzae RIB40] gi|83772201|dbj|BAE62331.1| protein product [Aspergillus oryzae]
  misc_feature (20)..(1002): NCBI GI: 115433735 Blast Desc: conserved [Aspergillus terreus NIH2624] gi|114189856|gb|EAU31556.1| conserved [Aspergillus terreus NIH2624]
  misc_feature (20)..(963): NCBI GI: 225562037 Blast Desc: GTPase activating protein [Ajellomyces capsulatus G186AR]
  misc_feature (20)..(1002): NCBI GI: 238844467 Blast Desc: GTPase activating protein [Microsporum canis CBS 113480]
  misc_feature (20)..(1002): NCBI GI: 242817958 Blast Desc: TSTA_054410 [Talaromyces stipitatus ATCC 10500] gi|218713505|gb|EED12929.1| TSTA_054410 [Talaromyces stipitatus ATCC 10500]
  misc_feature (20)..(961): NCBI GI: 226278276 Blast Desc: GTPase-activating protein GYP2 [Paracoccidioides brasiliensis Pb01]
  misc_feature (20)..(961): NCBI GI: 261197708 Blast Desc: GTPase activating protein [Ajellomyces dermatitidis SLH14081] gi|239595219|gb|EEQ77800.1| GTPase activating protein [Ajellomyces dermatitidis SLH14081]
SAASSASTARTSSSPSPSPTWNAISQDAAKDKDRNDLREQRITIQLAGSRQACERFCDGLKKGLRGAVGNVGKLKKVISECYSEYLLRPEDKKSAPSPDAGLGMVFKYPGDPKKLRDRAKMRLWAEYLRDNGRNATLIRQPTFHKLIRVGLPNRLRGEMWELTSGSLYLRLETPSLYADTLAKFSGRESLAIDEIEKDLNRSLPEYPGFQSEDGINRLRRVLTAYSWINPEVGYCQAMNIVVAALLIYMSEAQAFFLLSALCDRLVPGYYSSTMYGTLLDQKVFESLVEKTMPILWEHLVKSDVQLSVVSLPWFLSLYINSMPLVFAFRVLDVFFVEGPKVLFQVGLAILRINGEELLDATDDGAFISVLKSYFSRLDESAHPKSENPKLRAINRFQELMVVAFKEFSAITHSSIQELRLKNKDAVLNNIENFAKRTAIRNLGPDSKLLSPEELGSLYDRFYGILYERQQRDSIIQEEQRRRAKASRTRANEAFSDHHDHSVEKGRVGLGPSTSLMDYDAFREFLASVSKWAISDAPASSPRRGQPTDKDYNPYFGSFRRSDPNLLSPWGAGPEPAEHEFIQRLFHRWDVDSSSSLTLQNVVTGLAQIKGKKDIMGTITYFFELYDDDGDGKVDREGILRISEALLFLSRRGLEGSLSTSNSTANLDGMVSPDGASLSPSMTGTVSERFLASVSAFIRRCFEYADPDHSATEHAGSARETSTSTTSNNEGKADDNAFAIGDDEDEDEEDLVAFEDPARDARPTKKKPELESIQAAIGKPSREDSGRSVSKAQSEKANVALDPSHPLHITLPTFRMVVLADELLEQFFESSFPTSLHIMDGLPPITRQSSSSLTTFSGLNFNRPPGISPSLPPPGLAGAGRGLRGVLDNIVTDASRVAAEVRRRMEEAQRELERNAAPGQGDEDDEEDEDQVSIKPSGGYAGDPERRSVRSSDRDLLDGADADAGATKGQEGSSESLLDTDIAPEEGADKPNTATQRIVEFES

SEQ ID NO: 25029 - DNA, 6962 bp, Muscodor strobelii
  misc_feature: SGI EST ID NO. CUFF.58962.0
  misc_feature: Variant of the nucleotide sequence at SEQ ID NO 25027
tggaacgccatctcccaggacgccgccaaggacaaggaccgcaacgaccttcgtgagcagcggatcaccatccagctcgccggcagccgccaggcctgcgagcgcttctgcgatggcctcaagaagggcctccgcggcgccgtcggcaacgtcggcaagctcaagaaggtcatctccgagtgctactccgagtatctgctgcggcccgaggacaagaagagtgccccctcgcccgacgccgggctcggcatggtcttcaaatatcccggcgaccccaagaagctgcgggaccgagccaagatgcgcctgtgggccgagtatctgcgagacaacggccgcaatgccaccctgatacgccagcctaccttccacaagctcatccgcgtcggcctgcccaaccgtctgaggggagagatgtgggagctgacctcgggctctctgtatctgcgcctcgagacgcccagcttgtacgccgacaccctcgccaagttctccggcagggagtctctcgccatcgacgagatcgagaaggacctgaaccgcagcttgcctgaataccccggcttccagagcgaggatgggatcaataggctccgccgtgtgctgaccgcctacagttggatcaatcccgaggtgggctactgccaggccatgaacatcgttgtcgccgccctcctgatctacatgtccgaggcccaggccttcttcttgctgtccgccctctgcgaccgacttgtgccgggatactactcgtctaccatgtacggcaccctgctcgatcagaaagtgttcgagtcgctcgtcgagaagacgatgcccatcttgtgggaacacctcgtcaagagcgacgtgcagctctccgtcgtatcgctcccttggtttttatcgctctacatcaactccatgcctttggtgtttgcttttcgagttctggacgtcttttttgtagaagggcccaaggtcctcttccaggtcggcttggctattctgcgtatcaacggcgaagagctgctcgacgctaccgacgacggtgcatttatctccgtcttaaagtcttacttctcgcgccttgatgaatctgcgcatcccaaatctgaaaatcctaaactgcgggccattaaccgcttccaagaactcatggtcgtcgcctttaaagaattctccgccatcacgcacagcagcatccaagagctgcggctcaagaacaaggacgcagttctcaataacattgagaacttcgccaaacgcactgccatccggaacctgggccctgatagtaagctcttgagccccgaagagctcggttctctgtatgaccgtttctacggcatcctttacgagcggcaacaacgtgacagcatcatccaggaagagcagcgtcgccgggccaaggcgagcagaacaagagccaacgaggccttctctgaccatcacgatcatagcgtcgagaagggtcgtgtcggtctgggccctagtactagcctgatggactacgacgccttccgcgagttcctcgctagcgtatccaaatgggccatttccgacgcgcccgcatcatcgcctcggcgtggtcaacctaccgacaaagactataatccctatttcgggagcttcagacgctcagatcctaacctgctttctccatggggtgcgggcccagaaccagcagaacacgaattcattcagaggttattccatcgatgggacgtggactccagctcaagcttgacattacaaaatgtcgtgaccggactggcgcagatcaaggggaagaaagacataatgggcaccatcacctactttttcgaactttacgatgatgacggggatgggaaggtagaccgtgaaggcattctacgcatctccgaggccctgttgttcctgtcaagacgcggactcgagggttcactgagcacctctaactccactgcaaatctagatgggatggtaagtccggatggcgcttcattaagcccatctatgaccggaaccgtcagcgaacgcttcctagccagcgttagtgccttcatcaggcgatgcttcgaatacgccgaccctgatcactctgccaccgaacacgccggatccgctcgggagacttcgacttcgaccacttctaataacgagggaaaggccgatgacaatgcttttgccatcggcgatgatgaggatgaggacgaagaagatctcgtggcctttgaagatcctgcgagagacgcgagaccgacaaagaaaaagcccgaacttgaatctatccaagcggccatcggcaagccttcacgggaggactcgggcagaagcgtatccaaagcccaatctgagaaggcaaacgtggcattggatccttcccatcctttacatattactctacccaccttccgtatggtggtccttgcggacgagctcttagaacaattcttcgagtcgtcgttcccaacatcgctccacattatggatggcctaccacctatcaccagacagtcatcttcatccttaactactttttccggtctgaattttaaccggccgcctggcatatcaccatcccttccgccgccgggcttggccggtgcaggccgaggtctccgcggcgtattagataatattgttacagacgcgtcacgtgtggcggccgaagtacgccgaaggatggaggaagcacagcgtgaattggaaagaaatgcagcccccggtcagggagatgaagacgacgaagaggatgaagaccaggtttctatcaaaccttccggcggctacgccggagaccccgagcgacggagcgtgcgatcttccgatagagaccttttagacggtgcagatgccgatgccggtgctaccaaagggcaagaaggctccagcgagtctcttcttgatactgatatcgctccagaagagggcgcggataaacctaataccgcgacgcaaagaattgtggagttcgagagttgatttatgcatgtagagaatatcgtcggcgtagtcaagggagttaagtatactgggcttggaacatgatttcaaggtctatagctctcgtcttgttactactgctttcgaccgagctatcacaagcaaggagctttgcgatttctacctgaatgaaacaaaccccatggtggcgctaagacatggcgccgatgctaagaatttggcgagatggccatatttgccctggaatcttcaaaagggctggtccccccgtcttgaatgcttttgtattgtcactaactcgctaggctgtccaagggaggctattctggcattgagattttggcccccttcatgctatagtataagacgctaatactagatcttagacaaccaagaaaatgtctttgctatgaagcctatctttccagcactccttgtgaagctgccgaagcaatcctgcttgaaggttgaaactaattggacgtagtaaaataaaatcagccgaatgagtctactaagttgggacacgccttcgtcgaggtctcgcatcaggggcaagagaccgtcggcaatgcagctaagcgctcacatttgtgagagtgtcgcgcaagtgagcaggctctattgccattccaagggcgaagagatatccttgagatgggtcaaaattaaacagggagaatgccaccagcccatatgcgaagttcgttgccattttcagtcattctcggagcattcctcctcgagacattcccctcgacttctcaaggaggcaaaggagttgacatgcccatcatggttgtgtcgacacttcaaatatccagctttcgcagctgctcgagaaccgaaatctttgtgctatctcaccatcacgctcattgatcccatttcgctcatttgcggtgcaaatccccttgtctctagcttttcttagcaggttgtcgatactatctacacgctgtgaggtcctcaggagcttaattatcgatatggggatgccgatgcgggctggagctacggctctagcttctctgctggccttacggtctgtggtcgacgcgcaggcctattactggcaggatactcgcgactcttgtgatgccggggagacctttcagtatgccggatgcgcacctatggcttcggcccctttcgctttcacctttaccaactgggtccccgcaggagacaactcgaagtccgatatcaactatgtcacgggaaacaacttcaacaacaccgtgacaccttactactgtgctgagggttgtcgagctttcggttacaagtacgctggcttgtataaccaggcctgccactgtggcagctctctgtcatatcttgcagtcgatggtattactaccatcgactatgtccctgacccgaacgtgaacaccgcatgtgcggcacccaacgatccatgccccggtgataggcgtgagaattgtggttctgcctcaggcgctcagatctatgtcgacccttcgttcaaggacgaggccgacctgacggataaaaccgctatcgcagccgggtacgaagttatgggttgctttgacggccaacaaggccctaatttccccacgtctgatcaagcgaccaccaaggtttcggttgccgattccactgcttgtctcgaatactgcgccgacttgggtatgcctcttgcttacaaggaaaagaccggctctggagtcgattgctggtgcggtaccacctttggcaaaggcagctatcaggttgaaacgacagccgcgtgctcagtcgaatgcgcggatggaacgaccacaggttgcactggtgctgactgctgtgggccagtcaatgggccgtatcctgtctacgcaaacgctgatcttatgggatgctttgtccctgtcattcctggaattgcagctgatattgtggctgaccctctcacctatgctgcctgcttcgaaacaccacccgctatcgccaatcgcgtaacacccactgtcaactacaacgtggtcagtatcacgaagtctgcaagcttcatcgccacagtctcgccgtctcctaatgagaatactcttgtgaacaacttcatcatgttcggctgcttcagccagaagaccgtggctcaagtccttgacacccctgtcgatccttccaccggcaaccctgccagagctgattttgacgttgatgcttgtgtctcagcctgcgatgcggacgataagaagtatgctgcaatgatcggcactggaaaaacccttggttcgaacacattcgtctgtaaatgtgctgatgcggtcctccccaatctagcgctcaacaacatgcaagactgcgatctcgcctgcccacactccgaggaacagaattgcggtgctgatggtggtcctcttgtgtatgccaacgttgacgaagtccctgggctctggcaagcagggtatactgcgtctgagtcccctacggttacttactcttgccctagttcatccagcagttcctcatcgtcctcgtcctcttcatcttcatcctcgtcgtcttcatcctcctcctcctcaagctcatcgtcctcgtcttcctcttcttcctcttcatcttcgtcatcctcttcttcgtcctcagattcctcttcctcttcttcatctggctctacagcgtcctcttcagcgccttcatcttcgtcttccggcgcttcatcatctgatgcatcatcttccggtgcctcgtccagtggtgccggatcatcaggttctccatcatcttctggtgcaggatcaggctcaagcaacatgtctaccatcacaatgaccagcagcacaccgtctggcagtagccagccctcaggcagcgcttccggctccgactccggcagtgcttctggtagtggtggaccaagtggccctggaggtccctccggctccggcactggtcccaccggcggtggcaatggtacatcaccaaccaacactggcaccagtggtccttctggcagcggtacaggcgcgtctactaccggtaccttcacattcttgccaactggcacagaatcacctgcaccgggtatcacttctcttcctgacggaacgcgtatcatcctgggtatctcggctggtgctcctcctcagaagcgacacatctggaacatgcgtcgccagagcaacactggcggcttcattgctggcgctggaccgtctagccccgactcttgcgacgaggctgacctgttcggagtcaccgatggtcagctcttgaacggtggagaggccattgccgttgaccccggcgttgattacattcctttcaaggtgaaccccgaggctgagatcagcaccaccttttctatcgtcaacggtcttctccactggtacaatgatgagtttgatggtggagaggctgggttctgtcagacaccggatggaaaggtatacatcaccttcgtggctaacgccggccctgccaactgtgttactgtcaacgttgtaactttctacgcgcaacaatgtgtcgacggccagattgtcccactcgcctcgctaagcagcgttcccaccccgaccccgactggttctggtggtggcaacggtggcggtcctggcagtgcccagaccggtgtgcctcaggagaagttcatctacgtcgaaggccaagctcctgatgatgttccctgctacgagaccaccgagacttggatccctggcgagccaacctttttgccccataacgagctttaaacaagctctgcattttagtattagggagttctaactttgggaatgacctgatacttatgactcccaaccccgaaaatgagcaacgatgtaaacgcaatcgtttcatagttctttcaaattggtttatttcttatttgtcgatgcgatgactttggatggaaggtggaagcatgtatttgcaaattgtgcgttggtatttagtgtctgagatgtatagctaagagggggtttgcatgggataatgtatgggtttagtgttagattgttgtatgtgtaattgagcgcttgttatcctgaacctcaaattttgcttgtggtgaatcc

SEQ ID NO: 25030 - DNA, 1644 bp, Muscodor strobelii
  misc_feature: SGI cDNA ID NO. 568540
  misc_feature: Encodes the peptide sequence at SEQ ID NO 25031
atggggatgccgatgcgggctggagctacggctctagcttctctgctggccttacggtctgtggtcgacgcgcaggcctattactggcaggatactcgcgactcttgtgatgccggggagacctttcagtatgccggatgcgcacctatggcttcggcccctttcgctttcacctttaccaactgggtccccgcaggagacaactcgaagtccgatatcaactatgtcacgggaaacaacttcaacaacaccgtgacaccttactactgtgctgagggttgtcgagctttcggttacaagtacgctggcttgtataaccaggcctgccactgtggcagctctctgtcatatcttgcagtcgatggtattactaccatcgactatgtccctgacccgaacgtgaacaccgcatgtgcggcacccaacgatccatgccccggtgataggcgtgagaattgtggttctgcctcaggcgctcagatctatgtcgacccttcgttcaaggacgaggccgacctgacggataaaaccgctatcgcagccgggtacgaagttatgggttgctttgacggccaacaaggccctaatttccccacgtctgatcaagcgaccaccaaggtttcggttgccgattccactgcttgtctcgaatactgcgccgacttgggtatgcctcttgcttacaaggaaaagaccggctctggagtcgattgctggtgcggtaccacctttggcaaaggcagctatcaggttgaaacgacagccgcgtgctcagtcgaatgcgcggatggaacgaccacaggttgcactggtgctgactgctgtgggccagtcaatgggccgtatcctgtctacgcaaacgctgatcttatgggatgctttgtccctgtcattcctggaattgcagctgatattgtggctgaccctctcacctatgctgcctgcttcgaaacaccacccgctatcgccaatcgcgtaacacccactgtcaactacaacgtggtcagtatcacgaagtctgcaagcttcatcgccacagtctcgccgtctcctaatgagaatactcttgtgaacaacttcatcatgttcggctgcttcagccagaagaccgtggctcaagtccttgacacccctgtcgatccttccaccggcaaccctgccagagctgattttgacgttgatgcttgtgtctcagcctgcgatgcggacgataagaagtatgctgcaatgatcggcactggaaaaacccttggttcgaacacattcgtctgtaaatgtgctgatgcggtcctccccaatctagcgctcaacaacatgcaagactgcgatctcgcctgcccacactccgaggaacagaattgcggtgctgatggtggtcctcttgtgtatgccaacgttgacgaagtccctgggctctggcaagcaggcatccagcagttcctcatcgtcctcgtcctcttcatcttcatcctcgtcgtcttcatcctcctcctcctcaagctcatcgtcctcgtcttcctcttcttcctcttcatcttcgtcatcctcttcttcgtcctcagattcctcttcctcttcttcatctggctctacagcgtcctcttcagcgccttcatcttcgtcttccggcgcttcatcatctga

SEQ ID NO: 25031 - protein, 547 aa, Muscodor strobelii
  misc_feature: SGI Peptide ID NO. 568540
  misc_feature (44)..(155): Pfam Id: PF01822 Pfam Desc: WSC domain
  misc_feature (76)..(119): Pfam Id: PF01822 Pfam Desc: WSC domain
  misc_feature (22)..(477): NCBI GI: 164428534 Blast Desc: NCU10264 [Neurospora crassa OR74A] gi|157072183|gb|EDO65373.1| [Neurospora crassa OR74A]
  misc_feature (3)..(366): NCBI GI: 116193261 Blast Desc: [Chaetomium globosum CBS 148.51] gi|88182261|gb|EAQ89729.1| [Chaetomium globosum CBS 148.51]
  misc_feature (3)..(226): NCBI GI: 171684831 Blast Desc: protein product [Podospora anserina] gi|170942376|emb|CAP68028.1| protein product [Podospora anserina]
  misc_feature (79)..(271): NCBI GI: 256733246 Blast Desc: NECHADRAFT_38105 [Nectria haematococca mpVI 77-13-4]
  misc_feature (66)..(271): NCBI GI: 46125721 Blast Desc: FG07238.1 [Gibberella zeae PH-1]
  misc_feature (37)..(271): NCBI GI: 85078338 Blast Desc: NCU00039 [Neurospora crassa OR74A] gi|28917200|gb|EAA26914.1| [Neurospora crassa OR74A]
  misc_feature (90)..(272): NCBI GI: 156052144 Blast Desc: SS1G_07480 [Sclerotinia sclerotiorum 1980] gi|154705257|gb|EDO04996.1| SS1G_07480 [Sclerotinia sclerotiorum 1980]
  misc_feature (90)..(272): NCBI GI: 154312882 Blast Desc: BC1G_05142 [Botryotinia fuckeliana B05.10] gi|150849844|gb|EDN25037.1| BC1G_05142 [Botryotinia fuckeliana B05.10]
  misc_feature (54)..(271): NCBI GI: 261360225 Blast Desc: conserved [Verticillium albo-atrum VaMs.102]
  misc_feature (90)..(271): NCBI GI: 116192065 Blast Desc: CHGG_05750 [Chaetomium globosum CBS 148.51] gi|88181663|gb|EAQ89131.1| CHGG_05750 [Chaetomium globosum CBS 148.51]
MGMPMRAGATALASLLALRSVVDAQAYYWQDTRDSCDAGETFQYAGCAPMASAPFAFTFTNWVPAGDNSKSDINYVTGNNFNNTVTPYYCAEGCRAFGYKYAGLYNQACHCGSSLSYLAVDGITTIDYVPDPNVNTACAAPNDPCPGDRRENCGSASGAQIYVDPSFKDEADLTDKTAIAAGYEVMGCFDGQQGPNFPTSDQATTKVSVADSTACLEYCADLGMPLAYKEKTGSGVDCWCGTTFGKGSYQVETTAACSVECADGTTTGCTGADCCGPVNGPYPVYANADLMGCFVPVIPGIAADIVADPLTYAACFETPPAIANRVTPTVNYNVVSITKSASFIATVSPSPNENTLVNNFIMFGCFSQKTVAQVLDTPVDPSTGNPARADFDVDACVSACDADDKKYAAMIGTGKTLGSNTFVCKCADAVLPNLALNNMQDCDLACPHSEEQNCGADGGPLVYANVDEVPGLWQAGIQQFLIVLVLFIFILVVFILLLLKLIVLVFLFFLFIFVILFFVLRFLFLFFIWLYSVLFSAFIFVFRRFII

SEQ ID NO: 25032 - DNA, 6962 bp, Muscodor strobelii; identical to SEQ ID NO: 25029
  misc_feature: SGI EST ID NO. CUFF.58962.0
  misc_feature: Variant of the nucleotide sequence at SEQ ID NO 25030

SEQ ID NO: 25033 - DNA, 927 bp, Muscodor strobelii
  misc_feature: SGI cDNA ID NO. 568541
  misc_feature: Reduced expression when VOC is produced
  misc_feature: Encodes the peptide sequence at SEQ ID NO 25034
atgaccagcagcacaccgtctggcagtagccagccctcaggcagcgcttccggctccgactccggcagtgcttctggtagtggtggaccaagtggccctggaggtccctccggctccggcactggtcccaccggcggtggcaatggtacatcaccaaccaacactggcaccagtggtccttctggcagcggtacaggcgcgtctactaccggtaccttcacattcttgccaactggcacagaatcacctgcaccgggtatcacttctcttcctgacggaacgcgtatcatcctgggtatctcggctggtgctcctcctcagaagcgacacatctggaacatgcgtcgccagagcaacactggcggcttcattgctggcgctggaccgtctagccccgactcttgcgacgaggctgacctgttcggagtcaccgatggtcagctcttgaacggtggagaggccattgccgttgaccccggcgttgattacattcctttcaaggtgaaccccgaggctgagatcagcaccaccttttctatcgtcaacggtcttctccactggtacaatgatgagtttgatggtggagaggctgggttctgtcagacaccggatggaaaggtatacatcaccttcgtggctaacgccggccctgccaactgtgttactgtcaacgttgtaactttctacgcgcaacaatgtgtcgacggccagattgtcccactcgcctcgctaagcagcgttcccaccccgaccccgactggttctggtggtggcaacggtggcggtcctggcagtgcccagaccggtgtgcctcaggagaagttcatctacgtcgaaggccaagctcctgatgatgttccctgctacgagaccaccgagacttggatccctggcgagccaacctttttgccccataacgagctttaa

SEQ ID NO: 25034 - protein, 308 aa, Muscodor strobelii
  misc_feature: SGI Peptide ID NO. 568541
  misc_feature (113)..(238): NCBI GI: 46127509 Blast Desc: FG08132.1 [Gibberella zeae PH-1]
  misc_feature (88)..(253): NCBI GI: 46112795 Blast Desc: FG02899.1 [Gibberella zeae PH-1]
  misc_feature (91)..(246): NCBI GI: 46140059 Blast Desc: FG11544.1 [Gibberella zeae PH-1]
  misc_feature (77)..(238): NCBI GI: 46139523 Blast Desc: FG11276.1 [Gibberella zeae PH-1]
  misc_feature (108)..(239): NCBI GI: 46117599 Blast Desc: FG04634.1 [Gibberella zeae PH-1]
  misc_feature (93)..(241): NCBI GI: 46139599 Blast Desc: FG11314.1 [Gibberella zeae PH-1]
  misc_feature (79)..(228): NCBI GI: 256720269 Blast Desc: NECHADRAFT_89223 [Nectria haematococca mpVI 77-13-4]
  misc_feature (115)..(233): NCBI GI: 242801799 Blast Desc: TSTA_016840 [Talaromyces stipitatus ATCC 10500] gi|218717188|gb|EED16609.1| TSTA_016840 [Talaromyces stipitatus ATCC 10500]
  misc_feature: Useful for introducing or modulating the production of volatile compounds
MTSSTPSGSSQPSGSASGSDSGSASGSGGPSGPGGPSGSGTGPTGGGNGTSPTNTGTSGPSGSGTGASTTGTFTFLPTGTESPAPGITSLPDGTRIILGISAGAPPQKRHIWNMRRQSNTGGFIAGAGPSSPDSCDEADLFGVTDGQLLNGGEAIAVDPGVDYIPFKVNPEAEISTTFSIVNGLLHWYNDEFDGGEAGFCQTPDGKVYITFVANAGPANCVTVNVVTFYAQQCVDGQIVPLASLSSVPTPTPTGSGGGNGGGPGSAQTGVPQEKFIYVEGQAPDDVPCYETTETWIPGEPTFLPHNEL

SEQ ID NO: 25035 - DNA, 6962 bp, Muscodor strobelii; identical to SEQ ID NO: 25029
  misc_feature: SGI EST ID NO. CUFF.58962.0
  misc_feature: Variant of the nucleotide sequence at SEQ ID NO 25033

SEQ ID NO: 25036 - DNA, 393 bp, Muscodor strobelii
  misc_feature: SGI cDNA ID NO. 568542
  misc_feature: Reduced expression when VOC is produced
  misc_feature: Encodes the peptide sequence at SEQ ID NO 25037
atggccgctccaacagtagggggtggcgtcgcggtactcgagtatcgtgctatagacccggccgtgacccggtggaagagagacgctgatgttaacaacttcattgagcgagccgccgcccttgatttgcgaggcgatcatcatgatgagaagaaaaagcacgatgacgacaagaaagacaacgaaaaaagaaaagatgaagggggaaagaagcatgatggcaaaaagcagcacgagaataggaaggatggagaaaataagaaacacgacagcaagaaggaacacgaaactagaatggatggcgagaagaagaatcacgacggaaagaaggaacatgagacccggaaggacggagagaaaaacaaacatggtgataagaagcagcacgactag

SEQ ID NO: 25037 - protein, 130 aa, Muscodor strobelii
  misc_feature: SGI Peptide ID NO. 568542
  misc_feature: Useful for introducing or modulating the production of volatile compounds
MAAPTVGGGVAVLEYRAIDPAVTRWKRDADVNNFIERAAALDLRGDHHDEKKKHDDDKKDNEKRKDEGGKKHDGKKQHENRKDGENKKHDSKKEHETRMDGEKKNHDGKKEHETRKDGEKNKHGDKKQHD

SEQ ID NO: 25038 - DNA, 1872 bp, Muscodor strobelii
  misc_feature: SGI EST ID NO. CUFF.59196.0
  misc_feature: Variant of the nucleotide sequence at SEQ ID NO 25036
tgtgttgacttcagtcattgtccatgtcaatcaagacgactaggggaaccagatacataataaaacgttcagtacagttatgtgtttatgtcctgacatggcattgtgccgtgactgccgatggcagacgtggttataggaagacgtgtgatgtgtagggttgtaagctaggtgtgcctttgcgtctgcaatttcgcaaacccaaacctttgtgtaggacggtcatcgcaagaacctacgagtagagattacggacttgacgtgctattaaggttctctagcccatctatcggatggacaggacccttgcggtcggatgccacatccgatccttgctttcctaccctatatcttggcacttgataccttcagacggcgtcatgtcgggagaaaaaaggattaacctttcgaacgcatctcagaaatgcggcgggcaggttttgaattccaatgaagccgatatctggtcacaccactgacgcaagatcggcacgaattgctcacgagacgaaggtatctctgcaacgtgacaagaatggtacagctttcatggtcacggtctgatttctcggaacatacgaccggtctacgacgaaacaaactctgtcttccaaacccctttccgcttcgttattcaaagaaccgattccaaaaaaatagtgtcttctgcgatgttgctctgctgccgacttcacgatgccgtgcttccgaagccatcttagacgtgtttttgaggatgtctgtgccggccagataacctgaccaaacgtttgcggaccctggtaatgcccggctagagtgccgctgtgtgtgcctatataagtcttgcgaaaggagtccgaacttggtgttcttgacattccatctgccacaatttgatctctcaagcatccaagcatttgatattttgactatcaagctcgtctctaaatctttaaatattcacaatggtctgtaaaatcattatcgcagctctccttgccagcccctatatcatggccgctccaacagtagggggtggcgtcgcggtactcgagtatcgtgctatagacccggccgtgacccggtggaagagagacgctgatgttaacaacttcattgagcgagccgccgcccttgatttgcgaggcgatcatcatgatgagaagaaaaagcacgatgacgacaagaaagacaacgaaaaaagaaaagatgaagggggaaagaagcatgatggcaaaaagcagcacgagaataggaaggatggagaaaataagaaacacgacagcaagaaggaacacgaaactagaatggatggcgagaagaagaatcacgacggaaagaaggaacatgagacccggaaggacggagagaaaaacaaacatggtgataagaagcagcacgactagagctccaggccatgtgcaagggccatgactttttattcgacaatgcagtaagtcgacttgcacttctgtgtgatacaggtgcgagaattgctcagttttgtagttagcttagttgtcatgagatatattcattcctttgccttctgtgtcttcaatcttcatcactcgtagatggatcatcatcaaggttccttccgtccttgcgtttatcagccctttacatattgagtcgagtgccagacaacgtctctgtatatatagctttccgtgtttgcatagacaacatcatttgaggtgtactccgcccgttgtggaatcaaatcccagcggatggcaagttcctatggggattctagccccatgaactagtgatctattgacaggcatcatgttaagccatcaatcaagtatcgtggtccctgaagaccagaatgggtcgtattattacgtgccggcactggcgtaatccgtcattattccgtct

SEQ ID NO: 25039 - DNA, 1719 bp, Muscodor strobelii
  misc_feature: SGI cDNA ID NO. 568543
  misc_feature: Reduced expression when VOC is produced
  misc_feature: Encodes the peptide sequence at SEQ ID NO 25040
atggcaaagatatcaatgccaagactgttcattttctccgctgcggtgtcataccctcttgctagggtggataactcaacatacctttcttctttctcgcgcgtgttccctctctgctttgtcctatgggcacttatcaaagtcttcatttaccctaatctgatttcgcctttgagacacatcccaacagtagatggagggaaatggtggacccggagttgtcttcgattatataatgaacctagagggcatgcacaggctgactgggctctcaccacgcctactgaacaacatggtctcgttcgctataggacccttttcaacgccgagcgtatcattgtgacacaccctgatggcctggcagaggtcctgacaacgaaggcctatcatttcaaaaagcccgaggcggtcgtaacaggtcttaagcagcttcttggcatgggcatactgcttatggagggcgaagtgcataaagcgcagagaaaaactctccttccagccttcagttttcgacatatcaagcaactttatagcccgatgtgggacatctcaagtcatgctctgactagcttgacgaaggcgacagcagacaatgcatccaaaggctcaaaggcagctttcactgtggatattagtgattgggcgagtagtgcaacgctggatatcatctgcgtttcaggcctagggcaagatagagagtcagttctcaacaaagacgaaacctacgctacgcttcgccgaacctacaaggaagttgcgcatcaagagcgagccgatataattctcttcttccttcgtatctggatcctcccggcctggatcttgccgtttgtgcctgtgaagcggaataaggtgcttacacaagccgctgaaacactccgaactgtctgtcgacagttcattcgacaaaagaaaatagatctggcgaacgacatcgccgataagatggaaaaggatattctaacagtagcattatctaatgggggcttcagcgatgaagagctcgttgatcagttgctgaccttcctggctgctggtcacgaaacgaccgcgactagtttaacatgggcaatctatgccttgtgcgttcatccagaaatgcagacaaggcttcgagaggaagttcgggccagtcttccgaatcctacatcctctttgccggcggatgacattgaagggttggccacaatcatcgataaacaaatgccgtatctcagcgcaatttgccaagaagtcctgcgatactttgctccagtcccgacaacatttcgagaggcggccgtggatacatctatccagggagtcagaatccctgccggggctcaaattgtcatcagcccgcgagcaacaaaccgtgacgaaagactctggggagaggatgcaaaaatattcaatcccgatcgatatttgtcacagccacaagaaacacatcatgacccattggaacacgagacatatgaaggccacaacagcaagacttcagggcatagaagcaactatgcaaatttgacattcttgcacggtccaaggagctgtattggccagtcgttttcaagagccgaaatggccattttgctagcgcagcttgttggccggttcagattccagcttgcggactcgtctcaggcaaactgggaatcgatcaaactgaggcggggggcgacaaatagaccagcaaacgggatgaatgtgaaagtcgaactggttgagggctggtga

SEQ ID NO: 25040 - protein, 572 aa, Muscodor strobelii
  misc_feature: SGI Peptide ID NO. 568543
  misc_feature (81)..(564): Pfam Id: PF00067 Pfam Desc: Cytochrome P450
  misc_feature (112)..(537): Pfam Id: PF00067 Pfam Desc: Cytochrome P450
  misc_feature (26)..(566): NCBI GI: 170293012 Blast Desc: Fum15 [Fusarium oxysporum]
  misc_feature (31)..(566): NCBI GI: 87083855 Blast Desc: Fum15p [Gibberella moniliformis]
  misc_feature (43)..(552): NCBI GI: 145229611 Blast Desc: An01g06910 [Aspergillus niger] gi|134055222|emb|CAK43809.1| protein product [Aspergillus niger]
  misc_feature (13)..(571): NCBI GI: 256735154 Blast Desc: NECHADRAFT_98771 [Nectria haematococca mpVI 77-13-4]
  misc_feature (25)..(572): NCBI GI: 46108332 Blast Desc: FG01048.1 [Gibberella zeae PH-1]
  misc_feature (86)..(572): NCBI GI: 154299019 Blast Desc: BC1G_11822 [Botryotinia fuckeliana B05.10] gi|150857525|gb|EDN32717.1| BC1G_11822 [Botryotinia fuckeliana B05.10]
  misc_feature (47)..(572): NCBI GI: 156058097 Blast Desc: SS1G_04780 [Sclerotinia sclerotiorum 1980] gi|154702565|gb|EDO02304.1| SS1G_04780 [Sclerotinia sclerotiorum 1980]
  misc_feature (26)..(572): NCBI GI: 145603111 Blast Desc: MGG_04469 [Magnaporthe grisea 70-15] gi|145011426|gb|EDJ96082.1| MGG_04469 [Magnaporthe grisea 70-15]
  misc_feature (28)..(572): NCBI GI: 116180286 Blast Desc: CHGG_00771 [Chaetomium globosum CBS 148.51] gi|88185068|gb|EAQ92536.1| CHGG_00771 [Chaetomium globosum CBS 148.51]
  misc_feature (9)..(569): NCBI GI: 189201141 Blast Desc: cytochrome P450 78A3 [Pyrenophora tritici-repentis Pt-1C-BFP] gi|187984006|gb|EDU49494.1| cytochrome P450 78A3 [Pyrenophora tritici-repentis Pt-1C-BFP]
  misc_feature (111)..(540): SWISSPROT Homolog: EC 1.3.3.9 Secologanin synthase
  misc_feature: Useful for introducing or modulating the production of volatile compounds
MAKISMPRLFIFSAAVSYPLARVDNSTYLSSFSRVFPLCFVLWALIKVFIYPNLISPLRHIPTVDGGKWWTRSCLRLYNEPRGHAQADWALTTPTEQHGLVRYRTLFNAERIIVTHPDGLAEVLTTKAYHFKKPEAVVTGLKQLLGMGILLMEGEVHKAQRKTLLPAFSFRHIKQLYSPMWDISSHALTSLTKATADNASKGSKAAFTVDISDWASSATLDIICVSGLGQDRESVLNKDETYATLRRTYKEVAHQERADIILFFLRIWILPAWILPFVPVKRNKVLTQAAETLRTVCRQFIRQKKIDLANDIADKMEKDILTVALSNGGFSDEELVDQLLTFLAAGHETTATSLTWAIYALCVHPEMQTRLREEVRASLPNPTSSLPADDIEGLATIIDKQMPYLSAICQEVLRYFAPVPTTFREAAVDTSIQGVRIPAGAQIVISPRATNRDERLWGEDAKIFNPDRYLSQPQETHHDPLEHETYEGHNSKTSGHRSNYANLTFLHGPRSCIGQSFSRAEMAILLAQLVGRFRFQLADSSQANWESIKLRRGATNRPANGMNVKVELVEGW

SEQ ID NO: 25041 - DNA, 5589 bp, Muscodor strobelii
  misc_feature: SGI EST ID NO. CUFF.59291.1
  misc_feature: Variant of the nucleotide sequence at SEQ ID NO 25039
ctggcaatgaaagagaataatagcactagtattatcgtttcctctgtcatgactatagtgttgctagcagagcggaaggcttggcaggcgtgtcggtgttgaacaggctttccgataagtcttcgtaacgacaataagcttatacgattgtatgccgctccgaaattctgtaatggaaccggtccccgcggcatccatacaaggttaagacggatttgacaggtgtgcatgcagcaagtctttgaaatcccattatggtttttaatttaagcagcttgacggtgggagctgaggcctagcatcgccgttctctcttcaacatatattacctacttgggtctccgtagcgcaccgccacaccttttacctaccgaggcatacgcttcgctgtcgcattcgcattcgctatgtctaaggtagatattagaacacggccgcctgcagatacataattgtatacattaacttctcgacgttgtactcttgcatagtacaagtattcattattccttaacatcaagaacaacgacaacaacgataacattcaagcacatttcgaatatggcaaagatatcaatgccaagactgttcattttctccgctgcggtgtcataccctcttgctagggtggataactcaacatacctttcttctttctcgcgcgtgttccctctctgctttgtcctatgggcacttatcaaagtcttcatttaccctaatctgatttcgcctttgagacacatcccaacagtagatggagggaaatggtggacccggagttgtcttcgattatataatgaacctagagggcatgcacaggctgactgggctctcaccacgcctactgaacaacatggtctcgttcgctataggacccttttcaacgccgagcgtatcattgtgacacaccctgatggcctggcagaggtcctgacaacgaaggcctatcatttcaaaaagcccgaggcggtcgtaacaggtcttaagcagcttcttggcatgggcatactgcttatggagggcgaagtgcataaagcgcagagaaaaactctccttccagccttcagttttcgacatatcaagcaactttatagcccgatgtgggacatctcaagtcatgctctgactagcttgacgaaggcgacagcagacaatgcatccaaaggctcaaaggcagctttcactgtggatattagtgattgggcgagtagtgcaacgctggatatcatctgcgtttcaggcctagggcaagatagagagtcagttctcaacaaagacgaaacctacgctacgcttcgccgaacctacaaggaagttgcgcatcaagagcgagccgatataattctcttcttccttcgtatctggatcctcccggcctggatcttgccgtttgtgcctgtgaagcggaataaggtgcttacacaagccgctgaaacactccgaactgtctgtcgacagttcattcgacaaaagaaaatagatctggcgaacgacatcgccgataagatggaaaaggatattctaacagtagcattatctaatgggggcttcagcgatgaagagctcgttgatcagttgctgaccttcctggctgctggtcacgaaacgaccgcgactagtttaacatgggcaatctatgccttgtgcgttcatccagaaatgcagacaaggcttcgagaggaagttcgggccagtcttccgaatcctacatcctctttgccggcggatgacattgaagggttggccacaatcatcgataaacaaatgccgtatctcagcgcaatttgccaagaagtcctgcgatactttgctccagtcccgacaacatttcgagaggcggccgtggatacatctatccagggagtcagaatccctgccggggctcaaattgtcatcagcccgcgagcaacaaaccgtgacgaaagactctggggagaggatgcaaaaatattcaatcccgatcgatatttgtcacagccacaagaaacacatcatgacccattggaacacgagacatatgaaggccacaacagcaagacttcagggcatagaagcaactatgcaaatttgacattcttgcacggtccaaggagctgtattggccagtcgttttcaagagccgaaatggccattttgctagcgcagcttgttggccggttcagattccagcttgcggactcgtctcaggcaaactgggaatcgatcaaactgaggcggggggcgacaaatagaccagcaaacgggatgaatgtgaaagtcgaactggttgagggctggtgattcttttactttgttctcggcttttctgcccagatatctggagcatatttgagaccgaatcaggtgtttggagtagggtgtttaagatgtaggtagacacttgcctgcccatcatgggaacgaactgaaatatggcctagctgcatattcatgtacactagatacatccatcgtgcgtgcaagtgctttttatcgaaatcttcataatcttgcacgctgcggttctctgactcatctgctctcctctacgtcctgcacaagatctgcttcgagctgccctcaaagataatggcgagggctaaaggaccaattttgggacagactaattagcttaaaccaccttttgcccttgggagatcgcgtgcgggaaattcaactgaccaccctgccaagctgccaccgacattggatatgcgaccctcttccagcttcctgcaggtagcctgcattgcccccacccaatcatgtacctagctttccacgaccagacctacttaccaccttggccattcggatttcggtctcagcaccaaagacctgcagcctaattgcatgaggggagtatgaaacccgcacatgttttctaggtgaaagattcggtggacatatccttagctttcctgacttccttacctgcacaaaacgcctgtcaaaagggctatcgtactatgaaggagaaaaggctgggattcttggctaagatgaacgtcccgcgtctgtttccaacaatcctggttgggctgcctgttggtccttacaagcctctttgtttcaccgagcggccggaattccctcaataccacttcccatctctaccgtcctatcacaattaccttccgttacatcccacgcgaagcagacagactactatgtagctcgggatcttacaacccgacatatcagcttttcatacgatgcaacatctgagtgttagatcatggccacaatttgcggcccttcaaccatccccgttagactgcatttgcgaaagctctaagccttgttgaatacagagtcacacacttatcatcgatagggcagtacataatgcgaccgacatgcacttccaaggattctgggacaagcaacaagaacgccgtggtatcatatccttgtctaggctacgaatcacatcctctcctgtcttctagaacgccatcgtagcatctgatgactgcatctttataggaccgccctatcgcccctttgtgtagccgcactccttgcaacaaaaaaacattaatgaccaatgtccgtccaggggtcccacttccaatgcttcggtcgctgctggccgggcacgatgatgatcaactggcaacgaatcgtaacggtatctcgctgttgacgatgtgacgctgcccccatggacgccagcgtcgtattcctctggtggatactttctagacatggcgcacggcagcgttgtagtatgggactttcaaatgaatatatctttgggaatataaaagttgaatgcccatgcctatcttgctagcaacggtcttgctttagaaaaggttcgtcctcaccctccacgatatcgttgtcccaagtttccatctctcgttactccatctcaccctcgtctatttacctctgcttgtgccattagacctgccatgtacttcgacgagggttcaggcaggctcagtctctatttcataacaactctgaactatccttcatggctctcatttccccctatctctggcccttcaagctcactctcctccatccacagttctgcgctcttcaagacaagcttagcgtcttgcttttctagcctattacactacgctccgtctactcgagcttggtcgttcatctttcttctcatgtttctacattgctatcaacctggaagacatccgtgaaactagccactttgtcgtgactgaatgttctgtcgccttatcgccgatactccgactcgaacaaactgacgatatcaccaacatacgacatcacgtgatgctggctgacacatggcaacggctaaaggtacatccgttcttcgcttattgatcttctagctatcttacctcggaatcgatcgcgcgataagccctttgagccatacattctcagccagcaacaggatcttatcatcggctatcgacatgatgacatttcatgtacatgaatgacaactgtcctgcaggaaattggcctcatcgtgcctcatggctgctacactgaagggttgggggccgcttgattgcataggcgtcgttgaaactgattggctaagcagtcaaccccgattgtcggcagttgttcaccgaaagtcagagggctgtctccaacgatctagacttaagggacaagtctttttgtgcccacgcgagaatgaaaggctcggcaaagctgccatgctggtggcaactgcctatttctaccacgtatccgagtatgccatccgatatggtcggcccttctttcggctgaactgtgtgctgcctagtgaataaggccaccaatgttcgaggatagaatgaaatcagtgtctagatcaggacgcgaaccgtctcgtaacaaacggctcttcaacggtattccacgaggagtcacgcgaaaccggatagaaacggtaaatgtgtaatcagagagcacatgttgcagtttcatacgaaatgcattcgattcaccctcgtatgcatgactgtatacatgtatcttgagatttgcggtcattgggggcaatttgggccacgactatctcttgtcaaaaagcaagtgctattgtcctatgcctggtcgttggatccatattgctagaaacataatgtacaatgaatttacacgtcggtgccgtgcgtgtggtagtaacatcagaattgatgcaatgggttcattgcaattcatgcaaacttcaatgactgctagtgcagatatgatggaaatattgccattgcaacatcattgagcttgtaaatgtcgctttctgctcacccgggatactgcttcgcttatcacaactttgatcctggccacccaaggtaccaattacatcattgctttgctaccaggttacagactacttattgagtctttcgtgtaacaacaaatcacatcaactgtcctgcgttactttcggacttgaattcaccgtatcgcgcctgcgagcgactcagcccatctctatattgctggctcgggtttgtgtattcacccatgctgcataagaccgatcgttgcccctcttgcagcaatggcccatttcgatgtagaattgcatgataacaaccggtcctgacggtctgagtgtaccgtgccgtttgtcggacgttgaaagtaggcgaccaa

SEQ ID NO: 25042 - DNA, 1590 bp, Muscodor strobelii
  misc_feature: SGI cDNA ID NO. 568544
  misc_feature: Encodes the peptide sequence at SEQ ID NO 25043
atggcgtacaggagcagccggagcgagttcagcgagcgcgattacgcccataggagggcacctgtgcgcgagtacgacgacttggatgtcgacgtccgcgtgcgggagcgggagcgggagcatgtagacaggacacctgcttttctccgcgaggatgtccgccgcaccgacgccggcccgctggtgctccgctcgcgagaggtcgagaccctcgacaggcggcgccgcagccccagccctcaggtcagataccgagagcgcatcatcgagcgtgagcgctcgagggaaccaacccccgagcgacggccgcgatactatgagcggtcgccttcgcctgcccaggtgcgcgtcgagtcgcgcgtggtcgagcgccggagagaacggtcgcccactccggatcgcgagcgtgagctgatccgcctgcgcatcgaaagagagagggaacgaaaaccctcgccctctcccagcccctctcccgagccgtcccccgagccccagttcatccgagggccgaccatagagcgggaggtcatcactcactacagagacattgatcacggtatgatccgggctaagccgccatcgcctccgccggcaccccgtcgcgcaccctcccggccgagggtgaaagagaccagagagacggatattgacatcgatatctaccgagatgagactgacatcgacattcgcaaacgcacccgctcacggtcccggcctcgcgagcgtgagcgtgaggtcgagcgacctcgccccaagcagcgtccctcctactacgatgaggacgacctcgtcattgtgaagggccgagacaagctcaaggtgacagacacccacaggcgacgggcacactcggaggcaccgagacccgactgggacgacgaggccgagtacatcaccagcaagatcgactcccgaggtcgtatgggcgaggcatggcacggtgccaccaaggactggaccatcgtggatgtcccgccgggaacggaacgcgtcaagatggacggcgtcggtggcggaggcgccgaagtgacctggcaacgctacaatggcgtgcgcaggtccaagttcattcctgagcgggatgagtcggtcgtcagcgcccccagcagtaagagcgaggcgccacgagaaacttctcgtgaccgagagaaactcagtatccagatttacgattccaaggcccgcgaccgtgaggtcaaggtcgaggaagtgcacgaccggcgcatctcgatccacgaaggcggcagagtcccagctcgtaagcgcgagggcatgtggacagagatcactaaagatctcgtcgttcgcgaggctatcgagcgcatgggatacgactacgaagagacggaatggtttttctatgtcatgcagtatctgcgttatgaggacgttcttgagctcgtcaatatctctgatgatatccgaaggcaccggagacatagacaccgagaatacgaatctggtgatttctacggccacgagcaccgacatcgccaccgcaaatctgtgccctgggataaaatcgacgacgaacgtatcgttgagcgggagatcgtctacgatcggccgtcgcgccactaccgctga

SEQ ID NO: 25043 - protein, 529 aa, Muscodor strobelii
  misc_feature: SGI Peptide ID NO. 568544
  misc_feature (19)..(522): NCBI GI: 85074799 Blast Desc: NCU00627 [Neurospora crassa OR74A] gi|28927580|gb|EAA36531.1| [Neurospora crassa OR74A]
  misc_feature (6)..(501): NCBI GI: 116193095 Blast Desc: CHGG_06265 [Chaetomium globosum CBS 148.51] gi|88182178|gb|EAQ89646.1| CHGG_06265 [Chaetomium globosum CBS 148.51]
  misc_feature (8)..(528): NCBI GI: 256727672 Blast Desc: NECHADRAFT_99337 [Nectria haematococca mpVI 77-13-4]
  misc_feature (8)..(528): NCBI GI: 46135879 Blast Desc: FG09455.1 [Gibberella zeae PH-1]
  misc_feature (6)..(522): NCBI GI: 171683967 Blast Desc: protein product [Podospora anserina] gi|170941944|emb|CAP67596.1| protein product [Podospora anserina]
  misc_feature (11)..(528): NCBI GI: 149209799 Blast Desc: MGCH7_ch7g381 [Magnaporthe grisea 70-15] gi|86196336|gb|EAQ70974.1| MGCH7_ch7g381 [Magnaporthe grisea 70-15]
  misc_feature (11)..(528): NCBI GI: 145610203 Blast Desc: MGG_02655 [Magnaporthe grisea 70-15] gi|145017557|gb|EDK01920.1| MGG_02655 [Magnaporthe grisea 70-15]
  misc_feature (211)..(522): NCBI GI: 261353128 Blast Desc: conserved [Verticillium albo-atrum VaMs.102]
  misc_feature (8)..(522): NCBI GI: 154303906 Blast Desc: BC1G_08837 [Botryotinia fuckeliana B05.10] gi|150854421|gb|EDN29613.1| BC1G_08837 [Botryotinia fuckeliana B05.10]
  misc_feature (166)..(522): NCBI GI: 156040814 Blast Desc: SS1G_11385 [Sclerotinia sclerotiorum 1980] gi|154695769|gb|EDN95507.1| SS1G_11385 [Sclerotinia sclerotiorum 1980]
MAYRSSRSEFSERDYAHRRAPVREYDDLDVDVRVREREREHVDRTPAFLREDVRRTDAGPLVLRSREVETLDRRRRSPSPQVRYRERIIERERSREPTPERRPRYYERSPSPAQVRVESRVVERRRERSPTPDRERELIRLRIERERERKPSPSPSPSPEPSPEPQFIRGPTIEREVITHYRDIDHGMIRAKPPSPPPAPRRAPSRPRVKETRETDIDIDIYRDETDIDIRKRTRSRSRPREREREVERPRPKQRPSYYDEDDLVIVKGRDKLKVTDTHRRRAHSEAPRPDWDDEAEYITSKIDSRGRMGEAWHGATKDWTIVDVPPGTERVKMDGVGGGGAEVTWQRYNGVRRSKFIPERDESVVSAPSSKSEAPRETSRDREKLSIQIYDSKARDREVKVEEVHDRRISIHEGGRVPARKREGMWTEITKDLVVREAIERMGYDYEETEWFFYVMQYLRYEDVLELVNISDDIRRHRRHRHREYESGDFYGHEHRHRHRKSVPWDKIDDERIVEREIVYDRPSRHYR

SEQ ID NO: 25044 - DNA, 2787 bp, Muscodor strobelii
  misc_feature: SGI EST ID NO. CUFF.58969.0
  misc_feature: Variant of the nucleotide sequence at SEQ ID NO 25042
tatgatggaattgtcaatttgcctgcgatgcacagctctgaaagccgtcggcatttgtaactatgggcattcatgttgttgaacctcataaagagagggtgtcgcagcgtgccgggagcagggcttgtgaggcatgggtgtgagggcgagatccttgcattatgacgacgttggccctagggcttgatggctcctgggattgattctgctgtgggctatgtcaatgcccacttgacctttggcccaaccttggagacgtgaccctgtatctgactgactgaaccttatgactgtccgtaaataagacaggcgatagggcctgaactttctgcctgacagtagacagcagaccaaggcattccgtctcagtcgactgctttcctcgtctccctctcgctgctgagggctagcttgcagacaggcggcccgctgcatggtctgctataagcgacaagggttgtatagatagcgtcgacagcacgacagcgtcaccagttccaacttccaactttcccctcagcacccacatccaccccgctactgtacatatcccatatagtgccaacgccagcataagcgcgcgtgcgacgtcagcaccgtttcaccacctgcgaaaacactcatcttcgtacactgtttcccttctcatcatccagccttacacgggaagagaacaggctgaagagggaaaacgagaagaagcaagacactccaaatctcatctcgtcgaacaccccgtcaagcagacgaggctacccctcacccctcactctcaccatggcgtacaggagcagccggagcgagttcagcgagcgcgattacgcccataggagggcacctgtgcgcgagtacgacgacttggatgtcgacgtccgcgtgcgggagcgggagcgggagcatgtagacaggacacctgcttttctccgcgaggatgtccgccgcaccgacgccggcccgctggtgctccgctcgcgagaggtcgagaccctcgacaggcggcgccgcagccccagccctcaggtcagataccgagagcgcatcatcgagcgtgagcgctcgagggaaccaacccccgagcgacggccgcgatactatgagcggtcgccttcgcctgcccaggtgcgcgtcgagtcgcgcgtggtcgagcgccggagagaacggtcgcccactccggatcgcgagcgtgagctgatccgcctgcgcatcgaaagagagagggaacgaaaaccctcgccctctcccagcccctctcccgagccgtcccccgagccccagttcatccgagggccgaccatagagcgggaggtcatcactcactacagagacattgatcacggtatgatccgggctaagccgccatcgcctccgccggcaccccgtcgcgcaccctcccggccgagggtgaaagagaccagagagacggatattgacatcgatatctaccgagatgagactgacatcgacattcgcaaacgcacccgctcacggtcccggcctcgcgagcgtgagcgtgaggtcgagcgacctcgccccaagcagcgtccctcctactacgatgaggacgacctcgtcattgtgaagggccgagacaagctcaaggtgacagacacccacaggcgacgggcacactcggaggcaccgagacccgactgggacgacgaggccgagtacatcaccagcaagatcgactcccgaggtcgtatgggcgaggcatggcacggtgccaccaaggactggaccatcgtggatgtcccgccgggaacggaacgcgtcaagatggacggcgtcggtggcggaggcgccgaagtgacctggcaacgctacaatggcgtgcgcaggtccaagttcattcctgagcgggatgagtcggtcgtcagcgcccccagcagtaagagcgaggcgccacgagaaacttctcgtgaccgagagaaactcagtatccagatttacgattccaaggcccgcgaccgtgaggtcaaggtcgaggaagtgcacgaccggcgcatctcgatccacgaaggcggcagagtcccagctcgtaagcgcgagggcatgtggacagagatcactaaagatctcgtcgttcgcgaggctatcgagcgcatgggatacgactacgaagagacggaatggtttttctatgtcatgcagtatctgcgttatgaggacgttcttgagctcgtcaatatctctgatgatatccgaaggcaccggagacatagacaccgagaatacgaatctggtgatttctacggccacgagcaccgacatcgccaccgcaaatctgtgccctgggataaaatcgacgacgaacgtatcgttgagcgggagatcgtctacgatcggccgtcgcgccactaccgctgaagctcgtctgggagccgttacggatcaacgtattcgctccgggcagttggttggccatttgctgcaagaggctgtgttcatacggcagcatcgaatctggcttggtttccggatattatttgaacttcacttccttcaaataactggattggatatcggcacggttgtttgcttcttgttgtttgcttcttgttgtttgctccagatattcataatcgcactcgaatcgatgagcatagcgacagattaggactttgtggctgtttgggacataaaccgagatagtgagcgttacgatacgtatttacgactgatgagtctacgaacaactacatgtcatttaggcatctgccacttttttgctatgttgataatcattttgagataatatagcgatgattttgcgttacatctttcccc

SEQ ID NO: 25045 - DNA, 696 bp, Muscodor strobelii
  misc_feature: SGI cDNA ID NO. 568545
  misc_feature: Encodes the peptide sequence at SEQ ID NO 25046
atggcgccgcccaaaataacttggtcccgtcgcactcccgcttgttgggacgacttggtacatgagcgtggtgacaagaagtgtctcgagactggcatgttctcggacgtcgttgtcaagtgtggtgttcgacagtggaacctgcatcttggtttcttgtacacacgcagtgattggttccaggctgctctcagcggacatgttcaggaagccaaaccacacattatcactcttgacgagcaagatcccaccgcccttgatgttgtaatccacctgatctatctcccggatgacaagttcgagatggaggagcatccgtccatgcttaccgtctatgtcaaaatactcgtcgcaatcgattatttctgcctagatgagctttcagaggacatcttgcccgatgctcgccgcgtcttaaagagcacccttgagaagatgagctccaccacgcccggcaccgaagaattccgcaatctggtcgatgaattcacaacagccgtgaatgtggcctacgactccgagttgctggccctccgaaagctgttcgtggaatgtatggtcgagtgcgagatgcgtcctctcatggtagagcagatcaacgcagagatcctcgacctaactcctaagtatgcagaagatctcatgtgcgaacgagagaaaataactagccaagcctttcccacttgccgactttga

SEQ ID NO: 25046 - protein, 231 aa, Muscodor strobelii
  misc_feature: SGI Peptide ID NO. 568545
  misc_feature (25)..(215): NCBI GI: 85079439 Blast Desc: NCU05044 [Neurospora crassa OR74A] gi|28917412|gb|EAA27116.1| [Neurospora crassa OR74A]
  misc_feature (24)..(183): NCBI GI: 171680598 Blast Desc: protein product [Podospora anserina] gi|170939926|emb|CAP65152.1| protein product [Podospora anserina]
  misc_feature (25)..(215): NCBI GI: 116179034 Blast Desc: CHGG_00145 [Chaetomium globosum CBS 148.51] gi|88184442|gb|EAQ91910.1| CHGG_00145 [Chaetomium globosum CBS 148.51]
  misc_feature (29)..(94): NCBI GI: 189192190 Blast Desc: PTRG_02101 [Pyrenophora tritici-repentis Pt-1C-BFP] gi|187974040|gb|EDU41539.1| PTRG_02101 [Pyrenophora tritici-repentis Pt-1C-BFP]
  misc_feature (29)..(94): NCBI GI: 225555851 Blast Desc: BTB/POZ domain-containing protein [Ajellomyces capsulatus G186AR]
  misc_feature (29)..(97): NCBI GI: 240277121 Blast Desc: conserved [Ajellomyces capsulatus H143]
  misc_feature (21)..(94): NCBI GI: 46115930 Blast Desc: FG03807.1 [Gibberella zeae PH-1]
  misc_feature (29)..(94): NCBI GI: 256727319 Blast Desc: NECHADRAFT_33838 [Nectria haematococca mpVI 77-13-4]
  misc_feature (32)..(132): NCBI GI: 171679309 Blast Desc: protein product [Podospora anserina] gi|170939280|emb|CAP64508.1| protein product [Podospora anserina]
  misc_feature (25)..(94): NCBI GI: 226292908 Blast Desc: BTB/POZ domain-containing protein [Paracoccidioides brasiliensis Pb18]
MAPPKITWSRRTPACWDDLVHERGDKKCLETGMFSDVVVKCGVRQWNLHLGFLYTRSDWFQAALSGHVQEAKPHIITLDEQDPTALDVVIHLIYLPDDKFEMEEHPSMLTVYVKILVAIDYFCLDELSEDILPDARRVLKSTLEKMSSTTPGTEEFRNLVDEFTTAVNVAYDSELLALRKLFVECMVECEMRPLMVEQINAEILDLTPKYAEDLMCEREKITSQAFPTCRL

SEQ ID NO: 25047 - DNA, 714 bp, Muscodor strobelii
  misc_feature: SGI EST ID NO. CUFF.58966.0
  misc_feature: Variant of the nucleotide sequence at SEQ ID NO 25045
cccacttccaagttgaactcctactaggagctcactaggatttcctaaggcgcctgtcacctcccaaggtctcccagcttactgctgttcatttgcaacaaaacctacctttttctaacttaacgctcagtacatagggtagtgaaagtgggcatccaccacctaggatagatacctacaactatctctgcacactctatccgagattacaagagcaacttacatgcctacctccctgaccatttgatctcgctgaaagcatggcgccgcccaaaataacttggtcccgtcgcactcccgcttgttgggacgacttggtacatgagcgtggtgacaagaagtgtctcgagactggcatgttctcggacgtcgttgtcaagtgtggtgttcgacagtggaacctgcatcttggtttcttgtacacacgcagtgattggttccaggctgctctcagcggacatgttcaggaagccaaaccacacattatcactcttgacgagcaagatcccaccgcccttgatgttgtaatccacctgatctatctcccggatgacaagttcgagatggaggagcatccgtccatgcttaccgtctatgtcaaaatactcgtcgcaatcgattatttctgcctagatgagctttcagaggacatcttgcccgatgctcgccgcgtcttaaagagcacccttgagaagatgagctccaccacgcccg

SEQ ID NO: 25048 - DNA, 426 bp, Muscodor strobelii
  misc_feature: SGI cDNA ID NO. 568546
  misc_feature: Encodes the peptide sequence at SEQ ID NO 25049
atgtctgaccacgagtatggaggcaacgatgacttgtctctccccaaagctacggtgcagaagatcgtgagcgagattctgcccccctccaccggggtgtcgttttccaaagaagcccgcgatctcctgatcgagtgctgcgtcgagttcatcacgctgatctcgtccgaggctaacgagatctcggagaaagaggcgaagaagacaatcgcctgcgaccacatcaccaaggcactcgagactcttggcttcagcgattacgtgcccgctgttctagaggctgctgcacagcacaaagagacacaaagagtccgagagaagagaaccaacaagttcgaggacagtggtatgaccatggaacagctactggaactccagcagagggagttcgaggaggccaagaagaagcagagcggcgaatcgtga

SEQ ID NO: 25049 - protein, 141 aa, Muscodor strobelii
  misc_feature: SGI Peptide ID NO. 568546
  misc_feature (12)..(79): Pfam Id: PF00808 Pfam Desc: Histone-like transcription factor (CBF/NF-Y) and archaeal histone
  misc_feature (1)..(139): NCBI GI: 171684963 Blast Desc: protein product [Podospora anserina] gi|170942442|emb|CAP68094.1| protein product [Podospora anserina]
  misc_feature (1)..(138): NCBI GI: 256732279 Blast Desc: [Nectria haematococca mpVI 77-13-4]
  misc_feature (1)..(138): NCBI GI: 261353679 Blast Desc: TATA-binding protein-associated phosphoprotein [Verticillium albo-atrum VaMs.102]
  misc_feature (1)..(138): NCBI GI: 46134155 Blast Desc: FG09217.1 [Gibberella zeae PH-1]
  misc_feature (1)..(138): NCBI GI: 164429630 Blast Desc: NCU02017 [Neurospora crassa OR74A] gi|157073555|gb|EAA35646.2| conserved [Neurospora crassa OR74A]
  misc_feature (1)..(137): NCBI GI: 39970715 Blast Desc: conserved [Magnaporthe grisea 70-15] gi|149210203|ref|XP_001522476.1| MGCH7_ch7g579 [Magnaporthe grisea 70-15] gi|86196534|gb|EAQ71172.1| MGCH7_ch7g579 grisea
  misc_feature (1)..(141): NCBI GI: 238840286 Blast Desc: class 2 transcription repressor NC2 [Microsporum canis CBS 113480]
  misc_feature (9)..(138): NCBI GI: 38566897 Blast Desc: related to TBP-binding repressor protein [Neurospora crassa]
  misc_feature (1)..(136): NCBI GI: 119179415 Blast Desc: CIMG_08461 [Coccidioides immitis RS] gi|240110098|gb|EER28257.1| Histone-like transcription factor and archaeal histone family protein [Coccidioides posadasii C735
  misc_feature (1)..(141): NCBI GI: 261188929 Blast Desc: CBF/NF-Y family transcription factor [Ajellomyces dermatitidis SLH14081] gi|239591881|gb|EEQ74462.1| CBF/NF-Y family transcription factor [Ajellomyces dermatitidis SLH14081]
  misc_feature (10)..(103): SWISSPROT Homolog: EC 2.7.7.7 DNA-directed DNA polymerase
MSDHEYGGNDDLSLPKATVQKIVSEILPPSTGVSFSKEARDLLIECCVEFITLISSEANEISEKEAKKTIACDHITKALETLGFSDYVPAVLEAAAQHKETQRVREKRTNKFEDSGMTMEQLLELQQREFEEAKKKQSGES

SEQ ID NO: 25050 - DNA, 1901 bp, Muscodor strobelii
  misc_feature: SGI EST ID NO. CUFF.58994.0
  misc_feature: Variant of the nucleotide sequence at SEQ ID NO 25048
tggcaagctcacaacgtgatcgaaaccatgtccgtcatttgaagtagcaagtacaaagaaatactgtcgaatcttgcgagatatcgaatgcagctttgcccgcaactcgatgcactactaccagtcggccgtgtttggtgctttttgaatgcctcttagatcagtccgcctgcaccttaaacccaacctcatgcccctcccacattgcctgtttaagcccacctcaaatcatcccttgtccttgagcctcgcaaaacgtcactcaacaacacactcatctcatcttttctcttcaaccttggctcatacttcacttcgactcaacacgacctgcgaacttggccctcggatttgatccctccctccccatatcgcttatttgatctcggtctcttgtatcgcgagaatcacgtggtggaatctgcaatctgagtcgctgtctgctctgtcttgcaaataggtagcctcccatcgttttccccgagttaggttgaaggaatattgtcatgtctgaccacgagtatggaggtgagtcttttcatccgaataaaagctctgatttaaatcaggtgcagtcaatccccttgtatgaccgcagtatctcccgtcactgagcaaacgccacacataatgctcatcgcttagcaagtcgctgctggcggaaccaccctcgaatcatcacccccctattgcccatatcgtacctgcccgagtgtcattccgcacctttattcaatgtggttgatctatgcttttgaggctagtgcttttgtactagactttagcaaccatttgtttgcgctccccgaatgaccagtgcataggagtctgtgcatgggtgagcattcactatcctcttgccttgcttaacaaaattgaatcacggtcattcctacacctttgtacccattcaagtaaatagaagatcggtctacctaatacttcaccattcactgttgttttcatatctcattcctccaccaccttaccccctctcttcacccgtggtcaatctacttttacgctccctcctgcacatgtctcattgttctattttggagatttaactcgacttgcaatcaccaagcatggctcaaagtatggcaaaactcaaaacacacgatcccgttgtcccattgcgcaactcccgccattataatctagatgttgactaatgttgtctctaggcaacgatgacttgtctctccccaaagctacggtgcagaagatcgtgagcgagattctgcccccctccaccggggtgtcgttttccaaagaagcccgcgatctcctgatcgagtgctgcgtcgagttcatcacgctgatctcgtccgaggctaacgagatctcggagaaagaggcgaagaagacaatcgcctgcgaccacatcaccaaggcactcgagactcttggcttcagcgattacgtgcccgctgttctagaggctgctgcacagcacaaagagacacaaagagtccgagagaagagaaccaacaagttcgaggacagtggtatgaccatggaacagctactggaactccagcagagggagttcgaggaggccaagaagaagcagagcggcgaatcgtgagaggcccgatattgcttttgctgtgggacgggcacttcgtagctacgctgagctgaaggatttgcattatgggtaggcgttaggaacaagaaatgcgagactgggcagcggcgttaaggaggttccggtttattgtttttaagtgccagcgagttcgtagcctctgttgcctacagtcacaaatccaaccagaccgaaaaagatggtctttaccaatgctcgatagcctcttcgctggcttttgcccatgctgaccaggactccgttttgaaaaatatgaatcgctttgaatttgaaaacacgatatgcg

SEQ ID NO: 25051 - DNA, 768 bp, Muscodor strobelii
  misc_feature: SGI cDNA ID NO. 568547
  misc_feature: Encodes the peptide sequence at SEQ ID NO 25052
atgtctaaggttttcatagtgaccggcgcaagccgcggtctaggcctcgccatcgcacaaattctactcaataaatcccacaaagtgttcctggtcgcaagatctcaacatgagctacagaagatcaaaacacagcacccagaatcgactgagttcatgactgctgatttaggggatttgaaagtagcaccaaggatcacagaggctgctctcaaggcttttggtaagatcgatggtttggtggtaaatcacgggacattgtctcccatcaccaagctctttgaatccgacgctgaagagtggaggaaagcatacgatatcaatctattcagcgccgtagcactggtgaaagcagcaatccctgagctacgcaaatcaagcggtcgcgtcgtttttgtctcctccggggcttctgcaggcggcgtggcagggtggggggcatacgggtcctcgaaagcggcgataaatcatctctgtgccacgttggccgtcgaagaagctaatattacgagtgtggctatatccccggggaaggttgacacggcgatgcaaaagcagatcagagaagagggacatgcggggatgtcgcctgaagttcatgccagtttcgtcgcagaacacgattcaggacgtctactcagtccagataagccaggcatggtgattgccaacctggtagttggcgctaagacgcaattcaatggcaaacatttgaggtttgagaagacttactcgactggagttcgtgccgtactgaccgcaagctag

SEQ ID NO: 25052 - protein, 255 aa, Muscodor strobelii
  misc_feature: SGI Peptide ID NO. 568547
  misc_feature (3)..(167): Pfam Id: PF00106 Pfam Desc: short chain dehydrogenase
  misc_feature (2)..(246): NCBI GI: 145246170 Blast Desc: An12g02520 [Aspergillus niger] gi|134080047|emb|CAK41094.1| protein product [Aspergillus niger]
  misc_feature (3)..(240): NCBI GI: 121711743 Blast Desc: short-chain dehydrogenase [Aspergillus clavatus NRRL 1] gi|119401638|gb|EAW12061.1| short-chain dehydrogenase [Aspergillus clavatus NRRL 1]
  misc_feature (1)..(238): NCBI GI: 259488199 Blast Desc: TPA: short-chain dehydrogenase/reductase, (AFU_orthologue; AFUA_3G02370) [Aspergillus nidulans FGSC A4]
  misc_feature (2)..(241): NCBI GI: 145609980 Blast Desc: MGG_02825 [Magnaporthe grisea 70-15] gi|149210205|ref|XP_001522477.1| MGCH7_ch7g580 [Magnaporthe grisea 70-15] gi|86196535|gb|EAQ71173.1| MGCH7_ch7g580 grisea
  misc_feature (1)..(245): NCBI GI: 115401006 Blast Desc: conserved [Aspergillus terreus NIH2624] gi|114190032|gb|EAU31732.1| conserved [Aspergillus terreus NIH2624]
  misc_feature (1)..(238): NCBI GI: 67904740 Blast Desc: AN9357.2 [Aspergillus nidulans FGSC A4] gi|40747268|gb|EAA66424.1| AN9357.2 [Aspergillus nidulans FGSC A4]
  misc_feature (3)..(241): NCBI GI: 116193623 Blast Desc: CHGG_06529 [Chaetomium globosum CBS 148.51] gi|88182442|gb|EAQ89910.1| CHGG_06529 [Chaetomium globosum CBS 148.51]
  misc_feature (2)..(240): NCBI GI: 121712086 Blast Desc: short-chain dehydrogenase [Aspergillus clavatus NRRL 1] gi|119401810|gb|EAW12232.1| short-chain dehydrogenase [Aspergillus clavatus NRRL 1]
  misc_feature (3)..(240): NCBI GI: 164429632 Blast Desc: NCU02018 [Neurospora crassa OR74A] gi|157073556|gb|EAA35647.2| conserved [Neurospora crassa OR74A]
  misc_feature (2)..(240): NCBI GI: 169778695 Blast Desc: [Aspergillus oryzae RIB40] gi|238499251|ref|XP_002380860.1| short-chain dehydrogenase/reductase, [Aspergillus flavus NRRL3357] protein
MSKVFIVTGASRGLGLAIAQILLNKSHKVFLVARSQHELQKIKTQHPESTEFMTADLGDLKVAPRITEAALKAFGKIDGLVVNHGTLSPITKLFESDAEEWRKAYDINLFSAVALVKAAIPELRKSSGRVVFVSSGASAGGVAGWGAYGSSKAAINHLCATLAVEEANITSVAISPGKVDTAMQKQIREEGHAGMSPEVHASFVAEHDSGRLLSPDKPGMVIANLVVGAKTQFNGKHLRFEKTYSTGVRAVLTAS

SEQ ID NO: 25053 - DNA, 1984 bp, Muscodor strobelii
  misc_feature: SGI EST ID NO. CUFF.58984.2
  misc_feature: Variant of the nucleotide sequence at SEQ ID NO 25051
gttttattttatgttctaggagaacaccgatatgtgataggcaataggtacagagatactgtacatccgtactaccggagcaaatactgatttgattaatgtggagcgcgagcactcaacgacaattacgaaacctgcccctccaacccccaccataccggctcaaatattttaacatcatcgacctacctcaaatcacgcagccatcgagcataacctttcgggagataaggatgtctaaggttttcatagtgaccggcgcaagccgcggtctaggcctcgccatcgcacaaattctactcaataaatcccacaaagtgttcctggtcgcaagatctcaacatgagctacagaagatcaaaacacagcacccagaatcgactgagttcatgactgctgatttaggggatttgaaagtagcaccaaggatcacagaggctgctctcaaggcttttggtaagatcgatggtttggtggtaaatcacgggacattgtctcccatcaccaagctctttgaatccgacgctgaagagtggaggaaagcatacgatatcaatctattcagcgccgtagcactggtgaaagcagcaatccctgagctacgcaaatcaagcggtcgcgtcgtttttgtctcctccggggcttctgcaggcggcgtggcagggtggggggcatacgggtcctcgaaagcggcgataaatcatctctgtgccacgttggccgtcgaagaagctaatattacgagtgtggctatatccccggggaaggttgacacggcgatgcaaaagcagatcagagaagagggacatgcggggatgtcgcctgaagttcatgccagtttcgtcgcagaacacgattcaggacgtctactcagtccagataagccaggcatggtgattgccaacctggtagttggcgctaagacgcaattcaatggcaaacatttgaggtggaatgcagctgaactcgagtcttttggctcgggttgaatcaggtcgcaagatagagacgtcactggaggcaaagtcagccgtgagtttaatcatgtggataagtataatatctagtgtttgatgcttcagtcgaaagatgaaaagacgttgttgtatttccacatcaagttcggtgatagcacgatcatcataagcagccaaagagggaagaaatggactattaatcatacctcgtaagcggagatgcaatccaacatgacgatgaccatcagctatatgtcaacctagagtcccaacccgatcagcctcgaatgctgggccagtcatgccatgcagcagaaatatggatatgtatatagaatcagggtaaaggtagtccgtcatgtagtgtcggtatttgatagtacatttggataagtggcatcatgatacgcgagtcgggcagaggtcgttcggggtgtcacatacgctcgcgagactggacatctttaggcggttagcttggctcgacaaggcagcgccggcagcagtgagagaggaacagggacttgattcaggcatgtcatttggcttgacgtgtcgatcaccatggtgccatttgtcattaggcagtaagactggggcgacaacaagttcatcatacaagttcgaggacgaaagagtaggaaacgaagtaaacgaagtatcggaacacatacggttcactgtaatacaagccgagcaacgctcattctggacagaggagccgacgcttgtgaactgagattacaggctcaaggatccgtattgagatgatgctgagcaccagctaccgattgtacgctgaggttgtgaggctttgcgcaagcgctgcgatgcttgggctctaattaatatccaatcatggtgaggttgtcgcgaaaaaaaggccattgattagcaagggaagatgtgagtatagcactgcatcttaatacacctaggtcggccacactagggagtccgatcgcatgtcgtgcggcaaacaggaggaaaatagagatgtgggaaga

SEQ ID NO: 25054 - DNA, 837 bp, Muscodor strobelii
  misc_feature: SGI cDNA ID NO. 568548
  misc_feature: Encodes the peptide sequence at SEQ ID NO 25055
atgtctaaggttttcatagtgaccggcgcaagccgcggtctaggcctcgccatcgcacaaattctactcaataaatcccacaaagtgttcctggtcgcaagatctcaacatgagctacagaagatcaaaacacagcacccagaatcgactgagttcatgactgctgatttaggggatttgaaagtagcaccaaggatcacagaggctgctctcaaggcttttggtaagatcgatggtttggtggtaaatcacgggacattgtctcccatcaccaagctctttgaatccgacgctgaagagtggaggaaagcatacgatatcaatctattcagcgccgtagcactggtaaagtcgccaatcgggcatttcatgataggaaaaggagaaagtactcgaactaatcacatgctacaggtgaaagcagcaatccctgagctacgcaaatcaagcggtcgcgtcgtttttgtctcctccggggcttctgcaggcggcgtggcagggtggggggcatacgggtcctcgaaagcggcgataaatcatctctgtgccacgttggccgtcgaagaagctaatattacgagtgtggctatatccccggggaaggttgacacggcgatgcaaaagcagatcagagaagagggacatgcggggatgtcgcctgaagttcatgccagtttcgtcgcagaacacgattcaggacgtctactcagtccagataagccaggcatggtgattgccaacctggtagttggcgctaagacgcaattcaatggcaaacatttgaggtttgagaagacttactcgactggagttcgtgccgtactgaccgcaagctag

SEQ ID NO: 25055 - protein, 278 aa, Muscodor strobelii
  misc_feature: SGI Peptide ID NO. 568548
  misc_feature (3)..(190): Pfam Id: PF00106 Pfam Desc: short chain dehydrogenase
  misc_feature (3)..(115): Pfam Id: PF00106 Pfam Desc: short chain dehydrogenase
  misc_feature (147)..(190): Pfam Id: PF00106 Pfam Desc: short chain dehydrogenase
  misc_feature (3)..(264): NCBI GI: 116193623 Blast Desc: CHGG_06529 [Chaetomium globosum CBS 148.51] gi|88182442|gb|EAQ89910.1| CHGG_06529 [Chaetomium globosum CBS 148.51]
  misc_feature (2)..(264): NCBI GI: 261353678 Blast Desc: short-chain dehydrogenase [Verticillium albo-atrum VaMs.102]
  misc_feature (2)..(269): NCBI GI: 145246170 Blast Desc: An12g02520 [Aspergillus niger] gi|134080047|emb|CAK41094.1| protein product [Aspergillus niger]
  misc_feature (1)..(261): NCBI GI: 259488199 Blast Desc: TPA: short-chain dehydrogenase/reductase, (AFU_orthologue; AFUA_3G02370) [Aspergillus nidulans FGSC A4]
  misc_feature (3)..(263): NCBI GI: 121711743 Blast Desc: short-chain dehydrogenase [Aspergillus clavatus NRRL 1] gi|119401638|gb|EAW12061.1| short-chain dehydrogenase [Aspergillus clavatus NRRL 1]
  misc_feature (2)..(264): NCBI GI: 145609980 Blast Desc: MGG_02825 [Magnaporthe grisea 70-15] gi|149210205|ref|XP_001522477.1| MGCH7_ch7g580 [Magnaporthe grisea 70-15] gi|86196535|gb|EAQ71173.1| MGCH7_ch7g580 grisea
  misc_feature (1)..(268): NCBI GI: 115401006 Blast Desc: conserved [Aspergillus terreus NIH2624] gi|114190032|gb|EAU31732.1| conserved [Aspergillus terreus NIH2624]
  misc_feature (1)..(261): NCBI GI: 67904740 Blast Desc: AN9357.2 [Aspergillus nidulans FGSC A4] gi|40747268|gb|EAA66424.1| AN9357.2 [Aspergillus nidulans FGSC A4]
  misc_feature (2)..(263): NCBI GI: 121712086 Blast Desc: short-chain dehydrogenase [Aspergillus clavatus NRRL 1] gi|119401810|gb|EAW12232.1| short-chain dehydrogenase [Aspergillus clavatus NRRL 1]
  misc_feature (3)..(263): NCBI GI: 164429632 Blast Desc: NCU02018 [Neurospora crassa OR74A] gi|157073556|gb|EAA35647.2| conserved [Neurospora crassa OR74A]
MSKVFIVTGASRGLGLAIAQILLNKSHKVFLVARSQHELQKIKTQHPESTEFMTADLGDLKVAPRITEAALKAFGKIDGLVVNHGTLSPITKLFESDAEEWRKAYDINLFSAVALVKSPIGHFMIGKGESTRTNHMLQVKAAIPELRKSSGRVVFVSSGASAGGVAGWGAYGSSKAAINHLCATLAVEEANITSVAISPGKVDTAMQKQIREEGHAGMSPEVHASFVAEHDSGRLLSPDKPGMVIANLVVGAKTQFNGKHLRFEKTYSTGVRAVLTAS

SEQ ID NO: 25056 - DNA, 1984 bp, Muscodor strobelii; identical to SEQ ID NO: 25053
  misc_feature: SGI EST ID NO. CUFF.58984.2
  misc_feature: Variant of the nucleotide sequence at SEQ ID NO 25054

SEQ ID NO: 25057 - DNA, 756 bp, Muscodor strobelii
  misc_feature: SGI cDNA ID NO. 568549
  misc_feature: Encodes the peptide sequence at SEQ ID NO 25058
atgtctaaggttttcatagtgaccggcgcaagccgcggtctaggcctcgccatcgcacaaattctactcaataaatcccacaaagtgttcctggtcgcaagatctcaacatgagctacagaagatcaaaacacagcacccagaatcgactgagttcatgactgctgatttaggggatttgaaagtagcaccaaggatcacagaggctgctctcaaggcttttggtaagatcgatggtttggtggtaaatcacgggacattgtctcccatcaccaagctctttgaatccgacgctgaagagtggaggaaagcatacgatatcaatctattcagcgccgtagcactggtgaaagcagcaatccctgagctacgcaaatcaagcggtcgcgtcgtttttgtctcctccggggcttctgcaggcggcgtggcagggtggggggcatacgggtcctcgaaagcggcgataaatcatctctgtgccacgttggccgtcgaagaagctaatattacgagtgtggctatatccccggggaaggttgacacggcgatgcaaaagcagatcagagaagagggacatgcggggatgtcgcctgaagttcatgccagtttcgtcgcagaacacgattcaggacgtctactcagtccagataagccaggcatggtgattgccaacctggtagttggcgctaagacgcaattcaatggcaaacatttgaggtggaatgcagctgaactcgagtcttttggctcgggttga

SEQ ID NO: 25058 - protein, 251 aa, Muscodor strobelii
  misc_feature: SGI Peptide ID NO. 568549
  misc_feature (3)..(167): Pfam Id: PF00106 Pfam Desc: short chain dehydrogenase
  misc_feature (3)..(248): NCBI GI: 121711743 Blast Desc: short-chain dehydrogenase [Aspergillus clavatus NRRL 1] gi|119401638|gb|EAW12061.1| short-chain dehydrogenase [Aspergillus clavatus NRRL 1]
  misc_feature (1)..(248): NCBI GI: 259488199 Blast Desc: TPA: short-chain dehydrogenase/reductase, (AFU_orthologue; AFUA_3G02370) [Aspergillus nidulans FGSC A4]
  misc_feature (3)..(248): NCBI GI: 116193623 Blast Desc: CHGG_06529 [Chaetomium globosum CBS 148.51] gi|88182442|gb|EAQ89910.1| CHGG_06529 [Chaetomium globosum CBS 148.51]
  misc_feature (2)..(248): NCBI GI: 121712086 Blast Desc: short-chain dehydrogenase [Aspergillus clavatus NRRL 1] gi|119401810|gb|EAW12232.1| short-chain dehydrogenase [Aspergillus clavatus NRRL 1]
  misc_feature (2)..(248): NCBI GI: 145609980 Blast Desc: MGG_02825 [Magnaporthe grisea 70-15] gi|149210205|ref|XP_001522477.1| MGCH7_ch7g580 [Magnaporthe grisea 70-15] gi|86196535|gb|EAQ71173.1| MGCH7_ch7g580 grisea
  misc_feature (1)..(248): NCBI GI: 67904740 Blast Desc: AN9357.2 [Aspergillus nidulans FGSC A4] gi|40747268|gb|EAA66424.1| AN9357.2 [Aspergillus nidulans FGSC A4]
  misc_feature (2)..(248): NCBI GI: 169778695 Blast Desc: [Aspergillus oryzae RIB40] gi|238499251|ref|XP_002380860.1| short-chain dehydrogenase/reductase, [Aspergillus flavus NRRL3357] protein
  misc_feature (2)..(248): NCBI GI: 46134153 Blast Desc: FG09216.1 [Gibberella zeae PH-1]
  misc_feature (3)..(248): NCBI GI: 164429632 Blast Desc: NCU02018 [Neurospora crassa OR74A] gi|157073556|gb|EAA35647.2| conserved [Neurospora crassa OR74A]
  misc_feature (2)..(238): NCBI GI: 145246170 Blast Desc: An12g02520 [Aspergillus niger] gi|134080047|emb|CAK41094.1| protein product [Aspergillus niger]
  misc_feature (3)..(125): SWISSPROT Homolog: EC 1.1.1.146 11-beta-hydroxysteroid dehydrogenase
MSKVFIVTGASRGLGLAIAQILLNKSHKVFLVARSQHELQKIKTQHPESTEFMTADLGDLKVAPRITEAALKAFGKIDGLVVNHGTLSPITKLFESDAEEWRKAYDINLFSAVALVKAAIPELRKSSGRVVFVSSGASAGGVAGWGAYGSSKAAINHLCATLAVEEANITSVAISPGKVDTAMQKQIREEGHAGMSPEVHASFVAEHDSGRLLSPDKPGMVIANLVVGAKTQFNGKHLRWNAAELESFGSG

SEQ ID NO: 25059 - DNA, 1984 bp, Muscodor strobelii; identical to SEQ ID NO: 25053
  misc_feature: SGI EST ID NO. CUFF.58984.2
  misc_feature: Variant of the nucleotide sequence at SEQ ID NO 25057

SEQ ID NO: 25060 - DNA, 633 bp, Muscodor strobelii
  misc_feature: SGI cDNA ID NO. 568550
  misc_feature: Reduced expression when VOC is produced
  misc_feature: Encodes the peptide sequence at SEQ ID NO 25061
atggcatacatcaccaaaacgcccctctttcacagaaaatctaagagcaacctgctcacaaaaccgatgccggaggaccagagacatctaagaaaattcagttcagccagcacgatttcacaggcctcctcagaaggcagccgaatgccatacgaccctctctctctacatcctcctctcacactcaacacttcgccagtcatgaccccggaatacgacatggtacgataccgagaagacgaggcacgcgaggatcgatttttcaaccagacacgtcatgctgaagaccacattcaggatctagcagagttttcaccgatcaaagggaaaaattgctggttcgaaggccctaaggcacggccctatgtttatgatcaagattctcagtggccgctcaaggactggcaggcaattccaccaggattaagtaactctcattcaccaagctccttcacatcatcgtcgcctacacgtcttgccgcgccgagaagaaggaacaccgactggatggaagacaccgatgtttttgtcaagcgaggggcttggaaacgccagggtatcatcttccaacttgacgacgaagacaaagaatgggaagagcaacactttgagctaccagacgagacacattaa

SEQ ID NO: 25061 - protein, 210 aa, Muscodor strobelii
  misc_feature: SGI Peptide ID NO. 568550
  misc_feature: Useful for introducing or modulating the production of volatile compounds
MAYITKTPLFHRKSKSNLLTKPMPEDQRHLRKFSSASTISQASSEGSRMPYDPLSLHPPLTLNTSPVMTPEYDMVRYREDEAREDRFFNQTRHAEDHIQDLAEFSPIKGKNCWFEGPKARPYVYDQDSQWPLKDWQAIPPGLSNSHSPSSFTSSSPTRLAAPRRRNTDWMEDTDVFVKRGAWKRQGIIFQLDDEDKEWEEQHFELPDETH

SEQ ID NO: 25062 - DNA, 1673 bp, Muscodor strobelii
  misc_feature: SGI EST ID NO. CUFF.58987.0
  misc_feature: Variant of the nucleotide sequence at SEQ ID NO 25060
cctgtcagtgccactaattcaaggatttccatgaccatgacgtccgtgtctcccggaggatcgaggctcggggttaagatcgcaaagcgaccatctccaatttatgaatcacaagctttcatgctgcttacagatatcagaataacctccctccattacgaagcaatgacccagtcctgcaaggcacaggtcttgtatttgaatcagcaccaggatcttatctacgctgctgcaggaaccactcgatcggaaatggatgcatggtcatattaataaactgccctacgcccaattgtctatgcccacctagacgggaagagctcatccaatatatatcactagctcttcagcctttcgaggagcatatgtctgttcttcgtggtcccaggtctacacagtacctcgccacctcttactcatctccatctagagaaacttcatttcacactccttccaccattcactgcagacacggtactcaaaatggcatacatcaccaaaacgcccctctttcacagaaaatctaagagcaacctgctcacaaaaccgatgccggaggaccagagacatctaagaaaattcagttcagccagcacgatttcacaggcctcctcagaaggcagccgaatgccatacgaccctctctctctacatcctcctctcacactcaacacttcgccagtcatgaccccggaatacgacatggtacgataccgagaagacgaggcacgcgaggatcgatttttcaaccagacacgtcatgctgaagaccacattcaggatctagcagagttttcaccgatcaaagggaaaaattgctggttcgaaggccctaaggcacggccctatgtttatgatcaagattctcagtggccgctcaaggactggcaggcaattccaccaggattaagtaactctcattcaccaagctccttcacatcatcgtcgcctacacgtcttgccgcgccgagaagaaggaacaccgactggatggaagacaccgatgtttttgtcaagcgaggggcttggaaacgccagggtatcatcttccaacttgacgacgaagacaaagaatgggaagagcaacactttgagctaccagacgagacacattaagcgatattttcccaaaaactacttcctaccgcggcaacgacacacacgtatggtcataggactcacatccattctcaatctctcatatgacacgtcacattattcattcacactctctcccactatgctcatcaacaaatcaagcaacatgtcaccatcactatcaacttgtgtcattcacctttcctacttacgaaatatcacgaaattacggtctgttaacgggtttatcgggaagcgtggtactgggggcattcctggggaatgccacaaaaatgggacagacagggctcggcttattctattttaaggtctctccacgtgaacaaccacttggaaggcttctggcagatatatcaacttgtaatctatttagaagtgcattcggactcggcgtgtcaggggcgccggataggattaggaccaagataccaatttgaatttattttgctcttctcgcacccaacatgcctttgtccattgccacttgggtgaatggaaacagttatctaccgttcatgtatcctgtacgaccccgttattaggatcctttcaag

SEQ ID NO: 25063 - DNA, 348 bp, Muscodor strobelii
  misc_feature: SGI cDNA ID NO. 568551
  misc_feature: Reduced expression when VOC is produced
  misc_feature: Encodes the peptide sequence at SEQ ID NO 25064
atggctgtgttcccgtccaagaagtatcggggtgccgccgaagccggctccttcgccgtcaaataccgctccatgatggccagacatccgttcctcctcttcggcctgcccttcatgtcggtgattgtcgcaggctccttcatcctcaccccggccaccgccgtccgctatgagaagcacgaccgcaaggtccgccagctgagccgcgacgaggagctcggcgtcggcaaggcgggcaggaaggtcaacatcaaggacgagtactaccgtctggcggccaaggacctcgacagctgggagcagaagcgggtcaagagacttcctggcgagaccgacggcgtgctctga

SEQ ID NO: 25064 - protein, 115 aa, Muscodor strobelii
  misc_feature: SGI Peptide ID NO. 568551
  misc_feature (1)..(115): NCBI GI: 156041238 Blast Desc: SS1G_11598 [Sclerotinia sclerotiorum 1980] gi|154695981|gb|EDN95719.1| SS1G_11598 [Sclerotinia sclerotiorum 1980]
  misc_feature (1)..(115): NCBI GI: 154299476 Blast Desc: BC1G_11000 [Botryotinia fuckeliana B05.10] gi|150857342|gb|EDN32534.1| BC1G_11000 [Botryotinia fuckeliana B05.10]
  misc_feature (1)..(115): NCBI GI: 39970381 Blast Desc: MGG_02657 [Magnaporthe grisea 70-15] gi|149209807|ref|XP_001522278.1| MGCH7_ch7g385 [Magnaporthe grisea 70-15] gi|86196340|gb|EAQ70978.1| MGCH7_ch7g385 grisea
  misc_feature (4)..(115): NCBI GI: 171683857 Blast Desc: protein product [Podospora anserina] gi|170941889|emb|CAP67541.1| protein product [Podospora anserina]
  misc_feature (3)..(115): NCBI GI: 85074827 Blast Desc: NCU00641 [Neurospora crassa OR74A] gi|74619057|sp|Q7SI11.1|COX16_NEUCR RecName: Full=Cytochrome c oxidase assembly protein cox-16, mitochondrial; Flags: Precursor
  misc_feature (1)..(115): NCBI GI: 46124071 Blast Desc: FG06413.1 [Gibberella zeae PH-1] gi|121813620|sp|Q4I8P5.1|COX16_GIBZE RecName: Full=Cytochrome c oxidase assembly protein COX16, mitochondrial; Flags: Precursor
  misc_feature (1)..(115): NCBI GI: 256731889 Blast Desc: [Nectria haematococca mpVI 77-13-4]
  misc_feature (4)..(115): NCBI GI: 261353675 Blast Desc: cytochrome c oxidase-assembly factor COX16 [Verticillium albo-atrum VaMs.102]
  misc_feature (26)..(115): NCBI GI: 116193117 Blast Desc: CHGG_06276 [Chaetomium globosum CBS 148.51] gi|88182189|gb|EAQ89657.1| CHGG_06276 [Chaetomium globosum CBS 148.51]
  misc_feature (4)..(115): NCBI GI: 187608871 Blast Desc: CHGG_06276 [Chaetomium globosum CBS 148.51] gi|88182189|gb|EAQ89657.1| CHGG_06276 [Chaetomium globosum CBS 148.51]
  misc_feature: Useful for introducing or modulating the production of volatile compounds
MAVFPSKKYRGAAEAGSFAVKYRSMMARHPFLLFGLPFMSVIVAGSFILTPATAVRYEKHDRKVRQLSRDEELGVGKAGRKVNIKDEYYRLAAKDLDSWEQKRVKRLPGETDGVL

SEQ ID NO: 25065 - DNA, 2624 bp, Muscodor strobelii
  misc_feature: SGI EST ID NO. CUFF.59166.1
  misc_feature: Variant of the nucleotide sequence at SEQ ID NO 25063
ctgtaacccacccaaagacagtccgccaagcttacactagacttatcatttcggagaaggaaactggaagctcgtccacctcatcgtcgcagcttcgtcgtcctcctcagcaaataccaccgtcattagcaacactcacattctcgacctgcacaggcacaactaaactagcacttaggtacttatctggagtgattgaagcaatataacgcatatacaatggctgtgttcccgtccaagaagtatcggggtgccgccgaagccggctccttcgccgtcaaataccgctccatgatggccagacatccgttcctcctcttcggcctgcccttcatgtcggtgattgtcgcaggctccttcatcctcaccccggccaccgccgtccgctatgagaagcacgaccgcaaggtccgccagctgagccgcgacgaggagctcggcgtcggcaaggcgggcaggaaggtcaacatcaaggacgagtactaccgtctggcggccaaggacctcgacagctgggagcagaagcgggtcaagagacttcctggcgagaccgacggcgtgctctgagcatcgttcatgcacattcaccacacgcgaactcacgccatcaccgtctcgcctgtcgcgtccgagccctcgcagcatttgtagccgacaaggcgacgtttctacgcaacctggcccgagcgagtcaataacgtcgtgtcccgctcccgccctgctaatcccgatgccgaggcacaggtcgagtgtctttgtcgaggccaccgacattgactttgcacggggaaactcaattgcctcagcctctaccaatctccaacctgtgcaacactccgcttgtctacccgccctgtgtagtttcggtcctttgtctaccgtttgccaagcttcatctgtctccattgaattcagattcttccctcgcgaggccccatctatttacctctcgcctacgaatttggatcctatcatggccatttagaactggagatcggcggggtttctgtcacggccagtctcaaatcacctgatcagatctctacatgacacgaaacatgcctcggaatcgcgtgccgaagacgcgtctgattaaaaatcattctcctagtgccatgttacatcgcggctaaggcacgcggcatctttgtatgttgtcgtctgggccgtttttgggtaaagaggcgggcacctacggcagctaaggtagcctaagcaattacctttgacaaccacccggtttttccaaccgtctagcttcaaatcagactacttcagggtggattaggttatgataggcagagagttttcacttggaaacagggtcatatattatcggataatgcatcatcacgtcattgcgtctcggccgcccgcccgcagcgtgccgttcgccgtagtttcaggaatagtcataggtagcaactatgagatgtaaagaagactatatgtgtaaatgccataatgcacaacagtaacagacggtaatgagagcgatgctccatcagtaccttttcaacgtaatgaccagacaattggaggaacaatcatcggaacactcgtgcgactactgacgtatgcggcggttagcagatcactcacctaagaaggtcatacaatcgccgcatagaaccgaccgtatcccacagtcgcgttaaacaataccacgtaattattgatcgccacgcatctccgtaatagaacgaaacggatctactgtacttctccatcactgctcgatccgcatattcggtcgcttgatgccattgagttcaccagaggtgccgagaaaagttagttggattggtaagaaaatgtagttgactcagtagcgggcgttgactcgtactggagacgttgtgccattgggatgggtgcctttttccggctctggcgcgggttcatcaacactgctggatagtctaagcaaggatttctcagcatcacggcgtattcaaccggctcagccggctctcgcaccatggatttcgggccaggtcgaatcataagaaacacgactctggcatcttcatgatcgtgcaactgaaagccgtagtccgaagcccgggccttgggaatcaaagggcaatctccactcgcacgaaaagaaaagtgaatatccgtacctaggtagttatcgcactcgtttagaagctgacttgaacagcaacccgtcgcgatggttcaatctagagggctgtaagttcgcgtcaggcaacctccgtgagtgccgatttccgggcaggcgatcccacgagcccaaaaagatatcggtgggctgtcactaaactcaatgcacccgcggggattcatcaacatgaatgccaatccgactagctgccatatctacagatgacaattgacagctgtagccttgtcgagccttgtctgtaattttactgatgagtcgtctgacatcagccgtacgcactatctgctgtgcctagccagaccaaggaatgctgtgtggtcagagtctcagcccaatgggtgtttgggtgtgtaaggatgtaatccatgttcagtggcagccggcatgcttttcatgcttcgttccgcactctgcatagacactgcactgcagcagcgccgtgttaacgcgatccccctccgtgaagatcttt

SEQ ID NO: 25066 - DNA, 7368 bp, Muscodor strobelii
  misc_feature: SGI cDNA ID NO. 568552
  misc_feature: Encodes the peptide sequence at SEQ ID NO 25067
atgtcaccagcgtctcacggtcggaatggtcgtcgtcgtcaacccgagcctgtcgtcgtcgatctggccatcatggatcatcatgttgctcctccgtctaccttggctgcccagctggttgataacatctccacctcagcaagaccttctcacccaaatgagacttctgagctgtccagacttttcgccgccatagaacaggtcaagaacgaccctgccatcctcgactcgcacgagaagcgtgtcgagcacaaccatatgctcatatatgtctactcccgtgttgtcctagagtctctcgagtgggatgctccttttgccaacaaggcccaattgaccctcgatgctaccagggctgtcaatttcttgaggatcaccattaacgagactcccgacgtcctgctgaccaccattgacgatgagtctttcctctttagaggatccgagcccctctggctatgggcttttccaaaggttttgaagctcctgaccaccggcgcttccgctgagatgactgcggccgttgaagccttctttactcaagtgttccgctcttcctctcgcacaagcagcctgtggccatatgccccacgtttccttgcctatctttgtcactgcttggatgcaattcaccgttgcttagcggagcagccaggcttatccataagtcatcatgcttctcccgcgttggttctgcctcggctctcatactttgaaaatgccggctattctgacatgcaacacctccagcaacattgtacctacacaattgcgcagcaggccgcgcagaaacctcgtgtataccaacatgcattaaatttcctgtccctcttgttgaatcctctggtgaacaagcagtcaagcctcgcccccacgttctcaactcacgagacaatcccatggttgttggacgcttttctgcgcacacatgcaatgcgaactcaatggcaggacatctatttggctcacttgccatcgctattcccaaaaatcatagaattaatagacaaattgagatgttcacagtataaggatgtgttgctgcaagacaaggcttccatactcttgacccatctttgcactgatattcttgccaatgcagcatgtggtaaagcaggccaaatccaagtcgatgatcgactgctcagtgccgctatgatcaggatagcagagtcttgcgtctcgtgtcagcctgtttcccatctggtgcaggcaaatatcagccccatactggaacaaccagtcatttacgagcaattagctactcctgaaagcgacctatggagaagcttagagttactccgccggacgtcacgcatccctacaccaacatcattagatgccattgtacaggcagaccggttcagtgacaggaaacttcgacagtgcgtgcaagatctgctcaccgcacttatcttaagatttcccgaagagccaaaatcaaaacgaaggaagcctgacagaccattgctgctgtccaaagttaccaacttactttggacgacttttggggtagagccacgcgacaccctgactggcttcggtgatgtacttcaagagaagtattcgacccttacagattccgacaagatacgagtttctcaacttattgcacatctttgttgtgctgtggatgagacacttgtcatcgtccatggttatgaagacagtgaattggagtttgactgtgccgattgccgtaactttggtaatttccacaaatcgttagccggcattgacgttgcagcgaaaaagaccgcaatggatttgttttcctcgctgctgcagacacctggctttgctgagtcgcgaaaagcacgtgtaactacaatgatttgcttacggcgcattgcaaagcactgtaattcttctgacttccttgatatggagtcttcccctgctgcacagtggtgcctgaagtctctgcaaagctctgtaagggagctacgtgtggcagcaggtcggacacttgctatgtttctcacggagcctgaccactgtggtatcaagaccttcgtcatagagaagaaccggggcaatgcgctcagcatacttcgtaccctatccgaccaagcccgaccggaattcgtcgagtcttgtattctggcatggtctcaagtcgcagttgtaataccagatgaccaacttattctagtattggttaaattagtagaatatttgggtcatgacagttcctttgcgtcggctactgcattcaccgagattctccaagtcgcccggcgccgaggtataaccaccaagcagctttttgagccattttggagttcgatcgcttatttagctgtgaaagagatgatcgagcaaccaaaactgacgcaactgcttgctgacgtcttggaaacaaccctaccacaattgctccttcatattcaatcatacgctctcccgtggcttgttctaaccaggaaaaaggagattattcacaaaattgcagaagtccgaaaggatgctgaatcatggcaaccttgtgtcgataatgctaatttgggccgtattctggctctgctcctcactcaagagagtcctgatatcgaggaccacacgatgggtctactcagacacgtctctcaccatttcaacgacttcaaactggtggatttgttcagagttgagcctttatcagtaactctccacgtcttgaaagctattgcggatgcggaagaggcgcgaaagccttacatgcgtaatgcactcaatcaaatggctagcatgattctcgctgctagtggtgaaagtaaaagaaaaagccaagcgacaggccgctttttgcatcaccatgcattaggattgatggcccagttgacggacgtcatcaacgacgtttcagctaaccgggctccattttacgagcgcaggcgttgcttaaaggccatggaggagatgatacgaacagggaagaatgatgttcgtatcgctcggccacagattactgcatgcactatggctgccatgtcacacaacgatctacgcgcggctgcattttcatgctggtgtgctatgatctttttctttgaagaaagtgaagtagacttagtcatcgaaacaaccttttatttaattggtcatcattggtcgtcgtttgaggatgcatcgcgacgactcgcccaggaactcgtcaacttcgtattggaacagcacaaacctctcgttatgaaattcattaataagcttccctccttcagccatattaacgagctgtctgatatcgaggccagacttagcaaatttcgatcaccagtggacagcagtacagccttcagagacctggcagatcgcttgtatcacgaacacgctggcgttgttctacaagctcttagggaactatcatcctatttgcaacgacatcagggctacttgcaggcgtcagctgtcagtgagcaacctgaatctatcgtttcgcaactttcgaggacgctcatggactgtgcgtcacgattcaacgggattcaccatgagatcagtgagctttgcagtcaatgcattggactagtgggctgtctggatcccaatcgcgtcgagtctattcgggcaaacacgcccatgattgttaccagcaacttcgaggattcggctgaatcaacagaatttggtttctttatactggaaaatgtgctggtcgaatcctttgtgacagcaacggacacaaagcttcaaggctttctatcgtatgcaatgcaagagctccttgacagatgctctatcacagaagccgtcaagaatccaactcttaaagatgctgagccagtatatcgacaatggtgtaaagtgaaccaaccagcacaggagattctcacgccttttatgacatcgctatacctccttccacccatgatgcagcagagaatcgaatacccaatttttcgtcctggcaggtcgtacgggaattggatgagaaatatcactctggactgtctccggagacctcagacgccctttgctatgctcatctttgagccgctgtgccgactgatccgggtcaaagatatcactatcgctgagtttctatttccttatttgttagtgcatatcatactggctgaggatatcgtggaagaggaacgcgttgctatattacgtgagccaatcgacgttcttcggtatgagccccctagtgaggtttcctataccgagaaggaggatagaaaactctattgcgagatacttttccgttttctcgattatgccatgcaatgggttcaccagaaacgggcgatatctaatcccgcaactagagatatcgaagggatagagaaggtagtaaattacctatcctcgttccctgcggagttgatatcacaacgcgccatcgactgctctgcatattctcgggcactgttccacctcgagcagcatgttgcggaggtagatgagatggaggacagtagcgttgatcgtgatcggttggtgcaaagagtacaagacatttactcgcagattgacgagcctgatggtcttgaaggactctctgcacatcttaaagtactcgatatcgagcagcaagtgttgagtcaccggaaggcagggcggtggaccgcagcccagacctggtatgaaattaagcttgctgaagaccccgactgtgttgatgtacaaattgacctcctcacgtgtcttaaagagtctgggcagcacgatgtgctcctgaactatgtggaaggtattgaaaagcacacagccttgaacacgattaataaagtcataccatacgctgttgaagcagcgtgggcaactggcagatgggaaacgatgcagaagttcatcaataagtatcaaggcgatcctacagaggatttcaatgtgtctatagcccaagcactactgtgtttacgaaaggggtggacaaaagggtttctcgagctggtcaaaaccatgaggaacagggttggcgcgtcgctaacaccagcctctactacgtctctggcagcttgtcatgaacccatgcttcgagcccacgtcttgacagatttagagctcatagttggcattggcaacgagggaaatcaacatcctcaggagatacttaaatccttggagaggcgtattgaagtgctcggctcttacgtcaacgacaaacaattcgtgctgggcattcgccgggcagcaatggaattactgcggccacgcttctccaataccgacatatccgccctatggctttcgagcgctcgacttgcgagaaagactaactcgattcatcaatcatttaacgccgtgcttcgcgcctcgcagcttggcgatgaatcctctacaattgaaaatgcgcgtttgctctggaaagaggggcataacagaaaggccatacagactctccaaggtgccattgctagtagagctttctcacatcagagtttcagtgagaacgactcgtcagaaagaaacattggtacacaacagactctcctcgccgccagagctaaattactgcttgcgaaatggctggacagcgccggccagacaagcgccactgccttgagagagcaatatagagccgtgcctcagatctacagcaattgggagaaaggccattattacgtggggcgacattacaaaaaggtccttgaatccgaaaggacgctgaagccagacgatcaaagtgacgaatatctgaccggagaaatcgctaagcttgtcatagagaactatctaagatctctgaactatgggacaaaatatctgtatcagacattgcctcgaatcctaacactttggcttgaattgggagctcaggtcgacaaagcacccgaaggcaaagtttctctttcgcgggagcttcaccatcgccggaagatccaactcgaaggactccacggtagtctacgaaaataccttgcgcgtttaccggcgtatgtcttctacacagctctccctcagattgtggcgcgtattgcccatcccaataccgatgtctttcgaatgctacaagccatcatattcaaagtcgtcgaagcctatcccaatcaggctctttggaacctgtttgctatcatgacatcccggcaggcaacatccgaacgtcgggccagaggtcagcaaatattggttcacctcaaagagcgaaatatcaaaactgagactggtgggtacactctcccttcgctgcttcgaaggggagagaaattggccgagcaattacttctggcgtgcaataacggcgactttcagagcaatcggacgactttggctagcattactcgtgatctgcacttcaaccacaagtgtacaccctgccccctagtcgtgcccgtcgaggcctgtttgacagcaacactgcccacactcaccgataacctaaagagacacaaagccttctcgcgagatattgtcacaattagctcgttcctcgacgaggttctcgtgctaggctccctagcgaaaccgcgaaagctcatcgcacgggggtcgaacggcgttaattatggtctcttgatcaaacccaaggacgatctccggacggaccagcgactcatggagttcaacagtatgatcaaccggtcactgagacgcgacgcggaatctagccggcgacagctgtatatccggacctacgccgtcgtacccctcaatgaggagtgtggtatcatcgagtgggtcgatggactgaagacgctacgtgatattttacttaacagctatcgtgcacgtggcatcaccccgccatacggccatctgcaacaaatgatgaaagactcggtcgtgggtgacaagaacaccaagatcttcacagagggtgtgttgggcatgttcccccctgtacttcccaactggttcatagcacaattccccaacccatcactgtggttcacggcgcgattaaggtatacgcgctcgtgtgctgtcatgtcgatggtgggcacaatcctggggcttggagatcgacacggcgagaacgtgcttctcgaggaaggcaacgggggtgttttccacgtcgacttcaactgtctgtttgacaagggcctcacattcgcacagccagaaaaggtgccattccggctcactcacaacatggtggccgctatgggaatctatggatatgaagggccattccgaaaatgctcggagctcacgctaagtatcctccgtcaacaggaggagacactgatgacaatcctcgaggctttcatctatgatcccaccctagatttgcagaaggataagaagagaaagaacgaggtggtgaggctgaacccgcagagtgtggttgagagtattaagagaaaggtcagaggtttgttgccggacgagagtattccactcggagtggaaggacaggtggatgaactcatcaagcaggcggtgaacccgaggaacttggcgtctatgtatatcgggtggtgcccctttttgtga

SEQ ID NO: 25067 - protein, 2455 aa, Muscodor strobelii
  misc_feature: SGI Peptide ID NO. 568552
  misc_feature (2423)..(2455): Pfam Id: PF02260 Pfam Desc: FATC domain
  misc_feature (2145)..(2390): Pfam Id: PF00454 Pfam Desc: Phosphatidylinositol 3- and 4-kinase
  misc_feature (926)..(1033): Pfam Id: PF08064 Pfam Desc: UME (NUC010) domain
  misc_feature (927)..(1033): Pfam Id: PF08064 Pfam Desc: UME (NUC010) domain
  misc_feature (1)..(2455): NCBI GI: 171683963 Blast Desc: protein product [Podospora anserina] gi|170941942|emb|CAP67594.1| protein product [Podospora anserina]
  misc_feature (445)..(2455): NCBI GI: 149209805 Blast Desc: MGCH7_ch7g384 [Magnaporthe grisea 70-15] gi|86196339|gb|EAQ70977.1| MGCH7_ch7g384 [Magnaporthe grisea 70-15]
  misc_feature (1)..(2455): NCBI GI: 90403224 Blast Desc: phosphatidyl inositol 3-kinase [Neurospora crassa]
  misc_feature (579)..(2455): NCBI GI: 145610197 Blast Desc: MGG_02656 [Magnaporthe grisea 70-15] gi|145017554|gb|EDK01917.1| MGG_02656 [Magnaporthe grisea 70-15]
  misc_feature (30)..(2354): NCBI GI: 261353129 Blast Desc: protein kinase rad3 [Verticillium albo-atrum VaMs.102]
  misc_feature (673)..(2453): NCBI GI: 256734124 Blast Desc: NECHADRAFT_92026 [Nectria haematococca mpVI 77-13-4]
  misc_feature (673)..(2447): NCBI GI: 46128611 Blast Desc: FG08683.1 [Gibberella zeae PH-1]
  misc_feature (474)..(2455): NCBI GI: 261188115 Blast Desc: phosphatidylinositol 3- and 4-kinase [Ajellomyces dermatitidis SLH14081] gi|239593349|gb|EEQ75930.1| phosphatidylinositol 3- and 4-kinase [Ajellomyces dermatitidis
  misc_feature (474)..(2455): NCBI GI: 239609091 Blast Desc: phosphatidylinositol 3- and 4-kinase [Ajellomyces dermatitidis ER-3]
  misc_feature (503)..(2455): NCBI GI: 119486670 Blast Desc: phosphatidylinositol 3- and 4-kinase, [Neosartorya fischeri NRRL 181] gi|119410478|gb|EAW20424.1| phosphatidylinositol 3- and 4-kinase, [Neosartorya fischeri NRRL
  misc_feature (589)..(2455): SWISSPROT Homolog: EC 2.7.11.1 Non-specific serine/threonine protein kinase
MSPASHGRNGRRRQPEPVVVDLAIMDHHVAPPSTLAAQLVDNISTSARPSHPNETSELSRLFAAIEQVKNDPAILDSHEKRVEHNHMLIYVYSRVVLESLEWDAPFANKAQLTLDATRAVNFLRITINETPDVLLTTIDDESFLFRGSEPLWLWAFPKVLKLLTTGASAEMTAAVEAFFTQVFRSSSRTSSLWPYAPRFLAYLCHCLDAIHRCLAEQPGLSISHHASPALVLPRLSYFENAGYSDMQHLQQHCTYTIAQQAAQKPRVYQHALNFLSLLLNPLVNKQSSLAPTFSTHETIPWLLDAFLRTHAMRTQWQDIYLAHLPSLFPKIIELIDKLRCSQYKDVLLQDKASILLTHLCTDILANAACGKAGQIQVDDRLLSAAMIRIAESCVSCQPVSHLVQANISPILEQPVIYEQLATPESDLWRSLELLRRTSRIPTPTSLDAIVQADRFSDRKLRQCVQDLLTALILRFPEEPKSKRRKPDRPLLLSKVTNLLWTTFGVEPRDTLTGFGDVLQEKYSTLTDSDKIRVSQLIAHLCCAVDETLVIVHGYEDSELEFDCADCRNFGNFHKSLAGIDVAAKKTAMDLFSSLLQTPGFAESRKARVTTMICLRRIAKHCNSSDFLDMESSPAAQWCLKSLQSSVRELRVAAGRTLAMFLTEPDHCGIKTFVIEKNRGNALSILRTLSDQARPEFVESCILAWSQVAVVIPDDQLILVLVKLVEYLGHDSSFASATAFTEILQVARRRGITTKQLFEPFWSSIAYLAVKEMIEQPKLTQLLADVLETTLPQLLLHIQSYALPWLVLTRKKEIIHKIAEVRKDAESWQPCVDNANLGRILALLLTQESPDIEDHTMGLLRHVSHHFNDFKLVDLFRVEPLSVTLHVLKAIADAEEARKPYMRNALNQMASMILAASGESKRKSQATGRFLHHHALGLMAQLTDVINDVSANRAPFYERRRCLKAMEEMIRTGKNDVRIARPQITACTMAAMSHNDLRAAAFSCWCAMIFFFEESEVDLVIETTFYLIGHHWSSFEDASRRLAQELVNFVLEQHKPLVMKFINKLPSFSHINELSDIEARLSKFRSPVDSSTAFRDLADRLYHEHAGVVLQALRELSSYLQRHQGYLQASAVSEQPESIVSQLSRTLMDCASRFNGIHHEISELCSQCIGLVGCLDPNRVESIRANTPMIVTSNFEDSAESTEFGFFILENVLVESFVTATDTKLQGFLSYAMQELLDRCSITEAVKNPTLKDAEPVYRQWCKVNQPAQEILTPFMTSLYLLPPMMQQRIEYPIFRPGRSYGNWMRNITLDCLRRPQTPFAMLIFEPLCRLIRVKDITIAEFLFPYLLVHIILAEDIVEEERVAILREPIDVLRYEPPSEVSYTEKEDRKLYCEILFRFLDYAMQWVHQKRAISNPATRDIEGIEKVVNYLSSFPAELISQRAIDCSAYSRALFHLEQHVAEVDEMEDSSVDRDRLVQRVQDIYSQIDEPDGLEGLSAHLKVLDIEQQVLSHRKAGRWTAAQTWYEIKLAEDPDCVDVQIDLLTCLKESGQHDVLLNYVEGIEKHTALNTINKVIPYAVEAAWATGRWETMQKFINKYQGDPTEDFNVSIAQALLCLRKGWTKGFLELVKTMRNRVGASLTPASTTSLAACHEPMLRAHVLTDLELIVGIGNEGNQHPQEILKSLERRIEVLGSYVNDKQFVLGIRRAAMELLRPRFSNTDISALWLSSARLARKTNSIHQSFNAVLRASQLGDESSTIENARLLWKEGHNRKAIQTLQGAIASRAFSHQSFSENDSSERNIGTQQTLLAARAKLLLAKWLDSAGQTSATALREQYRAVPQIYSNWEKGHYYVGRHYKKVLESERTLKPDDQSDEYLTGEIAKLVIENYLRSLNYGTKYLYQTLPRILTLWLELGAQVDKAPEGKVSLSRELHHRRKIQLEGLHGSLRKYLARLPAYVFYTALPQIVARIAHPNTDVFRMLQAIIFKVVEAYPNQALWNLFAIMTSRQATSERRARGQQILVHLKERNIKTETGGYTLPSLLRRGEKLAEQLLLACNNGDFQSNRTTLASITRDLHFNHKCTPCPLVVPVEACLTATLPTLTDNLKRHKAFSRDIVTISSFLDEVLVLGSLAKPRKLIARGSNGVNYGLLIKPKDDLRTDQRLMEFNSMINRSLRRDAESSRRQLYIRTYAVVPLNEECGIIEWVDGLKTLRDILLNSYRARGITPPYGHLQQMMKDSVVGDKNTKIFTEGVLGMFPPVLPNWFIAQFPNPSLWFTARLRYTRSCAVMSMVGTILGLGDRHGENVLLEEGNGGVFHVDFNCLFDKGLTFAQPEKVPFRLTHNMVAAMGIYGYEGPFRKCSELTLSILRQQEETLMTILEAFIYDPTLDLQKDKKRKNEVVRLNPQSVVESIKRKVRGLLPDESIPLGVEGQVDELIKQAVNPRNLASMYIGWCPFL

SEQ ID NO: 25068 - DNA, 8003 bp, Muscodor strobelii
  misc_feature: SGI EST ID NO. CUFF.58990.0
  misc_feature: Variant of the nucleotide sequence at SEQ ID NO 25066
ccgaggcctacctaaagtacctaggtacgtcagggcccatttccaacctaaattgtgctgcccatctactgccctcacgtgatttcgcgacagcatctttcgcgcaccgacgcggtccccatccatcgccactatcaccttaggtactcaattcgagcattacctcactaccactgcttctctccattatccgtctgtgcagccaaccggagacccggatgcagtcctgtaagacccggtgacggagcagacatgtcaccagcgtctcacggtcggaatggtcgtcgtcgtcaacccgagcctgtcgtcgtcgatctggccatcatggatcatcatgttgctcctccgtctaccttggctgcccagctggttgataacatctccacctcagcaagaccttctcacccaaatgagacttctgagctgtccagacttttcgccgccatagaacaggtcaagaacgaccctgccatcctcgactcgcacgagaagcgtgtcgagcacaaccatatgctcatatatgtctactcccgtgttgtcctagagtctctcgagtgggatgctccttttgccaacaaggcccaattgaccctcgatgctaccagggctgtcaatttcttgaggatcaccattaacgagactcccgacgtcctgctgaccaccattgacgatgagtctttcctctttagaggatccgagcccctctggctatgggcttttccaaaggttttgaagctcctgaccaccggcgcttccgctgagatgactgcggccgttgaagccttctttactcaagtgttccgctcttcctctcgcacaagcagcctgtggccatatgccccacgtttccttgcctatctttgtcactgcttggatgcaattcaccgttgcttagcggagcagccaggcttatccataagtcatcatgcttctcccgcgttggttctgcctcggctctcatactttgaaaatgccggctattctgacatgcaacacctccagcaacattgtacctacacaattgcgcagcaggccgcgcagaaacctcgtgtataccaacatgcattaaatttcctgtccctcttgttgaatcctctggtgaacaagcagtcaagcctcgcccccacgttctcaactcacgagacaatcccatggttgttggacgcttttctgcgcacacatgcaatgcgaactcaatggcaggacatctatttggctcacttgccatcgctattcccaaaaatcatagaattaatagacaaattgagatgttcacagtataaggatgtgttgctgcaagacaaggcttccatactcttgacccatctttgcactgatattcttgccaatgcagcatgtggtaaagcaggccaaatccaagtcgatgatcgactgctcagtgccgctatgatcaggatagcagagtcttgcgtctcgtgtcagcctgtttcccatctggtgcaggcaaatatcagccccatactggaacaaccagtcatttacgagcaattagctactcctgaaagcgacctatggagaagcttagagttactccgccggacgtcacgcatccctacaccaacatcattagatgccattgtacaggcagaccggttcagtgacaggaaacttcgacagtgcgtgcaagatctgctcaccgcacttatcttaagatttcccgaagagccaaaatcaaaacgaaggaagcctgacagaccattgctgctgtccaaagttaccaacttactttggacgacttttggggtagagccacgcgacaccctgactggcttcggtgatgtacttcagtatgctctccacatcaaggcccggcattgagattgatttgctaatattatgatcagagagaagtattcgacccttacagattccgacaagatacgagtttctcaacttattgcacatctttgttgtgctgtggatgagacacttgtcatcgtccatggttatgaagacagtgaattggagtttgactgtgccgattgccgtaactttggtaatttccacaaatcgttagccggcattgacgttgcagcgaaaaagaccgcaatggatttgttttcctcgctgctgcagacacctggctttgctgagtcgcgaaaagcacgtgtaactacaatgatttgcttacggcgcattgcaaagcactgtaattcttctgacttccttgatatggagtcttcccctgctgcacagtggtgcctgaagtctctgcaaagctctgtaagggagctacgtgtggcagcaggtcggacacttgctatgtttctcacggagcctgaccactgtggtatcaagaccttcgtcatagagaagaaccggggcaatgcgctcagcatacttcgtaccctatccgaccaagcccgaccggaattcgtcgagtcttgtattctggcatggtctcaagtcgcagttgtaataccagatgaccaacttattctagtattggttaaattagtagaatatttgggtcatgacagttcctttgcgtcggctactgcattcaccgagattctccaagtcgcccggcgccgaggtataaccaccaagcagctttttgagccattttggagttcgatcgcttatttagctgtgaaagagatgatcgagcaaccaaaactgacgcaactgcttgctgacgtcttggaaacaaccctaccacaattgctccttcatattcaatcatacgctctcccgtggcttgttctaaccaggaaaaaggagattattcacaaaattgcagaagtccgaaaggatgctgaatcatggcaaccttgtgtcgataatgctaatttgggccgtattctggctctgctcctcactcaagagagtcctgatatcgaggaccacacgatgggtctactcagacacgtctctcaccatttcaacgacttcaaactggtggatttgttcagagttgagcctttatcagtaactctccacgtcttgaaagctattgcggatgcggaagaggcgcgaaagccttacatgcgtaatgcactcaatcaaatggctagcatgattctcgctgctagtggtgaaagtaaaagaaaaagccaagcgacaggccgctttttgcatcaccatgcattaggattgatggcccagttgacggacgtcatcaacgacgtttcagctaaccgggctccattttacgagcgcaggcgttgcttaaaggccatggaggagatgatacgaacagggaagaatgatgttcgtatcgctcggccacagattactgcatgcactatggctgccatgtcacacaacgatctacgcgcggctgcattttcatgctggtgtgctatgatctttttctttgaagaaagtgaagtagacttagtcatcgaaacaaccttttatttaattggtcatcattggtcgtcgtttgaggatgcatcgcgacgactcgcccaggaactcgtcaacttcgtattggaacagcacaaacctctcgttatgaaattcattaataagcttccctccttcagccatattaacgagctgtctgatatcgaggccagacttagcaaatttcgatcaccagtggacagcagtacagccttcagagacctggcagatcgcttgtatcacgaacacgctggcgttgttctacaagctcttagggaactatcatcctatttgcaacgacatcagggctacttgcaggcgtcagctgtcagtgagcaacctgaatctatcgtttcgcaactttcgaggacgctcatggactgtgcgtcacgattcaacgggattcaccatgagatcagtgagctttgcagtcaatgcattggactagtgggctgtctggatcccaatcgcgtcgagtctattcgggcaaacacgcccatgattgttaccagcaacttcgaggattcggctgaatcaacagaatttggtttctttatactggaaaatgtgctggtcgaatcctttgtgacagcaacggacacaaagcttcaaggctttctatcgtatgcaatgcaagagctccttgacagatgctctatcacagaagccgtcaagaatccaactcttaaagatgctgagccagtatatcgacaatggtgtaaagtgaaccaaccagcacaggagattctcacgccttttatgacatcgctatacctccttccacccatgatgcagcagagaatcgaatacccaatttttcgtcctggcaggtcgtacgggaattggatgagaaatatcactctggactgtctccggagacctcagacgccctttgctatgctcatctttgagccgctgtgccgactgatccgggtcaaagatatcactatcgctgagtttctatttccttatttgttagtgcatatcatactggctgaggatatcgtggaagaggaacgcgttgctatattacgtgagccaatcgacgttcttcggtatgagccccctagtgaggtttcctataccgagaaggaggatagaaaactctattgcgagatacttttccgttttctcgattatgccatgcaatgggttcaccagaaacgggcgatatctaatcccgcaactagagatatcgaagggatagagaaggtagtaaattacctatcctcgttccctgcggagttgatatcacaacgcgccatcgactgctctgcatattctcgggcactgttccacctcgagcagcatgttgcggaggtagatgagatggaggacagtagcgttgatcgtgatcggttggtgcaaagagtacaagacatttactcgcagattgacgagcctgatggtcttgaaggactctctgcacatcttaaagtactcgatatcgagcagcaagtgttgagtcaccggaaggcagggcggtggaccgcagcccagacctggtatgaaattaagcttgctgaagaccccgactgtgttgatgtacaaattgacctcctcacgtgtcttaaagagtctgggcagcacgatgtgctcctgaactatgtggaaggtattgaaaagcacacagccttgaacacgattaataaagtcataccatacgctgttgaagcagcgtgggcaactggcagatgggaaacgatgcagaagttcatcaataagtatcaaggcgatcctacagaggatttcaatgtgtctatagcccaagcactactgtgtttacgaaaggggtggacaaaagggtttctcgagctggtcaaaaccatgaggaacagggttggcgcgtcgctaacaccagcctctactacgtctctggcagcttgtcatgaacccatgcttcgagcccacgtcttgacagatttagagctcatagttggcattggcaacgagggaaatcaacatcctcaggagatacttaaatccttggagaggcgtattgaagtgctcggctcttacgtcaacgacaaacaattcgtgctgggcattcgccgggcagcaatggaattactgcggccacgcttctccaataccgacatatccgccctatggctttcgagcgctcgacttgcgagaaagactaactcgattcatcaatcatttaacgccgtgcttcgcgcctcgcagcttggcgatgaatcctctacaattgaaaatgcgcgtttgctctggaaagaggggcataacagaaaggccatacagactctccaaggtgccattgctagtagagctttctcacatcagagtttcagtgagaacgactcgtcagaaagaaacattggtacacaacagactctcctcgccgccagagctaaattactgcttgcgaaatggctggacagcgccggccagacaagcgccactgccttgagagagcaatatagagccgtgcctcagatctacagcaattgggagaaaggccattattacgtggggcgacattacaaaaaggtccttgaatccgaaaggacgctgaagccagacgatcaaagtgacgaatatctgaccggagaaatcgctaagcttgtcatagagaactatctaagatctctgaactatgggacaaaatatctgtatcagacattgcctcgaatcctaacactttggcttgaattgggagctcaggtcgacaaagcacccgaaggcaaagtttctctttcgcgggagcttcaccatcgccggaagatccaactcgaaggactccacggtagtctacgaaaataccttgcgcgtttaccggcgtatgtcttctacacagctctccctcagattgtggcgcgtattgcccatcccaataccgatgtctttcgaatgctacaagccatcatattcaaagtcgtcgaagcctatcccaatcaggctctttggaacctgtttgctatcatgacatcccggcaggcaacatccgaacgtcgggccagaggtcagcaaatattggttcacctcaaagagcgaaatatcaaaactgagactggtgggtacactctcccttcgctgcttcgaaggggagagaaattggccgagcaattacttctggcgtgcaataacggcgactttcagagcaatcggacgactttggctagcattactcgtgatctgcacttcaaccacaagtgtacaccctgccccctagtcgtgcccgtcgaggcctgtttgacagcaacactgcccacactcaccgataacctaaagagacacaaagccttctcgcgagatattgtcacaattagctcgttcctcgacgaggttctcgtgctaggctccctagcgaaaccgcgaaagctcatcgcacgggggtcgaacggcgttaattatggtctcttgatcaaacccaaggacgatctccggacggaccagcgactcatggagttcaacagtatgatcaaccggtcactgagacgcgacgcggaatctagccggcgacagctgtatatccggacctacgccgtcgtacccctcaatgaggagtgtggtatcatcgagtgggtcgatggactgaagacgctacgtgatattttacttaacagctatcgtgcacgtggcatcaccccgccatacggccatctgcaacaaatgatgaaagactcggtcgtgggtgacaagaacaccaagatcttcacagagggtgtgttgggcatgttcccccctgtacttcccaactggttcatagcacaattccccaacccatcactgtggttcacggcgcgattaaggtatacgcgctcgtgtgctgtcatgtcgatggtgggcacaatcctggggcttggagatcgacacggcgagaacgtgcttctcgaggaaggcaacgggggtgttttccacgtcgacttcaactgtctgtttgacaagggcctcacattcgcacagccagaaaaggtgccattccggctcactcacaacatggtggccgctatgggaatctatggatatgaagggccattccgaaaatgctcggagctcacgctaagtatcctccgtcaacaggaggagacactgatgacaatcctcgaggctttcatctatgatcccaccctagatttgcagaaggataagaagagaaagaacgaggtggtgaggctgaacccgcagagtgtggttgagagtattaagagaaaggtcagaggtttgttgccggacgagagtattccactcggagtggaaggacaggtggatgaactcatcaagcaggcggtgaacccgaggaacttggcgtctatgtatatcgggtggtgcccctttttgtgatgaattatgagagtctattgcatgcgtacatacatgttgtaagattcttgttatacatggttgctgaagtatagtgagtccccgacgcttcaactcattcaaaaatatctggaccgcagagagctagatctgcaatttgaggaaggggcacagggccaaggaaaatagaaagatggcattaaaaaggactttatgctaagtgagtgagctgcacgtatgacttctcttgacttcttgtaaatctacggtaccttagtgacgtgtgggtacgtaccaagctaagagtaattgatagtgatatagatagacgcagagatcaattaatg

SEQ ID NO: 25069 - DNA, 954 bp, Muscodor strobelii
  misc_feature: SGI cDNA ID NO. 568553
  misc_feature: Encodes the peptide sequence at SEQ ID NO 25070
atgtcggagtatcgcatcgagatctcgcccaacaaccgcgccggctgccaagacaaggtatgcaaggacacgggcaccaaaatcctcaaaggggagattcgctttggcgtctgggtcgtggtgccccaaactgagcatggcggctggaaatggcgacactggggttgtgtctcgggcaagagcatatccaacctccaggaggccctcggggcggatggcgactatgactgggacaagctcgacggctatgatgaactgccggacgacgacgtcaaggagaaggtccgacgcgttgtgaagcaaggtcacatcgaccctgaggatttcaaaggcgatccggagttcaatgtgcccggcaagactagcatccgtggccgagccaagaaggccaaggccaccgacgacgctgacgaggaggacgatggcgagggtgcgcccaagaagacggccaagaagggcaagggcaagcgtgcccgcaagaatgcggaagacgacgaggacgaggaagaagtaatgccggccaagaagggcaagggcaagcgtgcccgcaagaatgcggaagacgacgaggacgaggaagaagtaatgccggccaagaagaagcgcggtcgcaagtccaaggcggccgaagaggaggaggaagagccggcggcagagcccatcaagaagaaggcaggacgcgcggccaagaaggcggaagaggacgacgcggagccagcggccgcgcccgccaagaagagccgaggccgcaaagccaagaaagagcccacgcccgtcgaggaagacgaggaagccgagcaggagccagaggaagaagagccagctcccaagaagggcaaaggtggacgcaaagccaagggagcggccaaggcggcggccaaggagaaggaggcaactcccaaggcaccgcgacgtggaggtcgccgagccagccgggccgttgacgaagagtaa

SEQ ID NO: 25070 - protein, 317 aa, Muscodor strobelii
  misc_feature: SGI Peptide ID NO. 568553
  misc_feature (7)..(100): Pfam Id: PF00645 Pfam Desc: Poly(ADP-ribose) polymerase and DNA-Ligase Zn-finger region
  misc_feature (4)..(260): NCBI GI: 149209803 Blast Desc: MGCH7_ch7g383 [Magnaporthe grisea 70-15] gi|86196338|gb|EAQ70976.1| MGCH7_ch7g383 [Magnaporthe grisea 70-15]
  misc_feature (4)..(260): NCBI GI: 145610199 Blast Desc: MGG_12633 [Magnaporthe grisea 70-15] gi|145017555|gb|EDK01918.1| MGG_12633 [Magnaporthe grisea 70-15]
  misc_feature (1)..(311): NCBI GI: 261353129 Blast Desc: protein kinase rad3 [Verticillium albo-atrum VaMs.102]
  misc_feature (1)..(276): NCBI GI: 46128611 Blast Desc: FG08683.1 [Gibberella zeae PH-1]
  misc_feature (1)..(126): NCBI GI: 171683965 Blast Desc: protein product [Podospora anserina] gi|170941943|emb|CAP67595.1| protein product [Podospora anserina]
  misc_feature (4)..(126): NCBI GI: 116193093 Blast Desc: CHGG_06264 [Chaetomium globosum CBS 148.51] gi|88182177|gb|EAQ89645.1| CHGG_06264 [Chaetomium globosum CBS 148.51]
  misc_feature (1)..(159): NCBI GI: 145233315 Blast Desc: An02g08950 [Aspergillus niger] gi|134056958|emb|CAK44305.1| protein product [Aspergillus niger]
  misc_feature (2)..(124): NCBI GI: 156042109 Blast Desc: SS1G_11605 [Sclerotinia sclerotiorum 1980] gi|154695988|gb|EDN95726.1| SS1G_11605 [Sclerotinia sclerotiorum 1980]
  misc_feature (1)..(131): NCBI GI: 189204602 Blast Desc: conserved [Pyrenophora tritici-repentis Pt-1C-BFP] gi|187985735|gb|EDU51223.1| conserved [Pyrenophora tritici-repentis Pt-1C-BFP]
  misc_feature (1)..(127): NCBI GI: 67525359 Blast Desc: AN3137.2 [Aspergillus nidulans FGSC A4] gi|40744532|gb|EAA63708.1| AN3137.2 [Aspergillus nidulans FGSC A4] gi|259485911|tpe|CBF83336.1| TPA: conserved [Aspergillus FGSC
MSEYRIEISPNNRAGCQDKVCKDTGTKILKGEIRFGVWVVVPQTEHGGWKWRHWGCVSGKSISNLQEALGADGDYDWDKLDGYDELPDDDVKEKVRRVVKQGHIDPEDFKGDPEFNVPGKTSIRGRAKKAKATDDADEEDDGEGAPKKTAKKGKGKRARKNAEDDEDEEEVMPAKKGKGKRARKNAEDDEDEEEVMPAKKKRGRKSKAAEEEEEEPAAEPIKKKAGRAAKKAEEDDAEPAAAPAKKSRGRKAKKEPTPVEEDEEAEQEPEEEEPAPKKGKGGRKAKGAAKAAAKEKEATPKAPRRGGRRASRAVDEE

SEQ ID NO: 25071 - DNA, 2433 bp, Muscodor strobelii
  misc_feature: SGI EST ID NO. CUFF.59215.2
  misc_feature: Variant of the nucleotide sequence at SEQ ID NO 25069
tagaacacctctactaatagattcaaacttgagacgcgtcgcgaactgctttcaatgtccttagacctccatccgtctcccctttcctctgatagccaccacaaacgcacaacgctctgtcctcatttctttccgttccgtgtaccaggactttgacttgtgcctgaactagcactccttgtcctttttgccccatcattacattgtcgctcgcgtcagcatcattatcgtgtccagcatttgcagccgccactccattcatctgcccatctcatcttgacgtatctaagatccttacaacatcaccaatcttcacccctcaagccgtacgcagaagttggctcttagacaacttaaaatcaacaatgtcggagtatcgcatcgagatctcgcccaacaaccgcgccggctgccaagacaaggtatgcaaggacacgggcaccaaaatcctcaaaggggagattcgctttggcgtctgggtcgtggtgccccaaactgagcatggcggctggaaatggcgacactggggttgtgtctcgggcaagagcatatccaacctccaggaggccctcggggcggatggcgactatgactgggacaagctcgacggctatgatgaactgccggacgacgacgtcaaggagaaggtccgacgcgttgtgaagcaaggtcacatcgaccctgaggatttcaaaggcgatccggagttcaatgtgcccggcaagactagcatccgtggccgagccaagaaggccaaggccaccgacgacgctgacgaggaggacgatggcgagggtgcgcccaagaagacggccaagaagggcaagggcaagcgtgcccgcaagaatgcggaagacgacgaggacgaggaagaagtaatgccggccaagaagggcaagggcaagcgtgcccgcaagaatgcggaagacgacgaggacgaggaagaagtaatgccggccaagaagaagcgcggtcgcaagtccaaggcggccgaagaggaggaggaagagccggcggcagagcccatcaagaagaaggcaggacgcgcggccaagaaggcggaagaggacgacgcggagccagcggccgcgcccgccaagaagagccgaggccgcaaagccaagaaagagcccacgcccgtcgaggaagacgaggaagccgagcaggagccagaggaagaagagccagctcccaagaagggcaaaggtggacgcaaagccaagggagcggccaaggcggcggccaaggagaaggaggcaactcccaaggcaccgcgacgtggaggtcgccgagccagccgggccgttgacgaagagtaaggtcagcgacaggcagtgcgtgtgtgttgccattggactggccgacacaagactgcgggcatgccatttgctttgtttctttgagtcagaacagaagtacgagccatcagtgtctccgagctgcagaggagcgatgggcagcgcggacatataaccgaagatgtgcatattgtgtgaaggatctggctgttgcagtcggcagggatttgtcgagtcagatcgatatgagtgtacattagcttgcacggcgcggagctgagagcgagtgagttgctacgagggtgattttgtacgatatgcaaaaaggcatgttgctggccatattgtcgagaaagacgagagcggatgaggccgggtcttctttagctcgcagtgtgtcatagtcgtgcgaggggggcatgcatggcttttaggttgctctaggtgataggtgaaaaatggcgtgcgaatctaaatgtgccacactccttcgaagttgtacatgatgcatttgtaaattacctgtatcattgtcgaatactcgatgtgctaggtccatctgtacatacctcctatacatgctatggttgctgctattcgaggtgtaagtgaagtaccaggccacaggtgcccgcagctgaggagcgagccaaaggatggcagtacagggctagatactatagtgggaccacgaccaaatgcaacaccaaagttcgtggagctgcaacgcatgtggtgggagctgctggagccatacctacaacgtcatacgtacctgcctgccttgagttgctcgatgcttgcactgcgcgtgctcctctgctcagtgctccgttgacgagcgcaccccgacacgatgcacccgctgtcgctgtcgctgtcgctgtcgctgggcctgctgctggcgctgccgggcgccgtccgggcggtgttccaggacgaggtcgggcacatcgactaccaccacgagctgctgggtgtgccgcaggccgacacgactttcttccaccgcccgcggcccgacgagaaggcgagcctgctgtacaccctcagcgacctcagcgtgctgggcgccgtcaaccccaccagcggcgccctcgtctggcgccacctgctcgactgcggcaacgccaac

SEQ ID NO: 25072 - DNA, 282 bp, Muscodor strobelii
  misc_feature: SGI cDNA ID NO. 568554
  misc_feature: Reduced expression when VOC is produced
  misc_feature: Encodes the peptide sequence at SEQ ID NO 25073
atgcacccgctgtcgctgtcgctgtcgctgtcgctgggcctgctgctggcgctgccgggcgccgtccgggcggtgttccaggacgaggtcgggcacatcgactaccaccacgagctgctgggtgtgccgcaggccgacacgactttcttccaccgcccgcggcccgacgagaaggcgagcctgctgtacaccctcagcgacctcagcgtgctgggcgccgtcaaccccaccagcggcgccctcgtctggcgccacctgctcgactgcggcaacgccaactga

SEQ ID NO: 25073 - protein, 93 aa, Muscodor strobelii
  misc_feature: SGI Peptide ID NO. 568554
  misc_feature (6)..(88): NCBI GI: 85074773 Blast Desc: NCU00614 [Neurospora crassa OR74A] gi|28927567|gb|EAA36518.1| conserved [Neurospora crassa OR74A]
  misc_feature (15)..(93): NCBI GI: 171683935 Blast Desc: protein product [Podospora anserina] gi|170941928|emb|CAP67580.1| protein product [Podospora anserina]
  misc_feature (14)..(91): NCBI GI: 261353640 Blast Desc: conserved [Verticillium albo-atrum VaMs.102]
  misc_feature (24)..(87): NCBI GI: 256731907 Blast Desc: [Nectria haematococca mpVI 77-13-4]
  misc_feature (25)..(87): NCBI GI: 39970801 Blast Desc: MGG_02867 [Magnaporthe grisea 70-15] gi|145017315|gb|EDK01678.1| MGG_02867 [Magnaporthe grisea 70-15]
  misc_feature (25)..(87): NCBI GI: 149210293 Blast Desc: MGCH7_ch7g624 [Magnaporthe grisea 70-15] gi|86196579|gb|EAQ71217.1| MGCH7_ch7g624 [Magnaporthe grisea 70-15]
  misc_feature (25)..(87): NCBI GI: 46105266 Blast Desc: FG00261.1 [Gibberella zeae PH-1]
  misc_feature (24)..(91): NCBI GI: 154310580 Blast Desc: BC1G_06764 [Botryotinia fuckeliana B05.10] gi|150851304|gb|EDN26497.1| BC1G_06764 [Botryotinia fuckeliana B05.10]
  misc_feature (24)..(91): NCBI GI: 156058420 Blast Desc: SS1G_03221 [Sclerotinia sclerotiorum 1980] gi|154701009|gb|EDO00748.1| SS1G_03221 [Sclerotinia sclerotiorum 1980]
  misc_feature (6)..(87): NCBI GI: 67537116 Blast Desc: AN4728.2 [Aspergillus nidulans FGSC A4] gi|40741580|gb|EAA60770.1| AN4728.2 [Aspergillus nidulans FGSC A4] gi|259482433|tpe|CBF76912.1| TPA: conserved [Aspergillus FGSC
  misc_feature: Useful for introducing or modulating the production of volatile compounds
MHPLSLSLSLSLGLLLALPGAVRAVFQDEVGHIDYHHELLGVPQADTTFFHRPRPDEKASLLYTLSDLSVLGAVNPTSGALVWRHLLDCGNAN

SEQ ID NO: 25074 - DNA, 2433 bp, Muscodor strobelii; identical to SEQ ID NO: 25071
  misc_feature: SGI EST ID NO. CUFF.59215.2
  misc_feature: Variant of the nucleotide sequence at SEQ ID NO 25072

SEQ ID NO: 25075 - DNA, 906 bp, Muscodor strobelii
  misc_feature: SGI cDNA ID NO. 568555
  misc_feature: Encodes the peptide sequence at SEQ ID NO 25076
cccgctatagttagtgacgttttccaccatggagatcccagctcggccctctgggaattcaagcatggcaacggcaacttcaagagaggcgacctggtcgggttgcgcgagatcaaaagacgggcctcacgccatactctaatccatagagatccattcagcagtagccagaagccgacgccgtcgcaacctggcacgcctgccgagtctatgccgcctatccccgacgggtcagatccacgactggcgattattgaacagaacctgtatgacgccaacgtcaaactacagcgcagcgaggagaccgcccagttgatgcacatcaaacagcagaccatggtggacactatcaaccgcctactcttcttcaaccaagagctgtgtaggactgtactctcactggtcccacccgatgcgcctgcacatcgagatataatgagtctgcaaggagagatctcgcggcagacggagtatttcacagtcggagtcgatgagcccccagagccccctatgtcaagcagccgacaatacttcagcaacattgacaacccgcctgtttctccccgtcagctggcccaggactctagacccgccgctcatcagtctcgagctgccaacatgtttcgtccaccagtgccttcgaacctgtctatctccgcacgccgaccatatggttcaatcagcggcgctcccgttgctccgtcccagccggccccgtcacctttacgccaacaacagccgccgcctccccctggtcctcacccattagctgctgctgagcctctgcccggaaatctcgctaggaggcacacctccgctgacatacgagcaacgggatggcaacccaatccctcctccctacctcggatcaggacccccgtcaacccattggccatcttctcctag

SEQ ID NO: 25076 - protein, 301 aa, Muscodor strobelii
  misc_feature: SGI Peptide ID NO. 568555
  misc_feature (6)..(285): NCBI GI: 46138707 Blast Desc: FG10868.1 [Gibberella zeae PH-1]
  misc_feature (4)..(280): NCBI GI: 171689256 Blast Desc: protein product [Podospora anserina] gi|170944590|emb|CAP70701.1| protein product [Podospora anserina]
  misc_feature (4)..(280): NCBI GI: 39978173 Blast Desc: MGG_06971 [Magnaporthe grisea 70-15] gi|145013454|gb|EDJ98095.1| MGG_06971 [Magnaporthe grisea 70-15]
  misc_feature (3)..(284): NCBI GI: 116199363 Blast Desc: CHGG_07837 [Chaetomium globosum CBS 148.51] gi|88179116|gb|EAQ86584.1| CHGG_07837 [Chaetomium globosum CBS 148.51]
  misc_feature (4)..(281): NCBI GI: 164423488 Blast Desc: NCU08480 [Neurospora crassa OR74A] gi|157070114|gb|EAA33913.2| conserved [Neurospora crassa OR74A]
  misc_feature (3)..(285): NCBI GI: 156063060 Blast Desc: SS1G_01646 [Sclerotinia sclerotiorum 1980] gi|154696982|gb|EDN96720.1| SS1G_01646 [Sclerotinia sclerotiorum 1980]
  misc_feature (4)..(282): NCBI GI: 119486732 Blast Desc: HSF-type DNA-binding domain protein [Neosartorya fischeri NRRL 181] gi|119410509|gb|EAW20455.1| HSF-type DNA-binding domain protein [Neosartorya fischeri NRRL 181]
  misc_feature (3)..(285): NCBI GI: 154292999 Blast Desc: BC1G_14768 [Botryotinia fuckeliana B05.10] gi|150845672|gb|EDN20865.1| BC1G_14768 [Botryotinia fuckeliana B05.10]
  misc_feature (4)..(284): NCBI GI: 189204850 Blast Desc: HSF-type DNA-binding domain containing protein [Pyrenophora tritici-repentis Pt-1C-BFP] gi|187985859|gb|EDU51347.1| HSF-type DNA-binding domain protein
  misc_feature (4)..(282): NCBI GI: 238508768 Blast Desc: flocculation suppression protein [Aspergillus flavus NRRL3357] gi|220688460|gb|EED44813.1| flocculation suppression protein [Aspergillus flavus NRRL3357]
PAIVSDVFHHGDPSSALWEFKHGNGNFKRGDLVGLREIKRRASRHTLIHRDPFSSSQKPTPSQPGTPAESMPPIPDGSDPRLAIIEQNLYDANVKLQRSEETAQLMHIKQQTMVDTINRLLFFNQELCRTVLSLVPPDAPAHRDIMSLQGEISRQTEYFTVGVDEPPEPPMSSSRQYFSNIDNPPVSPRQLAQDSRPAAHQSRAANMFRPPVPSNLSISARRPYGSISGAPVAPSQPAPSPLRQQQPPPPPGPHPLAAAEPLPGNLARRHTSADIRATGWQPNPSSLPRIRTPVNPLAIFS

SEQ ID NO: 25077 - DNA, 3018 bp, Muscodor strobelii
  misc_feature: SGI EST ID NO. CUFF.58996.0
  misc_feature: Variant of the nucleotide sequence at SEQ ID NO 25075
agttagtgacgttttccaccatggagatcccagctcggccctctgggaattcaagcatggcaacggcaacttcaagagaggcgacctggtcgggttgcgcgagatcaaaagacgggcctcacgccatactctaatccatagagatccattcagcagtagccagaagccgacgccgtcgcaacctggcacgcctgccgagtctatgccgcctatccccgacgggtcagatccacgactggcgattattgaacagaacctgtatgacgccaacgtcaaactacagcgcagcgaggagaccgcccagttgatgcacatcaaacagcagaccatggtggacactatcaaccgcctactcttcttcaaccaagagctgtgtaggactgtactctcactggtcccacccgatgcgcctgcacatcgagatataatgagtctgcaaggagagatctcgcggcagacggagtatttcacagtcggagtcgatgagcccccagagccccctatgtcaagcagccgacaatacttcagcaacattgacaacccgcctgtttctccccgtcagctggcccaggactctagacccgccgctcatcagtctcgagctgccaacatgtttcgtccaccagtgccttcgaacctgtctatctccgcacgccgaccatatggttcaatcagcggcgctcccgttgctccgtcccagccggccccgtcacctttacgccaacaacagccgccgcctccccctggtcctcacccattagctgctgctgagcctctgcccggaaatctcgctaggaggcacacctccgctgacatacgagcaacgggatggcaacccaatccctcctccctacctcggatcaggacccccgtcaacccattggccatcttctcctagcagggctcccgtcgaagatggccgtatccgcgaaccaccagtcggctactccctgtcgagaccaactacaccgcctgctcctccattctctaatggcagtgtgggtagcaacttggagagcttgaacaattggtcctggggctcggcaaacagagaaaacaagaacctctctatccgggatatttctgccccgccgaccagacgggggagcatggcacatatcttgaatccaacagatacagccgaacgggacgacgaggatgacgttagagacgatgatcggaagcgaaaacgaatgcaatgactccccgacttgcctgagggtatctatgtatcaggctgagtataatctatgcactaattcttacgaataacatcccgactataaaatacagcgactctatacatagtcgccgtacggtccacagaacgaagccacgccacaatcacgtctatccctcctgattcaaacaatcatattatcacgtctcttaggtgttttgctcctagacactatgactcgacattccagacgccggggctcctcataatggaaatggaaaacatcgaagagcatcggagctcctccaagttattatgcttttttgagattttgactttttgaaagactcctgactcctgagataccacttttctgctgctatattgtcaggatacggaggtgggagttatagtaccccaggtctgacccttgttcttgagccgcacatttgaagtgttgttttgctgcggtggactgtatgatacgtgacttgggactatgctggtcgttgaaaaaagtgaacaagcactggcgcacctaaaagcgccgaggtctaatgttgtagtctagccgtcgttttggagagctgatcagatataggggtggagatatatgtctgaaatggactgtgactggccttttttggcttgtctatctatatcaatcctgctcgtggacaatacagaactgagggtatgtgacagatggtctcgcgctgctttgatgtcacaaacactgccatgttgctcagaatgcaatgtaggcattattaccgttcaccgtagtagaacaggctcttccatcgaactcctccaaagaatactatgcacccgcaactctcgacctctgaaggtttccagcgctcatctcaccgtattagagccgtactagtagccattgaccacaaacgtcttctttccgcttctcatcccattgtttcgttagaagcatcttcttttccttctttctgccgcctcttagcctccttttcgcgcttgcgcttctgatatttcttctgtgctgctttactccgtgctaatttttcggatgttgtgagggtttcttcgctgccttctctcgtagcctccgttgtgtttttatcggcttcgttggcttttgttctgcgcttggagataacgtctactatttctttggccaccagatctagatcacttttgtcaacctcgtcggtggcgaagatatcctcagattcgacaaccctcctcttctttttactccgtcctagtgcacttcttccttcttcctcgtcactactttctttatccctccctctgacaccacccccgcttgttccgtctgctcgccgccctcccctgcctatcaagcggttacgtaggacttggttctcgcgctctttatcgctggattttgtgcccttgccgaatcctagaccggtgtttgggtctgctgatgattctgagaagagagattcgactctggcgcgggcttgcgctgttgcagcgttgggattgggagatggattggagagggcggagaatgttgagggagtggtggtggaagagtcggtagcattggtggagttggttggccgtggtgggagcatggagcgtatagaactgatttgcgactcgaattgcgactgtactctgttcatgagcaccgtgtagtcgggcgctgggtttgcgtttttggatggcggtgccattttggctattgttttgcgccgcgctaagcggggggacggagtcagttctcggtgtaagtttgtcaatacaatatgtgaagcgggccacatatagcgtgaatatgttgcgaatgaaggaaaagggggaaattgcgacaagctgttgttgag

SEQ ID NO: 25078 - DNA, 762 bp, Muscodor strobelii
  misc_feature: SGI cDNA ID NO. 568556
  misc_feature: Encodes the peptide sequence at SEQ ID NO 25079
atggcaccgccatccaaaaacgcaaacccagcgcccgactacacggtgctcatgaacagagtacagtcgcaattcgagtcgcaaatcagttctatacgctccatgctcccaccacggccaaccaactccaccaatgctaccgactcttccaccaccactccctcaacattctccgccctctccaatccatctcccaatcccaacgctgcaacagcgcaagcccgcgccagagtcgaatctctcttctcagaatcatcagcagacccaaacaccggtctaggattcggcaagggcacaaaatccagcgataaagagcgcgagaaccaagtcctacgtaaccgcttgataggcaggggagggcggcgagcagacggaacaagcgggggtggtgtcagagggagggataaagaaagtagtgacgaggaagaaggaagaagtgcactaggacggagtaaaaagaagaggagggttgtcgaatctgaggatatcttcgccaccgacgaggttgacaaaagtgatctagatctggtggccaaagaaatagtagacgttatctccaagcgcagaacaaaagccaacgaagccgataaaaacacaacggaggctacgagagaaggcagcgaagaaaccctcacaacatccgaaaaattagcacggagtaaagcagcacagaagaaatatcagaagcgcaagcgcgaaaaggaggctaagaggcggcagaaagaaggaaaagaagatgcttctaacgaaacaatgggatga

SEQ ID NO: 25079 - protein, 253 aa, Muscodor strobelii
  misc_feature: SGI Peptide ID NO. 568556
MAPPSKNANPAPDYTVLMNRVQSQFESQISSIRSMLPPRPTNSTNATDSSTTTPSTFSALSNPSPNPNAATAQARARVESLFSESSADPNTGLGFGKGTKSSDKERENQVLRNRLIGRGGRRADGTSGGGVRGRDKESSDEEEGRSALGRSKKKRRVVESEDIFATDEVDKSDLDLVAKEIVDVISKRRTKANEADKNTTEATREGSEETLTTSEKLARSKAAQKKYQKRKREKEAKRRQKEGKEDASNETMG

SEQ ID NO: 25080 - DNA, 1575 bp, Muscodor strobelii
  misc_feature: SGI cDNA ID NO. 568557
  misc_feature: Encodes the peptide sequence at SEQ ID NO 25081
atgttgacgatcctcggaattagcatcaacgctcgctcattgcttgcttgtggagtcgcgtacctattcatctacttcgtccgctcactcgttgcctacgcgaggaaagaagctgcgattcgtagacttggcggccatcgtgctcacgtgctatacagaaatcccatatcaggattgtaccactcaaccaacataatccggaagtcagctcaattcaagactaaggaagtattcaacaatgcctttggcaaagtaaggcccgagagccgtaatatcttcgaagttgggacgccgctaggcgatcgaattattgaaacccgagagccatctcacgtcaaggcaatcctagccgaagacttccattctttcgggaaaggggaaacgtttcatagattatggtcgccctggctcggcgacggcatcttcacgacggatggtgagctctggagtaggagccggaaactcattcgaccaatgtttgccactgagcgtatgagcgacttatacatctttgaacgccaggtcgagaagatgatgacacatattcctccatccggacaatctgtcgatatgaaggatctgttcttccgcatgaccctcgacgtcaccacggatttcctattaggcgaaagctctaacagtttggataacccgaagggcgagttcactcatgcattcaacgacatcttgtcaaagcagatgtacatctttgttttgagaaacttcagaccactcgataggttctttaaaccggcatatcatcgccatatcgaaacgattgatagtttcatcaacccctatatcaaacaagccttgtccatcccgcctgaggagctcgagaaaatcaccaagtcagataccgagtttaccttcttacacaatttggcgctatttactcgggatcctaaagtcattcgtgatcagctcatggctgtcctccttgctggtcgagatacgaccgcagccaccctatcatgggccttttacgagcttgccgcatgcccagacaaagtcgagagactgcgagccgaggtgctagagcacattggggcagatggtactccaacttatgagactctgaagaatatgaaatatcttcgttatgttctccaggaaacactcagattgcaccctgctgttccttttaatgtatatgatataccacttatcaaactcgcactgaaagacaccgtccttcccgaagcacctggatcgccatccatcagcgtctgtaaaggcgacaccgtctgttacagtccgtttaatatccaaggacgtcgggatatatatccgcctgtatcagccgactttgcagatccttcaaagttcagccctgagcggtggtatgtgtggcagccgcggccatgggaatacatccccttcaatggtggtccaagaatctgtcccgggcagaactttgctttgactgagatggcttattgcattgtacgtatcttccaaagatacggcagaatggaatatgacggagactggaatgcccaaaaagacaaaatggacattatttcacgacctgcattcgctgtacctatcacattcttcgacgcaaagaactaa

SEQ ID NO: 25081 - protein, 524 aa, Muscodor strobelii
  misc_feature: SGI Peptide ID NO. 568557
  misc_feature (48)..(524): Pfam Id: PF00067 Pfam Desc: Cytochrome P450
  misc_feature (118)..(384): Pfam Id: PF00067 Pfam Desc: Cytochrome P450
  misc_feature (437)..(489): Pfam Id: PF00067 Pfam Desc: Cytochrome P450
  misc_feature (40)..(522): NCBI GI: 239612275 Blast Desc: cytochrome P450 alkane hydroxylase [Ajellomyces dermatitidis ER-3]
  misc_feature (44)..(522): NCBI GI: 261202474 Blast Desc: cytochrome P450 alkane hydroxylase [Ajellomyces dermatitidis SLH14081] gi|239590548|gb|EEQ73129.1| cytochrome P450 alkane hydroxylase [Ajellomyces dermatitidis SLH14081]
  misc_feature (35)..(481): NCBI GI: 261357033 Blast Desc: cytochrome P450 52A11 [Verticillium albo-atrum VaMs.102]
  misc_feature (77)..(522): NCBI GI: 39978177 Blast Desc: MGG_06973 [Magnaporthe grisea 70-15] gi|145013452|gb|EDJ98093.1| MGG_06973 [Magnaporthe grisea 70-15]
  misc_feature (44)..(524): NCBI GI: 67537376 Blast Desc: AN4858.2 [Aspergillus nidulans FGSC A4] gi|40741746|gb|EAA60936.1| AN4858.2 [Aspergillus nidulans FGSC A4]
  misc_feature (44)..(524): NCBI GI: 259482279 Blast Desc: TPA: cytochrome P450, (Eurofung) [Aspergillus nidulans FGSC A4]
  misc_feature (7)..(524): NCBI GI: 39965179 Blast Desc: MGG_09920 [Magnaporthe grisea 70-15] gi|145013177|gb|EDJ97818.1| MGG_09920 [Magnaporthe grisea 70-15]
  misc_feature (12)..(522): NCBI GI: 256735040 Blast Desc: NECHADRAFT_31103 [Nectria haematococca mpVI 77-13-4]
  misc_feature (100)..(523): NCBI GI: 171687345 Blast Desc: protein product [Podospora anserina] gi|170943634|emb|CAP69286.1| protein product [Podospora anserina]
  misc_feature (99)..(523): NCBI GI: 164424932 Blast Desc: NCU09115 [Neurospora crassa OR74A] gi|157070719|gb|EAA28794.2| NCU09115 [Neurospora crassa OR74A]
  misc_feature (103)..(489): SWISSPROT Homolog: EC 1.14.14.1 Unspecific monooxygenase
MLTILGISINARSLLACGVAYLFIYFVRSLVAYARKEAAIRRLGGHRAHVLYRNPISGLYHSTNIIRKSAQFKTKEVFNNAFGKVRPESRNIFEVGTPLGDRIIETREPSHVKAILAEDFHSFGKGETFHRLWSPWLGDGIFTTDGELWSRSRKLIRPMFATERMSDLYIFERQVEKMMTHIPPSGQSVDMKDLFFRMTLDVTTDFLLGESSNSLDNPKGEFTHAFNDILSKQMYIFVLRNFRPLDRFFKPAYHRHIETIDSFINPYIKQALSIPPEELEKITKSDTEFTFLHNLALFTRDPKVIRDQLMAVLLAGRDTTAATLSWAFYELAACPDKVERLRAEVLEHIGADGTPTYETLKNMKYLRYVLQETLRLHPAVPFNVYDIPLIKLALKDTVLPEAPGSPSISVCKGDTVCYSPFNIQGRRDIYPPVSADFADPSKFSPERWYVWQPRPWEYIPFNGGPRICPGQNFALTEMAYCIVRIFQRYGRMEYDGDWNAQKDKMDIISRPAFAVPITFFDAKN

SEQ ID NO: 25082 - DNA, 1395 bp, Muscodor strobelii
  misc_feature: SGI EST ID NO. CUFF.59000.0
  misc_feature: Variant of the nucleotide sequence at SEQ ID NO 25080
ccgaagggcgagttcactcatgcattcaacgacatcttgtcaaagcagatgtacatctttgttttgagaaacttcagaccactcgataggttctttaaaccggcatatcatcgccatatcgaaacgattgatagtttcatcaacccctatatcaaacaagccttgtccatcccgcctgaggagctcgagaaaatcaccaagtcagataccgagtttaccttcttacacaatttggcgctatttactcgggatcctaaagtcattcgtgatcagctcatggctgtcctccttgctggtcgagatacgaccgcagccaccctatcatgggccttttacgagcttgccgcatgcccagacaaagtcgagagactgcgagccgaggtgctagagcacattggggcagatggtactccaacttatgagactctgaagaatatgaaatatcttcgttatgttctccaggaaacactcagattgcaccctgctgttccttttaatggttagtttcacctcatggaacgtccgactacatgctaacttgacacagtatatgatataccacttgtttctctgtgctcctctccactgagtcccgctcgtgcacttgaatctcttcatatgcttttgactgatcaatagtagatcaaactcgcactgaaagacaccgtccttcccgaagcacctggatcgccatccatcagcgtctgtaaaggcgacaccgtctgttacagtccgtttaatatccaaggacgtcgggatatatatccgcctgtatcagccgactttgcagatccttcaaagttcagccctgagcggtggtatgtgtggcagccgcggccatgggaatacatccccttcaatggtggtccaagaatctgtcccgggcagaactttgctttgactgagatggcttattgcattgtacgtatcttccaaagatacggcagaatggaatatgacggagactggaatgcccaaaaagacaaaatggacattatttcacgacctgcattcgctgtacctatcacattcttcgacgcaaagaactaatatggaaatgtatatcgagtgtggttcgtcccgtcgaggttcacggtgatcgaaaaggagagaaaatatgtcgtaataggaggcaaagcattgtcaattcggggacaccataatcaatttgttgaaaatattgtatacaatgcacgtaacatacctacatgtaggtagcttgtcttcaatatcactatcaaacactgggtgtatcgtggacctttgctagtctcaactgtctgtggtcaatggctagcaacatcaattgcacccagaatcgttttctgtcagatcagccatctgtatcacgtaatagtaaatatccaaaagcacatcgtcatcgtcaagaatcgc

SEQ ID NO: 25083 - DNA, 1350 bp, Muscodor strobelii
  misc_feature: SGI cDNA ID NO. 568558
  misc_feature: Reduced expression when VOC is produced
  misc_feature: Encodes the peptide sequence at SEQ ID NO 25084
atgtacaagctcgctcgtagccgggctgctgcttcggcgctgcgctcctcctccaagactgccttcggcccctcctccagaattcccagcttcgcccagcaacagcgaagaaatctgagcatacacgaatatctctcagccgacctcttgcgccagtatggcatcggtgtgcccaagggctccaacgcctcgtccgccgccgaggccgagaagatcgcaaaggagataggaggcgaggacatggtcatcaaggcgcaggtgctcgccggcggccgcggcaagggcaccttcgacaacgggctcaagggcggcgtgcgcgtcatctactcgccgaccgaggccaagatgttcgccgaccagatgatcggccacaagctcatcaccaagcagaccggcgcccagggccgcctgtgcaactccgtctacatctgcgagcgcaagttcgcccgccgcgagttttacctcgccatcctcatggaccgcgcctcccagggccccgtcatcgtctcctcgtcgcagggcggcatggacatcgagggcgtcgccaaggagaaccccgacgccatcgtcaccacctacatcgacatcaacaagggcgtcaccgacgacatcgcccgcgacgtcgccaccaagctcggcttctccgagcagtgcatcgaggacgccaaggacaccatccagaagctctacaagatcttcctcgagaaggacgccacccagatcgagatcaacccgctgtccgagacctccgaccaccaggtcctctgcatggacgccaagttcggcttcgacgacaacgccgacttccgccagaaggaggtcttcgagtggcgcgacaccacccaggaggacgccgaggaggtccgcgccgccgagtccggcctcaacttcatcaagctcgacggcgacatcggctgtctcgtcaacggcgccggcctcgccatggccaccatggacatcatcaagctgaacggcggcgccccggccaacttcctcgacgtcggcggtggtgccacgcccgccgccatcaaggaggccttcgagctcatcacctccgaccccaaggtcacggccatcttcgtcaacatcttcggtggaatcgtgcgctgcgacgccatcgcccacggcctgatcaacaccgtcaaggacctcaacctcaagatccccatcatcgcccgtctgcagggaaccaacatggagcaggcccaccagctcatcaatgactccggcatgaagatcttctccatcgatgacctgcagagcgctgctgagaagtcggtgcagctctccaaggtcgtgaagatggctcgcgatatcgacgtcggcgttgaattcagcctgggtatctaa

SEQ ID NO: 25084 - protein, 449 aa, Muscodor strobelii
  misc_feature: SGI Peptide ID NO. 568558
  misc_feature (40)..(248): Pfam Id: PF08442 Pfam Desc: ATP-grasp domain
  misc_feature (291)..(427): Pfam Id: PF00549 Pfam Desc: CoA-ligase
  misc_feature (1)..(449): NCBI GI: 171689266 Blast Desc: protein product [Podospora anserina] gi|170944595|emb|CAP70706.1| protein product [Podospora anserina]
  misc_feature (1)..(449): NCBI GI: 85110202 Blast Desc: succinyl-CoA ligase beta-chain [Neurospora crassa OR74A] gi|21264057|sp|Q9P567.1|SUCB_NEUCR RecName: Full= succinyl-CoA ligase [GDP-forming] subunit beta, mitochondrial;
  misc_feature (1)..(449): NCBI GI: 39978185 Blast Desc: conserved [Magnaporthe grisea 70-15] gi|59802928|gb|AAX07669.1| succinyl-CoA ligase beta-chain-like protein [Magnaporthe grisea] gi|145013447|gb|EDJ98088.1| grisea
  misc_feature (1)..(449): NCBI GI: 46138741 Blast Desc: SUCB_NEUCR succinyl-CoA ligase [GDP-forming] beta-chain, mitochondrial precursor (Succinyl-CoA synthetase, beta chain) (SCS-beta) [Gibberella zeae PH-1]
  misc_feature (1)..(449): NCBI GI: 256728902 Blast Desc: [Nectria haematococca mpVI 77-13-4]
  misc_feature (1)..(449): NCBI GI: 225681391 Blast Desc: succinyl-CoA ligase beta-chain [Paracoccidioides brasiliensis Pb03] gi|226288516|gb|EEH44028.1| succinyl-CoA ligase subunit beta [Paracoccidioides brasiliensis Pb18]
  misc_feature (1)..(449): NCBI GI: 154289904 Blast Desc: ATP-specific succinyl-CoA synthetase beta subunit [Botryotinia fuckeliana B05.10] gi|150848565|gb|EDN23758.1| ATP-specific succinyl-CoA synthetase beta subunit [Botryotinia
  misc_feature (1)..(447): NCBI GI: 238839855 Blast Desc: succinyl-CoA ligase beta-chain [Microsporum canis CBS 113480]
  misc_feature (1)..(449): NCBI GI: 226283435 Blast Desc: succinyl-CoA ligase subunit beta [Paracoccidioides brasiliensis Pb01]
  misc_feature (1)..(449): NCBI GI: 145248642 Blast Desc: An14g00310 [Aspergillus niger] gi|134081327|emb|CAK41830.1| protein product [Aspergillus niger]
  misc_feature (25)..(449): SWISSPROT Homolog: EC 6.2.1.4 Succinate--CoA ligase (GDP-forming)
  misc_feature: Useful for introducing or modulating the production of volatile compounds
MYKLARSRAAASALRSSSKTAFGPSSRIPSFAQQQRRNLSIHEYLSADLLRQYGIGVPKGSNASSAAEAEKIAKEIGGEDMVIKAQVLAGGRGKGTFDNGLKGGVRVIYSPTEAKMFADQMIGHKLITKQTGAQGRLCNSVYICERKFARREFYLAILMDRASQGPVIVSSSQGGMDIEGVAKENPDAIVTTYIDINKGVTDDIARDVATKLGFSEQCIEDAKDTIQKLYKIFLEKDATQIEINPLSETSDHQVLCMDAKFGFDDNADFRQKEVFEWRDTTQEDAEEVRAAESGLNFIKLDGDIGCLVNGAGLAMATMDIIKLNGGAPANFLDVGGGATPAAIKEAFELITSDPKVTAIFVNIFGGIVRCDAIAHGLINTVKDLNLKIPIIARLQGTNMEQAHQLINDSGMKIFSIDDLQSAAEKSVQLSKVVKMARDIDVGVEFSLGI

SEQ ID NO: 25085 - DNA, 2115 bp, Muscodor strobelii
  misc_feature: SGI EST ID NO. CUFF.59008.0
  misc_feature: Variant of the nucleotide sequence at SEQ ID NO 25083
acctggccgagttttcccgtcagagagcgtcgtgcagtggaccgtggagctggaaaacagctcaaaccgtcgtgacagctgtgtttttgccgacgtcgagatttgtacatgcagtagccagataaatcatccaccattaccacgaagcacacccataatccacagactcgacatccctagtcgtctgtggccgtaataatcatctcctctcccttgttccctctcgccgtctttgtttcatcttcacgtcacaatgtacaagctcgctcgtagccgggctgctgcttcggcgctgcgctcctcctccaagactgccttcggcccctcctccagaattcccagcttcgcccagcaacagcgaagaaatctgagcatacacgaatatctctcagccgacctcttgcgccagtatggcatcggtgtgcccaagggctccaacgcctcgtccgccgccgaggccgagaagatcgcaaaggagataggaggcgaggacatggtcatcaaggcgcaggtgctcgccggcggccgcggcaagggcaccttcgacaacgggctcaagggcggcgtgcgcgtcatctactcgccgaccgaggccaagatgttcgccgaccagatgatcggccacaagctcatcaccaagcagaccggcgcccagggccgcctgtgcaactccgtctacatctgcgagcgcaagttcgcccgccgcgagttttacctcgccatcctcatggaccgcgcctcccagggccccgtcatcgtctcctcgtcgcagggcggcatggacatcgagggcgtcgccaaggagaaccccgacgccatcgtcaccacctacatcgacatcaacaagggcgtcaccgacgacatcgcccgcgacgtcgccaccaagctcggcttctccgagcagtgcatcgaggacgccaaggacaccatccagaagctctacaagatcttcctcgagaaggacgccacccagatcgagatcaacccgctgtccgagacctccgaccaccaggtcctctgcatggacgccaagttcggcttcgacgacaacgccgacttccgccagaaggaggtcttcgagtggcgcgacaccacccaggaggacgccgaggaggtccgcgccgccgagtccggcctcaacttcatcaagctcgacggcgacatcggctgtctcgtcaacggcgccggcctcgccatggccaccatggacatcatcaagctgaacggcggcgccccggccaacttcctcgacgtcggcggtggtgccacgcccgccgccatcaaggaggccttcgagctcatcacctccgaccccaaggtcacggccatcttcgtcaacatcttcggtggaatcgtgcgctgcgacgccatcgcccacggcctgatcaacaccgtcaaggacctcaacctcaagatccccatcatcgcccgtctgcagggaaccaacatggagcaggcccaccagctcatcaatgactccggcatgaagatcttctccatcgatgacctgcagagcgctgctgagaagtcggtgcagctctccaaggtcgtgaagatggctcgcgatatcgacgtcggcgttgaattcagcctgggtatctaagcgtggtgcctccactgtactgtactaacttcaacaggggatcgatgagacgtaaatcaaaaaaggacagaagaacgggaggattgcatgcgtgtaccagaggggcagtaaagggtggaactgcatgtactaacggttaaggaatgagccatacatagacagacggggggaaacttcgggttgtttcttcatcattgcttgcatcgtcatgttcctgttgatccttttttttttctttgcatggctaatatcaaatcttgtgcatatttctgtgtctactttcttactgcgcgtctacgtgatttactgtgcgatagggtagaatattacatctgggagagcgtcattatctcacgggaagcaagggagagtagagatcggatacattcatactcattgctaactagctcttgaaaaactgctgatctgcctataggcttgcaaattgggtatttcgtgcctcattatctcagtcatttctcttgcgggccatatgcgtgccaatcctgagg

SEQ ID NO: 25086 - DNA, 864 bp, Muscodor strobelii
  misc_feature: SGI cDNA ID NO. 568559
  misc_feature: Encodes the peptide sequence at SEQ ID NO 25087
atgtccgccaccaccaccacctcttcccgccgcgccggcggcgttagcccgccctacacccctcctcctttcgtcttcgcctccaccgctgaggagcgcgaccgcatcatcgccgaggagtacgcccatcggctgtaccagcagcagtaccggctgggtccctacgacccctatcccgccatctgggcccaatgggcacgtgaggacaacccccctcctccccccttcgacttccagcgcgatgttctcggccgcctctgggccatcttcacctttctcctcgccttcgtcttcctcactgttctcggctccattctcggctccatctaccacatcgccatcaccgcgccctgccgactcatcgtcgcccagtatcagaagttcaccgacccctcgactccccgcatgaaggcccttgacgacttgtattatcgtcaccgcgcctggcgcaatcgggtctcgtgggaggtctggtacgtctggtgcttcgtccgagaccccgtctggcttgtcttcaaggtctgtgccggcacttacattgcgtacatcgtcttctgggccctcatctggaaccatctcccagtgtgggatgatacgacgtatcgcctagcccattccagtgcccatgtcgtcgaaagagtcgtagacaaagtctacgtctatagtcctcccgcccgttgtgctgtcgagactcctgcctacagttctcaagttcaatcgacggcctatggtgatgtcgactccggaaaaccccagggaattgacatgcagtcggtgggctcagcatgttactgtcagacgatgtgtttctgccgcgtttgggataacccacctgccgccactcatgtatccatcgagacttaa

SEQ ID NO: 25087 - protein, 287 aa, Muscodor strobelii
  misc_feature: SGI Peptide ID NO. 568559
MSATTTTSSRRAGGVSPPYTPPPFVFASTAEERDRIIAEEYAHRLYQQQYRLGPYDPYPAIWAQWAREDNPPPPPFDFQRDVLGRLWAIFTFLLAFVFLTVLGSILGSIYHIAITAPCRLIVAQYQKFTDPSTPRMKALDDLYYRHRAWRNRVSWEVWYVWCFVRDPVWLVFKVCAGTYIAYIVFWALIWNHLPVWDDTTYRLAHSSAHVVERVVDKVYVYSPPARCAVETPAYSSQVQSTAYGDVDSGKPQGIDMQSVGSACYCQTMCFCRVWDNPPAATHVSIET

SEQ ID NO: 25088 - DNA, 712 bp, Muscodor strobelii
  misc_feature: SGI EST ID NO. CUFF.59020.0
  misc_feature: Variant of the nucleotide sequence at SEQ ID NO 25086
taccagcagcagtaccggctgggtccctacgacccctatcccgccatctgggcccaatgggcacgtgaggacaacccccctcctccccccttcgacttccagcgcgatgttctcggccgcctctgggccatcttcacctttctcctcgccttcgtcttcctcactgttctcggctccattctcggctccatctaccacatcgccatcaccgcgccctgccgactcatcgtcgcccagtatcagaagttcaccgacccctcgactccccgcatgaaggcccttgacgacttgtattatcgtcaccgcgcctggcgcaatcgggtctcgtgggaggtctggtacgtctggtgcttcgtccgagaccccgtctggcttgtcttcaaggtctgtgccggcacttacattgcgtacatcgtcttctgggccctcatctggaaccatctcccagtgtgggatgatacgacgtatcgcctagcccattccagtgcccatgtcgtcgaaagagtcgtagacaaagtctacgtctatagtcctcccgcccgttgtgctgtcgagactcctgcctacagttctcaagttcaatcgacggcctatggtgatgtcgactccggaaaaccccagggaattgacatgcagtcggtgggctcagcatgttactgtcagacgatgtgtttctgccgcgtttgggataacccacctgccgccactcatg

SEQ ID NO: 25089 - DNA, 1005 bp, Muscodor strobelii
  misc_feature: SGI cDNA ID NO. 568560
  misc_feature: Encodes the peptide sequence at SEQ ID NO 25090
atggctataggcaagtctgtcgaagtcatccttgggagcagcgttattgcgagtgggaatgtcgaagttggctcagaatggcttcgaacggcgcacgagctcggcattcgatcgatcgatactgctccagtatatggtagggcagagaccacgcttggtgagaacggcgcgttaggtttcaacatcagcacgaagtgtgatgtcatttactcctcgaacccggccacgaaagagaatgttattgctgctggccgaagcagcgcacgcaaacttcagaatcaaattattgacgtgtactacctgcatggtcccgacaagcgagcgtcagtagagagcaccctggaaggtgtaaatacgttgtacaaacaaggactattcaagcgatttggtctctccaacttcctagctgaggaaatagaggaggtcatccgcatatctaaagaacgaaattacgtccttccgacggtgtaccagggcaactactcaccagtgacacgtcgtgtcgaggcggagatttttcccacgcttcgaaaacaccgcatggcattctatgcctatagcccaatagcggggggattcctcacgaaggtcaacagaaatctaatgacaagcccacgtttcgacccaaagaagccaggcggaatacaaatgaacaacttatacaacaagccaagctacctcgaggcgctcgacatgtggcatgtcatcgccaaagaagaagagatttcacaagccgaccttgcataccggtgggttgcacatcactccgctctgaaaggtgatcaaggcgatggcgtcattattggggcgaggactgaagaacagctcacaggcactttgaatgcggtcaagaggggaccgttgagtccaaaggcagtgaagagaattgatgagatttgggagattgtgaaaatggatgcgagtcttgataatcatcattgtgatactcccaatgggcaaaaggagtctgatgtcgaggctacgaagaatatgcgctttgactga

SEQ ID NO: 25090 - protein, 334 aa, Muscodor strobelii
  misc_feature: SGI Peptide ID NO. 568560
  misc_feature (4)..(301): Pfam Id: PF00248 Pfam Desc: Aldo/keto reductase family
  misc_feature (76)..(195): Pfam Id: PF00248 Pfam Desc: Aldo/keto reductase family
  misc_feature (6)..(314): NCBI GI: 115443044 Blast Desc: conserved [Aspergillus terreus NIH2624] gi|114188198|gb|EAU29898.1| conserved [Aspergillus terreus NIH2624]
  misc_feature (28)..(316): NCBI GI: 238508022 Blast Desc: aldehyde reductase (GliO), [Aspergillus flavus NRRL3357] gi|220688731|gb|EED45083.1| aldehyde reductase (GliO), [Aspergillus flavus NRRL3357]
  misc_feature (6)..(313): NCBI GI: 255943257 Blast Desc: Pc18g05700 [Penicillium chrysogenum Wisconsin 54-1255] gi|211587130|emb|CAP94794.1| Pc18g05700 [Penicillium chrysogenum Wisconsin 54-1255]
  misc_feature (6)..(311): NCBI GI: 212527498 Blast Desc: aldehyde reductase (GliO), [Penicillium marneffei ATCC 18224] gi|210073304|gb|EEA27391.1| aldehyde reductase (GliO), [Penicillium marneffei ATCC 18224]
  misc_feature (8)..(311): NCBI GI: 39941150 Blast Desc: MGG_05487 [Magnaporthe grisea 70-15] gi|145022145|gb|EDK06165.1| MGG_05487 [Magnaporthe grisea 70-15]
  misc_feature (26)..(313): NCBI GI: 115385765 Blast Desc: conserved [Aspergillus terreus NIH2624] gi|114187876|gb|EAU29576.1| conserved [Aspergillus terreus NIH2624]
  misc_feature (7)..(311): NCBI GI: 212544506 Blast Desc: aldo/keto reductase, [Penicillium marneffei ATCC 18224] gi|210065376|gb|EEA19470.1| aldo/keto reductase, [Penicillium marneffei ATCC 18224]
  misc_feature (5)..(311): NCBI GI: 242783967 Blast Desc: aldehyde reductase (GliO), [Talaromyces stipitatus ATCC 10500] gi|218720439|gb|EED19858.1| aldehyde reductase (GliO), [Talaromyces stipitatus ATCC 10500]
  misc_feature (7)..(325): NCBI GI: 145604354 Blast Desc: MGG_08519 [Magnaporthe grisea 70-15] gi|145012361|gb|EDJ97017.1| MGG_08519 [Magnaporthe grisea 70-15]
  misc_feature (26)..(314): NCBI GI: 119499147 Blast Desc: aldehyde reductase (GliO), [Neosartorya fischeri NRRL 181] gi|119414495|gb|EAW24434.1| aldehyde reductase (GliO), [Neosartorya fischeri NRRL 181]
MAIGKSVEVILGSSVIASGNVEVGSEWLRTAHELGIRSIDTAPVYGRAETTLGENGALGFNISTKCDVIYSSNPATKENVIAAGRSSARKLQNQIIDVYYLHGPDKRASVESTLEGVNTLYKQGLFKRFGLSNFLAEEIEEVIRISKERNYVLPTVYQGNYSPVTRRVEAEIFPTLRKHRMAFYAYSPIAGGFLTKVNRNLMTSPRFDPKKPGGIQMNNLYNKPSYLEALDMWHVIAKEEEISQADLAYRWVAHHSALKGDQGDGVIIGARTEEQLTGTLNAVKRGPLSPKAVKRIDEIWEIVKMDASLDNHHCDTPNGQKESDVEATKNMRFD

SEQ ID NO: 25091 - DNA, 1890 bp, Muscodor strobelii
  misc_feature: SGI cDNA ID NO. 568561
  misc_feature: Encodes the peptide sequence at SEQ ID NO 25092
atgaatcaatactcgttagaagagcctcagtcccttggcatatcgtcgcaaagaattgccggacatatcgctgggcgatatcgatctcccgatgtggactcgcgtcgggcgatgtatggcgacaatttgccctatcattccaagccgacagtttctgaagttaacgatgcgctcgatcgatcgaggagagtgttagacctcacccaaaagaccggattggagttgaggaacaagatcgaactgggatgtatggtgcggcgtggtgtcacgaacttcgcgcacgagcatggtcttagcgctacctcatcagtagtctgcattatggagggtatcaatatcactctacctgcgcgtaccgctctatcgttgaatcttcacgacgcttttgtgaaccttgagcattggcacattgtcttgggcacagccgtcttagtgctgtcgtggtacatgatcagtacagctgtagcatggaacaagcttcgacacgttccaggccctttccttgcatctatcaccaacctttgggccacccgagttatatcatccggccgtatatatgatatcctgcatgcaaaacaacaagagtatggagacatcatgcgagtcgggcccaacgccgtgactctctacgatgccgacacacttatgcgcatcaacggcgcacgttcggagtataccaaggctccttggtacaactgtctccgcttcgatctccgaggtcatagtgtaatcacagagccagacaatgtcaaacatgacaaacgaaaaaccaaactcatcgcgggattctcggggagagcgttgtcaggtatcgaggaaaaagttgaccaatggattgcggcacttattcaggacctcaaggacaaaatctctaaaggccaggggatagcgacagtagatatcggcaaacaagtacagtattttcaggtcgacttgatcacccacgctgggatgggaacgccgtggggcgatcttgagaccagtcgagacaactttgattatctgaagctgaatgatagtttccttcctttcatggcttcgatgagttggctcccactgacgcgatttctctttcaatcgactttctttatgaaactattgggtccaaagctcacggacacaggtggattaggtgtcttcttgaagatactcgaagacgaagtcgatagtcgtgtgaaagacacatcagagaatgcagaagataaagaggacatgctgggcgagtggatacgccgtggattgtctcctatgatgtgtaaattggatttagctgtgcaggtaccggctgggagcgagacttctgtgacagcaatacgtggcgtgctgttacttctgctgtcctcgccaagagtttatcagaagttgaaacgcgaaattaaggataagatcgcatcgggccaagcttcagaccccatcacgaatgagcaagccaagagttttgaatacatgcaagctgttatccaagagggcatgcgcctgatgacccctatctcatctggcttcgcaaagaaagtgcctccatccggcgacacggtttgtggcaagttcttgccaggaggcactgacgtctatcccaacttcggcagtctgatgcgcaatcctgaagtgtttggtgcagatgcagagtcattccgccctgagcggttccttggtaccggaccagaggtttctcgcatgctaaagactgtcgattttgtgtttggttacggacgttatatgtgtctcggaaaagcacttgcgcaaattgaactaaataagatcttcattcaacttttgagaaacttcgatttccaactttgcaatccagaaaagccttggacacgaactgggtacacgacgtggattgtccacgacttttgggttcaggtttcagagacgacactagcctga

SEQ ID NO: 25092 - protein, 629 aa, Muscodor strobelii
  misc_feature: SGI Peptide ID NO. 568561
  misc_feature (164)..(623): Pfam Id: PF00067 Pfam Desc: Cytochrome P450
  misc_feature (429)..(607): Pfam Id: PF00067 Pfam Desc: Cytochrome P450
  misc_feature (142)..(625): NCBI GI: 85091832 Blast Desc: NCU09185 [Neurospora crassa OR74A] gi|28920493|gb|EAA29859.1| [Neurospora crassa OR74A]
  misc_feature (137)..(625): NCBI GI: 85111238 Blast Desc: NCU08112 [Neurospora crassa OR74A] gi|28925582|gb|EAA34606.1| [Neurospora crassa OR74A]
  misc_feature (137)..(622): NCBI GI: 169615603 Blast Desc: SNOG_10960 [Phaeosphaeria nodorum SN15] gi|111060339|gb|EAT81459.1| SNOG_10960 [Phaeosphaeria nodorum SN15]
  misc_feature (153)..(624): NCBI GI: 171678209 Blast Desc: protein product [Podospora anserina] gi|170937174|emb|CAP61831.1| protein product [Podospora anserina]
  misc_feature (125)..(624): NCBI GI: 256723424 Blast Desc: NECHADRAFT_80996 [Nectria haematococca mpVI 77-13-4]
  misc_feature (142)..(625): NCBI GI: 85094228 Blast Desc: NCU05848 [Neurospora crassa OR74A] gi|28921295|gb|EAA30603.1| [Neurospora crassa OR74A]
  misc_feature (157)..(624): NCBI GI: 116205708 Blast Desc: CHGG_02147 [Chaetomium globosum CBS 148.51] gi|88182744|gb|EAQ90212.1| CHGG_02147 [Chaetomium globosum CBS 148.51]
  misc_feature (140)..(624): NCBI GI: 46109770 Blast Desc: FG01767.1 [Gibberella zeae PH-1]
  misc_feature (138)..(628): NCBI GI: 170940118 Blast Desc: protein product [Podospora anserina]
  misc_feature (125)..(626): NCBI GI: 51490962 Blast Desc: cytochrome P450 monooxygenase [Botryotinia fuckeliana]
  misc_feature (160)..(611): SWISSPROT Homolog: EC 1.14.13.12 Benzoate 4-monooxygenase
MNQYSLEEPQSLGISSQRIAGHIAGRYRSPDVDSRRAMYGDNLPYHSKPTVSEVNDALDRSRRVLDLTQKTGLELRNKIELGCMVRRGVTNFAHEHGLSATSSVVCIMEGINITLPARTALSLNLHDAFVNLEHWHIVLGTAVLVLSWYMISTAVAWNKLRHVPGPFLASITNLWATRVISSGRIYDILHAKQQEYGDIMRVGPNAVTLYDADTLMRINGARSEYTKAPWYNCLRFDLRGHSVITEPDNVKHDKRKTKLIAGFSGRALSGIEEKVDQWIAALIQDLKDKISKGQGIATVDIGKQVQYFQVDLITHAGMGTPWGDLETSRDNFDYLKLNDSFLPFMASMSWLPLTRFLFQSTFFMKLLGPKLTDTGGLGVFLKILEDEVDSRVKDTSENAEDKEDMLGEWIRRGLSPMMCKLDLAVQVPAGSETSVTAIRGVLLLLLSSPRVYQKLKREIKDKIASGQASDPITNEQAKSFEYMQAVIQEGMRLMTPISSGFAKKVPPSGDTVCGKFLPGGTDVYPNFGSLMRNPEVFGADAESFRPERFLGTGPEVSRMLKTVDFVFGYGRYMCLGKALAQIELNKIFIQLLRNFDFQLCNPEKPWTRTGYTTWIVHDFWVQVSETTLA

SEQ ID NO: 25093 - DNA, 408 bp, Muscodor strobelii
  misc_feature: SGI cDNA ID NO. 568562
  misc_feature: Encodes the peptide sequence at SEQ ID NO 25094
atgcagctcaatttgaagtctctcctattcctcggccttacggcctcttcggttgtgtctgtgactggcagagaagtgccggtgggtggtgtgccatgtatgggagggctctcgtttagtcgggccaaaattcagagcaccatcactcaagcagcaaactttcggttcaatccccccgtgcccacaccccactacccggatgaatttggcaacagagatgacggcgggcgcccgctctttttcctccagggcgcagaagtcactccattgtgggagtttcctattctgaaagagggagtgtgggcttcgggtgagcctggcacttaccgtctcatcatagatgacctaaacacatttgttggtatcaccaataagaatgcggacaatacggggattcgtgcgtgttag

SEQ ID NO: 25094 - protein, 135 aa, Muscodor strobelii
  misc_feature: SGI Peptide ID NO. 568562
  misc_feature (19)..(127): NCBI GI: 67904440 Blast Desc: AN9207.2 [Aspergillus nidulans FGSC A4] gi|40742308|gb|EAA61498.1| AN9207.2 [Aspergillus nidulans FGSC A4] gi|259485363|tpe|CBF82324.1| TPA: extracellular ribonuclease,
  misc_feature (17)..(127): NCBI GI: 115401962 Blast Desc: conserved [Aspergillus terreus NIH2624] gi|114190510|gb|EAU32210.1| conserved [Aspergillus terreus NIH2624]
  misc_feature (17)..(127): NCBI GI: 119501467 Blast Desc: ribonuclease, [Neosartorya fischeri NRRL 181] gi|119415656|gb|EAW25593.1| ribonuclease, [Neosartorya fischeri NRRL 181]
  misc_feature (5)..(114): NCBI GI: 115401962 Blast Desc: conserved [Aspergillus terreus NIH2624] gi|114190510|gb|EAU32210.1| conserved [Aspergillus terreus NIH2624]
  misc_feature (1)..(117): NCBI GI: 67904440 Blast Desc: AN9207.2 [Aspergillus nidulans FGSC A4] gi|40742308|gb|EAA61498.1| AN9207.2 [Aspergillus nidulans FGSC A4] gi|259485363|tpe|CBF82324.1| TPA: extracellular ribonuclease,
  misc_feature (17)..(127): NCBI GI: 70981618 Blast Desc: extracellular guanyl-specific ribonuclease [Aspergillus fumigatus Af293] gi|66843960|gb|EAL84300.1| extracellular guanyl-specific ribonuclease, [Aspergillus Af293]
MQLNLKSLLFLGLTASSVVSVTGREVPVGGVPCMGGLSFSRAKIQSTITQAANFRFNPPVPTPHYPDEFGNRDDGGRPLFFLQGAEVTPLWEFPILKEGVWASGEPGTYRLIIDDLNTFVGITNKNADNTGIRAC

SEQ ID NO: 25095 - DNA, 1344 bp, Muscodor strobelii
  misc_feature: SGI cDNA ID NO. 568563
  misc_feature: Encodes the peptide sequence at SEQ ID NO 25096
atggcatcgcaagcagcgtatgcggccgagaaggctataggccacgatggcagctcagtaacaaaacaagatgtaacaagttacgacggaagtggaactatgaaggcattgtgctggcaaggcaagaactctgttcaggtcctcgacgtaccacgtcctaagattctcgagccgaacgatgtgatcctcaaggtgactgggagtaccgtctgcggtagtgatctccaccttcttcacggaactgtaattcaacttgcaaaaggcgacatacttggccacgagttctgcggcatcgtggacgaggtcggatctgcggtctctaaagtacagaaaggcaagcgctatgtcgcctcttttcagatcgcctgcggagattgcttcttctgcaagcaaaagctatcttctcagtgcgagcggaccaactctaacacgacagagcgcgccatgtatggtggtcaaacggccggtatgtttggatactcccattttacaggtggctttgccggaggccaggccgagtacgtgcgcgtgccactcggcgatgtgaatttgctcgagattccagacggcgtgcccgacgagaaggcactattccttagtgatgtgttagccactagctacaatgctgtccatgacactgccgtctatgaaggcgacgaggtcgcaatcttcggcgccggtcctatcggccagatggctggcgtttttgcagttgaagccggcgccaaaaagatcatcttcgtcgacacggagcccaggatatcgttcattaaggaacgatggccaaaggaacacgctagcaagctagaattcatcgacttcaaaaagttctcgtttggtgttacgaataaggagactgtcgtatcggaactcaagaggctttgcggcggaagaggacctgacgcagccattgagtgcgtcgctggagagtacgccaaaggatggctacactgggccgagatgatgctgggtgctgagaccgacactagtgagatcattaacgagatgatcgaaggcgtgcgcaactttgggcgatgtggtattacaggcgtctatgtcggatatacaaatcatttcaatgtaggatcactaatggaaagaggcatccgcctcatcggcaatggtcaggcaccagttcacaagtattgggaagctttgttagagaaaatcaagacaggagaacttgatccactgcagatggtgtcgcaccgtgtccgagttgaggatcttgacaaggtctactacaaattcgagaagaaagaagatgctatgcagaaggtctttgttgaaacgcagttctcacttccagcttgcgcgggtagtcctcaactgacgaggtactga

SEQ ID NO: 25096 - protein, 447 aa, Muscodor strobelii
  misc_feature: SGI Peptide ID NO. 568563
  misc_feature (58)..(187): Pfam Id: PF08240 Pfam Desc: Alcohol dehydrogenase GroES-like domain
  misc_feature (217)..(249): Pfam Id: PF00107 Pfam Desc: Zinc-binding dehydrogenase
  misc_feature (1)..(447): NCBI GI: 46111101 Blast Desc: FG02432.1 [Gibberella zeae PH-1]
  misc_feature (13)..(447): NCBI GI: 149210341 Blast Desc: MGCH7_ch7g648 [Magnaporthe grisea 70-15] gi|86196603|gb|EAQ71241.1| MGCH7_ch7g648 [Magnaporthe grisea 70-15]
  misc_feature (3)..(447): NCBI GI: 164423148 Blast Desc: NCU11395 [Neurospora crassa OR74A] gi|157069968|gb|EDO64940.1| NCU11395 [Neurospora crassa OR74A]
  misc_feature (13)..(447): NCBI GI: 145609904 Blast Desc: MGG_02886 [Magnaporthe grisea 70-15] gi|145017291|gb|EDK01654.1| MGG_02886 [Magnaporthe grisea 70-15]
  misc_feature (1)..(445): NCBI GI: 116200961 Blast Desc: CHGG_08365 [Chaetomium globosum CBS 148.51] gi|88176883|gb|EAQ84351.1| CHGG_08365 [Chaetomium globosum CBS 148.51]
  misc_feature (2)..(447): NCBI GI: 171677346 Blast Desc: protein product [Podospora anserina] gi|170936741|emb|CAP61399.1| protein product [Podospora anserina]
  misc_feature (10)..(447): NCBI GI: 189197275 Blast Desc: S-(hydroxymethyl)glutathione dehydrogenase [Pyrenophora tritici-repentis Pt-1C-BFP] gi|187980923|gb|EDU47549.1| S-(hydroxymethyl)glutathione
  misc_feature (1)..(447): NCBI GI: 169616472 Blast Desc: SNOG_11408 [Phaeosphaeria nodorum SN15] gi|111059996|gb|EAT81116.1| SNOG_11408 [Phaeosphaeria nodorum SN15]
  misc_feature (3)..(384): NCBI GI: 261358540 Blast Desc: S-(hydroxymethyl)glutathione dehydrogenase [Verticillium albo-atrum VaMs.102]
  misc_feature (3)..(447): NCBI GI: 154317308 Blast Desc: BC1G_03556 [Botryotinia fuckeliana B05.10] gi|150844973|gb|EDN20166.1| BC1G_03556 [Botryotinia fuckeliana B05.10]
  misc_feature (34)..(430): SWISSPROT Homolog: EC 1.1.1.284 S-(hydroxymethyl)glutathione dehydrogenase
MASQAAYAAEKAIGHDGSSVTKQDVTSYDGSGTMKALCWQGKNSVQVLDVPRPKILEPNDVILKVTGSTVCGSDLHLLHGTVIQLAKGDILGHEFCGIVDEVGSAVSKVQKGKRYVASFQIACGDCFFCKQKLSSQCERTNSNTTERAMYGGQTAGMFGYSHFTGGFAGGQAEYVRVPLGDVNLLEIPDGVPDEKALFLSDVLATSYNAVHDTAVYEGDEVAIFGAGPIGQMAGVFAVEAGAKKIIFVDTEPRISFIKERWPKEHASKLEFIDFKKFSFGVTNKETVVSELKRLCGGRGPDAAIECVAGEYAKGWLHWAEMMLGAETDTSEIINEMIEGVRNFGRCGITGVYVGYTNHFNVGSLMERGIRLIGNGQAPVHKYWEALLEKIKTGELDPLQMVSHRVRVEDLDKVYYKFEKKEDAMQKVFVETQFSLPACAGSPQLTRY

SEQ ID NO: 25097 - DNA, 1801 bp, Muscodor strobelii
  misc_feature: SGI EST ID NO. CUFF.59053.0
  misc_feature: Variant of the nucleotide sequence at SEQ ID NO 25095
aacaacgtttaatatacagcatcattatattagtagtcactcactatcttctattactttacacgcgaactctaggcagtttagtccggagtataagtcaccatggcatcgcaagcagcgtatgcggccgagaaggctataggccacgatggcagctcagtaacaaaacaagatgtaacaagttacgacggaagtggaactatgaaggcattgtgctggcaaggcaagaactctgttcaggtcctcgacgtaccacgtcctaagattctcgagccgaacgatgtgatcctcaaggtgactgggagtaccgtctgcggtagtgatctccaccttcttcacggaactgtaattcaacttgcaaaaggcgacatacttggccacgagttctgcggcatcgtggacgaggtcggatctgcggtctctaaagtacagaaaggcaagcgctatgtcgcctcttttcagatcgcctgcggagattgcttcttctgcaagcaaaagctatcttctcagtgcgagcggaccaactctaacacgacagagcgcgccatgtatggtggtcaaacggccggtatgtttggatactcccattttacaggtggctttgccggaggccaggccgagtacgtgcgcgtgccactcggcgatgtgaatttgctcgagattccagacggcgtgcccgacgagaaggcactattccttagtgatgtgttagccactagctacaatgctgtccatgacactgccgtctatgaaggcgacgaggtcgcaatcttcggcgccggtcctatcggccagatggctggcgtttttgcagttgaagccggcgccaaaaagatcatcttcgtcgacacggagcccaggatatcgttcattaaggaacgatggccaaaggaacacgctagcaagctagaattcatcgacttcaaaaagttctcgtttggtgttacgaataaggagactgtcgtatcggaactcaagaggctttgcggcggaagaggacctgacgcagccattgagtgcgtcgctggagagtacgccaaaggatggctacactgggccgagatgatgctgggtgctgagaccgacactagtgagatcattaacgagatgatcgaaggcgtgcgcaactttgggcgatgtggtattacaggcgtctatgtcggatatacaaatcatttcaatgtaggatcactaatggaaagaggcatccgcctcatcggcaatggtcaggcaccagttcacaagtattgggaagctttgttagagaaaatcaagacaggagaacttgatccactgcagatggtgtcgcaccgtgtccgagttgaggatcttgacaaggtctactacaaattcgagaagaaagaagatgctatgcagaaggtctttgttgaaacgcagttctcacttccagcttgcgcgggtagtcctcaactgacgaggtactgaattctctgcgagtggggggagccacgtggggtgatgtgtcgggtcagagcaggcagaatatgcatgcatcactgtattctaacttttgcggacacctgggattccacgggacttacgcaatgacatagaatttgagtcaaatgagacaactagaaattgcaaaaaaaaaaacatacaacatcaggaattcgctggtcgtcaccgacccaactactaatctgacggtatcaagcttatcaagggcagagcggacgggatgccgagttgtcttgatcctatggtcgtatgtggaagagtcaggtcctagtgtggaccatatcgcagactaacctctagactttctcgcgctttgtgt

SEQ ID NO: 25098 - DNA, 963 bp, Muscodor strobelii
  misc_feature: SGI cDNA ID NO. 568564
  misc_feature: Encodes the peptide sequence at SEQ ID NO 25099
atgacagtaacagttgacgctgctatcgttgcggcgttaggccttgagccggccagcgcaaagattggctcacacagcggatatggctttgcatcaactttcaagctgagcggaacgattggcaacagagacgtattctttttcatcaaggtcgctggtggcacggaaggcaaggtgatgctggaaggcgaattcacatcgctcaaagcgatacacgatgcaataccaaatttctgtccatcaccccatgcacatggtgctttgagagatgatcctggcaaatattttttagcaatggattttatagatctcaatgcgccagcgaatcctggagctgagactctggcacagaagctggctcaacttcatgctatacctgcaccggtaccggatgggttcgacaggccgatgtacggtttcccggtaacgacatgttgcggatcgacgccacaagacaacagctggaaatcttcgtgggccgagttctatgcagagaatcggctgcgcgctgtttttcacgctggtgagcaaaagcatggtcgagatgcggaattagcgaaagctgttgagaagaccggtgtaatagttccacgactgcttggagatgatcacctacgaggtgtgcagcccgtcatagttcatggcgatctctggagcgggaaccatggcagcggacaaattgcttgcgaaggcaatactgaagaggttctgttcgacccctcttgcgtgtatggacattctgaatacgagctgggaataatgcgaatgttcggtgacgtgggaccgaggttttggaaagagtacaagactcttttgtcgatatcagagcccagagaagaatgggaagatagagtgacgctttatgagctgtaccatcacctgaatcactgggcgatatttggaggaatgtacagagggggcgcgatgtcgatcatgcagaaactatatcttaagtacggatag

SEQ ID NO: 25099 - protein, 320 aa, Muscodor strobelii
  misc_feature: SGI Peptide ID NO. 568564
  misc_feature (1)..(319): Pfam Id: PF03881 Pfam Desc: Fructosamine kinase
  misc_feature (209)..(319): Pfam Id: PF03881 Pfam Desc: Fructosamine kinase
  misc_feature (117)..(168): Pfam Id: PF03881 Pfam Desc: Fructosamine kinase
  misc_feature (5)..(320): NCBI GI: 261357029 Blast Desc: fructosamine-3-kinase [Verticillium albo-atrum VaMs.102]
  misc_feature (3)..(319): NCBI GI: 46138739 Blast Desc: FG10884.1 [Gibberella zeae PH-1]
  misc_feature (3)..(320): NCBI GI: 256728903 Blast Desc: NECHADRAFT_104325 [Nectria haematococca mpVI 77-13-4]
  misc_feature (1)..(290): NCBI GI: 145605645 Blast Desc: MGG_06978 [Magnaporthe grisea 70-15] gi|145013446|gb|EDJ98087.1| MGG_06978 [Magnaporthe grisea 70-15]
  misc_feature (1)..(320): NCBI GI: 171689870 Blast Desc: protein product [Podospora anserina] gi|170944897|emb|CAP71008.1| protein product [Podospora anserina]
  misc_feature (1)..(319): NCBI GI: 85110266 Blast Desc: NCU09611 [Neurospora crassa OR74A] gi|16944443|emb|CAD11434.1| conserved [Neurospora crassa] gi|28925053|gb|EAA34139.1| conserved [Neurospora crassa OR74A]
  misc_feature (1)..(315): NCBI GI: 154318961 Blast Desc: BC1G_02432 [Botryotinia fuckeliana B05.10] gi|150856863|gb|EDN32055.1| BC1G_02432 [Botryotinia fuckeliana B05.10]
  misc_feature (3)..(320): NCBI GI: 169594836 Blast Desc: SNOG_00147 [Phaeosphaeria nodorum SN15] gi|160700949|gb|EAT91642.2| SNOG_00147 [Phaeosphaeria nodorum SN15]
  misc_feature (5)..(319): NCBI GI: 226286839 Blast Desc: phosphotransferase enzyme family protein [Paracoccidioides brasiliensis Pb18]
  misc_feature (5)..(320): NCBI GI: 115443480 Blast Desc: conserved [Aspergillus terreus NIH2624] gi|114188416|gb|EAU30116.1| conserved [Aspergillus terreus NIH2624]
MTVTVDAAIVAALGLEPASAKIGSHSGYGFASTFKLSGTIGNRDVFFFIKVAGGTEGKVMLEGEFTSLKAIHDAIPNFCPSPHAHGALRDDPGKYFLAMDFIDLNAPANPGAETLAQKLAQLHAIPAPVPDGFDRPMYGFPVTTCCGSTPQDNSWKSSWAEFYAENRLRAVFHAGEQKHGRDAELAKAVEKTGVIVPRLLGDDHLRGVQPVIVHGDLWSGNHGSGQIACEGNTEEVLFDPSCVYGHSEYELGIMRMFGDVGPRFWKEYKTLLSISEPREEWEDRVTLYELYHHLNHWAIFGGMYRGGAMSIMQKLYLKYG

SEQ ID NO: 25100 - DNA, 1455 bp, Muscodor strobelii
  misc_feature: SGI EST ID NO. CUFF.59056.0
  misc_feature: Variant of the nucleotide sequence at SEQ ID NO 25098
caagaacttgccagtagtgaaatgaatttggatgcaacgatgccacgacggcttgccaaaacgttctgatgtgacgtcaccctggtggaggagcttctacctacctctgagttgatttagccatagccgaccgtgcaatgtaagtgcgaacaacgtgagttatggggaccctcgagatcgaattgtcgatggtcggctccaagaattattctatcgtctttctttccaagctggaacagactaagtgcctatgagtttccctgcgaaatgacagtaacagttgacgctgctatcgttgcggcgttaggccttgagccggccagcgcaaagattggctcacacagcggatatggctttgcatcaactttcaagctgagcggaacgattggcaacagagacgtattctttttcatcaaggtcgctggtggcacggaaggcaaggtgatgctggaaggcgaattcacatcgctcaaagcgatacacgatgcaataccaaatttctgtccatcaccccatgcacatggtgctttgagagatgatcctggcaaatattttttagcaatggattttatagatctcaatgcgccagcgaatcctggagctgagactctggcacagaagctggctcaacttcatgctatacctgcaccggtaccggatgggttcgacaggccgatgtacggtttcccggtaacgacatgttgcggatcgacgccacaagacaacagctggaaatcttcgtgggccgagttctatgcagagaatcggctgcgcgctgtttttcacgctggtgagcaaaagcatggtcgagatgcggaattagcgaaagctgttgagaagaccgggtatatctcatccactttctgataaatgttcattgcttttacatcactgattgagactaattacctaccatttatacaagtgtaatagttccacgactgcttggagatgatcacctacgaggtgtgcagcccgtcatagttcatggcgatctctggagcgggaaccatggcagcggacaaattgcttgcgaaggcaatactgaagaggttctgttcgacccctcttgcgtgtatggacattctgaatacgagctgggaataatgcgaatgttcggtgacgtgggaccgaggttttggaaagagtacaagactcttttgtcgatatcagagcccagagaagaatgggaagatagagtgacgctttatgagctgtaccatcacctgaatcactgggcgatatttggaggaatgtacagagggggcgcgatgtcgatcatgcagaaactatatcttaagtacggatagatggtatgagttcttccaatttttcggttggtatgtataaagaagtgaatgaaaagaaccttattattctactaaaccatagcatctacgaggcatgagacttacggcagccccttacatacagctaactgtgccaatttaccaa

SEQ ID NO: 25101 - DNA, 1014 bp, Muscodor strobelii
  misc_feature: SGI cDNA ID NO. 568565
  misc_feature: Encodes the peptide sequence at SEQ ID NO 25102
atgacagtaacagttgacgctgctatcgttgcggcgttaggccttgagccggccagcgcaaagattggctcacacagcggatatggctttgcatcaactttcaagctgagcggaacgattggcaacagagacgtattctttttcatcaaggtcgctggtggcacggaaggcaaggtgatgctggaaggtgagaattacacgaagcccctggttgaacagccgctcacgtgctatacaggcgaattcacatcgctcaaagcgatacacgatgcaataccaaatttctgtccatcaccccatgcacatggtgctttgagagatgatcctggcaaatattttttagcaatggattttatagatctcaatgcgccagcgaatcctggagctgagactctggcacagaagctggctcaacttcatgctatacctgcaccggtaccggatgggttcgacaggccgatgtacggtttcccggtaacgacatgttgcggatcgacgccacaagacaacagctggaaatcttcgtgggccgagttctatgcagagaatcggctgcgcgctgtttttcacgctggtgagcaaaagcatggtcgagatgcggaattagcgaaagctgttgagaagaccggtgtaatagttccacgactgcttggagatgatcacctacgaggtgtgcagcccgtcatagttcatggcgatctctggagcgggaaccatggcagcggacaaattgcttgcgaaggcaatactgaagaggttctgttcgacccctcttgcgtgtatggacattctgaatacgagctgggaataatgcgaatgttcggtgacgtgggaccgaggttttggaaagagtacaagactcttttgtcgatatcagagcccagagaagaatgggaagatagagtgacgctttatgagctgtaccatcacctgaatcactgggcgatatttggaggaatgtacagagggggcgcgatgtcgatcatgcagaaactatatcttaagtacggatag

SEQ ID NO: 25102 - protein, 337 aa, Muscodor strobelii
  misc_feature: SGI Peptide ID NO. 568565
  misc_feature (36)..(336): Pfam Id: PF03881 Pfam Desc: Fructosamine kinase
  misc_feature (226)..(336): Pfam Id: PF03881 Pfam Desc: Fructosamine kinase
  misc_feature (134)..(185): Pfam Id: PF03881 Pfam Desc: Fructosamine kinase
  misc_feature (5)..(337): NCBI GI: 261357029 Blast Desc: fructosamine-3-kinase [Verticillium albo-atrum VaMs.102]
  misc_feature (3)..(336): NCBI GI: 46138739 Blast Desc: FG10884.1 [Gibberella zeae PH-1]
  misc_feature (5)..(337): NCBI GI: 256728903 Blast Desc: NECHADRAFT_104325 [Nectria haematococca mpVI 77-13-4]
  misc_feature (1)..(307): NCBI GI: 145605645 Blast Desc: MGG_06978 [Magnaporthe grisea 70-15] gi|145013446|gb|EDJ98087.1| MGG_06978 [Magnaporthe grisea 70-15]
  misc_feature (1)..(337): NCBI GI: 171689870 Blast Desc: protein product [Podospora anserina] gi|170944897|emb|CAP71008.1| protein product [Podospora anserina]
  misc_feature (1)..(336): NCBI GI: 85110266 Blast Desc: NCU09611 [Neurospora crassa OR74A] gi|16944443|emb|CAD11434.1| conserved [Neurospora crassa] gi|28925053|gb|EAA34139.1| conserved [Neurospora crassa OR74A]
  misc_feature (1)..(332): NCBI GI: 154318961 Blast Desc: BC1G_02432 [Botryotinia fuckeliana B05.10] gi|150856863|gb|EDN32055.1| BC1G_02432 [Botryotinia fuckeliana B05.10]
  misc_feature (3)..(337): NCBI GI: 169594836 Blast Desc: SNOG_00147 [Phaeosphaeria nodorum SN15] gi|160700949|gb|EAT91642.2| SNOG_00147 [Phaeosphaeria nodorum SN15]
  misc_feature (3)..(336): NCBI GI: 226286839 Blast Desc: phosphotransferase enzyme family protein [Paracoccidioides brasiliensis Pb18]
  misc_feature (5)..(337): NCBI GI: 115443480 Blast Desc: conserved [Aspergillus terreus NIH2624] gi|114188416|gb|EAU30116.1| conserved [Aspergillus terreus NIH2624]
MTVTVDAAIVAALGLEPASAKIGSHSGYGFASTFKLSGTIGNRDVFFFIKVAGGTEGKVMLEGENYTKPLVEQPLTCYTGEFTSLKAIHDAIPNFCPSPHAHGALRDDPGKYFLAMDFIDLNAPANPGAETLAQKLAQLHAIPAPVPDGFDRPMYGFPVTTCCGSTPQDNSWKSSWAEFYAENRLRAVFHAGEQKHGRDAELAKAVEKTGVIVPRLLGDDHLRGVQPVIVHGDLWSGNHGSGQIACEGNTEEVLFDPSCVYGHSEYELGIMRMFGDVGPRFWKEYKTLLSISEPREEWEDRVTLYELYHHLNHWAIFGGMYRGGAMSIMQKLYLKYG

SEQ ID NO: 25103 - DNA, 1455 bp, Muscodor strobelii; identical to SEQ ID NO: 25100
  misc_feature: SGI EST ID NO. CUFF.59056.0
  misc_feature: Variant of the nucleotide sequence at SEQ ID NO 25101

SEQ ID NO: 25104 - DNA, 834 bp, Muscodor strobelii
  misc_feature: SGI cDNA ID NO. 568566
  misc_feature: Encodes the peptide sequence at SEQ ID NO 25105
atgacggagccaaagcgcaaagcgatcatcgtaggaatcagcggggcatcatcctcaggaaaaacgacgatatcccgactactccgtgacgtcttcccacatacatttgtcttacatgaagatgatttctatcgacccgagagcgaactcccaactaaacatgggttcctagactgggactgtgctggagcactcaatttcgacgatatgtcgcgtgcgctagaatacatccgtgccgaaggtacatttcctcccttcgtagactcaaaggaagacaaaaactccgtgggaacgtgtccggtcccagactccgccatagcttcagcaaaagctcgcgtcgaagcatggttggcccctggccagcctgggcacgccatattctcatcaccagatagcaacttacgtgtctgcctgttcgacgggtttctactctttggctgtgagcccccgctcaagcgcatcacggaggaacttatcgatatcaagtttctcctcacagttagcagacaaaaggcaactcagcgtcgtgatgcaagagatgggtatgtgacactagagggcttttgggctgatccgccggggtatgtggataaggttgtgtggcccaactatgcagagtctcacgcctggttgtttgaagagggcaatgtggagggagtcttgagtgagaaggtcctgaaggaaaaggcgatcttgtcgccatcaagtgtttcggcgttaggtggagaagatcaaggtgaggagtcgcgattggacattgatatgcctgcaatgttcgactgggtaattgatacacttatccaaaaactagaggagatagcgaacaagaggtga

SEQ ID NO: 25105 - protein, 277 aa, Muscodor strobelii
  misc_feature: SGI Peptide ID NO. 568566
  misc_feature (6)..(271): NCBI GI: 261353064 Blast Desc: conserved [Verticillium albo-atrum VaMs.102]
  misc_feature (6)..(275): NCBI GI: 154291310 Blast Desc: BC1G_15302 [Botryotinia fuckeliana B05.10] gi|150846994|gb|EDN22187.1| BC1G_15302 [Botryotinia fuckeliana B05.10]
  misc_feature (7)..(274): NCBI GI: 156059632 Blast Desc: SS1G_03828 [Sclerotinia sclerotiorum 1980] gi|154701615|gb|EDO01354.1| SS1G_03828 [Sclerotinia sclerotiorum 1980]
  misc_feature (6)..(276): NCBI GI: 39973511 Blast Desc: MGG_01098 [Magnaporthe grisea 70-15] gi|145017937|gb|EDK02216.1| MGG_01098 [Magnaporthe grisea 70-15]
  misc_feature (7)..(270): NCBI GI: 46117130 Blast Desc: FG04407.1 [Gibberella zeae PH-1]
  misc_feature (7)..(271): NCBI GI: 256729281 Blast Desc: [Nectria haematococca mpVI 77-13-4]
  misc_feature (6)..(266): NCBI GI: 169624768 Blast Desc: SNOG_15645 [Phaeosphaeria nodorum SN15] gi|111055900|gb|EAT77020.1| SNOG_15645 [Phaeosphaeria nodorum SN15]
  misc_feature (3)..(267): NCBI GI: 210075300 Blast Desc: YALI0B14729p [Yarrowia lipolytica] gi|199425178|emb|CAG83148.2| YALI0B14729p [Yarrowia lipolytica]
  misc_feature (7)..(231): NCBI GI: 189200028 Blast Desc: nicotinamide riboside kinase 1 [Pyrenophora tritici-repentis Pt-1C-BFP] gi|187983450|gb|EDU48938.1| nicotinamide riboside kinase 1 [Pyrenophora tritici-repentis
  misc_feature (8)..(219): NCBI GI: 213410016 Blast Desc: nicotinamide riboside kinase [Schizosaccharomyces japonicus yFS275] gi|212003825|gb|EEB09485.1| nicotinamide riboside kinase [Schizosaccharomyces japonicus yFS275]
  misc_feature (21)..(236): SWISSPROT Homolog: EC 2.7.1.22 Ribosylnicotinamide kinase
MTEPKRKAIIVGISGASSSGKTTISRLLRDVFPHTFVLHEDDFYRPESELPTKHGFLDWDCAGALNFDDMSRALEYIRAEGTFPPFVDSKEDKNSVGTCPVPDSAIASAKARVEAWLAPGQPGHAIFSSPDSNLRVCLFDGFLLFGCEPPLKRITEELIDIKFLLTVSRQKATQRRDARDGYVTLEGFWADPPGYVDKVVWPNYAESHAWLFEEGNVEGVLSEKVLKEKAILSPSSVSALGGEDQGEESRLDIDMPAMFDWVIDTLIQKLEEIANKR

SEQ ID NO: 25106 - DNA, 1404 bp, Muscodor strobelii
  misc_feature: SGI EST ID NO. CUFF.59155.0
  misc_feature: Variant of the nucleotide sequence at SEQ ID NO 25104
gtaggcatcccgggagacctcagatcaacttatcacaaccatgtctgtctgaaaatttaacctgctgcccgtttgcgcccagtaatatcgggtgttaccgaccgattgcgggcgccgttagccccactattcctgtctacacttttgtctagaagctgggacacattggcggctaattttctcaccagttttgacttttggacagaaagcagtgttctgggcatcatatatggttggatttatatgaagactcattatcgatattataaaacagcctttcaagtttcacgcaacgatgacggagccaaagcgcaaagcgatcatcgtaggaatcagcggggcatcatcctcaggaaaaacgacgatatcccgactactccgtgacgtcttcccacatacatttgtcttacatgaagatgatttctatcgacccgagagcgaactcccaactaaacatgggttcctagactgggactgtgctggagcactcaatttcgacgatatgtcgcgtgcgctagaatacatccgtgccgaaggtacatttcctcccttcgtagactcaaaggaagacaaaaactccgtgggaacgtgtccggtcccagactccgccatagcttcagcaaaagctcgcgtcgaagcatggttggcccctggccagcctgggcacgccatattctcatcaccagatagcaacttacgtgtctgcctgttcgacgggtttctactctttggctgtgagcccccgctcaagcgcatcacggaggaacttatcgatatcaagtttctcctcacagttagcagacaaaaggcaactcagcgtcgtgatgcaagagatgggtatgtgacactagagggcttttgggctgatccgccggggtatgtggataaggttgtgtggcccaactatgcagagtctcacgcctggttgtttgaagagggcaatgtggagggagtcttgagtgagaaggtcctgaaggaaaaggcgatcttgtcgccatcaagtgtttcggcgttaggtggagaagatcaaggtgaggagtcgcgattggacattgatatgcctgcaatgttcgactgggtaattgatacacttatccaaaaactagaggagatagcgaacaagaggtgattttcgcggatcaaaaaggccatagaatagagtaaggataagataaaatcaaaaatacttgacgattctatctattgttactagctgccggatgttcttttttccatctcccatgtatgcgaactctacattatcatccctatcatcattaacaatactctattcgaaagtcaacattcatggcgtataaaatttggcgtcaaagactattgccaggtattggagatcgcagctgtcgtggcacagccagtgggaaccgtgtacgtgtgattcgg

SEQ ID NO: 25107 - DNA, 2040 bp, Muscodor strobelii
  misc_feature: SGI cDNA ID NO. 568567
  misc_feature: Encodes the peptide sequence at SEQ ID NO 25108
atggacgctgtagcaaatgctagctcagccatcttcactgtcgctcctgctcagttgatacagcccatcatgtacagcttcacgtccttgttgctcctaggcagttatgccatcaattctgttttggggcgtcccgacgcttcacagatacgacgaaatcaattgatgctgaaacgtgctgtctctgacttcattactactgaggagccaattgctttggcccagatattgtgcaatattggcgcgaatggctgtcacgctggaggttttgcctcggggctagtatctgcgtcaccatcgctctcgaaccctgattattactatacatggactagagattcgtcactcgtattcaaggctttagttgagcggttcacaacgactgcctatgatgccagcctgcaaacacagattgagaattttattattgccgaggcaaaacagcaaacggtatccaatccttcaggttctctatcagatggtacgggtctcggcgagcccaaattcaaccctgatgatagtgcttttggtatgtataaagatggcttgcttagcactggttcttggggtcggccacagcgcgatggccctgcacttcgtgccattgccatgattgactacgccaattggctagtgagcaatggttacacatcgacggcatctagcctagtatggcctgtcattcgcaatgatctagcttacgttgcgcagtactggaactcaacaggcttcgacttatgggaagaggtttcagggagctcttttttcacgactgcagttcagcatcggacacttgttcaagggagcaaccttgctaagtctttgggaacgacctgcactgcttgcgctgccatcgcccctcaaatcctttgcttcttgcagtcttattggtcatcgtctggtggatatgtggtatccaatatcaatgtgaacaatggtcgaagtggaaaagatgccgcctcggttctcgcatcaattcacagttttgacccatccctcggctgcgatgcaaacacctttcaaccatgtagtgatcgagcattggccaatcataaggcatatgtcgatgcttttcgatccatctacacaatcaactccggcattggtgctggtggtgccgtatctgtaggccgttacgccgaagatacctactacaatggaaatccatggtatcttaatacgctcgccgctgccgagcagctctatgatgcactctatgtgtggcagagctccaaatctattaccgtgacatctacttccttaccattcttccaagctctcgtttcgggtgttacggcaggcacatacgcctccacttctacaacttacaccaacatctataatgctgttttcttatatgccgatggcttcgttggaaaagtgcagacatatgcaatgacaaatggctccctgaatgagcaatttgatcgcaacactggtgctcccctgtctgctagagatcttacctggtcttatgcagccttcttgacggctgcagctcgccgcgccggtgttgtgcctgcggggtgggcagggtctcctgcttcgtcagctacttctttgcctggtggctgttccgcgaccacgcaagctggttcttattcgacagcgacattcgcatcattcccagcgggccaaacttctgtgggtggcggaacgacaaccactacacacacaacgccaacagtgacccccacttccacttcgaccaccggctgtgttcaagcaacggctgtcgctataacttttaacgagaagaagacaacgactttcggtcaaacggtgaagattactggaaacattgctgcgctctccaactgggaccctaattcggcaattgccctcagcgcatcacaatatacatcttccaatccgctgtggagcgttactatcacgctcgcagctggtcaagtcattcaatacaagtatatcgtacagaatactgatgggtcaatcacttgggaggctgatccgaatcacacgtacacggttcccactggctgtgccacgacagctgcgatctccaatacctggcaatag

SEQ ID NO: 25108 - protein, 679 aa, Muscodor strobelii
  misc_feature: SGI Peptide ID NO. 568567
  misc_feature (578)..(674): Pfam Id: PF00686 Pfam Desc: Starch binding domain
  misc_feature (70)..(500): Pfam Id: PF00723 Pfam Desc: Glycosyl hydrolases family 15
  misc_feature (60)..(679): NCBI GI: 119497739 Blast Desc: Glycosyl hydrolase, family 15, [Neosartorya fischeri NRRL 181] gi|119413791|gb|EAW23730.1| Glycosyl hydrolase, family 15, [Neosartorya fischeri NRRL 181]
  misc_feature (19)..(679): NCBI GI: 261353063 Blast Desc: glucoamylase [Verticillium albo-atrum VaMs.102]
  misc_feature (55)..(679): NCBI GI: 49237635 Blast Desc: glucoamylase [Aspergillus ficuum]
  misc_feature (64)..(679): NCBI GI: 212538175 Blast Desc: glucan 1,4-alpha-glucosidase, [Penicillium marneffei ATCC 18224] gi|210068985|gb|EEA23076.1| glucan 1,4-alpha-glucosidase, [Penicillium marneffei ATCC 18224]
  misc_feature (17)..(679): NCBI GI: 157837372 Blast Desc: glucoamylase [synthetic construct]
  misc_feature (55)..(679): NCBI GI: 145235763 Blast Desc: glucan 1,4-alpha-glucosidase glaA-Aspergillus niger gi|59799159|sp|P69327.1|AMYG_ASPAW RecName: Full=Glucoamylase; AltName: Full=Glucan 1,4-alpha-glucosidase; AltName: Flags: G1 G1
  misc_feature (55)..(679): NCBI GI: 49615615 Blast Desc: glucoamylase [Aspergillus niger]
  misc_feature (54)..(679): NCBI GI: 255939424 Blast Desc: Pc16g00620 [Penicillium chrysogenum Wisconsin 54-1255] gi|211585104|emb|CAP92732.1| Pc16g00620 [Penicillium chrysogenum Wisconsin 54-1255]
  misc_feature (60)..(679): NCBI GI: 12666724 Blast Desc: glucoamylase [Talaromyces emersonii]
  misc_feature (54)..(679): NCBI GI: 169786471 Blast Desc: [Aspergillus oryzae RIB40] gi|94730359|sp|P36914.2|AMYG_ASPOR RecName: Full=Glucoamylase; AltName: Full=Glucan 1,4-alpha-glucosidase; AltName: Flags:
  misc_feature (24)..(679): SWISSPROT Homolog: EC 3.2.1.3 Glucan 1,4-alpha-glucosidase
MDAVANASSAIFTVAPAQLIQPIMYSFTSLLLLGSYAINSVLGRPDASQIRRNQLMLKRAVSDFITTEEPIALAQILCNIGANGCHAGGFASGLVSASPSLSNPDYYYTWTRDSSLVFKALVERFTTTAYDASLQTQIENFIIAEAKQQTVSNPSGSLSDGTGLGEPKFNPDDSAFGMYKDGLLSTGSWGRPQRDGPALRAIAMIDYANWLVSNGYTSTASSLVWPVIRNDLAYVAQYWNSTGFDLWEEVSGSSFFTTAVQHRTLVQGSNLAKSLGTTCTACAAIAPQILCFLQSYWSSSGGYVVSNINVNNGRSGKDAASVLASIHSFDPSLGCDANTFQPCSDRALANHKAYVDAFRSIYTINSGIGAGGAVSVGRYAEDTYYNGNPWYLNTLAAAEQLYDALYVWQSSKSITVTSTSLPFFQALVSGVTAGTYASTSTTYTNIYNAVFLYADGFVGKVQTYAMTNGSLNEQFDRNTGAPLSARDLTWSYAAFLTAAARRAGVVPAGWAGSPASSATSLPGGCSATTQAGSYSTATFASFPAGQTSVGGGTTTTTHTTPTVTPTSTSTTGCVQATAVAITFNEKKTTTFGQTVKITGNIAALSNWDPNSAIALSASQYTSSNPLWSVTITLAAGQVIQYKYIVQNTDGSITWEADPNHTYTVPTGCATTAAISNTWQ

SEQ ID NO: 25109 - DNA, 2199 bp, Muscodor strobelii
  misc_feature: SGI EST ID NO. CUFF.59156.1
  misc_feature: Variant of the nucleotide sequence at SEQ ID NO 25107
cgatggccctgcacttcgtgccattgccatgattgactacgccaattggctagtgagcaatggttacacatcgacggcatctagcctagtatggcctgtcattcgcaatgatctagcttacgttgcgcagtactggaactcaacaggcttcgacttatgggaagaggtttcagggagctcttttttcacgactgcagttcagcatcggacacttgttcaagggagcaaccttgctaagtctttgggaacgacctgcactgcttgcgctgccatcgcccctcaaatcctttgcttcttgcagtcttattggtcatcgtctggtggatatgtggtatccaatatcaatgtgaacaatggtcgaagtggaaaagatgccgcctcggttctcgcatcaattcacagttttgacccatccctcggctgcgatgcaaacacctttcaaccatgtagtgatcgagcattggccaatcataaggcatatgtcgatgcttttcgatccatctacacaatcaactccggcattggtgctggtggtgccgtatctgtaggccgttacgccgaagatacctactacaatggaaatccatggtatcttaatacgctcgccgctgccgagcagctctatgatgcactctatgtgtggcagagctccaaatctattaccgtgacatctacttccttaccattcttccaagctctcgtttcgggtgttacggcaggcacatacgcctccacttctacaacttacaccaacatctataatgctgttttcttatatgccgatggcttcgttggaaaagtgcagacatatgcaatgacaaatggctccctgaatgagcaatttgatcgcaacactggtgctcccctgtctgctagagatcttacctggtcttatgcagccttcttgacggctgcagctcgccgcgccggtgttgtgcctgcggggtgggcagggtctcctgcttcgtcagctacttctttgcctggtggctgttccgcgaccacgcaagctggttcttattcgacagcgacattcgcatcattcccagcgggccaaacttctgtgggtggcggaacgacaaccactacacacacaacgccaacagtgacccccacttccacttcgaccaccggctgtgttcaagcaacggctgtcgctataacttttaacgagaagaagacaacgactttcggtcaaacggtgaagattactggaaacattgctgcgctctccaactgggaccctaattcggcaattgccctcagcgcatcacaatatacatcttccaatccgctgtggagcgttactatcacgctcgcagctggtcaagtcattcaatacaagtatatcgtacagaatactgatgggtcaatcacttgggaggctgatccgaatcacacgtacacggttcccactggctgtgccacgacagctgcgatctccaatacctggcaatagtctttgacgccaaattttatacgccatgaatgttgactttcgaatagagtattgttaatgatgatagggatgataatgtagagttcgcatacatgggagatggaaaaaagaacatccggcagctagtaacaatagatagaatcgtcaagtatttttgattttatcttatccttactctattctatggcctttttgatccgcgaaaatcacctcttgttcgctatctcctctagtttttggataagtgtatcaattacccagtcgaacattgcaggcatatcaatgtccaatcgcgactcctcaccttgatcttctccacctaacgccgaaacacttgatggcgacaagatcgccttttccttcaggaccttctcactcaagactccctccacattgccctcttcaaacaaccaggcgtgagactctgcatagttgggccacacaaccttatccacataccccggcggatcagcccaaaagccctctagtgtcacatacccatctcttgcatcacgacgctgagttgccttttgtctgctaactgtgaggagaaacttgatatcgataagttcctccgtgatgcgcttgagcgggggctcacagccaaagagtagaaacccgtcgaacaggcagacacgtaagttgctatctggtgatgagaatatggcgtgcccaggctggccaggggccaaccatgcttcgacgcgagcttttgctgaagctatggcggagtctgggac

SEQ ID NO: 25110 - DNA, 246 bp, Muscodor strobelii
  misc_feature: SGI cDNA ID NO. 568568
  misc_feature: Encodes the peptide sequence at SEQ ID NO 25111
atggcctcgcctaaaggcaatgtcaagcttgaccaggaaggtcatcatcaaggagaaagccaaccaacccagcattcatcgtgtatgcttcagcaatatctcgagcaggaaactagtacagcggagtgcatacgcttcaatgcaaagggagcctctgcatcggagagtcgagagaaagtgtaccgcgacaaggctcgcaaagccatcgatgattttgatcgtgcatttaatggacgttccaagtaa

SEQ ID NO: 25111 - protein, 81 aa, Muscodor strobelii
  misc_feature: SGI Peptide ID NO. 568568
MASPKGNVKLDQEGHHQGESQPTQHSSCMLQQYLEQETSTAECIRFNAKGASASESREKVYRDKARKAIDDFDRAFNGRSK

SEQ ID NO: 25112 - DNA, 2943 bp, Muscodor strobelii
  misc_feature: SGI cDNA ID NO. 568569
  misc_feature: Encodes the peptide sequence at SEQ ID NO 25113
atggcaacgcacgacaggccaaatggcaaatcgatgacatttacgcagcaccagccttctgacttctgtcgacattttcttttcatgcttgcgaggggagattatgacctggggactataccacggcagacaattaccggcatacttaagccagacaaaagtatgatcccgctactatcaaacattctgaaagcagcaggcaagcacgtatcgatgaccctggcaagtggcttattgcagttagcgattgcaaactatagggattgctttcgcctacgagttcaaggtatcgtagagtcagaagatagacttgaggatgcgctcgagcaatcgagtgttgacgacaaaactggcttcgagttctatacgattatccgcctcctcgaaacgcatctatgtgatgtcaacaatattgctattgataccgaggacgcgttttatggatgtagcaaacagacgccgctcgaggttgcctcaagcataaggagcagcgctctcgttgtagttcttctgagctatggagccgatccgaacaagacttactcgccgacacaaccgagtaccggcgcactgtttgcgtactccagggggcttagcagcaaatacagagcagtttctgacgtaaagagctttgacataccgatcaagctcttgaaggcaggattcagaattaattctcgatttgtgcgagatttgagtagccatgacgagtttttgttcccgcaaattatccatgaactcatccctactcatcatgaagctcttttagctaaagaaattggagtgtgggtatatattgtagctatctattctaaggaccacgtcgggtcgactctggtggagagtacggtcaacgattgtaagaatcgtcataaatcagatagctgcatagcccgtttccgggacaagatcgatgcagcgctattgcttgccatggcagaggggaagcagaaaacaagtctcagcttatttccacattcaaaaatgtcccggactaaatgcccagattcgcgtttattgagcgccgcaattcggggcaagaacgcttcactgatcgatttcgtaatgtcgaagaagccgaatatcaatccaactcctcatagattacctacggctgatggctatgaggacccgacccataaacccaccacaccattagcggaaatcatacgatccggcaatgactctcttctcggccttttttcggatgcgggtgttctcacatcctcccgtggcgaccgcttttacactgccctcgatgctgctgttgacactaagaacattggcgttgtaagactgttatgtgatagctcacctgctttggagctacagtcgtcgacgagactggttagaacggccgcagcaattcgatccagtggcgaggatattgcagtctttctcattgaaagaggagcgttaattcattatagtcgcgagcatctaacatatgaggagatcaaaggcagccccacgataacacagaatctactaaaacatggatgccgcatgttgttgaaaatacactatagccgtgatctggtcgagttttgcgagtttctccaattggatgacctcgatatgctgcgagagatcttggcttctatacaagacgggtactcctacgaccctttgcggtccggactgtggaatcccaatcgatcaataataatggatcgtgatcatttttcaaaaatcgatgaaaagcagctcctttcaatgagtcccttagttaaattcttagaggatgacttcaagaggaatatgatcttggactcacgcgttgcaaataacgatttcctcacgatctgcctcacgacggctatattctacaataagcataatcttgttagcattctcattgaaagaggcgccgatccggggcattcctgggctatacaaaccgcttcccgatatcaaccagaaatgttgacatgtctgcttcatgcatcacgttccaaatcgcaggatcgcgtggatcactggctggagtgcatgcatgatgcaatagcgagagaagatatgaggaccctactcgttctaatcgagcatcagaagataagcggcttaccgataacccgttcacgaatgcaaaaacttctaggtgttgcgttgctacgtcggaattccaacatctgtcgcattcttctcgatattggctgcaacccaaatgagatcgcgtattatgaagcttcgtgtcatattcctatccatcaaactccactacttcaagcaataggtagcggcgatagagtattagttgaacttttcattgagcgaggcgcaaagatcgacggtccaatcccgagattatgtcaatacacgccgctccagaaggccgcatcgataggcaatctagagctagtccagctgctacttgagcatggcgcagatatcaatgcagagcctgcaattacgcttggtggtacggtcttgcaattcgcggctatttcaggcaattgcaaattagcagcagagctcttaacaagaggggctttgttacacgcgcttccatccaagactggaggtagatggcctatagaaggtgctgctgaacatggtcgtctcgacatgatccagttcctctggacagctaaccaggagactatctttatacagagtggcgagaatgggtatcaagagaggcatttcaaaaaggcgatgagactcgcagcggagaatggccattttggctgtaggaacttgcttgcgaagctcactggattgccagagaatgccactgatataccaccgttgatatcacccatatacgtggactggccaactgccagcaattccattggacttaagatccccgcagctcctgctgaccctagcactaatccctctaaggatgaattggataatagcgatgccgatatatgggactacggagaccgttgtagggagatattatattcgatagacaacgaagattcggattga

SEQ ID NO: 25113 - protein, 980 aa, Muscodor strobelii
  misc_feature: SGI Peptide ID NO. 568569
  misc_feature (771)..(803): Pfam Id: PF00023 Pfam Desc: Ankyrin repeat
  misc_feature (588)..(902): NCBI GI: 169599947 Blast Desc: SNOG_02801 [Phaeosphaeria nodorum SN15] gi|160705353|gb|EAT89532.2| SNOG_02801 [Phaeosphaeria nodorum SN15]
  misc_feature (738)..(901): NCBI GI: 240110365 Blast Desc: ankyrin repeat containing protein [Coccidioides posadasii C735 delta SOWgp]
  misc_feature (738)..(905): NCBI GI: 256731581 Blast Desc: [Nectria haematococca mpVI 77-13-4]
  misc_feature (378)..(897): NCBI GI: 238843722 Blast Desc: ankyrin repeat protein [Microsporum canis CBS 113480]
  misc_feature (700)..(895): NCBI GI: 115492243 Blast Desc: [Aspergillus terreus NIH2624] gi|114197609|gb|EAU39309.1| [Aspergillus terreus NIH2624]
  misc_feature (678)..(913): NCBI GI: 145601345 Blast Desc: MGG_08794 [Magnaporthe grisea 70-15] gi|145009348|gb|EDJ94059.1| MGG_08794 [Magnaporthe grisea 70-15]
  misc_feature (756)..(861): NCBI GI: 119180517 Blast Desc: CIMG_08884 [Coccidioides immitis RS]
  misc_feature (727)..(904): NCBI GI: 256730275 Blast Desc: NECHADRAFT_82615 [Nectria haematococca mpVI 77-13-4]
  misc_feature (700)..(901): NCBI GI: 258565299 Blast Desc: [Uncinocarpus reesii 1704] gi|237907095|gb|EEP81496.1| [Uncinocarpus reesii 1704]
  misc_feature (677)..(905): NCBI GI: 145252920 Blast Desc: An16g06710 [Aspergillus niger] gi|134083528|emb|CAK47005.1| protein product [Aspergillus niger]
MATHDRPNGKSMTFTQHQPSDFCRHFLFMLARGDYDLGTIPRQTITGILKPDKSMIPLLSNILKAAGKHVSMTLASGLLQLAIANYRDCFRLRVQGIVESEDRLEDALEQSSVDDKTGFEFYTIIRLLETHLCDVNNIAIDTEDAFYGCSKQTPLEVASSIRSSALVVVLLSYGADPNKTYSPTQPSTGALFAYSRGLSSKYRAVSDVKSFDIPIKLLKAGFRINSRFVRDLSSHDEFLFPQIIHELIPTHHEALLAKEIGVWVYIVAIYSKDHVGSTLVESTVNDCKNRHKSDSCIARFRDKIDAALLLAMAEGKQKTSLSLFPHSKMSRTKCPDSRLLSAAIRGKNASLIDFVMSKKPNINPTPHRLPTADGYEDPTHKPTTPLAEIIRSGNDSLLGLFSDAGVLTSSRGDRFYTALDAAVDTKNIGVVRLLCDSSPALELQSSTRLVRTAAAIRSSGEDIAVFLIERGALIHYSREHLTYEEIKGSPTITQNLLKHGCRMLLKIHYSRDLVEFCEFLQLDDLDMLREILASIQDGYSYDPLRSGLWNPNRSIIMDRDHFSKIDEKQLLSMSPLVKFLEDDFKRNMILDSRVANNDFLTICLTTAIFYNKHNLVSILIERGADPGHSWAIQTASRYQPEMLTCLLHASRSKSQDRVDHWLECMHDAIAREDMRTLLVLIEHQKISGLPITRSRMQKLLGVALLRRNSNICRILLDIGCNPNEIAYYEASCHIPIHQTPLLQAIGSGDRVLVELFIERGAKIDGPIPRLCQYTPLQKAASIGNLELVQLLLEHGADINAEPAITLGGTVLQFAAISGNCKLAAELLTRGALLHALPSKTGGRWPIEGAAEHGRLDMIQFLWTANQETIFIQSGENGYQERHFKKAMRLAAENGHFGCRNLLAKLTGLPENATDIPPLISPIYVDWPTASNSIGLKIPAAPADPSTNPSKDELDNSDADIWDYGDRCREILYSIDNEDSD

SEQ ID NO: 25114 - DNA, 992 bp, Muscodor strobelii
  misc_feature: SGI EST ID NO. CUFF.59077.0
  misc_feature: Variant of the nucleotide sequence at SEQ ID NO 25112
agacaattaccggcatacttaagccagacaaaagtatgatcccgctactatcaaacattctgaaagcagcaggcaagcacgtatcgatgaccctggcaagtggcttattgcagttagcgattgcaaactatagggattgctttcgcctacgagttcaaggtatcgtagagtcagaagatagacttgaggatgcgctcgagcaatcgagtgttgacgacaaaactggcttcgagttctatacgattatccgcctcctcgaaacgcatctatgtgatgtcaacaatattgctattgataccgaggacgcgttttatggatgtagcaaacagacgccgctcgaggttgcctcaagcataaggagcagcgctctcgttgtagttcttctgagctatggagccgatccgaacaagacttactcgccgacacaaccgagtaccggcgcactgtttgcgtactccagggggcttagcagcaaatacagagcagtttctgacgtaaagagctttgacataccgatcaagctcttgaaggcaggattcagaattaattctcgatttgtgcgagatttgagtagccatgacgagtttttgttcccgcaaattatccatgaactcatccctactcatcatgaagctcttttagctaaagaaattggagtgtgggtatatattgtagctatctattctaaggaccacgtcgggtcgactctggtggagagtacggtcaacgattgtaagaatcgtcataaatcagatagctgcatagcccgtttccgggacaagatcgatgcagcgctattgcttgccatggcagaggggaagcagaaaacaagtctcagcttatttccacattcaaaaatgtcccggactaaatgcccagattcgcgtttattgagcgccgcaattcggggcaagaacgcttcactgatcgatttcgtaatgtcgaagaagccgaatatcaatccaactcctcatagattacctacggctgat

SEQ ID NO: 25115 - DNA, 1878 bp, Muscodor strobelii
  misc_feature: SGI cDNA ID NO. 568570
  misc_feature: Encodes the peptide sequence at SEQ ID NO 25116
atggagttcggtagcatattcagcgtttctcatgcgccggattattttccaccacctataggtgatgataagctacagtctcataggatcgaatcactggtccctgaaccatcgtcgtcgctcgccttcactgttggcacatcacgacaggatatcgctggtggaaaggctcctacagcccgtcgatctaggtacggaaatctgaactgggatcggcacaaagctcgacttaatgaactgtacatggtcgaaaacaaaagtcttaatgaggtcgccgaaatcatgagagagtatcattcattcaatgcatcggttaagatctacaaggagaaattcaaagaatggaattggcaaaaaaacttgcctgccacgcaggctgctttcatggtgaaaaaagcgaaaaggcgaaagaatgagggtaaagatacggtattctcatacggcggaagcatctggacgagcgagaaagcccagaaaagtctgtcacgaaagaagatatgctacgaagacatagacgtcgatacaccgacggctggcgtcagttacgacacacccaaaactatggctacttctcccgatcaaagcaaagatatgccaacttgtggaaacacgagagatgcagattcttcggtgcagaatcggcatcgagataagtttccactgttacacgcagggaagaagaactgggtctggagcagcacgggcagacgtctaaagccaggtgaaccgatatttttgaagcgagggctatgggtctgtgatagtagaggcaaccctctctcacgaccagccgagcactcatttagactgcgatcgcgatctggccgcgatagattggtcaagtttccctcttccttggaaaacaggtcaacaaggtcaatcagcccttcggcgcctgattcagtattagaaatgaatgaagatgcatttggagataatgcggcgaatttgctggaagctctgcttttagattcgagagaatctgctcgggttgatcttctcgcaattggcagagcagcacaagcccgtattgattccggagaaggcccaattgccgaaagaatgatgctgcaagctattgagggctatagatcactcctcgatattctgcacgacgatgccaacgaactcttatttaagttatcgactttctacggcgagaaccaccgtatgcaggcggctaaggagatcactatccgaagtgtcacgaatatgctagtagacgaggagcatcccctcaatttggactttgctttagccattgctcgatcgcatgtttctattagagacgctgatacagagcgtcttctcctaaaaattgtgcaattctgcagaaattttcctcgcgaccgagagacgcagtacatacgcgcatacgcggagctactgagactctaccatgaatttggcactgccaacatccatgtgggcacattcatacaggctcaaattattctcgatgaaatacttctgaagtatgattgggatcctgagaatctcaggtcgctggaacttatagaagcttgcatgcagcttgctcaaggtcttctgagggcagatttccatgaggaagcagaggagatcttcaggaagatctcagatacggcagaagccatgtatgataaggatgagcgggtagtgtggatcttgattacaaccgggcttggatatcaaagttacgggaaatgggaggatgcggcaccatggttcgagcgcgcacttatgcttgctctgttgttatgggatggcgatgatgctatcgtgaagtcgcttcaaaatgccatcgatcaaaagcactttgtttatttgtcagatgaaggacggccattcgagaccttattcagggcttctagcatgctccaaacgccctcaagctga

SEQ ID NO: 25116 - protein, 625 aa, Muscodor strobelii
  misc_feature: SGI Peptide ID NO. 568570
  misc_feature (70)..(195): NCBI GI: 240110385 Blast Desc: CPC735_064170 [Coccidioides posadasii C735 delta SOWgp]
  misc_feature (29)..(160): NCBI GI: 46110607 Blast Desc: FG02185.1 [Gibberella zeae PH-1]
  misc_feature (69)..(244): NCBI GI: 156041192 Blast Desc: SS1G_11575 [Sclerotinia sclerotiorum 1980] gi|154695958|gb|EDN95696.1| SS1G_11575 [Sclerotinia sclerotiorum 1980]
  misc_feature (15)..(171): NCBI GI: 145603809 Blast Desc: [Magnaporthe grisea 70-15] gi|145011959|gb|EDJ96615.1| [Magnaporthe grisea 70-15]
  misc_feature (71)..(196): NCBI GI: 85109709 Blast Desc: NCU05687 [Neurospora crassa OR74A] gi|28924699|gb|EAA33813.1| [Neurospora crassa OR74A]
  misc_feature (70)..(223): NCBI GI: 145605984 Blast Desc: MGG_06762 [Magnaporthe grisea 70-15] gi|145013719|gb|EDJ98360.1| MGG_06762 [Magnaporthe grisea 70-15]
  misc_feature (437)..(600): NCBI GI: 240110385 Blast Desc: CPC735_064170 [Coccidioides posadasii C735 delta SOWgp]
  misc_feature (66)..(166): NCBI GI: 164425649 Blast Desc: NCU06072 [Neurospora crassa OR74A] gi|157071008|gb|EAA30599.2| [Neurospora crassa OR74A]
  misc_feature (69)..(145): NCBI GI: 116197018 Blast Desc: CHGG_05107 [Chaetomium globosum CBS 148.51] gi|88181020|gb|EAQ88488.1| CHGG_05107 [Chaetomium globosum CBS 148.51]
  misc_feature (68)..(186): NCBI GI: 116191293 Blast Desc: [Chaetomium globosum CBS 148.51] gi|88181277|gb|EAQ88745.1| [Chaetomium globosum CBS 148.51]
MEFGSIFSVSHAPDYFPPPIGDDKLQSHRIESLVPEPSSSLAFTVGTSRQDIAGGKAPTARRSRYGNLNWDRHKARLNELYMVENKSLNEVAEIMREYHSFNASVKIYKEKFKEWNWQKNLPATQAAFMVKKAKRRKNEGKDTVFSYGGSIWTSEKAQKSLSRKKICYEDIDVDTPTAGVSYDTPKTMATSPDQSKDMPTCGNTRDADSSVQNRHRDKFPLLHAGKKNWVWSSTGRRLKPGEPIFLKRGLWVCDSRGNPLSRPAEHSFRLRSRSGRDRLVKFPSSLENRSTRSISPSAPDSVLEMNEDAFGDNAANLLEALLLDSRESARVDLLAIGRAAQARIDSGEGPIAERMMLQAIEGYRSLLDILHDDANELLFKLSTFYGENHRMQAAKEITIRSVTNMLVDEEHPLNLDFALAIARSHVSIRDADTERLLLKIVQFCRNFPRDRETQYIRAYAELLRLYHEFGTANIHVGTFIQAQIILDEILLKYDWDPENLRSLELIEACMQLAQGLLRADFHEEAEEIFRKISDTAEAMYDKDERVVWILITTGLGYQSYGKWEDAAPWFERALMLALLLWDGDDAIVKSLQNAIDQKHFVYLSDEGRPFETLFRASSMLQTPSS

SEQ ID NO: 25117 - DNA, 534 bp, Muscodor strobelii
  misc_feature: SGI EST ID NO. CUFF.59095.0
  misc_feature: Variant of the nucleotide sequence at SEQ ID NO 25115
cagatacagtcttggatatctatggcaatactcctgaatagattcaaaacgcgattttgaggcctacagacacttcaactttcgaacatgttttcttgtgctccggtaatattacacgcaggctacaatttcgattggcattcttgcggtcgcgtaaataatggagttcggtagcatattcagcgtttctcatgcgccggattattttccaccacctataggtgatgataagctacagtctcataggatcgaatcactggtccctgaaccatcgtcgtcgctcgccttcactgttggcacatcacgacaggatatcgctggtggaaaggctcctacagcccgtcgatctaggtacggaaatctgaactgggatcggcacaaagctcgacttaatgaactgtacatggtcgaaaacaaaagtcttaatgaggtcgccgaaatcatgagagagtatcattcattcaatgcatcggttaagatctacaaggagaaattcaaagaatggaattggcaaaaaaacttgcctgccacgca

SEQ ID NO: 25118 - DNA, 1977 bp, Muscodor strobelii
  misc_feature: SGI cDNA ID NO. 568571
  misc_feature: Reduced expression when VOC is produced
  misc_feature: Encodes the peptide sequence at SEQ ID NO 25119
atggacgcagctgccatcgaggaggcgaacaagcttcgtgtctcaatgggcatgaagccgctgcccgtccctggcgccagcgccccctccgatggcccccagttcagagacaaagatgacgccgctgacggcgaagagcccgcgagcacactagagacgcgagaggctgcttcctacggcaactacaagaaggtccaggatgccgaggtcgccaagaagcgccgtgaagagaaagctgccgccgtccggaaggcccgcgacgccgccaagcgtgccgagaagctcgagggcaaggggctcggcgaactcgacggcgacgatgtagatgccaagtcttggttgataggacagaagaagcgccagaagaagatcgacgccgaacgaaagaaggacgatgaagccacagccgcccaaaaggcagccgccgccgccgtgcagtacacatccaaagaccttgctggcgtcaaagtccgtcacgaggttgacgccttcgaggacggagacgagcagatcctgaccctcgccgacaaggatgttctggccgaggacgacgacggcgacgagctggagaacctcgatctacgggacagggagaaactcaacgagaaacttaatctgaagaagaaaaagccagtgtacgacccgcacgagatcaacgagaccggtgaatcgaaccttttagcacaatacgacgacgagatcagcggcaaaaagatcaacacattcactctagatgggcaaggcaacacgacacaatctagcggcatctcccaaatgcagagactggctacccagaaccagaagattagcttggacttcctcgaagacctccagcccgcctcggactatatggacgtgtcagagatcaaagtaaagaaaccgaaaaagaagaaatccaaagctacgagacagcgacctatggacgacgatgacatcttaaatgtgccgattgcagatgatcagtctatggatatcgattcaggcgcaacattcaccaacaagaaacggaagacggaggagtcagatgtggtggatgacgacgatctgcaggctgcactcgccgtacaacggcgaggtgccttgaagaagcggaagaaaatgcgccccgaagatattgcgcgccaaatccgcgaggatgctgacaaacctgaacctgacaacgagaccaagcaagatgctgggctcgtcattgatgagatttccgaattcgtcactgcattgacgaaggaggacatcgagaagcgtaaagccaagactgcgaagtcaccacaacccgacaccgtcactgccatggaaaatgagtctgacgaggatcagccgatgaaggacggtgacgatgtggaggacggagatgaagctagaaccgaacgcgaagcgtctgcacaggccgaggtcacggctacaggcgtcgaagaggaaaagactcttggcactggtatcggcacgacattacaactcctcagagagcgacgtttagttagcgagacaggttcgggcgaactcaatgatcagttccgtagcaagcagtccttcctcgcagagaagaaaaggcgcatggaacagatggaccaggctactaagaaccaacgtgaacgcgatcgccaaggagggcggcttgaccgcatgtcagtacaggagagggaagcatgggcacgccagcaaaacagcgtccgcgaccaacaagcatctcgccaattggccgatctctttaaagactataagccaaacgtcgatctcaaatacgtcgacgatgatggccgattgctgaattcgaaagacgcattcaagcacttgagtcatgccttccacggcaaggggtcaggaaagggcaaaaccgacaagcgtctcaagaagatcgaagatgaaaaacggcacgaagctcagagcgtattagacgccagccagaacgttggcatgagttctgcgacggctcaccaaacgaaaactcgacgggaagcaggcgtcagactcgcgtaa

SEQ ID NO: 25119 - protein, 658 aa, Muscodor strobelii
  misc_feature: SGI Peptide ID NO. 568571
  misc_feature (1)..(635): Pfam Id: PF03343 Pfam Desc: SART-1 family
  misc_feature (570)..(635): Pfam Id: PF03343 Pfam Desc: SART-1 family
  misc_feature (6)..(245): Pfam Id: PF03343 Pfam Desc: SART-1 family
  misc_feature (2)..(658): NCBI GI: 154316438 Blast Desc: BC1G_04150 [Botryotinia fuckeliana B05.10] gi|150845950|gb|EDN21143.1| BC1G_04150 [Botryotinia fuckeliana B05.10]
  misc_feature (1)..(658): NCBI GI: 256732941 Blast Desc: NECHADRAFT_92512 [Nectria haematococca mpVI 77-13-4]
  misc_feature (2)..(655): NCBI GI: 156043223 Blast Desc: SS1G_10614 [Sclerotinia sclerotiorum 1980] gi|154695002|gb|EDN94740.1| SS1G_10614 [Sclerotinia sclerotiorum 1980]
  misc_feature (1)..(658): NCBI GI: 116199625 Blast Desc: CHGG_07968 [Chaetomium globosum CBS 148.51] gi|88179247|gb|EAQ86715.1| CHGG_07968 [Chaetomium globosum CBS 148.51]
  misc_feature (1)..(658): NCBI GI: 164427980 Blast Desc: NCU11222 [Neurospora crassa OR74A] gi|157071960|gb|EDO65333.1| NCU11222 [Neurospora crassa OR74A]
  misc_feature (1)..(658): NCBI GI: 46123803 Blast Desc: FG06279.1 [Gibberella zeae PH-1]
  misc_feature (1)..(658): NCBI GI: 16416060 Blast Desc: conserved [Neurospora crassa]
  misc_feature (1)..(658): NCBI GI: 39973517 Blast Desc: MGG_01095 [Magnaporthe grisea 70-15] gi|145017942|gb|EDK02221.1| MGG_01095 [Magnaporthe grisea 70-15]
  misc_feature (1)..(657): NCBI GI: 261353062 Blast Desc: conserved [Verticillium albo-atrum VaMs.102]
  misc_feature (2)..(658): NCBI GI: 258567424 Blast Desc: conserved [Uncinocarpus reesii 1704] gi|237905902|gb|EEP80303.1| conserved [Uncinocarpus reesii 1704]
  misc_feature: Useful for introducing or modulating the production of volatile compounds
MDAAAIEEANKLRVSMGMKPLPVPGASAPSDGPQFRDKDDAADGEEPASTLETREAASYGNYKKVQDAEVAKKRREEKAAAVRKARDAAKRAEKLEGKGLGELDGDDVDAKSWLIGQKKRQKKIDAERKKDDEATAAQKAAAAAVQYTSKDLAGVKVRHEVDAFEDGDEQILTLADKDVLAEDDDGDELENLDLRDREKLNEKLNLKKKKPVYDPHEINETGESNLLAQYDDEISGKKINTFTLDGQGNTTQSSGISQMQRLATQNQKISLDFLEDLQPASDYMDVSEIKVKKPKKKKSKATRQRPMDDDDILNVPIADDQSMDIDSGATFTNKKRKTEESDVVDDDDLQAALAVQRRGALKKRKKMRPEDIARQIREDADKPEPDNETKQDAGLVIDEISEFVTALTKEDIEKRKAKTAKSPQPDTVTAMENESDEDQPMKDGDDVEDGDEARTEREASAQAEVTATGVEEEKTLGTGIGTTLQLLRERRLVSETGSGELNDQFRSKQSFLAEKKRRMEQMDQATKNQRERDRQGGRLDRMSVQEREAWARQQNSVRDQQASRQLADLFKDYKPNVDLKYVDDDGRLLNSKDAFKHLSHAFHGKGSGKGKTDKRLKKIEDEKRHEAQSVLDASQNVGMSSATAHQTKTRREAGVRLA

SEQ ID NO: 25120 - DNA, 4944 bp, Muscodor strobelii
  misc_feature: SGI EST ID NO. CUFF.59104.0
  misc_feature: Variant of the nucleotide sequence at SEQ ID NO 25118
gcagtgggagcgaggcttagttggggtagatttatagtggagaagtgcgctaaaggcagctactagagcactgtacatcgagatattcagcttatcagtgaccgacagcagttacatctggtccatccgcaaacattcctaccaagttcacacatccaaccactttccggttcccaacatcacgtcgccctcatcgccgaatacccgcgccatcgaactccgtatcgcattatatcatatcgtacctggccaacagcgaaaacacatttcacgatggacgcagctgccatcgaggaggcgaacaagcttcgtgtctcaatgggcatgaagccgctgcccgtccctggcgccagcgccccctccgatggcccccagttcagagacaaagatgacgccgctgacggcgaagagcccgcgagcacactagagacgcgagaggctgcttcctacggcaactacaagaaggtccaggatgccgaggtcgccaagaagcgccgtgaagagaaagctgccgccgtccggaaggcccgcgacgccgccaagcgtgccgagaagctcgagggcaaggggctcggcgaactcgacggcgacgatgtagatgccaagtcttggttgataggacagaagaagcgccagaagaagatcgacgccgaacgaaagaaggacgatgaagccacagccgcccaaaaggcagccgccgccgccgtgcagtacacatccaaagaccttgctggcgtcaaagtccgtcacgaggttgacgccttcgaggacggagacgagcagatcctgaccctcgccgacaaggatgttctggccgaggacgacgacggcgacgagctggagaacctcgatctacgggacagggagaaactcaacgagaaacttaatctgaagaagaaaaagccagtgtacgacccgcacgagatcaacgagaccggtgaatcgaaccttttagcacaatacgacgacgagatcagcggcaaaaagatcaacacattcactctagatgggcaaggcaacacgacacaatctagcggcatctcccaaatgcagagactggctacccagaaccagaagattagcttggacttcctcgaagacctccagcccgcctcggactatatggacgtgtcagagatcaaagtaaagaaaccgaaaaagaagaaatccaaagctacgagacagcgacctatggacgacgatgacatcttaaatgtgccgattgcagatgatcagtctatggatatcgattcaggcgcaacattcaccaacaagaaacggaagacggaggagtcagatgtggtggatgacgacgatctgcaggctgcactcgccgtacaacggcgaggtgccttgaagaagcggaagaaaatgcgccccgaagatattgcgcgccaaatccgcgaggatgctgacaaacctgaacctgacaacgagaccaagcaagatgctgggctcgtcattgatgagatttccgaattcgtcactgcattgacgaaggaggacatcgagaagcgtaaagccaagactgcgaagtcaccacaacccgacaccgtcactgccatggaaaatgagtctgacgaggatcagccgatgaaggacggtgacgatgtggaggacggagatgaagctagaaccgaacgcgaagcgtctgcacaggccgaggtcacggctacaggcgtcgaagaggaaaagactcttggcactggtatcggcacgacattacaactcctcagagagcgacgtttagttagcgagacaggttcgggcgaactcaatgatcagttccgtagcaagcagtccttcctcgcagagaagaaaaggcgcatggaacagatggaccaggctactaagaaccaacgtgaacgcgatcgccaaggagggcggcttgaccgcatgtcagtacaggagagggaagcatgggcacgccagcaaaacagcgtccgcgaccaacaagcatctcgccaattggccgatctctttaaagactataagccaaacgtcgatctcaaatacgtcgacgatgatggccgattgctgaattcgaaagacgcattcaagcacttgagtcatgccttccacggcaaggggtcaggaaagggcaaaaccgacaagcgtctcaagaagatcgaagatgaaaaacggcacgaagctcagagcgtattagacgccagccagaacgttggcatgagttctgcgacggctcaccaaacgaaaactcgacgggaagcaggcgtcagactcgcgtaatgcgtctggaaatcggatttgggaatggaatatcaaaggtgcttttacctgcccacctccacctgtactaagtgccttcttttagttaatagaatgctaacaaatgagcgcatcaagtctcttatcaatgttaggtgatgtctggtctcccatcgccttgtactactgactcgagataagcgtaagtctcgagcagctgatgaactgtcgatggagccattgttgcgctctattccaattgcgcgtatcctgccccgatttggaagacagctaacgcgcagttgcaacctgagtgaaagggactgccgagactgctttacgtacaaactggcaggatctttacctcaacgtttcatgatttgagtgccattctgaacggtgtaccatggaaaactccatcctcaatttcatgcgatgcgccagcgactttatggtttcgccgtgcggctgtcgattaatactcatttagggagctcacaattacctgcccttttcgcaacccctgctaacccaagtcagccttcgctagtctttagatcggatcgtgtgcctttgcgcatgtgcgaaacaattgggtaggctgattggcgctaattcggtattcctgttcctggcaaagtgggtcaatgtcacccaagctgttgaaacaatccttactacaactaccagctacccaattcggcctaacatattccccacgatgcttcaggtgcttgttcgtgtactatattcgtggtccatcctggccttttaggacccgcgagtctttataccgaggacagccacgcaatcttgcagtgcaactacgacgttaccctcttggggctgctgttgatatcgaaattcccgagccagggggcccatctaccgaagcttgagctgccttctccgcgagactggcccgtcagccgatgcatgagacaaggcgctctctccgttattacgccgattcctccactctagatagacaacaatttaggtaagtgcatagctcttatccgagcaatgtaaggctatgcaggactataacttctattcctatccgtctgatcttttagatcgtctcagatctttcccgagttggcgtttgtttctttgagctatcatgtaacgtctcctgagttcaagatatttgatagtcagacttacacactaggaaagaggcgaaaagaaggcagagtaaggtagagtatgaccttcaggagaactacaaatatgctatgatgctcgcttccaaaatatgcttttggatcacggccatcagcaacactcccgaccacgcccacagtccttgacggatcattcattccttgacggaaagcaattttcttgtaaatagtttacactccttgtttagtacatacttcgtggttatacagtccttcaacatgcttttcgcctctatctccgcttccgtcggccttatggctggccttgctgctgctattcccgctcgtgttcaccctcgtcagaactctgcacaaacagtcgtgtactggggtcagaatggtggaggcactattgagaacaacgatcttacaacctactgcacagctgaatccggcgtgaacattattgtccttgccttcttgtaccaatacggcaacggaaacaccattgcttccggcaccattggccaatcttgcttcattagcaacaccggcgagggccaaaactgcgaggctctctcggcggctatcacgacttgccagtcaaatggcgtcaaaatcattctttcgctcggcggtgccagcggagcgtactctctgtcttcggacgatgaagccagcgctatcggtacttatctctgggaggcgtacggtaacggcggtgccaacagcaccagtggaactgcccgccctcttggcagtgccttcgtcaacggcttcgactttgacatcgaggtccccaccggtcaggagtactacccggccatgatctccaccctgcgcacggctttcgctaccgactcggccaaccagtactacatcactggagcaccgcaatgtcctattccggagcccaatatgggaaaaatgatcgagggcgctcagttcgactacctctggcctcagttctacaacaataataactacacttacccctgcgctctacccatcaacggaaatgctcctttcaactacgacggctgggtcgacttcactgccggcaccccctcggctgatgctcagcttttcattggtgttcctgcttctccgctcggtgccaacggcgcggagaccggcgctacgtattacgctacgccggctcaacttgctgatattgttggcgagtacaagtcacatgaacgctttgctggcgtcatgatgtggtctgcgggattctccgacgctaatgtggtgaatgggtgtacttatgcccagaacacggcacgaatcctgtctactgggtcgccttgctgattcagccacctttcaacctgggtcagtgattcttagaagacttgcatggctcttttcgactaagtggtcgtctgccagcatggaaaaaaggggttctgtgggcgggttacattgatatcactagggattggcatctacggggttactttgcatattttggatgggttctgcattcttggggttatgattttgggattcttttctatgaatatatttttggttcaaatttcattactgaccgtgtactatgattgaactttcactgtaaggc

SEQ ID NO: 25121 - DNA, 1035 bp, Muscodor strobelii
  misc_feature: SGI cDNA ID NO. 568572
  misc_feature: Encodes the peptide sequence at SEQ ID NO 25122
atgcttttcgcctctatctccgcttccgtcggccttatggctggccttgctgctgctattcccgctcgtgttcaccctcgtcagaactctgcacaaacagtcgtgtactggggtcagaatggtggaggcactattgagaacaacgatcttacaacctactgcacagctgaatccggcgtgaacattattgtccttgccttcttgtaccaatacggcaacggaaacaccattgcttccggcaccattggccaatcttgcttcattagcaacaccggcgagggccaaaactgcgaggctctctcggcggctatcacgacttgccagtcaaatggcgtcaaaatcattctttcgctcggcggtgccagcggagcgtactctctgtcttcggacgatgaagccagcgctatcggtacttatctctgggaggcgtacggtaacggcggtgccaacagcaccagtggaactgcccgccctcttggcagtgccttcgtcaacggcttcgactttgacatcgaggtccccaccggtcaggagtactacccggccatgatctccaccctgcgcacggctttcgctaccgactcggccaaccagtactacatcactggagcaccgcaatgtcctattccggagcccaatatgggaaaaatgatcgagggcgctcagttcgactacctctggcctcagttctacaacaataataactacacttacccctgcgctctacccatcaacggaaatgctcctttcaactacgacggctgggtcgacttcactgccggcaccccctcggctgatgctcagcttttcattggtgttcctgcttctccgctcggtgccaacggcgcggagaccggcgctacgtattacgctacgccggctcaacttgctgatattgttggcgagtacaagtcacatgaacgctttgctggcgtcatgatgtggtctgcgggattctccgacgctaatgtggtgaatgggtgtacttatgcccagaacacggcacgaatcctgtctactgggtcgccttgctga

SEQ ID NO: 25122 - protein, 344 aa, Muscodor strobelii
  misc_feature: SGI Peptide ID NO. 568572
  misc_feature (31)..(320): Pfam Id: PF00704 Pfam Desc: Glycosyl hydrolases family 18
  misc_feature (8)..(344): NCBI GI: 9971103 Blast Desc: endochitinase CHI2 [Metarhizium anisopliae var. acridum]
  misc_feature (1)..(344): NCBI GI: 119483574 Blast Desc: class III chitinase ChiA2 [Neosartorya fischeri NRRL 181] gi|119409846|gb|EAW19793.1| class III chitinase ChiA2 [Neosartorya fischeri NRRL 181]
  misc_feature (6)..(342): NCBI GI: 63148160 Blast Desc: chitinase [Metarhizium anisopliae]
  misc_feature (1)..(344): NCBI GI: 159124019 Blast Desc: class III chitinase ChiA2 [Aspergillus fumigatus A1163]
  misc_feature (1)..(344): NCBI GI: 70983215 Blast Desc: class III chitinase ChiA2 [Aspergillus fumigatus Af293] gi|66844760|gb|EAL85097.1| class III chitinase ChiA2 [Aspergillus fumigatus Af293]
  misc_feature (34)..(344): NCBI GI: 255709229 Blast Desc: chitinase [Metarhizium anisopliae]
  misc_feature (34)..(342): NCBI GI: 255709231 Blast Desc: chitinase [Metarhizium anisopliae]
  misc_feature (1)..(344): NCBI GI: 126032267 Blast Desc: TPA: TPA_inf: chitinase 18-14 [Hypocrea jecorina]
  misc_feature (27)..(344): NCBI GI: 212541552 Blast Desc: Acidic endochitinase precursor, [Penicillium marneffei ATCC 18224] gi|210068230|gb|EEA22322.1| Acidic endochitinase precursor, [Penicillium marneffei ATCC 18224]
  misc_feature (1)..(344): NCBI GI: 212544236 Blast Desc: endochitinase precursor, [Penicillium marneffei ATCC 18224] gi|210065241|gb|EEA19335.1| endochitinase precursor, [Penicillium marneffei ATCC 18224]
  misc_feature (20)..(338): SWISSPROT Homolog: EC 3.2.1.14 Chitinase
MLFASISASVGLMAGLAAAIPARVHPRQNSAQTVVYWGQNGGGTIENNDLTTYCTAESGVNIIVLAFLYQYGNGNTIASGTIGQSCFISNTGEGQNCEALSAAITTCQSNGVKIILSLGGASGAYSLSSDDEASAIGTYLWEAYGNGGANSTSGTARPLGSAFVNGFDFDIEVPTGQEYYPAMISTLRTAFATDSANQYYITGAPQCPIPEPNMGKMIEGAQFDYLWPQFYNNNNYTYPCALPINGNAPFNYDGWVDFTAGTPSADAQLFIGVPASPLGANGAETGATYYATPAQLADIVGEYKSHERFAGVMMWSAGFSDANVVNGCTYAQNTARILSTGSPC

SEQ ID NO: 25123 - DNA, 4944 bp, Muscodor strobelii; identical to SEQ ID NO: 25120
  misc_feature: SGI EST ID NO. CUFF.59104.0
  misc_feature: Variant of the nucleotide sequence at SEQ ID NO 25121

SEQ ID NO: 25124 - DNA, 687 bp, Muscodor strobelii
  misc_feature: SGI cDNA ID NO. 568573
  misc_feature: Encodes the peptide sequence at SEQ ID NO 25125
atgtcgtcctcatctagcaacggcaagacctccaacaaggccaccaacgaaacctccttcaccggcgataaccgcgtccctcttaaggagcgcatcagccgtttacagaaggcatttgttacccaggctggtactagcgaagccccgacgatcaaggtcgagcttcattccgggcccgccgaggactctcaccttattcctcaccaaacacccggtccctctcgtttaagccccggtactcccataactcgagactcattctgtggaaaggcctctttgcctcctactcctcaaaccccgccaaccaccactcaagactcatggtgtggggaggcctgtttccctcctactcctcagaccccgccaaccgagtacaaggaactcgaatgccccggcgcccccaagaaaggtaaagttgccgttttaaagcgttcccacgacgccgatgccgaagttctcgagcgcatggtcaacgaggtcacggcctccgaggtaagtcgaacacgtcctagcagcgtcgcttcttccggtcgtcgaacacccattacacctctacgcataagctggggaccaaacgaccccagcgagtggctactccccggcgacgaagatgaggaagatgccgagtaccgagaattctgtgctacgataggtgctaagtcctctgatcaccctttggagaagtaa

SEQ ID NO: 25125 - protein, 228 aa, Muscodor strobelii
  misc_feature: SGI Peptide ID NO. 568573
MSSSSSNGKTSNKATNETSFTGDNRVPLKERISRLQKAFVTQAGTSEAPTIKVELHSGPAEDSHLIPHQTPGPSRLSPGTPITRDSFCGKASLPPTPQTPPTTTQDSWCGEACFPPTPQTPPTEYKELECPGAPKKGKVAVLKRSHDADAEVLERMVNEVTASEVSRTRPSSVASSGRRTPITPLRISWGPNDPSEWLLPGDEDEEDAEYREFCATIGAKSSDHPLEK

SEQ ID NO: 25126 - DNA, 350 bp, Muscodor strobelii
  misc_feature: SGI EST ID NO. CUFF.59110.0
  misc_feature: Variant of the nucleotide sequence at SEQ ID NO 25124
acgaaacctccttcaccggcgataaccgcgtccctcttaaggagcgcatcagccgtttacagaaggcatttgttacccaggctggtactagcgaagccccgacgatcaaggtcgagcttcattccgggcccgccgaggactctcaccttattcctcaccaaacacccggtccctctcgtttaagccccggtactcccataactcgagactcattctgtggaaaggcctctttgcctcctactcctcaaaccccgccaaccaccactcaagactcatggtgtggggaggcctgtttccctcctactcctcagaccccgccaaccgagtacaaggaactcgaatgccccggc

SEQ ID NO: 25127 - DNA, 1035 bp, Muscodor strobelii
  misc_feature: SGI cDNA ID NO. 568574
  misc_feature: Encodes the peptide sequence at SEQ ID NO 25128
atggtctcattcgaggctatcaaagccgccaacgcgggtctctcgtcatctctgcctgccggcctcgttgcggtctttgtcggagcaacggctgggattggtgagatttcaatgaagaaattcgcacaatatgcgaaatccccgcgcgtctacttcgtcggccgaacacaagatgcaggagaacgcattgtgaaggagtgtcagaaactcaatcccgagggccaattcaactttatcgcgaaggatgtcagtctgatccgcaaagtcgatgaactgtgcgaggagctcaagagcaaagagaagacaatcaatctcctattcctcagtgcgggcgtccccagcctggatcgcagtagtatgatcgacgttcttgatgtacctggaaaagtcttgacagacaagctaaccaactgtgtagagacttccgaggacctgcatcttctcgcgtcgttgaactattactcgcgcatccgcattatcaataacctcatgcccttcgtgaaagccgcgcctgattttcgacgaattgtaaacgttggtggcggtggtttcgaaggagagctcgatgaaaccgattttcagggccttgaggtcccccaagctaatttacgcgggcacttaatttctctcgtcactcttggtctcgaggcagtgtcgaagagcgcaccggaagttagtattgtgcataactatcctggcacagtcgatacccggtttctggatgccgtccctaaagagatgttggaaaatctagagatcatgcccgtcgaggagtctggtgaacgacaagtttatctcgcaacgagcccgcgcttcccagctgctcaggactcgaacaacgcagacgcggatgtagcaattggatcaaatgggaaaatcggaagtggaatgtataccatcggttctgattgcgaagccgggtcggctgagtctgagtcccgagctgtccttgctggcctgcgcagccgtggtatggttgagaaggtttgggcacacactgaggaagagtttaaacggatcactggtattgcttga

SEQ ID NO: 25128 - protein, 344 aa, Muscodor strobelii
  misc_feature: SGI Peptide ID NO. 568574
  misc_feature (1)..(342): NCBI GI: 115398197 Blast Desc: conserved [Aspergillus terreus NIH2624] gi|114192881|gb|EAU34581.1| conserved [Aspergillus terreus NIH2624]
  misc_feature (1)..(340): NCBI GI: 67523837 Blast Desc: AN2374.2 [Aspergillus nidulans FGSC A4] gi|40745329|gb|EAA64485.1| AN2374.2 [Aspergillus nidulans FGSC A4] gi|259487778|tpe|CBF86716.1| TPA: conserved [Aspergillus FGSC
  misc_feature (1)..(344): NCBI GI: 255932335 Blast Desc: Pc12g08960 [Penicillium chrysogenum Wisconsin 54-1255] gi|211582343|emb|CAP80523.1| Pc12g08960 [Penicillium chrysogenum Wisconsin 54-1255]
  misc_feature (1)..(342): NCBI GI: 121719480 Blast Desc: conserved [Aspergillus clavatus NRRL 1] gi|119404637|gb|EAW15013.1| conserved [Aspergillus clavatus NRRL 1]
  misc_feature (1)..(342): NCBI GI: 145248247 Blast Desc: An13g02340 [Aspergillus niger] gi|134081123|emb|CAK41633.1| protein product [Aspergillus niger]
  misc_feature (1)..(342): NCBI GI: 119487451 Blast Desc: NFIA_030540 [Neosartorya fischeri NRRL 181] gi|119410675|gb|EAW20621.1| conserved [Neosartorya fischeri NRRL 181]
  misc_feature (7)..(342): NCBI GI: 261199179 Blast Desc: conserved [Ajellomyces dermatitidis SLH14081] gi|239595143|gb|EEQ77724.1| conserved [Ajellomyces dermatitidis SLH14081]
  misc_feature (1)..(342): NCBI GI: 256732276 Blast Desc: NECHADRAFT_80716 [Nectria haematococca mpVI 77-13-4]
  misc_feature (1)..(342): NCBI GI: 46134165 Blast Desc: FG09222.1 [Gibberella zeae PH-1]
  misc_feature (1)..(343): NCBI GI: 212526408 Blast Desc: short-chain dehydrogenases/reductase, [Penicillium marneffei ATCC 18224] gi|210072759|gb|EEA26846.1| short-chain dehydrogenases/reductase, [Penicillium marneffei ATCC 18224]
MVSFEAIKAANAGLSSSLPAGLVAVFVGATAGIGEISMKKFAQYAKSPRVYFVGRTQDAGERIVKECQKLNPEGQFNFIAKDVSLIRKVDELCEELKSKEKTINLLFLSAGVPSLDRSSMIDVLDVPGKVLTDKLTNCVETSEDLHLLASLNYYSRIRIINNLMPFVKAAPDFRRIVNVGGGGFEGELDETDFQGLEVPQANLRGHLISLVTLGLEAVSKSAPEVSIVHNYPGTVDTRFLDAVPKEMLENLEIMPVEESGERQVYLATSPRFPAAQDSNNADADVAIGSNGKIGSGMYTIGSDCEAGSAESESRAVLAGLRSRGMVEKVWAHTEEEFKRITGIA

SEQ ID NO: 25129 - DNA, 1391 bp, Muscodor strobelii
  misc_feature: SGI EST ID NO. CUFF.59114.0
  misc_feature: Variant of the nucleotide sequence at SEQ ID NO 25127
tctcacttcactgtcgcaagttttatgctgtaagcatggcagataagccggtcacttctcgccacggtatacggattacgtcgccaggatgatgtcacactgtgggagaagagctactaatgtacgctcgcgaaactataaagaccggccatgatctcctcaattatctatggatacaacagatactcattacacgcttgtttatatctcgtgcataaaagagtcgctcttcgctctccagacatttaagatggtctcattcgaggctatcaaagccgccaacgcgggtctctcgtcatctctgcctgccggcctcgttgcggtctttgtcggagcaacggctgggattggtgagatttcaatgaagaaattcgcacaatatgcgaaatccccgcgcgtctacttcgtcggccgaacacaagatgcaggagaacgcattgtgaaggagtgtcagaaactcaatcccgagggccaattcaactttatcgcgaaggatgtcagtctgatccgcaaagtcgatgaactgtgcgaggagctcaagagcaaagagaagacaatcaatctcctattcctcagtgcgggcgtccccagcctggatcgcagtaagacttccgaggacctgcatcttctcgcgtcgttgaactattactcgcgcatccgcattatcaataacctcatgcccttcgtgaaagccgcgcctgattttcgacgaattgtaaacgttggtggcggtggtttcgaaggagagctcgatgaaaccgattttcagggccttgaggtcccccaagctaatttacgcgggcacttaatttctctcgtcactcttggtctcgaggcagtgtcgaagagcgcaccggaagttagtattgtgcataactatcctggcacagtcgatacccggtttctggatgccgtccctaaagagatgttggaaaatctagagatcatgcccgtcgaggagtctggtgaacgacaagtttatctcgcaacgagcccgcgcttcccagctgctcaggactcgaacaacgcagacgcggatgtagcaattggatcaaatgggaaaatcggaagtggaatgtataccatcggttctgattgcgaagccgggtcggctgagtctgagtcccgagctgtccttgctggcctgcgcagccgtggtatggttgagaaggtttgggcacacactgaggaagagtttaaacggatcactggtattgcttgaaatggctagcattaacgcttcttcgtatccggccagtcaccgcttaccatcatttctatactgaactatgtgaaacgcggcaagcaaatgaagttcggatgctgcgatggtatttttgtcccgtgatagtgtagactacttgactaaatccttctaatgaacaagctgg

SEQ ID NO: 25130 - DNA, 216 bp, Muscodor strobelii
  misc_feature: SGI cDNA ID NO. 568575
  misc_feature: Encodes the peptide sequence at SEQ ID NO 25131
atgtgtctctgggtcaagcagcagagattctgccgcgtgtgcatgaagtacagcggatacaccatctgggctggaaaacgatgcgagaacgtgcgagatgtcgacggagcctggggctcctgcaacgatgagcaagaggtcatcccccagctccctcccattgttggaggatattgcgcagagcatgacggacaagatgataaagaggccaaataa

SEQ ID NO: 25131 - protein, 71 aa, Muscodor strobelii
  misc_feature: SGI Peptide ID NO. 568575
MCLWVKQQRFCRVCMKYSGYTIWAGKRCENVRDVDGAWGSCNDEQEVIPQLPPIVGGYCAEHDGQDDKEAK

SEQ ID NO: 25132 - DNA, 1113 bp, Muscodor strobelii
  misc_feature: SGI cDNA ID NO. 568576
  misc_feature: Encodes the peptide sequence at SEQ ID NO 25133
atgaaccgcttccaacgtttggtctttgatggtggatcaacatgcgagcgactggaatggcaagatgtccccgatggggcgcttcgtgatgcagttgcatatcatggtccccaggctgcaatcgaccattaccctgcgtcttacttcgaacatgatgataaggcatgtctaaattctactcttggcgaagtacttcaatatgcgtggagctcagcgcaccggcgggacaagcgcgtccttaagccgtatcaacttgatccggcgaaacactacgtgcgaacggatcgcaaaactctcgaagctttcttgctgctctcgcacgcgggtgttgtgcagttcaaagacgttgatggagtagccactgcccatctatatgtgaattttgagggacagcagcacaaccgcacaaaggcagagatcgaaaaaattctccaaggttatccgccattttacattagctcaattcaagtcactggcaccattatcataccaagcccaatctcatcttcggccgacatcacgcgtggtggatggatcattggcgtcggactggattctcacttgataccccccctcagcactcacaatatgaaacccggttatcggcccccagaaagctggaacatgaaccgagattggatgttctcttgcatctcttatgctgttaggaggttcggagaagtcttggataagatcgtaagctcgttcccggaagacgaaatggccaagagcgcatgcactatatttcaaggcttgacaacaggaacaatagtcatgcacaccttgccgttcaacatcctagtgaagtacgcaggttttaaaaacctcggccgagagtttccaactagaacttatctatcacagctcagtagggagcagtggatactggctacgaacgcgttcaatcacaaccagcctttcccagatgacgagcgcgaactgtttcgcgagcatagggatcctatattgcaggctgcgatcgtcgggttgatctgtgttttcacattcgaccattaccgggcatcttcttctctctacaaacggctctcatacccaccagaactggaaggccgcaagtacatatatctgacgacatgcgaacaagtagaatga

SEQ ID NO: 25133 - protein, 370 aa, Muscodor strobelii
  misc_feature: SGI Peptide ID NO. 568576
MNRFQRLVFDGGSTCERLEWQDVPDGALRDAVAYHGPQAAIDHYPASYFEHDDKACLNSTLGEVLQYAWSSAHRRDKRVLKPYQLDPAKHYVRTDRKTLEAFLLLSHAGVVQFKDVDGVATAHLYVNFEGQQHNRTKAEIEKILQGYPPFYISSIQVTGTIIIPSPISSSADITRGGWIIGVGLDSHLIPPLSTHNMKPGYRPPESWNMNRDWMFSCISYAVRRFGEVLDKIVSSFPEDEMAKSACTIFQGLTTGTIVMHTLPFNILVKYAGFKNLGREFPTRTYLSQLSREQWILATNAFNHNQPFPDDERELFREHRDPILQAAIVGLICVFTFDHYRASSSLYKRLSYPPELEGRKYIYLTTCEQVE

SEQ ID NO: 25134 - DNA, 1967 bp, Muscodor strobelii
  misc_feature: SGI EST ID NO. CUFF.59129.0
  misc_feature: Variant of the nucleotide sequence at SEQ ID NO 25132
atggctatttatgagctcagcaggtgtgtggtgtgtactggattcgtctgacctgtgttgttgattgcatcgcgcggctgaggcggggctacctgttgcaatctcacccgaaggcgcaatttgttcctcaagagtggcctaggccaaggaaacatccatcgttacacttggacctaggaataagctgtataaatgctacgttttcgtgtttctacgtacgttcgcaagcattatatatagcaagaaagctaagtagtaaaatacttagagataggcgatatagatatggtacaatgggacgccgtcgcagccttagtcgccctcttgggcttaccattcatgttgtcaggaagtacaacatggttatttcggtctatcatgaaccgcttccaacgtttggtctttgatggtggatcaacatgcgagcgactggaatggcaagatgtccccgatggggcgcttcgtgatgcagttgcatatcatggtccccaggctgcaatcgaccattaccctgcgtcttacttcgaacatgatgataaggcatgtctaaattctactcttggcgaagtacttcaatatgcgtggagctcagcgcaccggcgggacaagcgcgtccttaagccgtatcaacttgatccggcgaaacactacgtgcgaacggatcgcaaaactctcgaagctttcttgctgctctcgcacgcgggtgttgtgcagttcaaagacgttgatggagtagccactgcccatctatatgtgaattttgagggacagcagcacaaccgcacaaaggcagagatcgaaaaaattctccaaggttatccgccattttacattagctcaattcaagtcactggcaccattatcataccaagcccaatctcatcttcggccgacatcacgcgtggtggatggatcattggcgtcggactggattctcacttgataccccccctcagcactcacaatatgaaacccggttatcggcccccagaaagctggaacatgaaccgagattggatgttctcttgcatctcttatgctgttaggaggttcggagaagtcttggataagatcgtaagctcgttcccggaagacgaaatggccaagagcgcatgcactatatttcaaggcttgacaacaggaacaatagtcatgcacaccttgccgttcaacatcctagtgaagtacgcaggttttaaaaacctcggccgagagtttccaactagaacttatctatcacagctcagtagggagcagtggatactggctacgaacgcgttcaatcacaaccagcctttcccagatgacgagcgcgaactgtttcgcgagcatagggatcctatattgcaggctgcgatcgtcgggttgatctgtgttttcacattcgaccattaccgggcatcttcttctctctacaaacggctctcatacccaccagaactggaaggccgcaagtacatatatctgacgacatgcgaacaagtagaatgaatgcactcctcgcttatgcgaagacagtctagtcagatgcaatgcattgggcgcgcgttggcgcaacagactcagccaacgctgaaatgcggaagatcaaaggttgatgcagctatgagcacctacaagaaacagctgcggtcagaatcttgggatactcattttaacgagggttgactgctgatatttccaaagcctcgaatccaggaggcgaggtgctttcgacaaggtgcctgacaataaccacaacgacttaagagccaccgtcataattaccaatgagtcgtttctctccgtcagtagcgccagcgactaagtgtttgcatgatgaaacgtacgagcaatgaaactatgtaatgctgctgtttcgggtctcatgttcaagtcgtgccgttatgaaatgttatagatctcttcaagtcaaatctcttcaagtctgcgtttgtcgatgggcggcttgtgtacccatgtccaac

SEQ ID NO: 25135 - DNA, 1260 bp, Muscodor strobelii
  misc_feature: SGI cDNA ID NO. 568577
  misc_feature: Encodes the peptide sequence at SEQ ID NO 25136
atgcctccaaaacgcaaagcaccgcccgtttccaaagccgaagcaaaagcacaagctgacgccaggaagaaggccaaagcaggagaaaacgccaatatggccgcaaatttgagtgatcaccttattgataagaaacttggacgctggtccaaggtctccgggtcgaaaaacgccgcccgacactattttaagacaattgagaaagatgaaaagaaggcatactcattctatactatctgcaagccaatgcaccacttaacacccgaggagaatcctgactacgactccgttgttggtgattccgaagacgaagaggattatgatagtgagggtaacagaatagacgatgacgatgaggaagaagaagaggacgacgacaacgagggtcgagtaggatcaaaatgcaagaggcagaactgcatttgtttcctgcctgcaaataaaaaccccgagcatccctgggtcacgagtttcggcggattcatcaaattcaagacccaattgatgatgatacagattcgtgatccagatttgttctccatgtacacgttcaatgaccatgccaacattggcgttctagaggtgctggagaatctagttctcgacttcgaaatggaggataactggcgcgagcgatggagtatatgcgaggcaactgtgcaattactgatgaatgacgtaacatttgcattgaacatatttgaagacggagaccgcgtgataaacatgatgcaactcctcggccgacaattcctatatatgctcgcacaactcgactccatcggtctcctctccgactccagcccagtcctttcccttgccatcgtcatggcatcctacatgcgtctcgccaacatgcaacgcgaggacgatctgctagacgatgcgcgggggccatacggcgaggacaagcttttacagccgaacttttatgacgacgcgatcctgtcctacgccaaccaacgtggcatcatgctaggcgggtttaagaatatcgatgacatgtgcgccgactgcgtgccagaggtcaagttgccaaataaagacacacgagatccgtgggactacaaacgccgcctgaaagaatatagagctaattacgcgatgtcatccgtcactgacgatatcgggggtgacggaatggatctgacttcttggtcgagtgctgagaggaagaaaaatgcgtttaacaagaaggatccattgagtaagaaggagcttgatgggcttaaagaaggcgctgtaatgatgctaggttga

SEQ ID NO: 25136 - protein, 419 aa, Muscodor strobelii
  misc_feature: SGI Peptide ID NO. 568577
  misc_feature (1)..(416): NCBI GI: 242820660 Blast Desc: conserved [Talaromyces stipitatus ATCC 10500] gi|218714016|gb|EED13440.1| conserved [Talaromyces stipitatus ATCC 10500]
  misc_feature (1)..(419): NCBI GI: 119481807 Blast Desc: NFIA_089930 [Neosartorya fischeri NRRL 181] gi|119409086|gb|EAW19035.1| conserved [Neosartorya fischeri NRRL 181]
  misc_feature (1)..(419): NCBI GI: 238483351 Blast Desc: conserved [Aspergillus flavus NRRL3357] gi|220700964|gb|EED57302.1| conserved [Aspergillus flavus NRRL3357]
  misc_feature (9)..(419): NCBI GI: 146323022 Blast Desc: conserved [Aspergillus fumigatus Af293] gi|129558577|gb|EAL93764.2| conserved [Aspergillus fumigatus Af293]
  misc_feature (1)..(419): NCBI GI: 39954943 Blast Desc: [Magnaporthe grisea 70-15] gi|145021076|gb|EDK05205.1| [Magnaporthe grisea 70-15]
  misc_feature (170)..(416): NCBI GI: 169783614 Blast Desc: [Aspergillus oryzae RIB40] gi|83775013|dbj|BAE65136.1| protein product [Aspergillus oryzae]
  misc_feature (140)..(419): NCBI GI: 116178816 Blast Desc: CHGG_00036 [Chaetomium globosum CBS 148.51] gi|88184333|gb|EAQ91801.1| CHGG_00036 [Chaetomium globosum CBS 148.51]
  misc_feature (171)..(419): NCBI GI: 116206188 Blast Desc: CHGG_02387 [Chaetomium globosum CBS 148.51] gi|88182984|gb|EAQ90452.1| CHGG_02387 [Chaetomium globosum CBS 148.51]
  misc_feature (1)..(416): NCBI GI: 255936023 Blast Desc: Pc13g06040 [Penicillium chrysogenum Wisconsin 54-1255] gi|211583658|emb|CAP91673.1| Pc13g06040 [Penicillium chrysogenum Wisconsin 54-1255]
  misc_feature (234)..(419): NCBI GI: 159129859 Blast Desc: conserved [Aspergillus fumigatus A1163]
MPPKRKAPPVSKAEAKAQADARKKAKAGENANMAANLSDHLIDKKLGRWSKVSGSKNAARHYFKTIEKDEKKAYSFYTICKPMHHLTPEENPDYDSVVGDSEDEEDYDSEGNRIDDDDEEEEEDDDNEGRVGSKCKRQNCICFLPANKNPEHPWVTSFGGFIKFKTQLMMIQIRDPDLFSMYTFNDHANIGVLEVLENLVLDFEMEDNWRERWSICEATVQLLMNDVTFALNIFEDGDRVINMMQLLGRQFLYMLAQLDSIGLLSDSSPVLSLAIVMASYMRLANMQREDDLLDDARGPYGEDKLLQPNFYDDAILSYANQRGIMLGGFKNIDDMCADCVPEVKLPNKDTRDPWDYKRRLKEYRANYAMSSVTDDIGGDGMDLTSWSSAERKKNAFNKKDPLSKKELDGLKEGAVMMLG

SEQ ID NO: 25137 - DNA, 740 bp, Muscodor strobelii
  misc_feature: SGI EST ID NO. CUFF.59147.0
  misc_feature: Variant of the nucleotide sequence at SEQ ID NO 25135
caggagaaaacgccaatatggccgcaaatttgagtgatcaccttattgataagaaacttggacgctggtccaaggtctccgggtcgaaaaacgccgcccgacactattttaagacaattgagaaagatgaaaagaaggcatactcattctatactatctgcaagccaatgcaccacttaacacccgaggagaatcctgactacgactccgttgttggtgattccgaagacgaagaggattatgatagtgagggtaacagaatagacgatgacgatgaggaagaagaagaggacgacgacaacgagggtcgagtaggatcaaaatgcaagaggcagaactgcatttgtttcctgcctgcaaataaaaaccccgagcatccctgggtcacgagtttcggcggattcatcaaattcaagacccaattgatgatgatacagattcgtgatccagatttgttctccatgtacacgttcaatgaccatgccaacattggcgttctagaggtgctggagaatctagttctcgacttcgaaatggaggataactggcgcgagcgatggagtatatgcgaggcaactgtgcaattactgatgaatgacgtaacatttgcattgaacatatttgaagacggagaccgcgtgataaacatgatgcaactcctcggccgacaattcctatatatgctcgcacaactcgactccatcggtctcctctccgactccagcccagtcctttccctt

SEQ ID NO: 25138 - DNA, 631 bp, Muscodor strobelii
  misc_feature: SGI cDNA ID NO. 568578
  misc_feature: Reduced expression when VOC is produced
  misc_feature: Encodes the peptide sequence at SEQ ID NO 25139
atggctgtcgtcgactccagcagcacgttcctgcacctctcgcggccgctggcgccgtcggcgtacaactaccacaacaacctggcgccgctggccgtgacgatccagccgcaggcgatcctctcgatcctcgaccacgcggtgcgccgcgacatccccgccacgccggcgtcgtcgtcgcgcgtcatcggggccctgataggcacgcgctccgaggacggcagcgacgtctcggtggcgtcgtcgttcgcgatcccgcacacggagaacgaggaccaggtcgaggtcgacgtcgagtaccagaagaacatgctggcgctgcacctcaaggccaacccgcgcgaggtgctgctgggctggtacacgacctcgcacgagctcaactccttctccgccctcatccagaacttcttcgcctcccccgagaccggcaccttcccccacccggccgtccacctgaccgtctccaccgacccccggcgccgacgtccagctgcgcgcctacatccctcccccgtcgccgtcaacgccgaccgcgccgccgagagctgcctcttcatccaggtgccccaccgcgtcgcctccaacgacgccgaccgctctgccctcgactggatcgcctccgcccgcg

SEQ ID NO: 25139 - protein, 210 aa, Muscodor strobelii
  misc_feature: SGI Peptide ID NO. 568578
  misc_feature (28)..(144): Pfam Id: PF01398 Pfam Desc: Mov34/MPN/PAD-1 family
  misc_feature (10)..(210): NCBI GI: 39970089 Blast Desc: MGG_10653 [Magnaporthe grisea 70-15] gi|224488009|sp|A4R0E5.1|EIF3F_MAGGR RecName: Full=Eukaryotic translation initiation factor 3 subunit F; Short=eIF3f MGG_10653
  misc_feature (4)..(209): NCBI GI: 85103969 Blast Desc: NCU01021 [Neurospora crassa OR74A] gi|74638737|sp|Q9P748.2|EIF3F_NEUCR RecName: Full=Eukaryotic translation initiation factor 3 subunit F; Short=eIF3f related to
  misc_feature (1)..(210): NCBI GI: 156043625 Blast Desc: SS1G_10816 [Sclerotinia sclerotiorum 1980] gi|154695203|gb|EDN94941.1| SS1G_10816 [Sclerotinia sclerotiorum 1980]
  misc_feature (1)..(210): NCBI GI: 154316827 Blast Desc: BC1G_03831 [Botryotinia fuckeliana B05.10] gi|150845443|gb|EDN20636.1| BC1G_03831 [Botryotinia fuckeliana B05.10]
  misc_feature (10)..(200): NCBI GI: 116180068 Blast Desc: CHGG_00662 [Chaetomium globosum CBS 148.51] gi|121791986|sp|Q2HGJ2.1|EIF3F_CHAGB RecName: Full=Eukaryotic translation initiation factor 3 subunit F; Short=eIF3f CHGG_00662
  misc_feature (10)..(209): NCBI GI: 171691929 Blast Desc: protein product [Podospora anserina] gi|170945913|emb|CAP72714.1| protein product [Podospora anserina]
  misc_feature (6)..(210): NCBI GI: 46137119 Blast Desc: FG10075.1 [Gibberella zeae PH-1]
  misc_feature (7)..(210): NCBI GI: 258568666 Blast Desc: conserved [Uncinocarpus reesii 1704] gi|237906523|gb|EEP80924.1| conserved [Uncinocarpus reesii 1704]
  misc_feature (1)..(210): NCBI GI: 189195784 Blast Desc: eukaryotic translation initiation factor 3 subunit F [Pyrenophora tritici-repentis Pt-1C-BFP] gi|187980109|gb|EDU46735.1| eukaryotic translation initiation 3 F
  misc_feature (1)..(210): NCBI GI: 259488313 Blast Desc: TPA: eukaryotic translation initiation factor 3 subunit EifCf, (AFU_orthologue; AFUA_1G09330) [Aspergillus nidulans FGSC A4]
  misc_feature: Useful for introducing or modulating the production of volatile compounds
MAVVDSSSTFLHLSRPLAPSAYNYHNNLAPLAVTIQPQAILSILDHAVRRDIPATPASSSRVIGALIGTRSEDGSDVSVASSFAIPHTENEDQVEVDVEYQKNMLALHLKANPREVLLGWYTTSHELNSFSALIQNFFASPETGTFPHPAVHLTVSTDPRRRRPAARLHPSPVAVNADRAAESCLFIQVPHRVASNDADRSALDWIASAR

SEQ ID NO: 25140 - DNA, 1021 bp, Muscodor strobelii
  misc_feature: SGI EST ID NO. CUFF.59152.0
  misc_feature: Variant of the nucleotide sequence at SEQ ID NO 25138
aaaaattcccaaggcgagaaggacctaaacgacgtgagtgacgactcttgagaacgccccgtctccagtatttgcagtgtattgtagtggcgccggctgctaggaataattgagcagagtctgtgagaggagaagcggaagcgacagtgcatcgaacagagacagaggaattcccccggttgaccaagtgtgattccactttcgacactctcttcccactctcgacattttcgacattctcgacattcggtacccttttttccaatatcagaaccacaataacggcctgcatcccgcctgtccctacgccttggtgacttggacattagcacacaaacacataaacacatacacacatacgtacacatacgtctccggcccggcgtcatcatggctgtcgtcgactccagcagcacgttcctgcacctctcgcggccgctggcgccgtcggcgtacaactaccacaacaacctggcgccgctggccgtgacgatccagccgcaggcgatcctctcgatcctcgaccacgcggtgcgccgcgacatccccgccacgccggcgtcgtcgtcgcgcgtcatcggggccctgataggcacgcgctccgaggacggcagcgacgtctcggtggcgtcgtcgttcgcgatcccgcacacggagaacgaggaccaggtcgaggtcgacgtcgagtaccagaagaacatgctggcgctgcacctcaaggccaacccgcgcgaggtgctgctgggctggtacacgacctcgcacgagctcaactccttctccgccctcatccagaacttcttcgcctcccccgagaccggcaccttcccccacccggccgtccacctgaccgtctccaccgacccccggcgccgacgtccagctgcgcgcctacatccctcccccgtcgccgtcaacgccgaccgcgccgccgagagctgcctcttcatccaggtgccccaccgcgtcgcctccaacgacgccgaccgctctgccctcgactggatcgcctccgcccgcg

SEQ ID NO: 25141 - DNA, 2208 bp, Muscodor strobelii
  misc_feature: SGI cDNA ID NO. 568579
  misc_feature: Encodes the peptide sequence at SEQ ID NO 25142
atgccctctaagggaaaatttgccggccgaagggctcctcccaaaggcaaaggcaaaccacctaaaggagcttccaagagaaaattgggtgcaaggaaattccacaatgcaagacttgacgaggttgaggaatcagacagccaggcgtctgacgaagctcctctgacggatcttgaagatgagagtgacggttcggcatctgagccagatgggaggccggccgcgccgaatcagccatatctagctctcatgcagagcttgtccaaagacttatccgcgcctagtgccaagaggagaaagattagccacaagcctgaaaaggagcagtcccctgtagccgatcgggatcagaatttggagccggaggccgaggcttcagcggatgaggatcgcgatgtcgatttagtcgaggagccagaagagcaaccgggtaatgaagtcgatgtggatgatgagagtgaagatgacgatgtgcccgacacatccgatccgtttgagacgcacttcgccagtcccgacaagaccgagtacacaacccgtttaaaaatgacacagtccaacatctatcaacccagacagctcgaagtgaatggctggcgtcagttcaagggcattcccggcacggatgcagacctaacggagcgattgccctccaccatttccggccctggaagcctcaagctcaaacacaggctcatcgagacggcccagaaacagcggcctgcttttgacaagcttgagcaaatactgtatcccatcacatttggctacagagacctgctattctgcggtcgagatgtctccaacgcggagaacctgcgacgcatgacatgtctccatgctgtgaaccatgttttcaaaacccgagatagagtcattaaaaacaacgccaagctcgctaagctagcgttggaggtcggtgacaacactgactttgagcctcgagatcaaggcttcacgcgtgccaaggtcctcatgatcctgccgacgcgagagtcggctgttaaggtcgtcaatgctatatgtgatctctgcgagcctgatcagcaggagaaccgcaagcgcttcgacgagtcgtacatcgaccacgaggtcaagttcgcgggcgaccggccggccgacttccgcgagctgtttgaaggcaacgatgacgacatgtttcgtatcggcgtcaagttcacgcgaaagacgatcaaatactttgcgcagttctacaactcggacatactcctcgcctctccgctgggcctgcgcatggcgataggctcggagggggacaagaagaagttcgactacgactttctcagctccgtcgagatggtcatcgtcgatcaggccgacgcgtgcctgatgcagaattgggaacacgtcgagttcatcttcgagcatctcaacaaacagccgcgggaggcgcacggctgcgatttcagtcgcgtgcgtgagtggtacctcgaaaatcagtcaattcacttccgacagaccatagtcatgtcggcattcaacacgcccgagctgtcagagctacacagagcgggcaaaaattgggcgggccgcgctagagtgcagcccgagtacgcaggagtgatccaggagctgggcggcgtccggacaaagcagacattttcacgattcgaagccaagtccatcgccacggagcccgatgcccggttcgcctacttcacgagcgccgtcatcccgtccctcgtcaagctcgcccaggggcgaggcagcaaagcgtcgagcgcgggcggcgaggcggcgggcacgctgatcttcataccgtcgtatctcgacttcgtacgggtgcgcaactactttgccaacgcggacgccgtctccagcctgtcgtttggggcgatatccgagtacgccgacgtgcgcgaggcgtcgcgggccaggtcccatttcctgagcggtcggcacaaggtcttgctgtacacggaacgtgcacatcatttccggcggtatgtactggcgggggtgaagcggatcatcatgtacggactcccggacaacccgatcttttaccgcgagatggcaggcgggtttctggccaagagcgagcaggacatgacgttggagcccggcaggggcagcgtaagggtcttatttgccaagtacgatagcttgaagctcgaacgggtggcagggagtaaaagagtgggcaaaatgatcaaggagaggggtgatacctttgactttatatga

SEQ ID NO: 25142 - protein, 735 aa, Muscodor strobelii
  misc_feature: SGI Peptide ID NO. 568579
  misc_feature (287)..(734): Pfam Id: PF06862 Pfam Desc: Domain of function (DUF1253)
  misc_feature (74)..(735): NCBI GI: 85103972 Blast Desc: NCU01022 [Neurospora crassa OR74A] gi|11544675|emb|CAB88516.2| conserved [Neurospora crassa] gi|28923182|gb|EAA32398.1| NCU01022 [Neurospora crassa OR74A]
  misc_feature (74)..(735): NCBI GI: 46137121 Blast Desc: FG10076.1 [Gibberella zeae PH-1]
  misc_feature (77)..(735): NCBI GI: 256732120 Blast Desc: [Nectria haematococca mpVI 77-13-4]
  misc_feature (73)..(735): NCBI GI: 156043623 Blast Desc: SS1G_10815 [Sclerotinia sclerotiorum 1980] gi|154695202|gb|EDN94940.1| SS1G_10815 [Sclerotinia sclerotiorum 1980]
  misc_feature (59)..(735): NCBI GI: 116180070 Blast Desc: CHGG_00663 [Chaetomium globosum CBS 148.51] gi|88184960|gb|EAQ92428.1| CHGG_00663 [Chaetomium globosum CBS 148.51]
  misc_feature (73)..(735): NCBI GI: 154316825 Blast Desc: BC1G_03830 [Botryotinia fuckeliana B05.10] gi|150845442|gb|EDN20635.1| BC1G_03830 [Botryotinia fuckeliana B05.10]
  misc_feature (60)..(735): NCBI GI: 145605291 Blast Desc: MGG_10652 [Magnaporthe grisea 70-15] gi|145013120|gb|EDJ97761.1| MGG_10652 [Magnaporthe grisea 70-15]
  misc_feature (74)..(735): NCBI GI: 171691927 Blast Desc: protein product [Podospora anserina] gi|170945912|emb|CAP72713.1| protein product [Podospora anserina]
  misc_feature (12)..(735): NCBI GI: 242767297 Blast Desc: nucleolus protein required for cell viability, [Talaromyces stipitatus ATCC 10500] gi|218724538|gb|EED23955.1| nucleolus protein required for cell viability, [Talaromyces ATCC
  misc_feature (34)..(735): NCBI GI: 212528100 Blast Desc: nucleolus protein required for cell viability, [Penicillium marneffei ATCC 18224] gi|210073605|gb|EEA27692.1| nucleolus protein required for cell viability, [Penicillium ATCC
MPSKGKFAGRRAPPKGKGKPPKGASKRKLGARKFHNARLDEVEESDSQASDEAPLTDLEDESDGSASEPDGRPAAPNQPYLALMQSLSKDLSAPSAKRRKISHKPEKEQSPVADRDQNLEPEAEASADEDRDVDLVEEPEEQPGNEVDVDDESEDDDVPDTSDPFETHFASPDKTEYTTRLKMTQSNIYQPRQLEVNGWRQFKGIPGTDADLTERLPSTISGPGSLKLKHRLIETAQKQRPAFDKLEQILYPITFGYRDLLFCGRDVSNAENLRRMTCLHAVNHVFKTRDRVIKNNAKLAKLALEVGDNTDFEPRDQGFTRAKVLMILPTRESAVKVVNAICDLCEPDQQENRKRFDESYIDHEVKFAGDRPADFRELFEGNDDDMFRIGVKFTRKTIKYFAQFYNSDILLASPLGLRMAIGSEGDKKKFDYDFLSSVEMVIVDQADACLMQNWEHVEFIFEHLNKQPREAHGCDFSRVREWYLENQSIHFRQTIVMSAFNTPELSELHRAGKNWAGRARVQPEYAGVIQELGGVRTKQTFSRFEAKSIATEPDARFAYFTSAVIPSLVKLAQGRGSKASSAGGEAAGTLIFIPSYLDFVRVRNYFANADAVSSLSFGAISEYADVREASRARSHFLSGRHKVLLYTERAHHFRRYVLAGVKRIIMYGLPDNPIFYREMAGGFLAKSEQDMTLEPGRGSVRVLFAKYDSLKLERVAGSKRVGKMIKERGDTFDFI

SEQ ID NO: 25143 - DNA, 3777 bp, Muscodor strobelii
  misc_feature: SGI EST ID NO. CUFF.59307.0
  misc_feature: Variant of the nucleotide sequence at SEQ ID NO 25141
gacggttcggcatctgagccagatgggaggccggccgcgccgaatcagccatatctagctctcatgcagagcttgtccaaagacttatccgcgcctagtgccaagaggagaaagattagccacaagcctgaaaaggagcagtcccctgtagccgatcgggatcagaatttggagccggaggccgaggcttcagcggatgaggatcgcgatgtcgatttagtcgaggagccagaagagcaaccgggtaatgaagtcgatgtggatgatgagagtgaagatgacgatgtgcccgacacatccgatccgtttgagacgcacttcgccagtcccgacaagaccgagtacacaacccgtttaaaaatgacacagtccaacatctatcaacccagacagctcgaagtgaatggctggcgtcagttcaagggcattcccggcacggatgcagacctaacggagcgattgccctccaccatttccggccctggaagcctcaagctcaaacacaggctcatcgagacggcccagaaacagcggcctgcttttgacaagcttgagcaaatactgtatcccatcacatttggctacagagacctgctattctgcggtcgagatgtctccaacgcggagaacctgcgacgcatgacatgtctccatgctgtgaaccatgttttcaaaacccgagatagagtcattaaaaacaacgccaagctcgctaagctagcgttggaggtcggtgacaacactgactttgagcctcgagatcaaggcttcacgcgtgccaaggtcctcatgatcctgccgacgcgagagtcggctgttaaggtcgtcaatgctatatgtgatctctgcgagcctgatcagcaggagaaccgcaagcgcttcgacgagtcgtacatcgaccacgaggtcaagttcgcgggcgaccggccggccgacttccgcgagctgtttgaaggcaacgatgacgacatgtttcgtatcggcgtcaagttcacgcgaaagacgatcaaatactttgcgcagttctacaactcggacatactcctcgcctctccgctgggcctgcgcatggcgataggctcggagggggacaagaagaagttcgactacgactttctcagctccgtcgagatggtcatcgtcgatcaggccgacgcgtgcctgatgcagaattgggaacacgtcgagttcatcttcgagcatctcaacaaacagccgcgggaggcgcacggctgcgatttcagtcgcgtgcgtgagtggtacctcgaaaatcagtcaattcacttccgacagaccatagtcatgtcggcattcaacacgcccgagctgtcagagctacacagagcgggcaaaaattgggcgggccgcgctagagtgcagcccgagtacgcaggagtgatccaggagctgggcggcgtccggacaaagcagacattttcacgattcgaagccaagtccatcgccacggagcccgatgcccggttcgcctacttcacgagcgccgtcatcccgtccctcgtcaagctcgcccaggggcgaggcagcaaagcgtcgagcgcgggcggcgaggcggcgggcacgctgatcttcataccgtcgtatctcgacttcgtacgggtgcgcaactactttgccaacgcggacgccgtctccagcctgtcgtttggggcgatatccgagtacgccgacgtgcgcgaggcgtcgcgggccaggtcccatttcctgagcggtcggcacaaggtcttgctgtacacggaacgtgcacatcatttccggcggtatgtactggcgggggtgaagcggatcatcatgtacggactcccggacaacccgatcttttaccgcgagatggcaggcgggtttctggccaagagcgagcaggacatgacgttggagcccggcaggggcagcgtaagggtcttatttgccaagtacgatagcttgaagctcgaacgggtggcagggagtaaaagagtgggcaaaatgatcaaggagaggggtgatacctttgactttatatgacgatactgggcggagcgacggcgggagctgtggagatgagatacttctcgggatgagatgttgggcctggtcattcccatatctagaattgtctccctagcgagcagtgttgttgagacctgccaccaaactttgagttgatgtatagaacgtaacagacaatatcgcctgtgtcgaatagaccttgacctgaaatacaatactctagggatgcgatgcagattgtctcagatgcagcattgacttgatagaacagctatgttccaaccgtcttgttcgtgtttcccattcgtctcggcaatagttcactcgcagagcgtagctgcatatatgtatgccgcaactccctcgtacccaagtcaatttttctatcgtttctaaactggtaattgtaaaaggtttctgtttccagaggcgatccgaatggcctcgggtggttccaataatgtacatgaaatctcgtacagacaacgacgacgaccctagtgttggggtttcagcgtcgggattttatacagtagtaggttgggtagttgaagatgtcccacacttgatacatatgcatatgcacagacatgcactctttccgactagattcccatctcaacttctcttatcatctctcctgtgggcggaggaacagcgtagatgattgctaatcttcaccaccgccgcctcacacacgtgcaacatgcactctcttacttcgttctaccttgttctacctcgctctacctcgtggcctcttgtcccgcggcggccttggcagcgactctccgctggtgcttggcgacgaggaccctgacgccggccttgtggtcgcggatgtccttcttcttggcggcggtcctgacggccttgtcgaggggcgtgtcgggcttctggaggaggcggaagtcggggcgcaggtcgagcttggcgatgcggtcgaccatggcctcgaaggcgttggggccgtcggggcggtagcgggtgaccttggccatgttgagctgggtgagctcgttgtgggcgttcttgccgaagcggcggtcgcgggcgacggcggcggcggtcatggcgaagcgcatgtccttgggcccgtcgacgaactcgaggatggcggactcgccctggtcgtaggtgtccttgggctcggtgcgcaggacgcgcgtgtagccgccgggccgctcgaggtagcggctgcgcagctcgccgaagaccttgggcatgagggcctcgggcgtctatagatcgtgtcagacagaggggagagggcaaggggagagaaaagagaagacgacactcacgtagaggatgccctgcactcgccgccggctcgtctcgttgttgcgcttggcgagggtgatgagcttctcggccatgcgctgggcctccttggccttggcccaggtggtgtggatggcctcgtgcttgacgagcgacgtgacgaggttgcgcagcagcgcctgccggtgcgccgaccctctgctcaggtggcggtacttgacgagtccgcccgccatcgcgacagcgcgacactaatgcctcgcggttgttcgctggtgaaagaaggtatacctaggtatcctaaggtaggtagtcgttgtgggattgtgggtgaagatcggggatgtcgaggtttacatgtacactaagatatattcgagattcgggaggctcaaattcaacaacccctgttggctcctctcggattttttctaggcgtggtgtctttaaggttgtccctgggcacggcccgccggtgactggccg

SEQ ID NO: 25144 - DNA, 711 bp, Muscodor strobelii
  misc_feature: SGI cDNA ID NO. 568580
  misc_feature: Reduced expression when VOC is produced
  misc_feature: Encodes the peptide sequence at SEQ ID NO 25145
atggcgggcggactcgtcaagtaccgccacctgagcagagggtcggcgcaccggcaggcgctgctgcgcaacctcgtcacgtcgctcgtcaagcacgaggccatccacaccacctgggccaaggccaaggaggcccagcgcatggccgagaagctcatcaccctcgccaagcgcaacaacgagacgagccggcggcgagtgcagggcatcctctacacgcccgaggccctcatgcccaaggtcttcggcgagctgcgcagccgctacctcgagcggcccggcggctacacgcgcgtcctgcgcaccgagcccaaggacacctacgaccagggcgagtccgccatcctcgagttcgtcgacgggcccaaggacatgcgcttcgccatgaccgccgccgccgtcgcccgcgaccgccgcttcggcaagaacgcccacaacgagctcacccagctcaacatggccaaggtcacccgctaccgccccgacggccccaacgccttcgaggccatggtcgaccgcatcgccaagctcgacctgcgccccgacttccgcctcctccagaagcccgacacgcccctcgacaaggccgtcaggaccgccgccaagaagaaggacatccgcgaccacaaggccggcgtcagggtcctcgtcgccaagcaccagcggagagtcgctgccaaggccgccgcgggacaagaggccacgaggtag

SEQ ID NO: 25145 - protein, 236 aa, Muscodor strobelii
  misc_feature: SGI Peptide ID NO. 568580
  misc_feature (21)..(119): Pfam Id: PF01196 Pfam Desc: Ribosomal protein L17
  misc_feature (1)..(180): NCBI GI: 116180072 Blast Desc: CHGG_00664 [Chaetomium globosum CBS 148.51] gi|88184961|gb|EAQ92429.1| CHGG_00664 [Chaetomium globosum CBS 148.51]
  misc_feature (1)..(179): NCBI GI: 171691925 Blast Desc: protein product [Podospora anserina] gi|170945911|emb|CAP72712.1| protein product [Podospora anserina]
  misc_feature (1)..(171): NCBI GI: 164426228 Blast Desc: 50S ribosomal protein L17 [Neurospora crassa OR74A] gi|157071251|gb|EAA32399.2| 50S ribosomal protein L17 [Neurospora crassa OR74A]
  misc_feature (1)..(171): NCBI GI: 11544674 Blast Desc: related to mitochondrial ribosomal protein YmL8 [Neurospora crassa]
  misc_feature (1)..(179): NCBI GI: 256731734 Blast Desc: NECHADRAFT_93596 [Nectria haematococca mpVI 77-13-4]
  misc_feature (1)..(193): NCBI GI: 46137123 Blast Desc: FG10077.1 [Gibberella zeae PH-1]
  misc_feature (1)..(175): NCBI GI: 242767388 Blast Desc: 50S ribosomal protein L17 [Talaromyces stipitatus ATCC 10500] gi|218724556|gb|EED23973.1| 50S ribosomal protein L17 [Talaromyces stipitatus ATCC 10500]
  misc_feature (1)..(174): NCBI GI: 121702107 Blast Desc: 50S ribosomal protein L17 [Aspergillus clavatus NRRL 1] gi|119397461|gb|EAW07892.1| 50S ribosomal protein L17 [Aspergillus clavatus NRRL 1]
  misc_feature (1)..(175): NCBI GI: 212528068 Blast Desc: 50S ribosomal protein L17 [Penicillium marneffei ATCC 18224] gi|210073589|gb|EEA27676.1| 50S ribosomal protein L17 [Penicillium marneffei ATCC 18224]
  misc_feature (1)..(174): NCBI GI: 70995084 Blast Desc: 50S ribosomal protein L17 [Aspergillus fumigatus Af293] gi|66849943|gb|EAL90270.1| 50S ribosomal protein L17 [Aspergillus fumigatus Af293] gi|159131064|gb|EDP56177.1| 50S L17
  misc_feature: Useful for introducing or modulating the production of volatile compounds
MAGGLVKYRHLSRGSAHRQALLRNLVTSLVKHEAIHTTWAKAKEAQRMAEKLITLAKRNNETSRRRVQGILYTPEALMPKVFGELRSRYLERPGGYTRVLRTEPKDTYDQGESAILEFVDGPKDMRFAMTAAAVARDRRFGKNAHNELTQLNMAKVTRYRPDGPNAFEAMVDRIAKLDLRPDFRLLQKPDTPLDKAVRTAAKKKDIRDHKAGVRVLVAKHQRRVAAKAAAGQEATR

SEQ ID NO: 25146 - DNA, 3043 bp, Muscodor strobelii
  misc_feature: SGI EST ID NO. CUFF.59308.1
  misc_feature: Variant of the nucleotide sequence at SEQ ID NO 25144
cggccagtcaccggcgggccgtgcccagggacaaccttaaagacaccacgcctagaaaaaatccgagaggagccaacaggggttgttgaatttgagcctcccgaatctcgaatatatcttagtgtacatgtaaacctcgacatccccgatcttcacccacaatcccacaacgactacctaccttaggatacctaggtataccttctttcaccagcgaacaaccgcgaggcattagtgtcgcgctgtcgcgatggcgggcggactcgtcaagtaccgccacctgagcagagggtcggcgcaccggcaggcgctgctgcgcaacctcgtcacgtcgctcgtcaagcacgaggccatccacaccacctgggccaaggccaaggaggcccagcgcatggccgagaagctcatcaccctcgccaagcgcaacaacgagacgagccggcggcgagtgcagggcatcctctacacgcccgaggccctcatgcccaaggtcttcggcgagctgcgcagccgctacctcgagcggcccggcggctacacgcgcgtcctgcgcaccgagcccaaggacacctacgaccagggcgagtccgccatcctcgagttcgtcgacgggcccaaggacatgcgcttcgccatgaccgccgccgccgtcgcccgcgaccgccgcttcggcaagaacgcccacaacgagctcacccagctcaacatggccaaggtcacccgctaccgccccgacggccccaacgccttcgaggccatggtcgaccgcatcgccaagctcgacctgcgccccgacttccgcctcctccagaagcccgacacgcccctcgacaaggccgtcaggaccgccgccaagaagaaggacatccgcgaccacaaggccggcgtcagggtcctcgtcgccaagcaccagcggagagtcgctgccaaggccgccgcgggacaagaggccacgaggtagagcgaggtagaacaaggtagaacgaagtaagagagtgcatgttgcacgtgtgtgaggcggcggtggtgaagattagcaatcatctacgctgttcctccgcccacaggagagatgataagagaagttgagatgggaatctagtcggaaagagtgcatgtctgtgcatatgcatatgtatcaagtgtgggacatcttcaactacccaacctactactgtataaaatcccgacgctgaaaccccaacactagggtcgtcgtcgttgtctgtacgagatttcatgtacattattggaaccacccgaggccattcggatcgcctctggaaacagaaaccttttacaattaccagtttagaaacgatagaaaaattgacttgggtacgagggagttgcggcatacatatatgcagctacgctctgcgagtgaactattgccgagacgaatgggaaacacgaacaagacggttggaacatagctgttctatcaagtcaatgctgcatctgagacaatctgcatcgcatccctagagtattgtatttcaggtcaaggtctattcgacacaggcgatattgtctgttacgttctatacatcaactcaaagtttggtggcaggtctcaacaacactgctcgctagggagacaattctagatatgggaatgaccaggcccaacatctcatcccgagaagtatctcatctccacagctcccgccgtcgctccgcccagtatcgtcatataaagtcaaaggtatcacccctctccttgatcattttgcccactcttttactccctgccacccgttcgagcttcaagctatcgtacttggcaaataagacccttacgctgcccctgccgggctccaacgtcatgtcctgctcgctcttggccagaaacccgcctgccatctcgcggtaaaagatcgggttgtccgggagtccgtacatgatgatccgcttcacccccgccagtacataccgccggaaatgatgtgcacgttccgtgtacagcaagaccttgtgccgaccgctcaggaaatgggacctggcccgcgacgcctcgcgcacgtcggcgtactcggatatcgccccaaacgacaggctggagacggcgtccgcgttggcaaagtagttgcgcacccgtacgaagtcgagatacgacggtatgaagatcagcgtgcccgccgcctcgccgcccgcgctcgacgctttgctgcctcgcccctgggcgagcttgacgagggacgggatgacggcgctcgtgaagtaggcgaaccgggcatcgggctccgtggcgatggacttggcttcgaatcgtgaaaatgtctgctttgtccggacgccgcccagctcctggatcactcctgcgtactcgggctgcactctagcgcggcccgcccaatttttgcccgctctgtgtagctctgacagctcgggcgtgttgaatgccgacatgactatggtctgtcggaagtgaattgactgattttcgaggtaccactcacgcacgcgactgaaatcgcagccgtgcgcctcccgcggctgtttgttgagatgctcgaagatgaactcgacgtgttcccaattctgcatcaggcacgcgtcggcctgatcgacgatgaccatctcgacggagctgagaaagtcgtagtcgaacttcttcttgtccccctccgagcctatcgccatgcgcaggcccagcggagaggcgaggagtatgtccgagttgtagaactgcgcaaagtatttgatcgtctttcgcgtgaacttgacgccgatacgaaacatgtcgtcatcgttgccttcaaacagctcgcggaagtcggccggccggtcgcccgcgaacttgacctcgtggtcgatgtacgactcgtcgaagcgcttgcggttctcctgctgatcaggctcgcagagatcacatatagcattgacgaccttaacagccgactctcgcgtcggcaggatcatgaggaccttggcacgcgtgaagccttgatctcgaggctcaaagtcagtgttgtcaccgacctccaacgctagcttagcgagcttggcgttgtttttaatgactctatctcgggttctt

SEQ ID NO: 25147 - DNA, 786 bp, Muscodor strobelii
  misc_feature: SGI cDNA ID NO. 568581
  misc_feature: Reduced expression when VOC is produced
  misc_feature: Encodes the peptide sequence at SEQ ID NO 25148
atgggcttcaccactggctttactggaggcgtcacgctcacgctcggcgtcgcctacctcaccgtcctcgcgcaccgcaggcaccgagagcaccaggccgccgtcctgcgccagcagaccatcctcctcgacggcatcgtctacaactccctgcccctggcccacactacccgcgccgagcaggccctcctcgaccgcggccgcctcctcgacaccgccaaggaccgctggaactccgagctccagcacgccctcagctgggcccagaacaaggactgggacgacgctcgcgagcgcctcgagaccgccgtcgcccgcctgtgggcccgtgccttcagcgatgccagagacgctgctgagacggccgacgacaaaggccagtctgtcgcccgcgagctgtctacccggacgaggcaagacgcgcagattaaggccaacgatgtaaatgccgctgcgagatccgcctatgccgatgccagggccaagagtgccgccatcgctgccacggccgagtcccaagctgaagcggccaagggaacagtctttgctgccgtgggcaggggcatcgagaagggcaaggaggtcctgagcaaggccaagtccgccgtcgttggtgccgagggggaagtccagtccgagatcgagtctaggctgtcccccgtcgagaggacgctgcggcggcggtacgagaatggcgacaatctggacaagagtgccgacgaggtcttggctgcccgatatgtgcccactgacctcaaggatgagacagagttaagggggttatag

SEQ ID NO: 25148 - protein, 261 aa, Muscodor strobelii
  misc_feature: SGI Peptide ID NO. 568581
  misc_feature (1)..(261): NCBI GI: 156043619 Blast Desc: SS1G_10813 [Sclerotinia sclerotiorum 1980] gi|154695200|gb|EDN94938.1| SS1G_10813 [Sclerotinia sclerotiorum 1980]
  misc_feature (1)..(261): NCBI GI: 154316821 Blast Desc: BC1G_03828 [Botryotinia fuckeliana B05.10] gi|150845440|gb|EDN20633.1| BC1G_03828 [Botryotinia fuckeliana B05.10]
  misc_feature (1)..(261): NCBI GI: 261355720 Blast Desc: conserved [Verticillium albo-atrum VaMs.102]
  misc_feature (1)..(261): NCBI GI: 256732119 Blast Desc: NECHADRAFT_100537 [Nectria haematococca mpVI 77-13-4]
  misc_feature (1)..(261): NCBI GI: 46137125 Blast Desc: FG10078.1 [Gibberella zeae PH-1]
  misc_feature (1)..(261): NCBI GI: 164426226 Blast Desc: NCU01024 [Neurospora crassa OR74A] gi|16415974|emb|CAB88514.3| [Neurospora crassa] gi|157071250|gb|EAA32400.2| [Neurospora crassa OR74A]
  misc_feature (1)..(261): NCBI GI: 145605293 Blast Desc: [Magnaporthe grisea 70-15] gi|145013122|gb|EDJ97763.1| [Magnaporthe grisea 70-15]
  misc_feature (1)..(259): NCBI GI: 116180074 Blast Desc: [Chaetomium globosum CBS 148.51] gi|88184962|gb|EAQ92430.1| [Chaetomium globosum CBS 148.51]
  misc_feature (1)..(101): NCBI GI: 169604352 Blast Desc: SNOG_05188 [Phaeosphaeria nodorum SN15] gi|111066459|gb|EAT87579.1| SNOG_05188 [Phaeosphaeria nodorum SN15]
  misc_feature (1)..(101): NCBI GI: 189196368 Blast Desc: conserved [Pyrenophora tritici-repentis Pt-1C-BFP] gi|187980401|gb|EDU47027.1| conserved [Pyrenophora tritici-repentis Pt-1C-BFP]
  misc_feature: Useful for introducing or modulating the production of volatile compounds
MGFTTGFTGGVTLTLGVAYLTVLAHRRHREHQAAVLRQQTILLDGIVYNSLPLAHTTRAEQALLDRGRLLDTAKDRWNSELQHALSWAQNKDWDDARERLETAVARLWARAFSDARDAAETADDKGQSVARELSTRTRQDAQIKANDVNAAARSAYADARAKSAAIAATAESQAEAAKGTVFAAVGRGIEKGKEVLSKAKSAVVGAEGEVQSEIESRLSPVERTLRRRYENGDNLDKSADEVLAARYVPTDLKDETELRGL

SEQ ID NO: 25149 - DNA, 1607 bp, Muscodor strobelii
  misc_feature: SGI EST ID NO. CUFF.59357.0
  misc_feature: Variant of the nucleotide sequence at SEQ ID NO 25147
cggcgtctttgccattgtaagcaccacatgcatgttcggtacaggtacccgtgccgcctatcttgactctagcttgtcccgtccgccgcgcgactttcgtcatagccaccatccatccattcgttccctgttcccattttccaccgtaggtatcttgggtatactacaacaattgaacctcgtcagaggtcaattgcactctgcttgcgtgtcgtcgactcaacaaacaacaacactcgtttattccatatttgccctgacctacagcactcggttggccctcggtgccaccttgctgcgcactcgcatactagcatcgattcccacacctcacacctcacatcgcatatcagcacagtagatcccaccttggcgccatgggcttcaccactggctttactggaggcgtcacgctcacgctcggcgtcgcctacctcaccgtcctcgcgcaccgcaggcaccgagagcaccaggccgccgtcctgcgccagcagaccatcctcctcgacggcatcgtctacaactccctgcccctggcccacactacccgcgccgagcaggccctcctcgaccgcggccgcctcctcgacaccgccaaggaccgctggaactccgagctccagcacgccctcagctgggcccagaacaaggactgggacgacgctcgcgagcgcctcgagaccgccgtcgcccgcctgtgggcccgtgccttcagcgatgccagagacgctgctgagacggccgacgacaaaggccagtctgtcgcccgcgagctgtctacccggacgaggcaagacgcgcagattaaggccaacgatgtaaatgccgctgcgagatccgcctatgccgatgccagggccaagagtgccgccatcgctgccacggccgagtcccaagctgaagcggccaagggaacagtctttgctgccgtgggcaggggcatcgagaagggcaaggaggtcctgagcaaggccaagtccgccgtcgttggtgccgagggggaagtccagtccgagatcgagtctaggctgtcccccgtcgagaggacgctgcggcggcggtacgagaatggcgacaatctggacaagagtgccgacgaggtcttggctgcccgatatgtgcccactgacctcaaggatgagacagagttaagggggttatagagagctggtaggtatttcaatcgacatgggacgattctgaagggtcaagctcgagatccgtgtatagtatcatcaaggcatcatcaatagacaatagaggaattcaatatcagtacaccgagcaaacaatgcccatttatcacatatgcacctcctcgcccgtcgtcactagtcatttgttcactcactatggacatatggctccgcgtcagacggagctctgaatggttccctgataatggtgaatggtctgtggccactcatgaacacagcatgaagaggcattgggcctctcgattcattctgcttcttttctacttgagcttctctatatatgctccagtccttacttcaaatccatatcctggctcgttccccatctcgaggcaatcttctcagacggacagtcccttattttcgacatcctgatacgctttgatttcc

SEQ ID NO: 25150 - DNA, 1830 bp, Muscodor strobelii
  misc_feature: SGI cDNA ID NO. 568582
  misc_feature: Encodes the peptide sequence at SEQ ID NO 25151
atgagtgaatcctatgactatgttatcgttggtggtggcacctcgggcctggtagtcgccaatcgcctgactgaagatgacggcgtccgcgttctagtcatcgaggccggcgctgacaagagggcagacccagccctacaaactccgggtctggtagccggcgcctactctgacgatcgcttcatctggcccttcaaatcgactgcccaatccgagttgaacggccgccatctgaggcaggataccggccgagtcttaggtggaagctccttgaccaacttcatgatggcaatgtttccctctcgtaccaatctagatacttggggcaagatgggcaacaaaggctggtcttttgatgatctcgcgccttatttccagaaattctcaacgtcacacccgccaagtcaggctattcgtgatacgcttggtggtctgggctattttcaagaagatcttacaggaactggtccggttcagctgtctttcgacgaccagtattccatcatgaatcagaactggttcaagacattttccgctctaggattggagatgaagagcgatcctcgaacaggtagagcaatgggcgcgttccagaattcatcaacgattgaaagcggctctaacgtgcgcagttcggccgccactgcctattacacagaggaggtcgccaagagacccaacctcagagttgtcatggaaacaacggtacagaaaatcacgacagagatacgagagggccaagttgtcgcaacaggtgtagagattagggacaaggacggtcaagtcagcgccatctcagccactaaggaagtcatcttggctgcgggaaccatgaggacgcctcagatgttggagctgtcgggaatcggcgaccgcgacattctagaaagcctgggaattgaggtccttattgataatccaaatgtcggcgagcacttgcaggaccatctcatgacctcgcaacagtttcccgtaaagaaggatattccgtcggctgatggacttcgtgacccagccaagttccaaagtgcctttgaacagtatgccgcgacgaagcaaggccccctcgccggtatgggaaccagtgtcgcttacgtccccttggccgatcgggatggtgtcatgacgacagcagaccgcaaagctctcttcgacaaatatcttgtaggcggccctgcattgaacccggtacaaaaaagagagttcaagttgattcgtgagctactcgaggccgaagatgagccggcgattcaatacttgtgcttcccaggatcgctcaccgtgacccctcacccggacacgctgacggacatgttcacatcgcatgcaccctacgattgcattggcatcttgtcgctgctgaatcaccccttctcgcggggatccgtccacatttcctccgccgacgctacagttccaccagaatggaacccgaactactgcacacatccactcgatctggagatcctcgcacgtaccgtaggcttcgtcgaaaagatcgtcaacacggcgccttactcggatatgatcgatcccggactcaagcgcctaccggacgcgaaaggcgacgacctcgaagtggccaaagagattgtccgcggcaggaccgtgtcgtgtttccacgtcgcggggacgtgtcgaatgcttcccaaagagctaggcggtgtcatcgataaccgcctgatcgtccatggcacctcgaacatccgcgtcatcgacgccagcatgattcctctggagccgctgggcaacatccagactacggtgtatgctgtggccgaaagggcggcggactttatcaaagaggatgctaagtctagtctcgtctga

SEQ ID NO: 25151 - protein, 609 aa, Muscodor strobelii
  misc_feature: SGI Peptide ID NO. 568582
  misc_feature (450)..(596): Pfam Id: PF05199 Pfam Desc: GMC oxidoreductase
  misc_feature (5)..(331): Pfam Id: PF00732 Pfam Desc: GMC oxidoreductase
  misc_feature (6)..(37): Pfam Id: PF01266 Pfam Desc: FAD dependent oxidoreductase
  misc_feature (5)..(127): Pfam Id: PF00732 Pfam Desc: GMC oxidoreductase
  misc_feature (208)..(331): Pfam Id: PF00732 Pfam Desc: GMC oxidoreductase
  misc_feature (6)..(39): Pfam Id: PF05834 Pfam Desc: Lycopene cyclase protein
  misc_feature (6)..(51): Pfam Id: PF07992 Pfam Desc: Pyridine nucleotide-disulphide oxidoreductase
  misc_feature (1)..(606): NCBI GI: 171680799 Blast Desc: protein product [Podospora anserina] gi|27764292|emb|CAD60572.1| protein product [Podospora anserina] gi|170940027|emb|CAP65253.1| protein product [Podospora anserina]
  misc_feature (1)..(603): NCBI GI: 116200666 Blast Desc: CHGG_10878 [Chaetomium globosum CBS 148.51] gi|88175592|gb|EAQ83060.1| CHGG_10878 [Chaetomium globosum CBS 148.51]
  misc_feature (1)..(608): NCBI GI: 164422728 Blast Desc: NCU09798 [Neurospora crassa OR74A] gi|157069794|gb|EAA30872.2| conserved [Neurospora crassa OR74A]
  misc_feature (3)..(600): NCBI GI: 119501657 Blast Desc: aryl-alcohol dehydrogenase, [Neosartorya fischeri NRRL 181] gi|119415751|gb|EAW25688.1| aryl-alcohol dehydrogenase, [Neosartorya fischeri NRRL 181]
  misc_feature (1)..(600): NCBI GI: 70981732 Blast Desc: aryl-alcohol dehydrogenase [Aspergillus fumigatus Af293] gi|66844017|gb|EAL84357.1| aryl-alcohol dehydrogenase, [Aspergillus fumigatus Af293] gi|159121998|gb|EDP47121.1| A1163]
  misc_feature (3)..(601): NCBI GI: 255948370 Blast Desc: Pc22g09400 [Penicillium chrysogenum Wisconsin 54-1255] gi|211591969|emb|CAP98228.1| Pc22g09400 [Penicillium chrysogenum Wisconsin 54-1255]
  misc_feature (3)..(601): NCBI GI: 145231393 Blast Desc: An02g00400 [Aspergillus niger] gi|134056080|emb|CAK96255.1| protein product [Aspergillus niger]
  misc_feature (3)..(600): NCBI GI: 121704513 Blast Desc: aryl-alcohol dehydrogenase, [Aspergillus clavatus NRRL 1] gi|119398665|gb|EAW09094.1| aryl-alcohol dehydrogenase, [Aspergillus clavatus NRRL 1]
  misc_feature (5)..(608): NCBI GI: 145240585 Blast Desc: An08g08250 [Aspergillus niger] gi|134077462|emb|CAK40027.1| protein product [Aspergillus niger]
  misc_feature (3)..(604): NCBI GI: 169771991 Blast Desc: [Aspergillus oryzae RIB40] gi|238485400|ref|XP_002373938.1| aryl-alcohol dehydrogenase, [Aspergillus flavus NRRL3357] gi|83768324|dbj|BAE58463.1| protein
  misc_feature (6)..(600): SWISSPROT Homolog: EC 1.1.99.1 Choline dehydrogenase
MSESYDYVIVGGGTSGLVVANRLTEDDGVRVLVIEAGADKRADPALQTPGLVAGAYSDDRFIWPFKSTAQSELNGRHLRQDTGRVLGGSSLTNFMMAMFPSRTNLDTWGKMGNKGWSFDDLAPYFQKFSTSHPPSQAIRDTLGGLGYFQEDLTGTGPVQLSFDDQYSIMNQNWFKTFSALGLEMKSDPRTGRAMGAFQNSSTIESGSNVRSSAATAYYTEEVAKRPNLRVVMETTVQKITTEIREGQVVATGVEIRDKDGQVSAISATKEVILAAGTMRTPQMLELSGIGDRDILESLGIEVLIDNPNVGEHLQDHLMTSQQFPVKKDIPSADGLRDPAKFQSAFEQYAATKQGPLAGMGTSVAYVPLADRDGVMTTADRKALFDKYLVGGPALNPVQKREFKLIRELLEAEDEPAIQYLCFPGSLTVTPHPDTLTDMFTSHAPYDCIGILSLLNHPFSRGSVHISSADATVPPEWNPNYCTHPLDLEILARTVGFVEKIVNTAPYSDMIDPGLKRLPDAKGDDLEVAKEIVRGRTVSCFHVAGTCRMLPKELGGVIDNRLIVHGTSNIRVIDASMIPLEPLGNIQTTVYAVAERAADFIKEDAKSSLV

SEQ ID NO: 25152 - DNA, 3898 bp, Muscodor strobelii
  misc_feature: SGI EST ID NO. CUFF.59170.0
  misc_feature: Variant of the nucleotide sequence at SEQ ID NO 25150
ctccccttaactccggcgccccatatcgagccaaattcacgccttcgagtttgaaccgaggattgttcatttgtaggtactttaggtacctaaggtatctaggaaggctctggtgaagctttttacgttatggtatgtgttgctcggagttttcgctggctcaatacctaagtatccgtccttgcattgctcaatcaatctctcaggcggcattctgagcaaacatgtagagcaagcttggcaagcaccatgccaaagaatcgtcgcgtcaaccggagaacataagtatccatttagacacgaacattgatagagctatctcgtcttcgtatgaacggaagtgctagcccagagagtccttcaacttggccacgaatcacatcgtccccaagaacctcccacagccccttgactgacacatcgcctttcattttgttgcggaagatgtacgtgactcgtagcaatgtctgcggtttcgcttgtctaggttctgctgcaatctcatacaagctcatgactactctggttgaggaccagtcttctgagcattaacgaacaatgtggatgcagagcaaaatgacctaggttgcaagccaagcagcgtcggacaatcatcctcatgtctttagtaatcgcaaggaactgcaatgtcgttgtaacaagctcaacgagctatcagcccacaatcgaatgttcgtcatctccctcgcttcccttgcccctccctgggctgtgttccaccagtttggatcaattgacaatcccttcctgtgactttcgagaagatttcagatctaagataggtggcatagttagagctaatctctagcagatgaagctaaccaaaatattgttccgtctgcaagacaagtttcaaacaaaaaaccgaacaccaggagagatcaatcacgtacgcacgaaatcattgccgaactcgtagcggcttgacataacagattgaagattggtatttcttgttctgcaaccacgttggaccacaattcgctgcctacgaaattgatagtcgacagctcgtatgtagaacatagtagtccctctttgctaggaatagcaatttggtttgatccaatacgatgattcctttgcggttcccgttgcaagccatgatgtgggcctcgcaactcaattcacgtcttgccattgcaaccattttgcattgctcgactacaccttgctctcatgctagggatcatgcgtagatctggctgacttccacggtatcatgggctactccacgccttgggtggacggtgaatccatggggaggggccctgccgcacctggcagccagctttatatccattggatcatcatggtgcagtaagccgcaagccgcaagcatcaccttactaaacgagatagtcaacacagtagcattgtaacgacgcctctgagtcgccatgtgcgacacagccgcaatgtcttctttacgtcagcattaatagttgctaacttctcctgacactcgcattcctggtgtcaacgtcccatcatgtcttatctctgttgtctctaagcctctagtttgctatacgcctaagcgagagatttacttggggtcagttgatcagataacgtatcccaaccgaatcatgagtgaatcctatgactatgttatcgttggtggtggcacctcgggcctggtagtcgccaatcgcctgactgaagatgacggcgtccgcgttctagtcatcgaggccggcgctgacaagagggcagacccagccctacaaactccgggtctggtagccggcgcctactctgacgatcgcttcatctggcccttcaaatcgactgcccaatccgagttgaacggccgccatctgaggcaggataccggccgagtcttaggtggaagctccttgaccaacttcatgatggcaatgtttccctctcgtaccaatctagatacttggggcaagatgggcaacaaaggctggtcttttgatgatctcgcgccttatttccagaaattctcaacgtcacacccgccaagtcaggctattcgtgatacgcttggtggtctgggctattttcaagaagatcttacaggaactggtccggttcagctgtctttcgacgaccagtattccatcatgaatcagaactggttcaagacattttccgctctaggattggagatgaagagcgatcctcgaacaggtagagcaatgggcgcgttccagaattcatcaacgattgaaagcggctctaacgtgcgcagttcggccgccactgcctattacacagaggaggtcgccaagagacccaacctcagagttgtcatggaaacaacggtacagaaaatcacgacagagatacgagagggccaagttgtcgcaacaggtgtagagattagggacaaggacggtcaagtcagcgccatctcagccactaaggaagtcatcttggctgcgggaaccatgaggacgcctcagatgttggagctgtcgggaatcggcgaccgcgacattctagaaagcctgggaattgaggtccttattgataatccaaatgtcggcgagcacttgcaggaccatctcatgacctcgcaacagtttcccgtaaagaaggatattccgtcggctgatggacttcgtgacccagccaagttccaaagtgcctttgaacagtatgccgcgacgaagcaaggccccctcgccggtatgggaaccagtgtcgcttacgtccccttggccgatcgggatggtgtcatgacgacagcagaccgcaaagctctcttcgacaaatatcttgtaggcggccctgcattgaacccggtacaaaaaagagagttcaagttgattcgtgagctactcgaggccgaagatgagccggcgattcaatacttgtgcttcccaggatcgctcaccgtgacccctcacccggacacgctgacggacatgttcacatcgcatgcaccctacgattgcattggcatcttgtcgctgctgaatcaccccttctcgcggggatccgtccacatttcctccgccgacgctacagttccaccagaatggaacccgaactactgcacacatccactcgatctggagatcctcgcacgtaccgtaggcttcgtcgaaaagatcgtcaacacggcgccttactcggatatgatcgatcccggactcaagcgcctaccggacgcgaaaggcgacgacctcgaagtggccaaagagattgtccgcggcaggaccgtgtcgtgtttccacgtcgcggggacgtgtcgaatgcttcccaaagagctaggcggtgtcatcgataaccgcctgatcgtccatggcacctcgaacatccgcgtcatcgacgccagcatgattcctctggagccgctgggcaacatccagactacggtgtatgctgtggccgaaagggcggcggactttatcaaagaggatgctaagtctagtctcgtctgaaggatttgatattttatgccgacaattcatcagatacgataaaactgggtagatatagactagacgttgatattattcaatgaaactatcctatttgctgggtatctgttaagagctgtgggattcttatctcattgcctgcttctttacgtataaggcgaaggtaggaccttttattttctaatcacgattgtgtcaagattatgatggcgatgtttttgtacccatgacgatatcatatcaaggttcaacgattgagtgttagatttctcgataattaggcaacatcctattagcgcgaagttaacgagctgatcatcagctatgtttgtcttcaatttccctctgtacttactgcctgtatgccattctctttttttatttctgtttaattctgattctcaacgttgaagcttctctaaactcgccacccacctttgataaatcagcatgcg

SEQ ID NO: 25153 - DNA, 786 bp, Muscodor strobelii
  misc_feature: SGI cDNA ID NO. 568583
  misc_feature: Reduced expression when VOC is produced
  misc_feature: Encodes the peptide sequence at SEQ ID NO 25154
atgatacgaacttacgtgcgcaacctcgggccacttctgcgatcccccgggcctgccgccacttggcagcaaaatgtgctgagccccaacaatctccgcctgctgcggcgcaacttgacgctgccctcacagaccagcagcccccagctacctgctttgcaggcctcgagagtctcaagagtctcgagagccgtccagagaccccttcgctcgcccttgcgcaccaacaggcgacccctccacaactcctcccgcaagcgctccgcaaaccccgacccggccaagcccaaggcccaggaggcgccccagggcttgtcggcaaggctcaagaagctctcccgcgagtacggctggtctgcggttggtgtctacttcgcgctcagcgtgctcgacttccccttctgcttcctcctcgtccgcgtcgtgggcaccgataggataggcgagctcgagcattgggtcgtctcacacgccaccaagctgatcccccattctgtccgcgagaggtggaacgagtaccgccaggccctgaagcaggccgagcgagaaaatctcggcaatgacgagctcagcgagcacgtcgagatggccggctggggcgtcgccgaagctgaggagcggcacaatgccgaagcaagtcttggtacccagctcgccctcgcgtacgccatccataagagctttatcttccttagagtgcctctcactgcagctgtgacgcccaaagtggtcaaggtgttgcggtcatggggctggaatatagggaagcgccgaaccaagccgtga

SEQ ID NO: 25154 - protein, 261 aa, Muscodor strobelii
  misc_feature: SGI Peptide ID NO. 568583
  misc_feature (73)..(260): NCBI GI: 261351790 Blast Desc: conserved [Verticillium albo-atrum VaMs.102]
  misc_feature (74)..(260): NCBI GI: 156044130 Blast Desc: SS1G_10168 [Sclerotinia sclerotiorum 1980] gi|154694557|gb|EDN94295.1| SS1G_10168 [Sclerotinia sclerotiorum 1980]
  misc_feature (86)..(258): NCBI GI: 46136909 Blast Desc: FG09970.1 [Gibberella zeae PH-1]
  misc_feature (74)..(260): NCBI GI: 154299313 Blast Desc: BC1G_11142 [Botryotinia fuckeliana B05.10] gi|150857407|gb|EDN32599.1| BC1G_11142 [Botryotinia fuckeliana B05.10]
  misc_feature (1)..(257): NCBI GI: 256732113 Blast Desc: NECHADRAFT_100533 [Nectria haematococca mpVI 77-13-4]
  misc_feature (62)..(261): NCBI GI: 171691687 Blast Desc: protein product [Podospora anserina] gi|170945792|emb|CAP72592.1| protein product [Podospora anserina]
  misc_feature (77)..(260): NCBI GI: 145610947 Blast Desc: MGG_00783 [Magnaporthe grisea 70-15] gi|145018280|gb|EDK02559.1| MGG_00783 [Magnaporthe grisea 70-15]
  misc_feature (75)..(255): NCBI GI: 85092020 Blast Desc: NCU04644 [Neurospora crassa OR74A] gi|21622311|emb|CAD37014.1| related to protein N-acetyltransferase NAT2 [Neurospora crassa] [Neurospora crassa
  misc_feature (108)..(260): NCBI GI: 240279946 Blast Desc: malonyl CoA-acyl carrier protein transacylase [Ajellomyces capsulatus H143]
  misc_feature (108)..(260): NCBI GI: 225560392 Blast Desc: conserved [Ajellomyces capsulatus G186AR]
  misc_feature (83)..(260): SWISSPROT Homolog: EC 2.3.1.88 Peptide alpha-N-acetyltransferase
  misc_feature: Useful for introducing or modulating the production of volatile compounds
MIRTYVRNLGPLLRSPGPAATWQQNVLSPNNLRLLRRNLTLPSQTSSPQLPALQASRVSRVSRAVQRPLRSPLRTNRRPLHNSSRKRSANPDPAKPKAQEAPQGLSARLKKLSREYGWSAVGVYFALSVLDFPFCFLLVRVVGTDRIGELEHWVVSHATKLIPHSVRERWNEYRQALKQAERENLGNDELSEHVEMAGWGVAEAEERHNAEASLGTQLALAYAIHKSFIFLRVPLTAAVTPKVVKVLRSWGWNIGKRRTKP

SEQ ID NO: 25155 - DNA, 1618 bp, Muscodor strobelii
  misc_feature: SGI EST ID NO. CUFF.59247.1
  misc_feature: Variant of the nucleotide sequence at SEQ ID NO 25153
atggcttacagggtccttgctcccgacagcggccatcggaccctgaaaagcaccgctgcccgtttgttgagcagcactgaaagcggccctgggtccgcctgtgtgcagatggcatcaccgtgcatgtcgacgctaatcgttcaaagttgtgccgcagccgagcttgtcaattttttgcttgccgaactgacctcatcaacaccatcgacgccatcatcctcaagtcatccattcggatgcgataactcgacgacgaccatctcactgccacgcatcacacgccaaatctgcttcctttgtttttttcccacccaagtctcacgtctcgcctgtcgaatacggtgcagaggcatacggtgctcagcatcctggagcttagctggatacctacctaggtacctgaccgaagctaccagacggtccgtttgacgcgctgcgacagagccctctgccgtttatctggtcatctaaccgcgtgagatcaagtctgggaggtaacaggacactatagggacggacgcacgatatgatacgaacttacgtgcgcaacctcgggccacttctgcgatcccccgggcctgccgccacttggcagcaaaatgtgctgagccccaacaatctccgcctgctgcggcgcaacttgacgctgccctcacagaccagcagcccccagctacctgctttgcaggcctcgagagtctcaagagtctcgagagccgtccagagaccccttcgctcgcccttgcgcaccaacaggcgacccctccacaactcctcccgcaagcgctccgcaaaccccgacccggccaagcccaaggcccaggaggcgccccagggcttgtcggcaaggctcaagaagctctcccgcgagtacggctggtctgcggttggtgtctacttcgcgctcagcgtgctcgacttccccttctgcttcctcctcgtccgcgtcgtgggcaccgataggataggcgagctcgagcattgggtcgtctcacacgccaccaagctgatcccccattctgtccgcgagaggtggaacgagtaccgccaggccctgaagcaggccgagcgagaaaatctcggcaatgacgagctcagcgagcacgtcgagatggccggctggggcgtcgccgaagctgaggagcggcacaatgccgaagcaagtcttggtacccagctcgccctcgcgtacgccatccataagagctttatcttccttagagtgcctctcactgcagctgtgacgcccaaagtggtcaaggtgttgcggtcatggggctggaatatagggaagcgccgaaccaagccgtgagaaccggccggcttggtgaagcatctcttctcactcgtctcatctctggcggctaggcgtgatctctgcgggtctctgcatacgcaccttaatcaacttgtattaccaacttgtaccaaactcatgaggctagggagaatatagatgcactccacatatagatttactacttttacctagttttagtcggcgttgccatcttcaatgcaacccaccaatctcaatgcattcttcagaatgctggactttgtggctactgttattttaccagccaattcgaatcgcttctgtctgtacctacgctgc

SEQ ID NO: 25156 - DNA, 423 bp, Muscodor strobelii
  misc_feature: SGI cDNA ID NO. 568584
  misc_feature: Encodes the peptide sequence at SEQ ID NO 25157
atgctgctcgttaatccccacgaactacacgtccaggatctctgccatcttgcttacggaatgaattctactacaactacagtgcctatgctcgatcttttgggcatggctgagcacaatctgcgagaacaaaggaacgtagtgtatatggcatcacaagaaagcagcagcagcagtagcgaggtgacacaggcactggagattgcgagggagagtccggacggagcacgagacccaactatcagcagcattctggaatcagctctagcaagtatttggagcaaagtccaagctcatccggacagctacatcatgtcacgagacgagttcgctgtcttcaacttcttccaacatcggttcttgggcaacaagctggccattgccgctcggaaacgtttctgggacaactggactctaccttga

SEQ ID NO: 25157 - protein, 140 aa, Muscodor strobelii
  misc_feature: SGI Peptide ID NO. 568584
  misc_feature (56)..(136): NCBI GI: 46136907 Blast Desc: FG09969.1 [Gibberella zeae PH-1]
  misc_feature (56)..(136): NCBI GI: 256732112 Blast Desc: NECHADRAFT_80398 [Nectria haematococca mpVI 77-13-4]
  misc_feature (60)..(136): NCBI GI: 39974137 Blast Desc: MGG_00785 [Magnaporthe grisea 70-15] gi|145018279|gb|EDK02558.1| MGG_00785 [Magnaporthe grisea 70-15]
  misc_feature (51)..(136): NCBI GI: 154316709 Blast Desc: BC1G_03772 [Botryotinia fuckeliana B05.10] gi|150845384|gb|EDN20577.1| BC1G_03772 [Botryotinia fuckeliana B05.10]
  misc_feature (48)..(137): NCBI GI: 240110022 Blast Desc: CPC735_035270 [Coccidioides posadasii C735 delta SOWgp]
  misc_feature (50)..(137): NCBI GI: 119184901 Blast Desc: CIMG_07201 [Coccidioides immitis RS]
  misc_feature (50)..(137): NCBI GI: 238838851 Blast Desc: conserved [Microsporum canis CBS 113480]
  misc_feature (50)..(136): NCBI GI: 240274171 Blast Desc: conserved [Ajellomyces capsulatus H143]
  misc_feature (50)..(136): NCBI GI: 225557713 Blast Desc: conserved [Ajellomyces capsulatus G186AR]
  misc_feature (50)..(136): NCBI GI: 258568544 Blast Desc: conserved [Uncinocarpus reesii 1704] gi|237906462|gb|EEP80863.1| conserved [Uncinocarpus reesii 1704]
MLLVNPHELHVQDLCHLAYGMNSTTTTVPMLDLLGMAEHNLREQRNVVYMASQESSSSSSEVTQALEIARESPDGARDPTISSILESALASIWSKVQAHPDSYIMSRDEFAVFNFFQHRFLGNKLAIAARKRFWDNWTLP

SEQ ID NO: 25158 - DNA, 2935 bp, Muscodor strobelii
  misc_feature: SGI EST ID NO. CUFF.59175.0
  misc_feature: Variant of the nucleotide sequence at SEQ ID NO 25156
tcaaggtaacacattccatctaggtgtcacgctagaaagcggcatggatttgccaggtcaagtggcatgttccatgatttgataaaggagaatgcctaaccaagcaccgaagcaagatgtgcgcatgcgagacccgtctttccaatctctctagtctctatgcaatcgcgatactgaggtccgccttgcttttcagccttctggggctcattagtcacagatgtctcagctgagtccgctctgactcgtccaccagcgtctttcctcgtttttgtcccgagtcacagatcaggggcatcgtggaactaacaagttactacccctcagatgattaccacagcggaaccagggctttcggccatcggtgtacattccgcgtctcgaataacgtggttatgtggggtttcatgaagcaaagacaccggtcccaaggaggtggaacgggagggtaggctagctggagctaggcatcagcaaagtttgcttcgttgaacagaccatttctagttgtcaggtggcagcttggtatcatttgaataacaggacgaacttagatacgagggaccgcctttacgctcaggttcctgaagatggaatgataatgacgcccaccatcaaaatagcttctatgaaggcaacgacgttgaatctgaacgtggcctgttataatagatcgcgaaggcaaagccgtgagttgttacgagatcagggatccaaagccaacatctagcttctattagtggaacccacagagaactacaatcactaagattggcaaaactcaagagcagtagatagctgaaaccttgtgtatctggcaccgattctcagtggctgctggacgaatcagataaattggcacccatgtaaccagaaagagttgtgactgacttgtgcagaaccacattaaagactttggaccacggcacaaactgctcttagtcacggggcaggagatcggaaaatgcggtgactcgatcccgatgctatgaaccatgtatggattgccagagagtaatgtgtcccatttttacagttccctgttcgtggtttttgaaatgcgacagacatcgcaaatcaatcaaagtttgcgggcgtagtattaaagtaacaaaagaccctcacagcgtcgctgtcagcctcatcttcccttagtatcaagcatatcaccaccttgcaaacagttttgcaacagtcaagggactttttctgcgtcacataacgcagcccaacggtttctaagtttggatttatcttctataaaaagatcctcgaaacccagtacatcctcgtcacactctacttcgggagttcaataaaacccgcccggcataactggtccgccaggttcgcaagcattgcttttgccggtaattagtactatcattcatacgctcaagcaaccacaattcccgccgggtcccggaaagcatgctgctcgttaatccccacgaactacacgtccaggatctctgccatcttgcttacggaatgaattctactacaactacagtgcctatgctcgatcttttgggcatggctgagcacaatctgcgagaacaaaggaacgtagtgtatatggcatcacaagaaagcagcagcagcagtagcgaggtgacacaggcactggagattgcgagggagagtccggacggagcacgagacccaactatcagcagcattctggaatcagctctagcaagtatttggagcaaagtccaagctcatccggacagctacatcatgtcacgagacgagttcgctgtcttcaacttcttccaacatcggttcttgggcaacaagctggccattgccgctcggaaacgtttctgggacaactggactctaccttgaaacacgttggcagtcatgcataccacgcgtcgaatccccttgtcgttcgtgtattatcactcagaacttctattatcgtcactttacatagcggagcctttatcaagaagaagaacaagatgatgcagggctataccccttagaatgataccaccccttcagcatctccaccagcacgaacatttatcatttctggcgacactactcactcacgaattcaacgcattcacactacacttcccaccactaccaccatcggttggtgtgactcaggagagaaagaagacacaagcacatagatggagcaagagagaacaagggcacaagctgcagggatctagtagcatcgtgcattgtgttacatcggaatacatagtaatggcagtggagttggaagatagaaatcgatacttccgtttgtacattgttttcctgatatctacttttgctacgaataatacatagcgaacaataaatttgtatatgcctgccgagagtcctttgagaacaacggtgacttcatgatgcaggtatacgcaactgggttagcgctacttcgctcaccgcctcttctcccgtcttctatcttcatcatcttagatcacggaacctgctcatacatgtatgttgcaatcaaaattattcacatcggcactgtctctgtcatagctcataggccggatatggtccagcccgtttcaaccgcttttgctcttacttgactcacacgtgttgatggcgttcagaaatgtcgtgcgcctatgaaatagttagcatgaaaccggggaacaatccaagggcgatggaagacaccacagaaccgagatgaagtggccgtcgagcatttgccaatatgccaagaagaatagtcgaaccttatttttcaatcttggccatctcgggctatccgaaggcttcgataagctagtagacattgagtgctagataatgagaggctgctcggcctctctcctcgttgtgtagatgaaattgaaggtagcaaattacgatttaacctagactcagggcgggcattgctttagtcgtgtacgggagattggcttctagaaggcgaatggaa

SEQ ID NO: 25159 - DNA, 828 bp, Muscodor strobelii
  misc_feature: SGI cDNA ID NO. 568585
  misc_feature: Encodes the peptide sequence at SEQ ID NO 25160
atgcgaagctatttcgggagcatcctggcattcgtagcttgtcttacgcaaggtatttatgcccttcctagatctttgaagcaattaaaaactagcaaagcggtaaatctgactcacgcctctacactcgcagctgctgtattgccaagtgacgatcttgagcaacgatccttcgcaaatggcgtccgcttgcgtataatgcctcttggggcctcaatcacctatggcttgaagtctacggatggcaatggatataggaaagatctccgggttaagctgatcgacaatggcaatcccgtgaattacgtaggtacccagaataatggaactatgctcgacaatagtatggaaggctggccgggctataccatctccgaggtgcacaataaggccaacgtagccgtgcctaaatacaagcctaatgtcatcttggtcaatgtcggcaccaacgatgccagcggcaacgttgatatctcggctgcaggccagcgcatgacgagtcttctgaacgatctgtatgccaaatcacctcgcgccacagtcatcttgtcgacattgcttgtacggtcagacacgacgatgcagaagcgtaccgtctccattaactcacaaattaaaaccgtggcagcagctcagcaggccaaaaatcgacggctggttctagtcgacatggaatcaccatctggtccggttgtgggagacctggtagacggaactcatcctgatgatgccggatacgctaagatggcaaacatatggttcgctgggatcaagacggctagtgataaggggtttttggtggcaccagaggcttccgacaacgtttaa

SEQ ID NO: 25160 - protein, 275 aa, Muscodor strobelii
  misc_feature: SGI Peptide ID NO. 568585
  misc_feature (66)..(253): Pfam Id: PF00657 Pfam Desc: GDSL-like Lipase/Acylhydrolase
  misc_feature (33)..(270): NCBI GI: 85082538 Blast Desc: NCU04526 [Neurospora crassa OR74A] gi|28918018|gb|EAA27701.1| [Neurospora crassa OR74A]
  misc_feature (48)..(271): NCBI GI: 116195422 Blast Desc: CHGG_04309 [Chaetomium globosum CBS 148.51] gi|88180222|gb|EAQ87690.1| CHGG_04309 [Chaetomium globosum CBS 148.51]
  misc_feature (56)..(271): NCBI GI: 171691426 Blast Desc: protein product [Podospora anserina] gi|170945661|emb|CAP71774.1| protein product [Podospora anserina]
  misc_feature (22)..(270): NCBI GI: 261357824 Blast Desc: conserved [Verticillium albo-atrum VaMs.102]
  misc_feature (64)..(266): NCBI GI: 255931095 Blast Desc: Pc12g02110 [Penicillium chrysogenum Wisconsin 54-1255] gi|211581723|emb|CAP79838.1| Pc12g02110 [Penicillium chrysogenum Wisconsin 54-1255]
  misc_feature (39)..(270): NCBI GI: 169778429 Blast Desc: [Aspergillus oryzae RIB40] gi|83772417|dbj|BAE62547.1| protein product [Aspergillus oryzae]
  misc_feature (39)..(270): NCBI GI: 238495752 Blast Desc: esterase, [Aspergillus flavus NRRL3357] gi|220695762|gb|EED52105.1| esterase, [Aspergillus flavus NRRL3357]
  misc_feature (64)..(266): NCBI GI: 256731629 Blast Desc: NECHADRAFT_122845 [Nectria haematococca mpVI 77-13-4]
  misc_feature (64)..(269): NCBI GI: 116203151 Blast Desc: CHGG_09460 [Chaetomium globosum CBS 148.51] gi|88177978|gb|EAQ85446.1| CHGG_09460 [Chaetomium globosum CBS 148.51]
  misc_feature (44)..(272): NCBI GI: 145611800 Blast Desc: MGG_00110 [Magnaporthe grisea 70-15] gi|145019048|gb|EDK03327.1| MGG_00110 [Magnaporthe grisea 70-15]
MRSYFGSILAFVACLTQGIYALPRSLKQLKTSKAVNLTHASTLAAAVLPSDDLEQRSFANGVRLRIMPLGASITYGLKSTDGNGYRKDLRVKLIDNGNPVNYVGTQNNGTMLDNSMEGWPGYTISEVHNKANVAVPKYKPNVILVNVGTNDASGNVDISAAGQRMTSLLNDLYAKSPRATVILSTLLVRSDTTMQKRTVSINSQIKTVAAAQQAKNRRLVLVDMESPSGPVVGDLVDGTHPDDAGYAKMANIWFAGIKTASDKGFLVAPEASDNV

SEQ ID NO: 25161 - DNA, 321 bp, Muscodor strobelii
  misc_feature: SGI EST ID NO. CUFF.59187.0
  misc_feature: Variant of the nucleotide sequence at SEQ ID NO 25159
cgggttaagctgatcgacaatggcaatcccgtgaattacgtaggtacccagaataatggaactatgctcgacaatagtatggaaggctggccgggctataccatctccgaggtgcacaataaggccaacgtagccgtgcctaaatacaagcctaatgtcatcttggtcaatgtcggcaccaacgatgccagcggcaacgttgatatctcggctgcaggccagcgcatgacgagtcttctgaacgatctgtatgccaaatcacctcgcgccacagtcatcttgtcgacattgcttgtacggtcagacacgacgatgcagaag

SEQ ID NO: 25162 - DNA, 786 bp, Muscodor strobelii
  misc_feature: SGI cDNA ID NO. 568586
  misc_feature: Reduced expression when VOC is produced
  misc_feature: Encodes the peptide sequence at SEQ ID NO 25163
atggccgttcccttctatccaccaccaacgctcaactcccacttcgccataacgaggccgacagcaacagacattgacactctagcacgtgtctactatgagtcgttctccctggacccaggcaacacctactggtggtcgcccgacaaagatgccatgttcacatggatgcacgcccgtatcctgcgcaagatgaaggattccagcgtaaggcactatcaggttgtcgacatttcttcctggaaacccgagactgtcgcttttgcgcgctgggacatacctgacggctatgaggaagaattcggcaagtttgtgagcatcggcgggagcgtggacgtttcagctgtcgtcgaggagggcggcgacgagaatttgacccctaccgtagcccctgtagaagagacaactgccggagccgccaagtcgatagacatccccgagggcgctgacccagagctgtgccgcgggttctttgactggctgggtgttatgggtgagaaatggggtgcgaaggatatgctggggctctcgctcctatgcacagcacccaaataccaccgccagggcgctgccaaagcattggtagggcccatgctcgccatcgcagacagagcagggttacgatcttatctagaggccaccgaatctggacgaccgatgtatgagaagctaggatttcgaacggtggaattcaaagaatttgacctaccttcattgactggcggtcgactgggcggcacgtcgtacctatccatcatgatacgggaaccaaaatcgtcgaaataa

SEQ ID NO: 25163 - protein, 261 aa, Muscodor strobelii
  misc_feature: SGI Peptide ID NO. 568586
  misc_feature (128)..(227): Pfam Id: PF00583 Pfam Desc: Acetyltransferase (GNAT) family
  misc_feature (141)..(247): NCBI GI: 240111563 Blast Desc: GNAT family acetyltransferase, [Coccidioides posadasii C735 delta SOWgp]
  misc_feature (23)..(233): NCBI GI: 70983686 Blast Desc: acetyltransferase, GNAT family family [Aspergillus fumigatus Af293] gi|66844996|gb|EAL85332.1| acetyltransferase, GNAT family family [Aspergillus fumigatus Af293]
  misc_feature (141)..(258): NCBI GI: 258575767 Blast Desc: [Uncinocarpus reesii 1704] gi|237902331|gb|EEP76732.1| [Uncinocarpus reesii 1704]
  misc_feature (24)..(246): NCBI GI: 119484944 Blast Desc: acetyltransferase, GNAT family family [Neosartorya fischeri NRRL 181] gi|119410270|gb|EAW20217.1| acetyltransferase, GNAT family family [Neosartorya fischeri NRRL 181]
  misc_feature (143)..(261): NCBI GI: 119178605 Blast Desc: [Coccidioides immitis RS]
  misc_feature (146)..(261): NCBI GI: 121719954 Blast Desc: acetyltransferase, GNAT family family [Aspergillus clavatus NRRL 1] gi|119404887|gb|EAW15249.1| acetyltransferase, GNAT family family [Aspergillus clavatus NRRL 1]
  misc_feature (146)..(233): NCBI GI: 159123625 Blast Desc: acetyltransferase, GNAT family family [Aspergillus fumigatus A1163]
  misc_feature (27)..(241): NCBI GI: 75859070 Blast Desc: AN9493.2 [Aspergillus nidulans FGSC A4] gi|40747612|gb|EAA66768.1| AN9493.2 [Aspergillus nidulans FGSC A4] gi|259485406|tpe|CBF82401.1| TPA: conserved [Aspergillus FGSC
  misc_feature (143)..(258): NCBI GI: 240104665 Blast Desc: GNAT family acetyltransferase, [Coccidioides posadasii C735 delta SOWgp]
  misc_feature (145)..(257): NCBI GI: 156052885 Blast Desc: [Sclerotinia sclerotiorum 1980] gi|154704388|gb|EDO04127.1| [Sclerotinia sclerotiorum 1980]
  misc_feature: Useful for introducing or modulating the production of volatile compounds
MAVPFYPPPTLNSHFAITRPTATDIDTLARVYYESFSLDPGNTYWWSPDKDAMFTWMHARILRKMKDSSVRHYQVVDISSWKPETVAFARWDIPDGYEEEFGKFVSIGGSVDVSAVVEEGGDENLTPTVAPVEETTAGAAKSIDIPEGADPELCRGFFDWLGVMGEKWGAKDMLGLSLLCTAPKYHRQGAAKALVGPMLAIADRAGLRSYLEATESGRPMYEKLGFRTVEFKEFDLPSLTGGRLGGTSYLSIMIREPKSSK

SEQ ID NO: 25164 - DNA, 5781 bp, Muscodor strobelii
  misc_feature: SGI EST ID NO. CUFF.59370.1
  misc_feature: Variant of the nucleotide sequence at SEQ ID NO 25162
ccttgcgcttcttggcggactggctgtcatcctgcttgctcttctgcagcaggcggcgcagcagggtgttctggcgcaggcggtcgatctcctcctggcgcttggcaatcagctgctcgcgctccagctcgggcatggcctggatctcgtctcgctcggcctcgctggcgtagatgccgtccacagggtacttcatctcgtcgtcgtcgtccatcttgccgccggccgcagcagaggcggtggcggggagggattcggcatccgagtcggattcgtccatcggggcagagtcttcagatccagcgacagaggacctgtcgggggagaaaggagccctgttagcgcgcgacatgatggtgaggagcgtgcacagaggcgctgtcaagatggcaaagacaaagacacaaagggctagagatctgaagatccggaaggagtgaggacaaccacaacaacaatatcaacaacttgaagaagctgaagttgtggatgaacttgtgcaggagggcaggaaagcggccgatgggacgaaagaggacgagtgggtgacagatgtgctcaagctgttgaagaagtggcgagccagaaagcaaacaaaagactaagacagggcaaacagagaagctagaggggcagcaaatggacgcagactcgaaggcgcgaatgaagcagatgaagcaagaacgaagccaaatgtagaaaaagtggcagcgacgactggaggttgttgagccagcacgtctgaaagagcagagcacaggaaggtgcggcgaggcaggctgcgaagtactaaggtgtgcgctgttggtaggatagcaacgccatggatggcatcatagccttaggtatgcgaccagcgaaccgatcatccatgcgtctcttcatccctccctccatcaacacagctattcgggccaaggctgcagtgcaatgcaccaccgcctgaggcccctacgcacacagcaacaacatcaaccacaccaacagcatacgcagccttgcgcgcaacccaacaaaacgaagcaggcaagcaacagttgtagccggggggggagatgacttacgcctcgccctcctcctcgtccgagtcatcctgcctcctccgccgtgacgacttagctaccggtgtcgctttgctgttgcttctggagtccgggtccggagacggagatggcgatgggttgcggtccgaggcggcatcctgatctatctcgtcatccgaagcatcgtcccctccgactagagccaggaattcatcgtcaacatcggccatcgcggtagacagacgagcttcgaatgggatgggttcgaccgtgtaatatagggggttatgcgatacgacaacaagccgcaacgccgtgcgcgttcaattatattgtggattctatagagatggaatgaccgggctgtgatccccaagagaataaataaagtaaaataagccaaatactgtactatcgaaaatgggtgggttggatgactcgcagaccgtgaatgataggggctgggaaagtcaagccgcgatgacatgaaatggaattgaaaggataagttgaaaggtcgaagcggttgaatcgtagcgtcacgcctcaaagttgcggttgtaggcttaaggttgtactacacctactctatctccgatcctagcctgacgcagccccagagacgctaaaaaagcaaacgcttccgatggaatagaattggctgatagccacgatagctttgaaggatgcgtccgttgagagatcaagcatgccccctgtggccccgagcattaagcaagactgatgataggtacttggcatgtactagtttacactagagacgtcgtagtgtgacgaggttggcgtgggttggatcggcgtattagcaatatcttcgccgatgcacacagtattgcgtatgtgaatgtcgatgcattcgaggcagttaatactgtacgtattgtattgtactactagttgcatcgtcgtcgagccatatcatcatcatcgcctccatgttgaaactgtagtattgtcgtcgccttcgtcgccgccgtcgtcattgtgccgccatgtcttcgtccaggagtctcggcctcgtgcatgcaatgcgcaacatcagaatcaataccaacaccagcacggcgcgacgcaacgccacgcagtactgcctccatgatttcctcgtgcccgccttttttatcccgtcgtcatcacgatgcctctcctcgagttctcgcagccacgccgctactagcaccacaccgcccccgtcctcgtcctcgtcctcatcctcatcgtcgcgcgcctcctcgcagagctccttacccccaaagcggaagcctctgaccaaggaacagcgtgactttctctcttccgctctgcgcgtcaatcaggccggcgagctggctgcgacgcttatctacaccgcccagaccccgccgctcgtcaatgcccacccgcacctacggccgctgatggcacacgatgtacgagcaggaggccggccacctgcagaccttcaacgcgctcctcgccaagcaccgcgtccgccctacggccctctacccgctgtggtccgtcatggccaccggcctcggctggtccaccgcactgctgggccgcgaggctgccatggcctgcaccgaggccgtcgagaccgagatcggcgaccactacaataaccagatccgcaccctgctcgagatgttcgaccagtgggaagccgacggctacgacgtcggcccggagttccgcaacctcgtcagcaccctccgcaggatacgggacgaggagctagagcatctcgaccacgccgtccagcacgacgccaagaaggcagagccgtactggctgctgaccagcgtcatccgcgccggctgccggggcgccatctggaccagcgagcgtgtgtaacaaaaacccagctacgaagaatcgcacatagaaaactggcgtcgacacgtcgtgcaactagaccggccattctctatctgacaactgcctagatatggttataagctaggaacactcggcaggtgagcatggacatatttcataagctgtccgcggaagcatagcgcattgtaaaataatgtagattcatgtgcatctgagcagatcactcgaaaatgaatgcagatataatagctgcagggcatctcgatatacagaggccaacgcgcagagaccgggagaatagtgtatcgatatcacttcctgtagtgaagagcactcaaagtcactttatagtgctttggtccttatccgaaatacggtacgaaatgcgtgcgcatccgacccacatctctcgcatacagttggctacatatatgtacaagaattgcagttggtgttaaacagttgaaaattgtgcggttcaaatcttacggcgatgctccaggtgacactcacaggtacgttacaaccgagtgacggtgtcaattgacatggtaaaataagtatatcgcaatacatgccagttgggacgcagagacctaaataagtggcttcgaccttggcggtgcgtgtcggcgggcgtcggactaagacattgatcggcttacaacggagatttccttttcgtcctgcccttctgctccggacgagtcaccggccagctcacctacctgctccgtcctgacaccagcctccttcgcattcaccgtcgcaacatgactgggcgagattctggagatctaggggggtctcaatcccctcgtcagaacatctccgctcctcgtattcaagacacttcgtgcagacctgtgcttgcgagcagccctcatacgcgttgcatgccctgttttggcattagggcgcgccccatgtcgtctgagtgccccgttcatggagcttgtacagacggtcgaccgaccgctcgtggcgccataaaacataaaacagtcagttcggttcacatgatgccgaattgcacatgatgtggcactcgtcttggcccctctgtgctcgtatatatttaccactgggcccggcgtgtactcgcaagaatcaagacggctctcattttgcgttgactcgcatccgtctcgcatccgtctcgcagacaagccaagatcggactctgtagccgccccagcagaagcctgtctgtcgtcagaggctccagagaaacccaccggccaaaatggccgttcccttctatccaccaccaacgctcaactcccacttcgccataacgaggccgacagcaacagacattgacactctagcacgtgtctactatgagtcgttctccctggacccaggcaacacctactggtggtcgcccgacaaagatgccatgttcacatggatgcacgcccgtatcctgcgcaagatgaaggattccagcgtaaggcactatcaggttgtcgacatttcttcctggaaacccgagactgtcgcttttgcgcgctgggacatacctgacggctatgaggaagaattcggcaagtttgtgagcatcggcgggagcgtggacgtttcagctgtcgtcgaggagggcggcgacgagaatttgacccctaccgtagcccctgtagaagagacaactgccggagccgccaagtcgatagacatccccgagggcgctgacccagagctgtgccgcgggttctttgactggctgggtgttatgggtgagaaatggggtgcgaaggatatgctggggctctcgctcctatgcacagcacccaaataccaccgccagggcgctgccaaagcattggtagggcccatgctcgccatcgcagacagagcagggttacgatcttatctagaggccaccgaatctggacgaccgatgtatgagaagctaggatttcgaacggtggaattcaaagaatttgacctaccttcattgactggcggtcgactgggcggcacgtcgtacctatccatcatgatacgggaaccaaaatcgtcgaaataaggtagaacatgacggaacggagtggagttggaataagcggcttttcggtttctcatggattgatgtattgcattgcatagcgctttctcaaatcaggcacttttcgatgatcctaggacgtatctactaccatggccgctacttatacatctgcacgattctccttcacgactttcacatcagcagtcgcaagcggtctgaaagtaaaagtacattcccaagttgcaaatattatgagtctctgcagtacttcgccaagaaactggcaactctgcttgtacgcatcgaatcgacttcgctttcattaaaggatctgtcaattcagcttcagcacccgccacgcgagaagatatgcactattccatgcgggagtacgaattcaatcgaaatctcgtatgccatgttcttctaggctagttgtttgcgagagcttttagacttcacgcctattatagttttctctgtataccctacataccatagtgaagcattacgggaaagtgccgagagatggaggccttcgggatgacattcgtgacaattgagttcacttgtgagaagggataacggagaaaaaaactcagtccatcactatcccccagtaacgcttctctttacgaagttatactacataagcactcccgtatgaacaaacatacttggccgaagagccttcaagactactgaagacccgacggttaacgttcgaaaatggaaactcgacagtacaactctttatttgtttctcaagcctctacaccagaaaatgttccgctcttatatggtcgtgaatatgaggcaacgttaactacatctagactagtgatagggggcaacttaatgaacttgatcctatgtccgaat

SEQ ID NO: 25165 - DNA, 792 bp, Muscodor strobelii
  misc_feature: SGI cDNA ID NO. 568587
  misc_feature: Reduced expression when VOC is produced
  misc_feature: Encodes the peptide sequence at SEQ ID NO 25166
atgtcttcgtccaggagtctcggcctcgtgcatgcaatgcgcaacatcagaatcaataccaacaccagcacggcgcgacgcaacgccacgcagtactgcctccatgatttcctcgtgcccgccttttttatcccgtcgtcatcacgatgcctctcctcgagttctcgcagccacgccgctactagcaccacaccgcccccgtcctcgtcctcgtcctcatcctcatcgtcgcgcgcctcctcgcagagctccttacccccaaagcggaagcctctgaccaaggaacagcgtgactttctctcttccgctctgcgcgtcaatcaggccggcgagctggctgcgacgcttatctacaccgcccagaccccgccgctcgaggccggccacctgcagaccttcaacgcgctcctcgccaagcaccgcgtccgccctacggccctctacccgctgtggtccgtcatggccaccggcctcggctggtccaccgcactgctgggccgcgaggctgccatggcctgcaccgaggccgtcgagaccgagatcggcgaccactacaataaccagatccgcaccctgctcgagatgttcgaccagtgggaagccgacggctacgacgtcggcccggagttccgcaacctcgtcagcaccctccgcaggatacgggacgaggagctagagcatctcgaccacgccgtccagcacgacgccaagaaggcagagccgtactggctgctgaccagcgtcatccgcgccggctgccggggcgccatctggaccagcgagcgtgtgtaa

SEQ ID NO: 25166 - protein, 263 aa, Muscodor strobelii
  misc_feature: SGI Peptide ID NO. 568587
  misc_feature (166)..(256): Pfam Id: PF03232 Pfam Desc: Ubiquinone biosynthesis protein COQ7
  misc_feature (89)..(165): Pfam Id: PF03232 Pfam Desc: Ubiquinone biosynthesis protein COQ7
  misc_feature (129)..(165): Pfam Id: PF03232 Pfam Desc: Ubiquinone biosynthesis protein COQ7
  misc_feature (89)..(263): NCBI GI: 85085894 Blast Desc: NCU03957 [Neurospora crassa OR74A] gi|28918689|gb|EAA28360.1| NCU03957 [Neurospora crassa OR74A] gi|40882326|emb|CAF06148.1| related to ubiquinone biosynthesis
  misc_feature (70)..(259): NCBI GI: 46136805 Blast Desc: FG09918.1 [Gibberella zeae PH-1]
  misc_feature (12)..(259): NCBI GI: 39973789 Blast Desc: MGG_00959 [Magnaporthe grisea 70-15] gi|145018085|gb|EDK02364.1| MGG_00959 [Magnaporthe grisea 70-15]
  misc_feature (96)..(263): NCBI GI: 116201561 Blast Desc: CHGG_08665 [Chaetomium globosum CBS 148.51] gi|88177183|gb|EAQ84651.1| CHGG_08665 [Chaetomium globosum CBS 148.51]
  misc_feature (93)..(263): NCBI GI: 171677975 Blast Desc: protein product [Podospora anserina] gi|170937056|emb|CAP61715.1| protein product [Podospora anserina]
  misc_feature (64)..(263): NCBI GI: 240107432 Blast Desc: Rubrerythrin family protein [Coccidioides posadasii C735 delta SOWgp]
  misc_feature (36)..(263): NCBI GI: 119497995 Blast Desc: ubiquinone biosynthesis protein Coq7, [Neosartorya fischeri NRRL 181] gi|119413919|gb|EAW23858.1| ubiquinone biosynthesis protein Coq7, [Neosartorya fischeri NRRL 181]
  misc_feature (40)..(263): NCBI GI: 261195921 Blast Desc: ubiquinone biosynthesis protein Coq7 [Ajellomyces dermatitidis SLH14081] gi|239587497|gb|EEQ70140.1| ubiquinone biosynthesis protein Coq7 [Ajellomyces dermatitidis SLH14081]
  misc_feature (47)..(258): NCBI GI: 169606162 Blast Desc: SNOG_06117 [Phaeosphaeria nodorum SN15] gi|111064828|gb|EAT85948.1| SNOG_06117 [Phaeosphaeria nodorum SN15]
  misc_feature (36)..(263): NCBI GI: 70988947 Blast Desc: ubiquinone biosynthesis protein Coq7 [Aspergillus fumigatus Af293] gi|66846955|gb|EAL87286.1| ubiquinone biosynthesis protein Coq7, [Aspergillus fumigatus Af293] protein
  misc_feature: Useful for introducing or modulating the production of volatile compounds
MSSSRSLGLVHAMRNIRINTNTSTARRNATQYCLHDFLVPAFFIPSSSRCLSSSSRSHAATSTTPPPSSSSSSSSSSRASSQSSLPPKRKPLTKEQRDFLSSALRVNQAGELAATLIYTAQTPPLEAGHLQTFNALLAKHRVRPTALYPLWSVMATGLGWSTALLGREAAMACTEAVETEIGDHYNNQIRTLLEMFDQWEADGYDVGPEFRNLVSTLRRIRDEELEHLDHAVQHDAKKAEPYWLLTSVIRAGCRGAIWTSERV

SEQ ID NO: 25167 - DNA, 5781 bp, Muscodor strobelii; identical to SEQ ID NO: 25164
  misc_feature: SGI EST ID NO. CUFF.59370.1
  misc_feature: Variant of the nucleotide sequence at SEQ ID NO 25165

SEQ ID NO: 25168 - DNA, 255 bp, Muscodor strobelii
  misc_feature: SGI cDNA ID NO. 568588
  misc_feature: Encodes the peptide sequence at SEQ ID NO 25169
atggccgatgttgacgatgaattcctggctctagtcggaggggacgatgcttcggatgacgagatagatcaggatgccgcctcggaccgcaacccatcgccatctccgtctccggacccggactccagaagcaacagcaaagcgacaccggtagctaagtcgtcacggcggaggaggcaggatgactcggacgaggaggagggcgaggcgggcctcaggcggtggtgcattgcactgcagccttggcccgaatag

SEQ ID NO: 25169 - protein, 84 aa, Muscodor strobelii
  misc_feature: SGI Peptide ID NO. 568588
  misc_feature (1)..(70): NCBI GI: 85085889 Blast Desc: NCU03956 [Neurospora crassa OR74A] gi|28918688|gb|EAA28359.1| [Neurospora crassa OR74A] gi|40882327|emb|CAF06149.1| related to Pol II transcription
  misc_feature (1)..(69): NCBI GI: 116201563 Blast Desc: CHGG_08666 [Chaetomium globosum CBS 148.51] gi|88177184|gb|EAQ84652.1| CHGG_08666 [Chaetomium globosum CBS 148.51]
  misc_feature (1)..(70): NCBI GI: 261353189 Blast Desc: conserved [Verticillium albo-atrum VaMs.102]
MADVDDEFLALVGGDDASDDEIDQDAASDRNPSPSPSPDPDSRSNSKATPVAKSSRRRRQDDSDEEEGEAGLRRWCIALQPWPE

SEQ ID NO: 25170 - DNA, 5190 bp, Muscodor strobelii
  misc_feature: SGI EST ID NO. CUFF.59369.0
  misc_feature: Variant of the nucleotide sequence at SEQ ID NO 25168
attcggacataggatcaagttcattaagttgccccctatcactagtctagatgtagttaacgttgcctcatattcacgaccatataagagcggaacattttctggtgtagaggcttgagaaacaaataaagagttgtactgtcgagtttccattttcgaacgttaaccgtcgggtcttcagtagtcttgaaggctcttcggccaagtatgtttgttcatacgggagtgcttatgtagtataacttcgtaaagagaagcgttactgggggatagtgatggactgagtttttttctccgttatcccttctcacaagtgaactcaattgtcacgaatgtcatcccgaaggcctccatctctcggcactttcccgtaatgcttcactatggtatgtagggtatacagagaaaactataataggcgtgaagtctaaaagctctcgcaaacaactagcctagaagaacatggcatacgagatttcgattgaattcgtactcccgcatggaatagtgcatatcttctcgcgtggcgggtgctgaagctgaattgacagatcctttaatgaaagcgaagtcgattcgatgcgtacaagcagagttgccagtttcttggcgaagtactgcagagactcataatatttgcaacttgggaatgtacttttactttcagaccgcttgcgactgctgatgtgaaagtcgtgaaggagaatcgtgcagatgtataagtagcggccatggtagtagatacgtcctaggatcatcgaaaagtgcctgatttgagaaagcgctatgcaatgcaatacatcaatccatgagaaaccgaaaagccgcttattccaactccactccgttccgtcatgttctaccttatttcgacgattttggttcccgtatcatgatggataggtacgacgtgccgcccagtcgaccgccagtcaatgaaggtaggtcaaattctttgaattccaccgttcgaaatcctagcttctcatacatcggtcgtccagattcggtggcctctagataagatcgtaaccctgctctgtctgcgatggcgagcatgggccctaccaatgctttggcagcgccctggcggtggtatttgggtgctgtgcataggagcgagagccctggctctttcttagcggtggaattcatcttgagctcaagaatggcaagttgacaaggggaaaaacaaggcagacaaggagaagggcgacatacccagcatatccttcgcaccccatttctcacccataacacccagccagtcaaagaacccgcggcacagctctgggtcagcgccctcggggatgtctatcgacttggcggctccggcagttgtctcttctacaggggctacggtaggggtcaaattctcgtcgccgccctcctcgacgacagctgaaacgtccacgctcccgccgatgctcacaaacttgccgaattcttcctcatagccgtcaggtatgtcccagcgcgcaaaagcgacagtctcgggtttccaggaagaaatgtcgacaacctgatagtgccttacgctggaatccttcatcttgcgcaggatacgggcgtgcatccatgtgaacatggcatctttgtcgggcgaccaccagtaggtgttgcctgggtccagggagaacgactcatagtagacacgtgctagagtgtcaatgtctgttgctgtcggcctcgttatggcgaagtgggagttgagcgttggtggtggatagaagggaacggccattttggccggtgggtttctctggagcctctgacgacagacaggcttctgctggggcggctacagagtccgatcttggcttgtctgcgagacggatgcgagacggatgcgagtcaacgcaaaatgagagccgtcttgattcttgcgagtacacgccgggcccagtggtaaatatatacgagcacagaggggccaagacgagtgccacatcatgtgcaattcggcatcatgtgaaccgaactgactgttttatgttttatggcgccacgagcggtcggtcgaccgtctgtacaagctccatgaacggggcactcagacgacatggggcgcgccctaatgccaaaacagggcatgcaacgcgtatgagggctgctcgcaagcacaggtctgcacgaagtgtcttgaatacgaggagcggagatgttctgacgaggggattgagacccccctagatctccagaatctcgcccagtcatgttgcgacggtgaatgcgaaggaggctggtgtcaggacggagcaggtaggtgagctggccggtgactcgtccggagcagaagggcaggacgaaaaggaaatctccgttgtaagccgatcaatgtcttagtccgacgcccgccgacacgcaccgccaaggtcgaagccacttatttaggtctctgcgtcccaactggcatgtattgcgatatacttattttaccatgtcaattgacaccgtcactcggttgtaacgtacctgtgagtgtcacctggagcatcgccgtaagatttgaaccgcacaattttcaactgtttaacaccaactgcaattcttgtacatatatgtagccaactgtatgcgagagatgtgggtcggatgcgcacgcatttcgtaccgtatttcggataaggaccaaagcactataaagtgactttgagtgctcttcactacaggaagtgatatcgatacactattctcccggtctctgcgcgttggcctctgtatatcgagatgccctgcagctattatatctgcattcattttcgagtgatctgctcagatgcacatgaatctacattattttacaatgcgctatgcttccgcggacagcttatgaaatatgtccatgctcacctgccgagtgttcctagcttataaccatatctaggcagttgtcagatagagaatggccggtctagttgcacgacgtgtcgacgccagttttctatgtgcgattcttcgtagctgggtttttgttacacacgctcgctggtccagatggcgccccggcagccggcgcggatgacgctggtcagcagccagtacggctctgccttcttggcgtcgtgctggacggcgtggtcgagatgctctagctcctcgtcccgtatcctgcggagggtgctgacgaggttgcggaactccgggccgacgtcgtagccgtcggcttcccactggtcgaacatctcgagcagggtgcggatctggttattgtagtggtcgccgatctcggtctcgacggcctcggtgcaggccatggcagcctcgcggcccagcagtgcggtggaccagccgaggccggtggccatgacggaccacagcgggtagagggccgtagggcggacgcggtgcttggcgaggagcgcgttgaaggtctgcaggtggccggcctcctgctcgtacatcgtgtgccatcagcggccgtaggtgcgggtgggcattgacgagcggcggggtctgggcggtgtagataagcgtcgcagccagctcgccggcctgattgacgcgcagcttgagggagggacaaagactttagcatgcgctttgcgtcgaagaaggaatgccagctagcttacagcggaagagagaaagtcacgctgttccttggtcagaggcttccgctttgggggtaaggagctctgcgaggaggcgcgcgacgatgaggatgaggacgaggacgaggacgggggcggtgtggtgctagtagcggcgtggctgcgagaactcgaggagaggcatcgtgatgacgacgggataaaaaaggcgggcacgaggaaatcatggaggcagtactgcgtggcgttgcgtcgcgccgtgctggtgttggtattgattctgatgttgcgcattgcatgcacgaggccgagactcctggacgaagacatggcggcacaatgacgacggcggcgacgaaggcgacgacaatactacagtttcaacatggaggcgatgatgatgatatggctcgacgacgatgcaactagtagtacaatacaatacgtacagtattaactgcctcgaatgcatcgacattcacatacgcaatactgtgtgcatcggcgaagatattgctaatacgccgatccaacccacgccaacctcgtcacactacgacgtctctagtgtaaactagtacatgccaagtacctatcatcagtcttgcttaatgctcggggccacagggggcatgcttgatctctcaacggacgcatccttcaaagctatcgtggctatcagccaattctattccatcggaagcgtttgcttttttagcgtctctggggctgcgtcaggctaggatcggagatagagtaggtgtagtacaaccttaagcctacaaccgcaactttgaggcgtgacgctacgattcaaccgcttcgacctttcaacttatcctttcaattccatttcatgtcatcgcggcttgactttcccagcccctatcattcacggtctgcgagtcatccaacccacccattttcgatagtacagtatttggcttattttactttatttattctcttggggatcacagcccggtcattccatctctatagaatccacaatataattgaacgcgcacggcgttgcggcttgttgtcgtatcgcataaccccctatattacacggtcgaacccatcccattcgaagctcgtctgtctaccgcgatggccgatgttgacgatgaattcctggctctagtcggaggggacgatgcttcggatgacgagatagatcaggatgccgcctcggaccgcaacccatcgccatctccgtctccggacccggactccagaagcaacagcaaagcgacaccggtagctaagtcgtcacggcggaggaggcaggatgactcggacgaggaggagggcgaggcgtcctctgtcgctggatctgaagactctgccccgatggacgaatccgactcggatgccgaatccctccccgccaccgcctctgctgcggccggcggcaagatggacgacgacgacgagatgaagtaccctgtggacggcatctacgccagcgaggccgagcgagacgagatccaggccatgcccgagctggagcgcgagcagctgattgccaagcgccaggaggagatcgaccgcctgcgccagaacaccctgctgcgccgcctgctgcagaagagcaagcaggatgacagccagtccgccaagaagcgcaagg

SEQ ID NO: 25171 - DNA, 2763 bp, Muscodor strobelii
  misc_feature: SGI cDNA ID NO. 568589
  misc_feature: Reduced expression when VOC is produced
  misc_feature: Encodes the peptide sequence at SEQ ID NO 25172
ggcccagccgccctcggcatggccgccggcacggggtccgacgtcaccaaccacctcaaggtgcagctgctcgtgcgggcgtaccaggcgcgcggccaccacaaggccgacatcgacccgctgggcatccgcaacgagcagcagggcttcaccaacgtcaagcccaaggagctgacgctcgagcactaccagttctccgacaaggacctcgacaccgagtacgacctcggcccgggcatcctgccccgcttcaagcgcgagggccgcgacaagatgaccctgcgcgacatcatcgccgcctgcgagcgcatctactgcggctcctacggcgtcgagttcatccacatccccgaccgcgcccgctgcgactggctgcgcgagcgcatcgaggtgccccagcccttcaagtactccatcgacgagaagcgccgcatcctcgaccgcctcatctggagctccagcttcgagtccttcctcgccaccaagtaccccaacgacaagcgcttcggcctcgagggctgcgagacgctggtccccggcatgaaggctctcatcgaccgcagtgtcgactacggcgtcaaggacattgtcatcggcatgccccaccgtggtcgtctgaatgtcctgtccaacgtcgtccgcaagcagaacgagtccatcttcagcgagtttgcgggtactgcgggtgctgaggacgagggttccggtgacgtcaagtaccatctgggcatgaacttcgagcgtccgacgccctctggcaagcgtgtccagctctctctcgtcgccaacccctcgcatctggaggctgaggaccccgtcgtgctgggcaagacgcgcgccatccagcactacaacaacgacgagaagacccaccgtacggcgatgggtgttctgctccacggcgacgccgccttcgccgcccagggtgtcgtctacgagtgtctcggcttccactctctgcctgccttctcgaccggcggcaccatccacctggtcgtcaacaaccagatcggcttcaccaccgacccccgctttgcccgctccaccgcctactgcaccgacattgccaaggccatcgatgcccccgtcttccacgtcaacgccgacgacgtcgaggctgtcaacttcgtctgccagctcgctgccgactggcgcgccgagttccagtccgatgtcgtcatcgacctgatctgctaccgcaagcacggccacaacgagacggaccagccttcgttcacccagcccctgatgtacaagcgcattgccgagcacgatccccagatcaagatctacatcgacaagctcctcaaagacgggaccttcaccaaggaagacgtggaggagcacaagcaatgggtctggggcatgctggaagacagctttgccaagtccaaggactacaagcccagctccaaggaatggaccacctctgcctggaacggcttcaagtctcccaaggaactggccaacgaggtcctgccacacaatgctaccaatgtcgacaagaagactctggagcacattggcgaggtcatcggctccacccctgaagacttcaacgcgcaccgcaacctcaagcgtattctgcagaacaggactaaatcggtcgtcgagggtaagaatatcgactggtcgactgccgaggctcttgccattggttctctcgtcaccgagggccaccacgtccgtatctccggtcaggatgttgagcgtggtaccttctcccagcgccacgccgtcttccacgaccaggagaacgaggctacctacacgcctctgcagcacgtcagcaaggaccagggcaaattcgtcatctccaactcgtcgctcagcgagttcggtgctcttggcttcgagtatggttactcgctctcgtcgcccaatgctctggtcatgtgggaagcgcaattcggtgacttcgccaacaacgctcagtgtatcatcgatcagttcatcgcctccggtgaggtcaagtggcagcagcgaacaggtctcgtcatgtctcttccccacggttatgatggccagggtcccgagcactcctccggacggatggagcgatatctgcagctgagcaacgaggatcctcgtatcttccctgcgcccgagaagcttgagcgccagcaccaggactgcaacatgcagattgcttacatgaccacgcccgccaacttgttccacgccctccgccgacagatgcacagacaattccgcaagcccctcatcatcttcttctccaagtctctgctccgtcatcctcttgctcgctccaacattgaggaattcaccggcgagaatgctcacttccaatggattattcccgaccccgagcacgagaccggcgccatcaaggctcctgaagaggttgaccgtgtcattctctgctctggtcaagtctgggcggccctccacaagtaccgtgccgacaacaagattgataatgtcgccatcacccgtattgagcagctgaatcctttcccctgggagcagctgagagagaatctcgaccagtacaagaacgccaagaccatcgtctggtgtcaagaagagcccctgaatgctggtgcctggagcttcacgcagccccgtatcgagactctgctcaaccagacccagtaccacgaccggaagcacgtcatgtacgccggccgtaacccatctgcgtccgtggccaccggtatcaagtcttcgcacaagaaggaagaggaggagcttttgaacatggctttctctgtgacgcaagacaagctcaagggcgagtaa

SEQ ID NO: 25172 - protein, 920 aa, Muscodor strobelii
  misc_feature: SGI Peptide ID NO. 568589
  misc_feature (147)..(473): Pfam Id: PF00676 Pfam Desc: Dehydrogenase E1 component
  misc_feature (540)..(753): Pfam Id: PF02779 Pfam Desc: Transketolase, pyrimidine binding domain
  misc_feature (3)..(920): NCBI GI: 116204753 Blast Desc: conserved [Chaetomium globosum CBS 148.51] gi|88176388|gb|EAQ83856.1| conserved [Chaetomium globosum CBS 148.51]
  misc_feature (3)..(920): NCBI GI: 171690254 Blast Desc: protein product [Podospora anserina] gi|170945075|emb|CAP71186.1| protein product [Podospora anserina]
  misc_feature (2)..(920): NCBI GI: 145608396 Blast Desc: conserved [Magnaporthe grisea 70-15] gi|145015872|gb|EDK00362.1| conserved [Magnaporthe grisea 70-15]
  misc_feature (7)..(920): NCBI GI: 46116934 Blast Desc: FG04309.1 [Gibberella zeae PH-1]
  misc_feature (6)..(920): NCBI GI: 156054172 Blast Desc: SS1G_05934 [Sclerotinia sclerotiorum 1980] gi|154703714|gb|EDO03453.1| SS1G_05934 [Sclerotinia sclerotiorum 1980]
  misc_feature (3)..(920): NCBI GI: 164424833 Blast Desc: 2-oxoglutarate dehydrogenase E1 component, mitochondrial precursor [Neurospora crassa OR74A] gi|157070681|gb|EAA34012.2| 2-oxoglutarate dehydrogenase E1
  misc_feature (3)..(920): NCBI GI: 16416078 Blast Desc: oxoglutarate dehydrogenase precursor [Neurospora crassa]
  misc_feature (10)..(920): NCBI GI: 240105314 Blast Desc: 2-oxoglutarate dehydrogenase E1 component, mitochondrial precursor, [Coccidioides posadasii C735 delta SOWgp]
  misc_feature (6)..(920): NCBI GI: 225682695 Blast Desc: 2-oxoglutarate dehydrogenase E1 [Paracoccidioides brasiliensis Pb03]
  misc_feature (3)..(920): NCBI GI: 67538802 Blast Desc: AN5571.2 [Aspergillus nidulans FGSC A4] gi|40743086|gb|EAA62276.1| AN5571.2 [Aspergillus nidulans FGSC A4] gi|259484969|tpe|CBF81643.1| TPA: oxoglutarate dehydrogenase
  misc_feature (1)..(898): SWISSPROT Homolog: EC 1.2.4.2 Oxoglutarate dehydrogenase (succinyl-transferring)
  misc_feature: Useful for introducing or modulating the production of volatile compounds
  misc_feature: Useful for fungicidal and/or biocontrol applications
GPAALGMAAGTGSDVTNHLKVQLLVRAYQARGHHKADIDPLGIRNEQQGFTNVKPKELTLEHYQFSDKDLDTEYDLGPGILPRFKREGRDKMTLRDIIAACERIYCGSYGVEFIHIPDRARCDWLRERIEVPQPFKYSIDEKRRILDRLIWSSSFESFLATKYPNDKRFGLEGCETLVPGMKALIDRSVDYGVKDIVIGMPHRGRLNVLSNVVRKQNESIFSEFAGTAGAEDEGSGDVKYHLGMNFERPTPSGKRVQLSLVANPSHLEAEDPVVLGKTRAIQHYNNDEKTHRTAMGVLLHGDAAFAAQGVVYECLGFHSLPAFSTGGTIHLVVNNQIGFTTDPRFARSTAYCTDIAKAIDAPVFHVNADDVEAVNFVCQLAADWRAEFQSDVVIDLICYRKHGHNETDQPSFTQPLMYKRIAEHDPQIKIYIDKLLKDGTFTKEDVEEHKQWVWGMLEDSFAKSKDYKPSSKEWTTSAWNGFKSPKELANEVLPHNATNVDKKTLEHIGEVIGSTPEDFNAHRNLKRILQNRTKSVVEGKNIDWSTAEALAIGSLVTEGHHVRISGQDVERGTFSQRHAVFHDQENEATYTPLQHVSKDQGKFVISNSSLSEFGALGFEYGYSLSSPNALVMWEAQFGDFANNAQCIIDQFIASGEVKWQQRTGLVMSLPHGYDGQGPEHSSGRMERYLQLSNEDPRIFPAPEKLERQHQDCNMQIAYMTTPANLFHALRRQMHRQFRKPLIIFFSKSLLRHPLARSNIEEFTGENAHFQWIIPDPEHETGAIKAPEEVDRVILCSGQVWAALHKYRADNKIDNVAITRIEQLNPFPWEQLRENLDQYKNAKTIVWCQEEPLNAGAWSFTQPRIETLLNQTQYHDRKHVMYAGRNPSASVATGIKSSHKKEEEELLNMAFSVTQDKLKGE

SEQ ID NO: 25173 - DNA, 3148 bp, Muscodor strobelii
  misc_feature: SGI EST ID NO. CUFF.59206.0
  misc_feature: Variant of the nucleotide sequence at SEQ ID NO 25171
ggcccagccgccctcggcatggccgccggcacggggtccgacgtcaccaaccacctcaaggtgcagctgctcgtgcgggcgtaccaggcgcgcggccaccacaaggccgacatcgacccgctgggcatccgcaacgagcagcagggcttcaccaacgtcaagcccaaggagctgacgctcgagcactaccagttctccgacaaggacctcgacaccgagtacgacctcggcccgggcatcctgccccgcttcaagcgcgagggccgcgacaagatgaccctgcgcgacatcatcgccgcctgcgagcgcatctactgcggctcctacggcgtcgagttcatccacatccccgaccgcgcccgctgcgactggctgcgcgagcgcatcgaggtgccccagcccttcaagtactccatcgacgagaagcgccgcatcctcgaccgcctcatctggagctccagcttcgagtccttcctcgccaccaagtaccccaacgacaagcgcttcggcctcgagggctgcgagacgctggtccccggcatgaaggctctcatcgaccgcagtgtcgactacggcgtcaaggacattgtcatcggcatgccccaccgtggtcgtctgaatgtcctgtccaacgtcgtccgcaagcagaacgagtccatcttcagcgagtttgcgggtactgcgggtgctgaggacgagggttccggtgacgtcaagtaccatctgggcatgaacttcgagcgtccgacgccctctggcaagcgtgtccagctctctctcgtcgccaacccctcgcatctggaggctgaggaccccgtcgtgctgggcaagacgcgcgccatccagcactacaacaacgacgagaagacccaccgtacggcgatgggtgttctgctccacggcgacgccgccttcgccgcccagggtgtcgtctacgagtgtctcggcttccactctctgcctgccttctcgaccggcggcaccatccacctggtcgtcaacaaccagatcggcttcaccaccgacccccgctttgcccgctccaccgcctactgcaccgacattgccaaggccatcgatgcccccgtcttccacgtcaacgccgacgacgtcgaggctgtcaacttcgtctgccagctcgctgccgactggcgcgccgagttccagtccgatgtcgtcatcgacctgatctgctaccgcaagcacggccacaacgagacggaccagccttcgttcacccagcccctgatgtacaagcgcattgccgagcacgatccccagatcaagatctacatcgacaagctcctcaaagacgggaccttcaccaaggaagacgtggaggagcacaagcaatgggtctggggcatgctggaagacagctttgccaagtccaaggactacaagcccagctccaaggaatggaccacctctgcctggaacggcttcaagtctcccaaggaactggccaacgaggtcctgccacacaatgctaccaatgtcgacaagaagactctggagcacattggcgaggtcatcggctccacccctgaagacttcaacgcgcaccgcaacctcaagcgtattctgcagaacaggactaaatcggtcgtcgagggtaagaatatcgactggtcgactgccgaggctcttgccattggttctctcgtcaccgagggccaccacgtccgtatctccggtcaggatgttgagcgtggtaccttctcccagcgccacgccgtcttccacgaccaggagaacgaggctacctacacgcctctgcagcacgtcagcaaggaccagggcaaattcgtcatctccaactcgtcgctcagcgagttcggtgctcttggcttcgagtatggttactcgctctcgtcgcccaatgctctggtcatgtgggaagcgcaattcggtgacttcgccaacaacgctcagtgtatcatcgatcagttcatcgcctccggtgaggtcaagtggcagcagcgaacaggtctcgtcatgtctcttccccacggttatgatggccagggtcccgagcactcctccggacggatggagcgatatctgcagctgagcaacgaggatcctcgtatcttccctgcgcccgagaagcttgagcgccagcaccaggactgcaacatgcagattgcttacatgaccacgcccgccaacttgttccacgccctccgccgacagatgcacagacaattccgcaagcccctcatcatcttcttctccaagtctctgctccgtcatcctcttgctcgctccaacattgaggaattcaccggcgagaatgctcacttccaatggattattcccgaccccgagcacgagaccggcgccatcaaggctcctgaagaggttgaccgtgtcattctctgctctggtcaagtctgggcggccctccacaagtaccgtgccgacaacaagattgataatgtcgccatcacccgtattgagcagctgaatcctttcccctgggagcagctgagagagaatctcgaccagtacaagaacgccaagaccatcgtctggtgtcaagaagagcccctgaatgctggtgcctggagcttcacgcagccccgtatcgagactctgctcaaccagacccagtaccacgaccggaagcacgtcatgtacgccggccgtaacccatctgcgtccgtggccaccggtatcaagtcttcgcacaagaaggaagaggaggagcttttgaacatggctttctctgtgacgcaagacaagctcaagggcgagtaaactggctaattgccgaagttcagtgagacgtgggagagtcgaagaagaaaacatcatatttcatggcgatggcggtgtatgcatgcatgggctttcttgtaatttaaaaacaatatccctttttccctgtctgttgtataatgaagcctccggacgtcatgacttgagagagggtgtcgacatgagatagaataaagacagccagagaagaatgcccagagtgcttgtattgtgcattgggacggcaagatggaaataacatacccagatattaaaagagagttttatcagttcgactttgggccttgatgtttagatgtgatatttccttgttctggtatttaaactacattgctgttatatgacattggaggctcgactatag

SEQ ID NO: 25174 - DNA, 1206 bp, Muscodor strobelii
  misc_feature: SGI cDNA ID NO. 568590
  misc_feature: Encodes the peptide sequence at SEQ ID NO 25175
atgcattccgcctctatcggtgcgctactaccatatatggaatcatattacaacgtctccttcacaataatatcactcgtctttctcgcaccatgggcgggctacctacttgccgcattccttaacaccagagtacactattatctcggccaaagaggcgtcgcgttcctaggtccgttttcaaagatcttgggccatatctcgctatcactgcatccacctttcccggcattggtcccgctactcgtgttggttacatttggaagtggactccaagaaggggcatggaatgcgtgggtagggaacatggaaaacacacacgagctgattggaatcttgcacgggtcgttcggattaggagcgactatcgggcccctcatcgcaacagcgtttgttactagagtacatcttccttggtggacattctactaccttatgctcggactgtcggtcctcgaactcagtctcactctgacttctttctggaaggcgacgggcctagcatatcgcgcgacgcacaatatttctgttgataagaaggcaattacaatgagagtcgtggaaaaacagatttgctggctgacggccgtatttctgtttgtctacgtaggagccgaagtcagccttggaggctggatagtcacgttcatattggacgtccgtcacgccgagccgtttaaggctggtctcactgtcacgttcttctggctgggtttgaccatcggacgtgtcactcttgggttcgttactggccgggttggagagaaactgattgtctgtgtctatttgcttctttgcattgtgtttcaactgctctattggataatcccgatcttcgttgcctcggctgttttcgttgcagtggagggctacttcctcgggccccttttcccggtcgctatcgtcactttgaataagctgctgcctagtgagcaccacgtatcggcggttggcttcgctgccgcgtttggtagcggaggagctgctatctttcccttcgctgtaggtgctattgcacaaagccgaggtgtttgggttttgcagcccgttattctcactcttctcgcattcatgctcttgttgtggttgcttttaccgggtggtataaaaccagacggccttcagcgtgcaagggacagaaatgagaagcctggacattgtctcttcggtcttatgaagagcctgagttctaagatacgaccttaa

SEQ ID NO: 25175 - protein, 401 aa, Muscodor strobelii
  misc_feature: SGI Peptide ID NO. 568590
  misc_feature (3)..(332): Pfam Id: PF07690 Pfam Desc: Major Facilitator Superfamily
  misc_feature (195)..(363): Pfam Id: PF07690 Pfam Desc: Major Facilitator Superfamily
  misc_feature (1)..(398): NCBI GI: 171690146 Blast Desc: protein product [Podospora anserina] gi|170945021|emb|CAP71132.1| protein product [Podospora anserina]
  misc_feature (1)..(386): NCBI GI: 9367551 Blast Desc: conserved [Neurospora crassa]
  misc_feature (1)..(386): NCBI GI: 164424812 Blast Desc: NCU05394 [Neurospora crassa OR74A] gi|157070672|gb|EAA34246.2| conserved [Neurospora crassa OR74A]
  misc_feature (1)..(386): NCBI GI: 116204783 Blast Desc: CHGG_10275 [Chaetomium globosum CBS 148.51] gi|88176403|gb|EAQ83871.1| CHGG_10275 [Chaetomium globosum CBS 148.51]
  misc_feature (1)..(385): NCBI GI: 46116926 Blast Desc: FG04305.1 [Gibberella zeae PH-1]
  misc_feature (1)..(400): NCBI GI: 256729210 Blast Desc: NECHADRAFT_95677 [Nectria haematococca mpVI 77-13-4]
  misc_feature (2)..(366): NCBI GI: 242802937 Blast Desc: MFS transporter, [Talaromyces stipitatus ATCC 10500] gi|218717419|gb|EED16840.1| MFS transporter, [Talaromyces stipitatus ATCC 10500]
  misc_feature (2)..(366): NCBI GI: 255943945 Blast Desc: Pc20g01810 [Penicillium chrysogenum Wisconsin 54-1255] gi|211587475|emb|CAP85510.1| Pc20g01810 [Penicillium chrysogenum Wisconsin 54-1255]
  misc_feature (1)..(372): NCBI GI: 46111049 Blast Desc: FG02406.1 [Gibberella zeae PH-1]
  misc_feature (2)..(366): NCBI GI: 189189700 Blast Desc: conserved [Pyrenophora tritici-repentis Pt-1C-BFP] gi|187972795|gb|EDU40294.1| conserved [Pyrenophora tritici-repentis Pt-1C-BFP]
MHSASIGALLPYMESYYNVSFTIISLVFLAPWAGYLLAAFLNTRVHYYLGQRGVAFLGPFSKILGHISLSLHPPFPALVPLLVLVTFGSGLQEGAWNAWVGNMENTHELIGILHGSFGLGATIGPLIATAFVTRVHLPWWTFYYLMLGLSVLELSLTLTSFWKATGLAYRATHNISVDKKAITMRVVEKQICWLTAVFLFVYVGAEVSLGGWIVTFILDVRHAEPFKAGLTVTFFWLGLTIGRVTLGFVTGRVGEKLIVCVYLLLCIVFQLLYWIIPIFVASAVFVAVEGYFLGPLFPVAIVTLNKLLPSEHHVSAVGFAAAFGSGGAAIFPFAVGAIAQSRGVWVLQPVILTLLAFMLLLWLLLPGGIKPDGLQRARDRNEKPGHCLFGLMKSLSSKIRP

SEQ ID NO: 25176 - DNA, 607 bp, Muscodor strobelii
  misc_feature: SGI EST ID NO. CUFF.59218.0
  misc_feature: Variant of the nucleotide sequence at SEQ ID NO 25174
cggaatgtcgaggtaggtagatacccgatttattgggatgcacttcatattttactcgatatatcaaatgccaactccgtctacgagcgtggtctgtattcaacatcgtctgacatctagaaatcaatgacgatgagtctctccgaggctcagccggcgtcggacgaccaaatagcaacgaccgaagatgtcgagaaatcggaagggacagtatcttctcaatcaaccgacgggattttgacactaccatctccccaccaccagttgtcgagatggaatcatccaccaattcatagatatcgatatctagctgtaaacttcgttttcatcttgtccgggatgcattccgcctctatcggtgcgctactaccatatatggaatcatattacaacgtctccttcacaataatatcactcgtctttctcgcaccatgggcgggctacctacttgccgcattccttaacaccagagtacactattatctcggccaaagaggcgtcgcgttcctaggtccgttttcaaagatcttgggccatatctcgctatcactgcatccacctttcccggcattggtcccgctactcgtgttggttacatttggaagtg

SEQ ID NO: 25177 - DNA, 3168 bp, Muscodor strobelii
  misc_feature: SGI cDNA ID NO. 568591
  misc_feature: Encodes the peptide sequence at SEQ ID NO 25178
atggatacttctgctgagcctatagaccccaatcgacgaaaatcaaaaaagcgagccaagggagagcgttctgccaaagagaaggcacaagatggcctcgtcatgtcgaccaacagtagtagtatcgtgtcaaagcggagtgtagagcgtatctactacccaaacgagcaacactactttcgctatttcgtgcccaagttccagcgccgtgctcccctcatcaacagaggctatcatctccgtctacatgtcattgataccgctgtccgccgctttctcaatcggccaagcactaagaccaaggttgtcgtcaatttgggttgcgggagcgatgtgcttccatggcaatgtatggccaggtgcccagatgcttgccgaggtgtcaagttcatcgacatagattttcctgatctcatggagaagaagcgcattgtggtgctgaacacaccggagctgagttcggtctttgagcccctaagcgcagattctagcgggccaatcatcttgaagagcaatgcctactatcagattggatgtgaccttcgcaagaccgcagagatagaccaagccttagcatcaatcctcgatgtctccgagtgcactttcatgttcgtagccgaagtctccatcacgtacatggagacccctggcgccgacgcagtcgtacaatgggcaagatccctcggccactctgcggttttctgtctacttgagcaaatactccccgaaggcccagaccatcccttcgctcagaagatgctgagtcatttcgaaaagttgaacactccgccaaaatctgtagtccaataccctctgctcaagtcgcagcaccatcgttttactcgtctcggctggtcacaggtaagagcgcaaagcctttgggatgtttggaccgacgatgactggatccccgcttcgtataggcgggaactcgacactatcgagccgtttgacgaatgggaagagtttgcgttatttgccagtcattactgcgttgtcattgcaagatccggcgacacggaccacgagtttcggggtacggccgattcggcactcaaagatcgctcccaacccatcaatactcttgagtttcagttccatccctactcgggaactcaagggaaaaggcgatttggggcccctctacacttgcaagatgagcatggcgaacaagtcgttgccaatacatacgggcttggaacaaacaaccgtcttagatcgtgcgatctgtacggacctggaccgtctacggtagagatgagtctgcactcctctggaccgcccggtcgattatgccacgccgttgccgatctgggctcttctggaagtatcctggccggtggaaggacctcacccacgaccgtcttacgagactgctggcatttcagcattgagcaaaacagatggacaccaacatataaccttcccgtaccactgtaccggcatgctatgactcgattaggccgtacgaatatgatcctgcttctaggaggcaagacggactcatcgacagtgtttaaaggatgcctcctatacaagcctggctcgggctggaccaagtgcagcatgtttggatcaatctatcggccagtgttcggagccatactttacagtgttgaagacaaatttccgagtaccatttccaatgcttctaccgagtttatcttcaagggcctcattgcaggaggaatatcagaggatggactcgttgcggatcaattgcttcgatgggaccttactctactagcagacgggacatcttcaatcacctttgacaattatcaagtacctggttgtgctaatactaatccgttcgcgcatcgattcggcgcatctacaatttcgatccagaatggttgtgtcgccataattggtggtattacccaacacggcgtcgtgcctcgaggaaacgatattctcgtcctccatttatctgattccaatatcgaagtcattgcaagttatggcgtggagattccctccggcggacagatgcaaacccgtcctctcctcgtgggaacatccatgtccttgacctcgaccggtcaattaatgttcatgggaggcggcgctacatgtttttctatgggcacgttctggaatgaaggctcttatgtgtcgatgaacaacataagatcgctcgctgcccgtttcactcccaaatcttcaactacctcgtttacgttccaaagattagctgagatagtagacatgccacaaacccaagtatctgcaccaggacaagacgccaggccatcgaaacccaagatccaagaagtcccgagagtacgcattgcaacaaaagaggctttcgaagccattttgacggctggcaagcctgtaatcattgagggtagcagccttggcgaatgcgttggtacgtggtccgcagatgggctcaaagccaaagttggcgcgagtagaaaggttgttgttcatgaagcctctggctccacaatggacttcaacgcgaagaacttcaaatacgttactaaggactttaacacgttcgttacagagattgagaacggcggcaaacagtacttgcgcgcattatcagaggaacgcccaactgaaaagccagccaatctcgcagatgattttcccgctttagccggtgacttcgtattaccattagaattatcttccgttcaggagaatctcttcagctcagtcctacgaatttcgggcaacttaaatatgtggctacattatgatgtcatggcgaacgtgtactgtcaaatcacgggctccaagcgcttattattattctctccagaagacgttaactatctttcatttccgtcaggaagctcaacatctagtattgatgtgttttcggagattgaaacacctgcactatccatgacacatccccacgaggccagactagagccgggcgatgttctgttccttcctccggtttggctgcacgccacagctcccttgtcagactttggcgttgcagtgaacgtcttctttcgaagcctcgacgcgggttatgctgcaggtcgggatgtctacgggaaccgcgatgtcgcagcatatgagaagggtcgtcaagatattacacgaatagcaaactctctcggcaaaattcccagagacatgcaaggtttctacctcagacgcttggcaaatgaactcgcccaacatgccaccagatga

SEQ ID NO: 25178 - protein, 1055 aa, Muscodor strobelii
  misc_feature: SGI Peptide ID NO. 568591
  misc_feature (32)..(337): Pfam Id: PF04072 Pfam Desc: Leucine carboxyl methyltransferase
  misc_feature (23)..(1049): NCBI GI: 145608410 Blast Desc: MGG_03140 [Magnaporthe grisea 70-15] gi|145015884|gb|EDK00374.1| MGG_03140 [Magnaporthe grisea 70-15]
  misc_feature (35)..(1054): NCBI GI: 154296495 Blast Desc: BC1G_12822 [Botryotinia fuckeliana B05.10] gi|150843345|gb|EDN18538.1| BC1G_12822 [Botryotinia fuckeliana B05.10]
  misc_feature (16)..(1049): NCBI GI: 256729205 Blast Desc: NECHADRAFT_47919 [Nectria haematococca mpVI 77-13-4]
  misc_feature (15)..(1049): NCBI GI: 46116912 Blast Desc: FG04298.1 [Gibberella zeae PH-1] gi|90185137|sp|Q4IER0.1|LCMT2_GIBZE RecName: Full=Leucine carboxyl methyltransferase 2; AltName: Full=tRNA protein 4
  misc_feature (24)..(1053): NCBI GI: 145254818 Blast Desc: An18g03060 [Aspergillus niger] gi|134084350|emb|CAK48690.1| protein product [Aspergillus niger]
  misc_feature (15)..(1053): NCBI GI: 121713704 Blast Desc: leucine carboxyl methyltransferase [Aspergillus clavatus NRRL 1] gi|119402616|gb|EAW13037.1| leucine carboxyl methyltransferase [Aspergillus clavatus NRRL 1]
  misc_feature (37)..(1053): NCBI GI: 171690168 Blast Desc: protein product [Podospora anserina] gi|170945032|emb|CAP71143.1| protein product [Podospora anserina]
  misc_feature (15)..(1055): NCBI GI: 169779099 Blast Desc: [Aspergillus oryzae RIB40] gi|83772753|dbj|BAE62881.1| protein product [Aspergillus oryzae]
  misc_feature (15)..(1055): NCBI GI: 90185135 Blast Desc: [Aspergillus oryzae RIB40] gi|83772753|dbj|BAE62881.1| protein product [Aspergillus oryzae]
  misc_feature (19)..(1051): NCBI GI: 115387551 Blast Desc: conserved [Aspergillus terreus NIH2624] gi|114195365|gb|EAU37065.1| conserved [Aspergillus terreus NIH2624]
MDTSAEPIDPNRRKSKKRAKGERSAKEKAQDGLVMSTNSSSIVSKRSVERIYYPNEQHYFRYFVPKFQRRAPLINRGYHLRLHVIDTAVRRFLNRPSTKTKVVVNLGCGSDVLPWQCMARCPDACRGVKFIDIDFPDLMEKKRIVVLNTPELSSVFEPLSADSSGPIILKSNAYYQIGCDLRKTAEIDQALASILDVSECTFMFVAEVSITYMETPGADAVVQWARSLGHSAVFCLLEQILPEGPDHPFAQKMLSHFEKLNTPPKSVVQYPLLKSQHHRFTRLGWSQVRAQSLWDVWTDDDWIPASYRRELDTIEPFDEWEEFALFASHYCVVIARSGDTDHEFRGTADSALKDRSQPINTLEFQFHPYSGTQGKRRFGAPLHLQDEHGEQVVANTYGLGTNNRLRSCDLYGPGPSTVEMSLHSSGPPGRLCHAVADLGSSGSILAGGRTSPTTVLRDCWHFSIEQNRWTPTYNLPVPLYRHAMTRLGRTNMILLLGGKTDSSTVFKGCLLYKPGSGWTKCSMFGSIYRPVFGAILYSVEDKFPSTISNASTEFIFKGLIAGGISEDGLVADQLLRWDLTLLADGTSSITFDNYQVPGCANTNPFAHRFGASTISIQNGCVAIIGGITQHGVVPRGNDILVLHLSDSNIEVIASYGVEIPSGGQMQTRPLLVGTSMSLTSTGQLMFMGGGATCFSMGTFWNEGSYVSMNNIRSLAARFTPKSSTTSFTFQRLAEIVDMPQTQVSAPGQDARPSKPKIQEVPRVRIATKEAFEAILTAGKPVIIEGSSLGECVGTWSADGLKAKVGASRKVVVHEASGSTMDFNAKNFKYVTKDFNTFVTEIENGGKQYLRALSEERPTEKPANLADDFPALAGDFVLPLELSSVQENLFSSVLRISGNLNMWLHYDVMANVYCQITGSKRLLLFSPEDVNYLSFPSGSSTSSIDVFSEIETPALSMTHPHEARLEPGDVLFLPPVWLHATAPLSDFGVAVNVFFRSLDAGYAAGRDVYGNRDVAAYEKGRQDITRIANSLGKIPRDMQGFYLRRLANELAQHATR

SEQ ID NO: 25179 - DNA, 3576 bp, Muscodor strobelii
  misc_feature: SGI EST ID NO. CUFF.59219.1
  misc_feature: Variant of the nucleotide sequence at SEQ ID NO 25177
cgcccggtcgattatgccacgccgttgccgatctgggctcttctggaagtatcctggccggtggaaggacctcacccacgaccgtcttacgagactgctggcatttcagcattgagcaaaacagatggacaccaacatataaccttcccgtaccactgtaccggcatgctatgactcgattaggccgtacgaatatgatcctgcttctaggaggcaagacggactcatcgacagtgtttaaaggatgcctcctatacaagcctggctcgggctggaccaagtgcagcatgtttggatcaatctatcggccagtgttcggagccatactttacagtgttgaagacaaatttccgagtaccatttccaatgcttctaccgagtttatcttcaagggcctcattgcaggaggaatatcagaggatggactcgttgcggatcaattgcttcgatgggaccttactctactagcagacgggacatcttcaatcacctttgacaattatcaagtacctggttgtgctaatactaatccgttcgcgcatcgattcggcgcatctacaatttcgatccagaatggttgtgtcgccataattggtggtattacccaacacggcgtcgtgcctcgaggaaacgatattctcgtcctccatttatctgattccaatatcgaagtcattgcaagttatggcgtggagattccctccggcggacagatgcaaacccgtcctctcctcgtgggaacatccatgtccttgacctcgaccggtcaattaatgttcatgggaggcggcgctacatgtttttctatgggcacgttctggaatgaaggctcttatgtgtcgatgaacaacataagatcgctcgctgcccgtttcactcccaaatcttcaactacctcgtttacgttccaaagattagctgagatagtagacatgccacaaacccaagtatctgcaccaggacaagacgccaggccatcgaaacccaagatccaagaagtcccgagagtacgcattgcaacaaaagaggctttcgaagccattttgacggctggcaagcctgtaatcattgagggtagcagccttggcgaatgcgttggtacgtggtccgcagatgggctcaaagccaaagttggcgcgagtagaaaggttgttgttcatgaagcctctggctccacaatggacttcaacgcgaagaacttcaaatacgttactaaggactttaacacgttcgttacagagattgagaacggcggcaaacagtacttgcgcgcattatcagaggaacgcccaactgaaaagccagccaatctcgcagatgattttcccgctttagccggtgacttcgtattaccattagaattatcttccgttcaggagaatctcttcagctcagtcctacgaatttcgggcaacttaaatatgtggctacattatgatgtcatggcgaacgtgtactgtcaaatcacgggctccaagcgcttattattattctctccagaagacgttaactatctttcatttccgtcaggaagctcaacatctagtattgatgtgttttcggagattgaaacacctgcactatccatgacacatccccacgaggccagactagagccgggcgatgttctgttccttcctccggtttggctgcacgccacagctcccttgtcagactttggcgttgcagtgaacgtcttctttcgaagcctcgacgcgggttatgctgcaggtcgggatgtctacgggaaccgcgatgtcgcagcatatgagaagggtcgtcaagatattacacgaatagcaaactctctcggcaaaattcccagagacatgcaaggtttctacctcagacgcttggcaaatgaactcgcccaacatgccaccagatgaatcgctccagcttatagtacgtttaaggtcgtatcttagaactcaggctcttcataagaccgaagagacaatgtccaggcttctcatttctgtcccttgcacgctgaaggccgtctggttttataccacccggtaaaagcaaccacaacaagagcatgaatgcgagaagagtgagaataacgggctgcaaaacccaaacacctcggctttgtgcaatagcacctacagcgaagggaaagatagcagctcctccgctaccaaacgcggcagcgaagccaaccgccgatacgtggtgctcactaggcagcagcttattcaaagtgacgatagcgaccgggaaaaggggcccgaggaagtagccctccactgcaacgaaaacagccgaggcaacgaagatcgggattatccaatagagcagttgaaacacaatgcaaagaagcaaatagacacagacaatcagtttctctccaacccggccagtaacgaacccaagagtgacacgtccgatggtcaaacccagccagaagaacgtgacagtgagaccagccttaaacggctcggcgtgacggacgtccaatatgaacgtgactatccagcctccaaggctgacttcggctcctacgtagacaaacagaaatacggccgtcagccagcaaatctgtttttccacgactctcattgtaattgccttcttatcaacagaaatattgtgcgtcgcgcgatatgctaggcccgtcgccttccagaaagaagtcagagtgagactgagttcgaggaccgacagtccgagcataaggtagtagaatgtccaccaaggaagatgtactctagtaacaaacgctgttgcgatgaggggcccgatagtcgctcctaatccgaacgacccgtgcaagattccaatcagctctcagaggccaaaaacagaactccgtgattcttgatctagagactcacgtccacttccaaatgtaaccaacacgagtagcgggaccaatgccgggaaaggtggatgcagtgatagcgagatatggcccaagatctttgaaaacggacctaggaacgcgacgcctctttggccgagataatagtgtactctggtgttaaggaatgcggcaagtaggtagcccgcccatggtgcgagaaagacgagtgatattattgtgaaggagacgttgtaatatgattccatctaccaagttatcagcaagacacaacactgaaatccatctcgattctctttggcgcgcaactactatttgaaggggccaaccagcgaaacagatacaagggtggatgtgagcacaatccttacatatggtagtagcgcaccgatagaggcggaatgcatcccggacaagatgaaaacgaagtttacagctagatatcgatatctatgaattggtggatgattccatctcgacaactggtggtggggagatggtagtgtcaaaatcccgtcggttgattgagaagatactgtcccttccgatttctcgacatcttcggtcgttgctatttggtcgtccgacgccggctgagcctcggagagactcatcgtcattgatttctagatgtcagacgatgttgaatacagaccacgctcgtagacggagttggcatttgatatatcgagtaaaatatgaagtgcatcccaataaatcgggtatctacctacctcgacattccg

SEQ ID NO: 25180 - DNA, 1338 bp, Muscodor strobelii
  misc_feature: SGI cDNA ID NO. 568592
  misc_feature: Encodes the peptide sequence at SEQ ID NO 25181
atggccacgtcgtcggccctcaacttcatcaccttcaaccaggaccacagctgcctggctgtcggcacctccaagggcttccgcatctaccacacagaccccttctccaagatcttcagcagcgatgacggcaacatcgccaacatcgagatgctcttctccacctccctcgtcgccctcgtcctctccccgcgccacctggtcatccagaacaccaagcgtgcctccgtcatctgcgagctgaccttcccctcggccgtcaaggccgtcaggctgaaccggaagcgtctctgcgtcgtgctcgaggagggcatctatctctacgacattgccaacatgtccctgctccagcacatcgagacctcccccaaccccagcgcaatatgtgccctgtcgccctcgtccgagaactgctacctcgcctacccgctgcctcggccccgcgacgacctcaccgacaagagaccagcccactcgccccccgcgcccctctacgcccccgtcaccagcggcgacgtcctcatcttcgacaccctcactatgaaggccgtcaacgtcatcgaagcccaccgcgcaccactctcctgcatcgccctcaaccacgacggcaccctgctggccaccgccagcgagaccggcaccatcatccgcgtcttctccctgcccaagggcaacaagctctaccagttccgccgcggcacctaccctagcaccatctacagcatgtccttcaacatgaagagctccctgctctgcgtctcctcgacctccgacaccgttcacatcttccgcctccaagcgccctctgcggctgcttctgcagatacacaagcccttggctcgccccggcccgatcgctggaccaggagccgcagcaccgacagcgggaacgagtcgcctggtagcgcccagggctctccccacagcgaggctaccgagttcagcaccccgcccacgcacaacccgcccgcgcacaggaggcagagcggctcgttcagcagcatgctgcgccggtcatcgcagattatgggtcgtagtgtggccggcgtcgtagggggctacttgccacagagcttgaccgaagcctgggagccccagcgagacttcgcctacatcaagatacctaagacgtcgcaccagggcgccgcgagcaacacgcagctgcggagcgttgtcgccatgagcaacagcaccccccaggtcatggtggtgacgagtgacggactgttcaacgtctttgacattgatctgcagaatggtggcgaaggctatccagttaagcaattctcagttcttgacagtgacgacaagctcgacaactcgaattacggtccctag

SEQ ID NO: 25181 - protein, 445 aa, Muscodor strobelii
  misc_feature: SGI Peptide ID NO. 568592
  misc_feature (181)..(215): Pfam Id: PF00400 Pfam Desc: WD domain, G-beta repeat
  misc_feature (1)..(442): NCBI GI: 39942118 Blast Desc: MGG_03139 [Magnaporthe grisea 70-15] gi|73619366|sp|Q524W4.1|ATG18_MAGGR RecName: Full=Autophagy-related protein 18 gi|145015885|gb|EDK00375.1|
  misc_feature (3)..(444): NCBI GI: 46116910 Blast Desc: FG04297.1 [Gibberella zeae PH-1]
  misc_feature (6)..(430): NCBI GI: 256729406 Blast Desc: NECHADRAFT_47913 [Nectria haematococca mpVI 77-13-4]
  misc_feature (7)..(430): NCBI GI: 156047793 Blast Desc: SS1G_09586 [Sclerotinia sclerotiorum 1980] gi|166989532|sp|A7EW77.1|ATG18_SCLS1 RecName: Full=Autophagy-related protein 18 gi|154693981|gb|EDN93719.1|
  misc_feature (3)..(444): NCBI GI: 85081467 Blast Desc: NCU03441 [Neurospora crassa OR74A] gi|73619371|sp|Q96U88.1|ATG18_NEUCR RecName: Full=Autophagy-related protein 18 gi|16944526|emb|CAD11327.1|
  misc_feature (6)..(441): NCBI GI: 171689906 Blast Desc: protein product [Podospora anserina] gi|170944915|emb|CAP71026.1| protein product [Podospora anserina]
  misc_feature (7)..(439): NCBI GI: 166989538 Blast Desc: protein product [Podospora anserina] gi|170944915|emb|CAP71026.1| protein product [Podospora anserina]
  misc_feature (6)..(441): NCBI GI: 226294052 Blast Desc: WD repeat domain phosphoinositide-interacting protein [Paracoccidioides brasiliensis Pb18]
  misc_feature (6)..(441): NCBI GI: 225684409 Blast Desc: WD repeat domain phosphoinositide-interacting protein [Paracoccidioides brasiliensis Pb03]
  misc_feature (7)..(441): NCBI GI: 259489677 Blast Desc: TPA: Autophagy-related protein 18 [Source:UniProtKB/Swiss-Prot;Acc:Q5BH53] [Aspergillus nidulans FGSC A4]
MATSSALNFITFNQDHSCLAVGTSKGFRIYHTDPFSKIFSSDDGNIANIEMLFSTSLVALVLSPRHLVIQNTKRASVICELTFPSAVKAVRLNRKRLCVVLEEGIYLYDIANMSLLQHIETSPNPSAICALSPSSENCYLAYPLPRPRDDLTDKRPAHSPPAPLYAPVTSGDVLIFDTLTMKAVNVIEAHRAPLSCIALNHDGTLLATASETGTIIRVFSLPKGNKLYQFRRGTYPSTIYSMSFNMKSSLLCVSSTSDTVHIFRLQAPSAAASADTQALGSPRPDRWTRSRSTDSGNESPGSAQGSPHSEATEFSTPPTHNPPAHRRQSGSFSSMLRRSSQIMGRSVAGVVGGYLPQSLTEAWEPQRDFAYIKIPKTSHQGAASNTQLRSVVAMSNSTPQVMVVTSDGLFNVFDIDLQNGGEGYPVKQFSVLDSDDKLDNSNYGP

SEQ ID NO: 25182 - DNA, 3870 bp, Muscodor strobelii
  misc_feature: SGI EST ID NO. CUFF.59283.1
  misc_feature: Variant of the nucleotide sequence at SEQ ID NO 25180
ctcacagtggccgagggatcttgcccattgtacgactgcgtcggcgccaggggtctccatgtacgtgatggagacttcggctacgaacatgaaagtgcactcggagacatcgaggattgatgctaaggcttggtctatctctgcggtcttgcgaaggtcacatccaatctgatagtaggcattgctcttcaagatgattggcccgctagaatctgcgcttaggggctcaaagaccgaactcagctccggtgtgttcagcaccacaatgcgcttcttctccatgagatcaggaaaatctatgtcgatgaacttgacacctcggcaagcatctgggcacctggccatacattgccatggaagcacatcgctacgaagcaaataggagtcaaaagctgatgtttcacggtggctatgattgcagaacaggggtctggaggcacttacctcccgcaacccaaattgacgacaaccttggtcttagtgcttggccgattgagaaagcggcggacagcggtatcaatgacatgtagacggagatgatagcctctgttgatgaggggagcacggcgctggaacttgggcacgaaatagcgaaagtagtgttgctcgtttgggtagtagatacgctctacactccgctttgacacgatactactactgttggtcgacatgacgaggccatcttgtgccttctctttggcagaacgctctcccttggctcgcttttttgattttcgtcgattggggtctataggctcagcagaagtatccatgatgaatatgggaagtatagagacaggcaatttggtgatatgtccaattttctattccgaagacaggtgagaattgaaacagaccacactggaagaaaagagaagagacatatatcagtgattcatttgtctcagtatgaaaactggttcgctgagtagcgaaatcaaaagctggcgatgaaagatttgaatgttggtttggatcacactcataatctcaacgcactatcatcgactactgcatgtggtcatggaggccggggcatacagataattgtgcgaattcataaatttcgtgttatctccgaaaccatgaactctgggactaggttggatcaagggtacgatggaagggtttctgagttcggtacctgcccggggcgcctggctcgctggggggtacatgatcgaactcgatggcccgagctcaagcttgcagctccattgtccaaccccccgccattgcgcccgcctgccacctccatctccactgcccgcctctctgttgccctgcgccgcttcgaacgccgctgctctcggtcaaaagaaaggtcacacgcaagcagatcacgatgcttctactcagttgacgctcatcattccccagcctcccgttctctcacaacaccaacacacagctctacagtctatcgtgctggggcattgcaaagtcctgtgaacaaatttatccagttgtctgtcgaagtcacgagacagtacgtacatgcgccgctgttgaagagcgggctcgtcgaagctttccgacggcggcaaaagggtacatatccctccctctgtatgattccacgtgcctgccgaccaccgtgccactgcgtctcgactggaacgccaacaccacaacattaccctagaccagactaccacaactacgctgcaacacgctgatatcattctggatactgctcgataatcgtccattttgctgccaccgatcgccaccgctgccgctgccgccatggccacgtcgtcggccctcaacttcatcaccttcaaccaggaccacagctgcctggctgtcggcacctccaagggcttccgcatctaccacacagaccccttctccaagatcttcagcagcgatgacggcaacatcgccaacatcgagatgctcttctccacctccctcgtcgccctcgtcctctccccgcgccacctggtcatccagaacaccaagcgtgcctccgtcatctgcgagctgaccttcccctcggccgtcaaggccgtcaggctgaaccggaagcgtctctgcgtcgtgctcgaggagggcatctatctctacgacattgccaacatgtccctgctccagcacatcgagacctcccccaaccccagcgcaatatgtgccctgtcgccctcgtccgagaactgctacctcgcctacccgctgcctcggccccgcgacgacctcaccgacaagagaccagcccactcgccccccgcgcccctctacgcccccgtcaccagcggcgacgtcctcatcttcgacaccctcactatgaaggccgtcaacgtcatcgaagcccaccgcgcaccactctcctgcatcgccctcaaccacgacggcaccctgctggccaccgccagcgagaccggcaccatcatccgcgtcttctccctgcccaagggcaacaagctctaccagttccgccgcggcacctaccctagcaccatctacagcatgtccttcaacatgaagagctccctgctctgcgtctcctcgacctccgacaccgttcacatcttccgcctccaagcgccctctgcggctgcttctgcagatacacaagcccttggctcgccccggcccgatcgctggaccaggagccgcagcaccgacagcgggaacgagtcgcctggtagcgcccagggctctccccacagcgaggctaccgagttcagcaccccgcccacgcacaacccgcccgcgcacaggaggcagagcggctcgttcagcagcatgctgcgccggtcatcgcagattatgggtcgtagtgtggccggcgtcgtagggggctacttgccacagagcttgaccgaagcctgggagccccagcgagacttcgcctacatcaagatacctaagacgtcgcaccagggcgccgcgagcaacacgcagctgcggagcgttgtcgccatgagcaacagcaccccccaggtcatggtggtgacgagtgacggactgttcaacgtctttgacattgatctgcagaatggtggcgaaggctatccagttaagcaattctcagttcttgacagtgacgacaagctcgacaactcgaattacggtccctaggcggcccctgactcgaataacacaactactcaagatgtacaggaggaggaagtcgagagtgacgaaggcgaagatgatgacagcgacgtgacattctatggatcagacattatgccggacaaacatcaaccaccgtggattctgtggatacaagatcagaatgcttggcgcatggcagctcagaagcgatttttggacgaacaaaagaggctgagaaagaggatgagagatgagaagaaggcggccttggagaagagtagagcagaagacactatgcccgaaggactccccgaccctgaatcgtatgagatggacgatcccgatgaaccgacaatctgggagcagacacaagaaccattgcccgaccctacaacatttgcgatggacactccttatgaatcaaccatcgaggatatacacgggaaatccccgtactggggcgcgacggtggaaagagggccgtctgtaaaggatacggctgatgaattcgagtctgaagagcaggaggcgtccaggaatggaacgcccactgagaagcgacctgaggagaacggtgatgattgtggtgcattagcgtttggcgttgttccggattgctctgtgtctattctccagagtttgatttgtcttttaattattcttctcaaatctatctccgatggagatgggtgggactactgagactggtgtttggtggtttgcgatgcattttactctacacagctcaggtgttcgacgtgcactgcgtagaatagtaattttaccataatcaatatcgcaacc

SEQ ID NO: 25183 - DNA, 570 bp, Muscodor strobelii
  misc_feature: SGI cDNA ID NO. 568593
  misc_feature: Encodes the peptide sequence at SEQ ID NO 25184
atgccggacaaacatcaaccaccgtggattctgtggatacaagatcagaatgcttggcgcatggcagctcagaagcgatttttggacgaacaaaagaggctgagaaagaggatgagagatgagaagaaggcggccttggagaagagtagagcagaagacactatgcccgaaggactccccgaccctgaatcgtatgagatggacgatcccgatgaaccgacaatctgggagcagacacaagaaccattgcccgaccctacaacatttgcgatggacactccttatgaatcaaccatcgaggatatacacgggaaatccccgtactggggcgcgacggtggaaagagggccgtctgtaaaggatacggctgatgaattcgagtctgaagagcaggaggcgtccaggaatggaacgcccactgagaagcgacctgaggagaacggtgatgattgtggtgcattagcgtttggcgttgttccggattgctctgtgtctattctccagagtttgatttgtcttttaattattcttctcaaatctatctccgatggagatgggtgggactactga

SEQ ID NO: 25184 - protein, 189 aa, Muscodor strobelii
  misc_feature: SGI Peptide ID NO. 568593
MPDKHQPPWILWIQDQNAWRMAAQKRFLDEQKRLRKRMRDEKKAALEKSRAEDTMPEGLPDPESYEMDDPDEPTIWEQTQEPLPDPTTFAMDTPYESTIEDIHGKSPYWGATVERGPSVKDTADEFESEEQEASRNGTPTEKRPEENGDDCGALAFGVVPDCSVSILQSLICLLIILLKSISDGDGWDY

SEQ ID NO: 25185 - DNA, 3715 bp, Muscodor strobelii
  misc_feature: SGI EST ID NO. CUFF.59283.2
  misc_feature: Variant of the nucleotide sequence at SEQ ID NO 25183
cggcaagcatctgggcacctggccatacattgccatggaagcacatcgctacgaagcaaataggagtcaaaagctgatgtttcacggtggctatgattgcagaacaggggtctggaggcacttacctcccgcaacccaaattgacgacaaccttggtcttagtgcttggccgattgagaaagcggcggacagcggtatcaatgacatgtagacggagatgatagcctctgttgatgaggggagcacggcgctggaacttgggcacgaaatagcgaaagtagtgttgctcgtttgggtagtagatacgctctacactccgctttgacacgatactactactgttggtcgacatgacgaggccatcttgtgccttctctttggcagaacgctctcccttggctcgcttttttgattttcgtcgattggggtctataggctcagcagaagtatccatgatgaatatgggaagtatagagacaggcaatttggtgatatgtccaattttctattccgaagacaggtgagaattgaaacagaccacactggaagaaaagagaagagacatatatcagtgattcatttgtctcagtatgaaaactggttcgctgagtagcgaaatcaaaagctggcgatgaaagatttgaatgttggtttggatcacactcataatctcaacgcactatcatcgactactgcatgtggtcatggaggccggggcatacagataattgtgcgaattcataaatttcgtgttatctccgaaaccatgaactctgggactaggttggatcaagggtacgatggaagggtttctgagttcggtacctgcccggggcgcctggctcgctggggggtacatgatcgaactcgatggcccgagctcaagcttgcagctccattgtccaaccccccgccattgcgcccgcctgccacctccatctccactgcccgcctctctgttgccctgcgccgcttcgaacgccgctgctctcggtcaaaagaaaggtcacacgcaagcagatcacgatgcttctactcagttgacgctcatcattccccagcctcccgttctctcacaacaccaacacacagctctacagtctatcgtgctggggcattgcaaagtcctgtgaacaaatttatccagttgtctgtcgaagtcacgagacagtacgtacatgcgccgctgttgaagagcgggctcgtcgaagctttccgacggcggcaaaagggtacatatccctccctctgtatgattccacgtgcctgccgaccaccgtgccactgcgtctcgactggaacgccaacaccacaacattaccctagaccagactaccacaactacgctgcaacacgctgatatcattctggatactgctcgataatcgtccattttgctgccaccgatcgccaccgctgccgctgccgccatggccacgtcgtcggccctcaacttcatcaccttcaaccaggaccacagctgcctggctgtcggtgagtcgccacacctacgcatctcgtttccgtttgcttgatctgtctcgctgactgaagatgctcccaacccaccaggcacctccaagggcttccgcatctaccacacagaccccttctccaagatcttcagcagcgatgacggcaacatcgccaacatcgagatgctcttctccacctccctcgtcgccctcgtcctctccccgcgccacctggtcatccagaacaccaagcgtgcctccgtcatctgcgagctgaccttcccctcggccgtcaaggccgtcaggctgaaccggaagcgtctctgcgtcgtgctcgaggagggcatctatctctacgacattgccaacatgtccctgctccagcacatcgagacctcccccaaccccagcgcaatatgtgccctgtcgccctcgtccgagaactgctacctcgcctacccgctgcctcggccccgcgacgacctcaccgacaagagaccagcccactcgccccccgcgcccctctacgcccccgtcaccagcggcgacgtcctcatcttcgacaccctcactatgaaggccgtcaacgtcatcgaagcccaccgcgcaccactctcctgcatcgccctcaaccacgacggcaccctgctggccaccgccagcgagaccggcaccatcatccgcgtcttctccctgcccaagggcaacaagctctaccagttccgccgcggcacctaccctagcaccatctacagcatgtccttcaacatgaagagctccctgctctgcgtctcctcgacctccgacaccgttcacatcttccgcctccaagcgccctctgcggctgcttctgcagatacacaagcccttggctcgccccggcccgatcgctggaccaggagccgcagcaccgacagcgggaacgagtcgcctggtagcgcccagggctctccccacagcgaggctaccgagttcagcaccccgcccacgcacaacccgcccgcgcacaggaggcagagcggctcgttcagcagcatgctgcgccggtcatcgcagattatgggtcgtagtgtggccggcgtcgtagggggctacttgccacagagcttgaccgaagcctgggagccccagcgagacttcgcctacatcaagatacctaagacgtcgcaccagggcgccgcgagcaacacgcagctgcggagcgttgtcgccatgagcaacagcaccccccaggtcatggtggtgacgagtgacggactgttcaacgtctttgacattgatctgcagaatggtggcgaaggctatccagttaagcaattctcgtgagtccattcctactctttgatggttactcttgctcctctctcgggacattcagcaatacgggcaggaactaatacaagcgcagagttcttgacagtgacgacaagctcgacaactcgaattacggtccctaggcggcccctgactcgaataacacaactactcaagatgtacaggaggaggaagtcgagagtgacgaaggcgaagatgatgacagcgacgtgacattctatggatcagacattatgccggacaaacatcaaccaccgtggattctgtggatacaagatcagaatgcttggcgcatggcagctcagaagcgatttttggacgaacaaaagaggctgagaaagaggatgagagatgagaagaaggcggccttggagaagagtagagcagaagacactatgcccgaaggactccccgaccctgaatcgtatgagatggacgatcccgatgaaccgacaatctgggagcagacacaagaaccattgcccgaccctacaacatttgcgatggacactccttatgaatcaaccatcgaggatatacacgggaaatccccgtactggggcgcgacggtggaaagagggccgtctgtaaaggatacggctgatgaattcgagtctgaagagcaggaggcgtccaggaatggaacgcccactgagaagcgacctgaggagaacggtgatgattgtggtgcattagcgtttggcgttgttccggattgctctgtgtctattctccagagtttgatttgtcttttaattattcttctcaaatctatctccgatggagatgggtgggactactgagactggtgtttggtggtttgcgatgcattttactctacacagctcaggtgttcgacgtgcactgcgtagaatagtaattttaccataatcaatatcgcaacc

SEQ ID NO: 25186 - DNA, 2310 bp, Muscodor strobelii
  misc_feature: SGI cDNA ID NO. 568594
  misc_feature: Encodes the peptide sequence at SEQ ID NO 25187
atgcttgaagcctcagcgcgaccagatcttgaactactctttccccttgcgttggattcggcatgcattaggggtcatactgaaatcgtgaaattgttggttgatgcaggcgcgcccgtacatgttacagagggggacggcttcacaccattacatcgcgctgcaaaaaggggcagcttggagacagtgcggtatttgatcgaacactgcaaagacaggaagagctacgttcaggcttgttatcagataccgcgtatcagggtgttcccattcccgtaccgatgggaacataactctgccctctcgtgtgctgctgcggaaggacacttagatgtagtccgttacttggtcgaggctggggccgacccgctccaggagcttcagaacaatggtatcgcgatacatagcgcttgtaaagccagcaaggatcacaccgaagtcgtcaagtacctgatgaatctcgaccgaagccagctaccaatgcgaacagcagaggatcttgacacctgccttcacttggtagcccagaacgaccatatcgaatctgccaattttctgatgagcattggcgctgattatgggctaataaacgtcgcggggaacacaccttggcgggtcgcacataaggcgaagagcccatgtgtgatgggcgccctcctacgcaaggagatctctgatcgatatcaacacaaaggaccatggcgaagattgctggagaagatgagagaggctagcacgtatacgtacctctttcccggaagaaaggagtactattggggaggcaacaaactcatattcgcgaccttggacgaccccgagggcgctgctttcctgggtctcacacaggagagtcaatatcatataatgcgccaagttgagagaacctttgtcgagcacaaggagcgggatggcactatatgtgtgagggaagcaacctgcactgctgagacactggctggtagttctgaagggaaatatttgtctttatctatgccatacttatggtcggagagcctcgaatttctcagcaagcgccaggagaacagcttcgccaacccgaaaagattgctgtactgccaaactcatgatccaaaagaacttggcgctgacgtgaaagtaactctcgatgagttctgcaatccgacattagatcgtgaggtcctctatcaccggaaccgtgaccaagttctcactcgatatggccagaggaaactaggactgagtattgatttgcagactgcaccgcccctgggtcctccactatctcaacttcaattagttacggtgccacagatctggtgctggaatatcggctccaaactgatcttcagctgtcttaaaagtgcaaatgaagatttgaagcatctaagatcatccccacaaaccgacgacccggatatatacatcgggaggctcctgtcgcgatttatagacgctctcgatcgtccgaagatgttaaatctctcggagcccatcttcagcgtgttttccaagtccattacgctcgtatcggaagacgtcatcaaatatacgcgaacggccaagttcgacgacatcagcatcgagaaggagaagcaatatctccacgagatcaacgacatccgggaagagatcgccatgatacgcacggtgctatttcaacaggaggaagtctggaaagagttcctgtataacacgtggcctgactacgaagacaggcatttcaaacctcccaaggatcagatatctgcggagatctggcgggagatatcgaagccgcagacacaattccccaagttcagaaagcggttcgagaagcttgacgaggacgctgagcgcgtcgaaagaaacatactgatcaaactagatctcaaacagaaacacgccagtatgaaggagacacacacggcgacggtgatgagtgcggctatcgttggcttcaccgtaattacaatcatcttcgcaccgctctcgtttctgaccagtctcttcgcgcttcccatcgatcaattcgaacacatcgacggcaaatacacttcacgctatgtagggaaatggattgcaactggagaagtcgtctcattagctgtcacattgatcgccatactggtagcgtgtgactactttctcaatctacgggtcactgggatgttatggaagacagcgtcgaacgatgacgatcaaagcctgtcggaagccggattagacgttgcgaggtcaggccgctggacgcggccagtttctgccaggaaacttcctggcgacggcgacgagaaggtctcgtggcatgctaagaggcgaaggcgcatcggtgatcacgaggcgggatga

SEQ ID NO: 25187 - protein, 769 aa, Muscodor strobelii
  misc_feature: SGI Peptide ID NO. 568594
  misc_feature (46)..(78): Pfam Id: PF00023 Pfam Desc: Ankyrin repeat
  misc_feature (96)..(128): Pfam Id: PF00023 Pfam Desc: Ankyrin repeat
  misc_feature (46)..(72): Pfam Id: PF00023 Pfam Desc: Ankyrin repeat
  misc_feature (96)..(123): Pfam Id: PF00023 Pfam Desc: Ankyrin repeat
  misc_feature (17)..(45): Pfam Id: PF00023 Pfam Desc: Ankyrin repeat
  misc_feature (374)..(673): NCBI GI: 169613761 Blast Desc: SNOG_10013 [Phaeosphaeria nodorum SN15] gi|111061228|gb|EAT82348.1| SNOG_10013 [Phaeosphaeria nodorum SN15]
  misc_feature (310)..(711): NCBI GI: 169617431 Blast Desc: SNOG_11894 [Phaeosphaeria nodorum SN15] gi|111059818|gb|EAT80938.1| SNOG_11894 [Phaeosphaeria nodorum SN15]
  misc_feature (388)..(661): NCBI GI: 169615727 Blast Desc: SNOG_11027 [Phaeosphaeria nodorum SN15] gi|160703031|gb|EAT81526.2| SNOG_11027 [Phaeosphaeria nodorum SN15]
  misc_feature (331)..(697): NCBI GI: 119495022 Blast Desc: ankyrin repeat protein [Neosartorya fischeri NRRL 181] gi|119412469|gb|EAW22410.1| ankyrin repeat protein [Neosartorya fischeri NRRL 181]
  misc_feature (331)..(697): NCBI GI: 121701093 Blast Desc: ankyrin repeat protein [Aspergillus clavatus NRRL 1] gi|119396954|gb|EAW07385.1| ankyrin repeat protein [Aspergillus clavatus NRRL 1]
  misc_feature (331)..(697): NCBI GI: 70996130 Blast Desc: ankyrin repeat protein [Aspergillus fumigatus Af293] gi|66850455|gb|EAL90782.1| ankyrin repeat protein [Aspergillus fumigatus Af293] gi|159131573|gb|EDP56686.1| ankyrin repeat
  misc_feature (331)..(697): NCBI GI: 115492215 Blast Desc: conserved [Aspergillus terreus NIH2624] gi|114197595|gb|EAU39295.1| conserved [Aspergillus terreus NIH2624]
  misc_feature (331)..(697): NCBI GI: 145230782 Blast Desc: An01g12480 [Aspergillus niger] gi|134055776|emb|CAK37300.1| protein product [Aspergillus niger]
  misc_feature (17)..(192): NCBI GI: 115772433 Blast Desc: : similar to ankyrin 2,3/unc44 [Strongylocentrotus purpuratus] gi|115928953|ref|XP_001193458.1| : similar to ankyrin 2,3/unc44 [Strongylocentrotus purpuratus]
  misc_feature (17)..(312): NCBI GI: 115978442 Blast Desc: : similar to ankyrin 2,3/unc44 [Strongylocentrotus purpuratus]
MLEASARPDLELLFPLALDSACIRGHTEIVKLLVDAGAPVHVTEGDGFTPLHRAAKRGSLETVRYLIEHCKDRKSYVQACYQIPRIRVFPFPYRWEHNSALSCAAAEGHLDVVRYLVEAGADPLQELQNNGIAIHSACKASKDHTEVVKYLMNLDRSQLPMRTAEDLDTCLHLVAQNDHIESANFLMSIGADYGLINVAGNTPWRVAHKAKSPCVMGALLRKEISDRYQHKGPWRRLLEKMREASTYTYLFPGRKEYYWGGNKLIFATLDDPEGAAFLGLTQESQYHIMRQVERTFVEHKERDGTICVREATCTAETLAGSSEGKYLSLSMPYLWSESLEFLSKRQENSFANPKRLLYCQTHDPKELGADVKVTLDEFCNPTLDREVLYHRNRDQVLTRYGQRKLGLSIDLQTAPPLGPPLSQLQLVTVPQIWCWNIGSKLIFSCLKSANEDLKHLRSSPQTDDPDIYIGRLLSRFIDALDRPKMLNLSEPIFSVFSKSITLVSEDVIKYTRTAKFDDISIEKEKQYLHEINDIREEIAMIRTVLFQQEEVWKEFLYNTWPDYEDRHFKPPKDQISAEIWREISKPQTQFPKFRKRFEKLDEDAERVERNILIKLDLKQKHASMKETHTATVMSAAIVGFTVITIIFAPLSFLTSLFALPIDQFEHIDGKYTSRYVGKWIATGEVVSLAVTLIAILVACDYFLNLRVTGMLWKTASNDDDQSLSEAGLDVARSGRWTRPVSARKLPGDGDEKVSWHAKRRRRIGDHEAG

SEQ ID NO: 25188 - DNA, 1150 bp, Muscodor strobelii
  misc_feature: SGI EST ID NO. CUFF.59226.0
  misc_feature: Variant of the nucleotide sequence at SEQ ID NO 25186
ctcatattcgcgaccttggacgaccccgagggcgctgctttcctgggtctcacacaggagagtcaatatcatataatgcgccaagttgagagaacctttgtcgagcacaaggagcgggatggcactatatgtgtgagggaagcaacctgcactgctgagacactggctggtagttctgaagggaaatatttgtctttatctgtgcgttgttcaacaccattattgcgtcgtatgctaactacctgtcgtagatgccatacttatggtcggagagcctcgaatttctcagcaagcgccaggagaacagcttcgccaacccgaaaagattgctgtactgccaaactcatgatccaaaagaacttggcgctgacgtgaaagtaactctcgatgagttctgcaatccgacattagatcgtgaggtcctctatcaccggaaccgtgaccaagttctcactcgatatggccagaggaaactaggactgagtattgatttgcagactgcaccgcccctgggtcctccactatctcaacttcaattagttacggtgccacagatctggtgctggaatatcggctccaaactgatcttcagctgtcttaaaagtgcaaatgaagatttgaagcatctaagatcatccccacaaaccgacgacccggatatatacatcgggaggctcctgtcgcgatttatagacgctctcgatcgtccgaagatgttaaatctctcggagcccatcttcagcgtgttttccaagtccattacgctcgtatcggaagacgtcatcaaatatacgcgaacggccaagttcgacgacatcagcatcgagaaggagaagcaatatctccacgagatcaacgacatccgggaagagatcgccatgatacgcacggtgctatttcaacaggaggaagtctggaaagagttcctgtataacacgtggcctgactacgaagacaggcatttcaaacctcccaaggatcagatatctgcggagatctggcgggagatatcgaagccgcagacacaattccccaagttcagaaagcggttcgagaagcttgacgaggacgctgagcgcgtcgaaagaaacatactgatcaaactagatctcaaacagaaacacgccagtatgaaggagacacacacggc

SEQ ID NO: 25189 - DNA, 330 bp, Muscodor strobelii
  misc_feature: SGI cDNA ID NO. 568595
  misc_feature: Encodes the peptide sequence at SEQ ID NO 25190
atgcagatctcagatatcatacttcgagacatttggcactatatgtcgtactgtcttgtgcggaagcaagacggtagtgagcaagccgcgtccctgcaccccaccggcgcggcccgcctgtcgttactcggccctgaaaacgctgttcaggacgcgctgcttgtgctcatggccagagtcgaggacgggacgcccgcgcgccgcatcgtggccacaaagtttgctcacgatactgtggccagcgacattgcctgcgatagactgatctatcagtatctacgggaggcaaagtgggatggtgttggggatgaggatcgggctcaaagctag

SEQ ID NO: 25190 - protein, 109 aa, Muscodor strobelii
  misc_feature: SGI Peptide ID NO. 568595
  misc_feature (36)..(109): NCBI GI: 169621189 Blast Desc: SNOG_13802 [Phaeosphaeria nodorum SN15] gi|111057706|gb|EAT78826.1| SNOG_13802 [Phaeosphaeria nodorum SN15]
  misc_feature (24)..(109): NCBI GI: 145242544 Blast Desc: An09g05350 [Aspergillus niger] gi|134078397|emb|CAL00812.1| protein product [Aspergillus niger]
  misc_feature (25)..(105): NCBI GI: 145240565 Blast Desc: An08g08140 [Aspergillus niger] gi|134077452|emb|CAK40017.1| protein product [Aspergillus niger]
  misc_feature (15)..(100): NCBI GI: 145257202 Blast Desc: An04g02780 [Aspergillus niger] gi|134058558|emb|CAK96445.1| protein product [Aspergillus niger]
MQISDIILRDIWHYMSYCLVRKQDGSEQAASLHPTGAARLSLLGPENAVQDALLVLMARVEDGTPARRIVATKFAHDTVASDIACDRLIYQYLREAKWDGVGDEDRAQS

SEQ ID NO: 25191 - DNA, 1323 bp, Muscodor strobelii
  misc_feature: SGI cDNA ID NO. 568596
  misc_feature: Reduced expression when VOC is produced
  misc_feature: Encodes the peptide sequence at SEQ ID NO 25192
atgcttcctgctctgcgcgtcgtctctcgccaagcggccactcgtcgagttggtctacaagctgctagagccggttcaacctgggccaacgttcctcaaggtcctcctgtatgtcatcgttcctgccagtctatctctcgcgtgtcgacaatgctaatattgcctgcaggatgtatcaccgaagcgttcaaggccgactcctttgacaagaagatcaacctgggcgttggcgcataccgtgacgataagggcaagccttacgtcctcccctcggtccgcaccgctgagaacaatgtcgtgtcggccaagctgaacaaggagtacgccggcatcaccggtgtgcccgagttcaccaaggctgctgccacgctcgcctacggcaaggactcgtccgccctagaccgcctcgtcatcacccagtccatctctggtacaggtgccctgcgcatcggcgccgccttcctcgagcgcttctaccccggcgacaagaccatctacattcccaacccctcgtgggccaaccacaaggccgtcttcaacgatgccggcctcaaggtccagcagtatcgctactacgacaaaaacaccataggtctcgacttcgacggcatgcttgccgacatcaacgctgctcccaagggcagtatgttcctcttccacgcctgcgcccacaaccccaccggtgtcgacccgaccatggagcagtggaaggagatcagccaggccgtcaaggaccagggccactacgccttcttcgacatggcttaccagggcttcgccagtggtgacacggacaaggacgctttcgccctccgctactttgtcgagcagggccacaacgtctgcctggcccagagcttcgccaagaacatgggtctctacggtgagcgtgtaggtgctttctctatcgttgccgcctcggccgaggagaagaagcgcatcgactcccagatcaagatcctcgtccgacctctgtactcgaatcctcccgtccacggtgcccgcatcgcgtccgagatcctgaacacccccgccctctaccagcaatggctcggcgaggtcaaggagatggccgaccgcatcatcagcatgcgtgctctgctcaagggcaacctcgagaagctcggcagctcccacgactggagccacatcacctcgcagattggcatgtttgcctacactggtcttgacgccgcctcgatggagaagttggccaaggaccacagcgtctacgccaccaaggacggccgtatcagcgttgccggtatcacgagcgacaacgtcggacgtcttgccgaggccatctacaaggtcaagggttag

SEQ ID NO: 25192 - protein, 440 aa, Muscodor strobelii
  misc_feature: SGI Peptide ID NO. 568596
  misc_feature (69)..(435): Pfam Id: PF00155 Pfam Desc: Aminotransferase class I and II
  misc_feature (1)..(440): NCBI GI: 261355489 Blast Desc: aspartate aminotransferase [Verticillium albo-atrum VaMs.102]
  misc_feature (1)..(440): NCBI GI: 164423994 Blast Desc: aspartate aminotransferase, mitochondrial [Neurospora crassa OR74A] gi|164424031|ref|XP_963283.2| aspartate aminotransferase, mitochondrial [Neurospora crassa OR74A] crassa
  misc_feature (1)..(440): NCBI GI: 256728973 Blast Desc: [Nectria haematococca mpVI 77-13-4]
  misc_feature (1)..(440): NCBI GI: 46138463 Blast Desc: FG10746.1 [Gibberella zeae PH-1]
  misc_feature (1)..(440): NCBI GI: 225877944 Blast Desc: aspartate aminotransferase [Gibberella fujikuroi]
  misc_feature (1)..(440): NCBI GI: 145608574 Blast Desc: MGG_06530 [Magnaporthe grisea 70-15] gi|145016034|gb|EDK00524.1| MGG_06530 [Magnaporthe grisea 70-15]
  misc_feature (1)..(439): NCBI GI: 154291308 Blast Desc: glutamate oxaloacetate transaminase 2 [Botryotinia fuckeliana B05.10] gi|150846993|gb|EDN22186.1| glutamate oxaloacetate transaminase 2 [Botryotinia fuckeliana B05.10]
  misc_feature (59)..(440): NCBI GI: 171677093 Blast Desc: protein product [Podospora anserina] gi|170936614|emb|CAP61273.1| protein product [Podospora anserina]
  misc_feature (1)..(440): NCBI GI: 240105426 Blast Desc: aspartate aminotransferase, mitochondrial precursor, [Coccidioides posadasii C735 delta SOWgp]
  misc_feature (1)..(440): NCBI GI: 189200158 Blast Desc: aspartate aminotransferase, mitochondrial precursor [Pyrenophora tritici-repentis Pt-1C-BFP] gi|187983515|gb|EDU49003.1| aspartate aminotransferase, precursor
  misc_feature (1)..(438): SWISSPROT Homolog: EC 2.6.1.1 Aspartate transaminase
  misc_feature: Useful for introducing or modulating the production of volatile compounds
MLPALRVVSRQAATRRVGLQAARAGSTWANVPQGPPVCHRSCQSISRVSTMLILPAGCITEAFKADSFDKKINLGVGAYRDDKGKPYVLPSVRTAENNVVSAKLNKEYAGITGVPEFTKAAATLAYGKDSSALDRLVITQSISGTGALRIGAAFLERFYPGDKTIYIPNPSWANHKAVFNDAGLKVQQYRYYDKNTIGLDFDGMLADINAAPKGSMFLFHACAHNPTGVDPTMEQWKEISQAVKDQGHYAFFDMAYQGFASGDTDKDAFALRYFVEQGHNVCLAQSFAKNMGLYGERVGAFSIVAASAEEKKRIDSQIKILVRPLYSNPPVHGARIASEILNTPALYQQWLGEVKEMADRIISMRALLKGNLEKLGSSHDWSHITSQIGMFAYTGLDAASMEKLAKDHSVYATKDGRISVAGITSDNVGRLAEAIYKVKG

SEQ ID NO: 25193 - DNA, 1567 bp, Muscodor strobelii
  misc_feature: SGI EST ID NO. CUFF.59238.0
  misc_feature: Variant of the nucleotide sequence at SEQ ID NO 25191
ccgaagcgttcaaggccgactcctttgacaagaagatcaacctgggcgttggcgcataccgtgacgataagggcaagccttacgtcctcccctcggtccgcaccgctgagaacaatgtcgtgtcggccaagctgaacaaggagtacgccggcatcaccggtgtgcccgagttcaccaaggctgctgccacgctcgcctacggcaaggactcgtccgccctagaccgcctcgtcatcacccagtccatctctggtacaggtgccctgcgcatcggcgccgccttcctcgagcgcttctaccccggcgacaagaccatctacattcccaacccctcgtgggccaaccacaaggccgtcttcaacgatgccggcctcaaggtccagcagtatcgctactacgacaaaaacaccataggtctcgacttcgacggcatgcttgccgacatcaacgctgctcccaagggcagtatgttcctcttccacgcctgcgcccacaaccccaccggtgtcgacccgaccatggagcagtggaaggagatcagccaggccgtcaaggaccagggccactacgccttcttcgacatggcttaccagggcttcgccagtggtgacacggacaaggacgctttcgccctccgctactttgtcgagcagggccacaacgtctgcctggcccagagcttcgccaagaacatgggtctctacggtgagcgtgtaggtgctttctctatcgttgccgcctcggccgaggagaagaagcgcatcgactcccagatcaagatcctcgtccgacctctgtactcgaatcctcccgtccacggtgcccgcatcgcgtccgagatcctgaacacccccgccctctaccagcaatggctcggcgaggtcaaggagatggccgaccgcatcatcagcatgcgtgctctgctcaagggcaacctcgagaagctcggcagctcccacgactggagccacatcacctcgcagattggcatgtttgcctacactggtcttgacgccgcctcgatggagaagttggccaaggaccacagcgtctacgccaccaaggacggccgtatcagcgttgccggtatcacgagcgacaacgtcggacgtcttgccgaggccatctacaaggtcaagggttagagctgacgttcttgagagatgttgtatgaggctatggaatacggagggcgttttacgtgctatctggaaaaagaagcaagggtgtttcttttctgttgtattttgaaaagcactccttgccttacgaccggctgaatagacgtggataaaatgccgttagacgcctgacgcagagaacgagtgcatgcgtccacatgcatatctcattgcgtttcccgactactatgtagatagatgaggaattgtactactacccaaccacacaatgacatcttcgttgccgttctttgcaatttcgatttcaacattgactcctgcatctgcacattgtagccattctacataatgccgcgcaaagtgttacgactccataggctattatagttaggccatacgatctagatcgtctacttataatccaa

SEQ ID NO: 25194 - DNA, 1671 bp, Muscodor strobelii
  misc_feature: SGI cDNA ID NO. 568597
  misc_feature: Encodes the peptide sequence at SEQ ID NO 25195
atggcatcctatttcacattgtccgctgccttccagtcttcatatatccaaaaatctacgtacccttgcaatttgctccgtaaaggcatcggtacttaccccagcgacttagttgtctacaaaaacaagatagacgtcgcagagtctctcggcctcttcgaaacaaggcccaattgttttgaagtgagagttcgcgacttgcattttgatgatggccagggtgaagcactgaagaaggaatacatcgcgaatctgcagggtcttgactcctacttgggaataagagtggttcaggatccaaatgatgcccagcgcaaagtagctgccgccagatacaaagatccaaaatgtcgtttcatctatatatacggctcgaattcaagatcgccgttgaaaatatccaaagacatgctttcgggaatcttgacgttccaccaagtgatgcccgagtaccttgacttcatgtcagttttcgggctgcaagaaaggccagtagacttcgatttcggatctttcagagcgcaatgtattgtgggatcttcatcaaggaatgttggggatgcgtttggacaagatgctttagggcgatctgacaaatactaccaaatgtgttacaatctcaagtgcgtcaatcgaactgagagagatagtgaaacccaatattctatccgacaagccgcattctatcatcgtttcgatatcaagcggggaaactgtttgtggattgttactaaaggagggctggacattcatacgaaattcaaagaacttaccggtaaagatgccaagctggaggatacgtcttttggcaacccggaggagtgctttcgatcaactctgtccgcgcaattgctcttctgtcgttgggcaacggatgattggcatggttacatcagagccgtagaaacggccattgatcaatatacaaaactagccgtcatcggccctagagatcatagtattacccgagaatactttgcagccgagaatgtgcgaaaattacaagtgtggcatgaggaggtaagcgatatcatcacggtcttggaatccaatgtggacgtgatgagtgccctcatgagtttctatcaagatatgcgatcggacaagcgcatacctcaaggccaagtgtgcggagatgagatacatgacttcgtgcgtgaagtaaaccagatcattgtcaacaaacgcatgcagatcaatagaacaaaaaaactgctacagatgactatggaacgatcagagctggtcaaacaacatattgccacacaatcttctgaaaggctggagaggttaaaccaaaacctcgaaaaggaagccatcctcgtgcgcatcataaccatcgtcaccttaatctacttgccagctacatttgtgtcgacatttttcagcactgatgtcattaaataccaaaatactagtagggcaggaggcaacttctccaaaatcgccatgatccgctggctccaagtgacactgcccctgacatttttgacgcttttggtcgcctacgccttgcggagatgggcagagaggcgcgcagaaagcaaagggttcttgatacccaaggatcatcaaccatggctattctcaatgccgaacaaagtagcaactttcaacagcaggacaagcactctgctgccctggaccgagaaacacagccaatacccctga

SEQ ID NO: 25195 - protein, 556 aa, Muscodor strobelii
  misc_feature: SGI Peptide ID NO. 568597
  misc_feature (4)..(302): NCBI GI: 212537493 Blast Desc: PMAA_093510 [Penicillium marneffei ATCC 18224] gi|210068644|gb|EEA22735.1| PMAA_093510 [Penicillium marneffei ATCC 18224]
  misc_feature (10)..(305): NCBI GI: 46109784 Blast Desc: FG01774.1 [Gibberella zeae PH-1]
  misc_feature (113)..(316): NCBI GI: 116197192 Blast Desc: CHGG_05194 [Chaetomium globosum CBS 148.51] gi|88181107|gb|EAQ88575.1| CHGG_05194 [Chaetomium globosum CBS 148.51]
  misc_feature (102)..(305): NCBI GI: 171679401 Blast Desc: protein product [Podospora anserina] gi|170939326|emb|CAP64554.1| protein product [Podospora anserina]
  misc_feature (125)..(305): NCBI GI: 256723607 Blast Desc: NECHADRAFT_52101 [Nectria haematococca mpVI 77-13-4]
  misc_feature (147)..(313): NCBI GI: 189204522 Blast Desc: conserved [Pyrenophora tritici-repentis Pt-1C-BFP] gi|187985695|gb|EDU51183.1| conserved [Pyrenophora tritici-repentis Pt-1C-BFP]
  misc_feature (141)..(318): NCBI GI: 256729537 Blast Desc: NECHADRAFT_84216 [Nectria haematococca mpVI 77-13-4]
  misc_feature (115)..(507): NCBI GI: 115397151 Blast Desc: conserved [Aspergillus terreus NIH2624] gi|114192358|gb|EAU34058.1| conserved [Aspergillus terreus NIH2624]
  misc_feature (124)..(305): NCBI GI: 46111065 Blast Desc: FG02414.1 [Gibberella zeae PH-1]
  misc_feature (326)..(517): NCBI GI: 189204522 Blast Desc: conserved [Pyrenophora tritici-repentis Pt-1C-BFP] gi|187985695|gb|EDU51183.1| conserved [Pyrenophora tritici-repentis Pt-1C-BFP]
MASYFTLSAAFQSSYIQKSTYPCNLLRKGIGTYPSDLVVYKNKIDVAESLGLFETRPNCFEVRVRDLHFDDGQGEALKKEYIANLQGLDSYLGIRVVQDPNDAQRKVAAARYKDPKCRFIYIYGSNSRSPLKISKDMLSGILTFHQVMPEYLDFMSVFGLQERPVDFDFGSFRAQCIVGSSSRNVGDAFGQDALGRSDKYYQMCYNLKCVNRTERDSETQYSIRQAAFYHRFDIKRGNCLWIVTKGGLDIHTKFKELTGKDAKLEDTSFGNPEECFRSTLSAQLLFCRWATDDWHGYIRAVETAIDQYTKLAVIGPRDHSITREYFAAENVRKLQVWHEEVSDIITVLESNVDVMSALMSFYQDMRSDKRIPQGQVCGDEIHDFVREVNQIIVNKRMQINRTKKLLQMTMERSELVKQHIATQSSERLERLNQNLEKEAILVRIITIVTLIYLPATFVSTFFSTDVIKYQNTSRAGGNFSKIAMIRWLQVTLPLTFLTLLVAYALRRWAERRAESKGFLIPKDHQPWLFSMPNKVATFNSRTSTLLPWTEKHSQYP

SEQ ID NO: 25196 - DNA, 3622 bp, Muscodor strobelii
  misc_feature: SGI EST ID NO. CUFF.59305.0
  misc_feature: Variant of the nucleotide sequence at SEQ ID NO 25194
cgccgatgttgaataattctatggaggttcgctcgctgtgagattcgtctcctatgcgtttctgcgtcgctcatgcatgcataggcagggtaaatggttcgcgacacaccttatcgccttgtctattattctagtctgcctagtcatcagatttatgtcaagttaggccgcttaatctcaccaactggatacctggagtgatggtatataacaaagttcaaagtttctgcatgccttgattgtgcccttttgctccccttgccactacctttaggccacaaggcatctgaagtaatactggcggccccaaaacttctgaaatttcacccgaaatccaacgtatttctacacttctatttcggtcaaggttcgtcgttcaataatgtcggaaccagagcgaagacctcctcggcgccaaaataccgcatggtctagacgaagtgacacgtcttggtcgtcaatccggagacggaacacaagacgggatacaagcagcactgtcgcgaattcacataacagcggaccttgggtggaggattattctagctaccataggactttgtcatgggacatcctcaagagcttcctagaggaacttttcccgaatcattcctttcccgagacaggcagacttgtatgttgttctggttttgttgaatttcgccattgcttttacgcagagaactcaatacaatcaaattgataggaacgcgacttctggctcttcgaggcgcctcggccccttacgacggtaagtgacattagatttattgccaccgtagttgacggaactactattgacacacgtctagcaagacaggatctacatcgcaaggaggaggcatgaggagacagagccgcagccgacgggaaatgcaaagaacgaaccaagcccagagagatagggagggacttacgggctaaacccagggagtggcattgggggcggaggctctggcataagcgactcacagagccaggatacacctccttggggagcctcacacatgttttgtaatcatgagccacaaatggctgcatgaaaatttcggtatttacattttccaatgggtggtaacacgtttttcatcgcttcttgcatatcagattttctggatgattctcaacatatcaagtagttcatgtgatcagtgattgatgaatacaagtgcatggccatttgaattatcggcgaattgcccgttccattggcgttaattgtttacaagtttcctgtctcgtcggatttattggatgtacgtctgccaaggaattactgatttggccacgccacacacacagacgggcttttcctgtgcgcctatggcttgcatagctgacatggcagaatctgaggggcctcaagggcaacgaacgttacaacaagcgaggcaggcatttcgcgcgaggcaaaattgggatccgggctcgctcataaattagtggttggactcttgaacctcctccctgcacaagacgcaatgtatagcatcgtcccccatttcgattgacttctagcatatccactcgacagaccagatcgactatggcatcctatttcacattgtccgctgccttccagtcttcatatatccaaaaatctacgtacccttgcaatttgctccgtaaaggcatcggtacttaccccagcgacttagttgtctacaaaaacaagatagacgtcgcagagtctctcggcctcttcgaaacaaggcccaattgttttgaagtgagagttcgcgacttgcattttgatgatggccagggtgaagcactgaagaaggaatacatcgcgaatctgcagggtcttgactcctacttgggaataagagtggttcaggatccaaatgatgcccagcgcaaagtagctgccgccagatacaaagatccaaaatgtcgtttcatctatatatacggctcgaattcaagatcgccgttgaaaatatccaaagacatgctttcgggaatcttgacgttccaccaagtgatgcccgagtaccttgacttcatgtcagttttcgggctgcaagaaaggccagtagacttcgatttcggatctttcagagcgcaatgtattgtgggatcttcatcaaggaatgttggggatgcgtttggacaagatgctttagggcgatctgacaaatactaccaaatgtgttacaatctcaagtgcgtcaatcgaactgagagagatagtgaaacccaatattctatccgacaagccgcattctatcatcgtttcgatatcaagcggggaaactgtttgtggattgttactaaaggagggctggacattcatacgaaattcaaagaacttaccggtaaagatgccaagctggaggatacgtcttttggcaacccggaggagtgctttcgatcaactctgtccgcgcaattgctcttctgtcgttgggcaacggatgattggcatggttacatcagagccgtagaaacggccattgatcaatatacaaaactagccgtcatcggccctagagatcatagtattacccgagaatactttgcagccgagaatgtgcgaaaattacaagtgtggcatgaggaggtaagcgatatcatcacggtcttggaatccaatgtggacgtgatgagtgccctcatgagtttctatcaagatatgcgatcggacaagcgcatacctcaaggccaagtgtgcggagatgagatacatgacttcgtgcgtgaagtaaaccagatcattgtcaacaaacgcatgcagatcaatagaacaaaaaaactgctacagatgactatggaacgatcagagctggtcaaacaacatattgccacacaatcttctgaaaggctggagaggttaaaccaaaacctcgaaaaggaagccatcctcgtgcgcatcataaccatcgtcaccttaatctacttgccagctacatttgtgtcgacatttttcagcactgatgtcattaaataccaaaatactagtagggcaggaggcaacttctccaaaatcgccatgatccgctggctccaagtgacactgcccctgacatttttgacgcttttggtcgcctacgccttgcggagatgggcagagaggcgcgcagaaagcaaagggttcttgatacccaaggatcatcaaccatggctattctcaatgccgaacaaagtagcaactttcaacagcaggacaagcactctgctgccctggaccgagaaacacagccaatacccctgaacagcacagctttaaagcctattcttcttcttcttcttcttttcttcttcttctttttctgtactagcgctagtcgcatactggcaatcgatgtcagtctttgaatgcatttcccttagattccagttcactcggaattgctatttcttagcgttgcatagcgtagccagaggcacggaccaattctatagatttgggaatatcaggcttggtctatgagaaggtggaatgagtgtttaggcatatgggagattgtactatacagagcagtcttatcgaaatagatattgaaataggggtagattagtcagcagtaccagaataaggcttatagccttacttagatagctcagaattcgtcgattttatatcattacgacggaatacacagactttagacctgat

SEQ ID NO: 25197 - DNA, 2877 bp, Muscodor strobelii
  misc_feature: SGI cDNA ID NO. 568598
  misc_feature: Encodes the peptide sequence at SEQ ID NO 25198
atggaatcttttcacgaaccagcaatgacagcatcgccgctcagtattctagccgagttccgagattacatgagcaacataaaaagacctcactgggagcaaaagacattttacagacaagaagatattctgtggtggatgcgacagccacgaagtggaaagacgaatctttcgagtctcctcgatgctgtgctagacgtctcgaagagcccttccaaaacccaagactatcatattcgacagtcgaagatcgtatttgctgttcttttagacccagctgtcaacgaaggtcgtgctatccgtgctttcagtagatccatacgagatgatgacttggcaagattgaatgatggtgatttccgaccagctgaagtgtatttagcacaactataccccgatgagcctcttgagacatgggacaaactcagaaagaacttcaaggccgctcgttttgcatactgcccgcagaatctccgcatggggattgacgagaccgttaggcatggtatcattctgccgttctgtcaacgtaccgtgatcaataggaaaggtggcacagccaatgtgcatcaatgcctcatacaagaagatcttgtgcctgatgatcttcggcaagctttgagaggatcttgctacgaggtggaatcttttggaaaggtctacgatatcgcaatcaaatcttaccgacgatatgaagaggaggcatataatatagaagtcgacgcattcagggccctccataatgaacttggtgttgtcaagttcttaggatatcttggggagtacaacgagcactcgggaagcagcccacatgatgctttgacgcataatatcttgcttgagtacgggcaagaagacttggacgaatatcttttcgacaattctccacctgtactatacaaggaagtcagaactttttggctgtcactattgaaactcgcgaagactatcgagagacttcacaatctgtcttttgaaggaaatgtttacgcaggttggcatggggacatcaagccagacaacattctgcgagttagaggagagttcaaactcgctgacttcgggtttacgcaattccggccagtcagtgatgctggcaatggatctcctgaagtcgacagatttaacggatcagtcgaatacccgcaaaagatcgacacctggtccctgggctgtgttctgtcggcggtcgcgacctgggttgtcctcggacaacaacattataaccagtaccctgaagtacgaaaaacagcaatagagaagtttcgctcccggcagggacttggacagaacgccgggcctgcagctgatgacgcttttcataacggaaatcgtgtccttgatgctgtcgttcactggcacacgttgctccgcaactctttgcgcaggtcagacacgttgacggggcgaattattgatgtcatagagaagaaaatgctcgtcaatgatgttgacgatagagccacaattcaagaagcttgtgagcttcttgatgacgcattcattctcgcggaccaggactacgagtccgctctaagtagaccaatcgccccacctccgttaaaacgtatcgattccgaattgctagaaacgctattacgtcttgatgaaacagcacccaatgtatccattctagtggctcatcaacagcctcgttcgacgcgcctgggcctaccaagtgttaaagtcaggaaatccgagaggctgaagtcaaatggtagaacaaaggtcgctgcacgggaagaggcaataattgaagaggggacaaccgaagagaggacaacacaattgcctgaggaactctctgctattgagatcaatggagctccaaattcgattactggtaaagcatcaatctcactagtaaccccaaactacgagcagccaacacaccccgtactgcaacagcagtatcaggctccgatcgccaagttggcgattgaggagctccacgaacaattgactagaaagcagaggaacacaacactgcttacgttgctaggcgggacgaagaaagatagccatttgaagaaatttgtgtatggccgtgacgtgaaattcgtagtagacaacagcgcatcaatgatacagtatcactggaacgccgccaagatagtattagagactctgggaacattggtcactggacttgacgaagatggcgttgatctagaattcacaattggggctcatagaaaggaaaggaaaagaaaaaggatttccaaggaattcggtgactcgatggtcctcgtgcgtcaggaatacaacaagaatgacgtaactaacatgaagcaaaagttacaaacgattttcgacgattatcttgagtctggatataaaaagaggatgacactcatcattctaacagatgggctttggtacaaacaagatagcgacgacgtggagaaaacaattgtagagtttctcaaaaaactaaagggcaaacatgataaaatggaatcgaggcggttcagcatccaatttgtgtcgtttggcgatgacgcaaaggcactggagcgattggctgggttggataacaatatgaaaaaccggtacggagtcgaggacattatcgatacgaaaccttggaatcacaaccagccttaccatctgattactgggagtattcaagatgaatatgacgacgatgatcctgaccgctcacccagtctcgtctcgccaccgatgactctttcgctaacttcatcagctccgaggccaggtcaaggtactttactgccaccatcagcaggagggcagcctgggtcggacacactcttgccgggagcaaccgttcagcatgaccacaactttctaccagtgaggtcaccttcaagaggcaaagcggtcatgaagaagatttttaagggtttctag

SEQ ID NO: 25198 - protein, 958 aa, Muscodor strobelii
  misc_feature: SGI Peptide ID NO. 568598
  misc_feature (334)..(394): Pfam Id: PF00069 Pfam Desc: Protein kinase domain
  misc_feature (207)..(853): NCBI GI: 46122977 Blast Desc: FG05866.1 [Gibberella zeae PH-1]
  misc_feature (263)..(482): NCBI GI: 256723608 Blast Desc: NECHADRAFT_52172 [Nectria haematococca mpVI 77-13-4]
  misc_feature (171)..(497): NCBI GI: 256729536 Blast Desc: NECHADRAFT_84215 [Nectria haematococca mpVI 77-13-4]
  misc_feature (275)..(520): NCBI GI: 116197192 Blast Desc: CHGG_05194 [Chaetomium globosum CBS 148.51] gi|88181107|gb|EAQ88575.1| CHGG_05194 [Chaetomium globosum CBS 148.51]
  misc_feature (96)..(520): NCBI GI: 259480575 Blast Desc: TPA: protein kinase domain-containing protein (AFU_orthologue; AFUA_2G14650) [Aspergillus nidulans FGSC A4]
  misc_feature (96)..(520): NCBI GI: 67541591 Blast Desc: AN6959.2 [Aspergillus nidulans FGSC A4] gi|40738411|gb|EAA57601.1| AN6959.2 [Aspergillus nidulans FGSC A4]
  misc_feature (671)..(881): NCBI GI: 238837486 Blast Desc: conserved [Microsporum canis CBS 113480]
  misc_feature (679)..(881): NCBI GI: 258578287 Blast Desc: conserved [Uncinocarpus reesii 1704] gi|237903591|gb|EEP77992.1| conserved [Uncinocarpus reesii 1704]
  misc_feature (671)..(876): NCBI GI: 169598380 Blast Desc: SNOG_01992 [Phaeosphaeria nodorum SN15] gi|160704384|gb|EAT90204.2| SNOG_01992 [Phaeosphaeria nodorum SN15]
  misc_feature (673)..(881): NCBI GI: 239612725 Blast Desc: conserved [Ajellomyces dermatitidis ER-3]
MESFHEPAMTASPLSILAEFRDYMSNIKRPHWEQKTFYRQEDILWWMRQPRSGKTNLSSLLDAVLDVSKSPSKTQDYHIRQSKIVFAVLLDPAVNEGRAIRAFSRSIRDDDLARLNDGDFRPAEVYLAQLYPDEPLETWDKLRKNFKAARFAYCPQNLRMGIDETVRHGIILPFCQRTVINRKGGTANVHQCLIQEDLVPDDLRQALRGSCYEVESFGKVYDIAIKSYRRYEEEAYNIEVDAFRALHNELGVVKFLGYLGEYNEHSGSSPHDALTHNILLEYGQEDLDEYLFDNSPPVLYKEVRTFWLSLLKLAKTIERLHNLSFEGNVYAGWHGDIKPDNILRVRGEFKLADFGFTQFRPVSDAGNGSPEVDRFNGSVEYPQKIDTWSLGCVLSAVATWVVLGQQHYNQYPEVRKTAIEKFRSRQGLGQNAGPAADDAFHNGNRVLDAVVHWHTLLRNSLRRSDTLTGRIIDVIEKKMLVNDVDDRATIQEACELLDDAFILADQDYESALSRPIAPPPLKRIDSELLETLLRLDETAPNVSILVAHQQPRSTRLGLPSVKVRKSERLKSNGRTKVAAREEAIIEEGTTEERTTQLPEELSAIEINGAPNSITGKASISLVTPNYEQPTHPVLQQQYQAPIAKLAIEELHEQLTRKQRNTTLLTLLGGTKKDSHLKKFVYGRDVKFVVDNSASMIQYHWNAAKIVLETLGTLVTGLDEDGVDLEFTIGAHRKERKRKRISKEFGDSMVLVRQEYNKNDVTNMKQKLQTIFDDYLESGYKKRMTLIILTDGLWYKQDSDDVEKTIVEFLKKLKGKHDKMESRRFSIQFVSFGDDAKALERLAGLDNNMKNRYGVEDIIDTKPWNHNQPYHLITGSIQDEYDDDDPDRSPSLVSPPMTLSLTSSAPRPGQGTLLPPSAGGQPGSDTLLPGATVQHDHNFLPVRSPSRGKAVMKKIFKGF

SEQ ID NO: 25199 - DNA, 1133 bp, Muscodor strobelii
  misc_feature: SGI EST ID NO. CUFF.59253.0
  misc_feature: Variant of the nucleotide sequence at SEQ ID NO 25197
ttttcagttcctaagcaattaaaattagatctctatcagttggatggacagagaagttgctgcagttcatatgcgtctataccgtcagatcactttgctcgagtcatctgcgaaatggaatcttttcacgaaccagcaatgacagcatcgccgctcagtattctagccgagttccgagattacatgagcaacataaaaagacctcactgggagcaaaagacattttacagacaagaagatattctgtggtggatgcgacagccacgaagtggaaagacgaatctttcgagtctcctcgatgctgtgctagacgtctcgaagagcccttccaaaacccaagactatcatattcgacagtcgaagatcgtatttgctgttcttttagacccagctgtcaacgaaggtcgtgctatccgtgctttcagtagatccatacgagatgatgacttggcaagattgaatgatggtgatttccgaccagctgaagtgtatttagcacaactataccccgatgagcctcttgagacatgggacaaactcagaaagaacttcaaggccgctcgttttgcatactgcccgcagaatctccgcatggggattgacgagaccgttaggcatggtatcattctgccgttctgtcaacgtaccgtgatcaataggaaaggtggcacagccaatgtgcatcaatgcctcatacaagaagatcttgtgcctgatgatcttcggcaagctttgagaggatcttgctacgaggtggaatcttttggaaaggtctacgatatcgcaatcaaatcttaccgacgatatgaagaggaggcatataatatagaagtcgacgcattcagggccctccataatgaacttggtgttgtcaagttcttaggatatcttggggagtacaacgagcactcgggaagcagcccacatgatgctttgacgcataatatcttgcttgagtacgggcaagaagacttggacgaatatcttttcgacaattctccacctgtactatacaaggaagtcagaactttttggctgtcactattgaaactcgcgaagactatcgagagacttcacaatctgtcttttgaaggaaatgtttacgcaggttggcatggggacatcaagccaga

SEQ ID NO: 25200 - DNA, 444 bp, Muscodor strobelii
  misc_feature: SGI cDNA ID NO. 568599
  misc_feature: Encodes the peptide sequence at SEQ ID NO 25201
atgaccctcactgtcaaggccgaggccagctacaacgcgaacgcgcccagctttaacatccactgcgaatggtcgtacatcactaactacatcttctattacgactgcatctctatcgagggcgagttttttgagggcgaaatggtcaccttaatgacatactattcggcggatcaagcagagaacaagcactactgggccgctgagaacgccacaaagtacagatttaagggcgagtcggactggagccagtatggcgtcaagaattggatgttctcgctcgcgtggtctggcaggagtcccacagtcctggcgttggaacttctccagatcaaccttgttgagattcatctggaatacacgagaccacttccctcgatgttccacgtgtatgacactgaaatatactctactgatgtgcatagatcagatccgaagaattaa

SEQ ID NO: 25201 - protein, 147 aa, Muscodor strobelii
  misc_feature: SGI Peptide ID NO. 568599
MTLTVKAEASYNANAPSFNIHCEWSYITNYIFYYDCISIEGEFFEGEMVTLMTYYSADQAENKHYWAAENATKYRFKGESDWSQYGVKNWMFSLAWSGRSPTVLALELLQINLVEIHLEYTRPLPSMFHVYDTEIYSTDVHRSDPKN

SEQ ID NO: 25202 - DNA, 221 bp, Muscodor strobelii
  misc_feature: SGI EST ID NO. CUFF.59268.0
  misc_feature: Variant of the nucleotide sequence at SEQ ID NO 25200
actggagccagtatggcgtcaagaattggatgttctcgctcgcgtggtctggcaggagtcccacagtcctggcgttggaacttctccagatcaaccttgttgagattcatctggaatacacgagaccacttccctcgatgttccacgtgtatgacactgaaatatactctactgatgtgcatagatcagatccgaagaattaattacatgtacacatccgc

SEQ ID NO: 25203 - DNA, 2094 bp, Muscodor strobelii
  misc_feature: SGI cDNA ID NO. 568600
  misc_feature: Elevated expression when VOC is produced
  misc_feature: Encodes the peptide sequence at SEQ ID NO 25204
atggcgacaattgctctacccagacccattaccacccatcgatcctcttctgatatcgtgacactcgcctctcctatcagtctcgagacaatcgatacccaacaacctacatcatgtcccgctcccatacctaataagtacattcccgtttgtccgacaggaccggttcccgtacaggcccctaatacgccaccgccttcgcctggtcgcgaggaggaaagctatcactcttcctcatatctacaccctccatcccaataccacaagcataaatcaggctctttatgcatttatgccatcgacgccggtgacgtcgcggctgcaatcgactacaccgcgagacaaccattgccagacccgactcaggtttttccatggctacatggcatccacccgagtaaccacatgcaaaaagcattcttcgctgcacgaaaggctcttagaaagacaccttgctgcttgcgaggacttactgtggtaaaggccgatggtaatctgtgcgagtctcgtcttaaaggggctcttgcgcctcaagaattcttactcctaagtgccgatggagaattcattgatatcgacccgaaagaaggcttttcagttagaaattttcagatacaagctgctaaggtagctttcacctcagacattattgtgtacggtgaagatgccagcgttgttcgcaaagtagcctggagagtggcttccgcacagctgaaatggcgcgagaagcaacgaggccaagggcatattgttccggaatacaatactttcatttgtgtaagtccgtttgctgaatttgaagagcgccacggcgaggttgtagcagtcgattcaggaggtcttctgaccggcgccgttttggacttcttccaccaagagagagccgaaatgtacgccatgaccaaggcttcggagattgcgcacaacgtatggctgggacctactccggagcgtgatagcgcggaggatcagcgatatgacatccagatcgaatgcagtgacttgggtcgcttaaacccaagagcattgcaggctattgctgagaagcgtggtaataccgagacgaagtatcctgatctggatttcccatcttcaggaagtatctctgcgcccacatggtcacacgctgaggcagatggcattctcgatacctgtaaatggatctggcacttggcccatggcacactaccggctcctctagatatagatcgagatggtgatgcaaccatgacagacgcatcggaatcccaatgtcggtctcggaagatcctcatccattgtgcagatgggtatacggagtcgacgatgttggccatcgcgtacttcagctacagtaccggacagccgatccccgatgcgtggttgaatctgcacacaatgatgcagcgcaattttttcgcataccccactgatgtatcactattgagctccatcgcacccagaattctccgcgagtcaccagtttgcgtggacaaggacctatcggagatcacggccatggtacaaagcgagcctaagtggtttgcttcgttggacggttctttacccagtagagtgctgaattatatgtatcttggcaatctcggtcatgccaataatcctgaattattaaaggcaatgggaatcacacagattctcagtgtgggtgagaccgccatgtggagagacggggaactggaagattggggagctgataatgtgctggtggtcgagaatgtgcaagataatggaattgatcctctgacggatgagttcgagaggtgcttggattttatcgatcgcggccgtcgcctcggcacagcaacattggtccactgcagagttggagtttctcggagtgcaacgatctgtattgcagaggtgatgcggtcgatgaacatgtcgttcccgcgagcatactgtttcgttcgagcgagacggctcaatgtaattatacagccgcatctacgatttgcttatgaactcttaaagtgggaagaactgcttctccagagccgttccaccagagacgagaaggccccacgagggcgcgagctggaatggggtgagatcgcaagagagatcgctttcatgaatcagccttacgcgagatga

SEQ ID NO: 25204 - protein, 697 aa, Muscodor strobelii
  misc_feature: SGI Peptide ID NO. 568600
  misc_feature (515)..(661): Pfam Id: PF00782 Pfam Desc: Dual specificity phosphatase, catalytic domain
  misc_feature (1)..(697): NCBI GI: 171689904 Blast Desc: protein product [Podospora anserina] gi|170944914|emb|CAP71025.1| protein product [Podospora anserina]
  misc_feature (1)..(697): NCBI GI: 46116908 Blast Desc: FG04296.1 [Gibberella zeae PH-1]
  misc_feature (1)..(697): NCBI GI: 85081406 Blast Desc: NCU03426 [Neurospora crassa OR74A] gi|18376361|emb|CAD21139.1| related to protein tyrosine phosphatase PPS1 [Neurospora crassa] gi|28917787|gb|EAA27476.1|
  misc_feature (1)..(697): NCBI GI: 39942100 Blast Desc: MGG_03130 [Magnaporthe grisea 70-15] gi|145015896|gb|EDK00386.1| MGG_03130 [Magnaporthe grisea 70-15]
  misc_feature (1)..(697): NCBI GI: 256729204 Blast Desc: [Nectria haematococca mpVI 77-13-4]
  misc_feature (1)..(696): NCBI GI: 154296477 Blast Desc: BC1G_12813 [Botryotinia fuckeliana B05.10] gi|150843336|gb|EDN18529.1| BC1G_12813 [Botryotinia fuckeliana B05.10]
  misc_feature (1)..(697): NCBI GI: 116200015 Blast Desc: CHGG_08163 [Chaetomium globosum CBS 148.51] gi|88179442|gb|EAQ86910.1| CHGG_08163 [Chaetomium globosum CBS 148.51]
  misc_feature (147)..(697): NCBI GI: 261354883 Blast Desc: pps1 dual specificty phosphatase [Verticillium albo-atrum VaMs.102]
  misc_feature (40)..(697): NCBI GI: 238499711 Blast Desc: protein tyrosine phosphatase Pps1, [Aspergillus flavus NRRL3357] gi|220692843|gb|EED49189.1| protein tyrosine phosphatase Pps1, [Aspergillus flavus NRRL3357]
  misc_feature (40)..(697): NCBI GI: 169779103 Blast Desc: [Aspergillus oryzae RIB40] gi|83772755|dbj|BAE62883.1| protein product [Aspergillus oryzae]
  misc_feature (360)..(696): SWISSPROT Homolog: EC 3.1.3.16 Phosphoprotein phosphatase
  misc_feature (360)..(696): SWISSPROT Homolog: EC 3.1.3.48 Protein-tyrosine-phosphatase
  misc_feature: Useful for introducing or modulating the production of volatile compounds
MATIALPRPITTHRSSSDIVTLASPISLETIDTQQPTSCPAPIPNKYIPVCPTGPVPVQAPNTPPPSPGREEESYHSSSYLHPPSQYHKHKSGSLCIYAIDAGDVAAAIDYTARQPLPDPTQVFPWLHGIHPSNHMQKAFFAARKALRKTPCCLRGLTVVKADGNLCESRLKGALAPQEFLLLSADGEFIDIDPKEGFSVRNFQIQAAKVAFTSDIIVYGEDASVVRKVAWRVASAQLKWREKQRGQGHIVPEYNTFICVSPFAEFEERHGEVVAVDSGGLLTGAVLDFFHQERAEMYAMTKASEIAHNVWLGPTPERDSAEDQRYDIQIECSDLGRLNPRALQAIAEKRGNTETKYPDLDFPSSGSISAPTWSHAEADGILDTCKWIWHLAHGTLPAPLDIDRDGDATMTDASESQCRSRKILIHCADGYTESTMLAIAYFSYSTGQPIPDAWLNLHTMMQRNFFAYPTDVSLLSSIAPRILRESPVCVDKDLSEITAMVQSEPKWFASLDGSLPSRVLNYMYLGNLGHANNPELLKAMGITQILSVGETAMWRDGELEDWGADNVLVVENVQDNGIDPLTDEFERCLDFIDRGRRLGTATLVHCRVGVSRSATICIAEVMRSMNMSFPRAYCFVRARRLNVIIQPHLRFAYELLKWEELLLQSRSTRDEKAPRGRELEWGEIAREIAFMNQPYAR

SEQ ID NO: 25205 - DNA, 3738 bp, Muscodor strobelii
  misc_feature: SGI EST ID NO. CUFF.59275.0
  misc_feature: Variant of the nucleotide sequence at SEQ ID NO 25203
catacatgcagcgggcgttcctggcacggccaacagtccaatctagcagttctagctccatgtagacccagctattcgtccgttatgtcttatctgccgccctccctcttgctgctagcaggggttggtgataaggctgcaacagcgaattgtcaatcatctctccgtttcctgttgttaccccctctccgttgctacggtatactaccactctgctatagtctttctcgtttctgctatactcccctctcttcatctttttgtttcttagaaatcctcccctttctttctctgatcgtccaaaagtctttggtggccattcagacaaaacgaggcgctggacaacgacaaggccccggtttctttcagcttcattatctaaactccagaccaccagactgccgtctgctagttttacaactcttttgcttccgagtcccacgatccctgcgagattcaaccttgtcagcaccttttagtctccgccataacggatctcacgctcttcattggcgaaatttctccctgtgctctccccacaccacccacccaagcacgccaagcccatgttcgtctcgcactatcgagcaataccaatccatctccccgcagttagggcctcttgagaatccacctgagctcttcatctatacttccgagcgtccaactcgagatcacgagataccagagtctgacaacgacatcgaccgaaacaactgcgtgatcttgtttttctgtgtagtctgctttgtttttgtgtgtctgccaatgctcattactgccacatgatctcacaatacacactttgtattagtactatcacgatctacctgaaatccatcacctcgcccacgtgaggagagacaactccgttattgttattagacttgaatctcccgtcacgcgcgccgctggacgatggcgacaattgctctacccagacccattaccacccatcgatcctcttctgatatcgtgacactcgcctctcctatcagtctcgagacaatcgatacccaacaacctacatcatgtcccgctcccatacctaataagtacattcccgtttgtccgacaggaccggttcccgtacaggcccctaatacgccaccgccttcgcctggtcgcgaggaggaaagctatcactcttcctcatatctacaccctccatcccaataccacaagcataaatcaggctctttatgcatttatgccatcgacgccggtgacgtcgcggctgcaatcgactacaccgcgagacaaccattgccagacccgactcaggtttttccatggctacatggcatccacccgagtaaccacatgcaaaaagcattcttcgctgcacgaaaggctcttagaaagacaccttgctgcttgcgaggacttactgtggtaaaggccgatggtaatctgtgcgagtctcgtcttaaaggggctcttgcgcctcaagaattcttactcctaagtgccgatggagaattcattgatatcgacccgaaagaaggcttttcagttagaaattttcagatacaagctgctaaggtagctttcacctcagacattattgtgtacggtgaagatgccagcgttgttcgcaaagtagcctggagagtggcttccgcacagctgaaatggcgcgagaagcaacgaggccaagggcatattgttccggaatacaatactttcatttgtgtaagtccgtttgctgaatttgaagagcgccacggcgaggttgtagcagtcgattcaggaggtcttctgaccggcgccgttttggacttcttccaccaagagagagccgaaatgtacgccatgaccaaggcttcggagattgcgcacaacgtatggctgggacctactccggagcgtgatagcgcggaggatcagcgatatgacatccagatcgaatgcagtgacttgggtcgcttaaacccaagagcattgcaggctattgctgagaagcgtggtaataccgagacgaagtatcctgatctggatttcccatcttcaggaagtatctctgcgcccacatggtcacacgctgaggcagatggcattctcgatacctgtaaatggatctggcacttggcccatggcacactaccggctcctctagatatagatcgagatggtgatgcaaccatgacagacgcatcggaatcccaatgtcggtctcggaagatcctcatccattgtgcagatgggtatacggagtcgacgatgttggccatcgcgtacttcagctacagtaccggacagccgatccccgatgcgtggttgaatctgcacacaatgatgcagcgcaattttttcgcataccccactgatgtatcactattgagctccatcgcacccagaattctccgcgagtcaccagtttgcgtggacaaggacctatcggagatcacggccatggtacaaagcgagcctaagtggtttgcttcgttggacggttctttacccagtagagtgctgaattatatgtatcttggcaatctcggtcatgccaataatcctgaattattaaaggcaatgggaatcacacagattctcagtgtgggtgagaccgccatgtggagagacggggaactggaagattggggagctgataatgtgctggtggtcgagaatgtgcaagataatggaattgatcctctgacggatgagttcgagaggtgcttggattttatcgatcgcggccgtcgcctcggcacagcaacattggtccactgcagagttggagtttctcggagtgcaacgatctgtattgcagaggtgatgcggtcgatgaacatgtcgttcccgcgagcatactgtttcgttcgagcgagacggctcaatgtaattatacagccgcatctacgatttgcttatgaactcttaaagtgggaagaactgcttctccagagccgttccaccagagacgagaaggccccacgagggcgcgagctggaatggggtgagatcgcaagagagatcgctttcatgaatcagccttacgcgagatgaagtattggttttggatattttgcgtttcatttatcgagcgaggcgttggtattgtacgagtcgccgcatgcgctcgcatgggtttacaacggccagtacatgtttcaccggaattcgtcggaatgaaaacactacttggagcagggttgacatcaactccactgggcaaatataagttcccacatgggctcttgcgacggagagcatagcgacttgttgctcggtttgcatagaacggaagacaagccgttcgaagatataatcagtatctggctcgaaatcaggggaaagagaggagcgaggatacatcgacgagtatgataccaggatcagtttgtgcctttaccttcatttcagcaaatattaacggccgcaaagttttggggatcggaaagggtggtgcatcggcgtctaatcaaattttggatatgttttggagatatctggagtcgggttgggggatcaggagcattaacgatttgccttatgtcttggatgataagaattcgaaatggggttcttggccactgagtccctttagcgtgctattttgctaggttctagcagccggggtctaagaaacacgtagttgtatttacgcacaggcgttgctcatgttgcgttcttgctcgaaccagatcgttcctcgacgtgatctactatcctctcggcgccccaatgtgtagaatattgcatgagacggatttacttgctagtatctagctt

SEQ ID NO: 25206 - DNA, 3078 bp, Muscodor strobelii
  misc_feature: SGI cDNA ID NO. 568601
  misc_feature: Encodes the peptide sequence at SEQ ID NO 25207
atgtcttcaaactcgaacccataccgtttctctgcccctcctgagcctcacagcttcggtcctcagtgccgtttagctcccgtcgagaacccctttgttgcagagtcctccggacagacggcagacagcatacctccagtagccgcccagtttttctatacctcgcccgtccctatcgacgatcctctgtctgtcacggtcattgccacctccacagaccccaagtcttctcgccaagtgctgcaacctttctccccggccgacaataatgctctggagaaggcgtggttcggcttggccgacacccagtaccgacaaaaccatgaccacgctcaccgacgtaggagccccagtcccggtctagcaagggccaacgccgagaagctggccgccatttcccacgacttggccgtcaaacacgccgagaagcatgctcgcgaggggccagtgagagacccagctctttcggccgatgagggattgcccacaccagacgccaacgccgatctttgctgcccggagctgctcatcgacgttgggcttgcgctccgcaactctttttgcgctgtcgctaggcggaagcagcgtctgctggacagggaaaccgtcgcccaagctgtcgcagacgagatgaagacgatgcgaaccgattcttttgctaccgtcaccgagcaacgtggcaaatcgggaaccgttggctcgatcactaggagaagaaactctgtggccacagatgctgctctcaaccctgccagtcgattgtctgtccatgagagctcagaactccaagactcccaaaactccaagacggattctcagacggatgcctcgccacttgatatgaagttgagaccgaatatccccacaaagtcagctcatgcagatgctggcatctctgggaagccatttatccgagtcggtacccctgagatgttctctcccccatcgtctcttcctaaggccacgatacggccatccacgcccagagtgcccgaggagaagaaggagcctgtgcgaacaagcaaggagctacgaccacccacagatgtcaagaaaaagacgacgaagaactctgtcgatgtgccagttggagtatctagacttcacgaggtctccctccctgctttgcagatgaagcctatatactggtctcctgtcaatgacatcgcgacggttctgcgtgccacatggttctaccgtgatgatatgcggcccatcgatccgacagtagccaaccagcttgaggccggatatcgagagctaaagccacacacggaaacctggaatgacgagttgagatgtgccgtcgaggtcggaccgttgggtgaagaaaaggtgtcccatctcctgtggccaaaaatagttgattcttccagcaaaaagcatggtgggagtgctgacagtgctgagccggcattatcaagtgatcctttctgtgctggccggtgctttcaaggtgaagccgcagcggaaggcagtcttataccgattgcgaacgaggacacctcttcaccaattcagactccccgaaagttcgatcagtatcacgtcatctacaaagacgaaaagaatgcatttcttctgaaacccagtctcaaaccttccgcttattatggtcgacggccggtggcgaaaattatgaaagacatgaccatcggtatacccgttgtccgagggtttgactacgaggtatggaagaagaagcatcagaagaataagacccagcagcaaaacgattcgcaaaaactgaccgctccatctgagattcggggccgtcatcgggatgagatgtgcaaggcttgcaaagccgagagagatcacaaccaggtaacagatctcgtcttggttgtccacggcatcgggcagaagctcgccgagcgcgtggaaaactatcatttcacgcatgccattaacgcctttcgacgagctatcaacattgagttacgtaacgacgctgtcaaagcgattctccgcgatggccagaacggaatcatggtgttgcccgtcaattggcggcagaacctctcattcgaagatggtggacctatgaaagaggaagacaaggctgaatatgcagtggagaacttcagcttgaaggatatcgagcccaagacgattccagccgtgaggagcatgatatcagacgtcatgtttgatatcccgttctacatgtcgcagcacaagccgcagatggtcgcagcgcttgtgagtgaagcaaatagggtgtatcggctttggtgtcgcaataacccgggcttctcggagaatggacgagtccatttgattggacattcactgggtagtgtcatggctatcgaggtcttgtcgagacagccgacgatggtgccgagtttgcagcttgccaagcaaccacagatacagttatttgaattcgacacgaagaatctgtttcttcttggcagtccggctgcgttctttttgctactcgaaagaggtgcattggttccccgaagaggccgaaagaaacccggcgccgatgccgtcgatgtggtgtcgagtaatgttgttggcgatgctgggaaatttggctgcttggccgtggacaatatttacaacatcatggcaagagaagatcccgttgcgtatctactcaacgggaccatcgatccgatgtacgcggccagtctcaagacggcatatgttccgagcgccactcagagttttctccagtctatgggtactgcaatgcgtggctttgtgcctggactcagtaccacctcgatagatgcctataacgctgcaagtataaccaaacctcccactgtacgcttgccatcacaactcgaactcgaggtccacgacttcacgcgggaagagattgcagagaagaaggcattcctcttgaatgacaatgggcaaatcgacttcttcctaagaagcggaagcgggcctctagagctgcagtatctgaatatgttgtccgcgcacacgagttattgggtcaatggggatttgatccgtctgctgtgtctcgagatcggcaggaagcccgggaagggacacacattgcctgccatgagggcggtgaaggggaagaggctgccgggtgcgaaatag

SEQ ID NO: 25207 - protein, 1025 aa, Muscodor strobelii
  misc_feature: SGI Peptide ID NO. 568601
  misc_feature (796)..(1002): Pfam Id: PF02862 Pfam Desc: DDHD domain
  misc_feature (955)..(1002): Pfam Id: PF02862 Pfam Desc: DDHD domain
  misc_feature (17)..(1021): NCBI GI: 85110830 Blast Desc: NCU06812 [Neurospora crassa OR74A] gi|18375986|emb|CAB91719.2| related to phosphatidic acid-preferring phospholipase A1 [Neurospora crassa] conserved
  misc_feature (17)..(1021): NCBI GI: 261354884 Blast Desc: DDHD domain-containing protein [Verticillium albo-atrum VaMs.102]
  misc_feature (42)..(1019): NCBI GI: 116204807 Blast Desc: CHGG_10287 [Chaetomium globosum CBS 148.51] gi|88176415|gb|EAQ83883.1| CHGG_10287 [Chaetomium globosum CBS 148.51]
  misc_feature (17)..(1021): NCBI GI: 256729203 Blast Desc: NECHADRAFT_62990 [Nectria haematococca mpVI 77-13-4]
  misc_feature (17)..(1020): NCBI GI: 39942102 Blast Desc: MGG_03131 [Magnaporthe grisea 70-15] gi|145015894|gb|EDK00384.1| MGG_03131 [Magnaporthe grisea 70-15]
  misc_feature (17)..(1021): NCBI GI: 46116904 Blast Desc: FG04294.1 [Gibberella zeae PH-1]
  misc_feature (356)..(1019): NCBI GI: 171690230 Blast Desc: protein product [Podospora anserina] gi|170945063|emb|CAP71174.1| protein product [Podospora anserina]
  misc_feature (286)..(1017): NCBI GI: 156047781 Blast Desc: SS1G_09580 [Sclerotinia sclerotiorum 1980] gi|154693975|gb|EDN93713.1| SS1G_09580 [Sclerotinia sclerotiorum 1980]
  misc_feature (286)..(1017): NCBI GI: 154296509 Blast Desc: BC1G_12829 [Botryotinia fuckeliana B05.10] gi|150843352|gb|EDN18545.1| BC1G_12829 [Botryotinia fuckeliana B05.10]
  misc_feature (17)..(1019): NCBI GI: 255953213 Blast Desc: Pc21g02950 [Penicillium chrysogenum Wisconsin 54-1255] gi|211589070|emb|CAP95192.1| Pc21g02950 [Penicillium chrysogenum Wisconsin 54-1255]
MSSNSNPYRFSAPPEPHSFGPQCRLAPVENPFVAESSGQTADSIPPVAAQFFYTSPVPIDDPLSVTVIATSTDPKSSRQVLQPFSPADNNALEKAWFGLADTQYRQNHDHAHRRRSPSPGLARANAEKLAAISHDLAVKHAEKHAREGPVRDPALSADEGLPTPDANADLCCPELLIDVGLALRNSFCAVARRKQRLLDRETVAQAVADEMKTMRTDSFATVTEQRGKSGTVGSITRRRNSVATDAALNPASRLSVHESSELQDSQNSKTDSQTDASPLDMKLRPNIPTKSAHADAGISGKPFIRVGTPEMFSPPSSLPKATIRPSTPRVPEEKKEPVRTSKELRPPTDVKKKTTKNSVDVPVGVSRLHEVSLPALQMKPIYWSPVNDIATVLRATWFYRDDMRPIDPTVANQLEAGYRELKPHTETWNDELRCAVEVGPLGEEKVSHLLWPKIVDSSSKKHGGSADSAEPALSSDPFCAGRCFQGEAAAEGSLIPIANEDTSSPIQTPRKFDQYHVIYKDEKNAFLLKPSLKPSAYYGRRPVAKIMKDMTIGIPVVRGFDYEVWKKKHQKNKTQQQNDSQKLTAPSEIRGRHRDEMCKACKAERDHNQVTDLVLVVHGIGQKLAERVENYHFTHAINAFRRAINIELRNDAVKAILRDGQNGIMVLPVNWRQNLSFEDGGPMKEEDKAEYAVENFSLKDIEPKTIPAVRSMISDVMFDIPFYMSQHKPQMVAALVSEANRVYRLWCRNNPGFSENGRVHLIGHSLGSVMAIEVLSRQPTMVPSLQLAKQPQIQLFEFDTKNLFLLGSPAAFFLLLERGALVPRRGRKKPGADAVDVVSSNVVGDAGKFGCLAVDNIYNIMAREDPVAYLLNGTIDPMYAASLKTAYVPSATQSFLQSMGTAMRGFVPGLSTTSIDAYNAASITKPPTVRLPSQLELEVHDFTREEIAEKKAFLLNDNGQIDFFLRSGSGPLELQYLNMLSAHTSYWVNGDLIRLLCLEIGRKPGKGHTLPAMRAVKGKRLPGAK

SEQ ID NO: 25208 - DNA, 4387 bp, Muscodor strobelii
  misc_feature: SGI EST ID NO. CUFF.59324.1
  misc_feature: Variant of the nucleotide sequence at SEQ ID NO 25206
acagcattggatgcagtggaaatcgatcaagaactcggctcgtgcggaatgtccaagttacatcgttggcaggagcactgcctctgacattttcgcgcgactcttgtaatttgccattatctaatactggtttctatctatgaagctatgcctagacaaacatctataaatcgctccaattacctgtagctatacgctatgcatattgactggtcttggtcaaacgtgtaatttctaaagatttatgatacatggtattctcgtcggccacatcggaatttgaaggggtggcaagttccgatatctccagtgttggaatgccttagtgaccggtagcgtctccaatgtaggccagctgaacaacgtcatccgcctggacttttcctttgccctgcaaaaccatgtggcagtagcctcagctgcgtcagccctcctcttgcatctctgtgtgtcacgcagctcagaaaaacgctgctgtaaatttatgcaaaccggcgatagtccaggcttccctacatgaggctaggcagacacttactgcccacttcaccggaccatcccctccttgcttggcagttcatcgccgtctatgaacacgaatcgagaccttgtcatgcttccatgaatcccatcggctccgtctcgccgtgtcgcttacctccatacatgtgattcccacccgatcgatcatgtccttcatccgaccactacttttcttcccgtcacatcttcgcccgctgctcccgtagccagcctcagccccagcctcagcctcaacggacagccatgtcttcaaactcgaacccataccgtttctctgcccctcctgagcctcacagcttcggtcctcagtgccgtttagctcccgtcgagaacccctttgttgcagagtcctccggacagacggcagacagcatacctccagtagccgcccagtttttctatacctcgcccgtccctatcgacgatcctctgtctgtcacggtcattgccacctccacagaccccaagtcttctcgccaagtgctgcaacctttctccccggccgacaataatgctctggagaaggcgtggttcggcttggccgacacccagtaccgacaaaaccatgaccacgctcaccgacgtaggagccccagtcccggtctagcaagggccaacgccgagaagctggccgccatttcccacgacttggccgtcaaacacgccgagaagcatgctcgcgaggggccagtgagagacccagctctttcggccgatgagggattgcccacaccagacgccaacgccgatctttgctgcccggagctgctcatcgacgttgggcttgcgctccgcaactctttttgcgctgtcgctaggcggaagcagcgtctgctggacagggaaaccgtcgcccaagctgtcgcagacgagatgaagacgatgcgaaccgattcttttgctaccgtcaccgagcaacgtggcaaatcgggaaccgttggctcgatcactaggagaagaaactctgtggccacagatgctgctctcaaccctgccagtcgattgtctgtccatgagagctcagaactccaagactcccaaaactccaagacggattctcagacggatgcctcgccacttgatatgaagttgagaccgaatatccccacaaagtcagctcatgcagatgctggcatctctgggaagccatttatccgagtcggtacccctgagatgttctctcccccatcgtctcttcctaaggccacgatacggccatccacgcccagagtgcccgaggagaagaaggagcctgtgcgaacaagcaaggagctacgaccacccacagatgtcaagaaaaagacgacgaagaactctgtcgatgtgccagttggagtatctagacttcgtatgtcgattttttactccttgcattgtcttgcctcgcttttctgttctacttcaagcctaacaccagtcaatagacgaggtctccctccctgctttgcagatgaagcctatatactggtctcctgtcaatgacatcgcgacggttctgcgtgccacatggttctaccgtgatgatatgcggcccatcgatccgacagtagccaaccagcttgaggccggatatcgagagctaaagccacacacggaaacctggaatgacgagttgagatgtgccgtcgaggtcggaccgttgggtgaagaaaaggtgtcccatctcctgtggccaaaaatagttgattcttccagcaaaaagcatggtgggagtgctgacagtgctgagccggcattatcaagtgatcctttctgtgctggccggtgctttcaaggtgaagccgcagcggaaggcagtcttataccgattgcgaacgaggacacctcttcaccaattcagactccccgaaagttcgatcagtatcacgtcatctacaaagacgaaaagaatgcatttcttctgaaacccagtctcaaaccttccgcttattatggtcgacggccggtggcgaaaattatgaaagacatgaccatcggtatacccgttgtccgagggtttgactacgaggtatggaagaagaagcatcagaagaataagacccagcagcaaaacgattcgcaaaaactgaccgctccatctgagattcggggccgtcatcgggatgagatgtgcaaggcttgcaaagccgagagagatcacaaccaggtaacagatctcgtcttggttgtccacggcatcgggcagaagctcgccgagcgcgtggaaaactatcatttcacgcatgccattaacgcctttcgacgagctatcaacattgagttacgtaacgacgctgtcaaagcgattctccgcgatggccagaacggaatcatggtgttgcccgtcaattggcggcagaacctctcattcgaagatggtggacctatgaaagaggaagacaaggctgaatatgcagtggagaacttcagcttgaaggatatcgagcccaagacgattccagccgtgaggagcatgatatcagacgtcatgtttgatatcccgttctacatgtcgcagcacaagccgcagatggtcgcagcgcttgtgagtgaagcaaatagggtgtatcggctttggtgtcgcaataacccgggcttctcggagaatggacgagtccatttgattggacattcactgggtagtgtcatggctatcgaggtcttgtcgagacagccgacgatggtgccgagtttgcagcttgccaagcaaccacagatacagttatttgaattcgacacgaagaatctgtttcttcttggcagtccggctgcgttctttttgctactcgaaagaggtgcattggttccccgaagaggccgaaagaaacccggcgccgatgccgtcgatgtggtgtcgagtaatgttgttggcgatgctgggaaatttggctgcttggccgtggacaatatttacaacatcatggcaagagaagatcccgttgcgtatctactcaacgggaccatcgatccgatgtacgcggccagtctcaagacggcatatgttccgagcgccactcagagttttctccagtctatgggtactgcaatgcgtggctttgtgcctggactcagtaccacctcgatagatgcctataacgctgcaagtataaccaaacctcccactgtacgcttgccatcacaactcgaactcgaggtccacgacttcacgcgggaagagattgcagagaagaaggcattcctcttgaatgacaatgggcaaatcgacttcttcctaagaagcggaagcgggcctctagagctgcagtatctgaatatgttgtccgcgcacacgagttattgggtcaatggggatttgatccgtctgctgtgtctcgagatcggcaggaagcccgggaagggacacacattgcctgccatgagggcggtgaaggggaagaggctgccgggtgcgaaataggagagtatttcgaaagaacgtgggatgtagatttgtgaggttatgttgatttgtgccacttggacttagacagcgaataccctatttttgattactgtgttcgggataccatatattggcatctgacaatctcctacgaacctagctgccttatttcttgctggtcgctgagtgatgtcgaaatctggtatccgcttgaaaggggctttcaaaggtgatgtgagatttctgctcattatataccaacggtatggcttgcgtgtgtcttttacgaaggcgacactcattgaggtagttctgggataagcacctagctaaacttcgagagggcggcgaataactgccttgtaaataaaatctctaaatacttgtatgacgcccgcatgaacgtcatgtattacttttggactagtctctgaatgaagtcggctttccatatgaggcccc

SEQ ID NO: 25209 - DNA, 753 bp, Muscodor strobelii
  misc_feature: SGI cDNA ID NO. 568602
  misc_feature: Encodes the peptide sequence at SEQ ID NO 25210
atgcctccgttccttgccaacgccgacgttctcacgccctcgtcggcccacagcctcttgtccagcccaccttttgccgacatggagaccctcttcccgccgctgctcgacctcgtctcagcgaggctcaatgctcaggtcacagccctcgctcgcgtgctcagtccaaccaccaatgcctccttcattcaccgcacgattccatcgctgccctctcttgcaaacgaactcgtcacttcactcgccgacaccaagctgcagctctcccgtgcccgtctggcggctaccgcctctttcacagcccatcttcagcagcacaccgacgccctgtgcttgttgatcaacatgctcgagtccaagcacggtcccgcagcggcttcggcgtgtcttcgtgcttccgacgcccaatccgccgcgcagacctgggccctcgcagccgaagccctgctcctcgacacccgccatctcctctatccaccacaagcccaagccgcattggcgagctacaggagacatctgcgcgatgctggccagcgcctcgaggacaaagcgcgagtcagggaggccgagctcgccgactacggcgtggtcgtcgtcggagataaagcggatgggcagcagaggcgggagaggagaaagacgttgacggcggatccgcagaaagaacgcactatgcgagagatggctagagtttggaaggaaatggagtcgaggcttcgtgagattcagggcgatctcagacggttaggataa

SEQ ID NO: 25210 - protein, 250 aa, Muscodor strobelii
  misc_feature: SGI Peptide ID NO. 568602
  misc_feature (1)..(250): NCBI GI: 46138461 Blast Desc: FG10745.1 [Gibberella zeae PH-1]
  misc_feature (19)..(249): NCBI GI: 145608572 Blast Desc: MGG_12808 [Magnaporthe grisea 70-15] gi|145016033|gb|EDK00523.1| MGG_12808 [Magnaporthe grisea 70-15]
  misc_feature (19)..(250): NCBI GI: 256729177 Blast Desc: NECHADRAFT_39914 [Nectria haematococca mpVI 77-13-4]
  misc_feature (19)..(222): NCBI GI: 145608568 Blast Desc: MGG_12806 [Magnaporthe grisea 70-15] gi|145016031|gb|EDK00521.1| MGG_12806 [Magnaporthe grisea 70-15]
  misc_feature (11)..(250): NCBI GI: 261355488 Blast Desc: conserved [Verticillium albo-atrum VaMs.102]
  misc_feature (6)..(194): NCBI GI: 116205611 Blast Desc: CHGG_10689 [Chaetomium globosum CBS 148.51] gi|88176817|gb|EAQ84285.1| CHGG_10689 [Chaetomium globosum CBS 148.51]
  misc_feature (19)..(249): NCBI GI: 154291306 Blast Desc: BC1G_15300 [Botryotinia fuckeliana B05.10] gi|150846992|gb|EDN22185.1| BC1G_15300 [Botryotinia fuckeliana B05.10]
  misc_feature (80)..(249): NCBI GI: 171677091 Blast Desc: protein product [Podospora anserina] gi|170936613|emb|CAP61272.1| protein product [Podospora anserina]
  misc_feature (89)..(249): NCBI GI: 119500412 Blast Desc: NFIA_105540 [Neosartorya fischeri NRRL 181] gi|119415128|gb|EAW25066.1| conserved [Neosartorya fischeri NRRL 181]
  misc_feature (103)..(250): NCBI GI: 240105419 Blast Desc: CPC735_049820 [Coccidioides posadasii C735 delta SOWgp]
MPPFLANADVLTPSSAHSLLSSPPFADMETLFPPLLDLVSARLNAQVTALARVLSPTTNASFIHRTIPSLPSLANELVTSLADTKLQLSRARLAATASFTAHLQQHTDALCLLINMLESKHGPAAASACLRASDAQSAAQTWALAAEALLLDTRHLLYPPQAQAALASYRRHLRDAGQRLEDKARVREAELADYGVVVVGDKADGQQRRERRKTLTADPQKERTMREMARVWKEMESRLREIQGDLRRLG

SEQ ID NO: 25211 - DNA, 1175 bp, Muscodor strobelii
  misc_feature: SGI EST ID NO. CUFF.59287.0
  misc_feature: Variant of the nucleotide sequence at SEQ ID NO 25209
ccagcatctgcaagctcaccgcctgaaagccgcccggcttcagcttctgcgtactgcaatccagaccgctataccccacgagcaggcgtccagatctataccggcgcccccgaagcatcagcaacaactccgcagatgacagcatggacgatccaaatccaagacccaagctcaacagctgccgccgccaagcaatacgcagccctcacccgcaacaccctctttgccgccggacctcgttcatctgttgctcctcatgcctccgttccttgccaacgccgacgttctcacgccctcgtcggcccacagcctcttgtccagcccaccttttgccgacatggagaccctcttcccgccgctgctcgacctcgtctcagcgaggctcaatgctcaggtcacagccctcgctcgcgtgctcagtccaaccaccaatgcctccttcattcaccgcacgattccatcgctgccctctcttgcaaacgaactcgtcacttcactcgccgacaccaagctgcagctctcccgtgcccgtctggcggctaccgcctctttcacagcccatcttcagcagcacaccgacgccctgtgcttgttgatcaacatgctcgagtccaagcacggtcccgcagcggcttcggcgtgtcttcgtgcttccgacgcccaatccgccgcgcagacctgggccctcgcagccgaagccctgctcctcgacacccgccatctcctctatccaccacaagcccaagccgcattggcgagctacaggagacatctgcgcgatgctggccagcgcctcgaggacaaagcgcgagtcagggaggccgagctcgccgactacggcgtggtcgtcgtcggagataaagcggatgggcagcagaggcgggagaggagaaagacgttgacggcggatccgcagaaagaacgcactatgcgagagatggctagagtttggaaggaaatggagtcgaggcttcgtgagattcagggcgatctcagacggttaggataagcgggtaacatgctgcgatgaacgacgatatgatagataatgaaagcctatattgtttatgcattgctggccggccagttggggtattattattattgatatgagatggcgaatagacacgcgatcaatatgatgatgaacttaggactaataatacggttggaaa

SEQ ID NO: 25212 - DNA, 234 bp, Muscodor strobelii
  misc_feature: SGI cDNA ID NO. 568603
  misc_feature: Reduced expression when VOC is produced
  misc_feature: Encodes the peptide sequence at SEQ ID NO 25213
atgccgccgaggatacccttcgcctctgcgtctgcctctgcgctgcggcaggggctgtcacacctcagaccagcaacgaagtcatcgtccaagccgtcgttccacgcgtctctctccacatctgccgccccaagagcattgcgccacgatgtctcgcgcggctcctcgctcctgagcagcctcgagggcgagcccagccccgacgccaacccgacccgcgccgccgccgacatc

SEQ ID NO: 25213 - protein, 78 aa, Muscodor strobelii
  misc_feature: SGI Peptide ID NO. 568603
  misc_feature: Useful for introducing or modulating the production of volatile compounds
MPPRIPFASASASALRQGLSHLRPATKSSSKPSFHASLSTSAAPRALRHDVSRGSSLLSSLEGEPSPDANPTRAAADI

SEQ ID NO: 25214 - DNA, 395 bp, Muscodor strobelii
  misc_feature: SGI EST ID NO. CUFF.59298.1
  misc_feature: Variant of the nucleotide sequence at SEQ ID NO 25212
tgggggctgtctgtcaaatcgaggtgtgaactctgattggattgaatttggacttcgaattgggttgaatgcctactagtagtaggtagatcgaatattccacttcccgaaaccaccacaccgtcacgccacgccatagcacatccttcaccacatatatcgccatgccgccgaggatacccttcgcctctgcgtctgcctctgcgctgcggcaggggctgtcacacctcagaccagcaacgaagtcatcgtccaagccgtcgttccacgcgtctctctccacatctgccgccccaagagcattgcgccacgatgtctcgcgcggctcctcgctcctgagcagcctcgagggcgagcccagccccgacgccaacccgacccgcgccgccgccgac

SEQ ID NO: 25215 - DNA, 561 bp, Muscodor strobelii
  misc_feature: SGI cDNA ID NO. 568604
  misc_feature: Reduced expression when VOC is produced
  misc_feature: Encodes the peptide sequence at SEQ ID NO 25216
atggtgcgcaaattaaagcatcacgagtccaagctgtttaaccacctcaaaaaaacagatctcatcacctggaagcaggacaacgaccacagagatgctgccgtcatccgtcgctacatgatacaggatcgtggtgactatcagaagtacaataaactatgtggctctctacgtcaactagcccaccgtctttcactcctacctcccgagagtgcctttagacagaagcatgagaagttattgctcgagaagctgcacgacatgggcattttatcctccacctccaagctgagcaatgttgagcacggtgccactgtctcggccatggcccgccggaggctgcccgtcgtcctcactcgcctgcgcatggcgcctaccgttcaggctgccaccaagatgatcgagcaggggcatgtgagagtgggtaccgaatgtatcaccgatccggcatttttcgtaactaggaaccaagaggatctcatcacctggaccgttggcagcaagatcaagcggaatatcatggcctaccgacagaagctcgacgatttcgagttgttatag

SEQ ID NO: 25216 - protein, 186 aa, Muscodor strobelii
  misc_feature: SGI Peptide ID NO. 568604
  misc_feature (112)..(159): Pfam Id: PF01479 Pfam Desc: S4 domain
  misc_feature (2)..(111): Pfam Id: PF00163 Pfam Desc: Ribosomal protein S4/S9 N-terminal domain
  misc_feature (1)..(186): NCBI GI: 261352036 Blast Desc: U3 small nucleolar ribonucleoprotein IMP3 [Verticillium albo-atrum VaMs.102]
  misc_feature (1)..(186): NCBI GI: 46137407 Blast Desc: FG10219.1 [Gibberella zeae PH-1]
  misc_feature (1)..(186): NCBI GI: 256732214 Blast Desc: [Nectria haematococca mpVI 77-13-4]
  misc_feature (1)..(186): NCBI GI: 85103924 Blast Desc: U3 small nucleolar ribonucleoprotein protein IMP3 [Neurospora crassa OR74A] gi|28923168|gb|EAA32384.1| U3 small nucleolar ribonucleoprotein protein IMP3 [Neurospora crassa IMP3
  misc_feature (1)..(186): NCBI GI: 171692017 Blast Desc: protein product [Podospora anserina] gi|170945957|emb|CAP72758.1| protein product [Podospora anserina]
  misc_feature (1)..(186): NCBI GI: 154302449 Blast Desc: BC1G_09801 [Botryotinia fuckeliana B05.10] gi|150855290|gb|EDN30482.1| BC1G_09801 [Botryotinia fuckeliana B05.10]
  misc_feature (1)..(186): NCBI GI: 116180090 Blast Desc: conserved [Chaetomium globosum CBS 148.51] gi|88184970|gb|EAQ92438.1| conserved [Chaetomium globosum CBS 148.51]
  misc_feature (1)..(186): NCBI GI: 39944380 Blast Desc: MGG_04201 [Magnaporthe grisea 70-15] gi|145014939|gb|EDJ99507.1| MGG_04201 [Magnaporthe grisea 70-15]
  misc_feature (1)..(185): NCBI GI: 189192562 Blast Desc: U3 small nucleolar ribonucleoprotein protein IMP3 [Pyrenophora tritici-repentis Pt-1C-BFP] gi|187974226|gb|EDU41725.1| U3 small nucleolar ribonucleoprotein
  misc_feature (1)..(185): NCBI GI: 169625146 Blast Desc: SNOG_15842 [Phaeosphaeria nodorum SN15] gi|111055560|gb|EAT76680.1| SNOG_15842 [Phaeosphaeria nodorum SN15]
  misc_feature: Useful for introducing or modulating the production of volatile compounds
MVRKLKHHESKLFNHLKKTDLITWKQDNDHRDAAVIRRYMIQDRGDYQKYNKLCGSLRQLAHRLSLLPPESAFRQKHEKLLLEKLHDMGILSSTSKLSNVEHGATVSAMARRRLPVVLTRLRMAPTVQAATKMIEQGHVRVGTECITDPAFFVTRNQEDLITWTVGSKIKRNIMAYRQKLDDFELL

SEQ ID NO: 25217 - DNA, 1278 bp, Muscodor strobelii
  misc_feature: SGI EST ID NO. CUFF.59321.2
  misc_feature: Variant of the nucleotide sequence at SEQ ID NO 25215
gcctcaaaaaaacagatctcatcacctggaagcaggacaacgaccacagagatgctgccgtcatccgtcgctacatgatacaggatcgtggtgactatcagaagtacaataaactatgtggctctctacgtcaactagcccaccgtctttcactcctacctcccgagagtgcctttagacagaagcatgagaagttattgctcgagaagctgcacgacatgggcattttatcctccacctccaagctgagcaatgttgagcacggtgccactgtctcggccatggcccgccggaggctgcccgtcgtcctcactcgcctgcgcatggcgcctaccgttcaggctgccaccaagatgatcgagcaggggcatgtgagagtgggtaccgaagtatgtcatgccctttgaatggcccttttggcccacttcagcccgtctcagcctccgatgcgaatgtcagtactaattcagttgtagtgtatcaccgatccggcatttttcgtaactaggaaccaagaggatctcatcacctggaccgttggcagcaagatcaagcggaatatcatggcctaccgacagaagctcgacgatttcgagttgttatagtcttgcatatatacagatagcgcgggactcgatgtgaataggtcgtgacaaaatggggcgcatcgaggcattttcaggcgtttatggagttcaaaactagcagttgtgtcggagtatcccatctacgaggaggtaatcggacacttctgttcggtcctaagttcattggtcacagatatgggtcagaatcaggggtggaggcgacgctgcttggcgggcggcttaagaactacgcaggacaatacccaaaggcacattgaattgtttcccaatccacgagagttctgcgtcttctccccacgatcgtgtggttcgaagattggcagtgtttccagaggtttgcctagaagccccacgacgacacaaaggacgaaagtgcatgaccctgcatgtacgagatagtgtttgggaaaatgtatcatctcacccaagtgtcatctcacccaaacaagcgagcttggccagattttcacccgaacagcaatgttggagcagaaatatgcatactacaatgcaacctatgtttcgcatttgctgacctgtccttgcttgcacttctcaagaatgtccacgaggacattggagcgtactacatcataagtacttagtaaatgattgtttaacaaagtcatagtcacggctattagagcagagtaattaaggagtaattgag

SEQ ID NO: 25218 - DNA, 3111 bp, Muscodor strobelii
  misc_feature: SGI cDNA ID NO. 568605
  misc_feature: Encodes the peptide sequence at SEQ ID NO 25219
atggtgcgacgcactgatcctgtcgtcatctcggatggcgaagacactgcttccacacacttgtccctgtcgtccgaaccgccagtcaagagcataaggaaaggggttgctacgaagcgcaaatcaacacgcgaagaatcagagccagatgattggagcgacgactcggcagaccgtcgatatgttcttcagcacccaaccccaagaagggcaaataagtcagctcacaatggcaaaggcaaaggcaaaggtaaggccaaacgcagacggaaggacaatagcaactctgatagcgagtctgatgagctccccgagtatttccgccagcgtcgcaaaacattcaacgagaagtataaggctttgcatgatgctgggttgcgacttccccctgacttcagtgatatatccttctctgaggatgaacgactgggtgagctcgaagaaaggcccaagtttgacaaagccagcggcatcaagccgtctcagccctacgaagacatcaaacttgccgctggcttcatccctgcttcaatcgcacaatacctccggaactaccaggtcgaaggtgttcgattcctgcatgaccttttcatacaccagcgcggtggaatcctcggtgacgacatgggcctaggcaagaccatacaagttgctgctttcttgacggcgacttttggtaagacgggcgacagccgcgatgccaaaaggatgcgaagacacaggcgcgagatagacggttggtatccacgttgcttgatcgtttgccccggatctctaatacaaaattggaagaacgagctggagagatggggttggtgggctgtggctttgtttcacggccccaagcgtgacgacattcttgagactgcccgggccgggagaattgaggtaatggtaacgacatatactacctacaaaaacagcgcttctgccatcaataaagttccttgggatgttgtcgttgccgacgaatgtcattgcctcaaagagccaacttcaggcattacgaaagcaatgaacctggtcaactgtctctgtcgcatcgggttgactggtacggcaatacaaaacaactacggagaactgtggtcgttgttgaattggacgaatccaggccagttcgataccagacatgactgggatcgcaagatatcgaaacctcttaccgttggtcaaagtcacgatgccaccatggaacagttggccaaggctcgaacaacagcggaacagttgacgtacaatcttcttcctcggtttttcttacgccggctcaagtcatatatcgcagatcaactgccaaaaaaaagtgacaaagttgtcttctgccccctgtccgatattcagcgagaagcatacaaaaacatcatcggaagtgacctcgccctgcttgttctcaatgcgttgaagggatgcctgtgcgggtcaggccttaccggagggcactgttgcttccaaaagaccaaggacgggatgtcctggaaggcattggtttttccactgataatatcactgcagaaactatcgaaccatttcaacctgctcatgccacgaccctcgacggagaaccctgagagatacgagagagaagtccggattctccaagctgcagctcctgatagttgggaacgagaatatgctaaccgagaatcgatgctgactctgtccaatcccgagtattgcggcaaatggaaagtattgaagaaactgcttcagtattggcatcaaaatggcgacaaagttttgatcttctcccatagcatcaggcttttgcacattttgcaacagttgttcaacaatacttcatacaatatcagctatctcgatggctcactctcatacgaagagcgccaggctgcggtcgacgatttcaactgcgatccaaaccaattcatcttcctcatatcgacgaaagcaggcggcgtgggactgaatatcacatcagcgaacaaggttgtgattatggacccacactggaaccctagttacgacctgcaagcccaagaccgtgcgtatcgaatcggtcagacaagagacgtcgatgtctatcgattgatatctgttggcactattgaagagatcacgtacgcgcgacagatctacaagcagcagcaagcaaatattggctacaatgcttccaatgaacgccggtatttctccaaaggtgacctctttggcatccaaaacctcctggcttatactggtgagcaaggcatgcttcgtgacattgtcaacaaaaccaatgttgccgaggcgaaagctggcatcaaaatgctagacgtcaatatggatgagatggctcgagatgccgaaaatgacattcctatcaagaaggagggaggcgccgaagacgagagtggaggcctaaagcaacttaccgcaatgcttatcgcaccagaaagctcgagccgtgcccagaagcagtctgccgcaccctcaaaaccgaagagcgatcccgtccaggccatcctagcccgtgccggggttgactacactcacgagaattcagaagtgattggatcttccaaaatcgaaaatgaattgtcaaagtgggcagtgaaagctgggtccggagacagcggaatggctcagttggcattattcttggcagaaagccaagacgcttcggctggtgcaagatcttttcattttcaatacaacccgcccaaagctgtgatgcaacgtcagttttgcaccatggccaaagaattcgggttcccgggggcaacggagtttgctctcgcggttgagagcatgagtcaagaggagcgaagaaactgcttggattcgttctataagaaacgaattgataaaatgggaaatattgatgaaatcaaaacagaggatagcgaagcgaaggccgaaaacgagtcgaaagcagagcctagtgccacggacgttatagagacggagagggagatcgcgatgcccgaaatattcagtgtctccccagatatcaaatccgaacaagccttgtcgagtccagcagcgaatactctcatagctggggttaaacaagggcggcgaaccgaccgtgctacagtgttgaaaccgataggaatggaatcgatctctgtttgggtttcagatgacgaagagacagacgaattatga

SEQ ID NO: 25219 - protein, 1036 aa, Muscodor strobelii
  misc_feature: SGI Peptide ID NO. 568605
  misc_feature (596)..(674): Pfam Id: PF00271 Pfam Desc: Helicase conserved C-terminal domain
  misc_feature (185)..(514): Pfam Id: PF00176 Pfam Desc: SNF2 family N-terminal domain
  misc_feature (6)..(938): NCBI GI: 21622371 Blast Desc: related to DNA repair protein RAD26 [Neurospora crassa]
  misc_feature (94)..(950): NCBI GI: 171694309 Blast Desc: protein product [Podospora anserina] gi|170947103|emb|CAP73908.1| protein product [Podospora anserina]
  misc_feature (10)..(961): NCBI GI: 116197901 Blast Desc: CHGG_07106 [Chaetomium globosum CBS 148.51] gi|88178385|gb|EAQ85853.1| CHGG_07106 [Chaetomium globosum CBS 148.51]
  misc_feature (8)..(974): NCBI GI: 46137411 Blast Desc: FG10221.1 [Gibberella zeae PH-1]
  misc_feature (97)..(994): NCBI GI: 256731819 Blast Desc: SNF2 superfamily RAD26-like protein [Nectria haematococca mpVI 77-13-4]
  misc_feature (6)..(938): NCBI GI: 164426466 Blast Desc: NCU04229 [Neurospora crassa OR74A] gi|157071347|gb|EAA31617.2| NCU04229 [Neurospora crassa OR74A]
  misc_feature (10)..(960): NCBI GI: 154302623 Blast Desc: BC1G_09888 [Botryotinia fuckeliana B05.10] gi|150855377|gb|EDN30569.1| BC1G_09888 [Botryotinia fuckeliana B05.10]
  misc_feature (67)..(934): NCBI GI: 115442660 Blast Desc: conserved [Aspergillus terreus NIH2624] gi|114188006|gb|EAU29706.1| conserved [Aspergillus terreus NIH2624]
  misc_feature (69)..(934): NCBI GI: 261196956 Blast Desc: DNA excision repair protein [Ajellomyces dermatitidis SLH14081] gi|239596126|gb|EEQ78707.1| DNA excision repair protein [Ajellomyces dermatitidis SLH14081]
  misc_feature (94)..(934): NCBI GI: 67526707 Blast Desc: AN3811.2 [Aspergillus nidulans FGSC A4] gi|40740829|gb|EAA60019.1| AN3811.2 [Aspergillus nidulans FGSC A4] gi|259481632|tpe|CBF75332.1| TPA: DNA excision repair protein
  misc_feature (166)..(686): SWISSPROT Homolog: EC 1.14.11.6 Thymine dioxygenase
MVRRTDPVVISDGEDTASTHLSLSSEPPVKSIRKGVATKRKSTREESEPDDWSDDSADRRYVLQHPTPRRANKSAHNGKGKGKGKAKRRRKDNSNSDSESDELPEYFRQRRKTFNEKYKALHDAGLRLPPDFSDISFSEDERLGELEERPKFDKASGIKPSQPYEDIKLAAGFIPASIAQYLRNYQVEGVRFLHDLFIHQRGGILGDDMGLGKTIQVAAFLTATFGKTGDSRDAKRMRRHRREIDGWYPRCLIVCPGSLIQNWKNELERWGWWAVALFHGPKRDDILETARAGRIEVMVTTYTTYKNSASAINKVPWDVVVADECHCLKEPTSGITKAMNLVNCLCRIGLTGTAIQNNYGELWSLLNWTNPGQFDTRHDWDRKISKPLTVGQSHDATMEQLAKARTTAEQLTYNLLPRFFLRRLKSYIADQLPKKSDKVVFCPLSDIQREAYKNIIGSDLALLVLNALKGCLCGSGLTGGHCCFQKTKDGMSWKALVFPLIISLQKLSNHFNLLMPRPSTENPERYEREVRILQAAAPDSWEREYANRESMLTLSNPEYCGKWKVLKKLLQYWHQNGDKVLIFSHSIRLLHILQQLFNNTSYNISYLDGSLSYEERQAAVDDFNCDPNQFIFLISTKAGGVGLNITSANKVVIMDPHWNPSYDLQAQDRAYRIGQTRDVDVYRLISVGTIEEITYARQIYKQQQANIGYNASNERRYFSKGDLFGIQNLLAYTGEQGMLRDIVNKTNVAEAKAGIKMLDVNMDEMARDAENDIPIKKEGGAEDESGGLKQLTAMLIAPESSSRAQKQSAAPSKPKSDPVQAILARAGVDYTHENSEVIGSSKIENELSKWAVKAGSGDSGMAQLALFLAESQDASAGARSFHFQYNPPKAVMQRQFCTMAKEFGFPGATEFALAVESMSQEERRNCLDSFYKKRIDKMGNIDEIKTEDSEAKAENESKAEPSATDVIETEREIAMPEIFSVSPDIKSEQALSSPAANTLIAGVKQGRRTDRATVLKPIGMESISVWVSDDEETDEL

SEQ ID NO: 25220 - DNA, 3442 bp, Muscodor strobelii
  misc_feature: SGI EST ID NO. CUFF.59315.1
  misc_feature: Variant of the nucleotide sequence at SEQ ID NO 25218
cgcgtctgtcaattccagacatccaactgaaatgcacttggtcactgtagccaatctccgcagcaacatcatcctttgtgccatgctctcaagtctcactagatcgctctccattcattgactctcgccttccttctccagcatggagttgcgatgagtgcaaagcgtgaccaaaatggtgcgacgcactgatcctgtcgtcatctcggatggcgaagacactgcttccacacacttgtccctgtcgtccgaaccgccagtcaagagcataaggaaaggggttgctacgaagcgcaaatcaacacgcgaagaatcagagccagatgattggagcgacgactcggcagaccgtcgatatgttcttcagcacccaaccccaagaagggcaaataagtcagctcacaatggcaaaggcaaaggcaaaggtaaggccaaacgcagacggaaggacaatagcaactctgatagcgagtctgatgagctccccgagtatttccgccagcgtcgcaaaacattcaacgagaagtataaggctttgcatgatgctgggttgcgacttccccctgacttcagtgatatatccttctctgaggatgaacgactgggtgagctcgaagaaaggcccaagtttgacaaagccagcggcatcaagccgtctcagccctacgaagacatcaaacttgccgctggcttcatccctgcttcaatcgcacaatacctccggaactaccaggtcgaaggtgttcgattcctgcatgaccttttcatacaccagcgcggtggaatcctcggtgacgacatgggcctaggcaagaccatacaagttgctgctttcttgacggcgacttttggtaagacgggcgacagccgcgatgccaaaaggatgcgaagacacaggcgcgagatagacggttggtatccacgttgcttgatcgtttgccccggatctctaatacaaaattggaagaacgagctggagagatggggttggtgggctgtggctttgtttcacggccccaagcgtgacgacattcttgagactgcccgggccgggagaattgaggtaatggtaacgacatatactacctacaaaaacagcgcttctgccatcaataaagttccttgggatgttgtcgttgccgacgaatgtcattgcctcaaagagccaacttcaggcattacgaaagcaatgaacctggtcaactgtctctgtcgcatcgggttgactggtacggcaatacaaaacaactacggagaactgtggtcgttgttgaattggacgaatccaggccagttcgataccagacatgactgggatcgcaagatatcgaaacctcttaccgttggtcaaagtcacgatgccaccatggaacagttggccaaggctcgaacaacagcggaacagttgacgtacaatcttcttcctcggtttttcttacgccggctcaagtcatatatcgcagatcaactgccaaaaaaaagtgacaaagttgtcttctgccccctgtccgatattcagcgagaagcatacaaaaacatcatcggaagtgacctcgccctgcttgttctcaatgcgttgaagggatgcctgtgcgggtcaggccttaccggagggcactgttgcttccaaaagaccaaggacgggatgtcctggaaggcattggtttttccactgataatatcactgcagaaactatcgaaccatttcaacctgctcatgccacgaccctcgacggagaaccctgagagatacgagagagaagtccggattctccaagctgcagctcctgatagttgggaacgagaatatgctaaccgagaatcgatgctgactctgtccaatcccgagtattgcggcaaatggaaagtattgaagaaactgcttcagtattggcatcaaaatggcgacaaagttttgatcttctcccatagcatcaggcttttgcacattttgcaacagttgttcaacaatacttcatacaatatcagctatctcgatggctcactctcatacgaagagcgccaggctgcggtcgacgatttcaactgcgatccaaaccaattcatcttcctcatatcgacgaaagcaggcggcgtgggactgaatatcacatcagcgaacaaggttgtgattatggacccacactggaaccctagttacgacctgcaagcccaagaccgtgcgtatcgaatcggtcagacaagagacgtcgatgtctatcgattgatatctgttggcactattgaagagatcacgtacgcgcgacagatctacaagcagcagcaagcaaatattggctacaatgcttccaatgaacgccggtatttctccaaaggtgacctctttggcatccaaaacctcctggcttatactggtgagcaaggcatgcttcgtgacattgtcaacaaaaccaatgttgccgaggcgaaagctggcatcaaaatgctagacgtcaatatggatgagatggctcgagatgccgaaaatgacattcctatcaagaaggagggaggcgccgaagacgagagtggaggcctaaagcaacttaccgcaatgcttatcgcaccagaaagctcgagccgtgcccagaagcagtctgccgcaccctcaaaaccgaagagcgatcccgtccaggccatcctagcccgtgccggggttgactacactcacgagaattcagaagtgattggatcttccaaaatcgaaaatgaattgtcaaagtgggcagtgaaagctgggtccggagacagcggaatggctcagttggcattattcttggcagaaagccaagacgcttcggctggtgcaagatcttttcattttcaatacaacccgcccaaagctgtgatgcaacgtcagttttgcaccatggccaaagaattcgggttcccgggggcaacggagtttgctctcgcggttgagagcatgagtcaagaggagcgaagaaactgcttggattcgttctataagaaacgaattgataaaatgggaaatattgatgaaatcaaaacagaggatagcgaagcgaaggccgaaaacgagtcgaaagcagagcctagtgccacggacgttatagagacggagagggagatcgcgatgcccgaaatattcagtgtctccccagatatcaaatccgaacaagccttgtcgagtccagcagcgaatactctcatagctggggttaaacaagggcggcgaaccgaccgtgctacagtgttgaaaccgataggaatggaatcgatctctgtttgggtttcagatgacgaagagacagacgaattatgatcagccccatgataccctgtggatttggattcactttggcatagttaatgacgttcaagaaccaactcaatggatgaggtctacaatttaatcttgcattgtagcttaactgtcaactcatgttctttaattaaaacgtattgtaatcactatcga

SEQ ID NO: 25221 - DNA, 1590 bp, Muscodor strobelii
  misc_feature: SGI cDNA ID NO. 568606
  misc_feature: Encodes the peptide sequence at SEQ ID NO 25222
atgacggcccgcctcaagcttgaggtcaagaagggagctcagcgccgtcttggcagccgggttaatcggagggtagagccagtacctgtcggaaataggacaacgtttcatcaatttcgtcagggctcgcctatggtcgatattatccagacgacgcctcttgtccagagtgatggttcagaacaagagcccaatggcaaagaagagcggccgaaccactgcaaactcactgtcaagccgccaaacgagtttagtcgggcggacagcatcttgataatgttctacatcgagcacgtgtttccctttctattcccgttctaccagccctctatactcgatggcggtcgatcatgggttttagaattaatgatccatagccccgtcgttcgacaagctacgttgtgtcaaagctcctttttcttctccctggctcaaggctcttcggactgtaaggtcgtttggtcaacattgatcgagcaaatgcaagaggcatttggggtgttgaaagaggctcttcaaattatcggggcctcagatattgcagagcacccacatggagctgcccgagtattgtctggtatcatgcaggtgcagcggtttgaaactgctgtctcgtgttttaacagttgtcaagctcatctcagaggagccttggcattattcaaacagataatcgagagtgctggcccaggtatcgaacctaacggctcggcgtctaatttcagggctgtcatggaaggattcggaccacctacaaagttcctgccagctcgttgtgctcaagccccaagtgccgaacaggcagctttccgcttttcctcgtccctcctattgttcgacgacatagtagctagcacgacactccaagagccacctcaactatacgagtatcattgcggtcttttagaggaggtggatggtgctaacccgcttgtcgatttcgaagcaactgtaggctgtcagaactgggcactgatccagctaggcgaaatttctgcacttcaagcgtggaaacatcggtgtagcgattcagggaatctcgatgttgtggaattggtacacagagctacaaccatcaaaacaaatattgaagctaatctcaggcgactggaaatggaccgagctcgcagaaatacagaagctaaccccttttttgacgtattgacaacatatgctagtcaagaagccgccaacacctctcggcagagtttcttcgtcacacgtatatgggcgcgtgcgtcgttgcttcttctgtctctcgtagtatctggatggcaaccagcaagcactgatgtccgttatcatgttgactgcgtcattgatctactttcgcatcatatctcaccccaagccatgctccgcaccgcggtatggcccttttgcatcgccggttgcctcgcacagccaaaccaagaggctcaattccggactatggtgaaaacgctacagccatcacgtctattcggaacgctgcgcaaagccctcgaaattatggaagatgtgtggcgtagtcgggatgccctggaccccagcgagcgtgacattttcaagcgattcacaagacagggcgatctaatgctgcttgtttga

SEQ ID NO: 25222 - protein, 529 aa, Muscodor strobelii
  misc_feature: SGI Peptide ID NO. 568606
  misc_feature (1)..(527): NCBI GI: 242805508 Blast Desc: conserved [Talaromyces stipitatus ATCC 10500] gi|218715171|gb|EED14593.1| conserved [Talaromyces stipitatus ATCC 10500]
  misc_feature (1)..(529): NCBI GI: 169625124 Blast Desc: SNOG_15831 [Phaeosphaeria nodorum SN15] gi|111055549|gb|EAT76669.1| SNOG_15831 [Phaeosphaeria nodorum SN15]
  misc_feature (1)..(529): NCBI GI: 154308110 Blast Desc: BC1G_08222 [Botryotinia fuckeliana B05.10] gi|150853107|gb|EDN28299.1| BC1G_08222 [Botryotinia fuckeliana B05.10]
  misc_feature (72)..(529): NCBI GI: 256728333 Blast Desc: NECHADRAFT_87651 [Nectria haematococca mpVI 77-13-4]
  misc_feature (87)..(508): NCBI GI: 261361433 Blast Desc: conserved [Verticillium albo-atrum VaMs.102]
  misc_feature (93)..(515): NCBI GI: 116181342 Blast Desc: CHGG_01299 [Chaetomium globosum CBS 148.51] gi|88185596|gb|EAQ93064.1| CHGG_01299 [Chaetomium globosum CBS 148.51]
  misc_feature (91)..(529): NCBI GI: 46107782 Blast Desc: FG00774.1 [Gibberella zeae PH-1]
  misc_feature (1)..(529): NCBI GI: 256734789 Blast Desc: NECHADRAFT_98980 [Nectria haematococca mpVI 77-13-4]
  misc_feature (49)..(529): NCBI GI: 256727904 Blast Desc: NECHADRAFT_83501 [Nectria haematococca mpVI 77-13-4]
  misc_feature (85)..(509): NCBI GI: 171695546 Blast Desc: protein product [Podospora anserina] gi|170948015|emb|CAP60179.1| protein product [Podospora anserina]
MTARLKLEVKKGAQRRLGSRVNRRVEPVPVGNRTTFHQFRQGSPMVDIIQTTPLVQSDGSEQEPNGKEERPNHCKLTVKPPNEFSRADSILIMFYIEHVFPFLFPFYQPSILDGGRSWVLELMIHSPVVRQATLCQSSFFFSLAQGSSDCKVVWSTLIEQMQEAFGVLKEALQIIGASDIAEHPHGAARVLSGIMQVQRFETAVSCFNSCQAHLRGALALFKQIIESAGPGIEPNGSASNFRAVMEGFGPPTKFLPARCAQAPSAEQAAFRFSSSLLLFDDIVASTTLQEPPQLYEYHCGLLEEVDGANPLVDFEATVGCQNWALIQLGEISALQAWKHRCSDSGNLDVVELVHRATTIKTNIEANLRRLEMDRARRNTEANPFFDVLTTYASQEAANTSRQSFFVTRIWARASLLLLSLVVSGWQPASTDVRYHVDCVIDLLSHHISPQAMLRTAVWPFCIAGCLAQPNQEAQFRTMVKTLQPSRLFGTLRKALEIMEDVWRSRDALDPSERDIFKRFTRQGDLMLLV

SEQ ID NO: 25223 - DNA, 2369 bp, Muscodor strobelii
  misc_feature: SGI EST ID NO. CUFF.59311.1
  misc_feature: Variant of the nucleotide sequence at SEQ ID NO 25221
cggtgatgcccacctatcgttgtccggtcggccggaccaacctttttgggatgttgctctttgcaccgactgcttacctttaacaaagtcaagtctgtcgcccaagatgctttgcatccgacagtgcaaagctacctagctgacagaattttcggatttatttttgctctacgatcgggtctgtaaaaatggatactaattggccgataacagctcttgtatccgagcctctcggtgtgacgcagtccacgctccaagatgctccaaaccccttggcacgtccaattcctcgaagctctaatggatgttggacgtgtaggctaagacggaaaaaatgcgatgaaaattaccctatctgcgacgtttgtaacgctcttaatattacttgtcacttcgagcagaacaaaccggactggatggacagcggacctaggcaggacgagatgacggcccgcctcaagcttgaggtcaagaagggagctcagcgccgtcttggcagccgggttaatcggagggtagagccagtacctgtcggaaataggacaacgtttcatcaatttcgtcagggctcgcctatggtcgatattatccagacgacgcctcttgtccagagtgatggttcagaacaagagcccaatggcaaagaagagcggccgaaccactgcaaactcactgtcaagccgccaaacgagtttagtcgggcggacagcatcttgataatgttctacatcgagcacgtgtttccctttctattcccgttctaccagccctctatactcgatggcggtcgatcatgggttttagaattaatgatccatagccccgtcgttcgacaagctacgttgtgtcaaagctcctttttcttctccctggctcaaggctcttcggactgtaaggtcgtttggtcaacattgatcgagcaaatgcaagaggcatttggggtgttgaaagaggctcttcaaattatcggggcctcagatattgcagagcacccacatggagctgcccgagtattgtctggtatcatgcaggtgcagcggtttgaaactgctgtctcgtgttttaacagttgtcaagctcatctcagaggagccttggcattattcaaacagataatcgagagtgctggcccaggtatcgaacctaacggctcggcgtctaatttcagggctgtcatggaaggattcggaccacctacaaagttcctgccagctcgttgtgctcaagccccaagtgccgaacaggcagctttccgcttttcctcgtccctcctattgttcgacgacatagtagctagcacgacactccaagagccacctcaactatacgagtatcattgcggtcttttagaggaggtggatggtgctaacccgcttgtcgatttcgaagcaactgtaggctgtcagaactgggcactgatccagctaggcgaaatttctgcacttcaagcgtggaaacatcggtgtagcgattcagggaatctcgatgttgtggaattggtacacagagctacaaccatcaaaacaaatattgaagctaatctcaggcgactggaaatggaccgagctcgcagaaatacagaagctaaccccttttttgacgtattgacaacatatgctagtcaagaagccgccaacacctctcggcagagtttcttcgtcacacgtatatgggcgcgtgcgtcgttgcttcttctgtctctcgtagtatctggatggcaaccagcaagcactgatgtccgttatcatgttgactgcgtcattgatctactttcgcatcatatctcaccccaagccatgctccgcaccgcggtatggcccttttgcatcgccggttgcctcgcacagccaaaccaagaggctcaattccggactatggtgaaaacgctacagccatcacgtctattcggaacgctgcgcaaagccctcgaaattatggaagatgtgtggcgtagtcgggatgccctggaccccagcgagcgtgacattttcaagcgattcacaagacagggcgatctaatgctgcttgtttgaaagtctgaaaggatcggtcaactacatagaaaaccgctccatttggtctctcgatggtatctctgcaaccagaatccgtatcgcacaaccactttcgcaggttcgtgcggatctttcagagccatttaaaacttgacgaagccctttcctttgacaaaggtagcgtcccagggtacattgccctcatgcttcgccaactcggcatagaactcggcatgagctggaccgtcaagctgcatgcctttgatcttaccatcttcgtgacgttcatccgcatagaagaaactggtgttgctctttagttagctggacactagtcacggcttcagacgaaat

SEQ ID NO: 25224 - DNA, 762 bp, Muscodor strobelii
  misc_feature: SGI cDNA ID NO. 568607
  misc_feature: Encodes the peptide sequence at SEQ ID NO 25225
atgaacaaatcacttgctcgcaactcttggtttagacgattcatctcgacgatactcaaacgcccgaatatgtcttcccctgtagtccttattctcggagccggtccaaggatcggcacctccgtcgccgacaagttcgccgaggacggttataagatcgccgttgcttctagaaagggaaccaattccaagaatgggcagggttatctctatctcaaagccgatttcaaccagcctgaatccatcccggcacttttcgcggccgtcgaggccgagttcaaggctgcgccgagcattgttatatacaacgctgcagcattgacacctcctgccgaaaacgcatctgtattgtccgttacggctgcgagtgttgcgtccgacctgaatgtgaacacgattagcccctataccgccgcgcaggaggctgtcaaggcatgggagaaacagcccgaggcgaccaagaagaccttcatctatactggcaacattctcaataggacagtggtccccatgcccttgtttctgactcttggcattggcaaggctgcctccgccttttggattggcactgtggatttggcctatcaggcaaagggatatcgtttcttctatgcggatgaacgtcacgaagatggtaagatcaaaggcatgcagcttgacggtccagctcatgccgagttctatgccgagttggcgaagcatgagggcaatgtaccctgggacgctacctttgtcaaaggaaagggcttcgtcaagttttaa

SEQ ID NO: 25225 - protein, 253 aa, Muscodor strobelii
  misc_feature: SGI Peptide ID NO. 568607
  misc_feature (24)..(253): NCBI GI: 242824482 Blast Desc: conserved [Talaromyces stipitatus ATCC 10500] gi|218713188|gb|EED12613.1| conserved [Talaromyces stipitatus ATCC 10500]
  misc_feature (17)..(253): NCBI GI: 169625126 Blast Desc: SNOG_15832 [Phaeosphaeria nodorum SN15] gi|160705606|gb|EAT76670.2| SNOG_15832 [Phaeosphaeria nodorum SN15]
  misc_feature (25)..(253): NCBI GI: 242777459 Blast Desc: conserved [Talaromyces stipitatus ATCC 10500] gi|218722657|gb|EED22075.1| conserved [Talaromyces stipitatus ATCC 10500]
  misc_feature (25)..(253): NCBI GI: 256728144 Blast Desc: NECHADRAFT_87650 [Nectria haematococca mpVI 77-13-4]
  misc_feature (24)..(253): NCBI GI: 154307980 Blast Desc: BC1G_08221 [Botryotinia fuckeliana B05.10] gi|150853106|gb|EDN28298.1| BC1G_08221 [Botryotinia fuckeliana B05.10]
  misc_feature (25)..(253): NCBI GI: 256723075 Blast Desc: NECHADRAFT_81213 [Nectria haematococca mpVI 77-13-4]
  misc_feature (24)..(253): NCBI GI: 154317362 Blast Desc: BC1G_03583 [Botryotinia fuckeliana B05.10] gi|150845000|gb|EDN20193.1| BC1G_03583 [Botryotinia fuckeliana B05.10]
  misc_feature (26)..(253): NCBI GI: 116214433 Blast Desc: CHGG_11057 [Chaetomium globosum CBS 148.51] gi|88175412|gb|EAQ82881.1| CHGG_11057 [Chaetomium globosum CBS 148.51]
  misc_feature (24)..(253): NCBI GI: 242814356 Blast Desc: short-chain dehydrogenase, [Talaromyces stipitatus ATCC 10500] gi|218714692|gb|EED14115.1| short-chain dehydrogenase, [Talaromyces stipitatus ATCC 10500]
  misc_feature (26)..(253): NCBI GI: 156059224 Blast Desc: SS1G_03624 [Sclerotinia sclerotiorum 1980] gi|154701411|gb|EDO01150.1| SS1G_03624 [Sclerotinia sclerotiorum 1980]
MNKSLARNSWFRRFISTILKRPNMSSPVVLILGAGPRIGTSVADKFAEDGYKIAVASRKGTNSKNGQGYLYLKADFNQPESIPALFAAVEAEFKAAPSIVIYNAAALTPPAENASVLSVTAASVASDLNVNTISPYTAAQEAVKAWEKQPEATKKTFIYTGNILNRTVVPMPLFLTLGIGKAASAFWIGTVDLAYQAKGYRFFYADERHEDGKIKGMQLDGPAHAEFYAELAKHEGNVPWDATFVKGKGFVKF

SEQ ID NO: 25226 - DNA, 3301 bp, Muscodor strobelii
  misc_feature: SGI EST ID NO. CUFF.59312.0
  misc_feature: Variant of the nucleotide sequence at SEQ ID NO 25224
cgcccgcgcgaggtacggcgatgggtgtgtagcttccgcaggttgatccgcttcaagagcggccccaccgggcgcgcggtaaatgggtctcgactgagggtatacgactaagagcactagagtattgtcacggtcgaggagaatataggcaatagcactaagggcttgcgctcggcagcacgagtctactcgcattttcgatcacaacactattttttgggggctatgttgcgtggtctacagccgccggtacgcctgattaccaagcgttgagaatgagcatgacctgggaggccggcgccaaatactacatgtacttatgctcctctgcatataaataagccgaccagacttcgatgtaatccttctcaccagattaccatgaacaaatcacttgctcgcaactcttggtttagacgattcatctcgacgatactcaaacgcccgaatatgtcttcccctgtagtccttattctcggagccggtccaaggatcggcacctccgtcgccgacaagttcgccgaggacggttataagatcgccgttgcttctagaaagggaaccaattccaagaatgggcagggttatctctatctcaaagccgatttcaaccagcctgaatccatcccggcacttttcgcggccgtcgaggccgagttcaaggctgcgccgagcattgttatatacaacgctgcagcattgacacctcctgccgaaaacgcatctgtattgtccgttacggctgcgagtgttgcgtccgacctgaatgtgaacacgattagcccctataccgccgcgcaggaggctgtcaaggcatgggagaaacagcccgaggcgaccaagaagaccttcatctatactggcaacattctcaataggacagtggtccccatgcccttgtttctgactcttggcattggcaaggctgcctccgccttttggattggcactgtggatttggcctatcaggcaaagggatatcgtttcttctatgcggatgaacgtcacgaagatggtaagatcaaaggcatgcagcttgacggtccagctcatgccgagttctatgccgagttggcgaagcatgagggcaatgtaccctgggacgctacctttgtcaaaggaaagggcttcgtcaagttttaaatggctctgaaagatccgcacgaacctgcgaaagtggttgtgcgatacggattctggttgcagagataccatcgagagaccaaatggagcggttttctatgtagttgaccgatcctttcagactttcaaacaagcagcattagatcgccctgtcttgtgaatcgcttgaaaatgtcacgctcgctggggtccagggcatcccgactacgccacacatcttccataatttcgagggctttgcgcagcgttccgaatagacgtgatggctgtagcgttttcaccatagtccggaattgagcctcttggtttggctgtgcgaggcaaccggcgatgcaaaagggccataccgcggtgcggagcatggcttggggtgagatatgatgcgaaagtagatcaatgacgcagtcaacatgataacggacatcagtgcttgctggttgccatccagatactacgagagacagaagaagcaacgacgcacgcgcccatatacgtgtgacgaagaaactctgccgagaggtgttggcggcttcttgactagcatatgttgtcaatacgtcaaaaaaggggttagcttctgtatttctgcgagctcggtccatttccagtcgcctgagattagcttcaatatttgttttgatggttgtagctctgtgtaccaattccacaacatcgagattccctgaatcgctacaccgatgtttccacgcttgaagtgcagaaatttcgcctagctggatcagtgcccagttctgacagcctacagttgcttcgaaatcgacaagcgggttagcaccatccacctcctctaaaagaccgcaatgatactcgtatagttgaggtggctcttggagtgtcgtgctagctactatgtcgtcgaacaataggagggacgaggaaaagcggaaagctgcctgttcggcacttggggcttgagcacaacgagctggcaggaactttgtaggtggtccgaatccttccatgacagccctgaaattagacgccgagccgttaggttcgatacctgggccagcactctcgattatctgtttgaataatgccaaggctcctctgagatgagcttgacaactgttaaaacacgagacagcagtttcaaaccgctgcacctgcatgataccagacaatactcgggcagctccatgtgggtgctctgcaatatctgaggccccgataatttgaagagcctctttcaacaccccaaatgcctcttgcatttgctcgatcaatgttgaccaaacgaccttacagtccgaagagccttgagccagggagaagaaaaaggagctttgacacaacgtagcttgtcgaacgacggggctatggatcattaattctaaaacccatgatcgaccgccatcgagtatagagggctggtagaacgggaatagaaagggaaacacgtgctcgatgtagaacattatcaagatgctgtccgcccgactaaactcgtttggcggcttgacagtgagtttgcagtggttcggccgctcttctttgccattgggctcttgttctgaaccatcactctggacaagaggcgtcgtctggataatatcgaccataggcgagccctgacgaaattgatgaaacgttgtcctatttccgacaggtactggctctaccctccgattaacccggctgccaagacggcgctgagctcccttcttgacctcaagcttgaggcgggccgtcatctcgtcctgcctaggtccgctgtccatccagtccggtttgttctgctcgaagtgacaagtaatattaagagcgttacaaacgtcgcagatagggtaattttcatcgcattttttccgtcttagcctacacgtccaacatccattagagcttcgaggaattggacgtgccaaggggtttggagcatcttggagcgtggactgcgtcacaccgagaggctcggatacaagagctgttatcggccaattagtatccatttttacagacccgatcgtagagcaaaaataaatccgaaaattctgtcagctaggtagctttgcactgtcggatgcaaagcatcttgggcgacagacttgactttgttaaaggtaagcagtcggtgcaaagagcaacatcccaaaaaggttggtccggccgaccggacaacgataggtgggcatcaccg

SEQ ID NO: 25227 - DNA, 852 bp, Muscodor strobelii
  misc_feature: SGI cDNA ID NO. 568608
  misc_feature: Encodes the peptide sequence at SEQ ID NO 25228
atggcgcattcacagcatcagtctagctcttcacgactgcccgtctattttatgagcattggcgggccgaactcaatggaaaaagatgccaacccagcatatagagaactccaagaaatcggacgagagatcacgaacaagatcaagcccagagctgttgtcgtgttttctgcacattggcaggccggtcccaacaccgtccaggttaatgtagccgaggacacgggcatcatctacgactttcacggcttcccagcacattattacgaaaagaagtttccgtacaagggtagtcctcagcttgctgaacatgttatcagaagacttggcgatgcgggcatacgaacagagagggtccagaggggtcttgatcacggtgtgtgggccggcttcatcatcgcctttgacccaaagcataaccccttggacgtgccgatcgtgcaagtctcattgttcgacaatgaagacgcggaccgacattatcgcctaggtcaggcactcgagggtttgcgagacgaaggcatcttaatagtaggcgcgggcatggctgtacacaatactcgcgattatcgtgccacgaggcgggatagtgtaacgatgccctacgcgaagagcttcgatagagctttaaaggaggcgatttctgcaactcctgaagatcgaccgacgagaatgcgggcgttggtggaacgtgcagatgttgaccaggctcatccgactaaggaacatcttctacccgctttcatcgccgctggtgccgctggaaaagatgctggagaagctattcttacattacctgaggggagtctgagttggtctcagtaccggttcgggacggtgtcttcggtatga

SEQ ID NO: 25228 - protein, 283 aa, Muscodor strobelii
  misc_feature: SGI Peptide ID NO. 568608
  misc_feature (14)..(278): Pfam Id: PF02900 Pfam Desc: Catalytic LigB subunit of aromatic ring-opening dioxygenase
  misc_feature (8)..(281): NCBI GI: 242824472 Blast Desc: aromatic ring-opening dioxygenase LigB subunit, [Talaromyces stipitatus ATCC 10500] gi|242824477|ref|XP_002488266.1| aromatic ring-opening LigB ATCC
  misc_feature (12)..(280): NCBI GI: 240111773 Blast Desc: Catalytic LigB subunit of aromatic ring-opening dioxygenase family protein [Coccidioides posadasii C735 delta SOWgp]
  misc_feature (6)..(282): NCBI GI: 255950846 Blast Desc: Pc22g22960 [Penicillium chrysogenum Wisconsin 54-1255] gi|211593207|emb|CAP99584.1| Pc22g22960 [Penicillium chrysogenum Wisconsin 54-1255]
  misc_feature (12)..(280): NCBI GI: 119173188 Blast Desc: CIMG_10112 [Coccidioides immitis RS]
  misc_feature (9)..(278): NCBI GI: 119467360 Blast Desc: aromatic ring-opening dioxygenase LigB subunit, [Neosartorya fischeri NRRL 181] gi|119405638|gb|EAW15589.1| aromatic ring-opening dioxygenase LigB subunit, [Neosartorya NRRL
  misc_feature (10)..(282): NCBI GI: 225561063 Blast Desc: dioxygenase [Ajellomyces capsulatus G186AR]
  misc_feature (10)..(282): NCBI GI: 240280381 Blast Desc: dioxygenase [Ajellomyces capsulatus H143]
  misc_feature (11)..(282): NCBI GI: 169775449 Blast Desc: [Aspergillus oryzae RIB40] gi|83770055|dbj|BAE60190.1| protein product [Aspergillus oryzae]
  misc_feature (7)..(280): NCBI GI: 115386598 Blast Desc: conserved [Aspergillus terreus NIH2624] gi|114190838|gb|EAU32538.1| conserved [Aspergillus terreus NIH2624]
  misc_feature (4)..(271): NCBI GI: 256728332 Blast Desc: NECHADRAFT_97760 [Nectria haematococca mpVI 77-13-4]
MAHSQHQSSSSRLPVYFMSIGGPNSMEKDANPAYRELQEIGREITNKIKPRAVVVFSAHWQAGPNTVQVNVAEDTGIIYDFHGFPAHYYEKKFPYKGSPQLAEHVIRRLGDAGIRTERVQRGLDHGVWAGFIIAFDPKHNPLDVPIVQVSLFDNEDADRHYRLGQALEGLRDEGILIVGAGMAVHNTRDYRATRRDSVTMPYAKSFDRALKEAISATPEDRPTRMRALVERADVDQAHPTKEHLLPAFIAAGAAGKDAGEAILTLPEGSLSWSQYRFGTVSSV

SEQ ID NO: 25229 - DNA, 2043 bp, Muscodor strobelii
  misc_feature: SGI cDNA ID NO. 568609
  misc_feature: Encodes the peptide sequence at SEQ ID NO 25230
atggacgaccgtgtcgacatcgacgcggagcacctgggcaacgacaccttcggaaacgacgatgactatgaccatgacgagcgccagccctactcaacttcatcaaaagaacttgcgccagctcagattgccggcattgcagtgagcgcagttggggctgtggccatcgccgtaggtgctattttcctcgctagatgcctgcggaagaggaaataccccgattcggaatctgagaaagggttgtatcaaatcagccggaacacgaccccggatttgaatggttccagaggctctcgggttttccatatttcacctcctattcttcgaaattcaagatacggtgcagaattttcaccccgacctgcgccgcctatacccgccgtatcacaagcacagtcaggagttcagccatctcaaaatctccgaaggagtacgataggtcttgccatctcccgccctcctagtttgcaaccacctaagacatcgattgccttacagtcacctaggttatcaccacccccggccaacgcttcgctcgagaggaagccatccaagctcctgcctaataagcctactcttactctagacatcccgaaatcagctactgttatgagcgccatatcgtcacaagcgcccccaaccaccacagaccgagccagcacattgaccaacatgacagcatttgcagacctcgatgcagaggcggctgaaggcgggcagatttggcggccaccgcccactgatccgcaatcggccacgacattgtatgttgccgataagtatggtaactgggtactgagtaacgacaatcgcctgtctcagattcaagctgcccagattacggaagcagctgaattagacacgtacacgcctctgaccaagtctccaattgaaaagcaagaagaagcagccaagatgtcagctgctctttctgcagtttcgagtttgccaagagcaccacagccagcttttctctctcaagacccggcgaattggacagcgtctcgtgtaggctcgagtgtatattcacaagccagtgcaagccgaccgttcgctcgtaggaactcatccagtaaaagtggctcttcaaagtctcggaagggaagcggacggatgagtagaaccgattcgcaaggttcagcgacgacgatacatacctcgtcatctggcgatatagacgactatcctcttgagtctgatgttgcgcgcctgtcgcagttgtcacccgttgaggagtcaccagatttgggcacgggacgtgcccgagtcacatatcccaagatccctgggcgacttgatggggcaacgattcgttatgtcgctcccccgagaagaccaaactttacgggatcaccatcaggacagccaagtccgacgttgggggccgtctatggcgtgagagactccccaggagcgtacccacctcctctaaatcccaggcgctctatgagaccgtacacaccaactcaaaaagttggttcgggattctcgcccgaaccatccaactccgaagtcttcacttcccagtataatccgcgtccgactaagataccatcaccagcgcaaagcagacctggatataagcctgatgtcgtcagggagtctccccgcgtgcagaggcaactgggcctgcaaacaccgcctcggcaagccgtccccacattcaccccttcgcccccatccggtgaagcactgacgggtccttttaaaccccctactccaccacttatcgtcacagaggccgatcgtgcgcgtccacatatagcctctcagagtacaatgtccccaatgagctcgcgaactataagctcgaacgcgagttcgctgctagccaagcgcttgggtaacgatagagctgcagcccttgctcttgaccccagcgtctcaaatgcgcagaaatggacacggcagggcagtggactgctcagtcccgacgacgctgctcttacatcagggaaaggcacgctccctatgacacccacttggcttccaaaactcactcctacaagacgaggggacgacctttatctaaatgtgcagtga

SEQ ID NO: 25230 - protein, 680 aa, Muscodor strobelii
  misc_feature: SGI Peptide ID NO. 568609
  misc_feature (30)..(428): NCBI GI: 85103488 Blast Desc: NCU01158 [Neurospora crassa OR74A] gi|18376258|emb|CAD21372.1| [Neurospora crassa] gi|28923071|gb|EAA32288.1| [Neurospora crassa OR74A]
  misc_feature (38)..(437): NCBI GI: 171691959 Blast Desc: protein product [Podospora anserina] gi|170945928|emb|CAP72729.1| protein product [Podospora anserina]
  misc_feature (41)..(429): NCBI GI: 116180136 Blast Desc: CHGG_00696 [Chaetomium globosum CBS 148.51] gi|88184993|gb|EAQ92461.1| CHGG_00696 [Chaetomium globosum CBS 148.51]
  misc_feature (604)..(680): NCBI GI: 256732189 Blast Desc: [Nectria haematococca mpVI 77-13-4]
  misc_feature (596)..(679): NCBI GI: 145612705 Blast Desc: MGG_07334 [Magnaporthe grisea 70-15] gi|145019846|gb|EDK04074.1| MGG_07334 [Magnaporthe grisea 70-15]
  misc_feature (18)..(275): NCBI GI: 256732189 Blast Desc: [Nectria haematococca mpVI 77-13-4]
  misc_feature (223)..(264): NCBI GI: 145612705 Blast Desc: MGG_07334 [Magnaporthe grisea 70-15] gi|145019846|gb|EDK04074.1| MGG_07334 [Magnaporthe grisea 70-15]
  misc_feature (604)..(680): NCBI GI: 85103488 Blast Desc: NCU01158 [Neurospora crassa OR74A] gi|18376258|emb|CAD21372.1| [Neurospora crassa] gi|28923071|gb|EAA32288.1| [Neurospora crassa OR74A]
  misc_feature (609)..(680): NCBI GI: 261352001 Blast Desc: [Verticillium albo-atrum VaMs.102]
  misc_feature (656)..(680): NCBI GI: 154301825 Blast Desc: BC1G_10064 [Botryotinia fuckeliana B05.10] gi|150855726|gb|EDN30918.1| BC1G_10064 [Botryotinia fuckeliana B05.10]
MDDRVDIDAEHLGNDTFGNDDDYDHDERQPYSTSSKELAPAQIAGIAVSAVGAVAIAVGAIFLARCLRKRKYPDSESEKGLYQISRNTTPDLNGSRGSRVFHISPPILRNSRYGAEFSPRPAPPIPAVSQAQSGVQPSQNLRRSTIGLAISRPPSLQPPKTSIALQSPRLSPPPANASLERKPSKLLPNKPTLTLDIPKSATVMSAISSQAPPTTTDRASTLTNMTAFADLDAEAAEGGQIWRPPPTDPQSATTLYVADKYGNWVLSNDNRLSQIQAAQITEAAELDTYTPLTKSPIEKQEEAAKMSAALSAVSSLPRAPQPAFLSQDPANWTASRVGSSVYSQASASRPFARRNSSSKSGSSKSRKGSGRMSRTDSQGSATTIHTSSSGDIDDYPLESDVARLSQLSPVEESPDLGTGRARVTYPKIPGRLDGATIRYVAPPRRPNFTGSPSGQPSPTLGAVYGVRDSPGAYPPPLNPRRSMRPYTPTQKVGSGFSPEPSNSEVFTSQYNPRPTKIPSPAQSRPGYKPDVVRESPRVQRQLGLQTPPRQAVPTFTPSPPSGEALTGPFKPPTPPLIVTEADRARPHIASQSTMSPMSSRTISSNASSLLAKRLGNDRAAALALDPSVSNAQKWTRQGSGLLSPDDAALTSGKGTLPMTPTWLPKLTPTRRGDDLYLNVQ

SEQ ID NO: 25231 - DNA, 822 bp, Muscodor strobelii
  misc_feature: SGI cDNA ID NO. 568610
  misc_feature: Encodes the peptide sequence at SEQ ID NO 25232
atgcgccgcaagcagctcaatcccgctggcctcaaggtcctcgttattgacgaggccgacaacatgctggaccagcagggcatgggcgatcagtgtcgccggatcaaggccgccctccccccgaccacgcagatcctgctcttctccgcgaccttccccgagaaagtcgtcgcctacgccgagaacttcgcccccaaggccgccaagatccggctcaaggccagcgagctaaccgtcaagggcatctcccagatgtacatggactgccccgaggtcgccgacaagtacggcattctctgcaagctctacggcctaatgaacatcggccagtccattatctttgtcaagacccgtgagagcgcagaccagatcaagcagcgcatgactgccgacggccacaaggtctcggtcctgcacggagcgtacgagcctaatgaacgcgacctcctgctcgacgagttccgcaccggcaagtccaaggtgctcatcactaccaacgtcctcgcccgcggcatcgacgtctccaccgtgtccatggtcatcaactacgacatccccatgaagggcatgaacgacgctgtccacgacaccgagacttatcttcaccgcatcggacgtaccggccgtttcggccgcgtcggcgtcagcattaccttcatcacggacaagcgcagcttccaggctctccacgccatctccaaggatctcggcatcgatctcatcgctctcagccccgacgactgggacgagacagaggctactgtgcagcgcatcatcaagtctaaccgcgcacagcccgggtactaccccgaacagaaatag

SEQ ID NO: 25232 - protein, 273 aa, Muscodor strobelii
  misc_feature: SGI Peptide ID NO. 568610
  misc_feature (127)..(211): Pfam Id: PF00271 Pfam Desc: Helicase conserved C-terminal domain
  misc_feature (11)..(59): Pfam Id: PF00270 Pfam Desc: DEAD/DEAH box helicase
  misc_feature (1)..(273): NCBI GI: 39972035 Blast Desc: MGG_07333 [Magnaporthe grisea 70-15] gi|152013486|sp|A4RIF1.1|DBP5_MAGGR RecName: Full=ATP-dependent RNA helicase DBP5 gi|145019844|gb|EDK04072.1| MGG_07333 grisea
  misc_feature (1)..(270): NCBI GI: 85103495 Blast Desc: NCU01160 [Neurospora crassa OR74A] gi|74622816|sp|Q8X0X2.1|DBP5_NEUCR RecName: Full=ATP-dependent RNA helicase dbp-5 gi|18376257|emb|CAD21371.1| RNA helicase DBP5
  misc_feature (1)..(270): NCBI GI: 171691961 Blast Desc: protein product [Podospora anserina] gi|170945929|emb|CAP72730.1| protein product [Podospora anserina]
  misc_feature (1)..(270): NCBI GI: 116180138 Blast Desc: CHGG_00697 [Chaetomium globosum CBS 148.51] gi|118578044|sp|Q2HGF7.1|DBP5_CHAGB RecName: Full=ATP-dependent RNA helicase DBP5 gi|88184994|gb|EAQ92462.1| CHGG_00697 globosum
  misc_feature (1)..(270): NCBI GI: 256731798 Blast Desc: [Nectria haematococca mpVI 77-13-4]
  misc_feature (1)..(270): NCBI GI: 46137143 Blast Desc: FG10087.1 [Gibberella zeae PH-1] gi|91206548|sp|Q4HY71.1|DBP5_GIBZE RecName: Full=ATP-dependent RNA helicase DBP5
  misc_feature (2)..(270): NCBI GI: 261352000 Blast Desc: ATP-dependent RNA helicase DBP5 [Verticillium albo-atrum VaMs.102]
  misc_feature (1)..(264): NCBI GI: 156044376 Blast Desc: SS1G_10291 [Sclerotinia sclerotiorum 1980] gi|160380622|sp|A7EY76.1|DBP5_SCLS1 RecName: Full=ATP-dependent RNA helicase dbp5 gi|154694680|gb|EDN94418.1| SS1G_10291 1980]
  misc_feature (1)..(264): NCBI GI: 154301827 Blast Desc: BC1G_10065 [Botryotinia fuckeliana B05.10] gi|160380621|sp|A6SBT4.1|DBP5_BOTFB RecName: Full=ATP-dependent RNA helicase dbp5 gi|150855727|gb|EDN30919.1| BC1G_10065 B05.10]
  misc_feature (1)..(261): NCBI GI: 260950467 Blast Desc: CLUG_00689 [Clavispora lusitaniae ATCC 42720] gi|238847102|gb|EEQ36566.1| CLUG_00689 [Clavispora lusitaniae ATCC 42720]
MRRKQLNPAGLKVLVIDEADNMLDQQGMGDQCRRIKAALPPTTQILLFSATFPEKVVAYAENFAPKAAKIRLKASELTVKGISQMYMDCPEVADKYGILCKLYGLMNIGQSIIFVKTRESADQIKQRMTADGHKVSVLHGAYEPNERDLLLDEFRTGKSKVLITTNVLARGIDVSTVSMVINYDIPMKGMNDAVHDTETYLHRIGRTGRFGRVGVSITFITDKRSFQALHAISKDLGIDLIALSPDDWDETEATVQRIIKSNRAQPGYYPEQK

SEQ ID NO: 25233 - DNA, 1649 bp, Muscodor strobelii
  misc_feature: SGI EST ID NO. CUFF.59392.1
  misc_feature: Variant of the nucleotide sequence at SEQ ID NO 25231
ccccggcaccgtcatggacctcatgcgccgcaagcagctcaatcccgctggcctcaaggtcctcgttattgacgaggccgacaacatgctggaccagcagggcatgggcgatcagtgtcgccggatcaaggccgccctccccccgaccacgcagatcctgctcttctccgcgaccttccccgagaaagtcgtcgcctacgccgagaacttcgcccccaaggccgccaagatccggctcaaggccagcgagctaaccgtcaagggcatctcccagatgtacatggactgccccgaggtcgccgacaagtacggcattctctgcaagctctacggcctaatgaacatcggccagtccattatctttgtcaagacccgtgagagcgcagaccagatcaagcagcgcatgactgccgacggccacaaggtctcggtcctgcacggagcgtacgagcctaatgaacgcgacctcctgctcgacgagttccgcaccggcaagtccaaggtgctcatcactaccaacgtcctcgcccgcggcatcgacgtctccaccgtgtccatggtcatcaactacgacatccccatgaagggcatgaacgacgctgtccacgacaccgagacttatcttcaccgcatcggacgtaccggccgtttcggccgcgtcggcgtcagcattaccttcatcacggacaagcgcagcttccaggctctccacgccatctccaaggatctcggcatcgatctcatcgctctcagccccgacgactgggacgagacagaggctactgtgcagcgcatcatcaagtctaaccgcgcacagcccgggtactaccccgaacagaaatagagaggcgacacaagaacacccggtcatgtgctcaaagtgtgcaacagcccacgcccgtttggttcacgaatttgatgaccacactgctcgctataccccgggatgctttgcatgaggaaagagtggtaatgacagcacgaaatgtgtgtaatttggtcgacaggggctcgggcgagaactgtcaatagagctaagcatgtagggtaggaaacgaggtcatcggaacacagttcagacacaacgtgctatatgagagacctaagctaatgataccaaactactgaaaaagaaccactggatctagtgttttcttcgagtgcctcacgtgataaagtgcctatgatagcttgcttgacacggttactatagttatcactggcagtgcttgggtgaatgcgacactacccgtggcatggctcgatagatgcgaccatatcatgactaaggtatttacagtcgacaaatctcgcggaggattatgtgtgctgtatattgtgcatgacaagttctgtgggtatgtgactgccatgccggaaggatgctgcgcgaacgcgaaccggacgggaacgatgcagtctatttctgctacgggtgctgcgcattccaagagcaacagcagcagctattctcattccgaatcgggcaaaacgacgaaccgagctcgacagcccatgaggttccgtccgtggctctcatgcatctctaacaggaactctgcgtcgacatgagacatgcgagtgagatgaggtggtgacgagtgaacggaaaagggccgtcggcgtggatgcaggcacctcgcctccgc

SEQ ID NO: 25234 - DNA, 386 bp, Muscodor strobelii
  misc_feature: SGI cDNA ID NO. 568611
  misc_feature: Reduced expression when VOC is produced
  misc_feature: Encodes the peptide sequence at SEQ ID NO 25235
atggcgggggacgggcaggcgccattctcgctgcggccgtggccgatcagcgacaagcagcccaagaacatcggcgacttcatcgcgcgcgtcaacgccgccccggacggcttccgcaacctcgacgaggccgccctgcgccaacagctccacgaccagcagcttcagcagcagcagcttgggcccgacaccctcgatgccgatgatgacgaagacgacgacgacgatgacgacgaagggaaagaagagtcggcgatgctggccctcgacaccgtctcgctgctgctgtcgaaagaggcgcccgtccaggccggcaccacgctgtcgcccgccctgcgcaacacggtcggcatcggcaccctcggcgcctccaagctgcgcgagcc

SEQ ID NO: 25235 - protein, 128 aa, Muscodor strobelii
  misc_feature: SGI Peptide ID NO. 568611
  misc_feature (7)..(126): NCBI GI: 145610209 Blast Desc: MGG_12636 [Magnaporthe grisea 70-15] gi|145017561|gb|EDK01924.1| MGG_12636 [Magnaporthe grisea 70-15]
  misc_feature (7)..(126): NCBI GI: 149209793 Blast Desc: MGCH7_ch7g379 [Magnaporthe grisea 70-15] gi|86196334|gb|EAQ70972.1| MGCH7_ch7g379 [Magnaporthe grisea 70-15]
  misc_feature (6)..(127): NCBI GI: 261353126 Blast Desc: mediator of RNA polymerase II transcription subunit 17 [Verticillium albo-atrum VaMs.102]
  misc_feature (8)..(126): NCBI GI: 256733616 Blast Desc: NECHADRAFT_92009 [Nectria haematococca mpVI 77-13-4]
  misc_feature (8)..(126): NCBI GI: 116193097 Blast Desc: CHGG_06266 [Chaetomium globosum CBS 148.51] gi|88182179|gb|EAQ89647.1| CHGG_06266 [Chaetomium globosum CBS 148.51]
  misc_feature (8)..(126): NCBI GI: 156042107 Blast Desc: SS1G_11604 [Sclerotinia sclerotiorum 1980] gi|154695987|gb|EDN95725.1| SS1G_11604 [Sclerotinia sclerotiorum 1980]
  misc_feature (7)..(126): NCBI GI: 85074801 Blast Desc: NCU00628 [Neurospora crassa OR74A] gi|28927581|gb|EAA36532.1| [Neurospora crassa OR74A]
  misc_feature (1)..(126): NCBI GI: 46128327 Blast Desc: FG08541.1 [Gibberella zeae PH-1]
  misc_feature (10)..(123): NCBI GI: 67525533 Blast Desc: AN3224.2 [Aspergillus nidulans FGSC A4] gi|74596829|sp|Q5B8A6.1|MED17_EMENI RecName: Full=Mediator of RNA polymerase II transcription subunit 17; AltName: Full=Mediator 17
  misc_feature (1)..(122): NCBI GI: 242815362 Blast Desc: RNA polymerase II mediator complex component SRB4, [Talaromyces stipitatus ATCC 10500] gi|218714892|gb|EED14315.1| RNA polymerase II mediator complex component SRB4, [Talaromyces
  misc_feature: Useful for introducing or modulating the production of volatile compounds
MAGDGQAPFSLRPWPISDKQPKNIGDFIARVNAAPDGFRNLDEAALRQQLHDQQLQQQQLGPDTLDADDDEDDDDDDDEGKEESAMLALDTVSLLLSKEAPVQAGTTLSPALRNTVGIGTLGASKLRE

SEQ ID NO: 25236 - DNA, 2358 bp, Muscodor strobelii
  misc_feature: SGI cDNA ID NO. 568612
  misc_feature: Reduced expression when VOC is produced
  misc_feature: Encodes the peptide sequence at SEQ ID NO 25237
atggccccgaaaaagaagatcgccgtcatgacgtctgggggtgattcccccggcatgaacgccgtcgtgcgagctgtcgttcgcatggccatacacatgggttgcgacgccttcgccgtccaggaaggatacgcgggtcttgtcaaaggagacctccagcagatgtcctgggaggacgtccgaggctatctttccgaaggtggcactctcattggcactgccaggtgtttggaattcaaggaggacaagtatcagcgccaggcggccaagaacatggtcctcagcggcatagatgctctcatcgtctgcggcggtgatggttcccttaccggcgccaacatattccgcaagaaatggcccgatcatcttcgtaagctcgttgacgacaaggagctgtcaccagagcaggtcgagccataccggcatctcaacattgttggcctggtcggctctatcgacaacgatctatcgggcaccgacgccaccatcggttgttattcagccctctcacgcatctgcgagatggtggactacatcgaggccactgcttcgtcccattctcgtgccttcgtcatcgaggtcatgggccgtcactgcggctggcttgctctgatggctggcgtcgccaccggcgccgacttcatcttcatcccagagaaacctaggaaagacaattggaaggaggagatgcatgatactatcaaagagcaccgtcattggggaaagcgaaagaccatcgtcattattgccgagggcgcacgcgaccgccatgggcaatcaatcacctcgtctatggtgaaagacttgttggctgacaagaatggactggccctagatactcgtatcaccactctaggtcatgtccagaggggagggactgctgtgagctatgatcgcgtactagccacgttacagggtgtcgaggccgtcaaggccgtactcgaggctacgcctacgacagagagctgcattatcgcaatcaacgaaaacaagatcatccggaagcccatgatggccgccattcacgaaaccgagagagtagccgacctcatcaatgcacagaaattcgatgaggctatgagccttcgagatactgagtttgctgaacagtactcttcttttctgatgacaacatcaatgagcttcggtgagcagcatgagttggaagacgatcagaagatgaaaatcggcttcatcaatgtaggtgcaccagccggcgggatgaatgctgcgattagggccggtgtcgcgtactgtcgatctcgcggacacgaagccgttgccattcacaacgggtttgcgggttttgctcgacaccatggagataagcctcttggtgcagtgaggccgttcaactggcttgaagtggatggctgggccagcaaaggcggttcggaaatcggaacgaaccgtgagttgcctgaagaatccggcatggaacacattgccaacctgattcaaatatataaattcgatgccctcttcttgattggtggtttcgaggctttccatgccatctctcaactccgcaaagcccgggcgctatatccatctctttgcattcccatgactttactcccagccactatttccaacaacgttccgggcaccgaatactccctcgggtctgacacgtgtctgaacgagctggtgaactactgcgacaagatcaagcaatccgcctctgccacgcgcagacgagtgttcgtgattgaaacgcaaggtggacggtcagggtatgtcgcgactttggctggtctcggcgtgggagctagcgcggtctatattcccgaggaaggcatcagcttggacatgcttaatgccgatgtgaagtatctccaagaagtattcagcaaggacaaggggcagtctagagctggtaggttggtactcgtcaatgaaaaggcaagcaagacctacagtgccaagctcattgccgacatcatccgcgaggaggctcacaacaggtttgagtcccgagacagcattcccggccacgtacagcagggtggcgttccctcgccgatggacagatgtcgggctgtgagactggctatcaaatgcatacagcaccttgagagctttgggccccgatgctacgacgacaccgacaggaccatcgaagagcctctgagctcgtccgtcattggcattcgaggctccgaggtggtcatctccgcaatgaagacaatagaagacaaggagacagattggaagaacagacggccgatcgatgttcattgggtagagatgaaggatgtcgtggatattctgggtggccgtccgcctcatgaagccccgcagacagatctacacgggctacgagccaaggatgcgaaacggggcctaggcgagtag

SEQ ID NO: 25237 - protein, 785 aa, Muscodor strobelii
  misc_feature: SGI Peptide ID NO. 568612
  misc_feature (5)..(315): Pfam Id: PF00365 Pfam Desc: Phosphofructokinase
  misc_feature (395)..(694): Pfam Id: PF00365 Pfam Desc: Phosphofructokinase
  misc_feature (526)..(694): Pfam Id: PF00365 Pfam Desc: Phosphofructokinase
  misc_feature (395)..(471): Pfam Id: PF00365 Pfam Desc: Phosphofructokinase
  misc_feature (1)..(783): NCBI GI: 256727673 Blast Desc: 6-phosphofructokinase [Nectria haematococca mpVI 77-13-4]
  misc_feature (1)..(783): NCBI GI: 171683971 Blast Desc: protein product [Podospora anserina] gi|170941946|emb|CAP67598.1| protein product [Podospora anserina]
  misc_feature (1)..(783): NCBI GI: 46135881 Blast Desc: FG09456.1 [Gibberella zeae PH-1]
  misc_feature (1)..(783): NCBI GI: 164428478 Blast Desc: 6-phosphofructokinase [Neurospora crassa OR74A] gi|157072162|gb|EAA36533.2| 6-phosphofructokinase [Neurospora crassa OR74A]
  misc_feature (1)..(783): NCBI GI: 145610207 Blast Desc: MGG_02653 [Magnaporthe grisea 70-15] gi|145017560|gb|EDK01923.1| MGG_02653 [Magnaporthe grisea 70-15]
  misc_feature (1)..(783): NCBI GI: 149209797 Blast Desc: MGCH7_ch7g380 [Magnaporthe grisea 70-15] gi|86196335|gb|EAQ70973.1| MGCH7_ch7g380 [Magnaporthe grisea 70-15]
  misc_feature (4)..(783): NCBI GI: 156042105 Blast Desc: SS1G_11603 [Sclerotinia sclerotiorum 1980] gi|154695986|gb|EDN95724.1| SS1G_11603 [Sclerotinia sclerotiorum 1980]
  misc_feature (1)..(660): NCBI GI: 116193099 Blast Desc: conserved [Chaetomium globosum CBS 148.51] gi|88182180|gb|EAQ89648.1| conserved [Chaetomium globosum CBS 148.51]
  misc_feature (4)..(780): NCBI GI: 189204284 Blast Desc: 6-phosphofructokinase [Pyrenophora tritici-repentis Pt-1C-BFP] gi|187985576|gb|EDU51064.1| 6-phosphofructokinase [Pyrenophora tritici-repentis Pt-1C-BFP]
  misc_feature (4)..(777): NCBI GI: 169599436 Blast Desc: SNOG_02539 [Phaeosphaeria nodorum SN15] gi|160704610|gb|EAT90751.2| SNOG_02539 [Phaeosphaeria nodorum SN15]
  misc_feature (4)..(761): SWISSPROT Homolog: EC 2.7.1.11 6-phosphofructokinase
  misc_feature: Useful for introducing or modulating the production of volatile compounds
MAPKKKIAVMTSGGDSPGMNAVVRAVVRMAIHMGCDAFAVQEGYAGLVKGDLQQMSWEDVRGYLSEGGTLIGTARCLEFKEDKYQRQAAKNMVLSGIDALIVCGGDGSLTGANIFRKKWPDHLRKLVDDKELSPEQVEPYRHLNIVGLVGSIDNDLSGTDATIGCYSALSRICEMVDYIEATASSHSRAFVIEVMGRHCGWLALMAGVATGADFIFIPEKPRKDNWKEEMHDTIKEHRHWGKRKTIVIIAEGARDRHGQSITSSMVKDLLADKNGLALDTRITTLGHVQRGGTAVSYDRVLATLQGVEAVKAVLEATPTTESCIIAINENKIIRKPMMAAIHETERVADLINAQKFDEAMSLRDTEFAEQYSSFLMTTSMSFGEQHELEDDQKMKIGFINVGAPAGGMNAAIRAGVAYCRSRGHEAVAIHNGFAGFARHHGDKPLGAVRPFNWLEVDGWASKGGSEIGTNRELPEESGMEHIANLIQIYKFDALFLIGGFEAFHAISQLRKARALYPSLCIPMTLLPATISNNVPGTEYSLGSDTCLNELVNYCDKIKQSASATRRRVFVIETQGGRSGYVATLAGLGVGASAVYIPEEGISLDMLNADVKYLQEVFSKDKGQSRAGRLVLVNEKASKTYSAKLIADIIREEAHNRFESRDSIPGHVQQGGVPSPMDRCRAVRLAIKCIQHLESFGPRCYDDTDRTIEEPLSSSVIGIRGSEVVISAMKTIEDKETDWKNRRPIDVHWVEMKDVVDILGGRPPHEAPQTDLHGLRAKDAKRGLGE

SEQ ID NO: 25238 - DNA, 3248 bp, Muscodor strobelii
  misc_feature: SGI EST ID NO. CUFF.59413.0
  misc_feature: Variant of the nucleotide sequence at SEQ ID NO 25236
atgttgaaaagctgtcaaaattccattagcgttcttgaggctcaaaacttcgcaagaaaagtctaaggcgagcagaactttacagctcgtagcatcagctcccaggcaggcgagaggtagctccccgcatcgcggtcgtttgataaggcccgataagagcttctgcatcgtcacatcccaccttgtcattgcctttcgtcatctcgaacttgctcttgctacttgagtcgatactgcaatagtgcatgttacatgttgtgtttggtcataccaagtgagatcacgagccacgccatccctctctccccacgacattcgcctctttcactctgcttgtctctccccaaaacaccaataccgccctttcaatttgttcttttctactggaccttgatatcaatcacgttcctgtagccaaaccttctcaaaacatccaacgatcacatgatacaccccaatccatctcaccactgtccacgtttgagtcattccctaccatcactaataactagaccggaggcgactcaagggtatagatacccccgagggtaaagttgccaacctaatttcacattgctcaccacacacaacaacttcaacactacattaaacacgctttcacaacatggccccgaaaaagaagatcgccgtcatgacgtctgggggtgattcccccggcatgaacgccgtcgtgcgagctgtcgttcgcatggccatacacatgggttgcgacgccttcgccgtccaggaaggatacgcgggtcttgtcaaaggagacctccagcagatgtcctgggaggacgtccgaggctatctttccgaaggtggcactctcattggcactgccaggtgtttggaattcaaggaggacaagtatcagcgccaggcggccaagaacatggtcctcagcggcatagatgctctcatcgtctgcggcggtgatggttcccttaccggcgccaacatattccgcaagaaatggcccgatcatcttcgtaagctcgttgacgacaaggagctgtcaccagagcaggtcgagccataccggcatctcaacattgttggcctggtcggctctatcgacaacgatctatcgggcaccgacgccaccatcggttgttattcagccctctcacgcatctgcgagatggtggactacatcgaggccactgcttcgtcccattctcgtgccttcgtcatcgaggtcatgggccgtcactgcggctggcttgctctgatggctggcgtcgccaccggcgccgacttcatcttcatcccagagaaacctaggaaagacaattggaaggaggagatgcatgatactatcaaagagcaccgtcattggggaaagcgaaagaccatcgtcattattgccgagggcgcacgcgaccgccatgggcaatcaatcacctcgtctatggtgaaagacttgttggctgacaagaatggactggccctagatactcgtatcaccactctaggtcatgtccagaggggagggactgctgtgagctatgatcgcgtactagccacgttacagggtgtcgaggccgtcaaggccgtactcgaggctacgcctacgacagagagctgcattatcgcaatcaacgaaaacaagatcatccggaagcccatgatggccgccattcacgaaaccgagagagtagccgacctcatcaatgcacagaaattcgatgaggctatgagccttcgagatactgagtttgctgaacagtactcttcttttctgatgacaacatcaatgagcttcggtgagcagcatgagttggaagacgatcagaagatgaaaatcggcttcatcaatgtaggtgcaccagccggcgggatgaatgctgcgattagggccggtgtcgcgtactgtcgatctcgcggacacgaagccgttgccattcacaacgggtttgcgggttttgctcgacaccatggagataagcctcttggtgcagtgaggccgttcaactggcttgaagtggatggctgggccagcaaaggcggttcggaaatcggaacgaaccgtgagttgcctgaagaatccggcatggaacacattgccaacctgattcaaatatataaattcgatgccctcttcttgattggtggtttcgaggctttccatgccatctctcaactccgcaaagcccgggcgctatatccatctctttgcattcccatgactttactcccagccactatttccaacaacgttccgggcaccgaatactccctcgggtctgacacgtgtctgaacgagctggtgaactactgcgacaagatcaagcaatccgcctctgccacgcgcagacgagtgttcgtgattgaaacgcaaggtggacggtcagggtatgtcgcgactttggctggtctcggcgtgggagctagcgcggtctatattcccgaggaaggcatcagcttggacatgcttaatgccgatgtgaagtatctccaagaagtattcagcaaggacaaggggcagtctagagctggtaggttggtactcgtcaatgaaaaggcaagcaagacctacagtgccaagctcattgccgacatcatccgcgaggaggctcacaacaggtttgagtcccgagacagcattcccggccacgtacagcagggtggcgttccctcgccgatggacagatgtcgggctgtgagactggctatcaaatgcatacagcaccttgagagctttgggccccgatgctacgacgacaccgacaggaccatcgaagagcctctgagctcgtccgtcattggcattcgaggctccgaggtggtcatctccgcaatgaagacaatagaagacaaggagacagattggaagaacagacggccgatcgatgttcattgggtagagatgaaggatgtcgtggatattctgggtggccgtccgcctcatgaagccccgcagacagatctacacgggctacgagccaaggatgcgaaacggggcctaggcgagtagattgggacttgaaagaaagagtcaaagtagaagctagagatgaagagtagacaaagagtattatagtaacgagttcggatcgggaaaatggcaatggtatggtcaatatggttattcattatagatactcccctaattacagccgatcactccttacgtgcttatgttcctatactcggggctgtaatgatccactgcaagccttgcaagtatggctggcatgtgtgagcatgttatgatagaccgacggcttgtgacatcagag

SEQ ID NO: 25239 - DNA, 924 bp, Muscodor strobelii
  misc_feature: SGI cDNA ID NO. 568613
  misc_feature: Reduced expression when VOC is produced
  misc_feature: Encodes the peptide sequence at SEQ ID NO 25240
atggaacacattgccaacctgattcaaatatataaattcgatgccctcttcttgattggtggtttcgaggctttccatgccatctctcaactccgcaaagcccgggcgctatatccatctctttgcattcccatgactttactcccagccactatttccaacaacgttccgggcaccgaatactccctcgggtctgacacgtgtctgaacgagctggtgaactactgcgacaagatcaagcaatccgcctctgccacgcgcagacgagtgttcgtgattgaaacgcaaggtggacggtcagggtatgtcgcgactttggctggtctcggcgtgggagctagcgcggtctatattcccgaggaaggcatcagcttggacatgcttaatgccgatgtgaagtatctccaagaagtattcagcaaggacaaggggcagtctagagctggtaggttggtactcgtcaatgaaaaggcaagcaagacctacagtgccaagctcattgccgacatcatccgcgaggaggctcacaacaggtttgagtcccgagacagcattcccggccacgtacagcagggtggcgttccctcgccgatggacagatgtcgggctgtgagactggctatcaaatgcatacagcaccttgagagctttgggccccgatgctacgacgacaccgacaggaccatcgaagagcctctgagctcgtccgtcattggcattcgaggctccgaggtggtcatctccgcaatgaagacaatagaagacaaggagacagattggaagaacagacggccgatcgatgttcattgggtagagatgaaggatgtcgtggatattctgggtggccgtccgcctcatgaagccccgcagacagatctacacgggctacgagccaaggatgcgaaacggggcctaggcgagtag

SEQ ID NO: 25240 - protein, 307 aa, Muscodor strobelii
  misc_feature: SGI Peptide ID NO. 568613
  misc_feature (4)..(216): Pfam Id: PF00365 Pfam Desc: Phosphofructokinase
  misc_feature (48)..(216): Pfam Id: PF00365 Pfam Desc: Phosphofructokinase
  misc_feature (1)..(305): NCBI GI: 171683971 Blast Desc: protein product [Podospora anserina] gi|170941946|emb|CAP67598.1| protein product [Podospora anserina]
  misc_feature (1)..(305): NCBI GI: 256727673 Blast Desc: 6-phosphofructokinase [Nectria haematococca mpVI 77-13-4]
  misc_feature (1)..(305): NCBI GI: 164428478 Blast Desc: 6-phosphofructokinase [Neurospora crassa OR74A] gi|157072162|gb|EAA36533.2| 6-phosphofructokinase [Neurospora crassa OR74A]
  misc_feature (1)..(305): NCBI GI: 46135881 Blast Desc: FG09456.1 [Gibberella zeae PH-1]
  misc_feature (1)..(305): NCBI GI: 261353127 Blast Desc: 6-phosphofructokinase [Verticillium albo-atrum VaMs.102]
  misc_feature (1)..(305): NCBI GI: 145610207 Blast Desc: MGG_02653 [Magnaporthe grisea 70-15] gi|145017560|gb|EDK01923.1| MGG_02653 [Magnaporthe grisea 70-15]
  misc_feature (1)..(305): NCBI GI: 154299464 Blast Desc: BC1G_10994 [Botryotinia fuckeliana B05.10] gi|150857336|gb|EDN32528.1| BC1G_10994 [Botryotinia fuckeliana B05.10]
  misc_feature (1)..(305): NCBI GI: 156042105 Blast Desc: SS1G_11603 [Sclerotinia sclerotiorum 1980] gi|154695986|gb|EDN95724.1| SS1G_11603 [Sclerotinia sclerotiorum 1980]
  misc_feature (1)..(305): NCBI GI: 149209797 Blast Desc: MGCH7_ch7g380 [Magnaporthe grisea 70-15] gi|86196335|gb|EAQ70973.1| MGCH7_ch7g380 [Magnaporthe grisea 70-15]
  misc_feature (1)..(283): NCBI GI: 115386954 Blast Desc: 6-phosphofructokinase alpha subunit [Aspergillus terreus NIH2624] gi|114191016|gb|EAU32716.1| 6-phosphofructokinase alpha subunit [Aspergillus terreus NIH2624]
  misc_feature (1)..(289): SWISSPROT Homolog: EC 2.7.1.11 6-phosphofructokinase
  misc_feature: Useful for introducing or modulating the production of volatile compounds
MEHIANLIQIYKFDALFLIGGFEAFHAISQLRKARALYPSLCIPMTLLPATISNNVPGTEYSLGSDTCLNELVNYCDKIKQSASATRRRVFVIETQGGRSGYVATLAGLGVGASAVYIPEEGISLDMLNADVKYLQEVFSKDKGQSRAGRLVLVNEKASKTYSAKLIADIIREEAHNRFESRDSIPGHVQQGGVPSPMDRCRAVRLAIKCIQHLESFGPRCYDDTDRTIEEPLSSSVIGIRGSEVVISAMKTIEDKETDWKNRRPIDVHWVEMKDVVDILGGRPPHEAPQTDLHGLRAKDAKRGLGE

SEQ ID NO: 25241 - DNA, 3248 bp, Muscodor strobelii; identical to SEQ ID NO: 25238
  misc_feature: SGI EST ID NO. CUFF.59413.0
  misc_feature: Variant of the nucleotide sequence at SEQ ID NO 25239

SEQ ID NO: 25242 - DNA, 1047 bp, Muscodor strobelii
  misc_feature: SGI cDNA ID NO. 568614
  misc_feature: Encodes the peptide sequence at SEQ ID NO 25243
atggacgatagccaagcgaacccacaccatatcgggcctgaggattcgtggcacggctccgtatctcccggctcacgtttccaaccgcagaccgggaggtatcacctctacataggactgttctgtccttttgcgcatcgagttaacatcgttcgccatctcaaaggtctcggtcaagctattcctctgtctatcgtgaaggcctatcccaaaggtaacgacaagggttggccagggtggcagttccccggcgccaacggtccggatgatacttacgagggggcaacggaggatcacttgttcaaatccaagtatctgcacgaagtgtactttcgggccgataaggattataaggggcgctatagcgtccccgtgctgtgggataccgcagaggggaccatcgtgaacaacgaaagcctggagatgatgaggtggatgcagaggggtttcgatgagatactaccggagggcagtaaagagagggctttggatctatacccggagcatttacaggctcgcattgacgaggtgacgcagtggatgacgcgcgatctgaacagtggcgtttacaaagctgggttcgccccagatcaggaggcgtacgaaaggggtgtgatcccagtctttgctgcgttgaatcaccttgaggatattattcatcgaaacggtggtccttatgtgcttgggaaggagttgacagagcttgatgtcctggcatacgctacgatcattcgctttgatgttgtctatgtgcagcatttcaagtgtaatcttggcacaattcgaggggactatcctgttatacatgagtggttgaaaaatctatattggaacacacccgggtttcgggagactacgaatttcaagcatatcaaggagaattacacgaagagtcatggctcagtcaatccgcttgctatcactccgttgggtccgttcccggatattgagaaacgtgtacgtctggacttcgatagaattgaatcaggctctgtcgaacacccggcggtattggagtaccaagcaacactcccaaagctcgcctga

SEQ ID NO: 25243 - protein, 348 aa, Muscodor strobelii
  misc_feature: SGI Peptide ID NO. 568614
  misc_feature (10)..(344): NCBI GI: 256723286 Blast Desc: NECHADRAFT_51934 [Nectria haematococca mpVI 77-13-4]
  misc_feature (9)..(348): NCBI GI: 145235571 Blast Desc: An03g05540 [Aspergillus niger] gi|134058121|emb|CAK38315.1| protein product [Aspergillus niger]
  misc_feature (2)..(344): NCBI GI: 242770483 Blast Desc: cell wall organization protein/glutathione transferase (Gto3), [Talaromyces stipitatus ATCC 10500] gi|218725185|gb|EED24602.1| cell wall organization transferase
  misc_feature (6)..(344): NCBI GI: 145606576 Blast Desc: MGG_02244 [Magnaporthe grisea 70-15] gi|145014197|gb|EDJ98838.1| MGG_02244 [Magnaporthe grisea 70-15]
  misc_feature (8)..(344): NCBI GI: 67525469 Blast Desc: AN3192.2 [Aspergillus nidulans FGSC A4] gi|40743769|gb|EAA62956.1| AN3192.2 [Aspergillus nidulans FGSC A4]
  misc_feature (9)..(344): NCBI GI: 212541803 Blast Desc: cell wall organization protein/glutathione transferase (Gto3), [Penicillium marneffei ATCC 18224] gi|210065963|gb|EEA20056.1| cell wall organization transferase
  misc_feature (8)..(344): NCBI GI: 259485849 Blast Desc: TPA: glutathione S-transferase (Eurofung) [Aspergillus nidulans FGSC A4]
  misc_feature (9)..(344): NCBI GI: 169599535 Blast Desc: SNOG_02588 [Phaeosphaeria nodorum SN15] gi|111068199|gb|EAT89319.1| SNOG_02588 [Phaeosphaeria nodorum SN15]
  misc_feature (33)..(344): NCBI GI: 212541805 Blast Desc: cell wall organization protein/glutathione transferase (Gto3), [Penicillium marneffei ATCC 18224] gi|210065964|gb|EEA20057.1| cell wall organization transferase
  misc_feature (16)..(294): NCBI GI: 156056400 Blast Desc: SS1G_05554 [Sclerotinia sclerotiorum 1980] gi|154703336|gb|EDO03075.1| SS1G_05554 [Sclerotinia sclerotiorum 1980]
  misc_feature (16)..(317): SWISSPROT Homolog: EC 2.5.1.18 Glutathione transferase
MDDSQANPHHIGPEDSWHGSVSPGSRFQPQTGRYHLYIGLFCPFAHRVNIVRHLKGLGQAIPLSIVKAYPKGNDKGWPGWQFPGANGPDDTYEGATEDHLFKSKYLHEVYFRADKDYKGRYSVPVLWDTAEGTIVNNESLEMMRWMQRGFDEILPEGSKERALDLYPEHLQARIDEVTQWMTRDLNSGVYKAGFAPDQEAYERGVIPVFAALNHLEDIIHRNGGPYVLGKELTELDVLAYATIIRFDVVYVQHFKCNLGTIRGDYPVIHEWLKNLYWNTPGFRETTNFKHIKENYTKSHGSVNPLAITPLGPFPDIEKRVRLDFDRIESGSVEHPAVLEYQATLPKLA

SEQ ID NO: 25244 - DNA, 1494 bp, Muscodor strobelii
  misc_feature: SGI EST ID NO. CUFF.59351.1
  misc_feature: Variant of the nucleotide sequence at SEQ ID NO 25242
cgatcctcgtgtataatgtccgtagctcatttttcattgctcttcaaacacaagatagatttcgactattcgtgcttccgttttgctttgagttgacgtgtagcaatggacgatagccaagcgaacccacaccatatcgggcctgaggattcgtggcacggctccgtatctcccggctcacgtttccaaccgcagaccgggaggtatcacctctacataggactgttctgtccttttgcgcatcgagttaacatcgttcgccatctcaaaggtctcggtcaagctattcctctgtctatcgtgaaggcctatcccaaaggtaacgacaagggttggccagggtggcagttccccggcgccaacggtccggatgatacttacgagggggcaacggaggatcacttgttcaaatccaagtatctgcacgaagtgtactttcgggccgataaggattataaggggcgctatagcgtccccgtgctgtgggataccgcagaggggaccatcgtgaacaacgaaagcctggagatgatgaggtggatgcagaggggtttcgatgagatactaccggagggcagtaaagagagggctttggatctatacccggagcatttacaggctcgcattgacgaggtgacgcagtggatgacgcgcgatctgaacagtggcgtttacaaagctgggttcgccccagatcaggaggcgtacgaaaggggtgtgatcccagtctttgctgcgttgaatcaccttgaggatattattcatcgaaacggtggtccttatgtgcttgggaaggagttgacagagcttgatgtcctggcatacgctacgatcattcgctttgatgttgtctatgtgcagcatttcaagtgtaatcttggcacaattcgaggggactatcctgttatacatgagtggttgaaaaatctatattggaacacacccgggtttcgggagactacgaatttcaagcatatcaaggagaattacacgaagagtcatggctcagtcaatccgcttgctatcactccgttgggtccgttcccggatattgagaaacgtgtacgtctggacttcgatagaattgaatcaggctctgtcgaacacccggcggtattggagtaccaagcaacactcccaaagctcgcctgacgaggttgaattatgttgagatctgtatctggctactgccatcgcatatgttggaataacgcatccaacatgagaaacgtattgttgttctctgctgaattgccaatagacgtccagctcttatctactcctccgccgacgcctgcgggattgtcttcttgtcacaacttagttgcctttttaactcgtgagagtatcttgtggctcttctaaactttcgcgtagacaaaactcgtaaaatcagtgctattagccacctaaatgttcatgcataagtatgtctaggttgtgcgtacagctctgctattaacatggtcattaagactatcctgtcgatcctcg

SEQ ID NO: 25245 - DNA, 1134 bp, Muscodor strobelii
  misc_feature: SGI cDNA ID NO. 568615
  misc_feature: Encodes the peptide sequence at SEQ ID NO 25246
atgtccacacatctcgccgccgtctcagtggccaagggccagcgcttcgaggttcaatctcgcaaaactccagagcctggcccaggcgagctgcttgttgccatcaagtccatggccctgaacccggcagacgctatatggcgcgacactggcctatttgtacctgcttaccctacggtcatcggattcgacctggcaggaatagtccttgccattggcgatggtgtccctacaggccgtgatgcggatgcctttacacccggcgtctcacgcatcgcggccttcgctgcctcgtattggaagtcgtgcgccccagactatggagcatttcaggaatactgtcttgtgccttggcaacatgcgttactgcttcctgacagtatctcctggaactacgcggtcacattgcctgtcgctgtggaggtagctctcaatgcctggaatgtcctaggcataacatccgtagaggcaccgaccactgccatttcactatacgaagccaagcagggaaggtcgagcggagagagagaggctcttgttatctggggcgcctcctctagcgtaggtactatgggtgtgcaaaccgctcgactactgcgagaagaccccaattcctccattgccgcagtgtacgcgaccgccgggctagcaaatagtaactatatccggtcgctaggggcagatcgcgtatttgattataaggactctcaagtcacggatctcataattacggcagcgagagaggacagcttggtgatccggcattgtttcttagctactggagacctggcgaaatgtcaaactgtgttaaaggcattcgtaggcatggataaacaagcaaagaaggccgtgctggccaagatcggatcggcaccactaatccctcaagatgcaaaggtggtggatggactagagactatattcgtgttgccctcagcagacgaacgggagaggttgaagcggtttcgaagctggattggggtgtgggcgagggaaaacttgatcaatggcacgatcaaaccgagcccggagccacaggtcgtgggaagcgggttaagcgctatcaatgcgggcttggatataattcgccagggagtaagttgtacgaagttggttgttgagcttttggaatga

SEQ ID NO: 25246 - protein, 377 aa, Muscodor strobelii
  misc_feature: SGI Peptide ID NO. 568615
  misc_feature (28)..(124): Pfam Id: PF08240 Pfam Desc: Alcohol dehydrogenase GroES-like domain
  misc_feature (28)..(76): Pfam Id: PF08240 Pfam Desc: Alcohol dehydrogenase GroES-like domain
  misc_feature (1)..(377): NCBI GI: 119497453 Blast Desc: NFIA_022990 [Neosartorya fischeri NRRL 181] gi|119413647|gb|EAW23588.1| NFIA_022990 [Neosartorya fischeri NRRL 181]
  misc_feature (1)..(377): NCBI GI: 256723494 Blast Desc: NECHADRAFT_42043 [Nectria haematococca mpVI 77-13-4]
  misc_feature (1)..(377): NCBI GI: 169775883 Blast Desc: [Aspergillus oryzae RIB40] gi|83771143|dbj|BAE61275.1| protein product [Aspergillus oryzae]
  misc_feature (1)..(377): NCBI GI: 238502537 Blast Desc: alcohol dehydrogenase, [Aspergillus flavus NRRL3357] gi|220691312|gb|EED47660.1| alcohol dehydrogenase, [Aspergillus flavus NRRL3357]
  misc_feature (1)..(377): NCBI GI: 255955527 Blast Desc: Pc21g15040 [Penicillium chrysogenum Wisconsin 54-1255] gi|211590227|emb|CAP96401.1| Pc21g15040 [Penicillium chrysogenum Wisconsin 54-1255]
  misc_feature (1)..(377): NCBI GI: 115402001 Blast Desc: delta-aminolevulinic acid dehydratase [Aspergillus terreus NIH2624] gi|114188923|gb|EAU30623.1| delta-aminolevulinic acid dehydratase [Aspergillus terreus NIH2624]
  misc_feature (1)..(377): NCBI GI: 145250575 Blast Desc: An15g02630 [Aspergillus niger] gi|134082322|emb|CAL00417.1| protein product [Aspergillus niger]
  misc_feature (1)..(367): NCBI GI: 46139269 Blast Desc: FG11149.1 [Gibberella zeae PH-1]
  misc_feature (3)..(368): NCBI GI: 67527138 Blast Desc: AN3995.2 [Aspergillus nidulans FGSC A4] gi|40740276|gb|EAA59466.1| AN3995.2 [Aspergillus nidulans FGSC A4] gi|259481424|tpe|CBF74928.1| TPA: conserved [Aspergillus FGSC
  misc_feature (4)..(375): NCBI GI: 67521710 Blast Desc: AN1312.2 [Aspergillus nidulans FGSC A4] gi|40746339|gb|EAA65495.1| AN1312.2 [Aspergillus nidulans FGSC A4] gi|259488357|tpe|CBF87737.1| TPA: conserved [Aspergillus FGSC
  misc_feature (24)..(264): SWISSPROT Homolog: EC 1.6.5.5 NADPH:quinone reductase
MSTHLAAVSVAKGQRFEVQSRKTPEPGPGELLVAIKSMALNPADAIWRDTGLFVPAYPTVIGFDLAGIVLAIGDGVPTGRDADAFTPGVSRIAAFAASYWKSCAPDYGAFQEYCLVPWQHALLLPDSISWNYAVTLPVAVEVALNAWNVLGITSVEAPTTAISLYEAKQGRSSGEREALVIWGASSSVGTMGVQTARLLREDPNSSIAAVYATAGLANSNYIRSLGADRVFDYKDSQVTDLIITAAREDSLVIRHCFLATGDLAKCQTVLKAFVGMDKQAKKAVLAKIGSAPLIPQDAKVVDGLETIFVLPSADERERLKRFRSWIGVWARENLINGTIKPSPEPQVVGSGLSAINAGLDIIRQGVSCTKLVVELLE

SEQ ID NO: 25247 - DNA, 2283 bp, Muscodor strobelii
  misc_feature: SGI cDNA ID NO. 568616
  misc_feature: Encodes the peptide sequence at SEQ ID NO 25248
gcagacgacgagcacggcggcggcggcggcctcttctcggcgcggcccgccctggcggcgagccccaaggacaaggccatgttcagatgggctaatgtctccaatctcgacgtcttcatccgcgatgtgtacgactactacctgggagccggcctgtggtgcatcatgctcgacagactgctgcacctcctcaaggtcctcttcgtcacgagcctgctgaccctcctcacccaatgcgtcgactacgcccgcatcaggcagagcaagagcctcgccgagatcgtgatcccccagtgcaccaagcacatgtggggggtctggaacctgagcctgtggctctgcagcttctacttcgtctggaagtccatccagtggatcctcgacatcccccgcctcgtccacatccgcgacttctacgtccatctgctcgacatccccgaggccgacatgcagaccgtctcgtggcaggacgtcgtctccaaggtcaccggcctccgcgagcagaacgccaagacggccaaggacatcacccccgcccagaggaagtttctcttcggccaagcagggccgcacaccgccagccagtccaaggagaggctggacgcttccgacatcgccaacaggctgatgcgccgcgagaactacatcattgccctctttaacaaggacatcctgaatcttaccgctccgatcccctttgtgaacagcaagcagctattttccaagtctttggaatggaccgtgcagtttggcgtgctggacctcatctttgatgaagatggccaggtccaccagcgcgtcctcaagtccgaccatcgtggccagctaagccgagagatgaggaccaggtttgcattcgccgccgtcatgaatctcatcattgccccgttcctcgcctgcgggctcttggtcgactttctttttacatattacaacgaattcaaaaccaacacctcatccatcggtgcccgccaatataccccactggcgagatggaaatttcgcgagttcaacgagcttccgcatctgtttgaggaacgcctgaacatgtcctacttcccagctaagttctatctcgatcagtttccaaagaagaagaccgagtccgccgcacggactgtgcaattcgttgtcggggccatgatcgccgtcattgccatcgtcggtttctccgatcctgagatgtttgttgattttgaaatcttccccggcatgaacgctctgggcttcgttgccatcctgacaacggtatgggctgtggcgcgaggtatgatctccgaggacaatgccgtcttcgatcccgaattcgccatgcagaacgtcatcgagttcacgcactacgaacctgatcactggaaaggccggcttcatagccatgaggtcaagctggagttcgcagacctttacaagccccgcgtcgtcatcttcctggaagaaatactgggcgtcctggtgaccccattagtgctcttcttctctctgccgcagtgtagcgatcaggtcgtcgatttcttccgtgagtttacgattcacgtcgacgggcttggatacatatgttcttttgccgaattcaatttccaaaaagatgcgcggaccactcgtccccagccatccgcggccatggatgcccgcgaggattactatgcaaccaagcatggcaagatgcaagcatctatgcacgggttcctggagaactacgtctacaatccacggaccggacttccaggcgcccacaccatgggtgcggccggccgtcaccaatttcatcctcctccggctttccccggtctgacgtcgccaacgctagcggcagatatgcgggcatcgcggctgggcatgcccaggaaccggactgctcccattgctcaacacccggggaggactcccagatttggacccgccatagcaccgtcaccgatggcctcgatgctgctggacgctcaccatcaaccctcatcttcgttaatgctgggccgcacggcgccaataccgcgtccggcacgaggaccgtaccatggcgacagtcagatcatcgaggagtcgatgacggaggccggcgtggcggggagaggcacattgcatcggcagctgacgaacactaccgacgacggtgatattgaagagagtgtagcccacttgggcgagtcgacgtgggaacgatcacctcatcaggcaccgagcagagagaacagcgcagtgaaggaagacgagggtggcaccggtgtggtgacgatgctgaaacaatttcagaaggctcacatggagcagcgaggtgtcatgtga

SEQ ID NO: 25248 - protein, 760 aa, Muscodor strobelii
  misc_feature: SGI Peptide ID NO. 568616
  misc_feature (147)..(550): Pfam Id: PF04109 Pfam Desc: Autophagy protein Apg9
  misc_feature (147)..(529): Pfam Id: PF04109 Pfam Desc: Autophagy protein Apg9
  misc_feature (5)..(759): NCBI GI: 189091792 Blast Desc: [Podospora anserina] gi|73619465|sp|Q875A7.1|ATG9_PODAN RecName: Full=Autophagy-related protein 9 gi|27803006|emb|CAD60709.1|
  misc_feature (17)..(757): NCBI GI: 85092988 Blast Desc: NCU02422 [Neurospora crassa OR74A] gi|73619461|sp|Q7S4D7.1|ATG9_NEUCR RecName: Full=Autophagy-related protein 9 gi|28921048|gb|EAA30368.1|
  misc_feature (2)..(758): NCBI GI: 256732427 Blast Desc: NECHADRAFT_37808 [Nectria haematococca mpVI 77-13-4]
  misc_feature (18)..(757): NCBI GI: 39961750 Blast Desc: MGG_09559 [Magnaporthe grisea 70-15] gi|73619459|sp|Q51WZ9.1|ATG9_MAGGR RecName: Full=Autophagy-related protein 9 gi|145011062|gb|EDJ95718.1| ATG9
  misc_feature (18)..(757): NCBI GI: 166990657 Blast Desc: MGG_09559 [Magnaporthe grisea 70-15] gi|73619459|sp|Q51WZ9.1|ATG9_MAGGR RecName: Full=Autophagy-related protein 9 gi|145011062|gb|EDJ95718.1| ATG9
  misc_feature (22)..(757): NCBI GI: 225560831 Blast Desc: conserved [Ajellomyces capsulatus G186AR]
  misc_feature (22)..(758): NCBI GI: 226278463 Blast Desc: autophagy-related protein 9 [Paracoccidioides brasiliensis Pb01]
  misc_feature (22)..(758): NCBI GI: 226293427 Blast Desc: autophagy-related protein 9 [Paracoccidioides brasiliensis Pb18]
  misc_feature (6)..(758): NCBI GI: 242790878 Blast Desc: autophagy protein Apg9, [Talaromyces stipitatus ATCC 10500] gi|218718233|gb|EED17653.1| autophagy protein Apg9, [Talaromyces stipitatus ATCC 10500]
  misc_feature (22)..(758): NCBI GI: 225684036 Blast Desc: autophagy-related protein 9 [Paracoccidioides brasiliensis Pb03]
ADDEHGGGGGLFSARPALAASPKDKAMFRWANVSNLDVFIRDVYDYYLGAGLWCIMLDRLLHLLKVLFVTSLLTLLTQCVDYARIRQSKSLAEIVIPQCTKHMWGVWNLSLWLCSFYFVWKSIQWILDIPRLVHIRDFYVHLLDIPEADMQTVSWQDVVSKVTGLREQNAKTAKDITPAQRKFLFGQAGPHTASQSKERLDASDIANRLMRRENYIIALFNKDILNLTAPIPFVNSKQLFSKSLEWTVQFGVLDLIFDEDGQVHQRVLKSDHRGQLSREMRTRFAFAAVMNLIIAPFLACGLLVDFLFTYYNEFKTNTSSIGARQYTPLARWKFREFNELPHLFEERLNMSYFPAKFYLDQFPKKKTESAARTVQFVVGAMIAVIAIVGFSDPEMFVDFEIFPGMNALGFVAILTTVWAVARGMISEDNAVFDPEFAMQNVIEFTHYEPDHWKGRLHSHEVKLEFADLYKPRVVIFLEEILGVLVTPLVLFFSLPQCSDQVVDFFREFTIHVDGLGYICSFAEFNFQKDARTTRPQPSAAMDAREDYYATKHGKMQASMHGFLENYVYNPRTGLPGAHTMGAAGRHQFHPPPAFPGLTSPTLAADMRASRLGMPRNRTAPIAQHPGRTPRFGPAIAPSPMASMLLDAHHQPSSSLMLGRTAPIPRPARGPYHGDSQIIEESMTEAGVAGRGTLHRQLTNTTDDGDIEESVAHLGESTWERSPHQAPSRENSAVKEDEGGTGVVTMLKQFQKAHMEQRGVM

SEQ ID NO: 25249 - DNA, 2628 bp, Muscodor strobelii
  misc_feature: SGI EST ID NO. CUFF.59419.0
  misc_feature: Variant of the nucleotide sequence at SEQ ID NO 25247
cggcggcctcttctcggcgcggcccgccctggcggcgagccccaaggacaaggccatgttcagatgggctaatgtctccaatctcgacgtcttcatccgcgatgtgtacgactactacctgggagccggcctgtggtgcatcatgctcgacagactgctgcacctcctcaaggtcctcttcgtcacgagcctgctgaccctcctcacccaatgcgtcgactacgcccgcatcaggcagagcaagagcctcgccgagatcgtgatcccccagtgcaccaagcacatgtggggggtctggaacctgagcctgtggctctgcagcttctacttcgtctggaagtccatccagtggatcctcgacatcccccgcctcgtccacatccgcgacttctacgtccatctgctcgacatccccgaggccgacatgcagaccgtctcgtggcaggacgtcgtctccaaggtcaccggcctccgcgagcagaacgccaagacggccaaggacatcacccccgcccagaggaagtttctcttcggccaagcagggccgcacaccgccagccagtccaaggagaggctggacgcttccgacatcgccaacaggctgatgcgccgcgagaactacatcattgccctctttaacaaggacatcctgaatcttaccgctccgatcccctttgtgaacagcaagcagctattttccaagtctttggaatggaccgtgcagtttggcgtgctggacctcatctttgatgaagatggccaggtccaccagcgcgtcctcaagtccgaccatcgtggccagctaagccgagagatgaggaccaggtttgcattcgccgccgtcatgaatctcatcattgccccgttcctcgcctgcgggctcttggtcgactttctttttacatattacaacgtaggtccatctggcagggctcggggcacagaggcagaagtgatgctgacatcaggtctcccaaggaattcaaaaccaacacctcatccatcggtgcccgccaatataccccactggcgagatggaaatttcgcgagttcaacgagcttccgcatctgtttgaggaacgcctgaacatgtcctacttcccagctaagttctatctcgatcagtttccaaagaagaagaccgagtccgccgcacggactgtgcaattcgttgtcggggccatgatcgccgtcattgccatcgtcggtttctccgatcctgagatgtttgttgattttgaaatcttccccggcatgaacgctctgggcttcgttgccatcctgacaacggtatgggctgtggcgcgaggtatgatctccgaggacaatgccgtcttcgatcccgaattcgccatgcagaacgtcatcgagttcacgcactacgaacctgatcactggaaaggccggcttcatagccatgaggtcaagctggagttcgcagacctttacaagccccgcgtcgtcatcttcctggaagaaatactgggcgtcctggtgaccccattagtgctcttcttctctctgccgcagtgtagcgatcaggtcgtcgatttcttccgtgagtttacgattcacgtcgacgggcttggatacatatgttcttttgccgaattcaatttccaaaaagatgcgcggaccactcgtccccagccatccgcggccatggatgcccgcgaggattactatgcaaccaagcatggcaagatgcaagcatctatgcacgggttcctggagaactacgtctacaatccacggaccggacttccaggcgcccacaccatgggtgcggccggccgtcaccaatttcatcctcctccggctttccccggtctgacgtcgccaacgctagcggcagatatgcgggcatcgcggctgggcatgcccaggaaccggactgctcccattgctcaacacccggggaggactcccagatttggacccgccatagcaccgtcaccgatggcctcgatgctgctggacgctcaccatcaaccctcatcttcgttaatgctgggccgcacggcgccaataccgcgtccggcacgaggaccgtaccatggcgacagtcagatcatcgaggagtcgatgacggaggccggcgtggcggggagaggcacattgcatcggcagctgacgaacactaccgacgacggtgatattgaagagagtgtagcccacttgggcgagtcgacgtgggaacgatcacctcatcaggcaccgagcagagagaacagcgcagtgaaggaagacgagggtggcaccggtgtggtgacgatgctgaaacaatttcagaaggctcacatggagcagcgaggtgtcatgtgagaaaggggaagtagctgcatgaagcagaagttcatcgcatcaaagccagaaggctagtagatccataggcgttcactgtacgacttagcaaggatattgataccattacactgaacgcagacagaagtattgttcttgacttggtattgccattcatcgcaagcggctcaaccgtgacagtccacatatcagtggccctgtacgacttgatctcccctgacctacgagaaactacctggcatgagatattgtatgtagcaatactacctcgtctaatgcacttccctttcatggtgatcatat

SEQ ID NO: 25250 - DNA, 2295 bp, Muscodor strobelii
  misc_feature: SGI cDNA ID NO. 568617
  misc_feature: Reduced expression when VOC is produced
  misc_feature: Encodes the peptide sequence at SEQ ID NO 25251
gcagacgacgagcacggcggcggcggcggcctcttctcggcgcggcccgccctggcggcgagccccaaggacaaggccatgttcagatgggctaatgtctccaatctcgacgtcttcatccgcgatgtgtacgactactacctgggagccggcctgtggtgcatcatgctcgacagactgctgcacctcctcaaggtcctcttcgtcacgagcctgctgaccctcctcacccaatgcgtcgactacgcccgcatcaggcagagcaagagcctcgccgagatcgtgatcccccagtgcaccaagcacatgtggggggtctggaacctgagcctgtggctctgcagcttctacttcgtctggaagtccatccagtggatcctcgacatcccccgcctcgtccacatccgcgacttctacgtccatctgctcgacatccccgaggccgacatgcagaccgtctcgtggcaggacgtcgtctccaaggtcaccggcctccgcgagcagaacgccaagacggccaaggacatcacccccgcccagaggaagtttctcttcggccaagcagggccgcacaccgccagccagtccaaggagaggctggacgcttccgacatcgccaacaggctgatgcgccgcgagaactacatcattgccctctttaacaaggacatcctgaatcttaccgctccgatcccctttgtgaacagcaagcagctattttccaagtctttggaatggaccgtgcagtttggcgtgctggacctcatctttgatgaagatggccaggtccaccagcgcgtcctcaagtccgaccatcgtggccagctaagccgagagatgaggaccaggtttgcattcgccgccgtcatgaatctcatcattgccccgtccatctggcagggctcggggcacagaggcagaagtgatgctgacatcaggtctcccaaggaattcaaaaccaacacctcatccatcggtgcccgccaatataccccactggcgagatggaaatttcgcgagttcaacgagcttccgcatctgtttgaggaacgcctgaacatgtcctacttcccagctaagttctatctcgatcagtttccaaagaagaagaccgagtccgccgcacggactgtgcaattcgttgtcggggccatgatcgccgtcattgccatcgtcggtttctccgatcctgagatgtttgttgattttgaaatcttccccggcatgaacgctctgggcttcgttgccatcctgacaacggtatgggctgtggcgcgaggtatgatctccgaggacaatgccgtcttcgatcccgaattcgccatgcagaacgtcatcgagttcacgcactacgaacctgatcactggaaaggccggcttcatagccatgaggtcaagctggagttcgcagacctttacaagccccgcgtcgtcatcttcctggaagaaatactgggcgtcctggtgaccccattagtgctcttcttctctctgccgcagtgtagcgatcaggtcgtcgatttcttccgtgagtttacgattcacgtcgacgggcttggatacatatgttcttttgccgaattcaatttccaaaaagatgcgcggaccactcgtccccagccatccgcggccatggatgcccgcgaggattactatgcaaccaagcatggcaagatgcaagcatctatgcacgggttcctggagaactacgtctacaatccacggaccggacttccaggcgcccacaccatgggtgcggccggccgtcaccaatttcatcctcctccggctttccccggtctgacgtcgccaacgctagcggcagatatgcgggcatcgcggctgggcatgcccaggaaccggactgctcccattgctcaacacccggggaggactcccagatttggacccgccatagcaccgtcaccgatggcctcgatgctgctggacgctcaccatcaaccctcatcttcgttaatgctgggccgcacggcgccaataccgcgtccggcacgaggaccgtaccatggcgacagtcagatcatcgaggagtcgatgacggaggccggcgtggcggggagaggcacattgcatcggcagctgacgaacactaccgacgacggtgatattgaagagagtgtagcccacttgggcgagtcgacgtgggaacgatcacctcatcaggcaccgagcagagagaacagcgcagtgaaggaagacgagggtggcaccggtgtggtgacgatgctgaaacaatttcagaaggctcacatggagcagcgaggtgtcatgtga

SEQ ID NO: 25251 - protein, 764 aa, Muscodor strobelii
  misc_feature: SGI Peptide ID NO. 568617
  misc_feature (147)..(554): Pfam Id: PF04109 Pfam Desc: Autophagy protein Apg9
  misc_feature (317)..(533): Pfam Id: PF04109 Pfam Desc: Autophagy protein Apg9
  misc_feature (147)..(296): Pfam Id: PF04109 Pfam Desc: Autophagy protein Apg9
  misc_feature (5)..(763): NCBI GI: 189091792 Blast Desc: [Podospora anserina] gi|73619465|sp|Q875A7.1|ATG9_PODAN RecName: Full=Autophagy-related protein 9 gi|27803006|emb|CAD60709.1|
  misc_feature (17)..(761): NCBI GI: 85092988 Blast Desc: NCU02422 [Neurospora crassa OR74A] gi|73619461|sp|Q7S4D7.1|ATG9_NEUCR RecName: Full=Autophagy-related protein 9 gi|28921048|gb|EAA30368.1|
  misc_feature (2)..(762): NCBI GI: 256732427 Blast Desc: NECHADRAFT_37808 [Nectria haematococca mpVI 77-13-4]
  misc_feature (18)..(761): NCBI GI: 39961750 Blast Desc: MGG_09559 [Magnaporthe grisea 70-15] gi|73619459|sp|Q51WZ9.1|ATG9_MAGGR RecName: Full=Autophagy-related protein 9 gi|145011062|gb|EDJ95718.1| ATG9
  misc_feature (18)..(761): NCBI GI: 166990657 Blast Desc: MGG_09559 [Magnaporthe grisea 70-15] gi|73619459|sp|Q51WZ9.1|ATG9_MAGGR RecName: Full=Autophagy-related protein 9 gi|145011062|gb|EDJ95718.1| ATG9
  misc_feature (22)..(762): NCBI GI: 226278463 Blast Desc: autophagy-related protein 9 [Paracoccidioides brasiliensis Pb01]
  misc_feature (22)..(762): NCBI GI: 226293427 Blast Desc: autophagy-related protein 9 [Paracoccidioides brasiliensis Pb18]
  misc_feature (22)..(761): NCBI GI: 225560831 Blast Desc: conserved [Ajellomyces capsulatus G186AR]
  misc_feature (6)..(762): NCBI GI: 242790878 Blast Desc: autophagy protein Apg9, [Talaromyces stipitatus ATCC 10500] gi|218718233|gb|EED17653.1| autophagy protein Apg9, [Talaromyces stipitatus ATCC 10500]
  misc_feature (22)..(762): NCBI GI: 225684036 Blast Desc: autophagy-related protein 9 [Paracoccidioides brasiliensis Pb03]
  misc_feature: Useful for introducing or modulating the production of volatile compounds
ADDEHGGGGGLFSARPALAASPKDKAMFRWANVSNLDVFIRDVYDYYLGAGLWCIMLDRLLHLLKVLFVTSLLTLLTQCVDYARIRQSKSLAEIVIPQCTKHMWGVWNLSLWLCSFYFVWKSIQWILDIPRLVHIRDFYVHLLDIPEADMQTVSWQDVVSKVTGLREQNAKTAKDITPAQRKFLFGQAGPHTASQSKERLDASDIANRLMRRENYIIALFNKDILNLTAPIPFVNSKQLFSKSLEWTVQFGVLDLIFDEDGQVHQRVLKSDHRGQLSREMRTRFAFAAVMNLIIAPSIWQGSGHRGRSDADIRSPKEFKTNTSSIGARQYTPLARWKFREFNELPHLFEERLNMSYFPAKFYLDQFPKKKTESAARTVQFVVGAMIAVIAIVGFSDPEMFVDFEIFPGMNALGFVAILTTVWAVARGMISEDNAVFDPEFAMQNVIEFTHYEPDHWKGRLHSHEVKLEFADLYKPRVVIFLEEILGVLVTPLVLFFSLPQCSDQVVDFFREFTIHVDGLGYICSFAEFNFQKDARTTRPQPSAAMDAREDYYATKHGKMQASMHGFLENYVYNPRTGLPGAHTMGAAGRHQFHPPPAFPGLTSPTLAADMRASRLGMPRNRTAPIAQHPGRTPRFGPAIAPSPMASMLLDAHHQPSSSLMLGRTAPIPRPARGPYHGDSQIIEESMTEAGVAGRGTLHRQLTNTTDDGDIEESVAHLGESTWERSPHQAPSRENSAVKEDEGGTGVVTMLKQFQKAHMEQRGVM

SEQ ID NO: 25252 - DNA, 2628 bp, Muscodor strobelii; identical to SEQ ID NO: 25249
  misc_feature: SGI EST ID NO. CUFF.59419.0
  misc_feature: Variant of the nucleotide sequence at SEQ ID NO 25250

SEQ ID NO: 25253 - DNA, 1680 bp, Muscodor strobelii
  misc_feature: SGI cDNA ID NO. 568618
  misc_feature: Encodes the peptide sequence at SEQ ID NO 25254
atggcggaaaggacattcccgctgatgtcgaggagggagatagaaggcttgattgcggatggccgtttggtcttcattctcgatcacttcgtcatcaaggccgatgcatgggcgccttaccatccggggggcgacaaggccatccgccacatggtcggtcgcgatgccaccgacgaagtcaccgccctccactccgccgaggcacggcagcagatgtatcgatacagggtcggcaagatccaaggtcgatggtccaacttcatcccgcccatccagggtggaaagttcagacccgcctgcgtggctggcggcgacgtcttcgacaacagccccgagtcggctgcggcctcggcagccccgtccagcacctccagttcccgctctccgtcgcccgtcttcgacgatggggatgccccagggccgctacggagccgccatggcccctcggatgctgcctctgtttcttccgcctcgtctgtcgaggccgacgacgagggcatggccttcctcaacggcctgactcacgagaagatcgctctggaccaggataagtatccctctaccgagttcgccatccaggacgatatcgtcgtcaggtaccgggctctacaccaacgcatcaaagccgaaggcctctatcagtgcaactaccgagactacgccgtcgagtgctgtcgctacttgacgctttttgtcgccatgttgctcttcctgcattggggttggtatgttacgagtgccgccttcctgggcgccatgtggcatcagttggtgttcacggctcatgacgctggccacatgggcattacccacaacttccatgtcgacaccgttattggtatcctcattgccgactatatcggtggcctgtctctgggatggtggaagaggaaccataatgtccatcacatcgtgaccaactcgcccgagcacgacccggacatcgagcacatgcccttcatggccgtctctcaccgtctgttccagaacttgcgctccacatactacgacaaggttatggagtatgatgcattggccaaggttgctctccgagtgcagcattacaccttctttgtgctcatgacatttgggcgtttcaacctctacgtcaattcctgggcttttctgctgcgtgggcaagggcccaagaaaggaccctcttggtggcatcgttggttcgagctggccggccaagtcttcttttggacgtggttcggctatggcattctctacaagacgataccgacgaactgggatcggtttacctttctcatggttagccacatggtgactatgcctgttcatgcccaaatctgtctttctcacttcgcgatgagcacatcggatttaggccctcacgaatctttcccccagaagatgttacgtaccaccatggatatcgactgtccgccctggctggatttcttccacggcggcttacaattccaggtcatccatcacctatatcctcgcattccgcgccacaatctgcgtagaacgcagaagcttgtacaggaattctgcaacgaggttggcataccgtatgcactgtacggctttgtggatggtaacaagagggttgtcgggacacttgctgaagtgtccaggcaagccgccattctcgcaaggtgccagaaggccatcgccgaagacgacttcacgcatggacatagtcattaa

SEQ ID NO: 25254 - protein, 559 aa, Muscodor strobelii
  misc_feature: SGI Peptide ID NO. 568618
  misc_feature (247)..(508): Pfam Id: PF00487 Pfam Desc: Fatty acid desaturase
  misc_feature (8)..(81): Pfam Id: PF00173 Pfam Desc: Cytochrome b5-like Heme/Steroid binding domain
  misc_feature (3)..(557): NCBI GI: 39942978 Blast Desc: MGG_03569 [Magnaporthe grisea 70-15] gi|145009867|gb|EDJ94523.1| MGG_03569 [Magnaporthe grisea 70-15]
  misc_feature (8)..(557): NCBI GI: 154300380 Blast Desc: BC1G_11379 [Botryotinia fuckeliana B05.10] gi|150856702|gb|EDN31894.1| BC1G_11379 [Botryotinia fuckeliana B05.10]
  misc_feature (4)..(554): NCBI GI: 256732872 Blast Desc: NECHADRAFT_103962 [Nectria haematococca mpVI 77-13-4]
  misc_feature (4)..(552): NCBI GI: 261361153 Blast Desc: fatty acid desaturase [Verticillium albo-atrum VaMs.102]
  misc_feature (8)..(557): NCBI GI: 156042426 Blast Desc: SS1G_11010 [Sclerotinia sclerotiorum 1980] gi|154695397|gb|EDN95135.1| SS1G_11010 [Sclerotinia sclerotiorum 1980]
  misc_feature (3)..(548): NCBI GI: 189091846 Blast Desc: [Podospora anserina] gi|27803034|emb|CAD60737.1| protein product [Podospora anserina] gi|188219276|emb|CAP49256.1| protein product [Podospora anserina]
  misc_feature (4)..(559): NCBI GI: 261195875 Blast Desc: fatty acid desaturase [Ajellomyces dermatitidis SLH14081] gi|239587474|gb|EEQ70117.1| fatty acid desaturase [Ajellomyces dermatitidis SLH14081]
  misc_feature (4)..(559): NCBI GI: 239614426 Blast Desc: fatty acid desaturase [Ajellomyces dermatitidis ER-3]
  misc_feature (2)..(551): NCBI GI: 145238214 Blast Desc: An07g06770 [Aspergillus niger] gi|134076236|emb|CAK39522.1| protein product [Aspergillus niger]
  misc_feature (8)..(559): NCBI GI: 115398584 Blast Desc: ATEG_05703 [Aspergillus terreus NIH2624] gi|114191764|gb|EAU33464.1| ATEG_05703 [Aspergillus terreus NIH2624]
  misc_feature (201)..(518): SWISSPROT Homolog: EC 1.14.19.3 Linoleoyl-CoA desaturase
MAERTFPLMSRREIEGLIADGRLVFILDHFVIKADAWAPYHPGGDKAIRHMVGRDATDEVTALHSAEARQQMYRYRVGKIQGRWSNFIPPIQGGKFRPACVAGGDVFDNSPESAAASAAPSSTSSSRSPSPVFDDGDAPGPLRSRHGPSDAASVSSASSVEADDEGMAFLNGLTHEKIALDQDKYPSTEFAIQDDIVVRYRALHQRIKAEGLYQCNYRDYAVECCRYLTLFVAMLLFLHWGWYVTSAAFLGAMWHQLVFTAHDAGHMGITHNFHVDTVIGILIADYIGGLSLGWWKRNHNVHHIVTNSPEHDPDIEHMPFMAVSHRLFQNLRSTYYDKVMEYDALAKVALRVQHYTFFVLMTFGRFNLYVNSWAFLLRGQGPKKGPSWWHRWFELAGQVFFWTWFGYGILYKTIPTNWDRFTFLMVSHMVTMPVHAQICLSHFAMSTSDLGPHESFPQKMLRTTMDIDCPPWLDFFHGGLQFQVIHHLYPRIPRHNLRRTQKLVQEFCNEVGIPYALYGFVDGNKRVVGTLAEVSRQAAILARCQKAIAEDDFTHGHSH

SEQ ID NO: 25255 - DNA, 1976 bp, Muscodor strobelii
  misc_feature: SGI EST ID NO. CUFF.59443.0
  misc_feature: Variant of the nucleotide sequence at SEQ ID NO 25253
gtaattttgagagcttccaaagctctccagtccgtttattgttctgaaacattctatttcaacattctaatctccctcgtcaaggcaccctaagctatcctatccaaacagctctcaatggctatctgagtagcctctccaccgatcacatcgctcgcctttcagtacctcccgaacagccatggcggaaaggacattcccgctgatgtcgaggagggagatagaaggcttgattgcggatggccgtttggtcttcattctcgatcacttcgtcatcaaggccgatgcatgggcgccttaccatccggggggcgacaaggccatccgccacatggtcggtcgcgatgccaccgacgaagtcaccgccctccactccgccgaggcacggcagcagatgtatcgatacagggtcggcaagatccaaggtcgatggtccaacttcatcccgcccatccagggtggaaagttcagacccgcctgcgtggctggcggcgacgtcttcgacaacagccccgagtcggctgcggcctcggcagccccgtccagcacctccagttcccgctctccgtcgcccgtcttcgacgatggggatgccccagggccgctacggagccgccatggcccctcggatgctgcctctgtttcttccgcctcgtctgtcgaggccgacgacgagggcatggccttcctcaacggcctgactcacgagaagatcgctctggaccaggataagtatccctctaccgagttcgccatccaggacgatatcgtcgtcaggtaccgggctctacaccaacgcatcaaagccgaaggcctctatcagtgcaactaccgagactacgccgtcgagtgctgtcgctacttgacgctttttgtcgccatgttgctcttcctgcattggggttggtatgttacgagtgccgccttcctgggcgccatgtggcatcagttggtgttcacggctcatgacgctggccacatgggcattacccacaacttccatgtcgacaccgttattggtatcctcattgccgactatatcggtggcctgtctctgggatggtggaagaggaaccataatgtccatcacatcgtgaccaactcgcccgagcacgacccggacatcgagcacatgcccttcatggccgtctctcaccgtctgttccagaacttgcgctccacatactacgacaaggttatggagtatgatgcattggccaaggttgctctccgagtgcagcattacaccttctttgtgctcatgacatttgggcgtttcaacctctacgtcaattcctgggcttttctgctgcgtgggcaagggcccaagaaaggaccctcttggtggcatcgttggttcgagctggccggccaagtcttcttttggacgtggttcggctatggcattctctacaagacgataccgacgaactgggatcggtttacctttctcatggttagccacatggtgactatgcctgttcatgcccaaatctgtctttctcacttcgcgatgagcacatcggatttaggccctcacgaatctttcccccagaagatgttacgtaccaccatggatatcgactgtccgccctggctggatttcttccacggcggcttacaattccaggtcatccatcacctatatcctcgcattccgcgccacaatctgcgtagaacgcagaagcttgtacaggaattctgcaacgaggttggcataccgtatgcactgtacggctttgtggatggtaacaagagggttgtcgggacacttgctgaagtgtccaggcaagccgccattctcgcaaggtgccagaaggccatcgccgaagacgacttcacgcatggacatagtcattaatctctacaaatgagtctgtatgatggctcaatcgcatttagcgctgcatactgcatatacctaatcaattatttcaaatacatcttaaactcgaccttgtgaactctacttcgtc

SEQ ID NO: 25256 - DNA, 2691 bp, Muscodor strobelii
  misc_feature: SGI cDNA ID NO. 568619
  misc_feature: Encodes the peptide sequence at SEQ ID NO 25257
atggatcctcatatcgcacgtttgcttaatgacaagctctatgataagaggaagactggagctcttgagcttgagcggtctatccgcgagcacatggtcgccaaggactataacagagtccagagtatcatccaacacttatgtgatgaatacgcctacgccgtacatcaacctcatgcgagaaatggcggtctgattgggctggctgccgcagctattgcccttggttcggagcttcccaggtatctggaaatcatagtgccgccagtcctcgcttgcttcacggatcaagatgcgcgtgtccgctattatgcttgcgaatcaatgtacaacattgccaaggtcgcaaaaggagagattctcagatactttaatcacatatttgatgccttatgcaagctgggcgccgactcggaactgtcagttaaaaacggtgccgaattgctcgatcggctgatcaaagacattgtttcggaatccgctgctacttatgtatccatcttagagatctctgaacccccaccaccaccttacgaatctaaggagtttgatggtctcgagagttcggttcatcctaatccgcctactgccttttcattgccaagatttattcccctgctgaaagaacgtatctgggtcatcaacccgttcaccagaacctttttagtaggatggataacgcttcttgattccatcccggatcttgagctcgttacctacctcccggagttcctgggtggcctgcttaagttcttgagtggcaacaatccagacgtgcatgccgctacgcagggatgcctagacaagtttctcaatgaaatcaagcggattgcgcgcgtgaagaagggcattgccgacagcaagaaatcgaaaggtgacgggaagaggaagcgcgaagattctgttgatagtggtagcgaacactcccttcccgacgacgttgatgacacgggctccaagacggctatcgacgatgacgacgaagtgagcagcgaagacgactgggttcctggacaagatgttcagatcaactacaaagccatcctcgagattctcactgcaacacttgattctcctttggaggaagatggtttgctcgaaagtctacggtggattgtctcttttcttgacatctgccctgaagaggtgcttccctttacgccgaaagttctagctcacctactaccagccatggccagtggcgtcgagccaatccgccaggcggcagcgagagttaacacctcgctaatggcttatgtcgtttctctaactgatgaatcagatccatcaccaagtcaaccctcatcccgcatacctacttctctcactgtggatcgtcctgaaggcacagctagcgcccgtgcctcgttgtccagttcccgagaggtagacatgcgaagtcctacgccggctcaagaccgcaagacgcccacgccgataccttctgtcaatccacagcccgacttagactacgcagcggcagtgaattccttgactttgctatttctgaatgatcacgaagccacccgtgttgccgcattgacttggcttatcatgctacaccgcaaggcgccccgcaaaatcgtcgccttcaatgacggcacattccctgcacttctcaagaccctctcagatccggccgaggccgttgtcactaaagatctacagcttctatcacagatatccaagaacagcgaggatgactatttctcgaatttcatggtcagtcttttgcagctattctccacagaccgtaagctgctggagcaaagaggcaacctcatcatcaggcagctctgcatgacgctcagtcccgagcgcatctaccgcacgttggccgagacgattgaaaaggaagaggatcttgaatttgccagtatcatggtgcagaacctcaacaacaacctcatcacggcacccgagcttgccgacttacgaaagcgcttgagaaacctcgaaaccaaggacgggcaaatgttttttgttgcgctcttccgttcttggtgctacaatgccgtggccacattctccctgtgtctgctggctcaagcgtatgaggcggcgtacaatctactacagatatttgcggaactcgagatgacggtccatatcctaattcaaatcgacaaactcgtgcagctgatcgagtcacccgtattcacatacctacgtttgcagctactcgaaccggaaaagtacccgtatctgtacaagtgtctgtacgggctgctcatgctcctgccgcaatcttctgctttcgccgcactcaagaacagactcaacagtgtcagctccattggtttcttgcacgctgggccacgaccttctgtcactacacccagtgcgtctggttatgatcggcccaaccggctgggcaagggccgcgaagatggcatcatccgatgggaccagctcctcgacaaattcaaggcggtgcaggaccggtcgcggcgggcgcaacggctgatgggggccgggggactcgacgacggggccgactttgtcgatctacgtgtgcacgaggccatgggcggtaaagagacgacgacgcgagcggtggcgggaccgccgcccgtgccgcacaaggaatcagcgcccgcggtgccgcctaagcgcagcggagggctgggcaggcagttcgggcggctgggggcgtcggtgtcgggtcgcggcaagcgatcacagggatga

SEQ ID NO: 25257 - protein, 896 aa, Muscodor strobelii
  misc_feature: SGI Peptide ID NO. 568619
  misc_feature (80)..(116): Pfam Id: PF02985 Pfam Desc: HEAT repeat
  misc_feature (1)..(821): NCBI GI: 121700152 Blast Desc: vacuole-associated enzyme activator complex component (Vac14), [Aspergillus clavatus NRRL 1] gi|119396483|gb|EAW06915.1| vacuole-associated enzyme activator
  misc_feature (1)..(890): NCBI GI: 212534454 Blast Desc: vacuole-associated enzyme activator complex component (Vac14), [Penicillium marneffei ATCC 18224] gi|210069782|gb|EEA23872.1| vacuole-associated enzyme activator
  misc_feature (1)..(889): NCBI GI: 154300386 Blast Desc: BC1G_11382 [Botryotinia fuckeliana B05.10] gi|150856705|gb|EDN31897.1| BC1G_11382 [Botryotinia fuckeliana B05.10]
  misc_feature (1)..(890): NCBI GI: 242790186 Blast Desc: vacuole-associated enzyme activator complex component (Vac14), [Talaromyces stipitatus ATCC 10500] gi|218718103|gb|EED17523.1| vacuole-associated enzyme activator
  misc_feature (1)..(814): NCBI GI: 238840823 Blast Desc: vacuole morphology and inheritance protein 14 [Microsporum canis CBS 113480]
  misc_feature (1)..(813): NCBI GI: 169770245 Blast Desc: [Aspergillus oryzae RIB40] gi|83767451|dbj|BAE57590.1| protein product [Aspergillus oryzae]
  misc_feature (1)..(864): NCBI GI: 225684005 Blast Desc: conserved [Paracoccidioides brasiliensis Pb03]
  misc_feature (1)..(821): NCBI GI: 259485019 Blast Desc: TPA: vacuole-associated enzyme activator complex component (Vac14), (AFU_orthologue; AFUA_6G12890) [Aspergillus nidulans FGSC A4]
  misc_feature (1)..(893): NCBI GI: 169600419 Blast Desc: SNOG_03043 [Phaeosphaeria nodorum SN15] gi|111068654|gb|EAT89774.1| SNOG_03043 [Phaeosphaeria nodorum SN15]
  misc_feature (1)..(822): NCBI GI: 240105201 Blast Desc: HEAT repeat containing protein [Coccidioides posadasii C735 delta SOWgp]
MDPHIARLLNDKLYDKRKTGALELERSIREHMVAKDYNRVQSIIQHLCDEYAYAVHQPHARNGGLIGLAAAAIALGSELPRYLEIIVPPVLACFTDQDARVRYYACESMYNIAKVAKGEILRYFNHIFDALCKLGADSELSVKNGAELLDRLIKDIVSESAATYVSILEISEPPPPPYESKEFDGLESSVHPNPPTAFSLPRFIPLLKERIWVINPFTRTFLVGWITLLDSIPDLELVTYLPEFLGGLLKFLSGNNPDVHAATQGCLDKFLNEIKRIARVKKGIADSKKSKGDGKRKREDSVDSGSEHSLPDDVDDTGSKTAIDDDDEVSSEDDWVPGQDVQINYKAILEILTATLDSPLEEDGLLESLRWIVSFLDICPEEVLPFTPKVLAHLLPAMASGVEPIRQAAARVNTSLMAYVVSLTDESDPSPSQPSSRIPTSLTVDRPEGTASARASLSSSREVDMRSPTPAQDRKTPTPIPSVNPQPDLDYAAAVNSLTLLFLNDHEATRVAALTWLIMLHRKAPRKIVAFNDGTFPALLKTLSDPAEAVVTKDLQLLSQISKNSEDDYFSNFMVSLLQLFSTDRKLLEQRGNLIIRQLCMTLSPERIYRTLAETIEKEEDLEFASIMVQNLNNNLITAPELADLRKRLRNLETKDGQMFFVALFRSWCYNAVATFSLCLLAQAYEAAYNLLQIFAELEMTVHILIQIDKLVQLIESPVFTYLRLQLLEPEKYPYLYKCLYGLLMLLPQSSAFAALKNRLNSVSSIGFLHAGPRPSVTTPSASGYDRPNRLGKGREDGIIRWDQLLDKFKAVQDRSRRAQRLMGAGGLDDGADFVDLRVHEAMGGKETTTRAVAGPPPVPHKESAPAVPPKRSGGLGRQFGRLGASVSGRGKRSQG

SEQ ID NO: 25258 - DNA, 3089 bp, Muscodor strobelii
  misc_feature: SGI EST ID NO. CUFF.59488.3
  misc_feature: Variant of the nucleotide sequence at SEQ ID NO 25256
cggtccagcacaactaccacggagtaaggagccactacaggattgaatggacttgacatctgaatatttcgcatgcggccttgcttgtttacctggatcttcagcgtctcttaccgagtttcccgtatcctcactacctcactcaccttgacctcagagctgacggtacctgatattagctctgtcacctacacccgataatggtcccttaatttgagaagacagttggcccaccacggtaccggctcaccagccatggatcctcatatcgcacgtttgcttaatgacaagctctatgataagaggaagactggagctcttgagcttgagcggtctatccgcgagcacatggtcgccaaggactataacagagtccagagtatcatccaacacttatgtgatgaatacgcctacgccgtacatcaacctcatgcgagaaatggcggtctgattgggctggctgccgcagctattgcccttggttcggagcttcccaggtatctggaaatcatagtgccgccagtcctcgcttgcttcacggatcaagatgcgcgtgtccgctattatgcttgcgaatcaatgtacaacattgccaaggtcgcaaaaggagagattctcagatactttaatcacatatttgatgccttatgcaagctgggcgccgactcggaactgtcagttaaaaacggtgccgaattgctcgatcggctgatcaaagacattgtttcggaatccgctgctacttatgtatccatcttagagatctctgaacccccaccaccaccttacgaatctaaggagtttgatggtctcgagagttcggttcatcctaatccgcctactgccttttcattgccaagatttattcccctgctgaaagaacgtatctgggtcatcaacccgttcaccagaacctttttagtaggatggataacgcttcttgattccatcccggatcttgagctcgttacctacctcccggagttcctgggtggcctgcttaagttcttgagtggcaacaatccagacgtgcatgccgctacgcagggatgcctagacaagtttctcaatgaaatcaagcggattgcgcgcgtgaagaagggcattgccgacagcaagaaatcgaaaggtgacgggaagaggaagcgcgaagattctgttgatagtggtagcgaacactcccttcccgacgacgttgatgacacgggctccaagacggctatcgacgatgacgacgaagtgagcagcgaagacgactgggttcctggacaagatgttcagatcaactacaaagccatcctcgagattctcactgcaacacttgattctcctttggaggaagatggtttgctcgaaagtctacggtggattgtctcttttcttgacatctgccctgaagaggtgcttccctttacgccgaaagttctagctcacctactaccagccatggccagtggcgtcgagccaatccgccaggcggcagcgagagttaacacctcgctaatggcttatgtcgtttctctaactgatgaatcagatccatcaccaagtcaaccctcatcccgcatacctacttctctcactgtggatcgtcctgaaggcacagctagcgcccgtgcctcgttgtccagttcccgagaggtagacatgcgaagtcctacgccggctcaagaccgcaagacgcccacgccgataccttctgtcaatccacagcccgacttagactacgcagcggcagtgaattccttgactttgctatttctgaatgatcacgaagccacccgtgttgccgcattgacttggcttatcatgctacaccgcaaggcgccccgcaaaatcgtcgccttcaatgacggcacattccctgcacttctcaagaccctctcagatccggccgaggccgttgtcactaaagatctacagcttctatcacagatatccaagaacagcgaggatgactatttctcgaatttcatggtcagtcttttgcagctattctccacagaccgtaagctgctggagcaaagaggcaacctcatcatcaggcagctctgcatgacgctcagtcccgagcgcatctaccgcacgttggccgagacgattgaaaaggaagaggatcttgaatttgccagtatcatggtgcagaacctcaacaacaacctcatcacggcacccgagcttgccgacttacgaaagcgcttgagaaacctcgaaaccaaggacgggcaaatgttttttgttgcgctcttccgttcttggtgctacaatgccgtggccacattctccctgtgtctgctggctcaagcgtatgaggcggcgtacaatctactacagatatttgcggaactcgagatgacggtccatatcctaattcaaatcgacaaactcgtgcagctgatcgagtcacccgtattcacatgtgagcaatgcgataagctgaagagagctggaagctaagccgaggacatgctaacgtggaaacgtgtcagacctacgtttgcagctactcgaaccggaaaagtacccgtatctgtacaagtgtctgtacgggctgctcatgctcctgccgcaatcttctgctttcgccgcactcaagaacagactcaacagtgtcagctccattggtttcttgcacgctgggccacgaccttctgtcactacacccagtgcgtctggttatgatcggcccaaccggctgggcaagggccgcgaagatggcatcatccgatgggaccagctcctcgacaaattcaaggcggtgcaggaccggtcgcggcgggcgcaacggctgatgggggccgggggactcgacgacggggccgactttgtcgatctacgtgtgcacgaggccatgggcggtaaagagacgacgacgcgagcggtggcgggaccgccgcccgtgccgcacaaggaatcagcgcccgcggtgccgcctaagcgcagcggagggctgggcaggcagttcgggcggctgggggcgtcggtgtcgggtcgcggcaagcgatcacagggatgaagacgaaagactcgattgggtgagaaacggcagcactagatggttctgcttttcggggacgccgtgtagactt

SEQ ID NO: 25259 - DNA, 973 bp, Muscodor strobelii
  misc_feature: SGI cDNA ID NO. 568620
  misc_feature: Reduced expression when VOC is produced
  misc_feature: Encodes the peptide sequence at SEQ ID NO 25260
atggcgcctcctccgcctggatacagcggccctcctggcgcgcggtacgactcgtatcagcctctgccgccccctcccccgtactacgatcagccgcctccgcctcctgcccagacccagtcccagactcaggcccagggctgggactcgaggcgacgcgatgactactacgcccgcgacggccccaacgaccgtgccttccgtggcccttactctgacctgcgcgagccccctcgccagtacaatgactacgactaccgcgaccgtgaccgcgatcgtgaccgtcgagacgaccgccgtgacgatcgccgcaatgaccgtgatcgcgatcgtgaccgtgaccgagagcgccgtggcggcgacgactacgactaccgtgacagccaccgtggctctcactcgcactcccatcgcgacgacttccgtccgccccagggcgacttcaccttccgtgggcccggcgccggcccctcgtttccctcgcagcccaagtatgacccgcaccacccccagcgtccgcggcggcccgagcgccccgagcgcccccagcgttcccagcgtcccctcaccccgcaacacggttctagtggccgtggccgtgatcgtagtcgggtcccgagtggtcctcgtcgctctgtttctccccctcgtgaagtttctcgtcgtgttgattccaccgccgagacgtggcatcgcaaacttcctcttctccctgctgaccagtccagcaaccactacgattcctaccccggcccgcgtcgaaacgacaacaacaaccagcgtcctcgtcccggccgaggcggccgccctcccactggcccccgcggcggcggcggtcgacaccagcacaccaacagctacaagaggccgccgccccccaaagctgccgagcgggcggctgctgacgtcgcggtggaacaccgggaccgagcagatgctggacgacaacaccgtccgcgccacgtaccgagat

SEQ ID NO: 25260 - protein, 324 aa, Muscodor strobelii
  misc_feature: SGI Peptide ID NO. 568620
  misc_feature: Useful for introducing or modulating the production of volatile compounds
MAPPPPGYSGPPGARYDSYQPLPPPPPYYDQPPPPPAQTQSQTQAQGWDSRRRDDYYARDGPNDRAFRGPYSDLREPPRQYNDYDYRDRDRDRDRRDDRRDDRRNDRDRDRDRDRERRGGDDYDYRDSHRGSHSHSHRDDFRPPQGDFTFRGPGAGPSFPSQPKYDPHHPQRPRRPERPERPQRSQRPLTPQHGSSGRGRDRSRVPSGPRRSVSPPREVSRRVDSTAETWHRKLPLLPADQSSNHYDSYPGPRRNDNNNQRPRPGRGGRPPTGPRGGGGRHQHTNSYKRPPPPKAAERAAADVAVEHRDRADAGRQHRPRHVPR

SEQ ID NO: 25261 - DNA, 1100 bp, Muscodor strobelii
  misc_feature: SGI EST ID NO. CUFF.59374.0
  misc_feature: Variant of the nucleotide sequence at SEQ ID NO 25259
gcaacttttgtcaacctccccagtttctctgacgtcggagttgaattttcaggtctcaactggaccactctcacatctttacacatcgtcgcgtttcccatcgcgtttcccaccgcgtccctgcattgattgcagcaagtggatgaggaagccctcttttcaagtgtctttgtttaccgagattttgagttgaagtgacattgcgcgcgcgcgactgtgggcctgcttctctactaactcgtcctgtgcctgcgtttctccctgtgtgcatccgtccgtctatggcacgtatgacttgacatgtatagagacacttcgcatcaacactcgtctccttccggccctccccatcacagctatcccaacatggcgcctcctccgcctggatacagcggccctcctggcgcgcggtacgactcgtatcagcctctgccgccccctcccccgtactacgatcagccgcctccgcctcctgcccagacccagtcccagactcaggcccagggctgggactcgaggcgacgcgatgactactacgcccgcgacggccccaacgaccgtgccttccgtggcccttactctgacctgcgcgagccccctcgccagtacaatgactacgactaccgcgaccgtgaccgcgatcgtgaccgtcgagacgaccgccgtgacgatcgccgcaatgaccgtgatcgcgatcgtgaccgtgaccgagagcgccgtggcggcgacgactacgactaccgtgacagccaccgtggctctcactcgcactcccatcgcgacgacttccgtccgccccagggcgacttcaccttccgtgggcccggcgccggcccctcgtttccctcgcagcccaacaaccactacgattcctaccccggcccgcgtcgaaacgacaacaacaaccagcgtcctcgtcccggccgaggcggccgccctcccactggcccccgcggcggcggcggtcgacaccagcacaccaacagctacaagaggccgccgccccccaaagctgccgagcgggcggctgctgacgtcgcggtggaacaccgggaccgagcagatgctggacgacaacaccgtccgcgccacgtaccgag

SEQ ID NO: 25262 - DNA, 2004 bp, Muscodor strobelii
  misc_feature: SGI cDNA ID NO. 568621
  misc_feature: Encodes the peptide sequence at SEQ ID NO 25263
atggttgtcccgtcggacctcaacgccatgatcagtccgcaacttgttcactggcaaccgatagataggtataaatatttcctcaatccgagaaaccagtggttcatccttactcttacttcctcaccacactttcatcaacatcaagagtggtatctccaactgcagttatccaacctactgttgactagtctgcagaagagagaggtggtcaattgcactcatacaatgaagaacggtcaccgctctaccatggcctctgtgctgccagatgagccatctcaggttccattggtctcgagcaatgatcgttctcaccaatcccgaggtcgcgacgtcaaagttgagtctggtgacgaagtggacattcacctcgctattgcagaaacacaaccggacgacccctttacatcctatcatcctggtcgaggccgcaatgttacaactgagtctggccatgaagtgaaccccaatctcacccttgttgaacaggagccggacaatgccatgtcatgtggtcacaccgcccggaagtcgagtgatggtcccgtcgaagctggcgtcactgcttttccagataccatcgaagccacaaacgcactagaaacagatgctcaagctggactgtccgaagctattgatagcgagtcaattcgacaccatgcgccttcactcacccagtcagatgacaagccagacgcagtccagacggctaatcatggactcgtcaaaatagtcgtagatgacatgcatccagctcaacctgcactcaacgaaaaccaagcagaagaggcgctagcatctctctttaaagagacttcttacacttctaccgaacctacgcaacaaaacgacacagagtctgcggctcagaagaccacacctggcagcggtcaagtatcgggaaagtccattccattgagtcgactaaccctcactccgaagcaataccgtgtagtcctgaggatgatacagggcctgatcgaacactgggacaacgtgatgaaggaagatcgcatcggcaagaaatacgagagaacattcagtccttctctcgaccaagtcctagcagcctctttcgtctcaactgccgcagtcacgacaggacagattgcagatgctgttattcaaactatgctgcagctttgggaacgccacatcattgaaaggttcagcctgaaaatcagggatctgagcttcgatgccatgaaccgcggtgagcgtgtcaagctcaacgtgctgacagactcacgacttgaggcctatgccgatacaccttcagctgcatatgaacagcgcaaacaaagggagcagaagcgatttgaccaacagcagcgtgaggagcttctaacggccttggaaacgcctgatctcgatgatcttgcattcatacgggctatcgagatggcgagtgcgcaggcggttgataaccttgtcaaagagattttgcaggaagacaacgtgcaacaacttagttgtggcgttgataacattcatctcggtcgctcgcctcgcgccgccattgacacacctactcgcgcctcacctcgcaaggctcgctcaacccaagatcccggttcatctacgacaaacatacaaattgagcaagggcgaacatccatcaaggtagaaagttattctctccaggttccccttcaaccttgtacgccaccatcgaaatcccgttcttcgcgtgcaatgccttccgattacaaacacttccgagagtcatcagcagaaccaccgtcgaggcgttcgaagacacctcgatcgagtattgcacacaccactgccactcaggacaggcagtttctaacagggtcgcctgtgaagaaaactcgtcagagtgctcgtaatgttagaactccaactggctatcaagcagccgcgcaagtgggtcatcacgctgcgttctcaccgattcgatctcatgagactcaaccttcgatctctttggacggaacagacagtcaaatggcgtctgattctgaccccgacagatga

SEQ ID NO: 25263 - protein, 667 aa, Muscodor strobelii
  misc_feature: SGI Peptide ID NO. 568621
MVVPSDLNAMISPQLVHWQPIDRYKYFLNPRNQWFILTLTSSPHFHQHQEWYLQLQLSNLLLTSLQKREVVNCTHTMKNGHRSTMASVLPDEPSQVPLVSSNDRSHQSRGRDVKVESGDEVDIHLAIAETQPDDPFTSYHPGRGRNVTTESGHEVNPNLTLVEQEPDNAMSCGHTARKSSDGPVEAGVTAFPDTIEATNALETDAQAGLSEAIDSESIRHHAPSLTQSDDKPDAVQTANHGLVKIVVDDMHPAQPALNENQAEEALASLFKETSYTSTEPTQQNDTESAAQKTTPGSGQVSGKSIPLSRLTLTPKQYRVVLRMIQGLIEHWDNVMKEDRIGKKYERTFSPSLDQVLAASFVSTAAVTTGQIADAVIQTMLQLWERHIIERFSLKIRDLSFDAMNRGERVKLNVLTDSRLEAYADTPSAAYEQRKQREQKRFDQQQREELLTALETPDLDDLAFIRAIEMASAQAVDNLVKEILQEDNVQQLSCGVDNIHLGRSPRAAIDTPTRASPRKARSTQDPGSSTTNIQIEQGRTSIKVESYSLQVPLQPCTPPSKSRSSRAMPSDYKHFRESSAEPPSRRSKTPRSSIAHTTATQDRQFLTGSPVKKTRQSARNVRTPTGYQAAAQVGHHAAFSPIRSHETQPSISLDGTDSQMASDSDPDR

SEQ ID NO: 25264 - DNA, 2144 bp, Muscodor strobelii
  misc_feature: SGI EST ID NO. CUFF.59379.0
  misc_feature: Variant of the nucleotide sequence at SEQ ID NO 25262
caatgaagaacggtcaccgctctaccatggcctctgtgctgccagatgagccatctcaggttccattggtctcgagcaatgatcgttctcaccaatcccgaggtcgcgacgtcaaagttgagtctggtgacgaagtggacattcacctcgctattgcagaaacacaaccggacgacccctttacatcctatcatcctggtcgaggccgcaatgttacaactgagtctggccatgaagtgaaccccaatctcacccttgttgaacaggagccggacaatgccatgtcatgtggtcacaccgcccggaagtcgagtgatggtcccgtcgaagctggcgtcactgcttttccagataccatcgaagccacaaacgcactagaaacagatgctcaagctggactgtccgaagctattgatagcgagtcaattcgacaccatgcgccttcactcacccagtcagatgacaagccagacgcagtccagacggctaatcatggactcgtcaaaatagtcgtagatgacatgcatccagctcaacctgcactcaacgaaaaccaagcagaagaggcgctagcatctctctttaaagagacttcttacacttctaccgaacctacgcaacaaaacgacacagagtctgcggctcagaagaccacacctggcagcggtcaagtatcgggaaagtccattccattgagtcgactaaccctcactccgaagcaataccgtgtagtcctgaggatgatacagggcctgatcgaacactgggacaacgtgatgaaggaagatcgcatcggcaagaaatacgagagaacattcagtccttctctcgaccaagtcctagcagcctctttcgtctcaactgccgcagtcacgacaggacagattgcagatgctgttattcaaactatgctgcagctttgggaacgccacatcattgaaaggttcagcctgaaaatcagggatctgagcttcgatgccatgaaccgcggtgagcgtgtcaagctcaacgtgctgacagactcacgacttgaggcctatgccgatacaccttcagctgcatatgaacagcgcaaacaaagggagcagaagcgatttgaccaacagcagcgtgaggagcttctaacggccttggaaacgcctgatctcgatgatcttgcattcatacgggctatcgagatggcgagtgcgcaggcggttgataaccttgtcaaagagattttgcaggaagacaacgtgcaacaacttagttgtggcgttgataacattcatctcggtcgctcgcctcgcgccgccattgacacacctactcgcgcctcacctcgcaaggctcgctcaacccaagatcccggttcatctacgacaaacatacaaattgagcaagggcgaacatccatcaaggtagaaagttattctctccaggttccccttcaaccttgtacgccaccatcgaaatcccgttcttcgcgtgcaatgccttccgattacaaacacttccgagagtcatcagcagaaccaccgtcgaggcgttcgaagacacctcgatcgagtattgcacacaccactgccactcaggacaggcagtttctaacagggtcgcctgtgaagaaaactcgtcagagtgctcgtaatgttagaactccaactggctatcaagcagccgcgcaagtgggtcatcacgctgcgttctcaccgattcgatctcatgagactcaaccttcgatctctttggacggaacagacagtcaaatggcgtctgattctgaccccgacagatgatcttgaccgtgcgagtctttctaactcatcgggtcctcatcgtcttctgatctggggatgcttgcactgttggatcattcacatgactatcacggcagaattggagtttagagagcaaggaatatggttttaggattcgcctatcattttggtcttggctaatggtttctggtatggtcatgatgatctctgtactctactcgtatacctacccgttgctgcttggactgacacaagtgatgcattccccattctcggtcttggtggcagagatgcattgaccttttacggtatatgaggagatatgtcagacgacatctgtgtacactagattagtctagaggcaagaaataagcttggttcttg

SEQ ID NO: 25265 - DNA, 1263 bp, Muscodor strobelii
  misc_feature: SGI cDNA ID NO. 568622
  misc_feature: Encodes the peptide sequence at SEQ ID NO 25266
atgaaagacatctcagataacgacgacgtctttcacactcgattccttgactatgttctatatgttggccatggtgctatctctacctctctgcgcggtggtctctcacttttgaagttactcggagaatggggcgtaaagatggagcactttgacaaaagcatttctgtcccaactggaccatacatgatcaagaatcagactctttattcagtatggaggatttacgatgactcccagctagctttcacacaagcactctggccctcggtagaagaacctaagaaattcatacagatcaatgctcctggcaatagctaccgtgggcatggcattgccgttcctgcaagatcatgccctaacctattcggaggatttggcaatcaatgcaataacagctgcagtcttatcagaggactgaggtttgcggttaaggacaattaccatgtgtgtggcaccaagacaagtctcgggaatagggcatatctggaaacatttgcgaagtcgaaattcaccgctagtttagttgagaaactcctagaatgcggtgcccagctacttgggaagacacatttgagcgcactagccatgatggaacatccaacccagagtcttgattaccaggcacccttcaaccctcgaggctgcgggtttttgattcccggaggaagcagcagtggttgcgctgctgcgattgcgagctatgaatggctagactttacgatttgcactgataccacgggtagcgcccggattccagcctttcagactgggcttttcggatttcgatctagttatcgctacttgccttccgacggctggatttctggctgtgaagcgtttgatgtaccgggctggattggccgagaccttagcttgtttcccaacatcattcacgctctatctgggcaagcaaatccaatcgatgcgtcgacgcatggtctcagacgagtagagatcaggtatgcaagatatttaatgcctacgatctctgccaaggaaaaagagatcacggacgaatttttccgagatgttgaaaaatacatcggatgtcgtaaaatggaccttgacatccactcggactgggagaatacctctccagtcagtgagaaaaatcttcacaagtatctagaaaatttgcagacgactctccacggctggctctacagcgcgtatcactcgttcgaagactttcgaaggaagtacaatgcagacaatggccacgatccattcgtaactgaagtcgtgaagtcgtactggtga

SEQ ID NO: 25266 - protein, 420 aa, Muscodor strobelii
  misc_feature: SGI Peptide ID NO. 568622
  misc_feature (139)..(290): Pfam Id: PF01425 Pfam Desc: Amidase
  misc_feature (2)..(420): NCBI GI: 242775192 Blast Desc: TSTA_088670 [Talaromyces stipitatus ATCC 10500] gi|218722213|gb|EED21631.1| TSTA_088670 [Talaromyces stipitatus ATCC 10500]
  misc_feature (2)..(420): NCBI GI: 242826254 Blast Desc: glutamyl-tRNA(gln) amidotransferase subunit A, [Talaromyces stipitatus ATCC 10500] gi|218712421|gb|EED11847.1| glutamyl-tRNA(gln) amidotransferase subunit A, [Talaromyces ATCC
  misc_feature (1)..(420): NCBI GI: 242801359 Blast Desc: conserved [Talaromyces stipitatus ATCC 10500] gi|218717092|gb|EED16513.1| conserved [Talaromyces stipitatus ATCC 10500]
  misc_feature (5)..(420): NCBI GI: 242801363 Blast Desc: conserved [Talaromyces stipitatus ATCC 10500] gi|242801367|ref|XP_002483749.1| conserved [Talaromyces stipitatus ATCC 10500] gi|218717093|gb|EED16514.1| conserved ATCC
  misc_feature (3)..(420): NCBI GI: 239609232 Blast Desc: amidase [Ajellomyces dermatitidis ER-3]
  misc_feature (1)..(420): NCBI GI: 242761298 Blast Desc: amidase, [Talaromyces stipitatus ATCC 10500] gi|218723349|gb|EED22766.1| amidase, [Talaromyces stipitatus ATCC 10500]
  misc_feature (8)..(420): NCBI GI: 119483714 Blast Desc: NFIA_094830 [Neosartorya fischeri NRRL 181] gi|119409916|gb|EAW19863.1| NFIA_094830 [Neosartorya fischeri NRRL 181]
  misc_feature (3)..(420): NCBI GI: 261189075 Blast Desc: amidase [Ajellomyces dermatitidis SLH14081] gi|239591954|gb|EEQ74535.1| amidase [Ajellomyces dermatitidis SLH14081]
  misc_feature (8)..(420): NCBI GI: 115433839 Blast Desc: [Aspergillus terreus NIH2624] gi|114189908|gb|EAU31608.1| [Aspergillus terreus NIH2624]
  misc_feature (1)..(420): NCBI GI: 116202933 Blast Desc: CHGG_09351 [Chaetomium globosum CBS 148.51] gi|88177869|gb|EAQ85337.1| CHGG_09351 [Chaetomium globosum CBS 148.51]
MKDISDNDDVFHTRFLDYVLYVGHGAISTSLRGGLSLLKLLGEWGVKMEHFDKSISVPTGPYMIKNQTLYSVWRIYDDSQLAFTQALWPSVEEPKKFIQINAPGNSYRGHGIAVPARSCPNLFGGFGNQCNNSCSLIRGLRFAVKDNYHVCGTKTSLGNRAYLETFAKSKFTASLVEKLLECGAQLLGKTHLSALAMMEHPTQSLDYQAPFNPRGCGFLIPGGSSSGCAAAIASYEWLDFTICTDTTGSARIPAFQTGLFGFRSSYRYLPSDGWISGCEAFDVPGWIGRDLSLFPNIIHALSGQANPIDASTHGLRRVEIRYARYLMPTISAKEKEITDEFFRDVEKYIGCRKMDLDIHSDWENTSPVSEKNLHKYLENLQTTLHGWLYSAYHSFEDFRRKYNADNGHDPFVTEVVKSYW

SEQ ID NO: 25267 - DNA, 1575 bp, Muscodor strobelii
  misc_feature: SGI cDNA ID NO. 568623
  misc_feature: Encodes the peptide sequence at SEQ ID NO 25268
atgcgcttgaattcacttcttacgctggcaagctgtgctagcaccggcctttcagggtctatcctcctctcgggcggtaccatcattgcttgggacgagggaggtcagtctctcaacgtaattcgcgatggctcgcttctcgtcaccgaagacaaaatcgccgggatctatcacgaagcaagccccaagggtctaccaaaggataccgagctcttagactgcacacacaagatcatctctcctggattcatcgatacacatcgtcacggatggcaaacggcaatgaagacgttagcgtctaacactacattggctgactacatgtatcgatggtcaagtggtgccgcaggccccttttacacagtagaggatgtgtatatcggccagatggctgcgctgctcgagggcctgaacgccggtgtcacaacgactctagaccatgcacatagtctgtggtcgacagaccgtggtgtcgcggggctcgatgcgtcgattgacagcggtgcgagagtcgtctgggccgctgctatctcgccgtttgaaggatatagtgtgaaggaccagattaaggattataggtcgtggaggaagcagaaggtcaaaaagggaggactcgtttctttgggcattgggtatgactggtgggattctgacaatcacgaagataccaaggctgttgtcaagctcgtgaaagaaggagaggcggatgttctgacgattcactggcttggacacgcctggcaaatggaaagcccaccatcgctcctccatagccacggcgtactcacaacctccacgccggtggtgttctcccacggaccgggcataacggccaaggaagcccggatccttcgggacaccaaccaatttctgtccatcacgcccgagtcggagatgcattatggtcactaccacgagttctcgcacctggctcaggatcaggcggcgcttggtgtcgacacgcattttacattctcgacggatttactgacgcaagcgagattgtggctccagcgtacgagaagtcgactgtttgatgaggttatcaagagatgggagataccgagacggagccccatgtcggtaaatcaagccttcctccttagtacacgacaaggcgctctcgccctccgacgccctgacctcggtatcatcgcacctggtgccaaagctgatctcgtcgtctttgatggacgatcaccgagcttgctaggttgggttgatcccgttgccgcactcatcttgcacgcgaatgtgggcgatatcgtacatgtactcgttgacggcgtgtttcagaaacgcgatgggaaactcctatacaagaactatgaggacgttatcgagcggttggagaagtctgcggaagggttgagggaaagattgttgagcaggccggagccggacttcgggacgaggatgctggggattgggagtggatatgagaaacatgtgaaggatatgaaggtattaaggggtgaggactcgggttatggcgggttatttttgggtccccatggtccggtacctgagaagtcgggcttgggaaagtcgaatggggggcacgatgagctctaa

SEQ ID NO: 25268 - protein, 524 aa, Muscodor strobelii
  misc_feature: SGI Peptide ID NO. 568623
  misc_feature (78)..(397): Pfam Id: PF01979 Pfam Desc: Amidohydrolase family
  misc_feature (356)..(397): Pfam Id: PF01979 Pfam Desc: Amidohydrolase family
  misc_feature (78)..(147): Pfam Id: PF01979 Pfam Desc: Amidohydrolase family
  misc_feature (352)..(395): Pfam Id: PF07969 Pfam Desc: Amidohydrolase family
  misc_feature (1)..(502): NCBI GI: 256725429 Blast Desc: NECHADRAFT_45723 [Nectria haematococca mpVI 77-13-4]
  misc_feature (22)..(480): NCBI GI: 46116102 Blast Desc: FG03893.1 [Gibberella zeae PH-1]
  misc_feature (18)..(497): NCBI GI: 159128256 Blast Desc: amidohydrolase family protein [Aspergillus fumigatus A1163]
  misc_feature (18)..(497): NCBI GI: 146323215 Blast Desc: amidohydrolase family protein [Aspergillus fumigatus Af293] gi|129556522|gb|EAL86563.2| amidohydrolase family protein [Aspergillus fumigatus Af293]
  misc_feature (5)..(502): NCBI GI: 189198962 Blast Desc: amidohydrolase family protein [Pyrenophora tritici-repentis Pt-1C-BFP] gi|187982917|gb|EDU48405.1| amidohydrolase family protein [Pyrenophora tritici-repentis
  misc_feature (3)..(502): NCBI GI: 171680038 Blast Desc: protein product [Podospora anserina] gi|170939645|emb|CAP64872.1| protein product [Podospora anserina]
  misc_feature (3)..(497): NCBI GI: 256725833 Blast Desc: NECHADRAFT_44083 [Nectria haematococca mpVI 77-13-4]
  misc_feature (5)..(498): NCBI GI: 145606578 Blast Desc: MGG_02243 [Magnaporthe grisea 70-15] gi|145014198|gb|EDJ98839.1| MGG_02243 [Magnaporthe grisea 70-15]
  misc_feature (1)..(497): NCBI GI: 256722359 Blast Desc: NECHADRAFT_44376 [Nectria haematococca mpVI 77-13-4]
  misc_feature (19)..(497): NCBI GI: 70981762 Blast Desc: chlorohydrolase family protein [Aspergillus fumigatus Af293] gi|66844032|gb|EAL84372.1| chlorohydrolase family protein, [Aspergillus fumigatus Af293]
  misc_feature (40)..(460): SWISSPROT Homolog: EC 3.5.4.28 S-adenosylhomocysteine deaminase
MRLNSLLTLASCASTGLSGSILLSGGTIIAWDEGGQSLNVIRDGSLLVTEDKIAGIYHEASPKGLPKDTELLDCTHKIISPGFIDTHRHGWQTAMKTLASNTTLADYMYRWSSGAAGPFYTVEDVYIGQMAALLEGLNAGVTTTLDHAHSLWSTDRGVAGLDASIDSGARVVWAAAISPFEGYSVKDQIKDYRSWRKQKVKKGGLVSLGIGYDWWDSDNHEDTKAVVKLVKEGEADVLTIHWLGHAWQMESPPSLLHSHGVLTTSTPVVFSHGPGITAKEARILRDTNQFLSITPESEMHYGHYHEFSHLAQDQAALGVDTHFTFSTDLLTQARLWLQRTRSRLFDEVIKRWEIPRRSPMSVNQAFLLSTRQGALALRRPDLGIIAPGAKADLVVFDGRSPSLLGWVDPVAALILHANVGDIVHVLVDGVFQKRDGKLLYKNYEDVIERLEKSAEGLRERLLSRPEPDFGTRMLGIGSGYEKHVKDMKVLRGEDSGYGGLFLGPHGPVPEKSGLGKSNGGHDEL

SEQ ID NO: 25269 - DNA, 2905 bp, Muscodor strobelii
  misc_feature: SGI EST ID NO. CUFF.59389.0
  misc_feature: Variant of the nucleotide sequence at SEQ ID NO 25267
aaccgatatactgttcgctcgtattcaaaccaacaaagctccatcgcacgatagcaaacgcgtcgtcgttgtctaccccaaaacccagtcttggcatcgaatagccaacgaatcagcgcccatgaggatgaagtcatgccgttgtcacatcttgagaattaccaaatcttacaaatccgaggtaccctctctcaaaccttactaggtaagcaagtgtaaccaggtgagtgtagacgatgccaatgcatgctggtatgcgtcgtgaaagtcacatcgtaactccgagtgcggatacgcgatacttggcagggatgtctccatcctctgcgttgtaaggagacgagactgtatacttggcgtagacatcgtagggtaaggatatataaaaaagcccgaatgtcttccaccgtcattggcactgcagctttcattctctacaaacagcaatcatgcgcttgaattcacttcttacgctggcaagctgtgctagcaccggcctttcagggtctatcctcctctcgggcggtaccatcattgcttgggacgagggaggtcagtctctcaacgtaattcgcgatggctcgcttctcgtcaccgaagacaaaatcgccgggatctatcacgaagcaagccccaagggtctaccaaaggataccgagctcttagactgcacacacaagatcatctctcctggattcatcgatacacatcgtcacggatggcaaacggcaatgaagacgttagcgtctaacactacattggctgactacatgtatcgatggtcaagtggtgccgcaggccccttttacacagtagaggatgtgtatatcggccagatggctgcgctgctcgagggcctgaacgccggtgtcacaacgactctagaccatgcacatagtctgtggtcgacagaccgtggtgtcgcggggctcgatgcgtcgattgacagcggtgcgagagtcgtctgggccgctgctatctcgccgtttgaaggatatagtgtgaaggaccagattaaggattataggtcgtggaggaagcagaaggtcaaaaagggaggactcgtttctttgggcattgggtatgactggtgggattctgacaatcacgaagataccaaggctgttgtcaagctcgtgaaagaaggagaggcggatgttctgacgattcactggcttggacacgcctggcaaagtaagccaaacgcacgccccttcaacaaacacggactaatatcgcgtagtggaaagcccaccatcgctcctccatagccacggcgtactcacaacctccacgccggtggtgttctcccacggaccgggcataacggccaaggaagcccggatccttcgggacaccaaccaatttctgtccatcacgcccgagtcggagatgcattatggtcactaccacgagttctcgcacctggctcaggatcaggcggcgcttggtgtcgacacgcattttacattctcgacggatttactgacgcaagcgagattgtggctccagcgtacgagaagtcgactgtttgatgaggttatcaagagatgggagataccgagacggagccccatgtcggtaaatcaagccttcctccttagtacacgacaaggcgctctcgccctccgacgccctgacctcggtatcatcgcacctggtgccaaagctgatctcgtcgtctttgatggacgatcaccgagcttgctaggttgggttgatcccgttgccgcactcatcttgcacgcgaatgtgggcgatatcgtacatgtactcgttgacggcgtgtttcagaaacgcgatgggaaactcctatacaagaactatgaggacgttatcgagcggttggagaagtctgcggaagggttgagggaaagattgttgagcaggccggagccggacttcgggacgaggatgctggggattgggagtggatatgagaaacatgtgaaggatatgaaggtattaaggggtgaggactcgggttatggcgggttatttttgggtccccatggtccggtacctgagaagtcgggcttgggaaagtcgaatggggggcacgatgagctctaatgatcttatgaagacgacgacaagaatttgggagactgccattgcatgaattaattggcgataatcgaccaagcgtgagatcaagttaatttgagctttcctgtatctctaactggtataatatcggtgtggcttccgaccgtaatatttcggatacggccccgaataacctcatgccgttacaggagcaatatatctttgccacaacacattcagtttcgcccagcgcagatctcaggccatctttatatagataaactttacgcataccaccatgtagtttttgtttacctgaagactaaaaaacatgcagccctaataccagagcggagtgacgctacatcatctacgaagcatagtgcaacctccatgagactcatcgaagagggatcgaagtatcgtgatttgattaaagctttcacatctaactcattagagcactcttgcgatgatgggcattgcactgtctggcagaaatcattgcatctgcaaaggctacctcttcgaggatatgcgtatagcagtagcgagctaaagtgttcatcgtgtcaacgcagcttcgaatagtcattttatatggtagtagattctgttttcctttaatttcatgagactctttcatatccgtgcagctcttcgtgcatttcgagcggcgtctttgctgatgcaccaatatcacattcctgatggtatgcctggaatgcttgcgccagggtacacctgccagctccccccgtgccttatttctaactgcatttgaacaattcagcaaagcaagaatacttttcacttagtctttccggctggaagcgccgatacaatcttaaactcc

SEQ ID NO: 25270 - DNA, 1509 bp, Muscodor strobelii
  misc_feature: SGI cDNA ID NO. 568624
  misc_feature: Encodes the peptide sequence at SEQ ID NO 25271
atgcgcttgaattcacttcttacgctggcaagctgtgctagcaccggcctttcagggtctatcctcctctcgggcggtaccatcattgcttgggacgagggaggtcagtctctcaacgtaattcgcgatggctcgcttctcgtcaccgaagacaaaatcgccgggatctatcacgaagcaagccccaagggtctaccaaaggataccgagctcttagactgcacacacaagatcatctctcctggattcatcgatacacatcgtcacggatggcaaacggcaatgaagacgttagcgtctaacactacattggctgactacatgtatcgatggtcaagtggtgccgcaggccccttttacacagtagaggatgtgtatatcggccagatggctgcgctgctcgagggcctgaacgccggtgtcacaacgactctagaccatgcacatagtctgtggtcgacagaccgtggtgtcgcggggctcgatgcgtcgattgacagcggtgcgagagtcgtctgggccgctgctatctcgccgtttgaaggatatagtgtgaaggaccagattaaggattataggtcgtggaggaagcagaaggtcaaaaagggaggactcgtttctttgggcattgggtatgactggtgggattctgacaatcacgaagataccaaggctgttgtcaagctcgtgaaagaaggagaggcggatgttctgacgattcactggcttggacacgcctggcaaatggaaagcccaccatcgctcctccatagccacggcgtactcacaacctccacgccggtggtgttctcccacggaccgggcataacggccaaggaagcccggatccttcgggacaccaaccaatttctgtccatcacgcccgagtcggagatgcattatggtcactaccacgagttctcgcacctggctcaggatcaggcggcgcttggtgtcgacacgcattttacattctcgacggatttactgacgcaagcgagattgtggctccagcgtacgagaagtcgactgtttgatgaggttatcaagagatgggagataccgagacggagccccatgtcggtaaatcaagccttcctccttagtacacgacaaggcgctctcgccctccgacgccctgacctcggtatcatcgcacctggtgccaaagctgatctcgtcgtctttgatggacgatcaccgagcttgctaggttgggttgatcccgttgccgcactcatcttgcacgcgaatgtgggcgatatcgtacatgtactcgttgacggcgtgtttcagaaacgcgatgggaaactcctatacaagaactatgaggacgttatcgagcggttggagaagtctgcggaagggttgagggaaagattgttgagcaggccggagccggacttcgggacgaggatgctggggattgggagtggatatgagaaacatgtgaaggatatgaaggtattaaggggtgaggactcgggttatggcgggttatttttgtga

SEQ ID NO: 25271 - protein, 502 aa, Muscodor strobelii
  misc_feature: SGI Peptide ID NO. 568624
  misc_feature (78)..(397): Pfam Id: PF01979 Pfam Desc: Amidohydrolase family
  misc_feature (356)..(397): Pfam Id: PF01979 Pfam Desc: Amidohydrolase family
  misc_feature (78)..(147): Pfam Id: PF01979 Pfam Desc: Amidohydrolase family
  misc_feature (352)..(395): Pfam Id: PF07969 Pfam Desc: Amidohydrolase family
  misc_feature (1)..(502): NCBI GI: 256725429 Blast Desc: NECHADRAFT_45723 [Nectria haematococca mpVI 77-13-4]
  misc_feature (22)..(480): NCBI GI: 46116102 Blast Desc: FG03893.1 [Gibberella zeae PH-1]
  misc_feature (18)..(497): NCBI GI: 159128256 Blast Desc: amidohydrolase family protein [Aspergillus fumigatus A1163]
  misc_feature (18)..(497): NCBI GI: 146323215 Blast Desc: amidohydrolase family protein [Aspergillus fumigatus Af293] gi|129556522|gb|EAL86563.2| amidohydrolase family protein [Aspergillus fumigatus Af293]
  misc_feature (5)..(502): NCBI GI: 189198962 Blast Desc: amidohydrolase family protein [Pyrenophora tritici-repentis Pt-1C-BFP] gi|187982917|gb|EDU48405.1| amidohydrolase family protein [Pyrenophora tritici-repentis
  misc_feature (3)..(502): NCBI GI: 171680038 Blast Desc: protein product [Podospora anserina] gi|170939645|emb|CAP64872.1| protein product [Podospora anserina]
  misc_feature (3)..(497): NCBI GI: 256725833 Blast Desc: NECHADRAFT_44083 [Nectria haematococca mpVI 77-13-4]
  misc_feature (5)..(498): NCBI GI: 145606578 Blast Desc: MGG_02243 [Magnaporthe grisea 70-15] gi|145014198|gb|EDJ98839.1| MGG_02243 [Magnaporthe grisea 70-15]
  misc_feature (1)..(497): NCBI GI: 256722359 Blast Desc: NECHADRAFT_44376 [Nectria haematococca mpVI 77-13-4]
  misc_feature (19)..(497): NCBI GI: 70981762 Blast Desc: chlorohydrolase family protein [Aspergillus fumigatus Af293] gi|66844032|gb|EAL84372.1| chlorohydrolase family protein, [Aspergillus fumigatus Af293]
  misc_feature (40)..(460): SWISSPROT Homolog: EC 3.5.4.28 S-adenosylhomocysteine deaminase
MRLNSLLTLASCASTGLSGSILLSGGTIIAWDEGGQSLNVIRDGSLLVTEDKIAGIYHEASPKGLPKDTELLDCTHKIISPGFIDTHRHGWQTAMKTLASNTTLADYMYRWSSGAAGPFYTVEDVYIGQMAALLEGLNAGVTTTLDHAHSLWSTDRGVAGLDASIDSGARVVWAAAISPFEGYSVKDQIKDYRSWRKQKVKKGGLVSLGIGYDWWDSDNHEDTKAVVKLVKEGEADVLTIHWLGHAWQMESPPSLLHSHGVLTTSTPVVFSHGPGITAKEARILRDTNQFLSITPESEMHYGHYHEFSHLAQDQAALGVDTHFTFSTDLLTQARLWLQRTRSRLFDEVIKRWEIPRRSPMSVNQAFLLSTRQGALALRRPDLGIIAPGAKADLVVFDGRSPSLLGWVDPVAALILHANVGDIVHVLVDGVFQKRDGKLLYKNYEDVIERLEKSAEGLRERLLSRPEPDFGTRMLGIGSGYEKHVKDMKVLRGEDSGYGGLFL

SEQ ID NO: 25272 - DNA, 2905 bp, Muscodor strobelii; identical to SEQ ID NO: 25269
  misc_feature: SGI EST ID NO. CUFF.59389.0
  misc_feature: Variant of the nucleotide sequence at SEQ ID NO 25270

SEQ ID NO: 25273 - DNA, 258 bp, Muscodor strobelii
  misc_feature: SGI cDNA ID NO. 568625
  misc_feature: Reduced expression when VOC is produced
  misc_feature: Encodes the peptide sequence at SEQ ID NO 25274
accgagccccccttcgaccgccacgactggttcgtctcgcgcgacgtcgacggccagcgcaaggagatccgctacgtcatcgactactactcgggcggcgaggagcccaccggcgagcccatcttctacctcgacgtccgccccgccgtcacccccacacaggcctgcgagcgcgccctgcgctggggctgcgacgtctggtggagggccaagggtggcgacattcgcgagcgtaccgcagcagactcccggcagtag

SEQ ID NO: 25274 - protein, 85 aa, Muscodor strobelii
  misc_feature: SGI Peptide ID NO. 568625
  misc_feature (1)..(65): Pfam Id: PF01265 Pfam Desc: Cytochrome c/c1 heme lyase
  misc_feature (1)..(85): NCBI GI: 116201685 Blast Desc: CHGG_08727 [Chaetomium globosum CBS 148.51] gi|88177245|gb|EAQ84713.1| CHGG_08727 [Chaetomium globosum CBS 148.51]
  misc_feature (1)..(78): NCBI GI: 85098037 Blast Desc: NCU05601 [Neurospora crassa OR74A] gi|115943|sp|P14187.1|CCHL_NEUCR RecName: Full=Cytochrome c heme lyase; Short=CCHL; AltName: Full=Holocytochrome-c synthase c heme
  misc_feature (1)..(82): NCBI GI: 154299007 Blast Desc: cytochrome c heme lyase [Botryotinia fuckeliana B05.10] gi|150857519|gb|EDN32711.1| cytochrome c heme lyase [Botryotinia fuckeliana B05.10]
  misc_feature (1)..(77): NCBI GI: 171678050 Blast Desc: protein product [Podospora anserina] gi|170937094|emb|CAP61752.1| protein product [Podospora anserina]
  misc_feature (1)..(72): NCBI GI: 156058085 Blast Desc: SS1G_04774 [Sclerotinia sclerotiorum 1980] gi|154702559|gb|EDO02298.1| SS1G_04774 [Sclerotinia sclerotiorum 1980]
  misc_feature (1)..(78): NCBI GI: 39941392 Blast Desc: MGG_05607 [Magnaporthe grisea 70-15] gi|145022290|gb|EDK06310.1| MGG_05607 [Magnaporthe grisea 70-15]
  misc_feature (1)..(77): NCBI GI: 261361041 Blast Desc: cytochrome c heme lyase [Verticillium albo-atrum VaMs.102]
  misc_feature (1)..(78): NCBI GI: 256733448 Blast Desc: [Nectria haematococca mpVI 77-13-4]
  misc_feature (1)..(79): NCBI GI: 121714291 Blast Desc: cytochrome C1 heme lyase [Aspergillus clavatus NRRL 1] gi|119402910|gb|EAW13330.1| cytochrome C1 heme lyase [Aspergillus clavatus NRRL 1]
  misc_feature (1)..(77): NCBI GI: 258577807 Blast Desc: cytochrome c heme lyase [Uncinocarpus reesii 1704] gi|237903351|gb|EEP77752.1| cytochrome c heme lyase [Uncinocarpus reesii 1704]
  misc_feature (1)..(78): SWISSPROT Homolog: EC 4.4.1.17 Holocytochrome-c synthase
  misc_feature: Useful for introducing or modulating the production of volatile compounds
TEPPFDRHDWFVSRDVDGQRKEIRYVIDYYSGGEEPTGEPIFYLDVRPAVTPTQACERALRWGCDVWWRAKGGDIRERTAADSRQ

SEQ ID NO: 25275 - DNA, 3100 bp, Muscodor strobelii
  misc_feature: SGI EST ID NO. CUFF.59575.1
  misc_feature: Variant of the nucleotide sequence at SEQ ID NO 25273
cgcacatatgctgatgtcctaactatcgtcatgcagcaccgagccccccttcgaccgccacgactggttcgtctcgcgcgacgtcgacggccagcgcaaggagatccgctacgtcatcgactactactcgggcggcgaggagcccaccggcgagcccatcttctacctcgacgtccgccccgccgtcacccccacacaggcctgcgagcgcgccctgcgctggggctgcgacgtctggtggagggccaagggtggcgacattcgcgagcgtaccgcagcagactcccggcagtagacagtcggtgctggatatgtcagatataccgccatcagacttgggcccctggactggaaactggacacgccattgtattataagatcgtttggttgggagttcagggcatcgctactaccttatatcatacaactagggaatgtgtttgcgactggccagacttggctaacttgtatatctttacctgccgaggcgacgaccctcgtgacgcatcacgactcttgcacgctttacaattaatgttactacattttaatgtcccaagttgctttacttaggtacttacaaccatgataggtcacgctggactgcatgtgtcggtgtttctacgcatttgacatctgtcatttgctagtatagcttttcgaccctgtagtgtataaacgcacgaccagggaaggtcgtgtttccgcaattgccactgcaatgtgttgattcccaagaaaatctgaacttggacaacaaaccaagccctcgcgaccgaaatggccctgtgactactccatgttgcctacaggacgtgttcaatctcgagttcgcatcaatctgctaagcaccagtacacgccagcacacgcgcctgaggttcgtgtactgtatcatcgtatatgacactcacgggcttcggcactcctgagaattcggataaaatgtaactgaagatcagatcagcagatcgactataagtttcatgtgttatgcggggatcaagaagatcttttcaatcctcggtccgttcccatgacgagcatgattggcataggcatgtttacagagaaccgctggttccagaggtgtgaattggtggtatggcgcagttacaattgctcgcatcatctactatcaccccaatttgtgaatcagtatgcctctcatcatatgtacctatgtcccaccgggccttttcatcacttgccaattcagggtccgccctctagaggggaaagcatcgattccaggtcccccaagccgtaattccaaacgcaccaaccagaatcccggtcgctatcccaatctggtgaatctattcccgggaaacaattaactgtgcatattgccaaagaccctgtcgtccgcactcatcggctctgacttactctccgactacaacgtgtccataatttttatatgtatcatgaccgttagggaagcggccgaaactcacttatctgacgttatactcatatgtagtacggaacagcgtggtctgaacagttcggacgagaggcgcattccatgaattaaggctcgtcacgttttaactgaatcgctgcttgtttcgagtgttgtcgcaccacacctcccttacacgatggcttcgtagtggtccgacctgttaccgtacctctcgttcaatcacgactcttaaaccgagcgtcactgcgactcgaatgcgcacatgggaatagaacttcaacacatattctcagacacactgaccctctgctgtcattccattgtcattgattcctattgaaaaagcgataacaacctcacctcggttgcggttctgcgcatcatacgtacctattacgcacgtatttctcgctgcgcgagacttttgccctgagacgtaaagtcgacacttgtcgcgcttcattaggcagcgcaattctgtcctattcttacagttatcgtctctcgaatgaggtcaacgttcatcgaacttgatcttctgaagccctaaacttatatacgcaattgatgcatctcgtccagcactgagacggtgggagggaaggaaaggtaagccagtgacctcactccttaaatccatctccgcgatggttgtcttcgccgtgtttcgcatctttttgacatgctggccgtcatgtagtccctgttcagtatatcgttgtcaaatctaagatctcgaaactgacacggacaagctttcatcttcaccgcagaaacctacccagtagccaccgaagcccgccagttccatcgaggaacaacaagatgttcctaacacaaaacccccaagccataccacacttcgggttcgatctatcccggttcttgcacctcgacctagatcgcaaattgcgtgcccacggcctgaccgtccttgacggtttctggattacactcgtctgtatcgaggccgccatcatcgtgtgcgtcctcgtgcggcgcgggctgcaggcgaggcggcgcaaggcgaataggagtcgagtgctttcaatttcggggttaccttgttatcagtaacccgtctcttggacgcccgagtgatcttgagacagagtaaagatgttctctgggcgatagtgtttgaaagtaacaccgtgacaggatattcaagatgtctgtcgagagagtggaaattcattagcagtcggaatgagcatcgccattgccattgctctcgataaacggagcctattaggatttcgtcgaaactctacgctacatcacgcgaaacttgctgatacatgcgaaacgtcgtctacagttggaactgatcaccaagcgcagatgcgtctctcgcgctcggcagctacagttggctggtcctgtggctggtcctatgggcgagttgcatgatttatcagacacatacttgtttgatatgaaatttgctatccactgagtgactgtctaagtccggaggtagcttgggggagaacacggatatatgttcgaagcggcgtgccgtagccgcaaccggctccgagccacgcggcgtttgcggaggatagaatcagaaactaaggtaccttactctgtccatgagcttagttcgtcctagaatgtaaaccattgtcttgacatacactattctagttcattgatcaccta

SEQ ID NO: 25276 - DNA, 1299 bp, Muscodor strobelii
  misc_feature: SGI cDNA ID NO. 568626
  misc_feature: Reduced expression when VOC is produced
  misc_feature: Encodes the peptide sequence at SEQ ID NO 25277
atggccagcacagtactctgccgcaatatggacaactctacattggtgggactaccacttgaactcttgtttcaaatcacgtcatacttggaagaacgagacatcagatccttgcgcctggcatccagggttcttgaagatgtcacattcgagtctttcgcgcgcaagcatttctctcaagtacagattcatcgctcaaactccagccttcagaggctaatcgacatgtctaactctcatcttcgcccatatatcaaacaagtctggttaggcgctgcaatcgtggattcgtcgccagggaagactgcagaagatcgacgtatgcttgcgcaggcgttttccaaactggatctcgaaacgatcggattggtagatcatatttcaccctcatggtcttccagctcggtcactccttcgtgggacttcaccgggtcgtttagggcgctggtcggagcggcggttgatgcgaaaatcagccctcgagtttttgatacaggattcgatttctacacggataacatgctggattgccttccacgccaaaggggtgtcagcgatccattctgcgtcaacttacgagagctacatattcaattgtacctgactagaaagaatcgaaggactccaaattggacggataagatttgcgattttctaggccgcatcccccatttgaaggttctccacttagaagtgaaggaagattactgcaaatcagaagcggaaaaggtttggcagatttcacattggctgggccgagcattacccctccacgatcagcccaatcatgccatcgcctcgccttcgaaactgaatcaaataaccaatttgaagctatcgatgaccggagtatgcatgggcgacctactggccatcacggataaattttcaggaaccttaaagagcctggagcttgacggcgtatggttccgtaacgcaaacgctcatagctggatgacattcctcgacggacttctgtcgcaattaacgcgaaatcggctgaaattgaacgagatagacatcaaaacaggacgcccgagcagcagggatggaagattctacttctaccggcaaaaccactcatatcaccaatgtcgattcttctacaaaggtagagatgcaattagggcggttgcgtacttggtcagctacatgagatatcgaagcgagtcgcgcgacttgagcgacgagattgacatccccaaaccagagcctgcttttagagggaaatggatcttctatgacagctggcaacacgaagagcaagagcttatctgcgacagttcatcgagcgactag

SEQ ID NO: 25277 - protein, 432 aa, Muscodor strobelii
  misc_feature: SGI Peptide ID NO. 568626
  misc_feature (13)..(312): NCBI GI: 116198663 Blast Desc: CHGG_07487 [Chaetomium globosum CBS 148.51] gi|88178766|gb|EAQ86234.1| CHGG_07487 [Chaetomium globosum CBS 148.51]
  misc_feature (13)..(305): NCBI GI: 189209143 Blast Desc: conserved [Pyrenophora tritici-repentis Pt-1C-BFP] gi|187976997|gb|EDU43623.1| conserved [Pyrenophora tritici-repentis Pt-1C-BFP]
  misc_feature (15)..(325): NCBI GI: 85104200 Blast Desc: NCU01081 [Neurospora crassa OR74A] gi|18376194|emb|CAD21310.1| [Neurospora crassa] gi|28923241|gb|EAA32457.1| [Neurospora crassa OR74A]
  misc_feature (2)..(308): NCBI GI: 256731552 Blast Desc: NECHADRAFT_49371 [Nectria haematococca mpVI 77-13-4]
  misc_feature (18)..(159): NCBI GI: 261357962 Blast Desc: conserved [Verticillium albo-atrum VaMs.102]
  misc_feature (15)..(325): NCBI GI: 46123091 Blast Desc: FG05923.1 [Gibberella zeae PH-1]
  misc_feature (13)..(145): NCBI GI: 169598890 Blast Desc: SNOG_02254 [Phaeosphaeria nodorum SN15] gi|111069346|gb|EAT90466.1| SNOG_02254 [Phaeosphaeria nodorum SN15]
  misc_feature (14)..(208): NCBI GI: 145252832 Blast Desc: An16g06250 [Aspergillus niger] gi|134083484|emb|CAK46961.1| protein product [Aspergillus niger]
  misc_feature: Useful for introducing or modulating the production of volatile compounds
MASTVLCRNMDNSTLVGLPLELLFQITSYLEERDIRSLRLASRVLEDVTFESFARKHFSQVQIHRSNSSLQRLIDMSNSHLRPYIKQVWLGAAIVDSSPGKTAEDRRMLAQAFSKLDLETIGLVDHISPSWSSSSVTPSWDFTGSFRALVGAAVDAKISPRVFDTGFDFYTDNMLDCLPRQRGVSDPFCVNLRELHIQLYLTRKNRRTPNWTDKICDFLGRIPHLKVLHLEVKEDYCKSEAEKVWQISHWLGRALPLHDQPNHAIASPSKLNQITNLKLSMTGVCMGDLLAITDKFSGTLKSLELDGVWFRNANAHSWMTFLDGLLSQLTRNRLKLNEIDIKTGRPSSRDGRFYFYRQNHSYHQCRFFYKGRDAIRAVAYLVSYMRYRSESRDLSDEIDIPKPEPAFRGKWIFYDSWQHEEQELICDSSSSD

SEQ ID NO: 25278 - DNA, 1913 bp, Muscodor strobelii
  misc_feature: SGI EST ID NO. CUFF.59423.0
  misc_feature: Variant of the nucleotide sequence at SEQ ID NO 25276
cccgcatgatcatgtgatcagccgtacagctgcactttccggatgttgccggtagatccacctaccatcgtatatacagtcactgccaccccaagctgcctctggtcacatctagtctcagcacacattctatgctgacatgatcacaacaatcatagatcttctgtactagaacggtcttagaccccatcacgtgacaacctgaacaaccggagaattatcaacaactagagggtgcagaagccgattatggccagcacagtactctgccgcaatatggacaactctacattggtgggactaccacttgaactcttgtttcaaatcacgtcatacttggaagaacgagacatcagatccttgcgcctggcatccagggttcttgaagatgtcacattcgagtctttcgcgcgcaagcatttctctcaagtacagattcatcgctcaaactccagccttcagaggctaatcgacatgtctaactctcatcttcgcccatatatcaaacaagtctggttaggcgctgcaatcgtggattcgtcgccagggaagactgcagaagatcgacgtatgcttgcgcaggcgttttccaaactggatctcgaaacgatcggattggtagatcatatttcaccctcatggtcttccagctcggtcactccttcgtgggacttcaccgggtcgtttagggcgctggtcggagcggcggttgatgcgaaaatcagccctcgagtttttgatacaggattcgatttctacacggataacatgctggattgccttccacgccaaaggggtgtcagcgatccattctgcgtcaacttacgagagctacatattcaattgtacctgactagaaagaatcgaaggactccaaattggacggataagatttgcgattttctaggccgcatcccccatttgaaggttctccacttagaagtgaaggaagattactgcaaatcagaagcggaaaaggtttggcagatttcacattggctgggccgagcattacccctccacgatcagcccaatcatgccatcgcctcgccttcgaaactgaatcaaataaccaatttgaagctatcgatgaccggagtatgcatgggcgacctactggccatcacggataaattttcaggaaccttaaagagcctggagcttgacggcgtatggttccgtaacgcaaacgctcatagctggatgacattcctcgacggacttctgtcgcaattaacgcgaaatcggctgaaattgaacgagatagacatcaaaacaggacgcccgagcagcagggatggaagattctacttctaccggcaaaaccactcatatcaccaatgtcgattcttctacaaaggtagagatgcaattagggcggttgcgtacttggtcagctacatgagatatcgaagcgagtcgcgcgacttgagcgacgagattgacatccccaaaccagagcctgcttttagagggaaatggatcttctatgacagctggcaacacgaagagcaagagcttatctgcgacagttcatcgagcgactagctgtatatttccccattcaacgttttccataattttgtgctctgtctcggggtttgatgccccggttatccctgtacaataagggctagtttgacgggaaacttgtactattggttatatggtggcactcagttttggagcgaaccaagaagcatagtgacgcggctctgcattggaagtatgatctatcccagggcatttaggaatcggatagcgaatagcaaataggcacataatgtttcaatcataatgaagtcttgtggcaccattcttagtcagacgtcggtcaagattgagggtctaattcagaagcaactattgttcttaatgtctcatcgtcccaaatccgcccaaatggcctccct

SEQ ID NO: 25279 - DNA, 2337 bp, Muscodor strobelii
  misc_feature: SGI cDNA ID NO. 568627
  misc_feature: Elevated expression when VOC is produced
  misc_feature: Encodes the peptide sequence at SEQ ID NO 25280
atggaggccgttgcagcgctgggagtagccagcaacgttgcccagtttatcgagtatgccatccttctggtaatcaagacgaacgaaatccacgcgagtcgcaattgcacgttgcacgatttcagacaccttgagactatcaccaatagcatagaatcctcattaggattcgtacagcagtcagattcgcaaagtgagggcgatagccgtgcaaacgacaaaaccctcaatgagctggtcaatgagtgctctatcgtatccgatgagatcctggagattgtcaatgagttgaagtcgataagtaacaatacaggcataattcgtagtgccgcgatagccgtgaagactttagcctcgaaacccaagatacaggaactctccgacaagttatacaagttacgggatcagatttcggcgcatttgattatattacttcgggaacagcaactacgccttggtgcaacattgcaggcaatgagtgcttctagtagcacttttcaaagagaagttgaacttcagcttcaaaaaattatccaatatctaaatgatatcgtagatcccgcatccgttcaggttgcatcaagcaagaaggcttcgtttcagaagaacaagcagaagcgccaaaaagctaagcgattggcagccttgtcggcgcgagaactcattagcgagcaactagcaattacaggaacaatcttttcggacaaccttgacgaatatgtcaaggatatgcgacgtttagagaaccagaagcaggaattcatcctgcagagtctaaatttcagccaagtcaaggaccgagaattcgcagtcaccgaggctcacaagaacacatttgaatggatattcgcagattctaccccgacaaatttcgtatcctggctccgagaagacaacggggtctattggatcagcggcaaacctgggtctggaaagtccacgctgatgaaattcctcgctgaccatcgcactgttcgtagccacctgaaagactgggctcacccaaaggatattataatcgccagacattatttttggaaccctggaacgcctcttcaaaagtctcaagagggactgtttcgaacccttctattccagatattacacgaaaggcctcattggatccccaaagtctgcagcgaacgctggaatagccattacagtaatgattccagtccatggagccgggccgaattgattaaggcagttgaaagcctagcagccctatcggaatctggatgcaagttctgctggttcatagacggtcttgacgagtacgatggcgaccatggtgagctaatcaacatgattcgcaaaatcaacagaatcgaaaatgtcaagatatgtgtctcgagtcgtccttggctcgacttctctgatgccttcgagagttcaagcagaaagctatacgttcatgatcttacacgcgatgatatttggcgtaccattcgagatacacttgaagacgacactcgtttcaaaaggctccgggaacgtgacgggtccacggctaatgaactgatctctcaaataactgaaagagctgacggtgtatttctctgggtatttcttgttgttcgttcgatactgcgaggtcttagaaacgaagatacattgtcagaccttcaacgccgacttttcgagtttccaagcgatctgcaaaagttctttgatcgcatgctcgcgacgatagaagacgtttatacaagaagagtcgcccgcttgtttctcacaatggcttgcgctaacacgtggttccctgtattctcgttcctattcatggatttcggagacgatttttactctcccgactcgcttctattcttggaaacctggccagatgttaacccctctgaagcggaggccctaggtactaagaagaggcagttgattgcgcaatgcagagatctcgtgttcgtaaaacccgatccaggtgcacccatcttatttgccgagagagtagatttcctccatcgaacagttattgatttcttccgtctgccggatacggaggccaagctattgactctggctggcgagcgcttcaaaccacagaaagttctcctcaatgcattcttacatcaaacaaagtcgatgattcatcagcatcatttgaactatatccagccatatttacgacattggatactcggtacactctactacgctctagagctagagaaggccagtgggaaggcggaggtcgaagcactcgatgaacttgaaactgcaatactcaaaatatacagtcgatggggatttgcgcacttcatggagagtcttctcaagatctcagacaagaagaaacggaattcgactggagagtttgtcgtctag

SEQ ID NO: 25280 - protein, 778 aa, Muscodor strobelii
  misc_feature: SGI Peptide ID NO. 568627
  misc_feature (1)..(708): NCBI GI: 256725921 Blast Desc: NECHADRAFT_82115 [Nectria haematococca mpVI 77-13-4]
  misc_feature (1)..(762): NCBI GI: 226293863 Blast Desc: conserved [Paracoccidioides brasiliensis Pb18]
  misc_feature (1)..(762): NCBI GI: 225684243 Blast Desc: conserved [Paracoccidioides brasiliensis Pb03]
  misc_feature (1)..(762): NCBI GI: 261190024 Blast Desc: conserved [Ajellomyces dermatitidis SLH14081] gi|239591250|gb|EEQ73831.1| conserved [Ajellomyces dermatitidis SLH14081]
  misc_feature (1)..(740): NCBI GI: 46111055 Blast Desc: FG02409.1 [Gibberella zeae PH-1]
  misc_feature (250)..(665): NCBI GI: 256728066 Blast Desc: NECHADRAFT_83494 [Nectria haematococca mpVI 77-13-4]
  misc_feature (2)..(757): NCBI GI: 255956529 Blast Desc: Pc21g20270 [Penicillium chrysogenum Wisconsin 54-1255] gi|211590728|emb|CAP96924.1| Pc21g20270 [Penicillium chrysogenum Wisconsin 54-1255]
  misc_feature (2)..(742): NCBI GI: 256730066 Blast Desc: NECHADRAFT_82694 [Nectria haematococca mpVI 77-13-4]
  misc_feature (1)..(745): NCBI GI: 145252046 Blast Desc: An16g02230 [Aspergillus niger] gi|134083079|emb|CAL00447.1| protein product [Aspergillus niger]
  misc_feature (2)..(654): NCBI GI: 169616506 Blast Desc: SNOG_11426 [Phaeosphaeria nodorum SN15] gi|160703200|gb|EAT81134.2| SNOG_11426 [Phaeosphaeria nodorum SN15]
  misc_feature: Useful for introducing or modulating the production of volatile compounds
MEAVAALGVASNVAQFIEYAILLVIKTNEIHASRNCTLHDFRHLETITNSIESSLGFVQQSDSQSEGDSRANDKTLNELVNECSIVSDEILEIVNELKSISNNTGIIRSAAIAVKTLASKPKIQELSDKLYKLRDQISAHLIILLREQQLRLGATLQAMSASSSTFQREVELQLQKIIQYLNDIVDPASVQVASSKKASFQKNKQKRQKAKRLAALSARELISEQLAITGTIFSDNLDEYVKDMRRLENQKQEFILQSLNFSQVKDREFAVTEAHKNTFEWIFADSTPTNFVSWLREDNGVYWISGKPGSGKSTLMKFLADHRTVRSHLKDWAHPKDIIIARHYFWNPGTPLQKSQEGLFRTLLFQILHERPHWIPKVCSERWNSHYSNDSSPWSRAELIKAVESLAALSESGCKFCWFIDGLDEYDGDHGELINMIRKINRIENVKICVSSRPWLDFSDAFESSSRKLYVHDLTRDDIWRTIRDTLEDDTRFKRLRERDGSTANELISQITERADGVFLWVFLVVRSILRGLRNEDTLSDLQRRLFEFPSDLQKFFDRMLATIEDVYTRRVARLFLTMACANTWFPVFSFLFMDFGDDFYSPDSLLFLETWPDVNPSEAEALGTKKRQLIAQCRDLVFVKPDPGAPILFAERVDFLHRTVIDFFRLPDTEAKLLTLAGERFKPQKVLLNAFLHQTKSMIHQHHLNYIQPYLRHWILGTLYYALELEKASGKAEVEALDELETAILKIYSRWGFAHFMESLLKISDKKKRNSTGEFVV

SEQ ID NO: 25281 - DNA, 7022 bp, Muscodor strobelii
  misc_feature: SGI EST ID NO. CUFF.59661.3
  misc_feature: Variant of the nucleotide sequence at SEQ ID NO 25279
ggggttcccgatctcgacacaaagcttgcggctgctcattgagaactagcgagaaaggcaccttctaacacctatcaccaccaatactatctgaatctaagaagtgttcattcgaacgggctgaagacatctggtcttgcctgggcctgcactcatactcgatctatatagacacacggggggtgtttatataacttatcgcacggttacaatgctgcggcaggctatcgccaagagtcgaaactcctcactcagcttagagtcagccgtcacagaccatagcaagctttccgggtgagatcacctcttatatcctgtctagaattaagcaaatgatctcaaactattctcaattagtgcccgagattgtgaatctctgcgggtcgcgactaatctgagcctcagagctagtcggcatctcaactcagagcttaacttgctgctgttaaccccgcgccgtcatctctgtcacagatatttattgtcactaactatggaggccgttgcagcgctgggagtagccagcaacgttgcccagtttatcgagtatgccatccttctggtaatcaagacgaacgaaatccacgcgagtcgcaattgcacgttgcacgatttcagacaccttgagactatcaccaatagcatagaatcctcattaggattcgtacagcagtcagattcgcaaagtgagggcgatagccgtgcaaacgacaaaaccctcaatgagctggtcaatgagtgctctatcgtatccgatgagatcctggagattgtcaatgagttgaagtcgataagtaacaatacaggcataattcgtagtgccgcgatagccgtgaagactttagcctcgaaacccaagatacaggaactctccgacaagttatacaagttacgggatcagatttcggcgcatttgattatattacttcgggaacagcaactacgccttggtgcaacattgcaggcaatgagtgcttctagtagcacttttcaaagagaagttgaacttcagcttcaaaaaattatccaatatctaaatgatatcgtagatcccgcatccgttcaggttgcatcaagcaagaaggcttcgtttcagaagaacaagcagaagcgccaaaaagctaagcgattggcagccttgtcggcgcgagaactcattagcgagcaactagcaattacaggaacaatcttttcggacaaccttgacgaatatgtcaaggatatgcgacgtttagagaaccagaagcaggaattcatcctgcagagtctaaatttcagccaagtcaaggaccgagaattcgcagtcaccgaggctcacaagaacacatttgaatggatattcgcagattctaccccgacaaatttcgtatcctggctccgagaagacaacggggtctattggatcagcggcaaacctgggtctggaaagtccacgctgatgaaattcctcgctgaccatcgcactgttcgtagccacctgaaagactgggctcacccaaaggatattataatcgccagacattatttttggaaccctggaacgcctcttcaaaagtctcaagagggactgtttcgaacccttctattccagatattacacgaaaggcctcattggatccccaaagtctgcagcgaacgctggaatagccattacagtaatgattccagtccatggagccgggccgaattgattaaggcagttgaaagcctagcagccctatcggaatctggatgcaagttctgctggttcatagacggtcttgacgagtacgatggcgaccatggtgagctaatcaacatgattcgcaaaatcaacagaatcgaaaatgtcaagatatgtgtctcgagtcgtccttggctcgacttctctgatgccttcgagagttcaagcagaaagctatacgttcatgatcttacacgcgatgatatttggcgtaccattcgagatacacttgaagacgacactcgtttcaaaaggctccgggaacgtgacgggtccacggctaatgaactgatctctcaaataactgaaagagctgacggtgtatttctctgggtatttcttgttgttcgttcgatactgcgaggtcttagaaacgaagatacattgtcagaccttcaacgccgacttttcgagtttccaagcgatctgcaaaagttctttgatcgcatgctcgcgacgatagaagacgtttatacaagaagagtcgcccgcttgtttctcacaatggcttgcgctaacacgtggttccctgtattctcgttcctattcatggatttcggagacgatttttactctcccgactcgcttctattcttggaaacctggccagatgttaacccctctgaagcggaggccctaggtactaagaagaggcagttgattgcgcaatgcagagatctcgtgttcgtaaaacccgatccaggtgcacccatcttatttgccgagagagtagatttcctccatcgaacagttattgatttcttccgtctgccggatacggaggccaagctattgactctggctggcgagcgcttcaaaccacagaaagttctcctcaatgcattcttacatcaaacaaagtcgatgattcatcagcatcatttgaactatatccagccatatttacgacattggatactcggtacactctactacgctctagagctagagaaggccagtgggaaggcggaggtcgaagcactcgatgaacttgaaactgcaatactcaaaatatacagtcgatggggatttgcgcacttcatggagagtcttctcaagatctcagacgtatgctcttttttagaactggcctgcagatgtgatctcgcctgttacgtcgaaacaaaacatccaagattcacctcacaagaccttgaccgaatttttccaatgtggagatccacactgaaagtcgaactcatgtcaagttttgaaatttttgctcaaaacgtagaagaagaaacggaattcgactggagagtttgtcgtctagcacaactcaacgagcggaatctcgtacaggctaattcgtcagagcccctgccattactgaattctttattcgataggatagattcgcgaacagatcagcagcaggataaccagattccgaatcggtgtaaaactaccgtgttttccagggcgctgaaaagaatcatttctcgacgatgaaggcaaacactagctaagtgacacagtaccagcggtcgcttagcttgccgtccaccggcgacctagccaagatgctcgggctgctgcatcaactctcgtgcctcacttttgttaccgtattgtctttactacactcctgtcgcggtagtttatacaattcagtactaggataaatatgaatcattcccatcgctatcagcatttgtcttgtccccgtagacaaagactgaaacactcagggcactcggtatggggaaatccttatcttatgacttgacagaaaatacagcacacttgtacaaacagaagggccttttgactcttggcgaaatcaaacttctacagcactcgtttcccaatatcaaaccgcaattacacttttgccgcaagagacgagcaacccaagcatacagccccccatattagcgatcgaccttcggcagtgaggccatgtgtacagcatacagtgcaatgcaacgctcttatcgaagctgagagaattgccacgtcgacctccatttccatgtttttctcggggttgcaaagaaaagcgcgtgtatccattgaaaagaacgcgattacattccgatcgcatgtgtcatacatcacctgcggcaaggtgcctttatcgatgaccaagtaactcatgtcgcgtgacctaaatctagtctggtctggtaccgcgcttctagtgcatatacacttgctgaagtatgcaatgactccaacccaaaaatggggagaccgtcgatttgatgttgcattggaaaacacgacgccgttggccaccccttatgtagtagattgccggatcaatcgtggaggctcggagaaggcatttcattgatccattttgaaagcaactgcaagtcccacagcatgccaatcccctacctcattctaataagtctatcgactctcctttctaacccccaaaatgactcaacaatattttttcactccgacatgaaaagcagctttgcatcatgatcttggacattaatagtcttaagcctgaggtgacataatgctccacctaggtagccacatctcccaacgccaaggagtgcaccgacagcagagttttcggtgttcagatccgttgtcactcaatgcgcaacatcacttccgttgaaataccggcaagtcatctctttgacgtagggtaaggggcgttgaggagttggagtatgatgtacagctgcatctggtaatgttttcctcgaatcaatttgacagcaagcgctctagaaacagctacgagacactatctcgtcagcgtatgcacaacggttaaatgtaatggaacccactgaaagcaaacatactgcctatctctgcgatttcttttgctgcctggttcgcttcgttagctacgcatgcacagaccaatgggaacgtagcgagccgagctctagtgccgtggcagattagcgagcgaaaagaaatatctaagctagcgtcaacacacctcgttccgagctcgttatcggtggaaggacaacgcgacgtgtcccagtatgtctcggcaagcgttcactgtatatctgttatcttgtcaatgcgacatatgaacagcactagtgagggggcctcgattcttagagagttgcaatcagaacttgataactgtcattcttagttctcctgcatgaatataccgattggctcaatctatgccaatcaaatcgctttgctcccgagtctgctgcacctttgagtcaatccgaataaagttcacgtagggaatagggacgttgaatgaaggcgcgaatgataccgttgtcgaagcaagcatcggaactaacgatatctggactagtagaaatttgaggcccctcagaggccccctcaacggccggtcaaggtgctgacatccgccatatggggacgtcgtcgatcccagttgcaatactgaactaacattgatggcaacttgactcttcgcaatatgcaaaacttagatagatgactataaaatacgaagttgaccagagtcaatttaagcgtgaataaatgcgaatagcaatgctcactttgttgtttgttgcatccaaacggtgcttagaactggagttagataccagtccgcctcatgagcatggaagttgagtcattagctaattggcatctcggcattctccatcccaaaccatttgtgtcgacgacataagtagatgggtcgggttgcagactggatcgtaaaatcttgcagcaaactgggtcgctttgatgcggaactttacgggtctttctagtcttgggacccaaaccccacgccaatttgctaggtaatgagccaagacaatgctttttcttaaagtcgtcgcatcagacgcgtccctaatcttccgcggagtattcgcagctccgcagttgtgaatgaaatgaatcaatccacatcgtggaccgccatcgaaacatcagaaccttatcagaggtcttgtccaagggtctcaggtgtcaggatacatttaccgacatataaagaggtccaagagcgcaacccttgtctgcatctgcacgtgttagcgaatgagacccgctaatcgcaatagggaaccatgcggtcggatatgactattcccatattttctgttagtgagatatcgagttagggggcttcttgcttacgaaaaagtcctcggacttctacgactcgtcgaccagcggagtcatcaatgcttttcgatactcgacacatataacgcacaagggcacttgccgaatgcatcggcagaagtaagctccgtcaccgacatatctaaaatttatgccaaatcgactgcatatcgactcacgtttcgatgaaactatgattgggaaagtctgcggctagtttctgagtcatcgtaattacggcaattgtgattggctgtatcaaagtgctctgcagggcgagacttctttgaccaaaatccgtgcatctccgcggagcgagcagcaattaatttaggggctcgagagtgggatgtcgtggtcccagctccatgggcctggagattgaactcctaatgcacacgatctactttagggacatgcctcctgagagcagccaagtgtgagttgcctcggtggctggatgtcggaggccgagatgtttcataccagcttgccgttccggaaatagaaagcttcttccgcgataagggtctttgcgtatgcacgttcggcacatacgatgcattccttcatcctttcactggatttcgaggcccgtttggtgtctctgtcagggtcttgtgccgcagaaccagatcacaaccgactgtggtttgttgctaaagcccgaaattgcttcatgcagcgtccaaaattggacctcgagttcagaagcttgaaaatatgtgttcgtatttcctcgtttctcgcaaagagacgttacatacagtagagcttgcgattctctcatgaggcgaattgagtacgcaaatatcgtgtactactatgatagacgacgtcgacctctataacatggcctatggagtcggtttagctagccccgtaagaccgagagtaaccctacttactgaattgcccatatatacaccaaatcacaattgcaattgaatattcttcgactcatgtgttcaatctgtcctaagtacttaggcgagagatctcaggaatagtatgccagctaagctgacaagatacccctacgcggttgacgcctcgcagtgacgtggatcaaatagtccactagatcctggccttccggggtatactagctttagccgccggtcgtgtcacgagggtcagaaagtgtgaccgcaatcgtaatgagtcttgtaacgctagccaatgaccctaatattatactgatgcaatgacgttccaacttgaa

SEQ ID NO: 25282 - DNA, 1677 bp, Muscodor strobelii
  misc_feature: SGI cDNA ID NO. 568628
  misc_feature: Elevated expression when VOC is produced
  misc_feature: Encodes the peptide sequence at SEQ ID NO 25283
atgagcttggaagttgccggctttgttgtcggcgccgtgggcctccttgctgcgttcaaaggagctctcgatacctgtcttctcattgaagcctttttcgacgatggtaagacaggctgtggctatctggcactccgttatcacatccagaagactcgcctcgatctttggcgacagatataccacattaatgaaccggagaaatgccccttgcgacacaaaccagaggtcgtgcagacggtggtgcttaatatcctcagcgaaattaccaggcaacttgacgatgctcagaagctagtcaagcggcatgacattaaaacagccagcgtcgcagcatctgccactacgagcgagaatacgaagaccagcgatgataaggtggcagccttatctagagtcattgtgaaacctaagtcgaggttcatgtggacaatcaagggaaaggaagagtttaaggaaagtgtctctaggataagggagctcgttgaccacctacacgagttcactgttgacggtccggatgcgaagtcgcttaatattgcgctaccgtctgtgagtttgaaaaacatctacaacctcgagctgcttcaaactcttcaagaccctgcaacaaaggtcgatgccgcattggccatgtcagctagggtcaaattgttacggagcaatttcgaacaagagccccccaagaactccgtgacgctacttacgaacaatgaagtcagatttctaaagaactcgactacattggcgactcttcgatcgcctgcagtcggctttacctcggtttggattgagtggactatcatcaaccaaggcgacgcatcggacgagtacgtcagacgcatcaaatcgctcggctcactgctcgaggccgcgagcgatgtggccctcagcataccagtatgctacggcatcttcgacgatctgagatacgaagctgaaaccgggtcgagaagactcggctacgtctttggcgcgccgcgcaacggatcctcgcaaactaccaaatcacccacgttcaaatacgaaggaaacttccgcgactatcctccctcgtctctgatcgaactaataagagactaccctcaaacaccaatcccaatgcttggtgaccgcttcgcgcttgcattcatgctagccaccgcctttagtcgctttcattgcgcagggtggctccacaagggcttccatagtggcaatattatcttcttatcgcgggattttggcaccgagaacagtgtttccatcaccgaccctttcattaccggcttccagtactcgagaccaaaatccgcacattccctttcgcgcggtccactggaaaatcaggaattggaacactactaccacccatcggctgacagcggattctcaagacgcacagacttgtatagtttaggtgtcgtgctatgcgagatcggtcgatgggagctagttggtgacaaagtatctgaacgcacgaagaataagatcgacggtcgacgaggatggcgcgattacatgatcaaaaaggtactcgccgatattggttggcgcatgggtgacaagtatcagagtgtagtgaggacattgctcgaatgtcgcttaccgggtgatgattctgatgatgatgacggactttttgaacaacagtattttgagaaggtgatacagccgctgagtgtatgttcggcatga

SEQ ID NO: 25283 - protein, 558 aa, Muscodor strobelii
  misc_feature: SGI Peptide ID NO. 568628
  misc_feature (251)..(525): NCBI GI: 46122419 Blast Desc: FG05587.1 [Gibberella zeae PH-1]
  misc_feature (4)..(525): NCBI GI: 256735230 Blast Desc: [Nectria haematococca mpVI 77-13-4]
  misc_feature (251)..(554): NCBI GI: 256729668 Blast Desc: [Nectria haematococca mpVI 77-13-4]
  misc_feature (3)..(525): NCBI GI: 170108352 Blast Desc: [Laccaria bicolor S238N-H82] gi|164639861|gb|EDR04130.1| [Laccaria bicolor S238N-H82]
  misc_feature (260)..(525): NCBI GI: 189204452 Blast Desc: conserved [Pyrenophora tritici-repentis Pt-1C-BFP] gi|187985660|gb|EDU51148.1| conserved [Pyrenophora tritici-repentis Pt-1C-BFP]
  misc_feature (262)..(526): NCBI GI: 169598560 Blast Desc: SNOG_02086 [Phaeosphaeria nodorum SN15] gi|160704421|gb|EAT90298.2| SNOG_02086 [Phaeosphaeria nodorum SN15]
  misc_feature (262)..(553): NCBI GI: 154311899 Blast Desc: BC1G_05983 [Botryotinia fuckeliana B05.10] gi|150850633|gb|EDN25826.1| BC1G_05983 [Botryotinia fuckeliana B05.10]
  misc_feature (262)..(553): NCBI GI: 156060491 Blast Desc: SS1G_02384 [Sclerotinia sclerotiorum 1980] gi|154699792|gb|EDN99530.1| SS1G_02384 [Sclerotinia sclerotiorum 1980]
  misc_feature (258)..(534): NCBI GI: 67901996 Blast Desc: AN7985.2 [Aspergillus nidulans FGSC A4] gi|40739598|gb|EAA58788.1| AN7985.2 [Aspergillus nidulans FGSC A4] gi|259480736|tpe|CBF73652.1| TPA: conserved [Aspergillus FGSC
  misc_feature (250)..(522): NCBI GI: 85086807 Blast Desc: NCU10557 [Neurospora crassa OR74A] gi|28918853|gb|EAA28522.1| conserved [Neurospora crassa OR74A]
  misc_feature: Useful for introducing or modulating the production of volatile compounds
MSLEVAGFVVGAVGLLAAFKGALDTCLLIEAFFDDGKTGCGYLALRYHIQKTRLDLWRQIYHINEPEKCPLRHKPEVVQTVVLNILSEITRQLDDAQKLVKRHDIKTASVAASATTSENTKTSDDKVAALSRVIVKPKSRFMWTIKGKEEFKESVSRIRELVDHLHEFTVDGPDAKSLNIALPSVSLKNIYNLELLQTLQDPATKVDAALAMSARVKLLRSNFEQEPPKNSVTLLTNNEVRFLKNSTTLATLRSPAVGFTSVWIEWTIINQGDASDEYVRRIKSLGSLLEAASDVALSIPVCYGIFDDLRYEAETGSRRLGYVFGAPRNGSSQTTKSPTFKYEGNFRDYPPSSLIELIRDYPQTPIPMLGDRFALAFMLATAFSRFHCAGWLHKGFHSGNIIFLSRDFGTENSVSITDPFITGFQYSRPKSAHSLSRGPLENQELEHYYHPSADSGFSRRTDLYSLGVVLCEIGRWELVGDKVSERTKNKIDGRRGWRDYMIKKVLADIGWRMGDKYQSVVRTLLECRLPGDDSDDDDGLFEQQYFEKVIQPLSVCSA

SEQ ID NO: 25284 - DNA, 2014 bp, Muscodor strobelii
  misc_feature: SGI EST ID NO. CUFF.59425.0
  misc_feature: Variant of the nucleotide sequence at SEQ ID NO 25282
gcatgcgccacgctgttccacagctggatgccccccaacagatgattgtctcgtctacgctaggcgtggcaagacgaagctacatagagaccgtctttggcagcttgatttgcaaggaaatgggtatatgccagcggtgtctgacagctcgggtccatgtatgctgaagaccatttcgtgtatcgaaacagtcagccttaaacacgtgcaagactcaatcaaaagcaaaataacgtgatgagcttggaagttgccggctttgttgtcggcgccgtgggcctccttgctgcgttcaaaggagctctcgatacctgtcttctcattgaagcctttttcgacgatggtaagacaggctgtggctatctggcactccgttatcacatccagaagactcgcctcgatctttggcgacagatataccacattaatgaaccggagaaatgccccttgcgacacaaaccagaggtcgtgcagacggtggtgcttaatatcctcagcgaaattaccaggcaacttgacgatgctcagaagctagtcaagcggcatgacattaaaacagccagcgtcgcagcatctgccactacgagcgagaatacgaagaccagcgatgataaggtggcagccttatctagagtcattgtgaaacctaagtcgaggttcatgtggacaatcaagggaaaggaagagtttaaggaaagtgtctctaggataagggagctcgttgaccacctacacgagttcactgttgacggtccggatgcgaagtcgcttaatattgcgctaccgtctgtgagtttgaaaaacatctacaacctcgagctgcttcaaactcttcaagaccctgcaacaaaggtcgatgccgcattggccatgtcagctagggtcaaattgttacggagcaatttcgaacaagagccccccaagaactccgtgacgctacttacgaacaatgaagtcagatttctaaagaactcgactacattggcgactcttcgatcgcctgcagtcggctttacctcggtttggattgagtggactatcatcaaccaaggcgacgcatcggacgagtacgtcagacgcatcaaatcgctcggctcactgctcgaggccgcgagcgatgtggccctcagcataccagtatgctacggcatcttcgacgatctgagatacgaagctgaaaccgggtcgagaagactcggctacgtctttggcgcgccgcgcaacggatcctcgcaaactaccaaatcacccacgttcaaatacgaaggaaacttccgcgactatcctccctcgtctctgatcgaactaataagagactaccctcaaacaccaatcccaatgcttggtgaccgcttcgcgcttgcattcatgctagccaccgcctttagtcgctttcattgcgcagggtggctccacaagggcttccatagtggcaatattatcttcttatcgcgggattttggcaccgagaacagtgtttccatcaccgaccctttcattaccggcttccagtactcgagaccaaaatccgcacattccctttcgcgcggtccactggaaaatcaggaattggaacactactaccacccatcggctgacagcggattctcaagacgcacagacttgtatagtttaggtgtcgtgctatgcgagatcggtcgatgggagctagttggtgacaaagtatctgaacgcacgaagaataagatcgacggtcgacgaggatggcgcgattacatgatcaaaaaggtactcgccgatattggttggcgcatgggtgacaagtatcagagtgtagtgaggacattgctcgaatgtcgcttaccgggtgatgattctgatgatgatgacggactttttgaacaacagtattttgagaaggtgatacagccgctgagtgtatgttcggcatgattttataagttagacaggcatatcttttctgtgtcgcctcattttcgtgctgtttaaagctgagtttcactccggtctaaatttaacaagtccacagagg

SEQ ID NO: 25285 - DNA, 5076 bp, Muscodor strobelii
  misc_feature: SGI cDNA ID NO. 568629
  misc_feature: Encodes the peptide sequence at SEQ ID NO 25286
atggacgtcctgaacgcggcgacaggattagagctaccctcaattgaacttcgtcaagccgaaatcgtccagtccgaggaagagcgacaaacgattgttctcggcagtggattgacgtcaaacgtcgtgcaatatgttatgtccgatcaagatccgatagagacatcgacagggaagattgtggctctgaagacctttacgcgccgttcatccggcaaggtagcgcgacaggcagtatacgagacgatcatgagagagctgggacttctgcggcaccctctcataattggacacccgaatatcgttcaactgcacttcatagggtggaggaaggcagaaccattcccggctctggcaatggagcacggagcgcatggttctctggactatctcatccgaagctcctgggcaggtctcaatgccgaccagatccacgcgacatgctgccacattactattgatattgccatgggcctgcacgcaatacaccgcgctggctatgttcacggcgatcttaagcctgaaaacatccttataatgagccatgacaaagcagaccgacgggttgtcgccaaactgactgattttggagggagttcaccgtatgcagcagagaagtccgaacaaccaatacacttcacccctttatggagtgctcctgaagttctcaaccaggaccccgacgtggactgggagaaggccgatgtgtattcgtttggtctggttgtcggaagtctgtgggccagtattcaggacaccggggggttcggatccggacgtttgagtcggcctagctcttgcttcttggtctcatatactcaagccatcatgtcacatcaggacgaagaggacatgttgtggtacttgaagacaaacccagacaccatatcgggtcaaagtgtcagctcactactccaagataagctcaaagtcgttctgccggaggacggaaacctcgtagttcagatttcgcatgttctgaaaccgacgctgaatgctcatttttggactcggtctgcggttgaagatgttggcgacagtttgaccgacgttggtgcactggtagcacgagatatcagacaagaaatgattgctccacgtcagagagatataaaaagtcgcgcgaaacagacactcggacccttttcttggaccagatcccgcgattatttctctatcttagttgaacaagcgactctagctctaaatgatagaaaagtctctgatagagacgtggtctctcaaatcgatatcccagagattctccccgaagagcttaacgccgatctaaagcagatggcagacgttgtcaaacaccttgccttcgggaacgacgctggcgaaacggccgcaagcacagaaacacgttggaaagataagggcagaagagccactctatcccgcttcatcgcattatcatcactagctgcagctaaaactccggcgaacctgaagaccctccaggacatgatgtacacatcggcaatggcaggagatggggcaactatgtgcttcgccgctctaatgttcaccagtactcctaaagagtcagagatgccgatacgctgtttcttatcgctacttgcgctttctcagtccaatcaggcttcccaacttcttcacacacggtggccagatcactataaggtagttcaagacatgatcaaattgaaaccttcagcgttcgcgaaagctgcgtcccagaccgctccagactcaagcccgtttatgctagaaacattgactacttacagtcgcgagccgatcctgaaacggcctttgacactgagagaagcacttgatctggggctgcttggtactgtacgcgatatcctagaaggtcagatggtccccgaggatctggacgtatctattgcagggttactacacggactgtcgagtctgcccgacatagaggcagcagctcttgttccgaaagccataataatgggtgccaagctatcattcctagcaccagcggggtctcccatcgctgcagacggcttcttccagcaggacggagatgacgaaaagtcgttctcgccattagctgctgctatcagacgtgggaaatctgcactcgcgctagaaatcctaacagctcacgtcgagtccgccgacgagccaatggttgacttcgatgaatcactggctcttagctgtacatatctgcagtatgaagttgccgatgctttgatttctcttcacagcactaatccaaacatttgtcaaaactcccaaaactttcaaacggactccgagacatttttctgggaactggctctagacatcatgaatcctgagcgatcgccccttcctgaactcgaaagaaggttcctctttggcccacagtacgatgatgcgtatgaaaaaacactgaaaatcatgctccattatatcatggatccttcggctggctctatggaaacgagtctgctggtcaacgctatacgcttggacgacgttattgcagtccgattgatagtggagacactcgagcgaaaaggcttcgacgtataccgacacttgaaagaccctagcaaccgtcataaagaccctcaagaagaagaactcgagatcacggggctagatatctgcgtattttttgatgctgttcaatcattcgaataccttttggagaagtttccatcattctcttccgagacttttccggaatctggtggcacgcttctgcatgaagcgtgtaatggcagagccagtattgacttcatcgaggcactccttcgatttggggcgcacggcactctcaagaacgatcgcgggcagagtccactatcgcaagccctttcgaggggcaacatcgacgcagcagatgctattgcgcgtcatttgtcagacgaggaaatcaaggtggctttggcgcaagatagtgatgagagatggtctgtgtgtttcacattgcttgcattatggtccaagtcaggacagccagaactagtcagaagcttccggtggctatcagagcatgacggactccatcaatttggacctaacgggatgccttcttggtatcctgtacttgccagtcctaggcctcattcacgtgcggaccagcgcctctgcttggagcttgtgaagctacttatgggcaagcacgatttcgaggcaaaagtatcctctgaaagatgggaaaacaaaacaatactgcatcacgcggtatcgaatgggcacattaaaatagtggagatgctactcgacaaggacgttgatgtcaatattggcgttgagtactcgggtgagcttccagatgacgtcccagcacacatatttgaccctagcaaagaccgccctaccgctctggacatcgtgtgtctcaagattggtgggctcggtgtgccaccggaggtcttaaaaggtggcttcatcgaaattcagaagtggaatgaagattttgaacagatccgagatctgttgatcgagaaaggagccaagagcaaggtcttagatgccatcatggggctagatttagatcactccgaaacccaacaatccttacgttttgctagtaatagctaccttcgcgatggtcaagcaatgacaggcgtgtggcctaagccgttggccgaaacggcaatgtccatcgtacccaaggcaacacgggaagatattcttgcagacatacgaatgagagacgaggcctttcacaacgttatgcgatcgcagctccagaagcgcgagatggaaaggcgccgagagcgagaaaaagagatcgcccctgctgattatttggaaacgatcagagcaggcgcaaaactcagacgctacgagtggcgacttccacctaactggcattgtcttagtatcaatgaggacgacgatgacaagcctggagatgtcagagtcttatacatgaaccgcaacactggcgagtgcacatacaacagaccggagcttttccgaggtccccaaaataagaaggccgatgtgcatgacccgctcgtgcaaagatcgggagacgctgtcgatcaagatacaacacctgacaccacacgcaaagatattcctaacattccagatctagccaatctcagtctaaatgacccgaaaccgccgctagagtctgctaatcagcccgagtccgttatcaaggatcaaatcaacgcttcgggcccccagtctgcagaggatgaattcttcacagcaatgacggaaaggggcctagtccaactccctcgcaattacatgcatctcaagcttgatgatggtagcaattggctacatatggcagcaattggtggcaaagcggactttctcgagtccatactcgaacagaacttgatccccatcgacagcgagcgacacgacggatgcactcctctgcacactgccgtggacgaaggtgccctaaaggttttggagcttcttctcagtctattgcaggacaataccaaaatggtgaacatactcatcgcgggtggcgcagacgtcaacgctactacggtggaggggtacgcgccactgcacttctgcatggccactggcgacaaacctgaatttatcgacgtcttattgaacgtcaaggccgatatcaacaggacctgtcgcgagggtaccgcgctcaaaatggccgtatcctatggccatcgacaaagcgtggccaagcttctcgacgctggtgctcgtgccgaagatgacgagttcttgttacacgcagcagcacgacaaggcgacatcgagatcgccagtcgtcttcttgacgccggattgggcgtcaacaagcgcaccgaaagccaatggacaccgatcatcgacgctgtagtgtacgaaaacttcgagatgctacgactactgtgcgagcggggcgctaatatctccgtcttagccgaggagtttcgattctttgtacgaagacgcgacgatggcaagatcgaccgcatgggtatgcatgtcggcaaaggggcagtagaactaactgcagagactctgaatgaagggatgccagaggcagagagaggctgggaggtgtgggaacctgtcagaattaccaaggcgaaaagcagcgaagcagatgaagaggaatcggaagctgaagaaggcaccaaagatgttgcgtaa

SEQ ID NO: 25286 - protein, 1691 aa, Muscodor strobelii
  misc_feature: SGI Peptide ID NO. 568629
  misc_feature (1442)..(1488): Pfam Id: PF00023 Pfam Desc: Ankyrin repeat
  misc_feature (1051)..(1083): Pfam Id: PF00023 Pfam Desc: Ankyrin repeat
  misc_feature (1551)..(1583): Pfam Id: PF00023 Pfam Desc: Ankyrin repeat
  misc_feature (53)..(243): Pfam Id: PF00069 Pfam Desc: Protein kinase domain
  misc_feature (1408)..(1613): NCBI GI: 189502738 Blast Desc: Aasi_1435 [Candidatus Amoebophilus asiaticus 5a2] gi|189498179|gb|ACE06726.1| Aasi_1435 [Candidatus Amoebophilus asiaticus 5a2]
  misc_feature (54)..(246): NCBI GI: 258569847 Blast Desc: [Uncinocarpus reesii 1704] gi|237903997|gb|EEP78398.1| [Uncinocarpus reesii 1704]
  misc_feature (1408)..(1613): NCBI GI: 123437955 Blast Desc: ankyrin repeat protein [Trichomonas vaginalis G3] gi|121891508|gb|EAX96837.1| ankyrin repeat protein, [Trichomonas vaginalis G3]
  misc_feature (1408)..(1619): NCBI GI: 221136677 Blast Desc: : similar to ankyrin 2,3/unc44, partial [Hydra magnipapillata]
  misc_feature (1402)..(1617): NCBI GI: 189502738 Blast Desc: Aasi_1435 [Candidatus Amoebophilus asiaticus 5a2] gi|189498179|gb|ACE06726.1| Aasi_1435 [Candidatus Amoebophilus asiaticus 5a2]
  misc_feature (1402)..(1613): NCBI GI: 123437955 Blast Desc: ankyrin repeat protein [Trichomonas vaginalis G3] gi|121891508|gb|EAX96837.1| ankyrin repeat protein, [Trichomonas vaginalis G3]
  misc_feature (1409)..(1611): NCBI GI: 268557970 Blast Desc: CBG09456 [Caenorhabditis briggsae] gi|187031835|emb|CAP29135.1| CBG09456 [Caenorhabditis briggsae]
  misc_feature (1407)..(1610): NCBI GI: 115754958 Blast Desc: : similar to ankyrin 2,3/unc44 [Strongylocentrotus purpuratus] gi|115945498|ref|XP_001193462.1| : similar to ankyrin 2,3/unc44 [Strongylocentrotus purpuratus]
  misc_feature (1392)..(1612): NCBI GI: 240109327 Blast Desc: ankyrin repeat containing protein [Coccidioides posadasii C735 delta SOWgp]
  misc_feature (1409)..(1612): NCBI GI: 189502738 Blast Desc: Aasi_1435 [Candidatus Amoebophilus asiaticus 5a2] gi|189498179|gb|ACE06726.1| Aasi_1435 [Candidatus Amoebophilus asiaticus 5a2]
MDVLNAATGLELPSIELRQAEIVQSEEERQTIVLGSGLTSNVVQYVMSDQDPIETSTGKIVALKTFTRRSSGKVARQAVYETIMRELGLLRHPLIIGHPNIVQLHFIGWRKAEPFPALAMEHGAHGSLDYLIRSSWAGLNADQIHATCCHITIDIAMGLHAIHRAGYVHGDLKPENILIMSHDKADRRVVAKLTDFGGSSPYAAEKSEQPIHFTPLWSAPEVLNQDPDVDWEKADVYSFGLVVGSLWASIQDTGGFGSGRLSRPSSCFLVSYTQAIMSHQDEEDMLWYLKTNPDTISGQSVSSLLQDKLKVVLPEDGNLVVQISHVLKPTLNAHFWTRSAVEDVGDSLTDVGALVARDIRQEMIAPRQRDIKSRAKQTLGPFSWTRSRDYFSILVEQATLALNDRKVSDRDVVSQIDIPEILPEELNADLKQMADVVKHLAFGNDAGETAASTETRWKDKGRRATLSRFIALSSLAAAKTPANLKTLQDMMYTSAMAGDGATMCFAALMFTSTPKESEMPIRCFLSLLALSQSNQASQLLHTRWPDHYKVVQDMIKLKPSAFAKAASQTAPDSSPFMLETLTTYSREPILKRPLTLREALDLGLLGTVRDILEGQMVPEDLDVSIAGLLHGLSSLPDIEAAALVPKAIIMGAKLSFLAPAGSPIAADGFFQQDGDDEKSFSPLAAAIRRGKSALALEILTAHVESADEPMVDFDESLALSCTYLQYEVADALISLHSTNPNICQNSQNFQTDSETFFWELALDIMNPERSPLPELERRFLFGPQYDDAYEKTLKIMLHYIMDPSAGSMETSLLVNAIRLDDVIAVRLIVETLERKGFDVYRHLKDPSNRHKDPQEEELEITGLDICVFFDAVQSFEYLLEKFPSFSSETFPESGGTLLHEACNGRASIDFIEALLRFGAHGTLKNDRGQSPLSQALSRGNIDAADAIARHLSDEEIKVALAQDSDERWSVCFTLLALWSKSGQPELVRSFRWLSEHDGLHQFGPNGMPSWYPVLASPRPHSRADQRLCLELVKLLMGKHDFEAKVSSERWENKTILHHAVSNGHIKIVEMLLDKDVDVNIGVEYSGELPDDVPAHIFDPSKDRPTALDIVCLKIGGLGVPPEVLKGGFIEIQKWNEDFEQIRDLLIEKGAKSKVLDAIMGLDLDHSETQQSLRFASNSYLRDGQAMTGVWPKPLAETAMSIVPKATREDILADIRMRDEAFHNVMRSQLQKREMERRREREKEIAPADYLETIRAGAKLRRYEWRLPPNWHCLSINEDDDDKPGDVRVLYMNRNTGECTYNRPELFRGPQNKKADVHDPLVQRSGDAVDQDTTPDTTRKDIPNIPDLANLSLNDPKPPLESANQPESVIKDQINASGPQSAEDEFFTAMTERGLVQLPRNYMHLKLDDGSNWLHMAAIGGKADFLESILEQNLIPIDSERHDGCTPLHTAVDEGALKVLELLLSLLQDNTKMVNILIAGGADVNATTVEGYAPLHFCMATGDKPEFIDVLLNVKADINRTCREGTALKMAVSYGHRQSVAKLLDAGARAEDDEFLLHAAARQGDIEIASRLLDAGLGVNKRTESQWTPIIDAVVYENFEMLRLLCERGANISVLAEEFRFFVRRRDDGKIDRMGMHVGKGAVELTAETLNEGMPEAERGWEVWEPVRITKAKSSEADEEESEAEEGTKDVA

SEQ ID NO: 25287 - DNA, 527 bp, Muscodor strobelii
  misc_feature: SGI EST ID NO. CUFF.59431.0
  misc_feature: Variant of the nucleotide sequence at SEQ ID NO 25285
agttctcaaccaggaccccgacgtggactgggagaaggccgatgtgtattcgtttggtctggttgtcggaagtctgtgggccagtattcaggacaccggggggttcggatccggacgtttgagtcggcctagctcttgcttcttggtctcatatactcaagccatcatgtcacatcaggacgaagaggacatgttgtggtacttgaagacaaacccagacaccatatcgggtcaaagtgtcagctcactactccaagataagctcaaagtcgttctgccggaggacggaaacctcgtagttcagatttcgcatgttctgaaaccgacgctgaatgctcatttttggactcggtctgcggttgaagatgttggcgacagtttgaccgacgttggtgcactggtagcacgagatatcagacaagaaatgattgctccacgtcagagagatataaaaagtcgcgcgaaacagacactcggacccttttcttggaccagatcccgcgattatttctctatcttagttgaac

SEQ ID NO: 25288 - DNA, 738 bp, Muscodor strobelii
  misc_feature: SGI cDNA ID NO. 568630
  misc_feature: Reduced expression when VOC is produced
  misc_feature: Encodes the peptide sequence at SEQ ID NO 25289
atgtcaacccgtatattccgccggacgtccctcctccagagcatctcacgacgctccataccgcggcaagcgcagccctcccgcatagcccgtcgaagctacgccagcggcggagatcctcacggagcggccaaagcctccggcgacctaccatggctcctaggatccctcggcatagcagtccccggcctaatcttcctctcctactccgccccgccaaagaagaagagccacaagcacagcgaggagcatgccgaagaccctcatcccactcccaaggactccaaagccgggactaagtctgacgaaagctcagaggatgattctgagcaggaagactcagactccaacgaaggcgaaggcgaagatgaagataagaaggatgacaaggaagggaaagaaaaagatggcaaagacgatagtaaagataataaggaagacaagaagaaaaaggacggtgagggtaagaacagcgatagtgataagaaggaaaagtcctcagccccaggaaacccaccaggacaagacgtcccgcccccatcgaaagatagctccgatctagcgacgaaatgggatgagaagaagggagagcaggaggatcataaggagatgataaagaagaaagaaacgaagcaagcctcatcctcttcatcggcccccaccaagaagaccagctccgaggaccctcgcgaggacccccagaagggcgagggcgaagctgttaatgtcaagaagtga

SEQ ID NO: 25289 - protein, 245 aa, Muscodor strobelii
  misc_feature: SGI Peptide ID NO. 568630
  misc_feature (5)..(164): NCBI GI: 240274730 Blast Desc: conserved [Ajellomyces capsulatus H143]
  misc_feature (11)..(164): NCBI GI: 154283009 Blast Desc: [Ajellomyces capsulatus NAm1] gi|150410480|gb|EDN05868.1| [Ajellomyces capsulatus NAm1]
  misc_feature (5)..(85): NCBI GI: 255956419 Blast Desc: Pc21g19710 [Penicillium chrysogenum Wisconsin 54-1255] gi|211590673|emb|CAP96868.1| Pc21g19710 [Penicillium chrysogenum Wisconsin 54-1255]
  misc_feature (5)..(86): NCBI GI: 238841461 Blast Desc: [Microsporum canis CBS 113480]
  misc_feature: Useful for introducing or modulating the production of volatile compounds
MSTRIFRRTSLLQSISRRSIPRQAQPSRIARRSYASGGDPHGAAKASGDLPWLLGSLGIAVPGLIFLSYSAPPKKKSHKHSEEHAEDPHPTPKDSKAGTKSDESSEDDSEQEDSDSNEGEGEDEDKKDDKEGKEKDGKDDSKDNKEDKKKKDGEGKNSDSDKKEKSSAPGNPPGQDVPPPSKDSSDLATKWDEKKGEQEDHKEMIKKKETKQASSSSSAPTKKTSSEDPREDPQKGEGEAVNVKK

SEQ ID NO: 25290 - DNA, 4178 bp, Muscodor strobelii
  misc_feature: SGI EST ID NO. CUFF.59820.0
  misc_feature: Variant of the nucleotide sequence at SEQ ID NO 25288
atgacgtcgggtataggtgacagcacccctgaacaccccactaagctcgagagctctggacagctcgggtgagctgcaggagcaagagctccgatgaatcatctgcagctaaggtagaagacagatgacaccacctcaccgatcctaccttgtcaagctccaacctcgccagccacccggatctaccctttgtttccagcgagccgaaactcaattgacttcaattgacttcatctcgtatcaccaattggacttccagctcgcgattatagtacggcaacgtatcaagaagctctatcatcctctgaaataccatactcagttgtctaaaggatccaataagctccggaacagccaattaatcctctattccccatacctcatcgagatgtcaacccgtatattccgccggacgtccctcctccagagcatctcacgacgctccataccgcggcaagcgcagccctcccgcatagcccgtcgaagctacgccagcggcggagatcctcacggagcggccaaagcctccggcgacctaccatggctcctaggatccctcggcatagcagtccccggcctaatcttcctctcctactccgccccgccaaagaagaagagccacaagcacagcgaggagcatgccgaagaccctcatcccactcccaaggactccaaagccgggactaagtctgacgaaagctcagaggatgattctgagcaggaagactcagactccaacgaaggcgaaggcgaagatgaagataagaaggatgacaaggaagggaaagaaaaagatggcaaagacgatagtaaagataataaggaagacaagaagaaaaaggacggtgagggtaagaacagcgatagtgataagaaggaaaagtcctcagccccaggaaacccaccaggacaagacgtcccgcccccatcgaaagatagctccgatctagcgacgaaatgggatgagaagaagggagagcaggaggatcataaggagatgataaagaagaaagaaacgaagcaagcctcatcctcttcatcggcccccaccaagaagaccagctccgaggaccctcgcgaggacccccagaagggcgagggcgaagctgttaatgtcaagaagtgattcttatcactagccataccggcaaggattgggctgtaataaacatgatggagtgccgctgtgcctcatgcagatcggacatgtgccttggtcccatagtgcctgatagagacgccaggagcacgcgttgcttgtttaatgaattatcgacatagccagactggtaaatcgggtactatagttagggacgagacttgaaggtcctagtgttagacttgctatctcaatgaagacaacataagatttgtcagaaactttgcatttttttttttaatggtgtctttctatgctcgttcttagacgagtcttgcaatgactagttacaaagcaacgcagtgccatgtatcgcaaattgtttcctcatatcctcctccatctatcaacaaattagggactctgcctcttttggtgtgtaatccgacaattagttgttacagttagacgaaggccaagcctaatcttttgcaaatcaatcaatcaatctcaagcatgagaggagtcggtgtctcttgccccgtgactccaaaacgtccatgtaccgtccgtaacaccgttgtgggcgtggggaaaatcaagtccctctctcttccagtgcagtccagctcagtctcgccaatgcaaatcatgccatcgaggccgtatgtgattaccgcggcttcgcaaacaaaacaaatgaaaaattatcgttgtgagttgtgatcaaaggtcgggtggtggttatagtaaaatgagctctttgtgcagtagccattcgactcgtctgcagcttccgggcatcatatgagaagctccagacacagatatcgtgcatcatcaaaatggaactgcattgagcctttcggactgagcttgacattatgtcggttttatgtagctacgttgtcgtcgttcgagtcgcaaatagaaacgatccgacttgctggcctgtgagtagagtggtaatgcgcagtaagtactcaaatttcagtctaagcagacgctagtaagcttgatataggagaagtggttcgccgacattctcgatctcgggtattgtgcacttcagatcgaaggccttagacagtacaatcttgaagatctgccaaaagtcagtaaaattcaaccctatggatttgcccctcccaagcaatattttaccttttgaacattgatgctgtggctggtactgctgaatatcaacgaagcgcgcattgccttggcgaatcgccgagcttggttcgatatctcctcttgctcttcgcgggagaagttgacgaaatggtcgtacttggtccccaccaaaacgggaatagccgtcttgttgaagcctcgtccctggcggtaccactccttgatactgttgagcgtgctctttctcgtcaggtcgaacatgaacaagatggcaaccgcatcgttgcagacgagcggcagcatgttgacgaactcgcgctggccgcctaagtcccaaatgctgaaggtgatctccgtgttacggatgctgatggtcttctccatgaaattgacccccaaggtctggatatagtcctcatcccagctcccctcgacatatttgaccattaatgacgtcttgccaatctgcgcgtcccctaccattccgaccttgatgacgacctcggcggggcgtgcgttggcctgctcggcgccattgctgccacggtcgctgtgagatgtgtgtctctcgcccccgtggcccgacatttgcgaagggggtctggatatggactgggggtggccgtgggctggtggggtctcgtaacgagcattggggtccactgcctcctcggaaccatggtgaccgtggttgctcaagccctgatctgactgcgagtgacggtggtagggctcatgaatctcgtggccgttgtgggcgagatcgacaatctcaggatgcggggagccgtcgagaccattcatggagtcgtcggggttctcgtgagccccgcctaggggtgcggcgtggagatctcggtccatggggtccatggtgtctacagcgtcgtgaaattggcccgcagacccggcagaaagcgttgacgaatccacggcgggcaagttgtgggtgtgcgatgaagtatagtcgttgagaagaagcggatcggatcggatcgtggagcagatttggggatctcagtcttggggcggctgagggccaaaagtgacaagagctgagtggaattcgcaatgacgctttagccgagacagcagaggaatgctccacgtgtgctagaggctatggcttgactaggcggagataggtgtgtcagttggttagagccttggagggtgctgattggagcagtgtctatctcgatcgagctgagtggtctgagacaaggcgaggcggaggcctgcaatgtagcagtggaggagagactgagtgggatgggggagtacggggagttgtagattagcaggcagagagaggggttgtgttgaggtgggctaggttcggaattacggacgacagctgcgagattgtgtgtctgcgcaggctgcgtcgaggcagttgtggtgagatgaaaatgggacagatgtgtgactgtagtcaagcgggcaacgtacctcgagacagacgcagacaccgactgtcgtcaggcaaatgaggtcaaaatgggattgtaatgcggaggcccgtttcgggtctagaaagcatgtggaagcactggaggtggtagatggcgccccaccgacccgacaattactggaacaagccaaacgggccagagacgggcgttgggcggttgacaaaacgatccgttcaagcttaccaacgttttcgatcgacggccagaaaacacgggccagtcggagatgttggcgagaggggatggaaatacgtgtaatgatgtggggtggaagaatcgaaagagggtgaacaagtacccacgatctcaagtaaacgaagagatacggctgaaatgtttcaatgctgcagcttccagtttaaagtgggaggtgtcacgtttcttgcaggttcatctcaattgtttatgcggaaggtccaaaacgtttacattcgcacctactccaacatagctgaacagctgctccg

SEQ ID NO: 25291 - DNA, 1002 bp, Muscodor strobelii
  misc_feature: SGI cDNA ID NO. 568631
  misc_feature: Encodes the peptide sequence at SEQ ID NO 25292
atgacaccacctcaccgatcctaccttgtcaagctccaacctcgccagccacccggatctaccctttgtttccagcgagccgaaactcaattgacttcaattgacttcatctcgtatcaccaattggacttccagctcgcgattatagtacggcaacgtatcaagaagctctatcatcctctgaaataccatactcagttgtctaaaggatccaataagctccggaacagccaattaatcctctattccccatacctcatcgagatgtcaacccgtatattccgccggacgtccctcctccagagcatctcacgacgctccataccgcggcaagcgcagccctcccgcatagcccgtcgaagctacgccagcggcggagatcctcacggagcggccaaagcctccggcgacctaccatggctcctaggatccctcggcatagcagtccccggcctaatcttcctctcctactccgccccgccaaagaagaagagccacaagcacagcgaggagcatgccgaagaccctcatcccactcccaaggactccaaagccgggactaagtctgacgaaagctcagaggatgattctgagcaggaagactcagactccaacgaaggcgaaggcgaagatgaagataagaaggatgacaaggaagggaaagaaaaagatggcaaagacgatagtaaagataataaggaagacaagaagaaaaaggacggtgagggtaagaacagcgatagtgataagaaggaaaagtcctcagccccaggaaacccaccaggacaagacgtcccgcccccatcgaaagatagctccgatctagcgacgaaatgggatgagaagaagggagagcaggaggatcataaggagatgataaagaagaaagaaacgaagcaagcctcatcctcttcatcggcccccaccaagaagaccagctccgaggaccctcgcgaggacccccagaagggcgagggcgaagctgttaatgtcaagaagtga

SEQ ID NO: 25292 - protein, 333 aa, Muscodor strobelii
  misc_feature: SGI Peptide ID NO. 568631
  misc_feature (93)..(252): NCBI GI: 240274730 Blast Desc: conserved [Ajellomyces capsulatus H143]
  misc_feature (94)..(252): NCBI GI: 154283009 Blast Desc: [Ajellomyces capsulatus NAm1] gi|150410480|gb|EDN05868.1| [Ajellomyces capsulatus NAm1]
  misc_feature (93)..(166): NCBI GI: 238841461 Blast Desc: [Microsporum canis CBS 113480]
  misc_feature (86)..(175): NCBI GI: 255956419 Blast Desc: Pc21g19710 [Penicillium chrysogenum Wisconsin 54-1255] gi|211590673|emb|CAP96868.1| Pc21g19710 [Penicillium chrysogenum Wisconsin 54-1255]
MTPPHRSYLVKLQPRQPPGSTLCFQRAETQLTSIDFISYHQLDFQLAIIVRQRIKKLYHPLKYHTQLSKGSNKLRNSQLILYSPYLIEMSTRIFRRTSLLQSISRRSIPRQAQPSRIARRSYASGGDPHGAAKASGDLPWLLGSLGIAVPGLIFLSYSAPPKKKSHKHSEEHAEDPHPTPKDSKAGTKSDESSEDDSEQEDSDSNEGEGEDEDKKDDKEGKEKDGKDDSKDNKEDKKKKDGEGKNSDSDKKEKSSAPGNPPGQDVPPPSKDSSDLATKWDEKKGEQEDHKEMIKKKETKQASSSSSAPTKKTSSEDPREDPQKGEGEAVNVKK

SEQ ID NO: 25293 - DNA, 4178 bp, Muscodor strobelii; identical to SEQ ID NO: 25290
  misc_feature: SGI EST ID NO. CUFF.59820.0
  misc_feature: Variant of the nucleotide sequence at SEQ ID NO 25291

SEQ ID NO: 25294 - DNA, 945 bp, Muscodor strobelii
  misc_feature: SGI cDNA ID NO. 568632
  misc_feature: Encodes the peptide sequence at SEQ ID NO 25295
atggaccccatggaccgagatctccacgccgcacccctaggcggggctcacgagaaccccgacgactccatgaatggtctcgacggctccccgcatcctgagattgtcgatctcgcccacaacggccacgagattcatgagccctaccaccgtcactcgcagtcagatcagggcttgagcaaccacggtcaccatggttccgaggaggcagtggaccccaatgctcgttacgagaccccaccagcccacggccacccccagtccatatccagacccccttcgcaaatgtcgggccacgggggcgagagacacacatctcacagcgaccgtggcagcaatggcgccgagcaggccaacgcacgccccgccgaggtcgtcatcaaggtcggaatggtaggggacgcgcagattggcaagacgtcattaatggtcaaatatgtcgaggggagctgggatgaggactatatccagaccttgggggtcaatttcatggagaagaccatcagcatccgtaacacggagatcaccttcagcatttgggacttaggcggccagcgcgagttcgtcaacatgctgccgctcgtctgcaacgatgcggttgccatcttgttcatgttcgacctgacgagaaagagcacgctcaacagtatcaaggagtggtaccgccagggacgaggcttcaacaagacggctattcccgttttggtggggaccaagtacgaccatttcgtcaacttctcccgcgaagagcaagaggagatatcgaaccaagctcggcgattcgccaaggcaatgcgcgcttcgttgatattcagcagtaccagccacagcatcaatgttcaaaagatcttcaagattgtactgtctaaggccttcgatctgaagtgcacaatacccgagatcgagaatgtcggcgaaccacttctcctatatcaagcttactag

SEQ ID NO: 25295 - protein, 314 aa, Muscodor strobelii
  misc_feature: SGI Peptide ID NO. 568632
  misc_feature (128)..(241): Pfam Id: PF08477 Pfam Desc: Miro-like protein
  misc_feature (128)..(293): Pfam Id: PF00071 Pfam Desc: Ras family
  misc_feature (128)..(241): Pfam Id: PF00071 Pfam Desc: Ras family
  misc_feature (4)..(313): NCBI GI: 38566780 Blast Desc: related to septum initiation protein sid3 [Neurospora crassa]
  misc_feature (50)..(313): NCBI GI: 164423258 Blast Desc: protein TEM1 [Neurospora crassa OR74A] gi|157070013|gb|EAA31435.2| protein TEM1 [Neurospora crassa OR74A]
  misc_feature (21)..(313): NCBI GI: 154298912 Blast Desc: septum-promoting GTP-binding protein 1 [Botryotinia fuckeliana B05.10] gi|150857608|gb|EDN32800.1| septum-promoting GTP-binding protein 1 [Botryotinia fuckeliana B05.10]
  misc_feature (17)..(312): NCBI GI: 240106977 Blast Desc: septum-promoting GTP-binding protein, [Coccidioides posadasii C735 delta SOWgp]
  misc_feature (4)..(313): NCBI GI: 189199684 Blast Desc: septum-promoting GTP-binding protein 1 [Pyrenophora tritici-repentis Pt-1C-BFP] gi|187983278|gb|EDU48766.1| septum-promoting GTP-binding protein 1 [Pyrenophora Pt-1C-BFP]
  misc_feature (76)..(313): NCBI GI: 145602494 Blast Desc: conserved [Magnaporthe grisea 70-15] gi|145010912|gb|EDJ95568.1| conserved [Magnaporthe grisea 70-15]
  misc_feature (33)..(313): NCBI GI: 242761774 Blast Desc: GTP binding protein (SPG1), [Talaromyces stipitatus ATCC 10500] gi|242761779|ref|XP_002340247.1| GTP binding protein (SPG1), [Talaromyces stipitatus ATCC 10500] GTP binding protein
  misc_feature (35)..(313): NCBI GI: 212529950 Blast Desc: GTP binding protein (SPG1), [Penicillium marneffei ATCC 18224] gi|210074530|gb|EEA28617.1| GTP binding protein (SPG1), [Penicillium marneffei ATCC 18224]
  misc_feature (86)..(312): NCBI GI: 119174895 Blast Desc: CIMG_09391 [Coccidioides immitis RS]
  misc_feature (21)..(313): NCBI GI: 171692925 Blast Desc: protein product [Podospora anserina] gi|170946411|emb|CAP73212.1| protein product [Podospora anserina]
MDPMDRDLHAAPLGGAHENPDDSMNGLDGSPHPEIVDLAHNGHEIHEPYHRHSQSDQGLSNHGHHGSEEAVDPNARYETPPAHGHPQSISRPPSQMSGHGGERHTSHSDRGSNGAEQANARPAEVVIKVGMVGDAQIGKTSLMVKYVEGSWDEDYIQTLGVNFMEKTISIRNTEITFSIWDLGGQREFVNMLPLVCNDAVAILFMFDLTRKSTLNSIKEWYRQGRGFNKTAIPVLVGTKYDHFVNFSREEQEEISNQARRFAKAMRASLIFSSTSHSINVQKIFKIVLSKAFDLKCTIPEIENVGEPLLLYQAY

SEQ ID NO: 25296 - DNA, 3604 bp, Muscodor strobelii
  misc_feature: SGI EST ID NO. CUFF.59821.1
  misc_feature: Variant of the nucleotide sequence at SEQ ID NO 25294
gttttggaccttccgcataaacaattgagatgaacctgcaagaaacgtgacacctcccactttaaactggaagctgcagcattgaaacatttcagccgtatctcttcgtttacttgagatcgtgggtacttgttcaccctctttcgattcttccaccccacatcattacacgtatttccatcccctctcgccaacatctccgactggcccgtgttttctggccgtcgatcgaaaacgttggtaagcttgaacggatcgttttgtcaaccgcccaacgcccgtctctggcccgtttggcttgttccagtaattgtcgggtcggtggggcgccatctaccacctccagtgcttccacatgctttctagacccgaaacgggcctccgcattacaatcccattttgacctcatttgcctgacgacagtcggtgtctgcgtctgtctcgaggtacgttgcccgcttgactacagtcacacatctgtcccattttcatctcaccacaactgcctcgacgcagcctgcgcagacacacaatctcgcagctgtcgtccgtaattccgaacctagcccacctcaacacaacccctctctctgcctgctaatctacaactccccgtactcccccatcccactcagtctctcctccactgctacattgcaggcctccgcctcgccttgtctcagaccactcagctcgatcgagatagacactgctccaatcagcaccctccaaggctctaaccaactgacacacctatctccgcctagtcaagccatagcctctagcacacgtggagcattcctctgctgtctcggctaaagcgtcattgcgaattccactcagctcttgtcacttttggccctcagccgccccaagactgagatccccaaatctgctccacgatccgatccgatccgcttcttctcaacgactatacttcatcgcacacccacaacttgcccgccgtggattcgtcaacgctttctgccgggtctgcgggccaatttcacgacgctgtagacaccatggaccccatggaccgagatctccacgccgcacccctaggcggggctcacgagaaccccgacgactccatgaatggtctcgacggctccccgcatcctgagattgtcgatctcgcccacaacggccacgagattcatgagccctaccaccgtcactcgcagtcagatcagggcttgagcaaccacggtcaccatggttccgaggaggcagtggaccccaatgctcgttacgagaccccaccagcccacggccacccccagtccatatccagacccccttcgcaaatgtcgggccacgggggcgagagacacacatctcacagcgaccgtggcagcaatggcgccgagcaggccaacgcacgccccgccgaggtcgtcatcaaggtcggaatggtaggggacgcgcagattggcaagacgtcattaatggtcaaatatgtcgaggggagctgggatgaggactatatccagaccttgggggtcaatttcatggagaagaccatcagcatccgtaacacggagatcaccttcagcatttgggacttaggcggccagcgcgagttcgtcaacatgctgccgctcgtctgcaacgatgcggttgccatcttgttcatgttcgacctgacgagaaagagcacgctcaacagtatcaaggagtggtaccgccagggacgaggcttcaacaagacggctattcccgttttggtggggaccaagtacgaccatttcgtcaacttctcccgcgaagagcaagaggagatatcgaaccaagctcggcgattcgccaaggcaatgcgcgcttcgttgatattcagcagtaccagccacagcatcaatgttcaaaagatcttcaagattgtactgtctaaggccttcgatctgaagtgcacaatacccgagatcgagaatgtcggcgaaccacttctcctatatcaagcttactagcgtctgcttagactgaaatttgagtacttactgcgcattaccactctactcacaggccagcaagtcggatcgtttctatttgcgactcgaacgacgacaacgtagctacataaaaccgacataatgtcaagctcagtccgaaaggctcaatgcagttccattttgatgatgcacgatatctgtgtctggagcttctcatatgatgcccggaagctgcagacgagtcgaatggctactgcacaaagagctcattttactataaccaccacccgacctttgatcacaactcacaacgataatttttcatttgttttgtttgcgaagccgcggtaatcacatacggcctcgatggcatgatttgcattggcgagactgagctggactgcactggaagagagagggacttgattttccccacgcccacaacggtgttacggacggtacatggacgttttggagtcacggggcaagagacaccgactcctctcatgcttgagattgattgattgatttgcaaaagattaggcttggccttcgtctaactgtaacaactaattgtcggattacacaccaaaagaggcagagtccctaatttgttgatagatggaggaggatatgaggaaacaatttgcgatacatggcactgcgttgctttgtaactagtcattgcaagactcgtctaagaacgagcatagaaagacaccattaaaaaaaaaaatgcaaagtttctgacaaatcttatgttgtcttcattgagatagcaagtctaacactaggaccttcaagtctcgtccctaactatagtacccgatttaccagtctggctatgtcgataattcattaaacaagcaacgcgtgctcctggcgtctctatcaggcactatgggaccaaggcacatgtccgatctgcatgaggcacagcggcactccatcatgtttattacagcccaatccttgccggtatggctagtgataagaatcacttcttgacattaacagcttcgccctcgcccttctgggggtcctcgcgagggtcctcggagctggtcttcttggtgggggccgatgaagaggatgaggcttgcttcgtttctttcttctttatctattgcgagcgctgtcagtatgttatgtcatctagaattcctttacttgatcttcttggcgtggtattatataggtggggttggggctggggcttatagattgaaaacataccatctccttatgatcctcctgctctcccttcttctcatcccatttcgtcgctagatcggagctatctttcgatgggggcgggacgtcttgtcctggtgggtttcctggggctgaggacttttccttcttatcactatcgctgttcttaccctcaccgtcctttttcttcttgtcttccttattatctttactatcgtctttgccatctttttctttcccttccttgtcatccttcttatcttcatcttcgccttcgccttcgttggagtctgagtcttcctgctcagaatcatcctctgagctttcgtcagacttagtcccggctttggagtccttgggagtgggatgagggtcttcggcatgctcctcgctgtgcttgtggctcttcttctttggcggggcggagtaggagagga

SEQ ID NO: 25297 - DNA, 525 bp, Muscodor strobelii
  misc_feature: SGI cDNA ID NO. 568633
  misc_feature: Encodes the peptide sequence at SEQ ID NO 25298
atggcttctatcgcacgctgtctccgggcagctcgcccctcgacaatgtcccgcattgcgcaagctccccgcgttgccgttcgacctacggctgtccgcgctttttctgtatcttcgagtagagaaatccgcaaatacacaaaagaccatgaatggatcgacctctcagccgaccaaaccacaggcgtaatcgggatctcgacctacgcctcagaagagctaggtgacgtcgtctacgtcgaactcccagaggaaggaaaagagctcacagcgggcgacactttgggcgccgtcgaatccgtcaagtcagcagcggacatcaactccccgattgcctgcacagtcacacaggcgaatatggcgcttgaagaaaaaccgggtatgatcaaccaggtgcctgaggatgatagccatggtggtggttggatcgctaaggtctcggtgggcgagcagggcaagaaggactttgagggcttgatggatgaggctgagtataaggcttttactgggtctgaggaacattaa

SEQ ID NO: 25298 - protein, 174 aa, Muscodor strobelii
  misc_feature: SGI Peptide ID NO. 568633
  misc_feature (44)..(172): Pfam Id: PF01597 Pfam Desc: Glycine cleavage H-protein
  misc_feature (1)..(172): NCBI GI: 39940758 Blast Desc: glycine cleavage system H protein, [Magnaporthe grisea 70-15] gi|59802844|gb|AAX07637.1| glycine cleavage system H protein-like protein [Magnaporthe grisea] glycine cleavage system
  misc_feature (1)..(174): NCBI GI: 171692927 Blast Desc: protein product [Podospora anserina] gi|170946412|emb|CAP73213.1| protein product [Podospora anserina]
  misc_feature (1)..(174): NCBI GI: 85098805 Blast Desc: glycine cleavage system H protein [Neurospora crassa OR74A] gi|28922184|gb|EAA31434.1| glycine cleavage system H protein [Neurospora crassa OR74A] gi|38566781|emb|CAE76092.1| to
  misc_feature (1)..(174): NCBI GI: 256727856 Blast Desc: [Nectria haematococca mpVI 77-13-4]
  misc_feature (1)..(172): NCBI GI: 46130842 Blast Desc: FG08976.1 [Gibberella zeae PH-1]
  misc_feature (1)..(168): NCBI GI: 154298908 Blast Desc: BC1G_11701 [Botryotinia fuckeliana B05.10] gi|150857606|gb|EDN32798.1| BC1G_11701 [Botryotinia fuckeliana B05.10]
  misc_feature (1)..(172): NCBI GI: 156064081 Blast Desc: SS1G_00048 [Sclerotinia sclerotiorum 1980] gi|154690910|gb|EDN90648.1| SS1G_00048 [Sclerotinia sclerotiorum 1980]
  misc_feature (1)..(173): NCBI GI: 116199081 Blast Desc: CHGG_07696 [Chaetomium globosum CBS 148.51] gi|88178975|gb|EAQ86443.1| CHGG_07696 [Chaetomium globosum CBS 148.51]
  misc_feature (33)..(173): NCBI GI: 119174064 Blast Desc: CIMG_09014 [Coccidioides immitis RS] gi|240106683|gb|EER24870.1| glycine cleavage system H protein [Coccidioides posadasii C735 delta SOWgp]
  misc_feature (8)..(167): NCBI GI: 238841262 Blast Desc: glycine cleavage system H protein [Microsporum canis CBS 113480]
MASIARCLRAARPSTMSRIAQAPRVAVRPTAVRAFSVSSSREIRKYTKDHEWIDLSADQTTGVIGISTYASEELGDVVYVELPEEGKELTAGDTLGAVESVKSAADINSPIACTVTQANMALEEKPGMINQVPEDDSHGGGWIAKVSVGEQGKKDFEGLMDEAEYKAFTGSEEH

SEQ ID NO: 25299 - DNA, 2810 bp, Muscodor strobelii
  misc_feature: SGI EST ID NO. CUFF.59563.0
  misc_feature: Variant of the nucleotide sequence at SEQ ID NO 25297
cccctgccgaacactgtaagccaagctcctatcagtcgatgctatcatttctcaatcccagttccaaccacgacgtaaatccttccaccgatcatcgaaccacacacaactcttcacccaccaccgctcaacctcaaacaccctcacgccaatcgacacaatggcttctatcgcacgctgtctccgggcagctcgcccctcgacaatgtcccgcattgcgcaagctccccgcgttgccgttcgacctacggctgtccgcgctttttctgtatcttcgagtagagaaatccgcaaatacacaaaagaccatgaatggatcgacctctcagccgaccaaaccacaggcgtaatcgggatctcgacctacgcctcagaagagctaggtgacgtcgtctacgtcgaactcccagaggaaggaaaagagctcacagcgggcgacactttgggcgccgtcgaatccgtcaagtcagcagcggacatcaactccccgattgcctgcacagtcacacaggcgaatatggcgcttgaagaaaaaccgggtatgatcaaccaggtgcctgaggatgatagccatggtggtggttggatcgctaaggtctcggtgggcgagcagggcaagaaggactttgagggcttgatggatgaggctgagtataaggcttttactgggtctgaggaacattaaatgactgaacacatcttcggtcatcttcgggtacttgaggaaaaggaaatgatcaatgtgtggatggcgataggaggactgagtagacgaccaatggactcacgatccggatgcgaggaggagcattaacaagtgtcatcaaagaactgtgttgccaatgggcatccaacataccagcggcaggcagacagaccggctaacaagtagcacggtgttcaacagagagaaagacgggctcaaccttgtacatcatcatatcatacgccatacaccatagtcatcaatcacatgcatgcattctcgtggggtaactcatttgactctttttacttcttttggtactcttgggcctgtctgtctatctgttttcctcacctgaatgctgcatgctcgatgctaaatttgggtgatgagtgccgtctaaagctttgcgatgttagctaaagcagatacatgtgtggtggtcgcctgtatctgcgtacgcagatgcaccatcaacaataagggcagatacatgaatgtaatgcaatgcaatgtaatgggttgagccagccgtatctatcgccatttttccttttccttgatgtccgtcgttcatgtccgaggcccctcataccttgactgggcgatgcatacgtcgaaacggtccgatccgtgtgaaatgatccgtttgaaaaaaaaatgcaaacaagcagccataccgtgccctcaacatacaatcgtcgtcatcataaaacccttcaaggtaacataacaccaatcatcataccttcccttaagcagggatccacggctcagccttatcccgactcgcctcccgatccgcattgatcacatcgaggatcttctgcgctccattgtcgacgagcatcttggcgatcttcaagccgaactcgactgcttcctctttcgtcgtgatagtctcctcggctgctgcatccgctgcctcggtaccgtcaacactcacgacacaagcggtgatatgtaacttattctcacccacccactcactctccacaccaatcgggatactgcatccgccctccaactcgcgcatcacactcctctccacctcacaggataacatactgggcacattgttatacggcttgagcatctccaggatctcctcatcccccgctcgagcctcaatggacagacatccctgtcccacagcatacagcatgccaccaccgggcgttttcgagtccaaatactgactaatccttccctgtctccccgtgcggtgcaacccggctgcagcgaggatcaagacagagtactcggagtcgtcggcatcgagcttcttaagccgcgtgtcgatgttaccccgcatgtcgaggaacctgagcttcgggtatctgcgccggatctgggccattctgcggacgctcgacgttccgaccactgcgccatctggtaggtcggctagggatttgtattttccctcgagggacttcttgactacgactacatctcgggggtcttcgcgctcggagtagacggcgaggacacatccctcggggacggaggtgggcatgtccttggtgcagtgctggatgatgtctagctcgccgctgagcagggcggcctcgagctcgttggtccagagtcccttgccgcccatcttgtagagggccgtgatcttgtctttgtcggccgtggccagcatggggcagatctcgaaggtggtggtgggatgtagcttcttcaggttctcggcgacccattcagattgtacaacggcgagggctgagcggcgggtgccgagcttgacgactttttgggagggtgctgcggggatggtggtctcggtgattgtggacatggccgatgggccggatgttgtgccttgttgtgacatcttgactatgttgtgtctgtggctagtaccgcagtgtggttcgttgtgaggatcgtggggtcagagtcggcgaggaggggcagacagtgatggaggggcacggcgagaatcgggagaggttgcgacaagttgcaattgaaggtgtgaaggtggcaatcaggtaactgttgcaccagtacttgctatatggatcggcgcaaattgactggccgaggaaggcaacacggcggacagaagacacaacaggcagaaggaaaggcg

SEQ ID NO: 25300 - DNA, 1089 bp, Muscodor strobelii
  misc_feature: SGI cDNA ID NO. 568634
  misc_feature: Reduced expression when VOC is produced
  misc_feature: Encodes the peptide sequence at SEQ ID NO 25301
atgtcacaacaaggcacaacatccggcccatcggccatgtccacaatcaccgagaccaccatccccgcagcaccctcccaaaaagtcgtcaagctcggcacccgccgctcagccctcgccgttgtacaatctgaatgggtcgccgagaacctgaagaagctacatcccaccaccaccttcgagatctgccccatgctggccacggccgacaaagacaagatcacggccctctacaagatgggcggcaagggactctggaccaacgagctcgaggccgccctgctcagcggcgagctagacatcatccagcactgcaccaaggacatgcccacctccgtccccgagggatgtgtcctcgccgtctactccgagcgcgaagacccccgagatgtagtcgtagtcaagaagtccctcgagggaaaatacaaatccctagccgacctaccagatggcgcagtggtcggaacgtcgagcgtccgcagaatggcccagatccggcgcagatacccgaagctcaggttcctcgacatgcggggtaacatcgacacgcggcttaagaagctcgatgccgacgactccgagtactctgtcttgatcctcgctgcagccgggttgcaccgcacggggagacagggaaggattagtcagtatttggactcgaaaacgcccggtggtggcatgctgtatgctgtgggacagggatgtctgtccattgaggctcgagcgggggatgaggagatcctggagatgctcaagccgtataacaatgtgcccagtatgttatcctgtgaggtggagaggagtgtgatgcgcgagttggagggcggatgcagtatcccgattggtgtggagagtgagtgggtgggtgagaataagttacatatcaccgcttgtgtcgtgagtgttgacggtaccgaggcagcggatgcagcagccgaggagactatcacgacgaaagaggaagcagtcgagttcggcttgaagatcgccaagatgctcgtcgacaatggagcgcagaagatcctcgatgtgatcaatgcggatcgggaggcgagtcgggataaggctgagccgtggatccctgcttaa

SEQ ID NO: 25301 - protein, 362 aa, Muscodor strobelii
  misc_feature: SGI Peptide ID NO. 568634
  misc_feature (29)..(252): Pfam Id: PF01379 Pfam Desc: Porphobilinogen deaminase, dipyromethane cofactor binding domain
  misc_feature (260)..(337): Pfam Id: PF03900 Pfam Desc: Porphobilinogen deaminase, C-terminal domain
  misc_feature (29)..(349): NCBI GI: 154298906 Blast Desc: BC1G_11700 [Botryotinia fuckeliana B05.10] gi|150857605|gb|EDN32797.1| BC1G_11700 [Botryotinia fuckeliana B05.10]
  misc_feature (22)..(358): NCBI GI: 261357987 Blast Desc: porphobilinogen deaminase [Verticillium albo-atrum VaMs.102]
  misc_feature (26)..(351): NCBI GI: 39940760 Blast Desc: MGG_04860 [Magnaporthe grisea 70-15] gi|145010915|gb|EDJ95571.1| MGG_04860 [Magnaporthe grisea 70-15]
  misc_feature (26)..(349): NCBI GI: 164423255 Blast Desc: porphobilinogen deaminase [Neurospora crassa OR74A] gi|55976426|sp|Q6MW51.1|HEM3_NEUCR RecName: Full=Porphobilinogen deaminase; Short=PBG; AltName: Full=Pre-uroporphyrinogen AltName:
  misc_feature (29)..(349): NCBI GI: 156064079 Blast Desc: SS1G_00047 [Sclerotinia sclerotiorum 1980] gi|154690909|gb|EDN90647.1| SS1G_00047 [Sclerotinia sclerotiorum 1980]
  misc_feature (23)..(350): NCBI GI: 256728018 Blast Desc: [Nectria haematococca mpVI 77-13-4]
  misc_feature (21)..(349): NCBI GI: 255949632 Blast Desc: Pc22g16690 [Penicillium chrysogenum Wisconsin 54-1255] gi|211592600|emb|CAP98957.1| Pc22g16690 [Penicillium chrysogenum Wisconsin 54-1255]
  misc_feature (16)..(350): NCBI GI: 46130844 Blast Desc: FG08977.1 [Gibberella zeae PH-1]
  misc_feature (24)..(351): NCBI GI: 116199079 Blast Desc: CHGG_07695 [Chaetomium globosum CBS 148.51] gi|88178974|gb|EAQ86442.1| CHGG_07695 [Chaetomium globosum CBS 148.51]
  misc_feature (30)..(352): NCBI GI: 171692929 Blast Desc: protein product [Podospora anserina] gi|170946413|emb|CAP73214.1| protein product [Podospora anserina]
  misc_feature (24)..(349): SWISSPROT Homolog: EC 2.5.1.61 Hydroxymethylbilane synthase
  misc_feature: Useful for introducing or modulating the production of volatile compounds
MSQQGTTSGPSAMSTITETTIPAAPSQKVVKLGTRRSALAVVQSEWVAENLKKLHPTTTFEICPMLATADKDKITALYKMGGKGLWTNELEAALLSGELDIIQHCTKDMPTSVPEGCVLAVYSEREDPRDVVVVKKSLEGKYKSLADLPDGAVVGTSSVRRMAQIRRRYPKLRFLDMRGNIDTRLKKLDADDSEYSVLILAAAGLHRTGRQGRISQYLDSKTPGGGMLYAVGQGCLSIEARAGDEEILEMLKPYNNVPSMLSCEVERSVMRELEGGCSIPIGVESEWVGENKLHITACVVSVDGTEAADAAAEETITTKEEAVEFGLKIAKMLVDNGAQKILDVINADREASRDKAEPWIPA

SEQ ID NO: 25302 - DNA, 1488 bp, Muscodor strobelii
  misc_feature: SGI cDNA ID NO. 568635
  misc_feature: Encodes the peptide sequence at SEQ ID NO 25303
atgccttcgcatcctcagacgggcattattgctgaccctattcactctagcgatcgtggcacacaacaacagaatgaatcggtcttcaggcctacatggcggctatatttcataatcgtggggctggggatcgcgaatctcctggccgcgcttgaaaacacggtcgttgctatcgccgcacctgtaatcttgaccgacttgcagctaggggacaacttcatttggattacaaatggattctttctatcaagcacagcaacgctccctttgtttggccagttctgcaatatattcggcaggcgtgttcgtgggactcactcgtccatggtcttggccattttcggagtgggctcagcgttgggacctttcatcgggggtgtcatcatctcctcgacgacttggcgctgggtgttctacctgaatctccctattgggggccttgcttttggtgtgctattcgcgtttcttcgcgtcaggtacgacaaggacacatccctccgagaaaggctacaaagcatcgatctcatcggcaatggcatcctggtggccagtactttttctgtcctctacgcattgagctatgcagggacgcgttatctctggcagtcttggcacactttagtacctctcttagttgggtttgcaggtctattactcttcaccctgtatcaaaccttagggttattttcgccatttgagcctctgatgccgccacgcttttttcaagctccaacaacgatcatcttgggaatcaacacattcgtctattccataatcctatactggttgatttctttcctacctgtttatttccaaggtgtcaaactttattccccaactagatccggcgcggccttactccctatatcgcttgtagggattccgggctctgtgataggggcaatcatccttacgcgatggggccgatacaaagtaattcatattatcgcctttggactacagattcttgggctagggcttctcaccttgcaagtggagaagacaactgttgctcagtgggctacgttccagtcaattgtagcatttggtggagggcttgtcttctccaccattctacccgcctttcaagcgttcatacacgagcgcgatctcgcagcttgcacggcagtctggtactttatccgcctgttcggtcatatatggggtgtggctatcccggccgctgtgttcaacaatcgtattgacgagcttctatctgaacgtgtcatctcggacccaatcgtggcagatatcatctccaaaggtggtgcgtaccaagccgcttcagcagcattcgttcgacaattcccaccgcatctacgggttgagatccgtgctatatatagagatgccattcaaagagttttccagatatcgatcatatttactgcagttgcattcttgttgtctcttttcgaaagggaaattaagctgcgcaagacaatcgaaacggagtttggcatggatgagcaagttcaagaactataa

SEQ ID NO: 25303 - protein, 495 aa, Muscodor strobelii
  misc_feature: SGI Peptide ID NO. 568635
  misc_feature (42)..(390): Pfam Id: PF07690 Pfam Desc: Major Facilitator Superfamily
  misc_feature (103)..(390): Pfam Id: PF07690 Pfam Desc: Major Facilitator Superfamily
  misc_feature (5)..(494): NCBI GI: 238840350 Blast Desc: multidrug resistance protein fnx1 [Microsporum canis CBS 113480]
  misc_feature (15)..(494): NCBI GI: 256730552 Blast Desc: NECHADRAFT_74179 [Nectria haematococca mpVI 77-13-4]
  misc_feature (15)..(488): NCBI GI: 171679193 Blast Desc: protein product [Podospora anserina] gi|170937668|emb|CAP62326.1| protein product [Podospora anserina]
  misc_feature (15)..(491): NCBI GI: 46109404 Blast Desc: FG01584.1 [Gibberella zeae PH-1]
  misc_feature (33)..(491): NCBI GI: 145233185 Blast Desc: An02g08330 [Aspergillus niger] gi|134056892|emb|CAK37795.1| protein product [Aspergillus niger]
  misc_feature (11)..(494): NCBI GI: 145244244 Blast Desc: An11g06420 [Aspergillus niger] gi|134079311|emb|CAK96940.1| protein product [Aspergillus niger]
  misc_feature (15)..(493): NCBI GI: 255941836 Blast Desc: Pc16g13890 [Penicillium chrysogenum Wisconsin 54-1255] gi|211586310|emb|CAP94059.1| Pc16g13890 [Penicillium chrysogenum Wisconsin 54-1255]
  misc_feature (23)..(490): NCBI GI: 240109581 Blast Desc: Major Facilitator Superfamily protein [Coccidioides posadasii C735 delta SOWgp]
  misc_feature (23)..(490): NCBI GI: 119183366 Blast Desc: CIMG_06626 [Coccidioides immitis RS]
  misc_feature (101)..(494): NCBI GI: 145236904 Blast Desc: An07g00060 [Aspergillus niger] gi|134075564|emb|CAK39230.1| protein product [Aspergillus niger]
MPSHPQTGIIADPIHSSDRGTQQQNESVFRPTWRLYFIIVGLGIANLLAALENTVVAIAAPVILTDLQLGDNFIWITNGFFLSSTATLPLFGQFCNIFGRRVRGTHSSMVLAIFGVGSALGPFIGGVIISSTTWRWVFYLNLPIGGLAFGVLFAFLRVRYDKDTSLRERLQSIDLIGNGILVASTFSVLYALSYAGTRYLWQSWHTLVPLLVGFAGLLLFTLYQTLGLFSPFEPLMPPRFFQAPTTIILGINTFVYSIILYWLISFLPVYFQGVKLYSPTRSGAALLPISLVGIPGSVIGAIILTRWGRYKVIHIIAFGLQILGLGLLTLQVEKTTVAQWATFQSIVAFGGGLVFSTILPAFQAFIHERDLAACTAVWYFIRLFGHIWGVAIPAAVFNNRIDELLSERVISDPIVADIISKGGAYQAASAAFVRQFPPHLRVEIRAIYRDAIQRVFQISIIFTAVAFLLSLFEREIKLRKTIETEFGMDEQVQEL

SEQ ID NO: 25304 - DNA, 1209 bp, Muscodor strobelii
  misc_feature: SGI EST ID NO. CUFF.59465.0
  misc_feature: Variant of the nucleotide sequence at SEQ ID NO 25302
ttcgcatcctcagacgggcattattgctgaccctattcactctagcgatcgtggcacacaacaacagaatgaatcggtcttcaggcctacatggcggctatatttcataatcgtggggctggggatcgcgaatctcctggccgcgcttgaaaacacggtcgttgctatcgccgcacctgtaatcttgaccgacttgcagctaggggacaacttcatttggattacaaatggattctttctatcaagcacagcaacgctccctttgtttggccagttctgcaatatattcggcaggcgtgttgtaatgctcacagccattgcaatattcgtcctcggaagcggaatttgcggaggcgcttcgtcgggggctatgtgaatcgcagggcgtgctgtccaaggcgttggttctggtggcattatcatcacttgtgcctctccgacagcgtgggactcactcgtccatggtcttggccattttcggagtgggctcagcgttgggacctttcatcgggggtgtcatcatctcctcgacgacttggcgctgggtgttctacctgaatctccctattgggggccttgcttttggtgtgctattcgcgtttcttcgcgtcaggtacgacaaggacacatccctccgagaaaggctacaaagcatcgatctcatcggcaatggcatcctggtggccagtactttttctgtcctctacgcattgagctatgcagggacgcgttatctctggcagtcttggcacactttagtacctctcttagttgggtttgcaggtctattactcttcaccctgtatcaaaccttagggttattttcgccatttgagcctctgatgccgccacgcttttttcaagctccaacaacgatcatcttgggaatcaacacattcgtctattccataatcctatactggttgatttctttcctacctgtttatttccaaggtgtcaaactttattccccaactagatccggcgcggccttactccctatatcgcttgtagggattccgggctctgtgataggggcaatcatccttacgcgatggggccgatacaaagtaattcatattatcgcctttggactacagattcttgggctagggcttctcaccttgcaagtggagaagacaactgttgctcagtgggctacgttccagtcaattgtagcatttggtggagggcttgtcttctccacca

SEQ ID NO: 25305 - DNA, 849 bp, Muscodor strobelii
  misc_feature: SGI cDNA ID NO. 568636
  misc_feature: Encodes the peptide sequence at SEQ ID NO 25306
atgttccattgcttcagtactcatgccttcttgtcaacaataccacctcagagcacgcgactcggcagaaagtaccttgcttctgtcactgcacatgctgtaatagtcccatatctaatggacgaactcttggcattttcagctgcatacttgagcactcaaagaccgcatcaggcgcaaccatatcggcaagaagccactcgcttgcagacacgtgcgttagcctcgttcgatgctgccaaggctacaacaaccgccgatggatgcatgccggcttttctcttcaccattctactttctcatcaggcactcttcgacacgttttctacacgcattgattttccgtcttttctagacaagtttacagaaagtcttcgcctatgcgctggtgtaagagccgtagccggcgcatcgtggatatcaattcaggcacagtatcagtacgagactggtattgtgctcgacaatgaagctacccaaagtgatagttccaattatgtctttgtccagaggtttgcaaagctggagagtcttataaaagactctagcactgggcctcttatctctgggccctgtcttgaagccgtgaatctcctgaaagatctcgatgcacccggaaacaaccaggattttacattgtccccaagcattcgcgtgcttcggtgggctgtattagtaccgtctgcgtttgttgagctcgtcgagcagcgacggcccgaggctttagtcgtgatttcatattatgcgctgtttgtacatgaagcacgcaatatttgggtctttaatgatgccggagccttcatcatcagatctgttactagctacctagggagatcttggtccgagtag

SEQ ID NO: 25306 - protein, 282 aa, Muscodor strobelii
  misc_feature: SGI Peptide ID NO. 568636
  misc_feature (29)..(282): NCBI GI: 119484956 Blast Desc: NFIA_098530 [Neosartorya fischeri NRRL 181] gi|119410276|gb|EAW20223.1| conserved [Neosartorya fischeri NRRL 181]
  misc_feature (37)..(282): NCBI GI: 159123619 Blast Desc: C6 finger domain protein, [Aspergillus fumigatus A1163]
  misc_feature (37)..(282): NCBI GI: 70983698 Blast Desc: C6 finger domain protein [Aspergillus fumigatus Af293] gi|66845002|gb|EAL85338.1| C6 finger domain protein, [Aspergillus fumigatus Af293]
  misc_feature (1)..(282): NCBI GI: 119473723 Blast Desc: NFIA_001890 [Neosartorya fischeri NRRL 181] gi|119406890|gb|EAW16840.1| conserved [Neosartorya fischeri NRRL 181]
  misc_feature (1)..(282): NCBI GI: 70985839 Blast Desc: conserved [Aspergillus fumigatus Af293] gi|66846054|gb|EAL86387.1| conserved [Aspergillus fumigatus Af293] gi|159128439|gb|EDP53554.1| conserved [Aspergillus A1163]
  misc_feature (26)..(280): NCBI GI: 159129488 Blast Desc: AFUB_026610 [Aspergillus fumigatus A1163]
  misc_feature (26)..(280): NCBI GI: 71001470 Blast Desc: AFUA_2G10830 [Aspergillus fumigatus Af293] gi|66853054|gb|EAL93378.1| AFUA_2G10830 [Aspergillus fumigatus Af293]
  misc_feature (1)..(282): NCBI GI: 115390154 Blast Desc: conserved [Aspergillus terreus NIH2624] gi|114194978|gb|EAU36678.1| conserved [Aspergillus terreus NIH2624]
  misc_feature (29)..(282): NCBI GI: 169776792 Blast Desc: [Aspergillus oryzae RIB40] gi|83771598|dbj|BAE61729.1| protein product [Aspergillus oryzae]
  misc_feature (24)..(282): NCBI GI: 169594848 Blast Desc: SNOG_00153 [Phaeosphaeria nodorum SN15] gi|111070528|gb|EAT91648.1| SNOG_00153 [Phaeosphaeria nodorum SN15]
MFHCFSTHAFLSTIPPQSTRLGRKYLASVTAHAVIVPYLMDELLAFSAAYLSTQRPHQAQPYRQEATRLQTRALASFDAAKATTTADGCMPAFLFTILLSHQALFDTFSTRIDFPSFLDKFTESLRLCAGVRAVAGASWISIQAQYQYETGIVLDNEATQSDSSNYVFVQRFAKLESLIKDSSTGPLISGPCLEAVNLLKDLDAPGNNQDFTLSPSIRVLRWAVLVPSAFVELVEQRRPEALVVISYYALFVHEARNIWVFNDAGAFIIRSVTSYLGRSWSE

SEQ ID NO: 25307 - DNA, 445 bp, Muscodor strobelii
  misc_feature: SGI EST ID NO. CUFF.59473.0
  misc_feature: Variant of the nucleotide sequence at SEQ ID NO 25305
ggagagtcttataaaagactctagcactgggcctcttatctctgggccctgtcttgaagccgtgaatctcctgaaagatctcgatgcacccggaaacaaccaggattttacattgtccccaagcattcgcgtgcttcggtgggctgtattagtaccgtctgcgtttgttgagctcgtcgagcagcgacggcccgaggctttagtcgtgatttcatattatgcgctgtttgtacatgaagcacgcaatatttgggtctttaatgatgccggagccttcatcatcagatctgttactagctacctagggagatcttggtccgagtagcttgcgtagcctaacgatgttttaggattggaaagttctgtagatggccgctgcctggataaatgagactagatgtagggaatgtaacaatggtgcacatcagacatcctgagctgatgc

SEQ ID NO: 25308 - DNA, 936 bp, Muscodor strobelii
  misc_feature: SGI cDNA ID NO. 568637
  misc_feature: Encodes the peptide sequence at SEQ ID NO 25309
atggcatccaacttaggaacaggccaagagtcttgtactctcgatctttgtccggcatctatgtcactatatggctacagacctgaaatagggatcaatgtcgttatcactattgcatatgtgctgtgcctggcccagtgcatctacatgttcatcgtatggagaaaaaactggctgagctacacagttctcgtcttcatcacgtctctactggagttcattggctatatactgcgagtctacgggtggttcaacccatttctgaatattggctggatccttcagtattccgaaatcaccactgccccggtctttgtcaccgcagcactctatgtatctctcggtcgcctagccaccattctggggcgtggtatattcaatctcgaacccaagctctatacccaaatcttcctgacgagcgatgcgctttccctcatacttcaagctagtggcgccagtttatcctttttcgaacaagtcacgacgaatgaccttaccctcggcggcaagctcgttatcatcggtctaggatttcaagccttgtcattggcgaccttcttggtcctgttcattggtgtcctctggccagtcaaaattttcgcttcggagtcgcccattaagaggttccagcgttctgggcgcatgcgtcttatgttatgcggcatgctgatatcgaataccttcatcgttgttcggtcagcatacagggtagcagagttctccgagggcccgctgggcacactggtgcatgatcaggtccttttcattgttttcgacactttgactgtggccgtcactacgatcttactaagcttcttgcaccctaatattatgctaccatctgacgaatcgaggttctctacaatactagttgaacagcttgtgttcacgaacttagatatacgggcaacagatgcagaatcatcgaagaactag

SEQ ID NO: 25309 - protein, 311 aa, Muscodor strobelii
  misc_feature: SGI Peptide ID NO. 568637
  misc_feature (63)..(289): Pfam Id: PF04479 Pfam Desc: RTA1 like protein
  misc_feature (11)..(278): NCBI GI: 119181260 Blast Desc: CIMG_05758 [Coccidioides immitis RS] gi|240108922|gb|EER27091.1| parasitic phase-specific protein PSP-1 [Coccidioides posadasii C735 delta SOWgp]
  misc_feature (8)..(300): NCBI GI: 46124557 Blast Desc: FG06656.1 [Gibberella zeae PH-1]
  misc_feature (9)..(308): NCBI GI: 145608800 Blast Desc: MGG_12848 [Magnaporthe grisea 70-15] gi|145016231|gb|EDK00721.1| MGG_12848 [Magnaporthe grisea 70-15]
  misc_feature (1)..(306): NCBI GI: 119499309 Blast Desc: RTA1 domain protein, [Neosartorya fischeri NRRL 181] gi|119414576|gb|EAW24515.1| RTA1 domain protein, [Neosartorya fischeri NRRL 181]
  misc_feature (11)..(278): NCBI GI: 258572522 Blast Desc: UREG_04540 [Uncinocarpus reesii 1704] gi|237905293|gb|EEP79694.1| UREG_04540 [Uncinocarpus reesii 1704]
  misc_feature (3)..(277): NCBI GI: 169623345 Blast Desc: SNOG_14910 [Phaeosphaeria nodorum SN15] gi|160704967|gb|EAT77762.2| SNOG_14910 [Phaeosphaeria nodorum SN15]
  misc_feature (9)..(263): NCBI GI: 258571992 Blast Desc: conserved [Uncinocarpus reesii 1704] gi|237905062|gb|EEP79463.1| conserved [Uncinocarpus reesii 1704]
  misc_feature (1)..(276): NCBI GI: 70985426 Blast Desc: RTA1 domain protein [Aspergillus fumigatus Af293] gi|66845847|gb|EAL86181.1| RTA1 domain protein, [Aspergillus fumigatus Af293] gi|159125853|gb|EDP50969.1| RTA1 domain protein,
  misc_feature (6)..(279): NCBI GI: 169775895 Blast Desc: [Aspergillus oryzae RIB40] gi|83771149|dbj|BAE61281.1| protein product [Aspergillus oryzae]
  misc_feature (1)..(276): NCBI GI: 261354050 Blast Desc: conserved [Verticillium albo-atrum VaMs.102]
MASNLGTGQESCTLDLCPASMSLYGYRPEIGINVVITIAYVLCLAQCIYMFIVWRKNWLSYTVLVFITSLLEFIGYILRVYGWFNPFLNIGWILQYSEITTAPVFVTAALYVSLGRLATILGRGIFNLEPKLYTQIFLTSDALSLILQASGASLSFFEQVTTNDLTLGGKLVIIGLGFQALSLATFLVLFIGVLWPVKIFASESPIKRFQRSGRMRLMLCGMLISNTFIVVRSAYRVAEFSEGPLGTLVHDQVLFIVFDTLTVAVTTILLSFLHPNIMLPSDESRFSTILVEQLVFTNLDIRATDAESSKN

SEQ ID NO: 25310 - DNA, 708 bp, Muscodor strobelii
  misc_feature: SGI cDNA ID NO. 568638
  misc_feature: Encodes the peptide sequence at SEQ ID NO 25311
atgccttactttcctagcctcgtggctttggcctcagtcattcccgctgcgttggcgtgtttgggatatgagggaggtgtgcctgtgcctactggcacgaagacactttcgtctcccatgaggattgctgctggacagacgtttgacgccggctgggtcaagtacgatcgtggctctggcgcctgtcaagatggagaaggaggtgatgctgatgctgtcttcctactcgaggccggcgctaccctgatgaacgtcattatcggcaagaaccagcaagaaggcgtccactgtttgggaccttgcactcttaagtttgtctggttcgaggacgtttgcgaagatgccatcacgattaaaggagatgcacatggacaagagagttggatcatcggcggaggtgcatatcatgcctctgataaaatcgtccaacataacgggtgtggtacagtaaacatcatcaacttctatgccgaagactacggcaaagtatatcgttcatgcggaaactgcgactctcagtgccagcgaaacgtttatgttgaaggtaccacagcttatgatggcggagaggttgtcggcatcaacctcaactacggtgacacagcaactctcaaaaacgtgtgcactgatgcttctcacccatgcgtgttttatgacggttgtgataatgattgcgagcctcagaaggtcggatactgctctggttaa

SEQ ID NO: 25311 - protein, 235 aa, Muscodor strobelii
  misc_feature: SGI Peptide ID NO. 568638
  misc_feature (19)..(229): Pfam Id: PF03211 Pfam Desc: Pectate lyase
  misc_feature (4)..(235): NCBI GI: 119497549 Blast Desc: pectate lyase, [Neosartorya fischeri NRRL 181] gi|119413695|gb|EAW23636.1| pectate lyase, [Neosartorya fischeri NRRL 181]
  misc_feature (6)..(235): NCBI GI: 67539872 Blast Desc: AN6106.2 [Aspergillus nidulans FGSC A4] gi|40738891|gb|EAA58081.1| AN6106.2 [Aspergillus nidulans FGSC A4] gi|259479704|tpe|CBF70172.1| TPA: pectate lyase (Eurofung)
  misc_feature (4)..(235): NCBI GI: 159124816 Blast Desc: pectate lyase, [Aspergillus fumigatus A1163]
  misc_feature (4)..(235): NCBI GI: 70990026 Blast Desc: pectate lyase [Aspergillus fumigatus Af293] gi|66847494|gb|EAL87824.1| pectate lyase, [Aspergillus fumigatus Af293]
  misc_feature (10)..(235): NCBI GI: 115402271 Blast Desc: ATEG_08626 [Aspergillus terreus NIH2624] gi|114189058|gb|EAU30758.1| ATEG_08626 [Aspergillus terreus NIH2624]
  misc_feature (4)..(235): NCBI GI: 238498740 Blast Desc: pectate lyase precursor, [Aspergillus flavus NRRL3357] gi|220693879|gb|EED50224.1| pectate lyase precursor, [Aspergillus flavus NRRL3357]
  misc_feature (7)..(235): NCBI GI: 154310264 Blast Desc: BC1G_07052 [Botryotinia fuckeliana B05.10] gi|150851613|gb|EDN26806.1| BC1G_07052 [Botryotinia fuckeliana B05.10]
  misc_feature (18)..(233): NCBI GI: 256731322 Blast Desc: polysaccharide lyase family 3 [Nectria haematococca mpVI 77-13-4]
  misc_feature (18)..(233): NCBI GI: 595570 Blast Desc: pectate lyase C [Nectria haematococca mpVI]
  misc_feature (3)..(233): NCBI GI: 256722688 Blast Desc: polysaccharide lyase family 3 [Nectria haematococca mpVI 77-13-4]
  misc_feature (25)..(168): SWISSPROT Homolog: EC 4.2.2.2 Pectate lyase
  misc_feature (25)..(168): SWISSPROT Homolog: EC 4.2.2.10 Pectin lyase
MPYFPSLVALASVIPAALACLGYEGGVPVPTGTKTLSSPMRIAAGQTFDAGWVKYDRGSGACQDGEGGDADAVFLLEAGATLMNVIIGKNQQEGVHCLGPCTLKFVWFEDVCEDAITIKGDAHGQESWIIGGGAYHASDKIVQHNGCGTVNIINFYAEDYGKVYRSCGNCDSQCQRNVYVEGTTAYDGGEVVGINLNYGDTATLKNVCTDASHPCVFYDGCDNDCEPQKVGYCSG

SEQ ID NO: 25312 - DNA, 633 bp, Muscodor strobelii
  misc_feature: SGI cDNA ID NO. 568639
  misc_feature: Encodes the peptide sequence at SEQ ID NO 25313
atggcaccagcccaattcaaatcgcagcttgaggcgtcgtcctatcacgccccaggtggtggtgagctgtacaaacccctgagggagaagatcgtcaaagatgcacttgcgcagggctatgatgaagcgtcaatgatggaacatggtgttgtatgggcggacgatcaggatccttggggtcacatcatgaacgcgggcttcccccattattcatctgcctgtaatttccgattctttgagagcttcgaggagcatttgaaggataagtttcaggacttgatgaaggtgcgcggaattggcgtcattgtcaaatctagtacattgaacatcaagagacctgtcacttatccagactcgatagtcgtcgcgaataggataggcgaggttaagcccgatcgatatcatgtaacaaccacccaatggtcgttgaggcaacaagctccagttgctgagtcgagtggttgggttgtgttctatgattattcaaaagggaagcctgcgaatttgattcaggccggcggtgtatacacgaacctccatgcagctcttacaaacaaatccatggtggcgagtcaaaagcgtgcagaatgggacgaaaagaacccgaaaaggtctcgggatacaaaattgtga

SEQ ID NO: 25313 - protein, 210 aa, Muscodor strobelii
  misc_feature: SGI Peptide ID NO. 568639
  misc_feature (17)..(209): NCBI GI: 225562457 Blast Desc: conserved [Ajellomyces capsulatus G186AR]
  misc_feature (24)..(210): NCBI GI: 169610930 Blast Desc: SNOG_08574 [Phaeosphaeria nodorum SN15] gi|111062622|gb|EAT83742.1| SNOG_08574 [Phaeosphaeria nodorum SN15]
  misc_feature (39)..(209): NCBI GI: 240281164 Blast Desc: conserved [Ajellomyces capsulatus H143]
  misc_feature (38)..(161): NCBI GI: 58258841 Blast Desc: [Cryptococcus neoformans var. neoformans JEC21] gi|134106859|ref|XP_777971.1| CNBA4400 [Cryptococcus neoformans var. neoformans B-3501A] gi|50260671|gb|EAL23324.1| CNBA4400 var.
  misc_feature (59)..(171): NCBI GI: 54302857 Blast Desc: thioesterase [Photobacterium profundum SS9] gi|46916281|emb|CAG23050.1| thioesterase [Photobacterium profundum SS9]
  misc_feature (59)..(171): NCBI GI: 90413913 Blast Desc: thioesterase [Photobacterium profundum 3TCK] gi|90324975|gb|EAS41490.1| thioesterase [Photobacterium profundum 3TCK]
  misc_feature (51)..(169): NCBI GI: 114565118 Blast Desc: thioesterase superfamily protein [Shewanella frigidimarina NCIMB 400] gi|114336411|gb|ABI73793.1| thioesterase superfamily protein [Shewanella frigidimarina NCIMB 400]
  misc_feature (59)..(169): NCBI GI: 88858270 Blast Desc: 4-hydroxybenzoyl-CoA thioesterase [Pseudoalteromonas tunicata D2] gi|88819887|gb|EAR29700.1| 4-hydroxybenzoyl-CoA thioesterase [Pseudoalteromonas tunicata D2]
  misc_feature (59)..(169): NCBI GI: 119773215 Blast Desc: 4-hydroxybenzoyl-CoA thioesterase [Shewanella amazonensis SB2B] gi|119765715|gb|ABL98285.1| conserved 4-hydroxybenzoyl-CoA thioesterase [Shewanella amazonensis SB2B]
  misc_feature (59)..(169): NCBI GI: 170729175 Blast Desc: thioesterase superfamily protein [Shewanella woodyi ATCC 51908] gi|169814522|gb|ACA89106.1| thioesterase superfamily protein [Shewanella woodyi ATCC 51908]
MAPAQFKSQLEASSYHAPGGGELYKPLREKIVKDALAQGYDEASMMEHGVVWADDQDPWGHIMNAGFPHYSSACNFRFFESFEEHLKDKFQDLMKVRGIGVIVKSSTLNIKRPVTYPDSIVVANRIGEVKPDRYHVTTTQWSLRQQAPVAESSGWVVFYDYSKGKPANLIQAGGVYTNLHAALTNKSMVASQKRAEWDEKNPKRSRDTKL

SEQ ID NO: 25314 - DNA, 1581 bp, Muscodor strobelii
  misc_feature: SGI EST ID NO. CUFF.59491.0
  misc_feature: Variant of the nucleotide sequence at SEQ ID NO 25312
cgacatttcaatgtcattcacgatcgcaagcagatggacaaacaataactcttgcatgcccatgacataaatcgacctagatagctcctcaccaagtttgacttcacgcagattaagtcataccagttatggcaccagcccaattcaaatcgcagcttgaggcgtcgtcctatcacgccccaggtggtggtgagctgtacaaacccctgagggagaagatcgtcaaagatgcacttgcgcagggctatgatgaagcgtcaatgatggaacatggtgttgtatgggcggacgatcaggatccttggggtcacatcatgaacgcgggcttcccccattattcatctgcctgtaatttccgattctttgagagcttcgaggagcatttgaaggataagtttcaggacttgatgaaggtgcgcggaattggcgtcattgtcaaatctagtacattgaacatcaagagacctgtcacttatccagactcgatagtcgtcgcgaataggataggcgaggttaagcccgatcgatatcatgtaacaaccacccaatggtcgttgaggcaacaagctccagttgctgagtcgagtggttgggttgtgttctatgattattcaaaagggaagcctgcgaatttgattcaggccggcggtgtatacacgaacctccatgcagctcttacaaacaaatccatggtggcgagtcaaaagcgtgcagaatgggacgaaaagaacccgaaaaggtctcgggatacaaaattgtgacagaccttgatccatctgccgagttatgggacgacaccaagaggctgtacaatctgtaacgagaaaccagaaaagcaactgcgtctgttggagactagcttgtacagatagattccgaagattaggcatatgggtactccagaatttgtcttctattggcgacatgcttctttggcagggtacagtttgctcttgattgtcaacggggaagcgacttgtttgtgcctcgtttattagaatctgaagatattttggagaggcgacgaccttcacgcattgccatactactggatagctcccctagatatgcggcttatcaggttccttgtagcagcttggtattctcccgactcaatgttatcaagcggcgcattcacatgtttttggggtggagctgttgtggtagtctcttatgccttgcagcatgctggaatcgaacgtggcagtgttggccgaatcatcgtcaaacggtaactccatgcatcaatcatggtacttatcccactccaagcattattcgacgcatgtgctggtttgtgtaaaatctaggcagttggtactccgaaaaaacatcaagcctattaggtagagcaatgctgggtattcttatcgtttggtcgagtggcaaggcaagtaagggcgataacgcgacagatacgcttcgataataccaataccaattagttgccttatttcctcccttacttcaaataacacaacggctaaaagtcgcgagaggtgcatcttatcttgtgtgcgagccatgaatatcatacgtctggagcaattccagcaaatgaaaagtttatttatgcaactt

SEQ ID NO: 25315 - DNA, 999 bp, Muscodor strobelii
  misc_feature: SGI cDNA ID NO. 568640
  misc_feature: Encodes the peptide sequence at SEQ ID NO 25316
atggttgcggtcacagtttttaagggctctgcgactggtgtcccgacaaaggacacggtaacgaggtcagatgagctcacgggtgatcaggtattgatgaagatcaccgcatcgggcatttgcgggacagatcttcattatgtaaaagcaccaattgtgctcggccatgagggaataggaattgtcgaggaagttggaccaaactgcacgtatctcaagaagggcgatcgggtaggctttggctatcatcataacagctgcggccattgcagggaatgcctgacgggcagggagacatactgcaaacagcgagctctttacggcttccatgatcatgaccaaggttccgtgtcgtcgcatgcaatctggcgcgaatcattcctgcacaagattcccgacagcataagcgatatcgaggctgctcccttgcagtgtgctggtgctacggtcttcaacgctttgcaagctcacggctcccggccaactgaaacgatcggcgtcatgggcattggcggtttaggccatttggcgattcaattcgctgcgaagatgggaaatagagtggttgtcctctccagctccgaaagtaagagagagcaagccctcgaactgggtgcgcatgagtttgttgtgaccaagggcaagacccagctcgaagtctcatcaccacttgatagacttatagtcacaacttcggcgcagccagactgggcatcgctcttgccaattctagcaccgggcgcttctattcatcccctctctgtgtctcgcggaaacttcgaaatgccgtattcgccgatcttcctccagggctttaccattcaaggctctctcgtcgcggcaagaaatgtacatcgcgagatgctcgagtttgctgctttacacaacataaaaccgattactcagacattcccgatgacagaggatggtgttaaagaggcatttgaaaagcttgaacgcggtgatattcacctcaaagctgtcttattggcgcagtaa

SEQ ID NO: 25316 - protein, 332 aa, Muscodor strobelii
  misc_feature: SGI Peptide ID NO. 568640
  misc_feature (28)..(131): Pfam Id: PF08240 Pfam Desc: Alcohol dehydrogenase GroES-like domain
  misc_feature (161)..(294): Pfam Id: PF00107 Pfam Desc: Zinc-binding dehydrogenase
  misc_feature (1)..(332): NCBI GI: 154320089 Blast Desc: NADP-dependent alcohol dehydrogenase [Botryotinia fuckeliana B05.10] gi|150854764|gb|EDN29956.1| NADP-dependent alcohol dehydrogenase [Botryotinia fuckeliana B05.10]
  misc_feature (1)..(332): NCBI GI: 156065445 Blast Desc: SS1G_00733 [Sclerotinia sclerotiorum 1980] gi|154691592|gb|EDN91330.1| SS1G_00733 [Sclerotinia sclerotiorum 1980]
  misc_feature (1)..(332): NCBI GI: 116191893 Blast Desc: CHGG_05664 [Chaetomium globosum CBS 148.51] gi|88181577|gb|EAQ89045.1| CHGG_05664 [Chaetomium globosum CBS 148.51]
  misc_feature (1)..(332): NCBI GI: 169597595 Blast Desc: SNOG_01584 [Phaeosphaeria nodorum SN15] gi|111070113|gb|EAT91233.1| SNOG_01584 [Phaeosphaeria nodorum SN15]
  misc_feature (2)..(332): NCBI GI: 119467039 Blast Desc: NADP-dependent alcohol dehydrogenase [Neosartorya fischeri NRRL 181] gi|119405478|gb|EAW15429.1| NADP-dependent alcohol dehydrogenase [Neosartorya fischeri NRRL 181]
  misc_feature (1)..(329): NCBI GI: 189193347 Blast Desc: alcohol dehydrogenase [Pyrenophora tritici-repentis Pt-1C-BFP] gi|187978576|gb|EDU45202.1| alcohol dehydrogenase [Pyrenophora tritici-repentis Pt-1C-BFP]
  misc_feature (1)..(332): NCBI GI: 212527062 Blast Desc: NADP-dependent alcohol dehydrogenase [Penicillium marneffei ATCC 18224] gi|210073086|gb|EEA27173.1| NADP-dependent alcohol dehydrogenase [Penicillium marneffei ATCC 18224]
  misc_feature (5)..(331): NCBI GI: 159122725 Blast Desc: NADP-dependent alcohol dehydrogenase [Aspergillus fumigatus A1163]
  misc_feature (5)..(332): NCBI GI: 70981444 Blast Desc: NADP-dependent alcohol dehydrogenase [Aspergillus fumigatus Af293] gi|66843873|gb|EAL84214.1| NADP-dependent alcohol dehydrogenase [Aspergillus fumigatus Af293]
  misc_feature (5)..(332): NCBI GI: 121704284 Blast Desc: NADP-dependent alcohol dehydrogenase [Aspergillus clavatus NRRL 1] gi|119398550|gb|EAW08980.1| NADP-dependent alcohol dehydrogenase [Aspergillus clavatus NRRL 1]
  misc_feature (15)..(329): SWISSPROT Homolog: EC 1.1.1.1 Alcohol dehydrogenase
MVAVTVFKGSATGVPTKDTVTRSDELTGDQVLMKITASGICGTDLHYVKAPIVLGHEGIGIVEEVGPNCTYLKKGDRVGFGYHHNSCGHCRECLTGRETYCKQRALYGFHDHDQGSVSSHAIWRESFLHKIPDSISDIEAAPLQCAGATVFNALQAHGSRPTETIGVMGIGGLGHLAIQFAAKMGNRVVVLSSSESKREQALELGAHEFVVTKGKTQLEVSSPLDRLIVTTSAQPDWASLLPILAPGASIHPLSVSRGNFEMPYSPIFLQGFTIQGSLVAARNVHREMLEFAALHNIKPITQTFPMTEDGVKEAFEKLERGDIHLKAVLLAQ

SEQ ID NO: 25317 - DNA, 1694 bp, Muscodor strobelii
  misc_feature: SGI EST ID NO. CUFF.59636.1
  misc_feature: Variant of the nucleotide sequence at SEQ ID NO 25315
attatgaggtaggtgtgctagattgcgctaggatcaaagaaggtgctcggagacgcggagtagtggaccgacctctagaccaataggagtctcggagtctaacacctcggccaattaccctgacaaactctaggcacaaaactaaactttcgcggctccgtgtgcgattcccctcttactcaatacatcctccactgctgcgacatattttacgcgacttatgtgtctgcaagtgatgtctaaagtccgtgacggcgtcatgccgttgatcctggcgaatgaattcctaataattctctgaggtaatcaactttgcgggtccgaaacatggaggagcgtcgaaaagagcccccttacgtattactaaagggaggaagaagacggcgctatgtcattgtgtgatcatcatcgcttgttatatatagctttggtatgacttgtctgaattctccatatcaattgagatcaacgcagatattacatactgccatacccgccctgctcgacagattacggtagatcacctgaagaaaaacaatcaatcgactaggcagtctatcatggttgcggtcacagtttttaagggctctgcgactggtgtcccgacaaaggacacggtaacgaggtcagatgagctcacgggtgatcaggtattgatgaagatcaccgcatcgggcatttgcgggacagatcttcattatgtaaaagcaccaattgtgctcggccatgagggaataggaattgtcgaggaagttggaccaaactgcacgtatctcaagaagggcgatcgggtaggctttggctatcatcataacagctgcggccattgcagggaatgcctgacgggcagggagacatactgcaaacagcgagctctttacggcttccatgatcatgaccaaggttccgtgtcgtcgcatgcaatctggcgcgaatcattcctgcacaagattcccgacagcataagcgatatcgaggctgctcccttgcagtgtgctggtgctacggtcttcaacgctttgcaagctcacggctcccggccaactgaaacgatcggcgtcatgggcattggcggtttaggccatttggcgattcaattcgctgcgaagatgggaaatagagtggttgtcctctccagctccgaaagtaagagagagcaagccctcgaactgggtgcgcatgagtttgttgtgaccaagggcaagacccagctcgaagtctcatcaccacttgatagacttatagtcacaacttcggcgcagccagactgggcatcgctcttgccaattctagcaccgggcgcttctattcatcccctctctgtgtctcgcggaaacttcgaaatgccgtattcgccgatcttcctccagggctttaccattcaaggctctctcgtcgcggcaagaaatgtacatcgcgagatgctcgagtttgctgctttacacaacataaaaccgattactcagacattcccgatgacagaggatggtgttaaagaggcatttgaaaagcttgaacgcggtgatattcacctcaaagctgtcttattggcgcagtaattaccctgtaccttaacttgataaactcgcaagtttgttaacgccacgctgtagagatcgtcgttggcaagtacaggatacatatggtagaatgaataatggacagtccttaaaatagactaccttcaaacttac

SEQ ID NO: 25318 - DNA, 1146 bp, Muscodor strobelii
  misc_feature: SGI cDNA ID NO. 568641
  misc_feature: Encodes the peptide sequence at SEQ ID NO 25319
atggctctcatagttccagagggaacgccggatcaacgtcctggcctagtggcgttgattatcactcttttggttctagtcattctagctatcattggccggatcacagcaaagttcgtcgtacggcagtattggtggtgggacgacttcttcgcacttctcgcatttccatcccaatctatcttgcttggcttgttattagcctggaaagacatcggtctcgggctccctatagcggtggtggcagccaacgacttgaagtacacagtattggggccaaagtatctctatgttgccatctttttcttcgacggcgccatatccttttccaaactatctgcaatcttcttctacgctcgcgttttcggctccagtaataagcgctttgttacgaacctctggatcgctggcggtctcactgtgggctgggttgtttcgggcttcttctcgagtctatttcaatgcattcccatacagagggcttgggaccattctgttgacgggcattgcatcaacaatttcgcctggtatctcagcaccgcggttttgtcctccctaatcgacttttacatcttgttgataccggtaccaatgatatggcgcctccaagcgagcctcagacgccgtatttacttgcttgctgcgtttttcctagcctactcggttgttgtcacctcactcggaagggtagtacttgcggtcacggtgatctctgaagtcgaagaggacttaacgtacaatttcgttccatatctgtactgggcagtcttggaagcatcgatctcggttattggcatcaatgtccccaacacaattgggctcctcaaggtggtacggcggagacttctgctaattactcggggttcggtcaaactggagcgggatacaaacacgaaattcatggtcccaaactcacctacggcgataataagaagcttatcgcgtggtagcgcccatgatggcttcgagcggctcgtaagcaacgaggacgcatttgcttggaatgtggatatacgggatcggcctagcccgtccgtggtgattggcaatccaatgaccacgattccactcaacagaatccatgtggaaactcagattagcgtgtcgagcggcaaagaggagcatacaccgggacaagcagtgtga

SEQ ID NO: 25319 - protein, 381 aa, Muscodor strobelii
  misc_feature: SGI Peptide ID NO. 568641
  misc_feature (1)..(369): NCBI GI: 145228617 Blast Desc: An01g01780 [Aspergillus niger] gi|134054708|emb|CAK43549.1| protein product [Aspergillus niger]
  misc_feature (1)..(373): NCBI GI: 238497123 Blast Desc: conserved [Aspergillus flavus NRRL3357] gi|220694677|gb|EED51021.1| conserved [Aspergillus flavus NRRL3357]
  misc_feature (1)..(373): NCBI GI: 169774355 Blast Desc: [Aspergillus oryzae RIB40] gi|83769508|dbj|BAE59643.1| protein product [Aspergillus oryzae]
  misc_feature (1)..(373): NCBI GI: 145228497 Blast Desc: An01g01150 [Aspergillus niger] gi|134054646|emb|CAK43491.1| protein product [Aspergillus niger]
  misc_feature (11)..(278): NCBI GI: 242797784 Blast Desc: conserved [Talaromyces stipitatus ATCC 10500] gi|242797794|ref|XP_002483035.1| conserved [Talaromyces stipitatus ATCC 10500] gi|218716378|gb|EED15799.1| conserved ATCC
  misc_feature (65)..(278): NCBI GI: 242797789 Blast Desc: conserved [Talaromyces stipitatus ATCC 10500] gi|218716379|gb|EED15800.1| conserved [Talaromyces stipitatus ATCC 10500]
  misc_feature (13)..(331): NCBI GI: 115395874 Blast Desc: conserved [Aspergillus terreus NIH2624] gi|114193145|gb|EAU34845.1| conserved [Aspergillus terreus NIH2624]
  misc_feature (13)..(280): NCBI GI: 256727339 Blast Desc: NECHADRAFT_32592 [Nectria haematococca mpVI 77-13-4]
  misc_feature (46)..(270): NCBI GI: 67537778 Blast Desc: AN5059.2 [Aspergillus nidulans FGSC A4] gi|40740863|gb|EAA60053.1| AN5059.2 [Aspergillus nidulans FGSC A4] gi|259482061|tpe|CBF76179.1| TPA: conserved [Aspergillus FGSC
  misc_feature (13)..(280): NCBI GI: 46121321 Blast Desc: FG05039.1 [Gibberella zeae PH-1]
MALIVPEGTPDQRPGLVALIITLLVLVILAIIGRITAKFVVRQYWWWDDFFALLAFPSQSILLGLLLAWKDIGLGLPIAVVAANDLKYTVLGPKYLYVAIFFFDGAISFSKLSAIFFYARVFGSSNKRFVTNLWIAGGLTVGWVVSGFFSSLFQCIPIQRAWDHSVDGHCINNFAWYLSTAVLSSLIDFYILLIPVPMIWRLQASLRRRIYLLAAFFLAYSVVVTSLGRVVLAVTVISEVEEDLTYNFVPYLYWAVLEASISVIGINVPNTIGLLKVVRRRLLLITRGSVKLERDTNTKFMVPNSPTAIIRSLSRGSAHDGFERLVSNEDAFAWNVDIRDRPSPSVVIGNPMTTIPLNRIHVETQISVSSGKEEHTPGQAV

SEQ ID NO: 25320 - DNA, 2465 bp, Muscodor strobelii
  misc_feature: SGI EST ID NO. CUFF.59498.0
  misc_feature: Variant of the nucleotide sequence at SEQ ID NO 25318
ctgcgaccccatcatgctacgcttcctgcaagcatcatcggccacattttcttacatggcgatatgtgcgcagttgtttcagtggaagtccttgtggacaggctacaagcataagattgctgtgagtaattgcaaccatacagggcagaggacagggtatgaaatggcattgccttgactgagtacttatctcaactgtcattgaacggcacagagttggagtatcttcttccggcactgatcgacatcatgaacttccaatgcagatgctttacgcgctccttcaatggaaccacacacttcgcaaagggccactcttcgggatgcaaataggagtctcacctcttatgtatcattcctactgtctttgtcgcgacgtttcgagtagcgattttcgaacttgacgtttaatattatattaccaaagcattcaaggattgtcatgaatagcccgaagattgatacggtccttgattgactaccgacaggtgtcccattatagaccccgggcgcgcccgctactactctcagtttatgataatacggccatctaacattgtaatctttcttataccaggccccaacctcgaactgagtctcggcgaggcgtacgtgggactcgtttcggtcacctcgagttaaactcatttttggttcaatgatgtctctgtaaaacattctcgacgccacgcttttcgttcgatgcgcgttatcatcacatctcgaagatttgaagacctagcaccatggctctcatagttccagagggaacgccggatcaacgtcctggcctagtggcgttgattatcactcttttggttctagtcattctagctatcattggccggatcacagcaaagttcgtcgtacggcagtattggtggtgggacgacttcttcgcacttctcgcatttccatcccaatctatcttgcttggcttgttattagcctggaaagacatcggtctcgggctccctatagcggtggtggcagccaacgacttgaagtacacagtattggggccaaagtatctctatgttgccatctttttcttcgacggcgccatatccttttccaaactatctgcaatcttcttctacgctcgcgttttcggctccagtaataagcgctttgttacgaacctctggatcgctggcggtctcactgtgggctgggttgtttcgggcttcttctcgagtctatttcaatgcattcccatacagagggcttgggaccattctgttgacgggcattgcatcaacaatttcgcctggtatctcagcaccgcggttttgtcctccctaatcgacttttacatcttgttgataccggtaccaatgatatggcgcctccaagcgagcctcagacgccgtatttacttgcttgctgcgtttttcctagcctactcggttgttgtcacctcactcggaagggtagtacttgcggtcacggtgatctctgaagtcgaagaggacttaacgtacaatttcgttccatatctgtactgggcagtcttggaagcatcgatctcggttattggcatcaatgtccccaacacaattgggctcctcaaggtggtacggcggagacttctgctaattactcggggttcggtcaaactggagcgggatacaaacacgaaattcatggtcccaaactcacctacggcgataataagaagcttatcgcgtggtagcgcccatgatggcttcgagcggctcgtaagcaacgaggacgcatttgcttggaatgtggatatacgggatcggcctagcccgtccgtggtgattggcaatccaatgaccacgattccactcaacagaatccatgtggaaactcagattagcgtgtcgagcggcaaagaggagcatacaccgggacaagcagtgtgattttgccggcatgtatgaaggattttcgtatggctggtagccggggtggcgtgttactaccgatgctacacggattcggacccctgccgccaattcatgcttacttggagaagctaggggctaataatgccctgaaccagaccgggatttgatgccacgtccatcacatcattggcccggcgattggcccagcgactgagatacgatagaagtcggggagtctttcctctgaggtgatccaaagtcgttgtttccatcctgaggacagaatcgagcaacggtttacttggtgattggattcatcgtaaaacgagcgtcagggtgcctttgaggacactcgaactgtagctagctatccaatgatccgcctgacttgtattgaaaatcagtcaacagagcgagagctgcatcgcggcatactagtaggggacagggtacaaatcgcaacaaggtctgctttgcaccgattcttacggaatgtttcaagaacacaatgctgaagacacgaatacatagtgatccccgggaagtttagtgcgatcacaattcaaaacaaaactacaaatactcaaa

SEQ ID NO: 25321 - DNA, 6939 bp, Muscodor strobelii
  misc_feature: SGI cDNA ID NO. 568642
  misc_feature: Encodes the peptide sequence at SEQ ID NO 25322
atgaaagggggttatttcttgcaaagtgatgttcgtgacttcgagaatagcttcttcgatattaacaatcttgaggcaacgcacatcgatccgcagcaaagaaagcttctggaagtcgtattccaatgctttgaagatgccggcgtggccctcgagaaagtctccgggtctaacactggttgctatgttgcaaacttcacaaatgattatcaaactattcaacgcaaggacccggactatgcccaccactatacagcgataggatccggtaccaccatactcgcaaatcggataagtcatgtattcaatctactagggcctagcctcgttctggacacagcttgttcttcgtccctctattgtctacatgctgcttgcacagcattggagaattacgaatgtgacgcggctatcgtcgctggcgctaacctgattctatctcctgaacaacatgtggctattatgaaggccggtgtgctttctcctacttcgacatgccacacattcgacattgccgcagacggttatggccgggcggatggaattggtgccttatatgttaagcgtctgcaagatgccatcgccgcaggtgatccaatccgtagcgtaattcgaggggttgccgttaacgccaacggtcgcacctcgggaataagtctccctagcataagtggccaggtgtcagtgatcgaaaaagccctgagaaggggcggactgagagccaacgacatatccttcatagaatgtcatggaacagggaccaaagtcggtgactcaatggagattgaagcgctggcgcgagtatttcgaaggacagaacgaggtgatcccttactcattggttctgtgaagacaaatgttggccactccgaggcagctagtggtattacgagcatcatcaaggccaccctagcaatggaacgagggatgattcccccaacttacggggtaacggaaatcaatcccaagctcaagattgaggaacggaacatggccatcccatgcacacttacggtatggcctgacacaccaggacttcgccgacttgttggctttaccaaaggtatcaactcttttggttatggcggtgcaaatgcgcattgcatccttgaagaagccccgaatctatccgatcaactaatcaaatgtcgagaaaagccaatacaatcgcattttgtactgccactgtctgctgcatccaactactcactagaatcccgactctccgatcttgccgagtttaacttctcgaatgaagatatgtcggacatagcttatacgcttggttcgaaacgcactcattttccagtacgaggctttcttgtggccgctcggtgggacgacagaaaagagatatttgagcggccattaatacgttccgctgtcgaaagcaagtcacacgagcttccgtatgcttttgtgttcacgggacaaggttctcaatggtatagaatgggatacgagctttggaaagagttttcagtattccgacaagttctggacgaattggatgcgacactgcagacacttcctcatgcccccgtatggaggctatctcaagctctatttggtgacaaatcagacttgatccatgaagccgatagatcacaaacctgctgcacagcaatccagatcgcgctcgttgttctcctcgcttcgtgggatatagtcccgtcaactgtagtgggtcactcttctggtgaaattgcagcggcattcgctgctggtcatctctctgcgggacaggcgatcacgattgcatattaccgtggataccttgtttcggatcctaagctgcggagagatggcgcaatgatggccgtgggaatatctagagagtctgctgagcaagaaatattgtctagtgggcttgtcagtgaagtcgcgatcgcatgtgtcaattccccagaaagcgtgacactttccgcggatctccgcgcgttaaggcagcttgaagggatcctacaatcgcgcaaacttcttgcaaagatactgaaaacggggggtcaggcataccactctcaccatatgatggcacacggtgcaaagtatgaagcattactcagtcaagtacttcctaccttgcttccatctcggcggttggcaagtggtccggtctttgtctcttcggtgaacgttggtgtcagatcttcagattttggcggagcctattggcgccagaatctagaaagcccggtggaattctcatcagctatcaactacattcagcagatgtctgaccatgtatttgtcgaagttggaccgcattcatctcttcaactgccaattcggcaatgtttggctaagtttgacatcacaggtacccacgtcaggtacgctgcgcctctcaagagaaacggcaatgcggtagagacgactctatatttcgctgggtcactgtggctacaaggatgtaatatcaactggtctaaagtcaatggattcagcgaaaattcttcggtgcgcgttatctcgaatcttccggcttacaaatttaattacgaaaatactctttggaaagagagtcgactaagctcagaatatcgttatcgcaagcatcgacgtcatgaactactcggatcattacttccaggtggtagtggccgggattttatcttccggaacctgctaagggtcggcgatgtcccatggctcgctgatcacaagttgggagaagcgattgtttttccgggcactgcatacctagcaatggcaatggaagccatgcttcaagttacgaatgcagatcgaacgtgttgtccttcgttttccttctcgcaggtcaacatcacctcgacccttatactgttggccgacaagacctcccagacagagattttcctttctctccgaagatccactctgacaaataccactgtctcatcaatttggtgggagttcaatgtcagttcgcatgttaatgaaacctcaatttctcacgtgactggctttgtgtctatgcaaattgaaaaatcggtaccgcctccgagaatcgagattccacgcgacgctctggagcctactgccacgcgtacctggtatcagagactggcgaaccgaggtctcaactatggacctgcctttcaaactattacacaattcaacacgccaagaatgaaacggagatcggatttgttttgtacagcagaagcacccctcattaaagcatccggagatttgaccacggaataccccatacatcctataactttagactctctgttgcagttggctgctgtttctgcagcaaatgggactccccgggatctgagcgctgtaatccctaccagaattgtatcagctaccatccggaccgcatctaatcaggcgggcggatcatgccgcttggtttctgtcgttaaaagaacaggatttgggtctttggaagcagaagcagagctcttgagagcggacggcgagttgcttgctcaattcgatcaagtcaagttggtcccctactccgataccgcacagtcgatacgcgggagcgaaaagcggcatccggtgatacgagtgttgtggaaacccgatgtctgtggcctcgttgatgatattttaccttcttctgcgttagaacaatgggtgagggagttttcagggcagacattggatgacgaaccggagccgggaagctctttgacggagcttaaagctgttctcgacttgctaactcataaggagccacgagcgcgtatccttgaactgggtaatcttgaaacttctttgagtaacacgattctcgaattcttgtcatctgacaccgacttcaagagatacctcagctatactaaagcatcattcaatgaaaagggcctgctttggtgtaaggatgttgatgcatctatcaatcatacttcctcacaagaaacacgagttcaaacagagccatttgacctagtgttggtaaccgccagtgtatcattgatacaagcactccttccctctatcatcgaagtgctgacgaatagcgccttcgtggttttccttggctttgattctaacataagtgtgctggagaattatgggttctcctaccgcaaaatacttgcgaatggagacagaaaagatttggttgttgcaagacgatcgcctcttccaccccgcgtcgatctacccgagcagaacttcttgattgttgagagtgaaatctctcctcttgctacagaaacggccagctacatcgcgcaaagattaggacggggctcgacggtcgttcgaaagacacttggcagcctttcgaaagctgatgttcccccagatacagttgtcttcaacttttgtgagctgaattcaccgcttctcagctgtatctctgagcaagagatgcaacgtgtcaagattttgacggataacgcgaaggccttggtatggattactgccggtaatgctctaaaaggtgataagcccgacctttgcattgcaacgggtttagcgagagctgtcagcatggagcaaccttcattgaaattttatacttacgacatcgacgatccagagagagacatagataccactattagacacctcatgagcgttgttactcaaccatgttcccgacctgatctggagtttatccagcgtaacgggatcgtatacatcagtcgattgataccagacgaaagagttaatgcactttttagaaacaaacaaggtctcgaaccaagtctcatgactatgtcaagggcaaagaatctgaggctcgaaatcggaaaacccggtcaattcgacaccattctgttcaaacaactagatcctccgccagaagtcgcatctgggcacttgcgcatcgaagtcgcctctgttggcgtcaatgctaaagatttttatgtacttgcaggaaaagtagaaactcacaactcgacttgtcaattagagtgcacaggtacagtggtgcaggttagttccgatgtcactgacttttcagttggagatcgtgttgtggccatggctccatgtcattttcaaacataccaggatttacctgcctggtcatgccaccggttaaacgagaccgacagttttgatagatgcgcaacgctgcctgtcgtgtatgcaacagcactctatgccttacatcaccgggcccgtattcaagcaggggagacggtattgattcattcaggagcaggaggtgttggtattgcggcgattgaagtcgcacttgcagccggagccgagatctatactactgtgtcgacagatgagaagcgagagtttctagttacaactttcggtatccccgagtcccacatattcaattctcgagactcgtccttttatgaaggaataatggtagctacgcaaggttacggagttgacgttgtgttgaactccctaaccggcgatcaactacatgctacctggaaatgcgtagccgacttcggtcggtttgtggaaattgggaaagccgatctttcggaagctggtagactcgaaatggaacaattcctgaagaacacgacattcacggcgttcgatctaagtcatctctacaacacgaacaacaaaaagcaccgctccctctggaatcgactcctatcgcaggttattgaattgtatcgccagcgtaagatagcaacatcggtaccgctatcaatcgttgatgtctcccaggtcgcagatgcttaccgcctattcgcatcacgaagtcggattggaaaggtggcaatcaacctcgggaacgcttcttctgaagtcaaagtgcagagtcggaaattcatgaccgtattctcccctcgaaagagttacatcatgataggatgtctgggtggtctaggtcgctcgcttgctcgatggatgttcagccgtggggctcgaaagtttgttttccttagccggtcaggtctacggacaaacgctgcaaaagacttgatttcggatctcgaaagactaggttctcagacgtgtgttgttgccggcgacgtttgtgactcaatcgctgttgaattagttgtcaagaacgccattgacatggctgatgtgggaggcgtggtacaagctgctatggggctcagcgagtccattttttcagctatgccagcgagctcttggcacaaagcaatcaatccgaaagtcaaaggaacttggaatctttacaacgctttaagatccaatacagcgcttgcacagctcgagttcttcttgatgacctcatcgatatctggaagcctcggaaccgttgcagaagctaactattgtgctggtaattatttcttagacatatttgctcgatatctgcgcagccagggcgtgcctggtctttcgatcggattgggaatgatatccgagatcggctatttgcatgacaaccccaatattgaagcaatgcttttacgcaaaggtatcgcgcctatcgattccgacgaagtcttgcagatagtagacttggctttatcgtctcaggcgatacctggaggcttgtctcatggtatcaatgaaacggcctcgtcacacttgttgacaggcttggaagcttcgggaatacgagatctacgtgaaagggggtttcagggtaatcatcccgcattgagggatgtgcgatcaagtctcctcgcaggtgcactaggggacagctctgttgattcgcagcgtacgcacagaagggacctgccagctgagattgtaaagtctatcgattccggtcactcattttctcaggctgtttcgcattatgttcgctgccgctttgccagtatggtcctaatgaaagctgacgcaatggcaaccgagaaaccccttacggagtacggcatggacagcatgctgggggccgagctgagaacttggatttatgagaatttgagaacggacatcgcattatcgacgttgctaggcaagacgtgtaccttgcaggacataatcgagtcagtggtcactcatacagagacaatgagcgatgggtataaaaatggtactacgaatggtactgggatgacatga

SEQ ID NO: 25322 - protein, 2312 aa, Muscodor strobelii
  misc_feature: SGI Peptide ID NO. 568642
  misc_feature (472)..(807): Pfam Id: PF00698 Pfam Desc: Acyl transferase domain
  misc_feature (1591)..(1668): Pfam Id: PF08240 Pfam Desc: Alcohol dehydrogenase GroES-like domain
  misc_feature (1914)..(2084): Pfam Id: PF00106 Pfam Desc: short chain dehydrogenase
  misc_feature (1699)..(1851): Pfam Id: PF00107 Pfam Desc: Zinc-binding dehydrogenase
  misc_feature (1)..(193): Pfam Id: PF00109 Pfam Desc: Beta-ketoacyl synthase, N-terminal domain
  misc_feature (201)..(318): Pfam Id: PF02801 Pfam Desc: Beta-ketoacyl synthase, C-terminal domain
  misc_feature (1915)..(2097): Pfam Id: PF08659 Pfam Desc: KR domain
  misc_feature (541)..(651): Pfam Id: PF00698 Pfam Desc: Acyl transferase domain
  misc_feature (472)..(508): Pfam Id: PF00698 Pfam Desc: Acyl transferase domain
  misc_feature (707)..(807): Pfam Id: PF00698 Pfam Desc: Acyl transferase domain
  misc_feature (1625)..(1668): Pfam Id: PF08240 Pfam Desc: Alcohol dehydrogenase GroES-like domain
  misc_feature (2)..(193): Pfam Id: PF00109 Pfam Desc: Beta-ketoacyl synthase, N-terminal domain
  misc_feature (1)..(2283): NCBI GI: 85119238 Blast Desc: NCU02918 [Neurospora crassa OR74A] gi|28927411|gb|EAA36364.1| conserved [Neurospora crassa OR74A]
  misc_feature (3)..(2296): NCBI GI: 169774353 Blast Desc: [Aspergillus oryzae RIB40] gi|83769507|dbj|BAE59642.1| protein product [Aspergillus oryzae]
  misc_feature (2)..(2286): NCBI GI: 242797798 Blast Desc: polyketide synthase, [Talaromyces stipitatus ATCC 10500] gi|218716381|gb|EED15802.1| polyketide synthase, [Talaromyces stipitatus ATCC 10500]
  misc_feature (3)..(2290): NCBI GI: 40806923 Blast Desc: polyketide synthase [Gibberella moniliformis]
  misc_feature (3)..(2296): NCBI GI: 238497127 Blast Desc: polyketide synthase, [Aspergillus flavus NRRL3357] gi|220694679|gb|EED51023.1| polyketide synthase, [Aspergillus flavus NRRL3357]
  misc_feature (1)..(2290): NCBI GI: 242773383 Blast Desc: polyketide synthase, [Talaromyces stipitatus ATCC 10500] gi|218721848|gb|EED21266.1| polyketide synthase, [Talaromyces stipitatus ATCC 10500]
  misc_feature (3)..(2291): NCBI GI: 145228493 Blast Desc: An01g01130 [Aspergillus niger] gi|134054644|emb|CAK43489.1| protein product [Aspergillus niger]
  misc_feature (3)..(2288): NCBI GI: 145602522 Blast Desc: MGG_10912 [Magnaporthe grisea 70-15] gi|145010936|gb|EDJ95592.1| MGG_10912 [Magnaporthe grisea 70-15]
  misc_feature (3)..(2283): NCBI GI: 242823008 Blast Desc: polyketide synthase, [Talaromyces stipitatus ATCC 10500] gi|218712925|gb|EED12350.1| polyketide synthase, [Talaromyces stipitatus ATCC 10500]
  misc_feature (1)..(2290): NCBI GI: 240110610 Blast Desc: polyketide synthase, [Coccidioides posadasii C735 delta SOWgp]
  misc_feature (4)..(1154): SWISSPROT Homolog: EC 2.3.1.161 Lovastatin nonaketide synthase
  misc_feature: Useful for fungicidal and/or biocontrol applications
MKGGYFLQSDVRDFENSFFDINNLEATHIDPQQRKLLEVVFQCFEDAGVALEKVSGSNTGCYVANFTNDYQTIQRKDPDYAHHYTAIGSGTTILANRISHVFNLLGPSLVLDTACSSSLYCLHAACTALENYECDAAIVAGANLILSPEQHVAIMKAGVLSPTSTCHTFDIAADGYGRADGIGALYVKRLQDAIAAGDPIRSVIRGVAVNANGRTSGISLPSISGQVSVIEKALRRGGLRANDISFIECHGTGTKVGDSMEIEALARVFRRTERGDPLLIGSVKTNVGHSEAASGITSIIKATLAMERGMIPPTYGVTEINPKLKIEERNMAIPCTLTVWPDTPGLRRLVGFTKGINSFGYGGANAHCILEEAPNLSDQLIKCREKPIQSHFVLPLSAASNYSLESRLSDLAEFNFSNEDMSDIAYTLGSKRTHFPVRGFLVAARWDDRKEIFERPLIRSAVESKSHELPYAFVFTGQGSQWYRMGYELWKEFSVFRQVLDELDATLQTLPHAPVWRLSQALFGDKSDLIHEADRSQTCCTAIQIALVVLLASWDIVPSTVVGHSSGEIAAAFAAGHLSAGQAITIAYYRGYLVSDPKLRRDGAMMAVGISRESAEQEILSSGLVSEVAIACVNSPESVTLSADLRALRQLEGILQSRKLLAKILKTGGQAYHSHHMMAHGAKYEALLSQVLPTLLPSRRLASGPVFVSSVNVGVRSSDFGGAYWRQNLESPVEFSSAINYIQQMSDHVFVEVGPHSSLQLPIRQCLAKFDITGTHVRYAAPLKRNGNAVETTLYFAGSLWLQGCNINWSKVNGFSENSSVRVISNLPAYKFNYENTLWKESRLSSEYRYRKHRRHELLGSLLPGGSGRDFIFRNLLRVGDVPWLADHKLGEAIVFPGTAYLAMAMEAMLQVTNADRTCCPSFSFSQVNITSTLILLADKTSQTEIFLSLRRSTLTNTTVSSIWWEFNVSSHVNETSISHVTGFVSMQIEKSVPPPRIEIPRDALEPTATRTWYQRLANRGLNYGPAFQTITQFNTPRMKRRSDLFCTAEAPLIKASGDLTTEYPIHPITLDSLLQLAAVSAANGTPRDLSAVIPTRIVSATIRTASNQAGGSCRLVSVVKRTGFGSLEAEAELLRADGELLAQFDQVKLVPYSDTAQSIRGSEKRHPVIRVLWKPDVCGLVDDILPSSALEQWVREFSGQTLDDEPEPGSSLTELKAVLDLLTHKEPRARILELGNLETSLSNTILEFLSSDTDFKRYLSYTKASFNEKGLLWCKDVDASINHTSSQETRVQTEPFDLVLVTASVSLIQALLPSIIEVLTNSAFVVFLGFDSNISVLENYGFSYRKILANGDRKDLVVARRSPLPPRVDLPEQNFLIVESEISPLATETASYIAQRLGRGSTVVRKTLGSLSKADVPPDTVVFNFCELNSPLLSCISEQEMQRVKILTDNAKALVWITAGNALKGDKPDLCIATGLARAVSMEQPSLKFYTYDIDDPERDIDTTIRHLMSVVTQPCSRPDLEFIQRNGIVYISRLIPDERVNALFRNKQGLEPSLMTMSRAKNLRLEIGKPGQFDTILFKQLDPPPEVASGHLRIEVASVGVNAKDFYVLAGKVETHNSTCQLECTGTVVQVSSDVTDFSVGDRVVAMAPCHFQTYQDLPAWSCHRLNETDSFDRCATLPVVYATALYALHHRARIQAGETVLIHSGAGGVGIAAIEVALAAGAEIYTTVSTDEKREFLVTTFGIPESHIFNSRDSSFYEGIMVATQGYGVDVVLNSLTGDQLHATWKCVADFGRFVEIGKADLSEAGRLEMEQFLKNTTFTAFDLSHLYNTNNKKHRSLWNRLLSQVIELYRQRKIATSVPLSIVDVSQVADAYRLFASRSRIGKVAINLGNASSEVKVQSRKFMTVFSPRKSYIMIGCLGGLGRSLARWMFSRGARKFVFLSRSGLRTNAAKDLISDLERLGSQTCVVAGDVCDSIAVELVVKNAIDMADVGGVVQAAMGLSESIFSAMPASSWHKAINPKVKGTWNLYNALRSNTALAQLEFFLMTSSISGSLGTVAEANYCAGNYFLDIFARYLRSQGVPGLSIGLGMISEIGYLHDNPNIEAMLLRKGIAPIDSDEVLQIVDLALSSQAIPGGLSHGINETASSHLLTGLEASGIRDLRERGFQGNHPALRDVRSSLLAGALGDSSVDSQRTHRRDLPAEIVKSIDSGHSFSQAVSHYVRCRFASMVLMKADAMATEKPLTEYGMDSMLGAELRTWIYENLRTDIALSTLLGKTCTLQDIIESVVTHTETMSDGYKNGTTNGTGMT

SEQ ID NO: 25323 - DNA, 402 bp, Muscodor strobelii
  misc_feature: SGI EST ID NO. CUFF.59512.0
  misc_feature: Variant of the nucleotide sequence at SEQ ID NO 25321
gttgccgttaacgccaacggtcgcacctcgggaataagtctccctagcataagtggccaggtgtcagtgatcgaaaaagccctgagaaggggcggactgagagccaacgacatatccttcatagaatgtcatggaacagggaccaaagtcggtgactcaatggagattgaagcgctggcgcgagtatttcgaaggacagaacgaggtgatcccttactcattggttctgtgaagacaaatgttggccactccgaggcagctagtggtattacgagcatcatcaaggccaccctagcaatggaacgagggatgattcccccaacttacggggtaacggaaatcaatcccaagctcaagattgaggaacggaacatggccatcccatgcacacttacggtatgg

SEQ ID NO: 25324 - DNA, 1767 bp, Muscodor strobelii
  misc_feature: SGI cDNA ID NO. 568643
  misc_feature: Encodes the peptide sequence at SEQ ID NO 25325
atgctttctggagaggacattcgcatcctgcatctgctgccaccaactcaagatgatccagaagcccctatagtctgtgatatcagtgttaccacacttacgagtcctccgagcagcccttacgaggcggtctcatacacttgggatgatcagctaccctcaatgcctatagaggtttcaggccgacagcttagtataacccgcaacttacacgcagcgcttcgccaatttcgattactaggacgtacgcggaacttatggatcgatcagctatgtattcagcaatggaatctagacgagaaagcacagcaggtaaagctcatgcggcagatctacacatcctgcacgcgatgtctggcttggctgggtgaaattccagcaggtattgcactcgaggatgcaagaaggggactggccatcattacccatatggctgagcactggaagagagaggcagattatagctcgcctatagtaaagcagctatcggacaaaactatattcgcgcgcgcaatgaatgcgcttcagtatatctgctggccgcataacccgtggtggtggcggatctggacggtccaagaagctgcgcttcctcgagatgttattgtacattggggaccattgacgatctcgtgggatgtcatgacaaacgctacaagagcctacacacgcagcatgccgccaatcttgaagcatgcgcttcctagtcatcaagaccttactctgaaccatttactggtccgtaccatatggttgaatgtaagcaggatgcggttggacacacctttcgaagttctaaataagtggcgtcttcgaaaggcaacagatccacgggataagacctatgggctactagggttatgcgacgccgaggttctaccagttacgaagcactgcaactacaatctcactgcagcgaccgtttttcggtcgttgtcgctcgacctgattatgagtgagaagacgttaaggccattgatggttgatcctcaaatcgaattagagagagctaccccaggaatccggcgatgggcgttagatctctcttcgatgccaagattccacgtagactggtattaccacctatatggtaccgatgtctatagagccgacagagggctacaaccacttgatttgaagctcgtaaaagcaagctatatagaggaggcgctggcactaaagggtgtcagagtcgataaaatcgtgagctctcacgaagggcaacggaccatggacgttggacgtcgtggacctatacgaaacgtcgtgaagcgatggcatgatgttgtagaaggcaaagtaggcaacccagggccaggagttccagatccatattcaaagggctgttctagattcgaggcgttctcaagactattgtttggggatcgatttcgagacggcgagcagagagttgttggaacgccaaaagcagagacaatcatgactcatattgcgaagatcctgcggacagacgaatatacttatccactcaatgtggaagtaacggtatggggtctcatcgcgaatcgcgcattgttcattacggagaccggcttgataggctcgggccatcttgatacacgggtcggagacgaggtttggatcttcagaggaggatctatacctttcgttgtgcgcccgcgagaatctgatggaaagatagagagagattttgtaggcggttgctatgttcaaggtatcatggagggtgaggctctcataagggagaaggagagtccaattgaacaaactgtgtatctttactga

SEQ ID NO: 25325 - protein, 588 aa, Muscodor strobelii
  misc_feature: SGI Peptide ID NO. 568643
  misc_feature (41)..(194): Pfam Id: PF06985 Pfam Desc: Heterokaryon incompatibility protein (HET)
  misc_feature (41)..(123): Pfam Id: PF06985 Pfam Desc: Heterokaryon incompatibility protein (HET)
  misc_feature (7)..(358): NCBI GI: 261352782 Blast Desc: heterokaryon incompatibility protein [Verticillium albo-atrum VaMs.102]
  misc_feature (2)..(575): NCBI GI: 256733819 Blast Desc: NECHADRAFT_77355 [Nectria haematococca mpVI 77-13-4]
  misc_feature (5)..(304): NCBI GI: 154293145 Blast Desc: BC1G_14558 [Botryotinia fuckeliana B05.10] gi|150845598|gb|EDN20791.1| BC1G_14558 [Botryotinia fuckeliana B05.10]
  misc_feature (2)..(573): NCBI GI: 256733343 Blast Desc: NECHADRAFT_77319 [Nectria haematococca mpVI 77-13-4]
  misc_feature (2)..(558): NCBI GI: 256724252 Blast Desc: NECHADRAFT_87550 [Nectria haematococca mpVI 77-13-4]
  misc_feature (3)..(581): NCBI GI: 169619541 Blast Desc: SNOG_12969 [Phaeosphaeria nodorum SN15] gi|111058649|gb|EAT79769.1| SNOG_12969 [Phaeosphaeria nodorum SN15]
  misc_feature (6)..(317): NCBI GI: 256731981 Blast Desc: NECHADRAFT_80908 [Nectria haematococca mpVI 77-13-4]
  misc_feature (3)..(586): NCBI GI: 164423694 Blast Desc: NCU07897 [Neurospora crassa OR74A] gi|157070201|gb|EAA32550.2| [Neurospora crassa OR74A]
  misc_feature (2)..(578): NCBI GI: 256724019 Blast Desc: NECHADRAFT_86353 [Nectria haematococca mpVI 77-13-4]
  misc_feature (4)..(587): NCBI GI: 256730775 Blast Desc: NECHADRAFT_30134 [Nectria haematococca mpVI 77-13-4]
MLSGEDIRILHLLPPTQDDPEAPIVCDISVTTLTSPPSSPYEAVSYTWDDQLPSMPIEVSGRQLSITRNLHAALRQFRLLGRTRNLWIDQLCIQQWNLDEKAQQVKLMRQIYTSCTRCLAWLGEIPAGIALEDARRGLAIITHMAEHWKREADYSSPIVKQLSDKTIFARAMNALQYICWPHNPWWWRIWTVQEAALPRDVIVHWGPLTISWDVMTNATRAYTRSMPPILKHALPSHQDLTLNHLLVRTIWLNVSRMRLDTPFEVLNKWRLRKATDPRDKTYGLLGLCDAEVLPVTKHCNYNLTAATVFRSLSLDLIMSEKTLRPLMVDPQIELERATPGIRRWALDLSSMPRFHVDWYYHLYGTDVYRADRGLQPLDLKLVKASYIEEALALKGVRVDKIVSSHEGQRTMDVGRRGPIRNVVKRWHDVVEGKVGNPGPGVPDPYSKGCSRFEAFSRLLFGDRFRDGEQRVVGTPKAETIMTHIAKILRTDEYTYPLNVEVTVWGLIANRALFITETGLIGSGHLDTRVGDEVWIFRGGSIPFVVRPRESDGKIERDFVGGCYVQGIMEGEALIREKESPIEQTVYLY

SEQ ID NO: 25326 - DNA, 2115 bp, Muscodor strobelii
  misc_feature: SGI EST ID NO. CUFF.59560.0
  misc_feature: Variant of the nucleotide sequence at SEQ ID NO 25324
cgagcttcatgcggttccaagtccggcgtaagcgctgcttgtatccatggatgcaccaatcgtattagggaaaagggcatctgggaatacatatccttgactggatgcgtctacaccaaaaagcaaagctataagcctggttcactcctgccgagcagctaaatgactacgctcaccttgatctgattgaaagttgcttccagatttaacacaaaataaatttgtcgagtgtttattaacaagggcccagcgttgttgtacacaatatgctttctggagaggacattcgcatcctgcatctgctgccaccaactcaagatgatccagaagcccctatagtctgtgatatcagtgttaccacacttacgagtcctccgagcagcccttacgaggcggtctcatacacttgggatgatcagctaccctcaatgcctatagaggtttcaggccgacagcttagtataacccgcaacttacacgcagcgcttcgccaatttcgattactaggacgtacgcggaacttatggatcgatcagctatgtattcagcaatggaatctagacgagaaagcacagcaggtaaagctcatgcggcagatctacacatcctgcacgcgatgtctggcttggctgggtgaaattccagcaggtattgcactcgaggatgcaagaaggggactggccatcattacccatatggctgagcactggaagagagaggcagattatagctcgcctatagtaaagcagctatcggacaaaactatattcgcgcgcgcaatgaatgcgcttcagtatatctgctggccgcataacccgtggtggtggcggatctggacggtccaagaagctgcgcttcctcgagatgttattgtacattggggaccattgacgatctcgtgggatgtcatgacaaacgctacaagagcctacacacgcagcatgccgccaatcttgaagcatgcgcttcctagtcatcaagaccttactctgaaccatttactggtccgtaccatatggttgaatgtaagcaggatgcggttggacacacctttcgaagttctaaataagtggcgtcttcgaaaggcaacagatccacgggataagacctatgggctactagggttatgcgacgccgaggttctaccagttacgaagcactgcaactacaatctcactgcagcgaccgtttttcggtcgttgtcgctcgacctgattatgagtgagaagacgttaaggccattgatggttgatcctcaaatcgaattagagagagctaccccaggaatccggcgatgggcgttagatctctcttcgatgccaagattccacgtagactggtattaccacctatatggtaccgatgtctatagagccgacagagggctacaaccacttgatttgaagctcgtaaaagcaagctatatagaggaggcgctggcactaaagggtgtcagagtcgataaaatcgtgagctctcacgaagggcaacggaccatggacgttggacgtcgtggacctatacgaaacgtcgtgaagcgatggcatgatgttgtagaaggcaaagtaggcaacccagggccaggagttccagatccatattcaaagggctgttctagattcgaggcgttctcaagactattgtttggggatcgatttcgagacggcgagcagagagttgttggaacgccaaaagcagagacaatcatgactcatattgcgaagatcctgcggacagacgaatatacttatccactcaatgtggaagtaacggtatggggtctcatcgcgaatcgcgcattgttcattacggagaccggcttgataggctcgggccatcttgatacacgggtcggagacgaggtttggatcttcagaggaggatctatacctttcgttgtgcgcccgcgagaatctgatggaaagatagagagagattttgtaggcggttgctatgttcaaggtatcatggagggtgaggctctcataagggagaaggagagtccaattgaacaaactgtgtatctttactgaaacgaacttcgatgaaagactgatgtccacattttatcaagaaccaccggtctgagagaccatcgaaattaagacccggtgg

SEQ ID NO: 25327 - DNA, 1485 bp, Muscodor strobelii
  misc_feature: SGI cDNA ID NO. 568644
  misc_feature: Encodes the peptide sequence at SEQ ID NO 25328
atgtattgccaaaagtgtcgcgctcctttgaaactcgatggctcccttaccgatctgaaccccgctgcctttgacttgctcgtcgcttccaccgctcaacagcaacctaaacgaccatcctccacacgcccctcatatccacatgaatccgaacggcgcgctctctacgacagagtgtccaagaatgcagggccggcaacattcaagaggcaaagcggccatccgcgcgacagctctgccatgtcctttgtgctcctgaccgagtcgcaagtcgcgcccccgcgcttgacaggcccgacggaacagcctagcaccaagcagcgccgacagtctctctccatgagccagcgcgccgatagagctgctcagccccacgaagccgaacgcatagaaaagctattcgagattctatcggcgcgatccgatgtcgaccatcccgtctgcgtggagtgcacagagatgctggtagatggtctacagaagagactggaatccacggccagagagcgagacgcgtacgccgggtttctaaaacaggtccaagccgacatccccaccgcagacgacattgctgagtccgaacgcaccctagccaaagcgcggaaacaagaagaagaatcactggcagagctcataacactcgaaaaacaaaaggcagccctcgacgaagagatccttgccctggaagaagaatcccagaaactcgatctagaggaagagcagttctggcgcgagcgcaacgccttcgcgaccaagctctccgactttcaaaacgagcgcgacagcataaactccaagttcgaccacgactcgcagctcctcggcaaactccagcgcgcaaacgtgtacaacgacacattctccatccatcacgacggcaatttcgccactataaacgggctacggctaggaaagctctcgtccaagccagtagactggccggagatcaacgcagcatggggtcaagccctcttactcgtcgtcaccgtcgccgataaactgggctgcaagttcgacggctatgaacccttacctatgggctcaacatccaagatcataaaatatgaggcgcaatccccctcctcttctcgacttggcggccatcgtaccggtcccccgcccgctccaaagaagtccgtcctcgatctttactgtaccggggatctgcccctgcaaatgctgtggaaccgctcctttgacaaaggcatggtagccttccttgagctcttgcgtcaactcggggtgtttgtctatgaacagactagcgctgcggatgcatatagtacgggacccctaggtcttccgtatagaatcgagggagataagattggagaggagaagggcggacattatagtatcagacttgggatcacgaatgatgagggatggaccaaggcttgcaagtatgcgcttacttgttgcaagttcctgattgcgcatgcgagtaacgtgagttatcttgctgcgaggaacgaggccagatga

SEQ ID NO: 25328 - protein, 494 aa, Muscodor strobelii
  misc_feature: SGI Peptide ID NO. 568644
  misc_feature (126)..(488): Pfam Id: PF04111 Pfam Desc: Autophagy protein Apg6
  misc_feature (1)..(489): NCBI GI: 256735452 Blast Desc: NECHADRAFT_30705 [Nectria haematococca mpVI 77-13-4]
  misc_feature (1)..(485): NCBI GI: 154320744 Blast Desc: BC1G_01844 [Botryotinia fuckeliana B05.10] gi|150853533|gb|EDN28725.1| BC1G_01844 [Botryotinia fuckeliana B05.10]
  misc_feature (1)..(488): NCBI GI: 145615926 Blast Desc: MGG_03694 [Magnaporthe grisea 70-15] gi|73476189|emb|CAJ26339.1| beclin 1 [Magnaporthe grisea] gi|145009711|gb|EDJ94367.1| MGG_03694 [Magnaporthe grisea 70-15]
  misc_feature (1)..(485): NCBI GI: 156040475 Blast Desc: SS1G_12254 [Sclerotinia sclerotiorum 1980] gi|154696310|gb|EDN96048.1| SS1G_12254 [Sclerotinia sclerotiorum 1980]
  misc_feature (1)..(485): NCBI GI: 46107592 Blast Desc: FG00679.1 [Gibberella zeae PH-1]
  misc_feature (1)..(488): NCBI GI: 171687649 Blast Desc: protein product [Podospora anserina] gi|170943786|emb|CAP69438.1| protein product [Podospora anserina]
  misc_feature (1)..(483): NCBI GI: 121719854 Blast Desc: autophagy protein Apg6, [Aspergillus clavatus NRRL 1] gi|119404837|gb|EAW15199.1| autophagy protein Apg6, [Aspergillus clavatus NRRL 1]
  misc_feature (1)..(483): NCBI GI: 119484566 Blast Desc: autophagy protein Apg6, [Neosartorya fischeri NRRL 181] gi|119410218|gb|EAW20165.1| autophagy protein Apg6, [Neosartorya fischeri NRRL 181]
  misc_feature (1)..(483): NCBI GI: 115491219 Blast Desc: conserved [Aspergillus terreus NIH2624] gi|114197097|gb|EAU38797.1| conserved [Aspergillus terreus NIH2624]
  misc_feature (1)..(491): NCBI GI: 242799690 Blast Desc: autophagy protein Apg6, [Talaromyces stipitatus ATCC 10500] gi|218716777|gb|EED16198.1| autophagy protein Apg6, [Talaromyces stipitatus ATCC 10500]
MYCQKCRAPLKLDGSLTDLNPAAFDLLVASTAQQQPKRPSSTRPSYPHESERRALYDRVSKNAGPATFKRQSGHPRDSSAMSFVLLTESQVAPPRLTGPTEQPSTKQRRQSLSMSQRADRAAQPHEAERIEKLFEILSARSDVDHPVCVECTEMLVDGLQKRLESTARERDAYAGFLKQVQADIPTADDIAESERTLAKARKQEEESLAELITLEKQKAALDEEILALEEESQKLDLEEEQFWRERNAFATKLSDFQNERDSINSKFDHDSQLLGKLQRANVYNDTFSIHHDGNFATINGLRLGKLSSKPVDWPEINAAWGQALLLVVTVADKLGCKFDGYEPLPMGSTSKIIKYEAQSPSSSRLGGHRTGPPPAPKKSVLDLYCTGDLPLQMLWNRSFDKGMVAFLELLRQLGVFVYEQTSAADAYSTGPLGLPYRIEGDKIGEEKGGHYSIRLGITNDEGWTKACKYALTCCKFLIAHASNVSYLAARNEAR

SEQ ID NO: 25329 - DNA, 2072 bp, Muscodor strobelii
  misc_feature: SGI EST ID NO. CUFF.59750.1
  misc_feature: Variant of the nucleotide sequence at SEQ ID NO 25327
taagacgctaaggcagcttggggggacagataagccccggaatgcgacgggctcgtgacgtacctctcacaaggcacatcactcacttcaacacggccctgtcccgtctgaatctcacagcttcaactaagccgtcctgtaatttatatggtgtctcttgcattccatgacacgcgctgctctaggtgtcctattaggagtcgtgagctcaacatggaaagtttataaaagtccttttcctcacttctgacacagtcacggcataatcccaatccacggcacatcatcctctcatcatcatcatcaccatgtattgccaaaagtgtcgcgctcctttgaaactcgatggctcccttaccgatctgaaccccgctgcctttgacttgctcgtcgcttccaccgctcaacagcaacctaaacgaccatcctccacacgcccctcatatccacatgaatccgaacggcgcgctctctacgacagagtgtccaagaatgcagggccggcaacattcaagaggcaaagcggccatccgcgcgacagctctgccatgtcctttgtgctcctgaccgagtcgcaagtcgcgcccccgcgcttgacaggcccgacggaacagcctagcaccaagcagcgccgacagtctctctccatgagccagcgcgccgatagagctgctcagccccacgaagccgaacgcatagaaaagctattcgagattctatcggcgcgatccgatgtcgaccatcccgtctgcgtggagtgcacagagatgctggtagatggtctacagaagagactggaatccacggccagagagcgagacgcgtacgccgggtttctaaaacaggtccaagccgacatccccaccgcagacgacattgctgagtccgaacgcaccctagccaaagcgcggaaacaagaagaagaatcactggcagagctcataacactcgaaaaacaaaaggcagccctcgacgaagagatccttgccctggaagaagaatcccagaaactcgatctagaggaagagcagttctggcgcgagcgcaacgccttcgcgaccaagctctccgactttcaaaacgagcgcgacagcataaactccaagttcgaccacgactcgcagctcctcggcaaactccagcgcgcaaacgtgtacaacgacacattctccatccatcacgacggcaatttcgccactataaacgggctacggctaggaaagctctcgtccaagccagtagactggccggagatcaacgcagcatggggtcaagccctcttactcgtcgtcaccgtcgccgataaactgggctgcaagttcgacggctatgaacccttacctatgggctcaacatccaagatcataaaatatgaggcgcaatccccctcctcttctcgacttggcggccatcgtaccggtcccccgcccgctccaaagaagtccgtcctcgatctttactgtaccggggatctgcccctgcaaatgctgtggaaccgctcctttgacaaaggcatggtagccttccttgagctcttgcgtcaactcggggtgtttgtctatgaacagactagcgctgcggatgcatatagtacgggacccctaggtcttccgtatagaatcgagggagataagattggagaggagaagggcggacattatagtatcagacttgggatcacgaatgatgagggatggaccaaggcttgcaagtatgcgcttacttgttgcaagttcctgattgcgcatgcgagtaacgtgagttatcttgctgcgaggaacgaggccagatgatggcatttactgggaattctggggtgattggcaagcgttggtgtccggcgtttcggtatagatctgataactaggtggacgcaatgtagtgctgcattctgtcgtcgttgggtttatagccacgtcctctacagtaaaatccgacatacaatgaatttcttgaagatgcctgatgcagagtctattcattagagtgttcgcagcagaatgtctcatacctgcaaagagtatccgctatccttggcgtaacgcgaatactttttcgagatactacactcc

SEQ ID NO: 25330 - DNA, 1086 bp, Muscodor strobelii
  misc_feature: SGI cDNA ID NO. 568645
  misc_feature: Encodes the peptide sequence at SEQ ID NO 25331
atgcggccttcgatgtgggctgttgcgaatgtggccctcacgttgaaagcttatgccacatgcgccgtggacattgacacttcggatataagccccgatgctagcaaaggtcgaacatatgtggatcttgtaggctcttataacctagtggaccctgacgtaccaagattcttgataaggaacgagacgacgaaggcaagtttgttttggggagaatcactacttagtgcatattggatggtggtcgcaaacacctggtacgacaatgccatcgatgaaattaaaggagatcaagcattctctgccgatatcactttgaaaagactcctcggcaactcgactggaacaagggatgaagtagacggtgacgatttcttcagcgtagcgtgtttcacggagacgagttggtgtgggaatcagaccgagactattacctggctttctcagggcaaccaatctttagatccttaccctccggtctggcgtcgtgtcgacactcttggcagagcgatgtggttcactgccttgacagacctgggccgtaatgaatctgtcgttggtactcccaatatgctggtagacaaggattcactagcgactctgacgagaaacctcaccaacgagtgtcaagcatgggaacatcgtcgatatacagatccagacaatgaacacatccatctgtcgccgtacgcatccggtaccgcaacggactctttcaacgcatccatatcaccacaacccaacctcggcgcatcctcagcctacctttcgactagctacatctgtcaagttcccaaggccaaatcagcagggcttctgttcttctcgatccttgtttcggacctagtcttgctttcaacaatttggacagtcttcaattattctgtgggcaagtggatgcgaagccgccacccgacggcggactattgcgaaggatgccacaagaacgctattgaaaatggcgaagaggttctcaaagcagcagcatacccaaaaggacgcgattcttcagtgtcgcgccctggtagtatcacgaagaatatgtcctaccgggaagttgctcaagcagatcaggaaactagctaa

SEQ ID NO: 25331 - protein, 361 aa, Muscodor strobelii
  misc_feature: SGI Peptide ID NO. 568645
  misc_feature (15)..(214): NCBI GI: 242821387 Blast Desc: TSTA_000880 [Talaromyces stipitatus ATCC 10500] gi|218712591|gb|EED12016.1| TSTA_000880 [Talaromyces stipitatus ATCC 10500]
  misc_feature (36)..(255): NCBI GI: 189208318 Blast Desc: [Pyrenophora tritici-repentis Pt-1C-BFP] gi|187976585|gb|EDU43211.1| [Pyrenophora tritici-repentis Pt-1C-BFP]
  misc_feature (250)..(336): NCBI GI: 256730167 Blast Desc: [Nectria haematococca mpVI 77-13-4]
MRPSMWAVANVALTLKAYATCAVDIDTSDISPDASKGRTYVDLVGSYNLVDPDVPRFLIRNETTKASLFWGESLLSAYWMVVANTWYDNAIDEIKGDQAFSADITLKRLLGNSTGTRDEVDGDDFFSVACFTETSWCGNQTETITWLSQGNQSLDPYPPVWRRVDTLGRAMWFTALTDLGRNESVVGTPNMLVDKDSLATLTRNLTNECQAWEHRRYTDPDNEHIHLSPYASGTATDSFNASISPQPNLGASSAYLSTSYICQVPKAKSAGLLFFSILVSDLVLLSTIWTVFNYSVGKWMRSRHPTADYCEGCHKNAIENGEEVLKAAAYPKGRDSSVSRPGSITKNMSYREVAQADQETS

SEQ ID NO: 25332 - DNA, 1276 bp, Muscodor strobelii
  misc_feature: SGI EST ID NO. CUFF.59579.0
  misc_feature: Variant of the nucleotide sequence at SEQ ID NO 25330
gtcgcaaacacctggtacgacaatgccatcgatgaaattaaaggagatcaagcattctctgccgatatcactttgaaaagactcctcggcaactcgactggaacaagggatgaagtagacggtgacgatttcttcagcgtagcgtgtttcacggagacgagttggtgtgggaatcagaccgagactattacctggctttctcagggcaaccaatctttagatccttaccctccggtctggcgtcgtgtcgacactcttggcagagcgatgtggttcactgccttgacagacctgggccgtaatgaatctgtcgttggtactcccaatatgctggtagacaaggattcactagcgactctgacgagaaacctcaccaacgagtgtcaagcatgggaacatcgtcgatatacagatccagacaatgaacacatccatctgtcgccgtacgcatccggtaccgcaacggactctttcaacgcatccatatcaccacaacccaacctcggcgcatcctcagcctacctttcgactagctacatctgtcaagttcccaaggccaaatcagcagggcttctgttcttctcgatccttgtttcggacctagtcttgctttcaacaatttggacagtcttcaattattctgtgggcaagtggatgcgaagccgccacccgacggcggactattgcgaaggatgccacaagaacgctattgaaaatggcgaagaggttctcaaagcagcagcatacccaaaaggacgcgattcttcagtgtcgcgccctggtagtatcacgaagaatatgtcctaccgggaagttgctcaagcagatcaggaaactagctaatctcaaccttgctggagaaagaatgggatatacccatgcaggacactacctcagcggcgtggacgcgaatactggctctgaacacaacacaccgcttcgcgaagcagcgaaagggagacactttcacgccgtttctctgcttctcaatgtcaccgccaaggttattaactgccagggaaagtcagcagttctacgaagcgtttgttcatggtactcagaacctattctagagccaagaccaattcaacgtgttgttcatccaattaatcagtcctgtattcaatcagcgatattcgatccaatagagcattgtcgaatgatctggacttaagtgccactctatgaaacaattcaacggcccttcccaaccagttcatcgagttcctcaaacatcggatgctacgaacccagtcgcggcacatctgcgtaatcc

SEQ ID NO: 25333 - DNA, 1269 bp, Muscodor strobelii
  misc_feature: SGI cDNA ID NO. 568646
  misc_feature: Encodes the peptide sequence at SEQ ID NO 25334
atggcagtgaccaaatcaagcattctcatcatcggcacgctcgacacaaagctagcagagttcttgtatttacgaacacaaattctcgcgatcgacccacagatcagcgtgatattgcttgatgcaggacgctcaaacatcactcacgaagccattaccataacacaagaggaagtacttgcatctagtcaatatgacggggatttgcagtccttaccgcgcggcgaagtcatcaagatcatgactaaaggcgcaacaagctgtgtaaaggacttataccaggctggaaagctccatggtatcatctccttaggcggtagcgggggaaccagcattgcgtctggtgtaatgcgcggattgccgctcttcacgctccctaaattgatcgtgtcgactgttgcatcaggggatacgagctcatatgtcgccgagtcggacattatgatgatgtacagtgtggtggacatcgcagggttgaatgagatgctcagagctgtcatcgatcaggcagccgcagcgatcgtggggatggcgacagcttatactacgaagatatcagaaccaacgaaaaaggaaaacgaaacaaagaagagcattggcatcacgatgtttggtgtcacaacgccagccgttgatcgcgcaagagctgtgcttgatgacatgggttttgaggtttacgtgtttcatgcgacgggcgctggtggtcgtgcgatggaacgactcatcagcgagaataggcttgacggtgtccttgatctcacaaccactgagcttgcagatgagttggtgggcggtgtaatgagcgctggagagaatagattaacggccgcagccaaagctggcataccccagatcgtcagtgtcggtgcacttgacatggttaattatggaccgaaagctacggtccctaaggagtttcaggagcggaacttgttcgaacataatccctctgtgaccttgatgcgcaccaatcccgatgaatgcaaggagattgggagaagactggcgagccgattgcgagataactgcacaaacctaaaggctacagaggtttggatgccacttcggggagtgtcggcgatatcagtcgagggccaagcatttcacgacccgctggccgatgcatctttgttctattcgattttcaacggcctagatggtagcggtattaccgtcaaggaagttgacgttgctatcaacgacgaaaaatgggctaaggacatagcaagaagactcgcggaacttgtaaatggtactggaaagcattga

SEQ ID NO: 25334 - protein, 422 aa, Muscodor strobelii
  misc_feature: SGI Peptide ID NO. 568646
  misc_feature (5)..(411): Pfam Id: PF06792 Pfam Desc: Uncharacterised protein family (UPF0261)
  misc_feature (74)..(411): Pfam Id: PF06792 Pfam Desc: Uncharacterised protein family (UPF0261)
  misc_feature (7)..(416): NCBI GI: 85114939 Blast Desc: NCU00863 [Neurospora crassa OR74A] gi|28926573|gb|EAA35543.1| NCU00863 [Neurospora crassa OR74A]
  misc_feature (3)..(417): NCBI GI: 154311521 Blast Desc: BC1G_06613 [Botryotinia fuckeliana B05.10] gi|150851010|gb|EDN26203.1| BC1G_06613 [Botryotinia fuckeliana B05.10]
  misc_feature (4)..(416): NCBI GI: 225559681 Blast Desc: conserved [Ajellomyces capsulatus G186AR]
  misc_feature (4)..(405): NCBI GI: 240279425 Blast Desc: adenosylhomocysteinase [Ajellomyces capsulatus H143]
  misc_feature (3)..(417): NCBI GI: 156065093 Blast Desc: SS1G_00557 [Sclerotinia sclerotiorum 1980] gi|154691416|gb|EDN91154.1| SS1G_00557 [Sclerotinia sclerotiorum 1980]
  misc_feature (6)..(416): NCBI GI: 239613384 Blast Desc: UPF0261 domain-containing protein [Ajellomyces dermatitidis ER-3]
  misc_feature (7)..(416): NCBI GI: 171684245 Blast Desc: protein product [Podospora anserina] gi|170942083|emb|CAP67735.1| protein product [Podospora anserina]
  misc_feature (6)..(416): NCBI GI: 261194791 Blast Desc: UPF0261 domain-containing protein [Ajellomyces dermatitidis SLH14081] gi|239588338|gb|EEQ70981.1| UPF0261 domain-containing protein [Ajellomyces dermatitidis SLH14081]
  misc_feature (7)..(416): NCBI GI: 238498574 Blast Desc: UPF0261 domain protein [Aspergillus flavus NRRL3357] gi|220693796|gb|EED50141.1| UPF0261 domain protein [Aspergillus flavus NRRL3357]
  misc_feature (8)..(417): NCBI GI: 212542865 Blast Desc: UPF0261 domain protein [Penicillium marneffei ATCC 18224] gi|210066494|gb|EEA20587.1| UPF0261 domain protein [Penicillium marneffei ATCC 18224]
MAVTKSSILIIGTLDTKLAEFLYLRTQILAIDPQISVILLDAGRSNITHEAITITQEEVLASSQYDGDLQSLPRGEVIKIMTKGATSCVKDLYQAGKLHGIISLGGSGGTSIASGVMRGLPLFTLPKLIVSTVASGDTSSYVAESDIMMMYSVVDIAGLNEMLRAVIDQAAAAIVGMATAYTTKISEPTKKENETKKSIGITMFGVTTPAVDRARAVLDDMGFEVYVFHATGAGGRAMERLISENRLDGVLDLTTTELADELVGGVMSAGENRLTAAAKAGIPQIVSVGALDMVNYGPKATVPKEFQERNLFEHNPSVTLMRTNPDECKEIGRRLASRLRDNCTNLKATEVWMPLRGVSAISVEGQAFHDPLADASLFYSIFNGLDGSGITVKEVDVAINDEKWAKDIARRLAELVNGTGKH

SEQ ID NO: 25335 - DNA, 1719 bp, Muscodor strobelii
  misc_feature: SGI EST ID NO. CUFF.59591.0
  misc_feature: Variant of the nucleotide sequence at SEQ ID NO 25333
cccctcacggctggtctccgtttgtgcggagcaccgcttgaaggtaaggaggggatcctaccacaacaacaattgcatccaatgtagaatcaggcgaacaaatccaatctaaacgatggcagtgaccaaatcaagcattctcatcatcggcacgctcgacacaaagctagcagagttcttgtatttacgaacacaaattctcgcgatcgacccacagatcagcgtgatattgcttgatgcaggacgctcaaacatcactcacgaagccattaccataacacaagaggaagtacttgcatctagtcaatatgacggggatttgcagtccttaccgcgcggcgaagtcatcaagatcatgactaaaggcgcaacaagctgtgtaaaggacttataccaggctggaaagctccatggtatcatctccttaggcggtagcgggggaaccagcattgcgtctggtgtaatgcgcggattgccgctcttcacgctccctaaattgatcgtgtcgactgttgcatcaggggatacgagctcatatgtcgccgagtcggacattatgatgatgtacagtgtggtggacatcgcagggttgaatgagatgctcagagctgtcatcgatcaggcagccgcagcgatcgtggggatggcgacagcttatactacgaagatatcagaaccaacgaaaaaggaaaacgaaacaaagaagagcattggcatcacgatgtttggtgtcacaacgccagccgttgatcgcgcaagagctgtgcttgatgacatgggttttgaggtttacgtgtttcatgcgacgggcgctggtggtcgtgcgatggaacgactcatcagcgagaataggcttgacggtgtccttgatctcacaaccactgagcttgcagatgagttggtgggcggtgtaatgagcgctggagagaatagattaacggccgcagccaaagctggcataccccagatcgtcagtgtcggtgcacttgacatggttaattatggaccgaaagctacggtccctaaggagtttcaggagcggaacttgttcgaacataatccctctgtgaccttgatgcgcaccaatcccgatgaatgcaaggagattgggagaagactggcgagccgattgcgagataactgcacaaacctaaaggctacagaggtttggatgccacttcggggagtgtcggcgatatcagtcgagggccaagcatttcacgacccgctggccgatgcatctttgttctattcgattttcaacggcctagatggtagcggtattaccgtcaaggaagttgacgttgctatcaacgacgaaaaatgggctaaggacatagcaagaagactcgcggaacttgtaaatggtactggaaagcattgacacagaaggacgatgccaaaacaaggaaagagatacgcacttgagagattgcaattgaacgttaagatatggaactgggttctgtataggtaatcgccaatggtgttgagggcactcttgcaggcctcagtcaagtttacttcgttgagcccagagcatttctgctgctgtcgcctcatgagatttctgactctaatggatcaattgacggacttctaaaaagagagctaatgataattataatagaacggttcttgctggttgaaatgatcctagggctagaatagggccgcaacgcatgttacttcctgcgcaaagcttgtgtcaaaatgctc

SEQ ID NO: 25336 - DNA, 837 bp, Muscodor strobelii
  misc_feature: SGI cDNA ID NO. 568647
  misc_feature: Encodes the peptide sequence at SEQ ID NO 25337
atggcgccaatccctcgttcagagatcctcaagcgtctccgtgacgtcatcgcctcaaagcagcctattgtcggtgccggggcaggcatagggctgtcggccaaattcgttgaagccggcggtgcggacttaataatcatttacaattctggtcgcttcagaatggctggacggggttccctggctggactgatgccttatggagatgcgaacgccatcgtcgtcgacatggctaaagaggtgctgcccatcgtgaagaagaccccggtgctagccggcgtgtgcggtaccgatccatttcgagatattgagaccttcctacgccaattgaaggagattggattcagtggtgtgcagaatttccctactgttggtcttatcgatggtggcttccgcgcaaatctagaggagacggagatgggttacgagaaagaggttgagatgattcggcttgcggcgcagatggacttattcacatcaccttacgtattcaacgtcgaggaaagcattgccatgactgaagcaggcgccgatatcattgtagcgcatatgggtctcaccacgagcaagggcataggaggcaagacaggcaaaacacttgacgaatgcgtgaagctcatccaagagatcagggacgccgcaatcaagatccgggaggatgtgatcgtgttgtgccacggtggtcctatcgctgaagtcgcagatgcggaatatgttctctcaagaacaaaagggatccatggtttctacggggccagtagcatggaacggatacctgttgaggtggccatcacagacaacacaaagaggttcaagggaatcaggatcgaaaactag

SEQ ID NO: 25337 - protein, 278 aa, Muscodor strobelii
  misc_feature: SGI Peptide ID NO. 568647
  misc_feature (7)..(274): Pfam Id: PF09370 Pfam Desc: TIM-barrel signal transduction protein
  misc_feature (6)..(278): NCBI GI: 156065095 Blast Desc: SS1G_00558 [Sclerotinia sclerotiorum 1980] gi|154691417|gb|EDN91155.1| SS1G_00558 [Sclerotinia sclerotiorum 1980]
  misc_feature (6)..(278): NCBI GI: 154311519 Blast Desc: BC1G_06612 [Botryotinia fuckeliana B05.10] gi|150851009|gb|EDN26202.1| BC1G_06612 [Botryotinia fuckeliana B05.10]
  misc_feature (3)..(277): NCBI GI: 242767851 Blast Desc: TIM-barrel enzyme family protein [Talaromyces stipitatus ATCC 10500] gi|218724646|gb|EED24063.1| TIM-barrel enzyme family protein [Talaromyces stipitatus ATCC 10500]
  misc_feature (3)..(277): NCBI GI: 255935769 Blast Desc: Pc13g04760 [Penicillium chrysogenum Wisconsin 54-1255] gi|211583531|emb|CAP91545.1| Pc13g04760 [Penicillium chrysogenum Wisconsin 54-1255]
  misc_feature (3)..(278): NCBI GI: 259486625 Blast Desc: TPA: TIM-barrel enzyme family protein (AFU_orthologue; AFUA_1G10110) [Aspergillus nidulans FGSC A4]
  misc_feature (3)..(276): NCBI GI: 239613383 Blast Desc: TIM-barrel enzyme family protein [Ajellomyces dermatitidis ER-3]
  misc_feature (3)..(278): NCBI GI: 119495967 Blast Desc: TIM-barrel enzyme family protein [Neosartorya fischeri NRRL 181] gi|119412920|gb|EAW22861.1| TIM-barrel enzyme family protein [Neosartorya fischeri NRRL 181]
  misc_feature (3)..(278): NCBI GI: 225559680 Blast Desc: TIM-barrel enzyme family protein [Ajellomyces capsulatus G186AR]
  misc_feature (3)..(276): NCBI GI: 261194793 Blast Desc: TIM-barrel enzyme family protein [Ajellomyces dermatitidis SLH14081] gi|239588339|gb|EEQ70982.1| TIM-barrel enzyme family protein [Ajellomyces dermatitidis SLH14081]
  misc_feature (3)..(278): NCBI GI: 154280921 Blast Desc: HCAG_03370 [Ajellomyces capsulatus NAm1] gi|150411452|gb|EDN06840.1| HCAG_03370 [Ajellomyces capsulatus NAm1]
MAPIPRSEILKRLRDVIASKQPIVGAGAGIGLSAKFVEAGGADLIIIYNSGRFRMAGRGSLAGLMPYGDANAIVVDMAKEVLPIVKKTPVLAGVCGTDPFRDIETFLRQLKEIGFSGVQNFPTVGLIDGGFRANLEETEMGYEKEVEMIRLAAQMDLFTSPYVFNVEESIAMTEAGADIIVAHMGLTTSKGIGGKTGKTLDECVKLIQEIRDAAIKIREDVIVLCHGGPIAEVADAEYVLSRTKGIHGFYGASSMERIPVEVAITDNTKRFKGIRIEN

SEQ ID NO: 25338 - DNA, 1339 bp, Muscodor strobelii
  misc_feature: SGI EST ID NO. CUFF.59588.0
  misc_feature: Variant of the nucleotide sequence at SEQ ID NO 25336
ttcatacgtaactgccgagacgacagctttagacagttgacgtaggtccagattgagcgagctctcgtaacgctatttcaacgcgacgggccaaacactttaagttgcacctctttcgtttattttcatagttgcattgcatgaaacgcaacagacccaaaaggattttaaaagatcaataacatcgaatcgttccatcaacattcgaaatggcgccaatccctcgttcagagatcctcaagcgtctccgtgacgtcatcgcctcaaagcagcctattgtcggtgccggggcaggcatagggctgtcggccaaattcgttgaagccggcggtgcggacttaataatcatttacaattctggtcgcttcagaatggctggacggggttccctggctggactgatgccttatggagatgcgaacgccatcgtcgtcgacatggctaaagaggtgctgcccatcgtgaagaagaccccggtgctagccggcgtgtgcggtaccgatccatttcgagatattgagaccttcctacgccaattgaaggagattggattcagtggtgtgcagaatttccctactgttggtcttatcgatggtggcttccgcgcaaatctagaggagacggagatgggttacgagaaagaggttgagatgattcggcttgcggcgcagatggacttattcacatcaccttacgtattcaacgtcgaggaaagcattgccatgactgaagcaggcgccgatatcattgtagcgcatatgggtctcaccacgagcaagggcataggaggcaagacaggcaaaacacttgacgaatgcgtgaagctcatccaagagatcagggacgccgcaatcaagatccgggaggatgtgatcgtgttgtgccacggtggtcctatcgctgaagtcgcagatgcggaatatgttctctcaagaacaaaagggatccatggtttctacggggccagtagcatggaacggatacctgttgaggtggccatcacagacaacacaaagaggttcaagggaatcaggatcgaaaactagaaaacacctacgtgaggctacttctattcgagaagcacacagaaatcaccacgaatacaagtacagattactgacttagttaaccggttgattctgcacatcgaattcactagctcaggcagcgttggggttggatctagaagatgatggttggtgcgtgtcgtatcaattcatcctatccgaataagatataaatagtccgaaactagcgacgagaaacataatcagatgtccttgggatgtagctgtttgcttagaatctgccgagttgtgctcaccgcgaccgatattcc

SEQ ID NO: 25339 - DNA, 897 bp, Muscodor strobelii
  misc_feature: SGI cDNA ID NO. 568648
  misc_feature: Encodes the peptide sequence at SEQ ID NO 25340
atggcaaactcgtttgatatcaagcctgagggctatagtgttgctcaattctgggggtcaccagccaagaacttcagatcttcggcacgcttaggtttacaacatatgctccatcaaaatacgattggttacttgttgcatcctcaggtcgaaggttcagtcagcgccaccaagtctttggcaattgcagatctcggatgcggcaacgcggcttggctcattgaccttcaacgtgatctgtccaagaaaggcatacaagcgacatattacggatgtgatatcaacgcagtcaacctgcctcacaagacctttttgcctgaccctataacccttgaaaaattcgacgtcctttctgagctgcccgagaagctcaagaacgctttcgacatcgttcacgtccgcgcactcgtgagcatcgttgtcaacgggaatactacacctttgttatcggtagctttatccatgctgaagcctggaggctggatccaatgggaagaaacgccagcatcctcgctccatattcaggcgcctcctggtgtctcaaccactatgtgcaatacactggtgcaaatcttgaagcaaggcggtgagatgacgggaggagtctttcattttgtcgagacgctagatcaggagcttgcaaagcatggtttcgtggattccaagcaggaagccctgaagaaacatgcggcagatctcaaggcctggactgacgactatctgatggtctgggaagagctttggatttattttccatctaaggatgatgcaccagacgcacccatgacaaaagaaggatggctagacatgttctcgaaagcggtaggcgaaacggaacaaggcgtcgtagttcatcaagagaagattgtagtcgcaatcgggcgcaaggctgcttaa

SEQ ID NO: 25340 - protein, 298 aa, Muscodor strobelii
  misc_feature: SGI Peptide ID NO. 568648
  misc_feature (63)..(162): Pfam Id: PF08242 Pfam Desc: Methyltransferase domain
  misc_feature (10)..(296): NCBI GI: 145252776 Blast Desc: An16g05930 [Aspergillus niger] gi|134083455|emb|CAK46933.1| protein product [Aspergillus niger]
  misc_feature (10)..(296): NCBI GI: 242827242 Blast Desc: conserved [Talaromyces stipitatus ATCC 10500] gi|218712048|gb|EED11476.1| conserved [Talaromyces stipitatus ATCC 10500]
  misc_feature (10)..(296): NCBI GI: 67527035 Blast Desc: AN3975.2 [Aspergillus nidulans FGSC A4] gi|40740256|gb|EAA59446.1| AN3975.2 [Aspergillus nidulans FGSC A4] gi|259481445|tpe|CBF74969.1| TPA: conserved [Aspergillus FGSC
  misc_feature (10)..(296): NCBI GI: 242811553 Blast Desc: conserved [Talaromyces stipitatus ATCC 10500] gi|218714112|gb|EED13535.1| conserved [Talaromyces stipitatus ATCC 10500]
  misc_feature (23)..(247): NCBI GI: 70998775 Blast Desc: conserved [Aspergillus fumigatus Af293] gi|66851746|gb|EAL92071.1| conserved [Aspergillus fumigatus Af293] gi|159127128|gb|EDP52243.1| conserved [Aspergillus A1163]
  misc_feature (23)..(192): NCBI GI: 70998749 Blast Desc: methyltransferase [Aspergillus fumigatus Af293] gi|66851733|gb|EAL92058.1| methyltransferase, [Aspergillus fumigatus Af293]
  misc_feature (1)..(296): NCBI GI: 121712493 Blast Desc: conserved [Aspergillus clavatus NRRL 1] gi|119402010|gb|EAW12432.1| conserved [Aspergillus clavatus NRRL 1]
  misc_feature (24)..(247): NCBI GI: 115384358 Blast Desc: [Aspergillus terreus NIH2624] gi|114196418|gb|EAU38118.1| [Aspergillus terreus NIH2624]
  misc_feature (23)..(192): NCBI GI: 159127115 Blast Desc: methyltransferase, [Aspergillus fumigatus A1163]
  misc_feature (23)..(166): NCBI GI: 119489916 Blast Desc: NFIA_061810 [Neosartorya fischeri NRRL 181] gi|119411077|gb|EAW21020.1| conserved [Neosartorya fischeri NRRL 181]
MANSFDIKPEGYSVAQFWGSPAKNFRSSARLGLQHMLHQNTIGYLLHPQVEGSVSATKSLAIADLGCGNAAWLIDLQRDLSKKGIQATYYGCDINAVNLPHKTFLPDPITLEKFDVLSELPEKLKNAFDIVHVRALVSIVVNGNTTPLLSVALSMLKPGGWIQWEETPASSLHIQAPPGVSTTMCNTLVQILKQGGEMTGGVFHFVETLDQELAKHGFVDSKQEALKKHAADLKAWTDDYLMVWEELWIYFPSKDDAPDAPMTKEGWLDMFSKAVGETEQGVVVHQEKIVVAIGRKAA

SEQ ID NO: 25341 - DNA, 407 bp, Muscodor strobelii
  misc_feature: SGI EST ID NO. CUFF.59594.0
  misc_feature: Variant of the nucleotide sequence at SEQ ID NO 25339
tcaaaatacgattggttacttgttgcatcctcaggtcgaaggttcagtcagcgccaccaagtctttggcaattgcagatctcggatgcggcaacgcggcttggctcattgaccttcaacgtgatctgtccaagaaaggcatacaagcgacatattacggatgtgatatcaacgcagtcaacctgcctcacaagacctttttgcctgaccctataacccttgaaaaattcgacgtcctttctgagctgcccgagaagctcaagaacgctttcgacatcgttcacgtccgcgcactcgtgagcatcgttgtcaacgggaatactacacctttgttatcggtagctttatccatgctgaagcctggaggctggatccaatgggaagaaacgccagcatcctcgctccata

SEQ ID NO: 25342 - DNA, 375 bp, Muscodor strobelii
  misc_feature: SGI cDNA ID NO. 568649
  misc_feature: Encodes the peptide sequence at SEQ ID NO 25343
atgaacgctggagtgggtgttcgcgatcaaattcaagaaaaggaggccgatgtgcttggaatgctgttgatgacagaagctggattcgatccttcggtagcaccaagaacgtggcaagtcctcgaggaaagacgggcaaatggacttaaaaagccgaagaagaaatgggagaaagttcatgtccagtctccttcgaggatcaaagacgcggaaaattcaatagtcccggtcactgagattgtgcgaagcaacggagagctttcccgtgtggatgccgaatggaagtttattcaacttgggtggaagaccttcaaggaagaacgggctcaaaatgggaagcatctcaccccaactgctcgtagcgaagacttgtaa

SEQ ID NO: 25343 - protein, 124 aa, Muscodor strobelii
  misc_feature: SGI Peptide ID NO. 568649
  misc_feature (12)..(90): NCBI GI: 21229484 Blast Desc: XCC0006 [Xanthomonas campestris pv. campestris str. ATCC 33913] gi|66766358|ref|YP_241120.1| XC_0006 [Xanthomonas campestris pv. campestris str. 8004] conserved [Xanthomonas pv.
  misc_feature (12)..(90): NCBI GI: 188989402 Blast Desc: exported peptidase/protease [Xanthomonas campestris pv. campestris str. B100] gi|167731162|emb|CAP49334.1| exported peptidase/protease [Xanthomonas campestris pv. campestris]
  misc_feature (12)..(86): NCBI GI: 254507679 Blast Desc: VPMS16_3486 [Vibrio parahaemolyticus 16] gi|219549376|gb|EED26369.1| VPMS16_3486 [Vibrio parahaemolyticus 16]
MNAGVGVRDQIQEKEADVLGMLLMTEAGFDPSVAPRTWQVLEERRANGLKKPKKKWEKVHVQSPSRIKDAENSIVPVTEIVRSNGELSRVDAEWKFIQLGWKTFKEERAQNGKHLTPTARSEDL

SEQ ID NO: 25344 - DNA, 1038 bp, Muscodor strobelii
  misc_feature: SGI cDNA ID NO. 568650
  misc_feature: Encodes the peptide sequence at SEQ ID NO 25345
atgattccctcgtcggtgcggcggatcgcctccgccgcacctcagtcgcctctgctcgcatgctttgcaccgacggcgacacgcgcatccgccgccttcgccatctcggtcaaccccagatgcaaccagcggagacggtactcgtcctcgaagccctccagccccaatgactcgcccaagggtctcccagatggccaggtcaccgccagcccttcgacatcaaccaaacaaagcggagagaagaggaggcgcaaggtcaaggatttgaccgctacccagaagctccccagcgtccccagcacccagaatgtgccgcaggaagctctggccctatcgaccttcttctcgctgcaccggcccatctccgtcacacacagcttcccccgaacgatatcagacgatgctttcgcccagatctttgcgcagcgtacgaaatacaacacatacaacgacgtgataggcactctatctcaaacagtcaacgagctcgagcagcccatgcgggagctaggtctctccgaaccgcaggagaccgacttggcatcccccaacgccgacgagtccatgcgcaagatcgacttcaagcatccagacggcaccgagtccagcgtctacgttcagctcaaccacatgtcgggacaattcctccccttccgacctccaccaatcccccagcccgaatccgcccgcaccgacgtcgacgccgaggcttcgaccgatatggaagcagccgagggcccgcagactcgcgtctaccaggctatgttcacgctcgaggagaccatcgacgagaacggggagccgcgcatcgtcgcccactcccccagaatcgtcgaggaagacggcgtcaactccgctgatgagccttctcgctcgttcctaggccgtatggcgatgcgtgagattagacgtgggggactgcgggatatgcatgcgatttctgtcaagcgccagcgtaagctcaagatgaagaagaagaagtacaagaagctcatgaggcgcacgcgtaatgagcgtcggaagctggaccgtgtctag

SEQ ID NO: 25345 - protein, 345 aa, Muscodor strobelii
  misc_feature: SGI Peptide ID NO. 568650
  misc_feature (311)..(344): Pfam Id: PF08213 Pfam Desc: Mitochondrial domain of function (DUF1713)
  misc_feature (1)..(344): NCBI GI: 261358673 Blast Desc: conserved [Verticillium albo-atrum VaMs.102]
  misc_feature (1)..(345): NCBI GI: 85119634 Blast Desc: NCU02548 [Neurospora crassa OR74A] gi|28927491|gb|EAA36443.1| [Neurospora crassa OR74A]
  misc_feature (1)..(344): NCBI GI: 46107696 Blast Desc: FG00731.1 [Gibberella zeae PH-1]
  misc_feature (1)..(344): NCBI GI: 256734690 Blast Desc: NECHADRAFT_102386 [Nectria haematococca mpVI 77-13-4]
  misc_feature (1)..(344): NCBI GI: 145616010 Blast Desc: MGG_03622 [Magnaporthe grisea 70-15] gi|145009793|gb|EDJ94449.1| MGG_03622 [Magnaporthe grisea 70-15]
  misc_feature (1)..(345): NCBI GI: 116181472 Blast Desc: CHGG_01364 [Chaetomium globosum CBS 148.51] gi|88185661|gb|EAQ93129.1| CHGG_01364 [Chaetomium globosum CBS 148.51]
  misc_feature (1)..(345): NCBI GI: 171695890 Blast Desc: protein product [Podospora anserina] gi|170948187|emb|CAP60351.1| protein product [Podospora anserina]
  misc_feature (1)..(179): NCBI GI: 154299859 Blast Desc: BC1G_10820 [Botryotinia fuckeliana B05.10] gi|150857100|gb|EDN32292.1| BC1G_10820 [Botryotinia fuckeliana B05.10]
  misc_feature (1)..(179): NCBI GI: 156053632 Blast Desc: SS1G_05663 [Sclerotinia sclerotiorum 1980] gi|154703444|gb|EDO03183.1| SS1G_05663 [Sclerotinia sclerotiorum 1980]
  misc_feature (91)..(344): NCBI GI: 212545420 Blast Desc: conserved [Penicillium marneffei ATCC 18224] gi|210065833|gb|EEA19927.1| conserved [Penicillium marneffei ATCC 18224]
MIPSSVRRIASAAPQSPLLACFAPTATRASAAFAISVNPRCNQRRRYSSSKPSSPNDSPKGLPDGQVTASPSTSTKQSGEKRRRKVKDLTATQKLPSVPSTQNVPQEALALSTFFSLHRPISVTHSFPRTISDDAFAQIFAQRTKYNTYNDVIGTLSQTVNELEQPMRELGLSEPQETDLASPNADESMRKIDFKHPDGTESSVYVQLNHMSGQFLPFRPPPIPQPESARTDVDAEASTDMEAAEGPQTRVYQAMFTLEETIDENGEPRIVAHSPRIVEEDGVNSADEPSRSFLGRMAMREIRRGGLRDMHAISVKRQRKLKMKKKKYKKLMRRTRNERRKLDRV

SEQ ID NO: 25346 - DNA, 1564 bp, Muscodor strobelii
  misc_feature: SGI EST ID NO. CUFF.59646.0
  misc_feature: Variant of the nucleotide sequence at SEQ ID NO 25344
gccaactgcaatccagtcctgttttcgacgttgcaactgtgccgactcctgccatcgggaccatccacggaggcattttgtcgttgctgttgtcgtcttcgccctgccgcacaacctcagcgtctgaagtactatattctaccactactcctccccctgatattccatctgctccgctcacctagacggatgatgattccctcgtcggtgcggcggatcgcctccgccgcacctcagtcgcctctgctcgcatgctttgcaccgacggcgacacgcgcatccgccgccttcgccatctcggtcaaccccagatgcaaccagcggagacggtactcgtcctcgaagccctccagccccaatgactcgcccaagggtctcccagatggccaggtcaccgccagcccttcgacatcaaccaaacaaagcggagagaagaggaggcgcaaggtcaaggatttgaccgctacccagaagctccccagcgtccccagcacccagaatgtgccgcaggaagctctggccctatcgaccttcttctcgctgcaccggcccatctccgtcacacacagcttcccccgaacgatatcagacgatgctttcgcccagatctttgcgcagcgtacgaaatacaacacatacaacgacgtgataggcactctatctcaaacagtcaacgagctcgagcagcccatgcgggagctaggtctctccgaaccgcaggagaccgacttggcatcccccaacgccgacgagtccatgcgcaagatcgacttcaagcatccagacggcaccgagtccagcgtctacgttcagctcaaccacatgtcgggacaattcctccccttccgacctccaccaatcccccagcccgaatccgcccgcaccgacgtcgacgccgaggcttcgaccgatatggaagcagccgagggcccgcagactcgcgtctaccaggctatgttcacgctcgaggagaccatcgacgagaacggggagccgcgcatcgtcgcccactcccccagaatcgtcgaggaagacggcgtcaactccgctgatgagccttctcgctcgttcctaggccgtatggcgatgcgtgagattagacgtgggggactgcgggatatgcatgcgatttctgtcaagcgccagcgtaagctcaagatgaagaagaagaagtacaagaagctcatgaggcgcacgcgtaatgagcgtcggaagctggaccgtgtctagagttatctggatatggttcggtgcttgcaactggcgcgtgttggtgctgggggtggctgtttgtatatagctgctgcgtggcgcactggttgatattcgatgaggcgctttaattactgtacggtggatgaagtggatgacaggggttttctctcctttgttgatcataggcatttgttgcattaagttgcatgcagtgtgtgcatttccgaactggagggatgcttatagacttaggcatgggcgaacacacccaacaacccgactgagaatataagataagatccgtatctgcttatatatatttttggtatatattttttccactcttcta

SEQ ID NO: 25347 - DNA, 1539 bp, Muscodor strobelii
  misc_feature: SGI cDNA ID NO. 568651
  misc_feature: Reduced expression when VOC is produced
  misc_feature: Encodes the peptide sequence at SEQ ID NO 25348
atgtcacgaggtgttgacagcagcaaccacgcacagcagccggtcgccagcgggacagagctggcgaacctcggggacggatcaatctcaaagcagagtcaaggacagctcaacaaaccctcccgcaagtcgtcatcgcagaatctgcagccctctccggcgacaacggccctcactgggacaaccgcgagcgaacaccgtgatagcatcagcggccgctccaaggcctccagaagcagcatgatgggccgacgtagaaacggtagcgcatctaccacccgctctgccgcggccaccaaccccacgaccgccactccgaactcgtcacagccgcagtcgcctgctggagctccgcagaaaaagaagaagggaggattgctggcattgctgggctgctgcggtgtacccgacaacgccaacctcgaaggcggagacgaacctctgccatctcacaagctggacaaacttcccccacggcccttgacttccagcaggagaaccataacgccttcggaacaaccgagcaacagcaagtctcagcttcaggagagccagaaggacccccaagctcaaggcggcgtagcagcacaggatagcaaatcggccaagcgcgcttcgcagactgcagccgctgacaccacgggcaccaccgacctcgatagcgactccaaacaaaccacgctcgtagctgcgccgccaggcccaagcataacggtgaacccgcctgccgcggacagacaggaacccgaggttgtgccgagcgaaagcgcaaagagccaagaccaggatggcgatgtggacatgcccgatgctgatgcttccgcatcgcagcaggtacgcgcacctgtagccgctgctgatgacaacaagttccccaacactgttcctccacccccgcccccgcccaacacagcacccataccgaaccaaggcgcggtcgcagtggaagagaagacggcagtggcggaacagacgcagcaaaagttcctcctgccaccgatcgagccacgcttcaagggacgaaaatgtctcgtcttagatctggacgagacactggtccacagctcatttaagcagatattgcatcaggccgacttcacgatacctgtggagattgaaggcaactaccacaatgtgtatgtgatcaagcggccaggcgtcgaccaattcatgaagcgcgttggagaactgtacgaagttgtggtctttacggcgtccgtatctaagtacggcgacccgctactcgaccagctcgacattcataaagtggtacatcacaggttgttccgcgagagttgttataaccaccaaggcaactacgtaaaggacctctcgcaagttggacgcgatctcaaggacaccatcatcatcgacaactcgcccacctcttacatcttccacccgcaacacgcagtccccattagcagctggttctcggatgcacacgacaacgagctgctggatcttatccccgttctcgaggacctggctggccctaatgtacaagacgtcagcatggtcctcgatgtcactctttga

SEQ ID NO: 25348 - protein, 512 aa, Muscodor strobelii
  misc_feature: SGI Peptide ID NO. 568651
  misc_feature (333)..(510): Pfam Id: PF03031 Pfam Desc: NLI interacting factor-like phosphatase
  misc_feature (1)..(512): NCBI GI: 145615980 Blast Desc: MGG_03646 [Magnaporthe grisea 70-15] gi|145009766|gb|EDJ94422.1| MGG_03646 [Magnaporthe grisea 70-15]
  misc_feature (31)..(512): NCBI GI: 171695330 Blast Desc: protein product [Podospora anserina] gi|170947907|emb|CAP60071.1| protein product [Podospora anserina]
  misc_feature (8)..(512): NCBI GI: 256730582 Blast Desc: NECHADRAFT_89759 [Nectria haematococca mpVI 77-13-4]
  misc_feature (82)..(512): NCBI GI: 261355303 Blast Desc: phosphatase PSR1 [Verticillium albo-atrum VaMs.102]
  misc_feature (56)..(512): NCBI GI: 85117541 Blast Desc: conserved , variant [Neurospora crassa OR74A] gi|28927089|gb|EAA36047.1| conserved , variant [Neurospora crassa OR74A]
  misc_feature (120)..(512): NCBI GI: 164424900 Blast Desc: NCU08380 [Neurospora crassa OR74A] gi|157070709|gb|EDO65097.1| conserved [Neurospora crassa OR74A]
  misc_feature (13)..(512): NCBI GI: 46109290 Blast Desc: FG01527.1 [Gibberella zeae PH-1]
  misc_feature (31)..(512): NCBI GI: 154297273 Blast Desc: plasma membrane phosphatase required for sodium stress response [Botryotinia fuckeliana B05.10] gi|150842999|gb|EDN18192.1| plasma membrane phosphatase required
  misc_feature (30)..(512): NCBI GI: 156054110 Blast Desc: SS1G_05903 [Sclerotinia sclerotiorum 1980] gi|154703683|gb|EDO03422.1| SS1G_05903 [Sclerotinia sclerotiorum 1980]
  misc_feature (30)..(512): NCBI GI: 169619421 Blast Desc: SNOG_12907 [Phaeosphaeria nodorum SN15] gi|160703821|gb|EAT79707.2| SNOG_12907 [Phaeosphaeria nodorum SN15]
  misc_feature: Useful for introducing or modulating the production of volatile compounds
MSRGVDSSNHAQQPVASGTELANLGDGSISKQSQGQLNKPSRKSSSQNLQPSPATTALTGTTASEHRDSISGRSKASRSSMMGRRRNGSASTTRSAAATNPTTATPNSSQPQSPAGAPQKKKKGGLLALLGCCGVPDNANLEGGDEPLPSHKLDKLPPRPLTSSRRTITPSEQPSNSKSQLQESQKDPQAQGGVAAQDSKSAKRASQTAAADTTGTTDLDSDSKQTTLVAAPPGPSITVNPPAADRQEPEVVPSESAKSQDQDGDVDMPDADASASQQVRAPVAAADDNKFPNTVPPPPPPPNTAPIPNQGAVAVEEKTAVAEQTQQKFLLPPIEPRFKGRKCLVLDLDETLVHSSFKQILHQADFTIPVEIEGNYHNVYVIKRPGVDQFMKRVGELYEVVVFTASVSKYGDPLLDQLDIHKVVHHRLFRESCYNHQGNYVKDLSQVGRDLKDTIIIDNSPTSYIFHPQHAVPISSWFSDAHDNELLDLIPVLEDLAGPNVQDVSMVLDVTL

SEQ ID NO: 25349 - DNA, 2968 bp, Muscodor strobelii
  misc_feature: SGI EST ID NO. CUFF.59969.1
  misc_feature: Variant of the nucleotide sequence at SEQ ID NO 25347
cctcgagcctcttttcccgttgccgttgttcctccagccttttgcttgcagcgggcagaaagacctcctttcgcgttgacatctcgattacggaactgtcttctttgatctccgagtcctcgccgtcgcattgctcgctctcgccaccgaaacaccgcgtcgcccgctacactcggacgaggccacccgggccattgaccgcaccatcgggcagtcgggcagctaagtgcgcaaccgcttacgcccctgttcctccagcttccttcggcgcagatcatgtcacgaggtgttgacagcagcaaccacgcacagcagccggtcgccagcgggacagagctggcgaacctcggggacggatcaatctcaaagcagagtcaaggacagctcaacaaaccctcccgcaagtcgtcatcgcagaatctgcagccctctccggcgacaacggccctcactgggacaaccgcgagcgaacaccgtgatagcatcagcggccgctccaaggcctccagaagcagcatgatgggccgacgtagaaacggtagcgcatctaccacccgctctgccgcggccaccaaccccacgaccgccactccgaactcgtcacagccgcagtcgcctgctggagctccgcagaaaaagaagaagggaggattgctggcattgctgggctgctgcggtgtacccgacaacgccaacctcgaaggcggagacgaacctctgccatctcacaagctggacaaacttcccccacggcccttgacttccagcaggagaaccataacgccttcggaacaaccgagcaacagcaagtctcagcttcaggagagccagaaggacccccaagctcaaggcggcgtagcagcacaggatagcaaatcggccaagcgcgcttcgcagactgcagccgctgacaccacgggcaccaccgacctcgatagcgactccaaacaaaccacgctcgtagctgcgccgccaggcccaagcataacggtgaacccgcctgccgcggacagacaggaacccgaggttgtgccgagcgaaagcgcaaagagccaagaccaggatggcgatgtggacatgcccgatgctgatgcttccgcatcgcagcaggtacgcgcacctgtagccgctgctgatgacaacaagttccccaacactgttcctccacccccgcccccgcccaacacagcacccataccgaaccaaggcgcggtcgcagtggaagagaagacggcagtggcggaacagacgcagcaaaagttcctcctgccaccgatcgagccacgcttcaagggacgaaaatgtctcgtcttagatctggacgagacactggtccacagctcatttaagatattgcatcaggccgacttcacgatacctgtggagattgaaggcaactaccacaatgtgtatgtgatcaagcggccaggcgtcgaccaattcatgaagcgcgttggagaactgtacgaagttgtggtctttacggcgtccgtatctaagtacggcgacccgctactcgaccagctcgacattcataaagtggtacatcacaggttgttccgcgagagttgttataaccaccaaggcaactacgtaaaggacctctcgcaagttggacgcgatctcaaggacaccatcatcatcgacaactcgcccacctcttacatcttccacccgcaacacgcagtccccattagcagctggttctcggatgcacacgacaacgagctgctggatcttatccccgttctcgaggacctggctggccctaatgtacaagacgtcagcatggtcctcgatgtcactctttgagctcagtcacaactcacccatttttctatatcataccccacaatacatcgcagaccattattatcatagcggaaggcgttctcggctttgaatccctcgagtcttggtgtagatgtactgttctaatatactataaagaggaggatttctgccccgcggccccgtaggcccccattgtccagcagagacggtggcccgtgtatagttcaaatccggctggagcacctaggacctggttcaaattaaaacggaaaaggcgacttcaggaaaaagcgtcaaatctcaggcaggttcaggcaacttgacagggagcaaaagggaaggtctgtcacggccacactatctggagaggcagtcatctgaattcaacggtttcggcacaggcggcgaagcaatggctcatagttcaccgtacagtctcgcgacagaccttgcagagcatccagcatcaccacgacgaccgatcacacacccactcacacacaaaccatcttgttcttttcttgaactacatcttcttttctttttgtcattttgttttttttctcccgccaacccctggccgtcggcggcggcgagtctatcgcgccgccgacgcatatacatgaggacagaaagcaggccgcgcgggcaggacagcattccgtgagccgaggcgccgctgagagcgtggctgcccctcatggtcagaatcatcatacttttatcttgagagcgggtgcagaaggtggcatggaagacggagcgggtaggatgtgttgctagagagatgactttggtctgttaccaaggcacgttttgggagggatggaaggagcaaaacggtaccgacatccggctcacaagaagcacggtgatagaccttattcaactagtaatggcgtcaacttgattgaaagctctcagtaatgggccgaagtctccatctagtgtaatatgcatatcgacatttgtatcgatatgatctcccgtgataagacatctgctcataaatgtctcgtctacatatgtacttaggtgcctgaatgttctttgctcactcatgccattttacttggcgcatttcctaaatgtctgtattctactgccaatttctgttgcagctagtaggatatcgaaagcaagtattattatcttagtcgcagatcgctgactt

SEQ ID NO: 25350 - DNA, 1536 bp, Muscodor strobelii
  misc_feature: SGI cDNA ID NO. 568652
  misc_feature: Encodes the peptide sequence at SEQ ID NO 25351
atgtcacgaggtgttgacagcagcaaccacgcacagcagccggtcgccagcgggacagagctggcgaacctcggggacggatcaatctcaaagcagagtcaaggacagctcaacaaaccctcccgcaagtcgtcatcgcagaatctgcagccctctccggcgacaacggccctcactgggacaaccgcgagcgaacaccgtgatagcatcagcggccgctccaaggcctccagaagcagcatgatgggccgacgtagaaacggtagcgcatctaccacccgctctgccgcggccaccaaccccacgaccgccactccgaactcgtcacagccgcagtcgcctgctggagctccgcagaaaaagaagaagggaggattgctggcattgctgggctgctgcggtgtacccgacaacgccaacctcgaaggcggagacgaacctctgccatctcacaagctggacaaacttcccccacggcccttgacttccagcaggagaaccataacgccttcggaacaaccgagcaacagcaagtctcagcttcaggagagccagaaggacccccaagctcaaggcggcgtagcagcacaggatagcaaatcggccaagcgcgcttcgcagactgcagccgctgacaccacgggcaccaccgacctcgatagcgactccaaacaaaccacgctcgtagctgcgccgccaggcccaagcataacggtgaacccgcctgccgcggacagacaggaacccgaggttgtgccgagcgaaagcgcaaagagccaagaccaggatggcgatgtggacatgcccgatgctgatgcttccgcatcgcagcaggtacgcgcacctgtagccgctgctgatgacaacaagttccccaacactgttcctccacccccgcccccgcccaacacagcacccataccgaaccaaggcgcggtcgcagtggaagagaagacggcagtggcggaacagacgcagcaaaagttcctcctgccaccgatcgagccacgcttcaagggacgaaaatgtctcgtcttagatctggacgagacactggtccacagctcatttaagatattgcatcaggccgacttcacgatacctgtggagattgaaggcaactaccacaatgtgtatgtgatcaagcggccaggcgtcgaccaattcatgaagcgcgttggagaactgtacgaagttgtggtctttacggcgtccgtatctaagtacggcgacccgctactcgaccagctcgacattcataaagtggtacatcacaggttgttccgcgagagttgttataaccaccaaggcaactacgtaaaggacctctcgcaagttggacgcgatctcaaggacaccatcatcatcgacaactcgcccacctcttacatcttccacccgcaacacgcagtccccattagcagctggttctcggatgcacacgacaacgagctgctggatcttatccccgttctcgaggacctggctggccctaatgtacaagacgtcagcatggtcctcgatgtcactctttga

SEQ ID NO: 25351 - protein, 511 aa, Muscodor strobelii
  misc_feature: SGI Peptide ID NO. 568652
  misc_feature (333)..(509): Pfam Id: PF03031 Pfam Desc: NLI interacting factor-like phosphatase
  misc_feature (1)..(511): NCBI GI: 145615980 Blast Desc: MGG_03646 [Magnaporthe grisea 70-15] gi|145009766|gb|EDJ94422.1| MGG_03646 [Magnaporthe grisea 70-15]
  misc_feature (31)..(511): NCBI GI: 171695330 Blast Desc: protein product [Podospora anserina] gi|170947907|emb|CAP60071.1| protein product [Podospora anserina]
  misc_feature (8)..(511): NCBI GI: 256730582 Blast Desc: NECHADRAFT_89759 [Nectria haematococca mpVI 77-13-4]
  misc_feature (82)..(511): NCBI GI: 261355303 Blast Desc: phosphatase PSR1 [Verticillium albo-atrum VaMs.102]
  misc_feature (56)..(511): NCBI GI: 85117541 Blast Desc: conserved , variant [Neurospora crassa OR74A] gi|28927089|gb|EAA36047.1| conserved , variant [Neurospora crassa OR74A]
  misc_feature (120)..(511): NCBI GI: 164424900 Blast Desc: NCU08380 [Neurospora crassa OR74A] gi|157070709|gb|EDO65097.1| conserved [Neurospora crassa OR74A]
  misc_feature (13)..(511): NCBI GI: 46109290 Blast Desc: FG01527.1 [Gibberella zeae PH-1]
  misc_feature (31)..(511): NCBI GI: 154297273 Blast Desc: plasma membrane phosphatase required for sodium stress response [Botryotinia fuckeliana B05.10] gi|150842999|gb|EDN18192.1| plasma membrane phosphatase required
  misc_feature (30)..(511): NCBI GI: 156054110 Blast Desc: SS1G_05903 [Sclerotinia sclerotiorum 1980] gi|154703683|gb|EDO03422.1| SS1G_05903 [Sclerotinia sclerotiorum 1980]
  misc_feature (30)..(511): NCBI GI: 189207176 Blast Desc: phosphoprotein phosphatase [Pyrenophora tritici-repentis Pt-1C-BFP] gi|187976015|gb|EDU42641.1| phosphoprotein phosphatase [Pyrenophora tritici-repentis
MSRGVDSSNHAQQPVASGTELANLGDGSISKQSQGQLNKPSRKSSSQNLQPSPATTALTGTTASEHRDSISGRSKASRSSMMGRRRNGSASTTRSAAATNPTTATPNSSQPQSPAGAPQKKKKGGLLALLGCCGVPDNANLEGGDEPLPSHKLDKLPPRPLTSSRRTITPSEQPSNSKSQLQESQKDPQAQGGVAAQDSKSAKRASQTAAADTTGTTDLDSDSKQTTLVAAPPGPSITVNPPAADRQEPEVVPSESAKSQDQDGDVDMPDADASASQQVRAPVAAADDNKFPNTVPPPPPPPNTAPIPNQGAVAVEEKTAVAEQTQQKFLLPPIEPRFKGRKCLVLDLDETLVHSSFKILHQADFTIPVEIEGNYHNVYVIKRPGVDQFMKRVGELYEVVVFTASVSKYGDPLLDQLDIHKVVHHRLFRESCYNHQGNYVKDLSQVGRDLKDTIIIDNSPTSYIFHPQHAVPISSWFSDAHDNELLDLIPVLEDLAGPNVQDVSMVLDVTL

SEQ ID NO: 25352 - DNA, 2968 bp, Muscodor strobelii; identical to SEQ ID NO: 25349
  misc_feature: SGI EST ID NO. CUFF.59969.1
  misc_feature: Variant of the nucleotide sequence at SEQ ID NO 25350

SEQ ID NO: 25353 - DNA, 2469 bp, Muscodor strobelii
  misc_feature: SGI cDNA ID NO. 568653
  misc_feature: Encodes the peptide sequence at SEQ ID NO 25354
atggcggtgcaatccacccttcgccattcggcgtcggaggacatcatcatggtctttatagacaagtacaagagcctcatccgagatcgcttccggaagacgtcccgccgagccaaacttcttgcgactcttgctctagcgatatccatcgtcctcggcgccggagggactcgtaaatggtggatcaagaggaaaagagaaaaggaacaaggccgaaagctgctacggaccaattcgtggctgttggggaaagatggctcgaggactatatacgttccatataaagatggcacctcgaaagtgaccattcaccggacaaagcctttgacctttgaggcacatcgtcgcctcttcctcaacccgcccaaggtctctgggcttggcgacggcaccgttccctcagcgcaaaccaagcctggcctcaaccttgctttcttgcatcagtttctgagcctgatgagcatcatgatcccgcgatggacgagcaaagaggccgggttgctagtcagtcacggcgtgttcctgatgctgagaacatatctttcgctcgttgtcgcgcgccttgatggtgagatcgtgcgcgacctggtagctggtaacggacgattgttcctctggggtatagctaaatggtgtggacttggcgggtttgcctcgtataccaactcaatgatcaagttcctggagtccaaagtgtcgatcgcattccggacacgacttacgcgatacatacatgacttatatctgagtgaaaatctcaattactacaagctatctaaccttgatggtggcgtcgggcaaggcgccgaccagttcatcacccaagatctcacgcttttctgtgcttccgccgcgaacttgtactcatccttaggcaagccatttgtcgacatttgtgtcttcaactaccaactataccgctcattgggaccgttagctttgacagcattgcttagcaattatttccttacggcgagcattctccggcggatgtcgccgcctttcggaaaactcaaggcggttgaaggtcgcaaggagggtgacttccgaagtctacacgctcgcttgattgccaacgctgaggaagtcgccttttacggcggtgctgagatggagaagacgtttctgaataaggagttcaggtctttgaagagctggatggagggcatttatatgctcaagatccggtacaacatcctcgaagattttattttgaagtacagctggagtgcctacggctaccttctttcatccctccctgtattcctccccgcttggggcggtcttggaggtgccatggagatgattgagagcgccgaaaagggtggccgcgagcgcaatcgaatgaaagatttcattaccaacaagcgcctcatgctgtcactcgccgatgctggtggtcgcatgatgtactccatcaaggatctctccgaactagctggttacactagccgtgtctacacacttatctccaccctgcaccgagtacacgccaatgcatatttctctcgtcccagcggcaacgaactcttctctctttccgacgtccaaggcaccatccaaaagggcttcgatggcgtcagattagagcacgtgcctattgtggctcccggtctctggccccagggcggtgaagagcttctggagtcgctatctttgatcgttcgccgaggtgaacatttactaatctctggccctaatggcatcggcaagagcgctatctctagagttctcgccggtctgtggccagtatatcgtggcttagtgagcagacctaaatccatcggtgaagatggtatcatgttcctgcctcaacgaccatacctcagcatcggcacgcttcgtgatcaagtcatttacccagatggcgaactcgacatgcgattaaagcgaaagagcgaggatgatctgaagcgggctcttgatgctgctaagcttggatacctacctgatcgagagggcggatgggatactcgcaaagagtggaaagatgtgttgagtggtggtgagaagcagagagttggtattgcgagattgttctaccacgagcctcagtatgctattattgacgaaggtacgagtgctgtgtccagtgatgttgagggcctattgtatgagacttgtaaggagaagggtatcactttgatcacgatatctacgcgtgcttcactcaagaaatatcacactttcaatcttgcgcttggtcaaggcgagaatggcgatgagtgggaattcgagcgcattggtacggagcgtgagaagatgcaggttgagagagagctacaggatttgagagaacgactgaaccaggttgagcagtggaaggagaggagggaggagattgagagggagctggcgcaagtttggacagagaagagtgaggaggctctggaaccgccgccgtatgttgagaatagtgaacagacaagtgagtggagtgtgcctgagaaggttgaggctgagggctga

SEQ ID NO: 25354 - protein, 822 aa, Muscodor strobelii
  misc_feature: SGI Peptide ID NO. 568653
  misc_feature (139)..(422): Pfam Id: PF06472 Pfam Desc: ABC transporter transmembrane region 2
  misc_feature (558)..(737): Pfam Id: PF00005 Pfam Desc: ABC transporter
  misc_feature (1)..(821): NCBI GI: 171695328 Blast Desc: protein product [Podospora anserina] gi|31744958|emb|CAD91171.1| peroxisomal half ABC transporter [Podospora anserina] gi|170947906|emb|CAP60070.1| protein product
  misc_feature (1)..(811): NCBI GI: 85111423 Blast Desc: NCU08382 [Neurospora crassa OR74A] gi|28925680|gb|EAA34693.1| NCU08382 [Neurospora crassa OR74A]
  misc_feature (1)..(811): NCBI GI: 46109288 Blast Desc: FG01526.1 [Gibberella zeae PH-1]
  misc_feature (1)..(804): NCBI GI: 261355302 Blast Desc: peroxisomal long-chain fatty acid import protein [Verticillium albo-atrum VaMs.102]
  misc_feature (1)..(819): NCBI GI: 116182398 Blast Desc: CHGG_01827 [Chaetomium globosum CBS 148.51] gi|88186124|gb|EAQ93592.1| CHGG_01827 [Chaetomium globosum CBS 148.51]
  misc_feature (1)..(804): NCBI GI: 156054112 Blast Desc: SS1G_05904 [Sclerotinia sclerotiorum 1980] gi|154703684|gb|EDO03423.1| SS1G_05904 [Sclerotinia sclerotiorum 1980]
  misc_feature (1)..(794): NCBI GI: 154297267 Blast Desc: BC1G_12469 [Botryotinia fuckeliana B05.10] gi|150842996|gb|EDN18189.1| BC1G_12469 [Botryotinia fuckeliana B05.10]
  misc_feature (1)..(721): NCBI GI: 145615978 Blast Desc: MGG_13491 [Magnaporthe grisea 70-15] gi|145009765|gb|EDJ94421.1| MGG_13491 [Magnaporthe grisea 70-15]
  misc_feature (1)..(822): NCBI GI: 261188242 Blast Desc: peroxisomal ABC transporter [Ajellomyces dermatitidis SLH14081] gi|239593284|gb|EEQ75865.1| peroxisomal ABC transporter [Ajellomyces dermatitidis SLH14081]
  misc_feature (1)..(811): NCBI GI: 240279862 Blast Desc: peroxisomal half ABC transporter [Ajellomyces capsulatus H143]
  misc_feature (151)..(748): SWISSPROT Homolog: EC 3.6.3.47 Fatty-acyl-CoA-transporting ATPase
MAVQSTLRHSASEDIIMVFIDKYKSLIRDRFRKTSRRAKLLATLALAISIVLGAGGTRKWWIKRKREKEQGRKLLRTNSWLLGKDGSRTIYVPYKDGTSKVTIHRTKPLTFEAHRRLFLNPPKVSGLGDGTVPSAQTKPGLNLAFLHQFLSLMSIMIPRWTSKEAGLLVSHGVFLMLRTYLSLVVARLDGEIVRDLVAGNGRLFLWGIAKWCGLGGFASYTNSMIKFLESKVSIAFRTRLTRYIHDLYLSENLNYYKLSNLDGGVGQGADQFITQDLTLFCASAANLYSSLGKPFVDICVFNYQLYRSLGPLALTALLSNYFLTASILRRMSPPFGKLKAVEGRKEGDFRSLHARLIANAEEVAFYGGAEMEKTFLNKEFRSLKSWMEGIYMLKIRYNILEDFILKYSWSAYGYLLSSLPVFLPAWGGLGGAMEMIESAEKGGRERNRMKDFITNKRLMLSLADAGGRMMYSIKDLSELAGYTSRVYTLISTLHRVHANAYFSRPSGNELFSLSDVQGTIQKGFDGVRLEHVPIVAPGLWPQGGEELLESLSLIVRRGEHLLISGPNGIGKSAISRVLAGLWPVYRGLVSRPKSIGEDGIMFLPQRPYLSIGTLRDQVIYPDGELDMRLKRKSEDDLKRALDAAKLGYLPDREGGWDTRKEWKDVLSGGEKQRVGIARLFYHEPQYAIIDEGTSAVSSDVEGLLYETCKEKGITLITISTRASLKKYHTFNLALGQGENGDEWEFERIGTEREKMQVERELQDLRERLNQVEQWKERREEIERELAQVWTEKSEEALEPPPYVENSEQTSEWSVPEKVEAEG

SEQ ID NO: 25355 - DNA, 2834 bp, Muscodor strobelii
  misc_feature: SGI EST ID NO. CUFF.59698.0
  misc_feature: Variant of the nucleotide sequence at SEQ ID NO 25353
gccaggtctacgggccattgacgtcgcgatcttgaaactcattcctagtcacagttcaccatcacctacagccatattgtactatcttagtgaattgatgcatccatgattttttccgcgccctccctaccgatggcaccagtacttgtcgtgccagatcaatcctaattgacgtcacggactcagcgtcgtcatggcggtgcaatccacccttcgccattcggcgtcggaggacatcatcatggtctttatagacaagtacaagagcctcatccgagatcgcttccggaagacgtcccgccgagccaaacttcttgcgactcttgctctagcgatatccatcgtcctcggcgccggagggactcgtaaatggtggatcaagaggaaaagagaaaaggaacaaggccgaaagctgctacggaccaattcgtggctgttggggaaagatggctcgaggactatatacgttccatataaagatggcacctcgaaagtgaccattcaccggacaaagcctttgacctttgaggcacatcgtcgcctcttcctcaacccgcccaaggtctctgggcttggcgacggcaccgttccctcagcgcaaaccaagcctggcctcaaccttgctttcttgcatcagtttctgagcctgatgagcatcatgatcccgcgatggacgagcaaagaggccgggttgctagtcagtcacggcgtgttcctgatgctgagaacatatctttcgctcgttgtcgcgcgccttgatggtgagatcgtgcgcgacctggtagctggtaacggacgattgttcctctggggtatagctaaatggtgtggacttggcgggtttgcctcgtataccaactcaatgatcaagttcctggagtccaaagtgtcgatcgcattccggacacgacttacgcgatacatacatgacttatatctgagtgaaaatctcaattactacaagctatctaaccttgatggtggcgtcgggcaaggcgccgaccagttcatcacccaagatctcacgcttttctgtgcttccgccgcgaacttgtactcatccttaggcaagccatttgtcgacatttgtgtcttcaactaccaactataccgctcattgggaccgttagctttgacagcattgcttagcaattatttccttacggcgagcattctccggcggatgtcgccgcctttcggaaaactcaaggcggttgaaggtcgcaaggagggtgacttccgaagtctacacgctcgcttgattgccaacgctgaggaagtcgccttttacggcggtgctgagatggagaagacgtttctgaataaggagttcaggtctttgaagagctggatggagggcatttatatgctcaagatccggtacaacatcctcgaagattttattttgaagtacagctggagtgcctacggctaccttctttcatccctccctgtattcctccccgcttggggcggtcttggaggtgccatggagatgattgagagcgccgaaaagggtggccgcgagcgcaatcgaatgaaagatttcattaccaacaagcgcctcatgctgtcactcgccgatgctggtggtcgcatgatgtactccatcaaggatctctccgaactagctggttacactagccgtgtctacacacttatctccaccctgcaccgagtacacgccaatgcatatttctctcgtcccagcggcaacgaactcttctctctttccgacgtccaaggcaccatccaaaagggcttcgatggcgtcagattagagcacgtgcctattgtggctcccggtctctggccccagggcggtgaagagcttctggagtcgctatctttgatcgttcgccgaggtgaacatttactaatctctggccctaatggcatcggcaagagcgctatctctagagttctcgccggtctgtggccagtatatcgtggcttagtgagcagacctaaatccatcggtgaagatggtatcatgttcctgcctcaacgaccatacctcagcatcggcacgcttcgtgatcaagtcatttacccagatggcgaactcgacatgcgattaaagcgaaagagcgaggatgatctgaagcgggctcttgatgctgctaagcttggatacctacctgatcgagagggcggatgggatactcgcaaagagtggaaagatgtgttgagtggtggtgagaagcagagagttggtattgcgagattgttctaccacgagcctcagtatgctattattgacgaaggtacgagtgctgtgtccagtgatgttgagggcctattgtatgagacttgtaaggagaagggtatcactttgatcacgatatctacgcgtgcttcactcaagaaatatcacactttcaatcttgcgcttggtcaaggcgagaatggcgatgagtgggaattcgagcgcattggtacggagcgtgagaagatgcaggttgagagagagctacaggatttgagagaacgactgaaccaggttgagcagtggaaggagaggagggaggagattgagagggagctggcgcaagtttggacagagaagagtgaggaggctctggaaccgccgccgtatgttgagaatagtgaacagacaagtgagtggagtgtgcctgagaaggttgaggctgagggctgaagaggtggaatactgtatatatagtatagtatcgggtgtattgcatatcgtaaaggatagaagtgccactcaaacaagtcttggtgttgtgctgtctaggctgtctgttgcgtgccgatcatggtgagcaatatcccactagtgaaagccacacggcgccaacagatccagc

SEQ ID NO: 25356 - DNA, 1413 bp, Muscodor strobelii
  misc_feature: SGI cDNA ID NO. 568654
  misc_feature: Encodes the peptide sequence at SEQ ID NO 25357
atggcgtggatttaccagaacgccgtattcacaattgcctgtgaacgcggcgctcatatggacagtggatgtttcaacgacgccgatacatatacacttccagatgacctattcggaccagagctcgtgctcccgcccgatccagcatatgaaaaaattggctcggcttctcaaacgtctcgaagggttgtgtttcgtcagaatcgtttaaggacgaaacgcacgaacgacgaggtcaacgctttgcgaatgaatcggggtactttcaccagtcacttagacaaacgagcctggtctttccaggaaaggcttttctcgccgcgcgtcctgcattttacgtccacctctatagtctgggaatgcaaagaacgtttcgttaatctcgggctaccagaatactacgatgcaaagatcccagaaactatgttgaacttcgaaggggaagacaagaaccagctgcttcgaaaatggtatcacatagtcgaggaataccatacgaagcgcgtcatattcgttagtgacagactcccggctgtgagcggtttggctcgtagcatcggatccatgttaaggatgacagagacaaatatcgagtatattacaggcatgttcttccagattacctgtggaccacgagatgctctagaaaatgattggagctacaagggccgacctggaactgtctttgggcccataatcgcatgtagccggacgcctcaagacaacaccgaggaagacaaacaagagatagatcttgcttactggatcgatgaagattaccaagagcgcatggtccgaagtctcctctggcacattgactatgctcggagtacagatgacaataatgtgtcaaacccattgcccgtcattcctgatgctacagtcattattggtatgccatccttctcatgggcatcgaaaatgaactgcgagatcgatttttcgttcacccgcgtcactagcatggtaccccatttccaccgagctcccatcgtcgacctcaaggtattaccaaagatcaacgatccttacggcgacatctcatttgccagtctttcgatccgagcaagatacctaaacgtgactatctcgccatcgttgagccccgggataaatcatctcgaagacaaatcaaccggagatggggtcggacaagggtatctcgatgcaaataccgaaagtctcaagcccagcgatgcactatatttggagataattatagaacacaactacttctaccagcacggatggggctggccgaatgctaagacctctgtcggcttactcgtgactcaaacatcgtctacctatactaacgctacgtgctaccggagaattggagtggcacgggttcagagagcggggaagaaccccccagttccaatggaggaggagatatttaccctcgtgtaa

SEQ ID NO: 25357 - protein, 470 aa, Muscodor strobelii
  misc_feature: SGI Peptide ID NO. 568654
  misc_feature (1)..(230): NCBI GI: 171677722 Blast Desc: protein product [Podospora anserina] gi|170936929|emb|CAP61588.1| protein product [Podospora anserina]
  misc_feature (91)..(253): NCBI GI: 256728738 Blast Desc: NECHADRAFT_85988 [Nectria haematococca mpVI 77-13-4]
  misc_feature (1)..(204): NCBI GI: 238490686 Blast Desc: conserved [Aspergillus flavus NRRL3357] gi|220696993|gb|EED53334.1| conserved [Aspergillus flavus NRRL3357]
  misc_feature (1)..(213): NCBI GI: 256722671 Blast Desc: NECHADRAFT_87199 [Nectria haematococca mpVI 77-13-4]
  misc_feature (1)..(204): NCBI GI: 256728092 Blast Desc: NECHADRAFT_83551 [Nectria haematococca mpVI 77-13-4]
  misc_feature (1)..(204): NCBI GI: 154321906 Blast Desc: BC1G_01100 [Botryotinia fuckeliana B05.10] gi|150850347|gb|EDN25540.1| BC1G_01100 [Botryotinia fuckeliana B05.10]
  misc_feature (1)..(205): NCBI GI: 169608401 Blast Desc: SNOG_07276 [Phaeosphaeria nodorum SN15] gi|160701635|gb|EAT85927.2| SNOG_07276 [Phaeosphaeria nodorum SN15]
  misc_feature (93)..(204): NCBI GI: 171680048 Blast Desc: protein product [Podospora anserina] gi|170939650|emb|CAP64877.1| protein product [Podospora anserina]
  misc_feature (87)..(206): NCBI GI: 189207114 Blast Desc: conserved [Pyrenophora tritici-repentis Pt-1C-BFP] gi|187975984|gb|EDU42610.1| conserved [Pyrenophora tritici-repentis Pt-1C-BFP]
  misc_feature (1)..(210): NCBI GI: 256720767 Blast Desc: NECHADRAFT_85408 [Nectria haematococca mpVI 77-13-4]
MAWIYQNAVFTIACERGAHMDSGCFNDADTYTLPDDLFGPELVLPPDPAYEKIGSASQTSRRVVFRQNRLRTKRTNDEVNALRMNRGTFTSHLDKRAWSFQERLFSPRVLHFTSTSIVWECKERFVNLGLPEYYDAKIPETMLNFEGEDKNQLLRKWYHIVEEYHTKRVIFVSDRLPAVSGLARSIGSMLRMTETNIEYITGMFFQITCGPRDALENDWSYKGRPGTVFGPIIACSRTPQDNTEEDKQEIDLAYWIDEDYQERMVRSLLWHIDYARSTDDNNVSNPLPVIPDATVIIGMPSFSWASKMNCEIDFSFTRVTSMVPHFHRAPIVDLKVLPKINDPYGDISFASLSIRARYLNVTISPSLSPGINHLEDKSTGDGVGQGYLDANTESLKPSDALYLEIIIEHNYFYQHGWGWPNAKTSVGLLVTQTSSTYTNATCYRRIGVARVQRAGKNPPVPMEEEIFTLV

SEQ ID NO: 25358 - DNA, 341 bp, Muscodor strobelii
  misc_feature: SGI EST ID NO. CUFF.59657.0
  misc_feature: Variant of the nucleotide sequence at SEQ ID NO 25356
gtactttcaccagtcacttagacaaacgagcctggtctttccaggaaaggcttttctcgccgcgcgtcctgcattttacgtccacctctatagtctgggaatgcaaagaacgtttcgttaatctcgggctaccagaatactacgatgcaaagatcccagaaactatgttgaacttcgaaggggaagacaagaaccagctgcttcgaaaatggtatcacatagtcgaggaataccatacgaagcgcgtcatattcgttagtgacagactcccggctgtgagcggtttggctcgtagcatcggatccatgttaaggatgacagagacaaatatcgagtatatt

SEQ ID NO: 25359 - DNA, 1131 bp, Muscodor strobelii
  misc_feature: SGI cDNA ID NO. 568655
  misc_feature: Elevated expression when VOC is produced
  misc_feature: Encodes the peptide sequence at SEQ ID NO 25360
atgaggtcgaaatctcttcccctcatctccctcctcaccgccaccctctccagcgcaacgttccaactcccacccactgctcaaaagcccatcatcagcctcatcgaaaatgacgtcgatatttcacccggctctcaattccacggactgacaacttacgcaaatgtgccatacgtgaattgcttatcggatgagggagcggaggggaacaaatacgatattgcatttcttggcgcaccattcgataccgccgtgacagctcgcccaggagctcgctacgggccccgagcaatccgttccgcgagcgacaggaaagaggcgcgtgctggatggagcaagaatgctcttaaatcatgggccaaagtcgtagactgcggcgacgtcccgcttacatggctcgacaacaatgtcgcattggctcagctcacaaaggcacataaagttgtgtcttctagaaaaatagcaaatgagacttttggtagtgtgccaagaataattacgttgggtggtgatcatacgacgacgcttcctgcgctaaggagtacggtcaagcattggggtcctgtgtctgtcattcattttgatagtcatatcgatacgtgggatcccgcggttctcggaggcgatatatcagattatgcgggactaaaccatggcacatttctccatatcgcacacgaagaaggtctaatacgcaacacatcaatccacgctgggatccgggcacctttaattagacgcaaaggcgacatgcgcaacgacctacgctgcgggttcgagactctgacggcgcgagacattgatcggttcggtacagctggcatagtatcccggatccgtaaccgaattactgggcctgtatatatttccgtggatatcgatgtcctcgatcctgcgtttgctcctgcaacaggcacgcctgaaccaggcggttggtcaacacgagaacttctcacaattctcgagggactaacaggactcgaagtagtcggcggtgacgtggtcgaagtagcgcctgcgtatgacacacagggcgagaccacaggactcgccgcaacagaggtcgcatggtctctgcttgagctcatggttgaggttccggtgaagtctttgttcgatcacgaatcttga

SEQ ID NO: 25360 - protein, 376 aa, Muscodor strobelii
  misc_feature: SGI Peptide ID NO. 568655
  misc_feature (70)..(364): Pfam Id: PF00491 Pfam Desc: Arginase family
  misc_feature (258)..(364): Pfam Id: PF00491 Pfam Desc: Arginase family
  misc_feature (70)..(203): Pfam Id: PF00491 Pfam Desc: Arginase family
  misc_feature (11)..(368): NCBI GI: 258573173 Blast Desc: conserved [Uncinocarpus reesii 1704] gi|237901034|gb|EEP75435.1| conserved [Uncinocarpus reesii 1704]
  misc_feature (6)..(368): NCBI GI: 119191600 Blast Desc: CIMG_00177 [Coccidioides immitis RS] gi|240106411|gb|EER24604.1| agmatinase, [Coccidioides posadasii C735 delta SOWgp]
  misc_feature (25)..(368): NCBI GI: 121710926 Blast Desc: arginase family protein [Aspergillus clavatus NRRL 1] gi|119401229|gb|EAW11653.1| arginase family protein [Aspergillus clavatus NRRL 1]
  misc_feature (9)..(374): NCBI GI: 261355366 Blast Desc: proclavaminate amidinohydrolase [Verticillium albo-atrum VaMs.102]
  misc_feature (16)..(369): NCBI GI: 225559232 Blast Desc: arginase [Ajellomyces capsulatus G186AR]
  misc_feature (18)..(370): NCBI GI: 145235479 Blast Desc: An03g05070 [Aspergillus niger] gi|134058073|emb|CAK49159.1| protein product [Aspergillus niger]
  misc_feature (7)..(367): NCBI GI: 189205847 Blast Desc: arginase family protein [Pyrenophora tritici-repentis Pt-1C-BFP] gi|187975351|gb|EDU41977.1| arginase family protein [Pyrenophora tritici-repentis Pt-1C-BFP]
  misc_feature (18)..(368): NCBI GI: 239614184 Blast Desc: arginase [Ajellomyces dermatitidis ER-3]
  misc_feature (18)..(368): NCBI GI: 261204557 Blast Desc: arginase [Ajellomyces dermatitidis SLH14081] gi|239587277|gb|EEQ69920.1| arginase [Ajellomyces dermatitidis SLH14081]
  misc_feature (49)..(368): NCBI GI: 171684289 Blast Desc: protein product [Podospora anserina] gi|170942105|emb|CAP67757.1| protein product [Podospora anserina]
  misc_feature (38)..(368): SWISSPROT Homolog: EC 3.5.3.11 Agmatinase
  misc_feature: Useful for introducing or modulating the production of volatile compounds
MRSKSLPLISLLTATLSSATFQLPPTAQKPIISLIENDVDISPGSQFHGLTTYANVPYVNCLSDEGAEGNKYDIAFLGAPFDTAVTARPGARYGPRAIRSASDRKEARAGWSKNALKSWAKVVDCGDVPLTWLDNNVALAQLTKAHKVVSSRKIANETFGSVPRIITLGGDHTTTLPALRSTVKHWGPVSVIHFDSHIDTWDPAVLGGDISDYAGLNHGTFLHIAHEEGLIRNTSIHAGIRAPLIRRKGDMRNDLRCGFETLTARDIDRFGTAGIVSRIRNRITGPVYISVDIDVLDPAFAPATGTPEPGGWSTRELLTILEGLTGLEVVGGDVVEVAPAYDTQGETTGLAATEVAWSLLELMVEVPVKSLFDHES

SEQ ID NO: 25361 - DNA, 2258 bp, Muscodor strobelii
  misc_feature: SGI EST ID NO. CUFF.59695.1
  misc_feature: Variant of the nucleotide sequence at SEQ ID NO 25359
cgcaaatctactatgaattaatttccagacaaaaatttaagagccggaaatgaggtcgaaatctcttcccctcatctccctcctcaccgccaccctctccagcgcaacgttccaactcccacccactgctcaaaagcccatcatcagcctcatcgaaaatgacgtcgatatttcacccggctctcaattccacggactgacaacttacgcaaatgtgccatacgtgaattgcttatcggatgagggagcggaggggaacaaatacgatattgcatttcttggcgcaccattcgataccgccgtgacagctcgcccaggagctcgctacgggccccgagcaatccgttccgcgagcgacaggaaagaggcgcgtgctggatggagtgtatacacaggcaagaatgctcttaaatcatgggccaaagtcgtagactgcggcgacgtcccgcttacatggctcgacaacaatgtcgcattggctcagctcacaaaggcacataaagttgtgtcttctagaaaaatagcaaatgagacttttggtagtgtgccaagaataattacgttgggtggtgatcatacgacgacgcttcctgcgctaaggagtacggtcaagcattggggtcctgtgtctgtcattcattttgatagtcatatcgggtctaatacgcaacacatcaatccacgctgggatccgggcacctttaattagacgcaaaggcgacatgcgcaacgacctacgctgcgggttcgagactctgacggcgcgagacattgatcggttcggtacagctggcatagtatcccggatccgtaaccgaattactgggcctgtatatatttccgtggatatcgatgtcctcgatcctgcgtttgctcctgcaacaggcacgcctgaaccaggcggttggtcaacacgagaacttctcacaattctcgagggactaacaggactcgaagtagtcggcggtgacgtggtcgaagtagcgcctgcgtatgacacacagggcgagaccacaggactcgccgcaacagaggtcgcatggtctctgcttgagctcatggttgaggttccggtgaagtctttgttcgatcacgaatcttgagcttgacaggatgccctggtatataaggggggaatcgtatctctgaggtgaatgacagagttacgtgtgtcaaggattccgacacaaggaactgatagaaattatgagactagggactcttcatctctgtttaccatccacatggtatgcagaagctatgttgcagcaggtgactatgatgacccgtaccagcgagccgcaagtttctaccatgcttctactgaataatgactctcctgaatggttctttattggtatcatcatatcagctttagggacgacgccattaagaaagctttgatagcctcgcatatggatgcataagtaagcacatatactttcgatccgtaaggttgaggagtgactggtatccttgatcccaatacgtcctaggccattatgtcgtgttgatttgctcagcattattattacacgagggtaaatatctcctcctccattggaactggggggttcttccccgctctctgaacccgtgccactccaattctccggtagcacgtagcgttagtataggtagacgatgtttgagtcacgagtaagccgacagaggtcttagcattcggccagccccatccgtgctggtagaagtagttgtgttctataattatctccaaatatagtgcatcgctgggcttgagactttcggtatttgcatcgagatacccttgtccgaccccatctccggttgatttgtcttcgagatgatttatcccggggctcaacgatggcgagatagtcacgtttaggtatcttgctcggatcgaaagactggcaaatgagatgtcgccgtaaggatcgttgatctttggtaataccttgaggtcgacgatgggagctcggtggaaatggggtaccatgctagtgacgcgggtgaacgaaaaatcgatctcgcagttcattttcgatgcccatgagaaggatggcataccaataatgactgtagcatcaggaatgacgggcaatgggtttgacacattattgtcatctgtactccgagcatagtcaatgtgccagaggagacttcggaccatgcgctcttggtaatcttcatcgatccagtaagcaagatctatctcttgtttgtcttcctcggtgttgtcttgaggcgtccggctacatgcgattatgggccca

SEQ ID NO: 25362 - DNA, 2868 bp, Muscodor strobelii
  misc_feature: SGI cDNA ID NO. 568656
  misc_feature: Encodes the peptide sequence at SEQ ID NO 25363
atggcgtcaatgacgactactactgaggctgttgagcctcccaagacgaagcccgctcacaaaatacgaaagagggcaccgaaagcatgcctttcatgcagagcgcgcaaagtgaggtgcgatgtttctcagagaggacggccatgcatgaactgttatctcgacagtgagacatgtgttgtgacaggccgagcatcaagattccgaaaacctcagcatgaaggcacggaagatgctgaagcctctcatccaccctatgcagcagacgattgtgcacatgggaggacggcagaggacgttgttagatctaggattaatggcgaaccagcttggccaagagctgatcgtcttaataacccccaagcgaacgataagcctcaaacgacgcagttccatacgcatagccatgatttagcagcacacccagagcatgacacacgatcggaacaacattcatcacaaccaggattgaatctacgccctgatccctccttcagccgatctctaagcccaaacaatgcatcttcatcgctacacatgcagagttttgagcctctcatatcctcggaaatgccagtttgggttggcgaccaacgagtcccgatcaacgccgacattacgtattcattttatcccttcctctcaatcaacaacctccacaatataatgccacaagatgtcaactacctggaatctcagggatgtctcagagtaccgactcgggtcattctcgacgagtttgttaagcaatattttcttcatgttcaccctctactgcctctgataaacgagggggacttctgggaattgtattgtcatcaaggcaatggtggtccaagtgagaagatatccttacttgttttccaggcaatactgttttcttgctgcaatttcgtctcaaaaagcactatcaatgctctaggattccctacaatacgtgcagcgagagcgactttctaccgacgcacaaagcttctctatgatctcgataccgaggcctctctcgtttacctcgctcagactgccttattactctcgtactggagcccaaattggtcacatgcaacgaagaagccaaatacagcatggcttgggattgccattcagaacgctaagagcgcagaggctcatctatactcggcaatgccaacattctctgctgtcctggaacccattgagcacaagaagcaaaatatactcaaacggttatggtggtgttgcgtaattcgcgaccgcatattacccttgggtatgcgtcgtagtattcagatatccagggcgcattttgacctcgacaacaataatggtttaggatacgtggacttggcagatgaggtcgagcggtcgaaagtgtataacgctgaaacgaagcggtctctgatcgagattttcgtgcaaatcggagagctatgctcggtgttgaccgatatcttgacactcgtgttcccgatggacgacattcctggctggggtaggcatactggggccgaaggggccgccaaagtcagagattgcaaaatgtccctcagaagatggtataaaggggcgacacttcattttccattattcgggggtgcagctgggccgaggaagagcatggacgaaacaggaaaacagcacgagtcagttgttatatacacgaatttgatgtatatgtactaccactccgcacgtgcggctctgagccatcacgaggtgttacaatcagcagtagaattcgcaacgccgaatgcaaatagcaatcactgccaattttctaatatttacgagaatcggcacgatttacaggatgccgcctacggcgtcacggaatgtcttaaggaactcattcaacttggtcttgctcgttatttacccattagcgctgtggcctgtacagcacttccactggttcttcacatccttgacgtaaagctttcaacgcacaataaaagcaatggtactacggcagacagcaaaaggaaaatagccctgaagcagtctaggctaaatattcttattgaggcaatgaagacataccagcctcagtatgacggtgtagattacatcagcgagacgatacggcatattatcaacctctcagagctcgatcatctcagtagcgctacaaggacctctacaaacaccaatgggcccagcggatcaagctcgcagccaactatctcggattgggccgatatgcttgcctcgcagccaggttactacttacgactcgcaatgacaatggatatcagcattagcaaaggccgactagcggaagaatctgacttccctgtcggattacgtggtctgttcagcacaggactcagtcccattcagtctttgatggcacgtggccgaacggctaccccacaagcagcatcagtctttgcgaacacaccccaaacgtcgcacttctttattccgaatcatatcgctggcatacagccgggcacagtgcattctatgtcgtcagacgaggacactgcatcgccgagttctgtggaaggagtcgaaggcacaaaagctctcgctcctttattcgctccgcttgctgtccccgatatgccctccggaatgttcggcgacagcgggaccatgggtcttgaaatggacaacattgcagctgatgtactcaccgcgtacatgctacggaccgataccggtaatatgaattacgagagcccggacagcgggctgagcgatgaccatagtatgtatgatggtgatggaaacaaggaagaagattggatcgaacgggcttggagcgatgaaggcagagaacacagagagaatcctgaacagtccggtgttgacgacggcgatcgggagacggcgcgggtactacttgatgcgctgaggggtgatttcgtgagcgctgctgcatga

SEQ ID NO: 25363 - protein, 955 aa, Muscodor strobelii
  misc_feature: SGI Peptide ID NO. 568656
  misc_feature (28)..(68): Pfam Id: PF00172 Pfam Desc: Fungal Zn(2)-Cys(6) binuclear cluster domain
  misc_feature (28)..(52): Pfam Id: PF00172 Pfam Desc: Fungal Zn(2)-Cys(6) binuclear cluster domain
  misc_feature (295)..(951): NCBI GI: 261355365 Blast Desc: conserved [Verticillium albo-atrum VaMs.102]
  misc_feature (23)..(762): NCBI GI: 256720986 Blast Desc: NECHADRAFT_21539 [Nectria haematococca mpVI 77-13-4]
  misc_feature (23)..(776): NCBI GI: 46109742 Blast Desc: FG01753.1 [Gibberella zeae PH-1]
  misc_feature (23)..(770): NCBI GI: 256730677 Blast Desc: NECHADRAFT_74018 [Nectria haematococca mpVI 77-13-4]
  misc_feature (17)..(762): NCBI GI: 256725520 Blast Desc: NECHADRAFT_88894 [Nectria haematococca mpVI 77-13-4]
  misc_feature (211)..(762): NCBI GI: 46127373 Blast Desc: FG08064.1 [Gibberella zeae PH-1]
  misc_feature (19)..(764): NCBI GI: 239609545 Blast Desc: FarB [Ajellomyces dermatitidis ER-3]
  misc_feature (203)..(764): NCBI GI: 240111333 Blast Desc: CPC735_071680 [Coccidioides posadasii C735 delta SOWgp]
  misc_feature (203)..(786): NCBI GI: 119189183 Blast Desc: CIMG_04639 [Coccidioides immitis RS]
  misc_feature (200)..(766): NCBI GI: 256720248 Blast Desc: NECHADRAFT_89238 [Nectria haematococca mpVI 77-13-4]
MASMTTTTEAVEPPKTKPAHKIRKRAPKACLSCRARKVRCDVSQRGRPCMNCYLDSETCVVTGRASRFRKPQHEGTEDAEASHPPYAADDCAHGRTAEDVVRSRINGEPAWPRADRLNNPQANDKPQTTQFHTHSHDLAAHPEHDTRSEQHSSQPGLNLRPDPSFSRSLSPNNASSSLHMQSFEPLISSEMPVWVGDQRVPINADITYSFYPFLSINNLHNIMPQDVNYLESQGCLRVPTRVILDEFVKQYFLHVHPLLPLINEGDFWELYCHQGNGGPSEKISLLVFQAILFSCCNFVSKSTINALGFPTIRAARATFYRRTKLLYDLDTEASLVYLAQTALLLSYWSPNWSHATKKPNTAWLGIAIQNAKSAEAHLYSAMPTFSAVLEPIEHKKQNILKRLWWCCVIRDRILPLGMRRSIQISRAHFDLDNNNGLGYVDLADEVERSKVYNAETKRSLIEIFVQIGELCSVLTDILTLVFPMDDIPGWGRHTGAEGAAKVRDCKMSLRRWYKGATLHFPLFGGAAGPRKSMDETGKQHESVVIYTNLMYMYYHSARAALSHHEVLQSAVEFATPNANSNHCQFSNIYENRHDLQDAAYGVTECLKELIQLGLARYLPISAVACTALPLVLHILDVKLSTHNKSNGTTADSKRKIALKQSRLNILIEAMKTYQPQYDGVDYISETIRHIINLSELDHLSSATRTSTNTNGPSGSSSQPTISDWADMLASQPGYYLRLAMTMDISISKGRLAEESDFPVGLRGLFSTGLSPIQSLMARGRTATPQAASVFANTPQTSHFFIPNHIAGIQPGTVHSMSSDEDTASPSSVEGVEGTKALAPLFAPLAVPDMPSGMFGDSGTMGLEMDNIAADVLTAYMLRTDTGNMNYESPDSGLSDDHSMYDGDGNKEEDWIERAWSDEGREHRENPEQSGVDDGDRETARVLLDALRGDFVSAAA

SEQ ID NO: 25364 - DNA, 1860 bp, Muscodor strobelii
  misc_feature: SGI EST ID NO. CUFF.59676.0
  misc_feature: Variant of the nucleotide sequence at SEQ ID NO 25362
gcgtaattcgcgaccgcatattacccttgggtatgcgtcgtagtattcagatatccagggcgcattttgacctcgacaacaataatggtttaggatacgtggacttggcagatgaggtcgagcggtcgaaagtgtataacgctgaaacgaagcggtctctgatcgagattttcgtgcaaatcggagagctatgctcggtgttgaccgatatcttgacactcgtgttcccgatggacgacattcctggctggggtaggcatactggggccgaaggggccgccaaagtcagagattgcaaaatgtccctcagaagatggtataaaggggcgacacttcattttccattattcgggggtgcagctgggccgaggaagagcatggacgaaacaggaaaacagcacgagtcagttgttatatacacgaatttgatgtatatgtactaccactccgcacgtgcggctctgagccatcacgaggtgttacaatcagcagtagaattcgcaacgccgaatgcaaatagcaatcactgccaattttctaatatttacgagaatcggcacgatttacaggatgccgcctacggcgtcacggaatgtcttaaggaactcattcaacttggtcttgctcgttatttacccattagcgctgtggcctgtacagcacttccactggttcttcacatccttgacgtaaagctttcaacgcacaataaaagcaatggtactacggcagacagcaaaaggaaaatagccctgaagcagtctaggctaaatattcttattgaggcaatgaagacataccagcctcagtatgacggtgtagattacatcagcgagacgatacggcatattatcaacctctcagagctcgatcatctcagtagcgctacaaggacctctacaaacaccaatgggcccagcggatcaagctcgcagccaactatctcggattgggccgatatgcttgcctcgcagccaggttactacttacgactcgcaatgacaatggatatcagcattagcaaaggccgactagcggaagaatctgacttccctgtcggattacgtggtctgttcagcacaggactcagtcccattcagtctttgatggcacgtggccgaacggctaccccacaagcagcatcagtctttgcgaacacaccccaaacgtcgcacttctttattccgaatcatatcgctggcatacagccgggcacagtgcattctatgtcgtcagacgaggacactgcatcgccgagttctgtggaaggagtcgaaggcacaaaagctctcgctcctttattcgctccgcttgctgtccccgatatgccctccggaatgttcggcgacagcgggaccatgggtcttgaaatggacaacattgcagctgatgtactcaccgcgtacatgctacggaccgataccggtaatatgaattacgagagcccggacagcgggctgagcgatgaccatagtatgtatgatggtgatggaaacaaggaagaagattggatcgaacgggcttggagcgatgaaggcagagaacacagagagaatcctgaacagtccggtgttgacgacggcgatcgggagacggcgcgggtactacttgatgcgctgaggggtgatttcgtgagcgctgctgcatgagtatctgcttttggctgggaaaggagtggcatgggaactgagtactagatcgtgtctgcttcccatgaagcgtctttgacattgaacatattgcgtactgtcatcacttggataattcaagactcaacagcacattggagctgggactgggaatattggaagcattataggcgatctgtctgaattttcaaatgacattacgagcatacac

SEQ ID NO: 25365 - DNA, 1602 bp, Muscodor strobelii
  misc_feature: SGI cDNA ID NO. 568657
  misc_feature: Encodes the peptide sequence at SEQ ID NO 25366
atgacagaagtgcagagactaggggatcactcgctggacgagccctctgagaacgcgcctctccttggaaatcctccacaacgaccgcggcatcgccctggcctttctgtcacatccatcaggtcaataactagcatccatgttccaaaagcacacaaaaacagcactatcatcttctttctctacataattgtctttgtcgcctcatctgcagatgggtttatcgagcttccgttgacgcggatcctggaagatatcgtctgccacgattattatgatatgaaaagttcggatcaacccatagatgagagattatgcaaagaaaatcctattcaagagaaagtcgcctacatcctcgcaattctatccgctttacaggctatcgtgagctttctcgcagctcttccgtggggtgttgctgctgataaaatcgggaggaaacctgttgtcttcataaatctatctggtttaatactcggcgctatttgggccttaattgttgtatactggcgccatgttttccctctgacatcgatatggcttacttgtctggggcagctgatcggaggtggaaacactgtattactggcgatcattctgagtatgatatccgacgcgacaacagcagaaacaagagctattgagttcatgcgactgcatgttgccagtctctgcggcagcttcttgtccccgacgctcgcggctctggtgatgcaaagtataggtccttggccagcaccctggatcggtattgctttgttgttcagctccgcggtcgcgttcatgtttttgccagagactctaggacgcaagcgcaacccgcaaaccacagagccagagccagaagcacgcccacagcgagaggagtcgccgactctcagagacaagatctcgagcgctttcaacgaaattcgagagtctttgggcatgcttaagtcgccatctctcgttctcctcatcctgactgcactatccggacctccaatgtccttcgcaaccaccaacttcatgaatcaattcatttcaaagcgctaccatatcaagattgcttcgacgggttacattcaaaccctatatggcatcgcacacgtaataatgtcgctactcatcctccctcttctctctaaatatctaatgcagccatcgatacctcctaaattccgtccgaaagacgagcagcaccgggacttgacactggctcggtattcatatatcttcatcttcgttggagcattaatcctcggcttatcacccacgttgggaggcttcgttctcggactgctcgtcatggccatcggctcaggctataatagtcttgtgagaagcatgatgagtgttttcgtcaacccggagcatagttctagactgttcagtttttatgctatggtggaaaccgcttcgaaagtgtatgctcagcctatgcttgccggtaccttcgcactaggcttgaagtggcagggagaatggataggattgccctattttgcattggcggcgctcacgttcggtactatcatttgccttattttggtgagattgcctaagacgtatggtggtgtattaaaaagcccggtcgatgagggagatgctttagatgcatga

SEQ ID NO: 25366 - protein, 533 aa, Muscodor strobelii
  misc_feature: SGI Peptide ID NO. 568657
  misc_feature (61)..(472): Pfam Id: PF07690 Pfam Desc: Major Facilitator Superfamily
  misc_feature (119)..(472): Pfam Id: PF07690 Pfam Desc: Major Facilitator Superfamily
  misc_feature (60)..(509): NCBI GI: 255940990 Blast Desc: Pc16g09500 [Penicillium chrysogenum Wisconsin 54-1255] gi|211585887|emb|CAP93620.1| Pc16g09500 [Penicillium chrysogenum Wisconsin 54-1255]
  misc_feature (11)..(500): NCBI GI: 156055966 Blast Desc: SS1G_05335 [Sclerotinia sclerotiorum 1980] gi|154703119|gb|EDO02858.1| SS1G_05335 [Sclerotinia sclerotiorum 1980]
  misc_feature (42)..(514): NCBI GI: 226282709 Blast Desc: conserved [Paracoccidioides brasiliensis Pb01]
  misc_feature (14)..(513): NCBI GI: 67540348 Blast Desc: AN6344.2 [Aspergillus nidulans FGSC A4] gi|40739538|gb|EAA58728.1| AN6344.2 [Aspergillus nidulans FGSC A4] gi|259479437|tpe|CBF69657.1| TPA: MFS transporter, nidulans
  misc_feature (18)..(514): NCBI GI: 226292121 Blast Desc: conserved [Paracoccidioides brasiliensis Pb18]
  misc_feature (4)..(514): NCBI GI: 212527482 Blast Desc: MFS transporter, [Penicillium marneffei ATCC 18224] gi|210073296|gb|EEA27383.1| MFS transporter, [Penicillium marneffei ATCC 18224]
  misc_feature (12)..(529): NCBI GI: 238495034 Blast Desc: conserved [Aspergillus flavus NRRL3357] gi|220695403|gb|EED51746.1| conserved [Aspergillus flavus NRRL3357]
  misc_feature (42)..(514): NCBI GI: 225681172 Blast Desc: conserved [Paracoccidioides brasiliensis Pb03]
  misc_feature (77)..(515): NCBI GI: 171678127 Blast Desc: protein product [Podospora anserina] gi|170937133|emb|CAP61790.1| protein product [Podospora anserina]
  misc_feature (13)..(516): NCBI GI: 115383780 Blast Desc: conserved [Aspergillus terreus NIH2624] gi|114196129|gb|EAU37829.1| conserved [Aspergillus terreus NIH2624]
MTEVQRLGDHSLDEPSENAPLLGNPPQRPRHRPGLSVTSIRSITSIHVPKAHKNSTIIFFLYIIVFVASSADGFIELPLTRILEDIVCHDYYDMKSSDQPIDERLCKENPIQEKVAYILAILSALQAIVSFLAALPWGVAADKIGRKPVVFINLSGLILGAIWALIVVYWRHVFPLTSIWLTCLGQLIGGGNTVLLAIILSMISDATTAETRAIEFMRLHVASLCGSFLSPTLAALVMQSIGPWPAPWIGIALLFSSAVAFMFLPETLGRKRNPQTTEPEPEARPQREESPTLRDKISSAFNEIRESLGMLKSPSLVLLILTALSGPPMSFATTNFMNQFISKRYHIKIASTGYIQTLYGIAHVIMSLLILPLLSKYLMQPSIPPKFRPKDEQHRDLTLARYSYIFIFVGALILGLSPTLGGFVLGLLVMAIGSGYNSLVRSMMSVFVNPEHSSRLFSFYAMVETASKVYAQPMLAGTFALGLKWQGEWIGLPYFALAALTFGTIICLILVRLPKTYGGVLKSPVDEGDALDA

SEQ ID NO: 25367 - DNA, 1816 bp, Muscodor strobelii
  misc_feature: SGI EST ID NO. CUFF.59680.0
  misc_feature: Variant of the nucleotide sequence at SEQ ID NO 25365
cttatctcgaggatcgcgatgcaaggcattggtaatctgtaagcaggccggcgaagaataaaaatgcttgactgaaattttaattactacaatgatgtatcttcttcaaggcctattgcaattacattcttcttcactatcgccatgacagaagtgcagagactaggggatcactcgctggacgagccctctgagaacgcgcctctccttggaaatcctccacaacgaccgcggcatcgccctggcctttctgtcacatccatcaggtcaataactagcatccatgttccaaaagcacacaaaaacagcactatcatcttctttctctacataattgtctttgtcgcctcatctgcagatgggtttatcgagcttccgttgacgcggatcctggaagatatcgtctgccacgattattatgatatgaaaagttcggatcaacccatagatgagagattatgcaaagaaaatcctattcaagagaaagtcgcctacatcctcgcaattctatccgctttacaggctatcgtgagctttctcgcagctcttccgtggggtgttgctgctgataaaatcgggaggaaacctgttgtcttcataaatctatctggtttaatactcggcgctatttgggccttaattgttgtatactggcgccatgttttccctctgacatcgatatggcttacttgtctggggcagctgatcggaggtggaaacactgtattactggcgatcattctgagtatgatatccgacgcgacaacagcagaaacaagagctattgagttcatgcgactgcatgttgccagtctctgcggcagcttcttgtccccgacgctcgcggctctggtgatgcaaagtataggtccttggccagcaccctggatcggtattgctttgttgttcagctccgcggtcgcgttcatgtttttgccagagactctaggacgcaagcgcaacccgcaaaccacagagccagagccagaagcacgcccacagcgagaggagtcgccgactctcagagacaagatctcgagcgctttcaacgaaattcgagagtctttgggcatgcttaagtcgccatctctcgttctcctcatcctgactgcactatccggacctccaatgtccttcgcaaccaccaacttcatgaatcaattcatttcaaagcgctaccatatcaagattgcttcgacgggttacattcaaaccctatatggcatcgcacacgtaataatgtcgctactcatcctccctcttctctctaaatatctaatgcagccatcgatacctcctaaattccgtccgaaagacgagcagcaccgggacttgacactggctcggtattcatatatcttcatcttcgttggagcattaatcctcggcttatcacccacgttgggaggcttcgttctcggactgctcgtcatggccatcggctcaggctataatagtcttgtgagaagcatgatgagtgttttcgtcaacccggagcatagttctagactgttcagtttttatgctatggtggaaaccgcttcgaaagtgtatgctcagcctatgcttgccggtaccttcgcactaggcttgaagtggcagggagaatggataggattgccctattttgcattggcggcgctcacgttcggtactatcatttgccttattttggtgagattgcctaagacgtatggtggtgtattaaaaagcccggtcgatgagggagatgctttagatgcatgatagattgaatgattcatgatgtagaaagacataagatacttaataatatatgagcatgtgaagttgtcca

SEQ ID NO: 25368 - DNA, 1932 bp, Muscodor strobelii
  misc_feature: SGI cDNA ID NO. 568658
  misc_feature: Encodes the peptide sequence at SEQ ID NO 25369
atgtcgcctcgcgtcaaagcaaaacttcacagtcaattgattgcgcacattgcaccgttgttaccagatcgctcccgtttgaatcttgctttgaccagcaaagcgaatttccatgatgatcactcgcgattgatcaaggataatacacagcgtaagcatgagctgatcgctggagatatcctcgacttcaagactagtgacgggtcctgtgctctgttccacgctatcgattactctgatgtgcagctcttcgaacaatgtcttaagtctacaaacttctgggcctttgagaaatacaaaattgacgcagccgaactgccccttgtagtacgccttttggatcaaggatttcatcaatggtgggtagaggacccataccgccccggaaaacgtcttgctgagctgataaagaagtgcattttcgccggaagcgtgagttgtcttgagtatatttgtgagaagagcccagatgcgcttcaggcagtcaagaactacggattcgaactacgtgaaagtgcgctatactatcaacattaccacatgaaaaacttgtttgcgcggtacaagcttgatcagtcagacccacgtatggccttttggcaacgtgcgcattctgaagaaacagcgagactacggcgacacccgcctagagacctcaggttatactcttggtatgttcgggaccacttacacgcagccgacttctatgagggcaaagaaaaaagcgaagaagtttggaaattcgaccataaacttcatgagatctccagtgctggttcattcagattggtgtctgaagcagctgaaaagggcaaggacacgacaaaattgcgacaagatgccattaaaagcttacatcaagcatgtgcacggccctatacgtcagggtcattgattgaagcgatcatcaaagtcggccggttggatgtcaactggatcggcgattcagagatgtttgggcatgcttcgccgagtaagcttccaagcacaatcatgatggatctcatgtgccctttggatcacgccgtctcaggtcttaatctcaaagctgtttgcgcactacgaagtctcggggccaatagtggtggcgctcgtgccacgaaagtcacctcagccaacgatgccaaaattccatctcctttgtggcgagcatttgaccaggaaatcaatcccgtgcgctattgcttctggcagaagtcccatatggatgagcattttaattatcaatttgagcagcaagaactggcgcgtggcctttgtgaaccccaagttgggccgagtggatgccgatgttatcttcgcggatacgaccgatactacgataaaaacgtatggatacgccaagggaatgcattttgtaatcgtatcactagattggtcacgatgctgctaagcgacggcgtggaaattggctatgacctttgtgaaaaggagaaggactctccgccattatccgtgtttcaacacgtatctcaactacaccctgttcatcgcttgctaattctcttcaaagagattatgtatgaactcgccaacttcaaatacgatttgaaagaacgttgcgtcaagaacagagttcttatgacggacctgcgcagctgtgcctcaggacttgccaccgcatgcaagctgttagtcgacaaggatctagtgctcagagaagtaggatacatttcgaagcaggatgggccttggtatcttctggaccttttagggtttcagagtcaaggtggttgctatcatgaccccagcgggcacgctacctacgtcattgtagataatgtacgaggatttgaaggtcaggataacgacgctgatagtagcagtgagggtgaaagtagcagtgaggacgattacttcaataacctcgatgatcaatatcggaggccttttagtcctgacgacgacgacgacgatgacgacgacatgtag

SEQ ID NO: 25369 - protein, 643 aa, Muscodor strobelii
  misc_feature: SGI Peptide ID NO. 568658
MSPRVKAKLHSQLIAHIAPLLPDRSRLNLALTSKANFHDDHSRLIKDNTQRKHELIAGDILDFKTSDGSCALFHAIDYSDVQLFEQCLKSTNFWAFEKYKIDAAELPLVVRLLDQGFHQWWVEDPYRPGKRLAELIKKCIFAGSVSCLEYICEKSPDALQAVKNYGFELRESALYYQHYHMKNLFARYKLDQSDPRMAFWQRAHSEETARLRRHPPRDLRLYSWYVRDHLHAADFYEGKEKSEEVWKFDHKLHEISSAGSFRLVSEAAEKGKDTTKLRQDAIKSLHQACARPYTSGSLIEAIIKVGRLDVNWIGDSEMFGHASPSKLPSTIMMDLMCPLDHAVSGLNLKAVCALRSLGANSGGARATKVTSANDAKIPSPLWRAFDQEINPVRYCFWQKSHMDEHFNYQFEQQELARGLCEPQVGPSGCRCYLRGYDRYYDKNVWIRQGNAFCNRITRLVTMLLSDGVEIGYDLCEKEKDSPPLSVFQHVSQLHPVHRLLILFKEIMYELANFKYDLKERCVKNRVLMTDLRSCASGLATACKLLVDKDLVLREVGYISKQDGPWYLLDLLGFQSQGGCYHDPSGHATYVIVDNVRGFEGQDNDADSSSEGESSSEDDYFNNLDDQYRRPFSPDDDDDDDDDM

SEQ ID NO: 25370 - DNA, 848 bp, Muscodor strobelii
  misc_feature: SGI EST ID NO. CUFF.59688.0
  misc_feature: Variant of the nucleotide sequence at SEQ ID NO 25368
gggcaaagaaaaaagcgaagaagtttggaaattcgaccataaacttcatgagatctccagtgctggttcattcagattggtgtctgaagcagctgaaaagggcaaggacacgacaaaattgcgacaagatgccattaaaagcttacatcaagcatgtgcacggccctatacgtcagggtcattgattgaagcgatcatcaaagtcggccggttggatgtcaactggatcggcgattcagagatgtttgggcatgcttcgccgagtaagcttccaagcacaatcatgatggatctcatgtgccctttggatcacgccgtctcaggtcttaatctcaaagctgtttgcgcactacgaagtctcggggccaatagtggtggcgctcgtgccacgaaagtcacctcagccaacgatgccaaaattccatctcctttgtggcgagcatttgaccaggaaatcaatcccgtgcgctattgcttctggcagaagtcccatatggatgagcattttaattatcaatttgagcagcaagaactggcgcgtggcctttgtgaaccccaagttgggccgagtggatgccgatgttatcttcgcggatacgaccgatactacgataaaaacgtatggatacgccaagggaatgcattttgtaatcgtatcactagattggtcacgatgctgctaagcgacggcgtggaaattggctatgacctttgtgaaaaggagaaggactctccgccattatccgtgtttcaacacgtatctcaactacaccctgttcatcgcttgctaattctcttcaaagagattatgtatgaactcgccaacttcaaatacgatttgaaagaac

SEQ ID NO: 25371 - DNA, 1095 bp, Muscodor strobelii
  misc_feature: SGI cDNA ID NO. 568659
  misc_feature: Encodes the peptide sequence at SEQ ID NO 25372
atgcgtttctcaatcttcaaggtggctttcatcgtcttgcagaccaccctcatctgtgctctgcctcccaagattgaggatgtcgaccccggtctcgatatgtcacccactaccactatcactgtggtagaaactgtcagcgattggttccaaaccatcacggagacttcaagcagtactggtgttgtctctggtatcatgacgacccagattctcacgctcacttcaattagttactcacagtcaactatgacctggactccaattgctgtctctgaaagcaaatcaattacccccgttaccactgtcctggtaacggtaacccaaagtccaattgttgtttctgagagcaagaactccgcccctgttaccactgtcgttgttagccagactccagccactgttactgagagcatatcacctacctcagtcactactatcgtcgtaacccagactccgaccgctatctctggtagcaatacacctagcccggttactactgtcgttgtaactcagactcccctctccctgtcaaatactgcgtctttcagcggctggccgccagctcaaactgtgacatcttcgactcagtcgtcctctagtcagactgcttctttcgtcactgtcacccaaccgtttatcacggtcactcagacggtgcctagcgtgacagtcaatcctccgcaattcactatcactttcgttactgtcacctcttctccaagtgacacgcgaggccttactacaatcactgtaacgccctcttccgccaatacgcgaagcctgactaccatcacggtctcagaggtgactatttggccaactacgtcgtcgccttctgctccaccttctgcttcgcctaccacatcgtcgacttctgcttcgtctaccgcgtcgccttcatcttcgcacgtctcgaccctgaccttcacttcgagctctgtcgacgcttcgggctctaccacggtgtctttctcgaccacagccatgacactcagtccacctccgtctgctacaggcacgggtgccggcccagtcgcttctctcgcagttaaaagacaaattccacgccgcggccgcctcgcttggatttga

SEQ ID NO: 25372 - protein, 364 aa, Muscodor strobelii
  misc_feature: SGI Peptide ID NO. 568659
MRFSIFKVAFIVLQTTLICALPPKIEDVDPGLDMSPTTTITVVETVSDWFQTITETSSSTGVVSGIMTTQILTLTSISYSQSTMTWTPIAVSESKSITPVTTVLVTVTQSPIVVSESKNSAPVTTVVVSQTPATVTESISPTSVTTIVVTQTPTAISGSNTPSPVTTVVVTQTPLSLSNTASFSGWPPAQTVTSSTQSSSSQTASFVTVTQPFITVTQTVPSVTVNPPQFTITFVTVTSSPSDTRGLTTITVTPSSANTRSLTTITVSEVTIWPTTSSPSAPPSASPTTSSTSASSTASPSSSHVSTLTFTSSSVDASGSTTVSFSTTAMTLSPPPSATGTGAGPVASLAVKRQIPRRGRLAWI

SEQ ID NO: 25373 - DNA, 144 bp, Muscodor strobelii
  misc_feature: SGI EST ID NO. CUFF.59722.0
  misc_feature: Variant of the nucleotide sequence at SEQ ID NO 25371
aactacgtcgtcgccttctgctccaccttctgcttcgcctaccacatcgtcgacttctgcttcgtctaccgcgtcgccttcatcttcgcacgtctcgaccctgaccttcacttcgagctctgtcgacgcttcgggctctaccac

SEQ ID NO: 25374 - DNA, 1434 bp, Muscodor strobelii
  misc_feature: SGI cDNA ID NO. 568660
  misc_feature: Encodes the peptide sequence at SEQ ID NO 25375
atgtcgtcctcaaccagcactacgcccattctccttcctagccctccagggctagaagcgggcaccaccagcgaagtcccggcaaccggcaccgtctcctccatgggcagcccgagttcagaagtcgcacccctcgactctgactcgtcaattgcaaccggcgagaaggtcgagactacccaactcgatctctcgtccctgtccatggagggggcggtcgccacaagtggaagtggcaccgacgaggccaacaatggaacatcggtaccatcaggaagttcctcctcagatcatcacagctctccagacgtcgcatcctcatccgaagactcagattttcatcacaactcggcagacatcacatcctcatcagactccgaaactgccaaagagacagacataacttccgaatctggcagtgattccgatgcgagtgagaacccgtatgatgcctcacgaggaacattctgggcaccggatgaagaccaagatctcctctacgacatgaacgagaacactgatcagaaagactcgtcctctgatgatgatgatgatgagactaatctggggtttgcggttagtgcgccagggttttacgagaagaagaagatcgaggaggaacgactggagaggatcaagtcgttcagtatccagggctgggatgtcgagattgttaatgaggatggaaaatcccctgagaaggtcaagaatcccgagtccttcagcaacaaatacatccacgtcgccaagtcacgcttcgaaggcctcggcatgttcgcgtcccgcttcatcgcagccggcaccccaatcctcgtcgagcgcgaactattcaaatgccacggcacagccgacgtatcaacgcaactcgagactctttctcccgtccaacgcgctgccttccgccgcatgcacgggtataaaaaatacgaggacgaggatgaggatatcgctatcttccggaccaattctttccaaaccctccaccccatgcccagcgtaaccctcctaatcggatcgcgcttcaaccacgcctgtgaacccctcttcaacgtacagtaccactacatgctcaactccttctccgaactctcttcttccccctcttcttccacccctaccaccaaagcgagcattaaagccaacaaccgcgccctacacaccctacgcaatctccccatctacactccaccttcttccaataccaacgacccagcgttcaatccttcggacccgatggcaggctatatggtgttcaagacaatccgcgacgtagccgctggcgaggagctattcatccgctatgctcatggaccggaggcgctgttctataactggggcttccgatgtgagtgtggtgcttgctcgggaattacggaggagcgctgcaacatgttacgccccgatggaggattccccgccagtttcatctggtag

SEQ ID NO: 25375 - protein, 477 aa, Muscodor strobelii
  misc_feature: SGI Peptide ID NO. 568660
  misc_feature (241)..(355): NCBI GI: 46109036 Blast Desc: FG01400.1 [Gibberella zeae PH-1]
MSSSTSTTPILLPSPPGLEAGTTSEVPATGTVSSMGSPSSEVAPLDSDSSIATGEKVETTQLDLSSLSMEGAVATSGSGTDEANNGTSVPSGSSSSDHHSSPDVASSSEDSDFHHNSADITSSSDSETAKETDITSESGSDSDASENPYDASRGTFWAPDEDQDLLYDMNENTDQKDSSSDDDDDETNLGFAVSAPGFYEKKKIEEERLERIKSFSIQGWDVEIVNEDGKSPEKVKNPESFSNKYIHVAKSRFEGLGMFASRFIAAGTPILVERELFKCHGTADVSTQLETLSPVQRAAFRRMHGYKKYEDEDEDIAIFRTNSFQTLHPMPSVTLLIGSRFNHACEPLFNVQYHYMLNSFSELSSSPSSSTPTTKASIKANNRALHTLRNLPIYTPPSSNTNDPAFNPSDPMAGYMVFKTIRDVAAGEELFIRYAHGPEALFYNWGFRCECGACSGITEERCNMLRPDGGFPASFIW

SEQ ID NO: 25376 - DNA, 1234 bp, Muscodor strobelii
  misc_feature: SGI EST ID NO. CUFF.59746.0
  misc_feature: Variant of the nucleotide sequence at SEQ ID NO 25374
tctcactcaacatcacaaagatgtcgtcctcaaccagcactacgcccattctccttcctagccctccagggctagaagcgggcaccaccagcgaagtcccggcaaccggcaccgtctcctccatgggcagcccgagttcagaagtcgcacccctcgactctgactcgtcaattgcaaccggcgagaaggtcgagactacccaactcgatctctcgtccctgtccatggagggggcggtcgccacaagtggaagtggcaccgacgaggccaacaatggaacatcggtaccatcaggaagttcctcctcagatcatcacagctctccagacgtcgcatcctcatccgaagactcagattttcatcacaactcggcagacatcacatcctcatcagactccgaaactgccaaagagacagacataacttccgaatctggcagtgattccgatgcgagtgagaacccgtatgatgcctcacgaggaacattctgggcaccggatgaagaccaagatctcctctacgacatgaacgagaacactgatcagaaagactcgtcctctgatgatgatgatgatgagactaatctggggtttgcggttagtgcgccagggttttacgagaagaagaagatcgaggaggaacgactggagaggatcaagtcgttcagtatccagggctgggatgtcgagattgttaatgaggatggaaaatcccctgagaaggtcaagaatcccgagtccttcagcaacaaatacatccacgtcgccaagtcacgcttcgaaggcctcggcatgttcgcgtcccgcttcatcgcagccggcaccccaatcctcgtcgagcgcgaactattcaaatgccacggcacagccgacgtatcaacgcaactcgagactctttctcccgtccaacgcgctgccttccgccgcatgcacgggtataaaaaatacgaggacgaggatgaggatatcgctatcttccggaccaattctttccaaaccctccaccccatgcccagcgtaaccctcctaatcggatcgcgcttcaaccacgcctgtgaacccctcttcaacgtacagtaccactacatgctcaactccttctccgaactctcttcttccccctcttcttccacccctaccaccaaagcgagcattaaagccaacaaccgcgccctacacaccctacgcaatctccccatctacactccaccttcttccaataccaacgacccagc

SEQ ID NO: 25377 - DNA, 1443 bp, Muscodor strobelii
  misc_feature: SGI cDNA ID NO. 568661
  misc_feature: Reduced expression when VOC is produced
  misc_feature: Encodes the peptide sequence at SEQ ID NO 25378
atggcgtccaggagactcgcgttgaacttccagagggggctgcgcaccacccgcgctgctccctctccatctctcattcgacccttcaagaggaattttgctacgccggtgtcatcccctgtcggcgcgaagacgcagaccacgacgctcaagaatggcctgaccatcgcaaccgaatactcccccttcgcgcagacgtcgacggtcggtgtgtggatcgacgccgggtcgagggcagagacggccgagaccaacggcaccgcacacttcctcgagcatctcgccttcaagggcacgcagaagaggacgcagcagcagctggagttggagatcgagaacatgggtggccacctcaacgcctacacatcgcgcgagaacacggtctacttctcccgcgccttcaactcggacgtgccccagtccgtcgacatcctcgccgacatcctgcagaactccaagctcgagccctcggccatcgagcgtgagcgcgacgtcatcctgcgcgagtccgaggaggtcgagaagcagctggacgaggtcgtcttcgaccacctgcacgccaccgccttccagcaccagcccctcggccgcaccatcctcggcccccgcgacaacatccgcgacatcacccggaccgagctgaccaactacatcaagtccaactacaccgccgaccgcatggtcctcgtcggcgccggcggcgtcccccacgaccagctcgtcgagctcgccgagaagaacttcgccggcctgcccaccacctccccgcacaacgaggcctacatcctgtccaagcagcagcccagcttcatcggctccgaggtccgcatccgcgacgacaccatcggcgccgcccacatcgccctcgctgtcgagggtgtcagctggaacgacgacgactacttcaccgccctcgtcacccaggccatcgtcggcaactacgacaaggccatgggcagcgccccccaccagggcagcaagctcgccgccttcgtccaccagaacgacctcgccaacagcttcatgagcttctccaccagctacagcgacaccggtctgtggggcatctacatggtctccgacaagctcacccgcctcgacgacctcatccacttcgcccagcgcgagtggtccagactctccagcaacgtcacctcctccgaggtcgagcgcgccaaggcccagctcaaggcctccatccttctttcgcttgacagcacctccgccgtcgccgaggacatcggccgccagatcatcaccaccggccgccgcatgaaccccggcgaggtcgagcgcaccatcgaccgcgtcaccgagaaggacgtcatggacttcgccaacaagaagctgtgggaccaggatatcgccatcagcgccgtcggcagcatcgagggcatgctcgactaccagaggatcaggaatgatatgagccggaacttttaa

SEQ ID NO: 25378 - protein, 480 aa, Muscodor strobelii
  misc_feature: SGI Peptide ID NO. 568661
  misc_feature (208)..(396): Pfam Id: PF05193 Pfam Desc: Peptidase M16 inactive domain
  misc_feature (55)..(203): Pfam Id: PF00675 Pfam Desc: Insulinase (Peptidase family M16)
  misc_feature (1)..(480): NCBI GI: 171695892 Blast Desc: protein product [Podospora anserina] gi|170948188|emb|CAP60352.1| protein product [Podospora anserina]
  misc_feature (1)..(480): NCBI GI: 261358699 Blast Desc: mitochondrial-processing peptidase subunit beta [Verticillium albo-atrum VaMs.102]
  misc_feature (1)..(479): NCBI GI: 85119638 Blast Desc: mitochondrial processing peptidase beta subunit [Neurospora crassa OR74A] gi|127289|sp|P11913.1|MPPB_NEUCR RecName: Full=Mitochondrial-processing peptidase subunit beta; I;
  misc_feature (1)..(480): NCBI GI: 39943040 Blast Desc: mitochondrial processing peptidase subunit beta [Magnaporthe grisea 70-15] gi|145009829|gb|EDJ94485.1| mitochondrial processing peptidase subunit beta [Magnaporthe
  misc_feature (1)..(478): NCBI GI: 154320919 Blast Desc: mitochondrial processing peptidase beta subunit, mitochondrial precursor [Botryotinia fuckeliana B05.10] gi|150851872|gb|EDN27064.1| mitochondrial processing peptidase
  misc_feature (1)..(478): NCBI GI: 156054648 Blast Desc: mitochondrial processing peptidase beta subunit, mitochondrial precursor [Sclerotinia sclerotiorum 1980] gi|154703952|gb|EDO03691.1| mitochondrial processing peptidase
  misc_feature (1)..(479): NCBI GI: 119495086 Blast Desc: mitochondrial processing peptidase beta subunit, [Neosartorya fischeri NRRL 181] gi|119412498|gb|EAW22439.1| mitochondrial processing peptidase beta subunit, [Neosartorya
  misc_feature (1)..(479): NCBI GI: 70996070 Blast Desc: mitochondrial processing peptidase beta subunit [Aspergillus fumigatus Af293] gi|66850425|gb|EAL90752.1| mitochondrial processing peptidase beta subunit, [Aspergillus
  misc_feature (1)..(480): NCBI GI: 46107960 Blast Desc: FG00863.1 [Gibberella zeae PH-1]
  misc_feature (1)..(479): NCBI GI: 67516931 Blast Desc: AN0747.2 [Aspergillus nidulans FGSC A4] gi|40746233|gb|EAA65389.1| AN0747.2 [Aspergillus nidulans FGSC A4] gi|259488974|tpe|CBF88862.1| TPA: Mitochondrial-processing
  misc_feature (1)..(479): SWISSPROT Homolog: EC 3.4.24.64 Mitochondrial processing peptidase
  misc_feature: Useful for introducing or modulating the production of volatile compounds
MASRRLALNFQRGLRTTRAAPSPSLIRPFKRNFATPVSSPVGAKTQTTTLKNGLTIATEYSPFAQTSTVGVWIDAGSRAETAETNGTAHFLEHLAFKGTQKRTQQQLELEIENMGGHLNAYTSRENTVYFSRAFNSDVPQSVDILADILQNSKLEPSAIERERDVILRESEEVEKQLDEVVFDHLHATAFQHQPLGRTILGPRDNIRDITRTELTNYIKSNYTADRMVLVGAGGVPHDQLVELAEKNFAGLPTTSPHNEAYILSKQQPSFIGSEVRIRDDTIGAAHIALAVEGVSWNDDDYFTALVTQAIVGNYDKAMGSAPHQGSKLAAFVHQNDLANSFMSFSTSYSDTGLWGIYMVSDKLTRLDDLIHFAQREWSRLSSNVTSSEVERAKAQLKASILLSLDSTSAVAEDIGRQIITTGRRMNPGEVERTIDRVTEKDVMDFANKKLWDQDIAISAVGSIEGMLDYQRIRNDMSRNF

SEQ ID NO: 25379 - DNA, 1855 bp, Muscodor strobelii
  misc_feature: SGI EST ID NO. CUFF.59794.0
  misc_feature: Variant of the nucleotide sequence at SEQ ID NO 25377
gccgagtccatgttggcattgaatcagagccaaccaaaatttgagctggagagtctgagccgaatccgccttcaaactcacgatcctcatcaaaccgctcacccgccttcatccgactccctcccgcctccccgtcctcaaccaccatggcgtccaggagactcgcgttgaacttccagagggggctgcgcaccacccgcgctgctccctctccatctctcattcgacccttcaagaggaattttgctacgccggtgtcatcccctgtcggcgcgaagacgcagaccacgacgctcaagaatggcctgaccatcgcaaccgaatactcccccttcgcgcagacgtcgacggtcggtgtgtggatcgacgccgggtcgagggcagagacggccgagaccaacggcaccgcacacttcctcgagcatctcgccttcaagggcacgcagaagaggacgcagcagcagctggagttggagatcgagaacatgggtggccacctcaacgcctacacatcgcgcgagaacacggtctacttctcccgcgccttcaactcggacgtgccccagtccgtcgacatcctcgccgacatcctgcagaactccaagctcgagccctcggccatcgagcgtgagcgcgacgtcatcctgcgcgagtccgaggaggtcgagaagcagctggacgaggtcgtcttcgaccacctgcacgccaccgccttccagcaccagcccctcggccgcaccatcctcggcccccgcgacaacatccgcgacatcacccggaccgagctgaccaactacatcaagtccaactacaccgccgaccgcatggtcctcgtcggcgccggcggcgtcccccacgaccagctcgtcgagctcgccgagaagaacttcgccggcctgcccaccacctccccgcacaacgaggcctacatcctgtccaagcagcagcccagcttcatcggctccgaggtccgcatccgcgacgacaccatcggcgccgcccacatcgccctcgctgtcgagggtgtcagctggaacgacgacgactacttcaccgccctcgtcacccaggccatcgtcggcaactacgacaaggccatgggcagcgccccccaccagggcagcaagctcgccgccttcgtccaccagaacgacctcgccaacagcttcatgagcttctccaccagctacagcgacaccggtctgtggggcatctacatggtctccgacaagctcacccgcctcgacgacctcatccacttcgcccagcgcgagtggtccagactctccagcaacgtcacctcctccgaggtcgagcgcgccaaggcccagctcaaggcctccatccttctttcgcttgacagcacctccgccgtcgccgaggacatcggccgccagatcatcaccaccggccgccgcatgaaccccggcgaggtcgagcgcaccatcgaccgcgtcaccgagaaggacgtcatggacttcgccaacaagaagctgtgggaccaggatatcgccatcagcgccgtcggcagcatcgagggcatgctcgactaccagaggatcaggaatgatatgagccggaacttttaaataaataattagaaagaggggtgtgacgtgactaggtgggagtggtggcatgtgtgtgtggtacgagtgggaggggagatacaaaacccggacatagagtgtaccagttaactacgataccgcatattgttagttgtaccatagaagactattttttccatctgttagaaccattttctacctcttttgtctcctgggtcttcctcgttgaacattccacacttcacgcagcaatacagggaaaatagatgtaaatgaaaaacaac

SEQ ID NO: 25380 - DNA, 2532 bp, Muscodor strobelii
  misc_feature: SGI cDNA ID NO. 568662
  misc_feature: Encodes the peptide sequence at SEQ ID NO 25381
atgggtccaggaatactgagattgaccccatacccgccattagctcaggtaacccagaccaagagcaatgaggtccttttttctgccattctacaagtagacgacattcacgtagaaaatccttgggaacttgcattatggcattccggcggtgccgcatggcaagaaacgctgctatcacctatcccggcctctgaatcaccgccattcttgcagcgttactctttaaatggcaaactactccatttcagcaccatgatccatgtatcatcgtctttgcagttcaccttcaaattccgatccgattctacccaggcttggacatgggcaggccatggcatcgacgatggcttaattctgattccgagcgataacgtatccccttcggaagacgatctgtcaggtgtaatccacaatttaaaccccgatttgagtgtccgttccatcttcacccagacaccgcggacaaagctttggcaagtgacggctccagtcgcttcggctgaaggtcacgactcgacgtacgcagatatcgacctcggcgtcccttggggcggctgtcaacgttattttgctctagtccgtcacgcaacgccgtggctaggtccgagacatgggaagagagacttccatctcgacaaggatgcctttctgtgttcattcttgagtccaaaggggaagcatttggtcgttctcggcgctagtggcaaggacggtgtacaaacgcttttccgaagcggcgaatctggcttggtcaagcttcatatacgtaatgacagcgaaaaggagactgctgggaggatcctagtggccgtgggcgatgacgctcagagtgcaatcgccgctgctatgtaccatgcgcgagttatggtgttagccgcatcgaatgaagacgaatcacactttcgagaactgcctacccacgaagaagatatcggggctcaatggatgcagcatttttacgatggattgggctattgtacttggaattcccttgggcaagatctcagcgaagagaaattgcttgacgccttggaaaacttcaagcagtatgacatccacatcaccaatctaataattgatgacaattggcaagatatagatcgttccgccaacgatccgggctcatacggttggaatcgattcgaagcggactcggaagggtttcctaaaggtctaaagcatacaatctctcaaatcaaaactaaatacccgaatatttcgtatgtcgctgtttggcatgcgctactgggatattggggaggcattgccccaaatggagagctcgctcagaaatatgagacggttcaagtcaaatgcgaggatggggaagctagcaaagccatgacagtggtcgacaaatctgacatcggcaatttctacgacgatttctaccgcttcctagcatcttgtggcgtcgatggtgtcaagactgatgctcaattcaagctggacacaatgacctctgcaaaaatgcgccgagagttgacgttgccatatctcgatgcatggactctctcatccttgcggcacttccactacaaggtcatctcatgcatgtcgcaaacgccgcaaattcttttccatcaacagataccgcagtaccgccctgtcattgcagtgcgaaactctgacgatttctttccagatgttccgtcgtcgcacgcgtggcatctatgggcaaacgcgcacaatgctctactcacgcatcacctgaacgttctaccagattgggatatgttccagaccagacatgaatttggtggatttcatgctgctgcgcgttgcattagtggtggtcctatatatatcactgatatcccaggagaacatgatatcgatctcatattgcaaatagtcggccgaactccccggaacaatactgtaattcttcgaccgagcgtggtcggaagaagtctcaacgtctatactagttttgacgaagatgtgctcctcaagatcggagcatatcacggcgcagcggcgacaggaagtcctatagttggtgtattcaacacgcgaccacagaagctggtcgagatcatcccgctcgacatatttccgggcgtgactgattcgatcaaatatgtagtcagatcacatcagagcgggatagtcagcagtgtcatgagcactcaatctcaagaagctcgcattgcgtttgatagcgagacaaacggtatcgtctctgtggcgtgccttggcctcgttggaaagatgactggcgcggcggctatcatttcaaacagattccaacaacttgcaacgggacgagtcacggttgtcacgcggctgaagactttgggaaaacttggtctatatatctccagcttgcctgacatgtccattgagcgtgacttgttagttacgatacaaggccaacctactcctgttgacgttgtgtggacctccgccgaagacaagcacgtattgtacattgacacagaggctgcatgggaagagatgaaattggtaccaggctggagcaacgaggtcgagatcaagacatacatagacattgagcacctgtga

SEQ ID NO: 25381 - protein, 843 aa, Muscodor strobelii
  misc_feature: SGI Peptide ID NO. 568662
  misc_feature (112)..(793): Pfam Id: PF05691 Pfam Desc: Raffinose synthase or seed imbibition protein Sip1
  misc_feature (459)..(616): Pfam Id: PF05691 Pfam Desc: Raffinose synthase or seed imbibition protein Sip1
  misc_feature (391)..(441): Pfam Id: PF05691 Pfam Desc: Raffinose synthase or seed imbibition protein Sip1
  misc_feature (8)..(839): NCBI GI: 156060933 Blast Desc: SS1G_02609 [Sclerotinia sclerotiorum 1980] gi|154700013|gb|EDN99751.1| SS1G_02609 [Sclerotinia sclerotiorum 1980]
  misc_feature (8)..(840): NCBI GI: 256734732 Blast Desc: NECHADRAFT_31188 [Nectria haematococca mpVI 77-13-4]
  misc_feature (8)..(835): NCBI GI: 46107958 Blast Desc: FG00862.1 [Gibberella zeae PH-1]
  misc_feature (8)..(841): NCBI GI: 116181474 Blast Desc: CHGG_01365 [Chaetomium globosum CBS 148.51] gi|88185662|gb|EAQ93130.1| CHGG_01365 [Chaetomium globosum CBS 148.51]
  misc_feature (8)..(839): NCBI GI: 154322038 Blast Desc: BC1G_01166 [Botryotinia fuckeliana B05.10] gi|150850413|gb|EDN25606.1| BC1G_01166 [Botryotinia fuckeliana B05.10]
  misc_feature (8)..(838): NCBI GI: 239611024 Blast Desc: raffinose synthase Sip1 [Ajellomyces dermatitidis ER-3]
  misc_feature (8)..(838): NCBI GI: 261206032 Blast Desc: raffinose synthase Sip1 [Ajellomyces dermatitidis SLH14081] gi|239592812|gb|EEQ75393.1| raffinose synthase Sip1 [Ajellomyces dermatitidis SLH14081]
  misc_feature (8)..(838): NCBI GI: 240281679 Blast Desc: raffinose synthase Sip1 [Ajellomyces capsulatus H143]
  misc_feature (8)..(838): NCBI GI: 225556816 Blast Desc: alpha-galactosidase [Ajellomyces capsulatus G186AR]
  misc_feature (8)..(838): NCBI GI: 258578087 Blast Desc: conserved [Uncinocarpus reesii 1704] gi|237903491|gb|EEP77892.1| conserved [Uncinocarpus reesii 1704]
  misc_feature (189)..(783): SWISSPROT Homolog: EC 2.4.1.82 Galactinol--sucrose galactosyltransferase
MGPGILRLTPYPPLAQVTQTKSNEVLFSAILQVDDIHVENPWELALWHSGGAAWQETLLSPIPASESPPFLQRYSLNGKLLHFSTMIHVSSSLQFTFKFRSDSTQAWTWAGHGIDDGLILIPSDNVSPSEDDLSGVIHNLNPDLSVRSIFTQTPRTKLWQVTAPVASAEGHDSTYADIDLGVPWGGCQRYFALVRHATPWLGPRHGKRDFHLDKDAFLCSFLSPKGKHLVVLGASGKDGVQTLFRSGESGLVKLHIRNDSEKETAGRILVAVGDDAQSAIAAAMYHARVMVLAASNEDESHFRELPTHEEDIGAQWMQHFYDGLGYCTWNSLGQDLSEEKLLDALENFKQYDIHITNLIIDDNWQDIDRSANDPGSYGWNRFEADSEGFPKGLKHTISQIKTKYPNISYVAVWHALLGYWGGIAPNGELAQKYETVQVKCEDGEASKAMTVVDKSDIGNFYDDFYRFLASCGVDGVKTDAQFKLDTMTSAKMRRELTLPYLDAWTLSSLRHFHYKVISCMSQTPQILFHQQIPQYRPVIAVRNSDDFFPDVPSSHAWHLWANAHNALLTHHLNVLPDWDMFQTRHEFGGFHAAARCISGGPIYITDIPGEHDIDLILQIVGRTPRNNTVILRPSVVGRSLNVYTSFDEDVLLKIGAYHGAAATGSPIVGVFNTRPQKLVEIIPLDIFPGVTDSIKYVVRSHQSGIVSSVMSTQSQEARIAFDSETNGIVSVACLGLVGKMTGAAAIISNRFQQLATGRVTVVTRLKTLGKLGLYISSLPDMSIERDLLVTIQGQPTPVDVVWTSAEDKHVLYIDTEAAWEEMKLVPGWSNEVEIKTYIDIEHL

SEQ ID NO: 25382 - DNA, 3116 bp, Muscodor strobelii
  misc_feature: SGI EST ID NO. CUFF.59771.0
  misc_feature: Variant of the nucleotide sequence at SEQ ID NO 25380
ttttcatgttctatctgccttgtccgtcttctcgctgtgttatcttgtatcccctatctcgcgctttgaattgcttgagctccgtcaagcttcttttcgaacgcatactacaagctgtcaagtgtggattagctcggcatctagtccacctggagtggtgaattgcataccttttgagccatcatgggtccaggaatactgagattgaccccatacccgccattagctcaggtaacccagaccaagagcaatgaggtccttttttctgccattctacaagtagacgacattcacgtagaaaatccttgggaacttgcattatggcattccggcggtgccgcatggcaagaaacgctgctatcacctatcccggcctctgaatcaccgccattcttgcagcgttactctttaaatggcaaactactccatttcagcaccatgatccatgtatcatcgtctttgcagttcaccttcaaattccgatccgattctacccaggcttggacatgggcaggccatggcatcgacgatggcttaattctgattccgagcgataacgtatccccttcggaagacgatctgtcaggtgtaatccacaatttaaaccccgatttgagtgtccgttccatcttcacccagacaccgcggacaaagctttggcaagtgacggctccagtcgcttcggctgaaggtcacgactcgacgtacgcagatatcgacctcggcgtcccttggggcggctgtcaacgttattttgctctagtccgtcacgcaacgccgtggctaggtccgagacatgggaagagagacttccatctcgacaaggatgcctttctgtgttcattcttgagtccaaaggggaagcatttggtcgttctcggcgctagtggcaaggacggtgtacaaacgcttttccgaagcggcgaatctggcttggtcaagcttcatatacgtaatgacagcgaaaaggagactgctgggaggatcctagtggccgtgggcgatgacgctcagagtgcaatcgccgctgctatgtaccatgcgcgagttatggtgttagccgcatcgaatgaagacgaatcacactttcgagaactgcctacccacgaagaagatatcggggctcaatggatgcagcatttttacgatggattgggctattgtacttggaattcccttgggcaagatctcagcgaagagaaattgcttgacgccttggaaaacttcaagcagtatgacatccacatcaccaatctaataattgatgacaattggcaagatatagatcgttccgccaacgatccgggctcatacggttggaatcgattcgaagcggactcggaagggtttcctaaaggtctaaagcatacaatctctcaaatcaaaactaaatacccgaatatttcgtatgtcgctgtttggcatgcgctactgggatattggggaggcattgccccaaatggagagctcgctcagaaatatgagacggttcaagtcaaatgcgaggatggggaagctagcaaagccatgacagtggtcgacaaatctgacatcggcaatttctacgacgatttctaccgcttcctagcatcttgtggcgtcgatggtgtcaagactgatgctcaattcaagctggacacaatgacctctgcaaaaatgcgccgagagttgacgttgccatatctcgatgcatggactctctcatccttgcggcacttccactacaaggtcatctcatgcatgtcgcaaacgccgcaaattcttttccatcaacagataccgcagtaccgccctgtcattgcagtgcgaaactctgacgatttctttccagatgttccgtcgtcgcacgcgtggcatctatgggcaaacgcgcacaatgctctactcacgcatcacctgaacgttctaccagattgggatatgttccagaccagacatgaatttggtggatttcatgctgctgcgcgttgcattagtggtggtcctatatatatcactgatatcccaggagaacatgatatcgatctcatattgcaaatagtcggccgaactccccggaacaatactgtaattcttcgaccgagcgtggtcggaagaagtctcaacgtctatactagttttgacgaagatgtgctcctcaagatcggagcatatcacggcgcagcggcgacaggaagtcctatagttggtgtattcaacacgcgaccacagaagctggtcgagatcatcccgctcgacatatttccgggcgtgactgattcgatcaaatatgtagtcagatcacatcagagcgggatagtcagcagtgtcatgagcactcaatctcaagaagctcgcattgcggtaaatttacaaccggcagactgtgatatcctttccgcttttcccagtgactcagtttgatagcgagacaaacggtatcgtctctgtggcgtgccttggcctcgttggaaagatgactggcgcggcggctatcatttcaaacagattccaacaacttgcaacgggacgagtcacggttgtcacgcggctgaagactttgggaaaacttggtctatatatctccagcttgcctgacatgtccattgagcgtgacttgttagttacgatacaaggccaacctactcctgttgacgttgtgtggacctccgccgaagacaagcacgtattgtacattgacacagaggctgcatgggaagagatgaaattggtaccaggctggagcaacgaggtcgagatcaagacatacatagacattgagcacctgtgactttactaatatggatgggggttgcaggtgatgatcattgcagccgtgttcggactgactgaattcaatgttctacatcattgtggcgaaaatgtacaccactcgctgggtagtgggtaggcgcgattgctgtatatagggatgcataaagagctgcccctcgacgttcccaacaggaccggtgaccaccgaggccaccacgaatgttggtcaagttagtcgagttgaaacgcagtcagactacgtttcagatagagtctgagtggcaaagaacaccggttcgatcccgaggcattatccttttgccactgttttgtttcttgttttctattcatttctgtctttg

SEQ ID NO: 25383 - DNA, 867 bp, Muscodor strobelii
  misc_feature: SGI cDNA ID NO. 568663
  misc_feature: Encodes the peptide sequence at SEQ ID NO 25384
atgcagaactatcaactcgccctcctcgggctcttgatccctctcctcgtgacattgggctggtttctctacgtcgcgaccgctgccttcgtgttcgccttcatcctgatcaacatagaccgcatcttcgtgggtggcccttacagaatcccgttcacgagctatgagatcgagtcgtcccgaaatggttttcagggccggttgatcagaactggatggaacgatgagagacctcagagacgtcgggtccgtcacattagtcatcgatctgatgatagtgcaaatgggaagaaggacaatggcgatggtggtgataatggaggtgatggaggtgatggagatggcggaaatggtgagattgggaacgtgccttttattacacatctccttcgaccaatctggaacttcaaccgaaacactgacttagagaaagctggacctcctcgctctgcacgcaacatcgacaaacccgagaaggaccaacgcagccgatctccacgcaaggacgacgacgaccgtcccaagacctatcctcaaaaagggctttggcgtggctcggccagctcggacgaagtgtatgagtgggagtgggctgggcccctgaaatggagatcgtctaaggttccagcgccacgcaaggatgcggacaagaaatgtaataaggataagaaagatgacgctgacggtggggaaaaggttgggtgcaagggcaggaagaggaaacagaacggagatgaggaggagtgtaagggtgaggagaaggtgagtccgaagaaggataggaagtgtaagggtaacggcacgtgtcacaagaggaagatgtataaggataacgatgagagtcagtgggaggatgaggagaagtga

SEQ ID NO: 25384 - protein, 288 aa, Muscodor strobelii
  misc_feature: SGI Peptide ID NO. 568663
MQNYQLALLGLLIPLLVTLGWFLYVATAAFVFAFILINIDRIFVGGPYRIPFTSYEIESSRNGFQGRLIRTGWNDERPQRRRVRHISHRSDDSANGKKDNGDGGDNGGDGGDGDGGNGEIGNVPFITHLLRPIWNFNRNTDLEKAGPPRSARNIDKPEKDQRSRSPRKDDDDRPKTYPQKGLWRGSASSDEVYEWEWAGPLKWRSSKVPAPRKDADKKCNKDKKDDADGGEKVGCKGRKRKQNGDEEECKGEEKVSPKKDRKCKGNGTCHKRKMYKDNDESQWEDEEK

SEQ ID NO: 25385 - DNA, 2331 bp, Muscodor strobelii
  misc_feature: SGI cDNA ID NO. 568664
  misc_feature: Encodes the peptide sequence at SEQ ID NO 25386
atgccgccgaggcggaaacgacataccgatgggaaagaccaagaccctcagcctgaggtggagttcgagaaatggtgcgaacttgaaaagaaacatcacattggccggactctttcagacatagaggagcactatattcccctgccatcgctacaggattactggacacagcagaaaatacacacaatcctgcaatcttttgagccgcccctgatttttgatatcaagacaattcaaactgattatatccgaatcttctcagttctggtctatttctccaggacccaaaaactcctccgttccgtcttggagtccaattgggacgacagtcattggcccatgactcacgatcatctccccaatattcgttggcttaaatcccacgacagtaaacatattctcgacggccaatggctttttttcccactctttctcactcgagcaaaattgggcggcgcggtgatcaacaagaagcaaatcttgccattcacatcttggacaaaacttcaagatgctggttccgctgtcattgctggttccgctgtcatcacagaagtcgaagttcctcgtcattcccatgatctgatcccagatttcagggcaccaggtcctcaaaaattcgttatcaaacgttatgacatgaaacacgggcaaaggtcttatgagaaagaagtcgaggcgttaactatgtttcgttatagcccgtccccaaacctcattgaatattttggtactttcaaaaccgagcagtcgggctatctgatcttggattacgcggatcgaggcaatctcgagagcctctttgtagaacaaccccacccacaatccccacaagacatcaaactcttctggacaagtctatatcgaacactttgcgggcttgatcggattcatcagttgatggaggctaagaaagaccaacaactggaagggatacaccaagacatcaagccgtcaaacgttctcctctgccaaggagagtcttcttctccgtacgactttgtgccgaaaattgcggattttggtatgttcgactatgtgaggaaggtaaaaaatagcaaggaggaagcgaaaggcttcaatagacgtggagataagacatatggtgcaccagaagtctctttcgccaacagacacaaggctggtggtctcataagcacaaaggctgatattttttcattgggggccatcttcagtgcagcggccgcatgggcaactggtggccaaaaggcaaagacggcctacttcacgaaacgcaagaactaccatcgtaccttgtcaacgtttcacaatagcggttatgaggggtgtttccatgatggagttgccatcttagatgttgtcatcaaaacacacaggagtatacgcgacgaatgcgacgccaaaggctgggacaaagtaaccccgaaggtgctggaaatcgttcaagagcggatgcttttgcccagatccacggaccgagatcacgcatgggaactgattgagcgtttcaaacggcttttagatgacgaacccccactgtccccaatttccagtcgccggacagagacctgggcctcgaatgttacgtcaaactcagagccccccagacgtattattaacatcgatacactaaatgagcagaacaagaagagccaaaagggacaagtcatcaatcctgcagtgaaagagctgctcaactacatcgagaccaacctccgcgatcgagaccaattcttcttcattgacgactcgaccagcatgaaacagcataaagatctagtgttgaatgctttcagggcgctgtcaaatattgccaaaaagctggatcccaacaaggtggagctggcatttgcttctgatccccgttgtgtcaagagggcgcgcaacaccaaaaagcttgccaaactagtcgagaaaaatgactatagccgggatcctgaactgatggaaaaagaccttcagacactattcgaatccaagatcgtcaagagactcccggttcgcaaattcggctggaatctgaactttatgtcaagaaaacacatgagtctatacatatttactgacggtaactgggggaatgacccagagaaagcctgcggcgttgagcgccccattgaatatttgatgaacgagttacaagaccgcaaactcgggaggaaccaggtcagcgtacatattgtccgcttcggcgataacgaaaacgggaaacgtcatcttgattatctagacgacttcggccaagagaagaattgggacattgtggacgttaaacatatctcgagtgatgtcaaagcgattttcttaggtccgatcagtcttaaaaacgatcgtcagggccgcagctaa

SEQ ID NO: 25386 - protein, 776 aa, Muscodor strobelii
  misc_feature: SGI Peptide ID NO. 568664
  misc_feature (1)..(534): NCBI GI: 116197192 Blast Desc: CHGG_05194 [Chaetomium globosum CBS 148.51] gi|88181107|gb|EAQ88575.1| CHGG_05194 [Chaetomium globosum CBS 148.51]
  misc_feature (492)..(771): NCBI GI: 116197192 Blast Desc: CHGG_05194 [Chaetomium globosum CBS 148.51] gi|88181107|gb|EAQ88575.1| CHGG_05194 [Chaetomium globosum CBS 148.51]
  misc_feature (42)..(771): NCBI GI: 46109786 Blast Desc: FG01775.1 [Gibberella zeae PH-1]
  misc_feature (15)..(771): NCBI GI: 256723608 Blast Desc: NECHADRAFT_52172 [Nectria haematococca mpVI 77-13-4]
  misc_feature (44)..(501): NCBI GI: 256729536 Blast Desc: NECHADRAFT_84215 [Nectria haematococca mpVI 77-13-4]
  misc_feature (45)..(739): NCBI GI: 46111063 Blast Desc: FG02413.1 [Gibberella zeae PH-1]
  misc_feature (26)..(512): NCBI GI: 212537495 Blast Desc: conserved [Penicillium marneffei ATCC 18224] gi|210068645|gb|EEA22736.1| conserved [Penicillium marneffei ATCC 18224]
  misc_feature (528)..(774): NCBI GI: 256729536 Blast Desc: NECHADRAFT_84215 [Nectria haematococca mpVI 77-13-4]
  misc_feature (45)..(511): NCBI GI: 189204520 Blast Desc: [Pyrenophora tritici-repentis Pt-1C-BFP] gi|187985694|gb|EDU51182.1| [Pyrenophora tritici-repentis Pt-1C-BFP]
  misc_feature (53)..(482): NCBI GI: 46122977 Blast Desc: FG05866.1 [Gibberella zeae PH-1]
MPPRRKRHTDGKDQDPQPEVEFEKWCELEKKHHIGRTLSDIEEHYIPLPSLQDYWTQQKIHTILQSFEPPLIFDIKTIQTDYIRIFSVLVYFSRTQKLLRSVLESNWDDSHWPMTHDHLPNIRWLKSHDSKHILDGQWLFFPLFLTRAKLGGAVINKKQILPFTSWTKLQDAGSAVIAGSAVITEVEVPRHSHDLIPDFRAPGPQKFVIKRYDMKHGQRSYEKEVEALTMFRYSPSPNLIEYFGTFKTEQSGYLILDYADRGNLESLFVEQPHPQSPQDIKLFWTSLYRTLCGLDRIHQLMEAKKDQQLEGIHQDIKPSNVLLCQGESSSPYDFVPKIADFGMFDYVRKVKNSKEEAKGFNRRGDKTYGAPEVSFANRHKAGGLISTKADIFSLGAIFSAAAAWATGGQKAKTAYFTKRKNYHRTLSTFHNSGYEGCFHDGVAILDVVIKTHRSIRDECDAKGWDKVTPKVLEIVQERMLLPRSTDRDHAWELIERFKRLLDDEPPLSPISSRRTETWASNVTSNSEPPRRIINIDTLNEQNKKSQKGQVINPAVKELLNYIETNLRDRDQFFFIDDSTSMKQHKDLVLNAFRALSNIAKKLDPNKVELAFASDPRCVKRARNTKKLAKLVEKNDYSRDPELMEKDLQTLFESKIVKRLPVRKFGWNLNFMSRKHMSLYIFTDGNWGNDPEKACGVERPIEYLMNELQDRKLGRNQVSVHIVRFGDNENGKRHLDYLDDFGQEKNWDIVDVKHISSDVKAIFLGPISLKNDRQGRS

SEQ ID NO: 25387 - DNA, 2828 bp, Muscodor strobelii
  misc_feature: SGI EST ID NO. CUFF.59775.0
  misc_feature: Variant of the nucleotide sequence at SEQ ID NO 25385
gcccccatcaccagcgaccggggagtgcagcagcgatttcagcccgcctgtagtacggtatgaccccctggctgatgacctcgattgataatccacatcacaatcttcttctacgaaagcgatgattcctccgtagccttgtttgtcttaataaataattcattcctctcaccatcgtcgatcaatttctttactgcacttttattcagttgcatgagaagcagcgtgtagcgttttagccaattgacaacaaacctatatgaagccaagatgccgccgaggcggaaacgacataccgatgggaaagaccaagaccctcagcctgaggtggagttcgagaaatggtgcgaacttgaaaagaaacatcacattggccggactctttcagacatagaggagcactatattcccctgccatcgctacaggattactggacacagcagaaaatacacacaatcctgcaatcttttgagccgcccctgatttttgatatcaagacaattcaaactgattatatccgaatcttctcagttctggtctatttctccaggacccaaaaactcctccgttccgtcttggagtccaattgggacgacagtcattggcccatgactcacgatcatctccccaatattcgttggcttaaatcccacgacagtaaacatattctcgacggccaatggctttttttcccactctttctcactcgagcaaaattgggcggcgcggtgatcaacaagaagcaaatcttgccattcacatcttggacaaaacttcaagatgctggttccgctgtcattgctggttccgctgtcatcacagaagtcgaagttcctcgtcattcccatgatctgatcccagatttcagggcaccaggtcctcaaaaattcgttatcaaacgttatgacatgaaacacgggcaaaggtcttatgagaaagaagtcgaggcgttaactatgtttcgttatagcccgtccccaaacctcattgaatattttggtactttcaaaaccgagcagtcgggctatctgatcttggattacgcggatcgaggcaatctcgagagcctctttgtagaacaaccccacccacaatccccacaagacatcaaactcttctggacaagtctatatcgaacactttgcgggcttgatcggattcatcagttgatggaggctaagaaagaccaacaactggaagggatacaccaagacatcaagccgtcaaacgttctcctctgccaaggagagtcttcttctccgtacgactttgtgccgaaaattgcggattttggtatgttcgactatgtgaggaaggtaaaaaatagcaaggaggaagcgaaaggcttcaatagacgtggagataagacatatggtgcaccagaagtctctttcgccaacagacacaaggctggtggtctcataagcacaaaggctgatattttttcattgggggccatcttcagtgcagcggccgcatgggcaactggtggccaaaaggcaaagacggcctacttcacgaaacgcaagaactaccatcgtaccttgtcaacgtttcacaatagcggttatgaggggtgtttccatgatggagttgccatcttagatgttgtcatcaaaacacacaggagtatacgcgacgaatgcgacgccaaaggctgggacaaagtaaccccgaaggtgctggaaatcgttcaagagcggatgcttttgcccagatccacggaccgagatcacgcatgggaactgattgagcgtttcaaacggcttttagatgacgaacccccactgtccccaatttccagtcgccggacagagacctgggcctcgaatgttacgtcaaactcagagccccccagacgtattattaacatcgatacactaaatgagcagaacaagaagagccaaaagggacaagtcatcaatcctgcagtgaaagagctgctcaactacatcgagaccaacctccgcgatcgagaccaattcttcttcattgacgactcgaccagcatgaaacagcataaagatctagtgttgaatgctttcagggcgctgtcaaatattgccaaaaagctggatcccaacaaggtggagctggcatttgcttctgatccccgttgtgtcaagagggcgcgcaacaccaaaaagcttgccaaactagtcgagaaaaatgactatagccgggatcctgaactgatggaaaaagaccttcagacactattcgaatccaagatcgtcaagagactcccggttcgcaaattcggctggaatctgaactttatgtcaagaaaacacatgagtctatacatatttactgacggtaactgggggaatgacccagagaaagcctgcggcgttgagcgccccattgaatatttgatgaacgagttacaagaccgcaaactcgggaggaaccaggtcagcgtacatattgtccgcttcggcgataacgaaaacgggaaacgtcatcttgattatctagacgacttcggccaagagaagaattgggacattgtggacgttaaacatatctcgagtgatgtcaaagcgattttcttaggtccgatcagtcttaaaaacgatcgtcagggccgcagctaacaagggtctgccccgattgaattaacacaagttggcgaattttggatgaggcgggattgtttttaagataccctttgattcttttctcgagatacatggatagcggaccttgcggactgtaatgataatagacctgtgtaataatacatgtaatagtgttttcatgcttattcaaaatgcgtgcgcattccatacttattttgagttgaggggtaacacaatataac

SEQ ID NO: 25388 - DNA, 1947 bp, Muscodor strobelii
  misc_feature: SGI cDNA ID NO. 568665
  misc_feature: Elevated expression when VOC is produced
  misc_feature: Encodes the peptide sequence at SEQ ID NO 25389
atggatattgaaacaagtgatgcggatcggtttgaagcatcacggaaacaattagatcaatatccagttaatcttgtccgaagacaagcttttaggcatatcttgtatcgataccgagatcagctcaagggtgataatgtttttcacccgaaacagtctttttatttgttcgacttacaagggacagacggaaatgatgatctcaagtttgtaggagttaagatcaataacgatgaccatcttagaactaagcttgaggatgcacctgagccaaaatggcgatttgtattcctacaagcacccacgtcacttgatcctctcggatgcacccaacaacagctcgcgagacttctgactcatcaccaagtgatgccatcatttttggatttcgttttggcgttcagaacacgtctaactcctgccactcatgcggttttccgtcgcgagaactaccttgatcctgatatcccaaacttcagtctgccggaacggcaacgctctggtctccagctacagcatgcatttaatcttctctcggtggaaagggcaaccataccaaatgaactcaataaatggccattgcgccatactgcgctctatcattgtttcgacgttggcaccggtcaagcaattttcacaatcttgaagggtaatacgaatatagcgagccgtgtcagagacgaagtgaataaccacagagatttccaaccattggctttgaagagcctagagggttctttcattgcaacacttcaagttcagctcattgtgcttgagtggtgtggcgagaactggggagagtatgttgacgactttgaggagaaagccaaagataagtcggtagaggtgagacacgttcctgtctccgtgggaacaagcccagcgaccattgagatgaccttctcgaggcgaagtacattgtcgcgaccagcgtcaagagcggggaccttcacccgacgaagcacattggcatcgatcggaccgtcagccagtagtgtggctcaaccagactctggctcccagaaacttaatacaatggagccaacatctcctatatctcctccagaaagtccaacgacgcccatgtcaccggtgcgacgtacttcgagtctcaggcaatcagtatcagagttattctcccggattccggggacgcaaaataagagaaccctcagtatagacacggagctgactgcagtgcaaaacgaagaagaaaacatctggtttgatctggataagatgctgtcatttgacgagtttcagaggcttaatcgctggtccgatgaacttgaacagtcaatgagagcgatggatgcaaacaaaggtgtgctcaaacaagtgaaactccaatactctgagatacttgagtcatatggcttccggaaaaacattcaggaagccaaaatctcaacttatgtaaaattgttcttccagaggatagacaacgttatacgggatctcaatatttatcatgatcgactaaaagccatagcactaacactcgagaacgacaaagctctatatggcgccgctctccagtatcaaagcgcaaaagtgtcggagcacttcgcgcactcggcaagggagtcctccgagagaatggaagattggacggtgaaaatgcatacgattgcagtcaagacagagcacgaaacggtgtcgatgcacgtaatcactatcttcacgctcatctttttgccaggtaccttcatcgcaaccttcttcagcagcggcgttattcaatggaacgatgatggcaacttgggcagcgactatactgtacttcctcacgcgatgactctattctggttcgtcagtatcccgatattggctgttatccttgccgtttgggcattggtgtattgggtagcacgccgcaaaagaaaagcaagggctgatccagaagcggtcccaaacgagaagcacgctgctgagagtctagtttag

SEQ ID NO: 25389 - protein, 648 aa, Muscodor strobelii
  misc_feature: SGI Peptide ID NO. 568665
  misc_feature (8)..(626): NCBI GI: 116197192 Blast Desc: CHGG_05194 [Chaetomium globosum CBS 148.51] gi|88181107|gb|EAQ88575.1| CHGG_05194 [Chaetomium globosum CBS 148.51]
  misc_feature (21)..(628): NCBI GI: 212537493 Blast Desc: PMAA_093510 [Penicillium marneffei ATCC 18224] gi|210068644|gb|EEA22735.1| PMAA_093510 [Penicillium marneffei ATCC 18224]
  misc_feature (9)..(632): NCBI GI: 171679401 Blast Desc: protein product [Podospora anserina] gi|170939326|emb|CAP64554.1| protein product [Podospora anserina]
  misc_feature (114)..(589): NCBI GI: 256729537 Blast Desc: NECHADRAFT_84216 [Nectria haematococca mpVI 77-13-4]
  misc_feature (9)..(637): NCBI GI: 256723607 Blast Desc: NECHADRAFT_52101 [Nectria haematococca mpVI 77-13-4]
  misc_feature (123)..(633): NCBI GI: 189204522 Blast Desc: conserved [Pyrenophora tritici-repentis Pt-1C-BFP] gi|187985695|gb|EDU51183.1| conserved [Pyrenophora tritici-repentis Pt-1C-BFP]
  misc_feature (106)..(621): NCBI GI: 46111065 Blast Desc: FG02414.1 [Gibberella zeae PH-1]
  misc_feature (13)..(583): NCBI GI: 46109784 Blast Desc: FG01774.1 [Gibberella zeae PH-1]
  misc_feature (192)..(572): NCBI GI: 261353792 Blast Desc: conserved [Verticillium albo-atrum VaMs.102]
  misc_feature (404)..(626): NCBI GI: 46122979 Blast Desc: FG05867.1 [Gibberella zeae PH-1]
  misc_feature: Useful for introducing or modulating the production of volatile compounds
MDIETSDADRFEASRKQLDQYPVNLVRRQAFRHILYRYRDQLKGDNVFHPKQSFYLFDLQGTDGNDDLKFVGVKINNDDHLRTKLEDAPEPKWRFVFLQAPTSLDPLGCTQQQLARLLTHHQVMPSFLDFVLAFRTRLTPATHAVFRRENYLDPDIPNFSLPERQRSGLQLQHAFNLLSVERATIPNELNKWPLRHTALYHCFDVGTGQAIFTILKGNTNIASRVRDEVNNHRDFQPLALKSLEGSFIATLQVQLIVLEWCGENWGEYVDDFEEKAKDKSVEVRHVPVSVGTSPATIEMTFSRRSTLSRPASRAGTFTRRSTLASIGPSASSVAQPDSGSQKLNTMEPTSPISPPESPTTPMSPVRRTSSLRQSVSELFSRIPGTQNKRTLSIDTELTAVQNEEENIWFDLDKMLSFDEFQRLNRWSDELEQSMRAMDANKGVLKQVKLQYSEILESYGFRKNIQEAKISTYVKLFFQRIDNVIRDLNIYHDRLKAIALTLENDKALYGAALQYQSAKVSEHFAHSARESSERMEDWTVKMHTIAVKTEHETVSMHVITIFTLIFLPGTFIATFFSSGVIQWNDDGNLGSDYTVLPHAMTLFWFVSIPILAVILAVWALVYWVARRKRKARADPEAVPNEKHAAESLV

SEQ ID NO: 25390 - DNA, 2348 bp, Muscodor strobelii
  misc_feature: SGI EST ID NO. CUFF.59960.1
  misc_feature: Variant of the nucleotide sequence at SEQ ID NO 25388
tttaggtcaaactgacctttttacacttcgcattcccagaggcatccaaaaaagtaagcggtccatgcagacatcggcaaggctaatctatgtgtgctgtccacaagctccttagtctacctgtgtgctcttatacctcttgatggagatccagttcaacaccgacttttgcgcagactattagatctggcccccaaagacgttgagtcagtcacaaatcgcgctggacagtcgacgacgatggatattgaaacaagtgatgcggatcggtttgaagcatcacggaaacaattagatcaatatccagttaatcttgtccgaagacaagcttttaggcatatcttgtatcgataccgagatcagctcaagggtgataatgtttttcacccgaaacagtctttttatttgttcgacttacaagggacagacggaaatgatgatctcaagtttgtaggagttaagatcaataacgatgaccatcttagaactaagcttgaggatgcacctgagccaaaatggcgatttgtgtatgcgaaatctcgttggccatgtataagaattgctcgttgataaactactcagattcctacaagcacccacgtcacttgatcctctcggatgcacccaacaacagctcgcgagacttctgactcatcaccaagtgatgccatcatttttggatttcgttttggcgttcagaacacgtctaactcctgccactcatgcggttttccgtcgcgagaactaccttgatcctgatatcccaaacttcagtctgccggaacggcaacgctctggtctccagctacagcatgcatttaatcttctctcggtggaaagggcaaccataccaaatgaactcaataaatggccattgcgccatactgcgctctatcattgtttcgacgttggcaccggtcaagcaattttcacaatcttgaagggtaatacgaatatagcgagccgtgtcagagacgaagtgaataaccacagagatttccaaccattggctttgaagagcctagagggttctttcattgcaacacttcaagttcagctcattgtgcttgagtggtgtggcgagaactggggagagtatgttgacgactttgaggagaaagccaaagataagtcggtagaggtgagacacgttcctgtctccgtgggaacaagcccagcgaccattgagatgaccttctcgaggcgaagtacattgtcgcgaccagcgtcaagagcggggaccttcacccgacgaagcacattggcatcgatcggaccgtcagccagtagtgtggctcaaccagactctggctcccagaaacttaatacaatggagccaacatctcctatatctcctccagaaagtccaacgacgcccatgtcaccggtgcgacgtacttcgagtctcaggcaatcagtatcagagttattctcccggattccggggacgcaaaataagagaaccctcagtatagacacggagctgactgcagtgcaaaacgaagaagaaaacatctggtttgatctggataagatgctgtcatttgacgagtttcagaggcttaatcgctggtccgatgaacttgaacagtcaatgagagcgatggatgcaaacaaaggtgtgctcaaacaagtgaaactccaatactctgagatacttgagtcatatggcttccggaaaaacattcaggaagccaaaatctcaacttatgtaaaattgttcttccagaggatagacaacgttatacgggatctcaatatttatcatgatcgactaaaagccatagcactaacactcgagaacgacaaagctctatatggcgccgctctccagtatcaaagcgcaaaagtgtcggagcacttcgcgcactcggcaagggagtcctccgagagaatggaagattggacggtgaaaatgcatacgattgcagtcaagacagagcacgaaacggtgtcgatgcacgtaatcactatcttcacgctcatctttttgccaggtaccttcatcgcaaccttcttcagcagcggcgttattcaatggaacgatgatggcaacttgggcagcgactatactgtacttcctcacgcgatgactctattctggttcgtcagtatcccgatattggctgttatccttgccgtttgggcattggtgtattgggtagcacgccgcaaaagaaaagcaagggctgatccagaagcggtcccaaacgagaagcacgctgctgagagtctagtttagttgatgctcaaccctccgtaccatgttgtaaagacaattattttaagcgtgaataaacgagcacacttgacgcctgcatgtatctgagataatgtttgctgtctga

SEQ ID NO: 25391 - DNA, 2076 bp, Muscodor strobelii
  misc_feature: SGI cDNA ID NO. 568666
  misc_feature: Encodes the peptide sequence at SEQ ID NO 25392
atgattgccatgccgccaggtttaggtcaaactgacctttttacacttcgcattcccagaggcatccaaaaaaatctggcccccaaagacgttgagtcagtcacaaatcgcgctggacagtcgacgacgatggatattgaaacaagtgatgcggatcggtttgaagcatcacggaaacaattagatcaatatccagttaatcttgtccgaagacaagcttttaggcatatcttgtatcgataccgagatcagctcaagggtgataatgtttttcacccgaaacagtctttttatttgttcgacttacaagggacagacggaaatgatgatctcaagtttgtaggagttaagatcaataacgatgaccatcttagaactaagcttgaggatgcacctgagccaaaatggcgatttgtattcctacaagcacccacgtcacttgatcctctcggatgcacccaacaacagctcgcgagacttctgactcatcaccaagtgatgccatcatttttggatttcgttttggcgttcagaacacgtctaactcctgccactcatgcggttttccgtcgcgagaactaccttgatcctgatatcccaaacttcagtctgccggaacggcaacgctctggtctccagctacagcatgcatttaatcttctctcggtggaaagggcaaccataccaaatgaactcaataaatggccattgcgccatactgcgctctatcattgtttcgacgttggcaccggtcaagcaattttcacaatcttgaagggtaatacgaatatagcgagccgtgtcagagacgaagtgaataaccacagagatttccaaccattggctttgaagagcctagagggttctttcattgcaacacttcaagttcagctcattgtgcttgagtggtgtggcgagaactggggagagtatgttgacgactttgaggagaaagccaaagataagtcggtagaggtgagacacgttcctgtctccgtgggaacaagcccagcgaccattgagatgaccttctcgaggcgaagtacattgtcgcgaccagcgtcaagagcggggaccttcacccgacgaagcacattggcatcgatcggaccgtcagccagtagtgtggctcaaccagactctggctcccagaaacttaatacaatggagccaacatctcctatatctcctccagaaagtccaacgacgcccatgtcaccggtgcgacgtacttcgagtctcaggcaatcagtatcagagttattctcccggattccggggacgcaaaataagagaaccctcagtatagacacggagctgactgcagtgcaaaacgaagaagaaaacatctggtttgatctggataagatgctgtcatttgacgagtttcagaggcttaatcgctggtccgatgaacttgaacagtcaatgagagcgatggatgcaaacaaaggtgtgctcaaacaagtgaaactccaatactctgagatacttgagtcatatggcttccggaaaaacattcaggaagccaaaatctcaacttatgtaaaattgttcttccagaggatagacaacgttatacgggatctcaatatttatcatgatcgactaaaagccatagcactaacactcgagaacgacaaagctctatatggcgccgctctccagtatcaaagcgcaaaagtgtcggagcacttcgcgcactcggcaagggagtcctccgagagaatggaagattggacggtgaaaatgcatacgattgcagtcaagacagagcacgaaacggtgtcgatgcacgtaatcactatcttcacgctcatctttttgccaggtaccttcatcgcaaccttcttcagcagcggcgttattcaatggaacgatgatggcaacttgggcagcgactatactgtacttcctcacgcgatgactctattctggttcgtcagtatcccgatattggctgttatccttgccgtttgggcattggtgtattgggtagcacgccgcaaaagaaaagcaagggctgatccagaagcggtcccaaacgagaagcacgctgctgagagtctagtttag

SEQ ID NO: 25392 - protein, 691 aa, Muscodor strobelii
  misc_feature: SGI Peptide ID NO. 568666
  misc_feature (43)..(669): NCBI GI: 116197192 Blast Desc: CHGG_05194 [Chaetomium globosum CBS 148.51] gi|88181107|gb|EAQ88575.1| CHGG_05194 [Chaetomium globosum CBS 148.51]
  misc_feature (64)..(671): NCBI GI: 212537493 Blast Desc: PMAA_093510 [Penicillium marneffei ATCC 18224] gi|210068644|gb|EEA22735.1| PMAA_093510 [Penicillium marneffei ATCC 18224]
  misc_feature (52)..(675): NCBI GI: 171679401 Blast Desc: protein product [Podospora anserina] gi|170939326|emb|CAP64554.1| protein product [Podospora anserina]
  misc_feature (157)..(632): NCBI GI: 256729537 Blast Desc: NECHADRAFT_84216 [Nectria haematococca mpVI 77-13-4]
  misc_feature (52)..(680): NCBI GI: 256723607 Blast Desc: NECHADRAFT_52101 [Nectria haematococca mpVI 77-13-4]
  misc_feature (166)..(676): NCBI GI: 189204522 Blast Desc: conserved [Pyrenophora tritici-repentis Pt-1C-BFP] gi|187985695|gb|EDU51183.1| conserved [Pyrenophora tritici-repentis Pt-1C-BFP]
  misc_feature (149)..(664): NCBI GI: 46111065 Blast Desc: FG02414.1 [Gibberella zeae PH-1]
  misc_feature (56)..(626): NCBI GI: 46109784 Blast Desc: FG01774.1 [Gibberella zeae PH-1]
  misc_feature (235)..(615): NCBI GI: 261353792 Blast Desc: conserved [Verticillium albo-atrum VaMs.102]
  misc_feature (447)..(669): NCBI GI: 46122979 Blast Desc: FG05867.1 [Gibberella zeae PH-1]
MIAMPPGLGQTDLFTLRIPRGIQKNLAPKDVESVTNRAGQSTTMDIETSDADRFEASRKQLDQYPVNLVRRQAFRHILYRYRDQLKGDNVFHPKQSFYLFDLQGTDGNDDLKFVGVKINNDDHLRTKLEDAPEPKWRFVFLQAPTSLDPLGCTQQQLARLLTHHQVMPSFLDFVLAFRTRLTPATHAVFRRENYLDPDIPNFSLPERQRSGLQLQHAFNLLSVERATIPNELNKWPLRHTALYHCFDVGTGQAIFTILKGNTNIASRVRDEVNNHRDFQPLALKSLEGSFIATLQVQLIVLEWCGENWGEYVDDFEEKAKDKSVEVRHVPVSVGTSPATIEMTFSRRSTLSRPASRAGTFTRRSTLASIGPSASSVAQPDSGSQKLNTMEPTSPISPPESPTTPMSPVRRTSSLRQSVSELFSRIPGTQNKRTLSIDTELTAVQNEEENIWFDLDKMLSFDEFQRLNRWSDELEQSMRAMDANKGVLKQVKLQYSEILESYGFRKNIQEAKISTYVKLFFQRIDNVIRDLNIYHDRLKAIALTLENDKALYGAALQYQSAKVSEHFAHSARESSERMEDWTVKMHTIAVKTEHETVSMHVITIFTLIFLPGTFIATFFSSGVIQWNDDGNLGSDYTVLPHAMTLFWFVSIPILAVILAVWALVYWVARRKRKARADPEAVPNEKHAAESLV

SEQ ID NO: 25393 - DNA, 2348 bp, Muscodor strobelii; identical to SEQ ID NO: 25390
  misc_feature: SGI EST ID NO. CUFF.59960.1
  misc_feature: Variant of the nucleotide sequence at SEQ ID NO 25391

SEQ ID NO: 25394 - DNA, 231 bp, Muscodor strobelii
  misc_feature: SGI cDNA ID NO. 568667
  misc_feature: Elevated expression when VOC is produced
  misc_feature: Encodes the peptide sequence at SEQ ID NO 25395
atggctacagcactggttacagatacaataccaacatatcatctttcggtagacaatctagagaattacttgaaaaacaccgtattcacagcagacaagaagaaggattctattaaaattcggcttaccgataagggctattacgaagtcttcttgccccgcgccttgtcagatatagaaaagaagaacgtccgcaaagtttggactaacgacgacgacaacttattttaa

SEQ ID NO: 25395 - protein, 76 aa, Muscodor strobelii
  misc_feature: SGI Peptide ID NO. 568667
  misc_feature: Useful for introducing or modulating the production of volatile compounds
MATALVTDTIPTYHLSVDNLENYLKNTVFTADKKKDSIKIRLTDKGYYEVFLPRALSDIEKKNVRKVWTNDDDNLF

SEQ ID NO: 25396 - DNA, 771 bp, Muscodor strobelii
  misc_feature: SGI EST ID NO. CUFF.59782.0
  misc_feature: Variant of the nucleotide sequence at SEQ ID NO 25394
gcctcttgttgtcgccttagaaatctgcataaatatgaacaaccactgccctgcatgtggtgaatagtttcgacttccaattacaacatcgcctcaccctgaatgccaacatggctacagcactggttacagatacaataccaacatatcatctttcggtagacaatctagagaattacttgaaaaacaccgtattcacagcagacaagaagaaggattctattaaaattcggcttaccgataagggctattacgaagtcttcttgccccgcgccttgtcagatatagaaaagaagaacgtccgcaaagtttggactaacgacgacgacaacttattttaagtcacgctatggtgtagacggaggactccaaggggtttgtggcatagggggagttgaggggcaaaacgacggaccgattacaatacgattgggcgactcacatgggaatttgagcaccaagagaccgcattgtttgaaccttacaaagctaatgttttaattgagagactggtccggcccggcgcgcgtcagctacatgcttcggaatcaatagattgtcttacgctacactgtgcctaaagtctctatgtctcaaaatagatgagaaaagcagaccattcataaaacaaacactgcgatccttacccacgtcttatggcatcagcccgataaaccttcaaatatttatcgtctatttgaaattgatttgggtgaatgtcaagaatcatttgaaaatctctctggttaattgtttggttgattatcgaga

SEQ ID NO: 25397 - DNA, 1608 bp, Muscodor strobelii
  misc_feature: SGI cDNA ID NO. 568668
  misc_feature: Reduced expression when VOC is produced
  misc_feature: Encodes the peptide sequence at SEQ ID NO 25398
atgtcaacctcttacgacgtcgtaatagcaggcgcggggccagttggcttattccttgcttgcgaactcaagctcgccggtgcctctgtcctggtccttgagcgagatatcgacaacgattcggcatggaaaattttgcctctgggtcttcgtggaatgacgacacaatcgatcgaatcattccaccgtcggggcctgctatctaaactgttcgcgccgggaaagcgaagtccccaatgggaggtgtcgaaggcgggccctgcattcggaggtcattttgccggactctggtttgataagaaccaacttgatcttgacaagttcccatatactctcaatggaccatccttagaaccaggcctaactagcttgtatgaagttgtcgaagttctggggaagcatgcgacagaacttggcgttaagatcaagagagggtatagcgtcactgcggtatcgcaaggtgaccgcagcgtgacggtggaagcgagcagtacagacggagatggcaatgagtcgaagcattcattcgatgggagatggctcgtgggctgtgatggcggccgaagtgcagtacgccacctcacggggtttgcgttccatggatcggaagccaagtcaacgatgtattcgatccaatgcgagattgaccacccggagaagcttaaacaaggatttcaagctacagaggcggggatgtacatgcagccgccgtttgctttgtaccctccagaaatagagggaagagtactagcattgatagaatgggataatgcgaaatatgatcgcaatgtgacgccgagccaagaacatctccagggtgtatttgaacgcgtcacacagtcttcggaagtcaatattacaaaagtgcacagagtgcaaacgttcacagacagaagtaaacagactgatcaatatcgccgagggcgtgttcttctcgcaggcgatgcgaaccatatccatccacctttaggaggacaaggtatgaatcttggcctcggcgatgctataaatttgggttggaaacttgggtcgactattcgacgagagaagcaagctgggggcaaggaagttgatttgactctcctcggcacgtacgaaagtgagcgcatgcccgttggggaagtactcctagactacacacgagcacagatggcgtccctctttccagactcacatggccgcgctacatatgagttaatgcgcgacataatcaatactaaagacggcgtgaactacttcatggagcgttcctggggtctggcactgcgatactcattaggcaaccccgacgaaaccattcatcctgttgttggacgcagcgtcccagactttgaacttgaagatggttccagacttgggtcaaaattggtgggtgctcatggcttgcttattgacttcaagcaagatggcaggcttcgcgctttactaggagaggacggcgagaaatacgacgataggatcgagtacatctgccaaggcgcaaaggatacgtgtgggctaagcgcgttgcttgtgcgtcccgatggcttcgttgcgtgggctaccactgagggtgaagaaaatgacttgaatgccgccaaagctgcgttggagaggtggtttatctga

SEQ ID NO: 25398 - protein, 535 aa, Muscodor strobelii
  misc_feature: SGI Peptide ID NO. 568668
  misc_feature (4)..(380): Pfam Id: PF01494 Pfam Desc: FAD binding domain
  misc_feature (6)..(36): Pfam Id: PF01266 Pfam Desc: FAD dependent oxidoreductase
  misc_feature (287)..(380): Pfam Id: PF01494 Pfam Desc: FAD binding domain
  misc_feature (130)..(212): Pfam Id: PF01494 Pfam Desc: FAD binding domain
  misc_feature (4)..(35): Pfam Id: PF01494 Pfam Desc: FAD binding domain
  misc_feature (5)..(35): Pfam Id: PF03486 Pfam Desc: HI0933-like protein
  misc_feature (1)..(532): NCBI GI: 242785273 Blast Desc: pentachlorophenol 4-monooxygenase, [Talaromyces stipitatus ATCC 10500] gi|218720708|gb|EED20127.1| pentachlorophenol 4-monooxygenase, [Talaromyces stipitatus ATCC
  misc_feature (1)..(534): NCBI GI: 212527992 Blast Desc: pentachlorophenol 4-monooxygenase, [Penicillium marneffei ATCC 18224] gi|210073551|gb|EEA27638.1| pentachlorophenol 4-monooxygenase, [Penicillium marneffei ATCC
  misc_feature (4)..(534): NCBI GI: 13471908 Blast Desc: oxygenase [Mesorhizobium loti MAFF303099] gi|14022652|dbj|BAB49261.1| oxygenase [Mesorhizobium loti MAFF303099]
  misc_feature (8)..(534): NCBI GI: 254380567 Blast Desc: monooxygenase [Streptomyces sp. Mg1] gi|194339478|gb|EDX20444.1| monooxygenase [Streptomyces sp. Mg1]
  misc_feature (1)..(534): NCBI GI: 238497287 Blast Desc: pentachlorophenol 4-monooxygenase, [Aspergillus flavus NRRL3357] gi|220694759|gb|EED51103.1| pentachlorophenol 4-monooxygenase, [Aspergillus flavus NRRL3357]
  misc_feature (2)..(534): NCBI GI: 271965880 Blast Desc: oxygenase [Streptosporangium roseum DSM 43021] gi|270509055|gb|ACZ87333.1| oxygenase [Streptosporangium roseum DSM 43021]
  misc_feature (1)..(534): NCBI GI: 169774209 Blast Desc: [Aspergillus oryzae RIB40] gi|83769435|dbj|BAE59570.1| protein product [Aspergillus oryzae]
  misc_feature (8)..(534): NCBI GI: 256772040 Blast Desc: oxygenase [Streptomyces sp. C]
  misc_feature (5)..(534): NCBI GI: 91777496 Blast Desc: oxygenase [Burkholderia xenovorans LB400] gi|91690156|gb|ABE33354.1| oxygenase [Burkholderia xenovorans LB400]
  misc_feature (5)..(534): NCBI GI: 115372121 Blast Desc: monooxygenase, FAD-binding [Stigmatella aurantiaca DW4/3-1] gi|115370823|gb|EAU69747.1| monooxygenase, FAD-binding [Stigmatella aurantiaca DW4/3-1]
  misc_feature (7)..(452): SWISSPROT Homolog: EC 1.14.13.50 Pentachlorophenol monooxygenase
  misc_feature: Useful for introducing or modulating the production of volatile compounds
MSTSYDVVIAGAGPVGLFLACELKLAGASVLVLERDIDNDSAWKILPLGLRGMTTQSIESFHRRGLLSKLFAPGKRSPQWEVSKAGPAFGGHFAGLWFDKNQLDLDKFPYTLNGPSLEPGLTSLYEVVEVLGKHATELGVKIKRGYSVTAVSQGDRSVTVEASSTDGDGNESKHSFDGRWLVGCDGGRSAVRHLTGFAFHGSEAKSTMYSIQCEIDHPEKLKQGFQATEAGMYMQPPFALYPPEIEGRVLALIEWDNAKYDRNVTPSQEHLQGVFERVTQSSEVNITKVHRVQTFTDRSKQTDQYRRGRVLLAGDANHIHPPLGGQGMNLGLGDAINLGWKLGSTIRREKQAGGKEVDLTLLGTYESERMPVGEVLLDYTRAQMASLFPDSHGRATYELMRDIINTKDGVNYFMERSWGLALRYSLGNPDETIHPVVGRSVPDFELEDGSRLGSKLVGAHGLLIDFKQDGRLRALLGEDGEKYDDRIEYICQGAKDTCGLSALLVRPDGFVAWATTEGEENDLNAAKAALERWFI

SEQ ID NO: 25399 - DNA, 3235 bp, Muscodor strobelii
  misc_feature: SGI EST ID NO. CUFF.59791.0
  misc_feature: Variant of the nucleotide sequence at SEQ ID NO 25397
cgcattggttgccatttacaggagaggttctctccaaatccactgaaattaggtaggcaccatatcaaacaattcgattccatggttcgagattttgaagggaagcaggcttccaatttgcagacctgcggacaccaggctaccaatgatgtcgttcagtacgcgaaatgagctgtcagatcatcaatatgtgatcaagtaacggcatctccctgtatcctagacagctgatgatggcgtcaaataactggatccgacacttcgtgccgtctttgcatcgttaaagctgatgcctagcattatctgtgatgcccgtccagccactccttttgggttgtccataaattccgtttcaatctcggcctcggccaacgtcaatgctgaaactcggaattgcgagcctctcataaggcacaagcccttgcaggtcggggtgggatgcaaaattcaggtgtttacgcgcagcctatgtaccgtatcgtatcacaattcgtaaggttataaaaagaacgtgtcgacctcgtgcaagaaagatctttttctagtgctatacagcagtctcactttctgtactaattcaggtgtattaccattccctacaacttgtccacgatacatagctatgtcaacctcttacgacgtcgtaatagcaggcgcggggccagttggcttattccttgcttgcgaactcaagctcgccggtgcctctgtcctggtccttgagcgagatatcgacaacgattcggcatggaaaattttgcctctgggtcttcgtggaatgacgacacaatcgatcgaatcattccaccgtcggggcctgctatctaaactgttcgcgccgggaaagcgaagtccccaatgggaggtgtcgaaggcgggccctgcattcggaggtcattttgccggactctggtttgataagaaccaacttgatcttgacaagttcccatatactctcaatggaccatccttagaaccaggcctaactagcttgtatgaagttgtcgaagttctggggaagcatgcgacagaacttggcgttaagatcaagagagggtatagcgtcactgcggtatcgcaaggtgaccgcagcgtgacggtggaagcgagcagtacagacggagatggcaatgagtcgaagcattcattcgatgggagatggctcgtgggctgtgatggcggccgaagtgcagtacgccacctcacggggtttgcgttccatggatcggaagccaagtcaacgatgtattcgatccaatgcgagattgaccacccggagaagcttaaacaaggatttcaagctacagaggcggggatgtacatgcagccgccgtttgctttgtaccctccagaaatagagggaagagtactagcattgatagaatgggataatgcgaaatatgatcgcaatgtgacgccgagccaagaacatctccagggtgtatttgaacgcgtcacacagtcttcggaagtcaatattacaaaagtgcacagagtgcaaacgttcacagacagaagtaaacagactgatcaatatcgccgagggcgtgttcttctcgcaggcgatgcgaaccatatccatccacctttaggaggacaaggtatgaatcttggcctcggcgatgctataaatttgggttggaaacttgggtcgactattcgacgagagaagcaagctgggggcaaggaagttgatttgactctcctcggcacgtacgaaagtgagcgcatgcccgttggggaagtactcctagactacacacgagcacagatggcgtccctctttccagactcacatggccgcgctacatatgagttaatgcgcgacataatcaatactaaagacggcgtgaactacttcatggagcgttcctggggtctggcactgcgatactcattaggcaaccccgacgaaaccattcatcctgttgttggacgcagcgtcccagactttgaacttgaagatggttccagacttgggtcaaaattggtgggtgctcatggcttgcttattgacttcaagcaagatggcaggcttcgcgctttactaggagaggacggcgagaaatacgacgataggatcgagtacatctgccaaggcgcaaaggatacgtgtgggctaagcgcgttgcttgtgcgtcccgatggcttcgttgcgtgggctaccactgagggtgaagaaaatgacttgaatgccgccaaagctgcgttggagaggtggtttatctgaacaaacattgcgaatgtggtagatgtctcgcacccactttatcattaatggcaatcacggcagtttaagtcagttttcaagtctccatctgggtaagtaggtaggcacagctggaggaaagaaatagggcacctcagtgccaagcccactgtatcaaaacatcgcttcgacaccactcaatacaaccagcaaaaacacctctctcaatactggcactcaattctctcgttatccagatataccgtgaaatatctattcgagtgtttatcctataaacacgtgccgccttatcgaccttacataagtactcatttgacgcaaacaacaatcgattggctaatgatcatagcacattccagaacaagggctagcaatgctgtccaggacgcgagacagggcgacaacgatagcggcgaatccttgagctcacatcatttccgtcgatatatttgtctcttgtcgccgcgccagttcgtcaacgtttctgaggatcatctcaatgccgcccatataagcccgtacatatggatcaagcccaaacgatggacaaatcggataggactgcgaagaactattctctgttcgaaaagactgatgctatcttcgtgcatttccgctgcacggcgctaagctccctgctccagcccaagatcatgttctgagcatgggcgtagtagacctgatgaatcagcagattgcaaaaaggaaactagatatcgagatgtgacgatgtatgtgggcgcaacgatagtgattcggatggttaaaacaaggatgagctatgagaaatggttgtgttttcatgcagacgttgattcgaaagcgagaatgggctggggtcccataatcatgcagagataatggctctttgaagtaaaacgacagtccacccgtagggtgacggctgaggaacattcataggggctgacttcggacttttttccatcaagtatcaacagtttctatgttagttgtggtgcacattaacatataccataccttgtg

SEQ ID NO: 25400 - DNA, 1140 bp, Muscodor strobelii
  misc_feature: SGI cDNA ID NO. 568669
  misc_feature: Encodes the peptide sequence at SEQ ID NO 25401
atgcctggtcctgtcagtcacgagcccggagatcagtctccgtctcccgagaatatcacggctcctgccgatgatgatgtcctggagacctcggatggagagcagtatgctggaccgcgagacagcagaggctgggatggcaaggctcgaatccagcttgagaaccctgaggctctctctgatcccgagtactcggacaacgagaatgtccttcatggtgagactattggtgccgatgaggacctcctcgatgacgaggatcccgagaccgatgagctctccctcactcagtcccgcatcatttccatccctgccctccgtctcgaacgatttagcaaggtcatccgcttgtgccttcgtcagaacctgattgtcaacatcgatggtctttcggtcattgcctcgactcttcaggatctcgacttttacgacaacctaatcaccaagatccgcggtctggacgatttgactgaactcacgtctcttgacttcagtttcaacaagatcaagcatatcaagaacattgatcatcttacgaagctcactgatctctacttcgtatccaacaagatcagccacattgaaggcctggacactctcatcaatctccgtcaactggaactgggtagcaaccgcattcgtgagatccagaacctggaggccctgaagaacctggaggagctctggctggctaagaataagattacggagctcaagggtctcggtggtttgcccaagctcagactgctcagtattcagtccaaccgaatctcagatctttcgcccctgaaggaggtaccccagcttcaagagctctatgtctcgcacaatgctcttgagagtctcgagggtcttgaggataatcccaacctgacaattctcgacatttcgaacaacaagattcaaagcctcaagggcctcggtagcctcaagaagatcgaggaggtctgggctagctacaatctgatttctgatttcaacgatgtcaccagagagctttcggacaaggagagtctcactactgtctactttgagggcaatcccctgcagcttaagcagcctgctttgtatcgcaacaaagttcgtctggctcttccgcagatccagcagatcgatgcgacctttgtcagaaccacttga

SEQ ID NO: 25401 - protein, 379 aa, Muscodor strobelii
  misc_feature: SGI Peptide ID NO. 568669
  misc_feature (1)..(378): NCBI GI: 85111429 Blast Desc: protein phosphatases PP1 regulatory subunit sds22 [Neurospora crassa OR74A] gi|28925683|gb|EAA34696.1| protein phosphatases PP1 regulatory subunit sds22 [Neurospora crassa
  misc_feature (1)..(378): NCBI GI: 116182386 Blast Desc: CHGG_01821 [Chaetomium globosum CBS 148.51] gi|88186118|gb|EAQ93586.1| CHGG_01821 [Chaetomium globosum CBS 148.51]
  misc_feature (12)..(378): NCBI GI: 261355310 Blast Desc: protein phosphatase 1 regulatory subunit SDS22 [Verticillium albo-atrum VaMs.102]
  misc_feature (10)..(378): NCBI GI: 46109280 Blast Desc: FG01522.1 [Gibberella zeae PH-1]
  misc_feature (1)..(377): NCBI GI: 39943138 Blast Desc: MGG_03649 [Magnaporthe grisea 70-15] gi|145009762|gb|EDJ94418.1| MGG_03649 [Magnaporthe grisea 70-15]
  misc_feature (24)..(378): NCBI GI: 256730580 Blast Desc: [Nectria haematococca mpVI 77-13-4]
  misc_feature (4)..(379): NCBI GI: 171695322 Blast Desc: protein product [Podospora anserina] gi|170947903|emb|CAP60067.1| protein product [Podospora anserina]
  misc_feature (38)..(378): NCBI GI: 156054124 Blast Desc: SS1G_05910 [Sclerotinia sclerotiorum 1980] gi|154703690|gb|EDO03429.1| SS1G_05910 [Sclerotinia sclerotiorum 1980]
  misc_feature (40)..(379): NCBI GI: 212540112 Blast Desc: protein phosphatase PP1 regulatory subunit Sds22, [Penicillium marneffei ATCC 18224] gi|210067510|gb|EEA21602.1| protein phosphatase PP1 regulatory subunit Sds22, [Penicillium
  misc_feature (40)..(379): NCBI GI: 145228987 Blast Desc: An01g03720 [Aspergillus niger] gi|134054898|emb|CAK36910.1| protein product [Aspergillus niger]
MPGPVSHEPGDQSPSPENITAPADDDVLETSDGEQYAGPRDSRGWDGKARIQLENPEALSDPEYSDNENVLHGETIGADEDLLDDEDPETDELSLTQSRIISIPALRLERFSKVIRLCLRQNLIVNIDGLSVIASTLQDLDFYDNLITKIRGLDDLTELTSLDFSFNKIKHIKNIDHLTKLTDLYFVSNKISHIEGLDTLINLRQLELGSNRIREIQNLEALKNLEELWLAKNKITELKGLGGLPKLRLLSIQSNRISDLSPLKEVPQLQELYVSHNALESLEGLEDNPNLTILDISNNKIQSLKGLGSLKKIEEVWASYNLISDFNDVTRELSDKESLTTVYFEGNPLQLKQPALYRNKVRLALPQIQQIDATFVRTT

SEQ ID NO: 25402 - DNA, 2306 bp, Muscodor strobelii
  misc_feature: SGI EST ID NO. CUFF.60091.0
  misc_feature: Variant of the nucleotide sequence at SEQ ID NO 25400
ccttcttcggcacagcgctccattgtcccgagattatagcgccttgtaccgcctgagactctagcgtcaaaaccgcctgaagcttagcatgaattagcgtgattctgcatccattcaagagctttcaactgcaacgattaggcggccctgattagaacccctccttctgcttctggggattccataagacagtagcgtcattcgcgtgtgagtctccaatctcgaattccatcaaccaaaacatcccatctctatcccgccatcgtaccttatcctcacatccgccacctcgatcacaaccccccagactccctctatccggtcgcgtctcttgtcagattactcatcacaattcactcttgttgtagatctgtcaagtcttgttatgatcccgttcgatacttccctgccctctccaactcttctcacctgttcaacaaccggtaaacattaaacattccctaccccccaaccaccacagcaccagagacaccatgcctggtcctgtcagtcacgagcccggagatcagtctccgtctcccgagaatatcacggctcctgccgatgatgatgtcctggagacctcggatggagagcagtatgctggaccgcgagacagcagaggctgggatggcaaggctcgaatccagcttgagaaccctgaggctctctctgatcccgagtactcggacaacgagaatgtccttcatggtgagactattggtgccgatgaggacctcctcgatgacgaggatcccgagaccgatgagctctccctcactcagtcccgcatcatttccatccctgccctccgtctcgaacgatttagcaaggtcatccgcttgtgccttcgtcagaacctgattgtcaacatcgatggtctttcggtcattgcctcgactcttcaggatctcgacttttacgacaacctaatcaccaagatccgcggtctggacgatttgactgaactcacgtctcttgacttcagtttcaacaagatcaagcatatcaagaacattgatcatcttacgaagctcactgatctctacttcgtatccaacaagatcagccacattgaaggcctggacactctcatcaatctccgtcaactggaactgggtagcaaccgcattcgtgagatccagaacctggaggccctgaagaacctggaggagctctggctggctaagaataagattacggagctcaagggtctcggtggtttgcccaagctcagactgctcagtattcagtccaaccgaatctcagatctttcgcccctgaaggaggtaccccagcttcaagagctctatgtctcgcacaatgctcttgagagtctcgagggtcttgaggataatcccaacctgacaattctcgacatttcgaacaacaagattcaaagcctcaagggcctcggtagcctcaagaagatcgaggaggtctgggctagctacaatctgatttctgatttcaacgatgtcaccagagagctttcggacaaggagagtctcactactgtctactttgagggcaatcccctgcagcttaagcagcctgctttgtatcgcaacaaagttcgtctggctcttccgcagatccagcagatcgatgcgacctttgtcagaaccacttgaaccattttcgatatcgacaacttttgatgaggacatatcagttcctcgagtttaagtgcatagcatcggagttatggaagtgcatttgctttaacaggatgggtaccaatagccccagggcttttcgacatgcgacggcgttgttaggacaggttacttttcacacaagacttgctttcgtgatttgctcacatttacggacgaaacaacacagaaaagattgatgtaaggaagcagactcttgcacacaaggacgatttacaggagaagttgcaccgagctttttgcagtcaaaaatgttggtcggaatgttgtgacggagaacttggcaaaaatttggcgttgtcttcaagtgtgaccgatgccggttttgcaagccaaaaaaccggtattgtctacgatgagcatgttgactacaatcagtaccaggctgtagtcttgacatcagaaatgcagttgtcttctgcctatctatgagatcctgctgtacatgctccaacctgaacgtgatcattatcttgctctctgcataaagccatggaaaatacgtctatccacttcgtagctaccgtgcctacactactaggatacagaccgatgaaccccttggtgagtttgatacgatgtatgctctaaccgaagatccacatcttctcagtctcgaagtactaa

SEQ ID NO: 25403 - DNA, 1161 bp, Muscodor strobelii
  misc_feature: SGI cDNA ID NO. 568670
  misc_feature: Reduced expression when VOC is produced
  misc_feature: Encodes the peptide sequence at SEQ ID NO 25404
atgcctggtcctgtcagtcacgagcccggagatcagtctccgtctcccgagaatatcacggctcctgccgatgatgatgtcctggagacctcggatggagagcagtatgctggaccgcgagacagcagaggctgggatggcaaggctcgaatccagcttgagaaccctgaggctctctctgatcccgagtactcggacaacgagaatgtccttcatggtgagactattggtgccgatgaggacctcctcgatgacgaggatcccgagaccgatgagctctccctcactcagtcccgcatcatttccatccctgccctccgtctcgaacgatttagcaaggtcatccgcttgtgccttcgtcagaacctgattgtcaacatcgatggtctttcggtcattgcctcgactcttcaggatctcgacttttacgacaacctaatcaccaagatccgcggtctggacgatttgactgaactcacgtctcttgacttcagtttcaacaagatcaagcatatcaagaacattgatcatcttacgaagctcactgatctctacttcgtatccaacaagatcagccacattgaaggcctggacactctcatcaatctccgtcaactggaactgggtagcaaccgcattcgtgagatccagaacctggaggccctgaagaacctggaggagctctggctggctaagaataagattacggagctcaagggtctcggtggtttgcccaagctcagactgctcagtattcagtccaaccgaatctcagatctttcgcccctgaaggaggtaccccagcttcaagagctctatgtctcgcacaatgctcttgagagtctcgagggtcttgaggataatcccaacctgacaattctcgacatttcgaacaacaagattcaaagcctcaagggcctcggtagcctcaagaagatcgaggaggtctgggctagctacaatctgatttctgatttcaacgatgtcaccagagagctttcggacaaggagagtctcactactgtctactttgagggcaatcccctgcagcttaagcagcctgctttgtatcgcaacaaagttcgtctggctcttccgcagatccagcagatcgatgcgagtaagtcacatcatgtttgtcatttccactacgatatctaa

SEQ ID NO: 25404 - protein, 386 aa, Muscodor strobelii
  misc_feature: SGI Peptide ID NO. 568670
  misc_feature (1)..(373): NCBI GI: 85111429 Blast Desc: protein phosphatases PP1 regulatory subunit sds22 [Neurospora crassa OR74A] gi|28925683|gb|EAA34696.1| protein phosphatases PP1 regulatory subunit sds22 [Neurospora crassa
  misc_feature (1)..(374): NCBI GI: 116182386 Blast Desc: CHGG_01821 [Chaetomium globosum CBS 148.51] gi|88186118|gb|EAQ93586.1| CHGG_01821 [Chaetomium globosum CBS 148.51]
  misc_feature (12)..(374): NCBI GI: 261355310 Blast Desc: protein phosphatase 1 regulatory subunit SDS22 [Verticillium albo-atrum VaMs.102]
  misc_feature (10)..(374): NCBI GI: 46109280 Blast Desc: FG01522.1 [Gibberella zeae PH-1]
  misc_feature (1)..(374): NCBI GI: 39943138 Blast Desc: MGG_03649 [Magnaporthe grisea 70-15] gi|145009762|gb|EDJ94418.1| MGG_03649 [Magnaporthe grisea 70-15]
  misc_feature (24)..(374): NCBI GI: 256730580 Blast Desc: [Nectria haematococca mpVI 77-13-4]
  misc_feature (4)..(374): NCBI GI: 171695322 Blast Desc: protein product [Podospora anserina] gi|170947903|emb|CAP60067.1| protein product [Podospora anserina]
  misc_feature (38)..(373): NCBI GI: 156054124 Blast Desc: SS1G_05910 [Sclerotinia sclerotiorum 1980] gi|154703690|gb|EDO03429.1| SS1G_05910 [Sclerotinia sclerotiorum 1980]
  misc_feature (40)..(374): NCBI GI: 212540112 Blast Desc: protein phosphatase PP1 regulatory subunit Sds22, [Penicillium marneffei ATCC 18224] gi|210067510|gb|EEA21602.1| protein phosphatase PP1 regulatory subunit Sds22, [Penicillium
  misc_feature (40)..(374): NCBI GI: 145228987 Blast Desc: An01g03720 [Aspergillus niger] gi|134054898|emb|CAK36910.1| protein product [Aspergillus niger]
  misc_feature: Useful for introducing or modulating the production of volatile compounds
MPGPVSHEPGDQSPSPENITAPADDDVLETSDGEQYAGPRDSRGWDGKARIQLENPEALSDPEYSDNENVLHGETIGADEDLLDDEDPETDELSLTQSRIISIPALRLERFSKVIRLCLRQNLIVNIDGLSVIASTLQDLDFYDNLITKIRGLDDLTELTSLDFSFNKIKHIKNIDHLTKLTDLYFVSNKISHIEGLDTLINLRQLELGSNRIREIQNLEALKNLEELWLAKNKITELKGLGGLPKLRLLSIQSNRISDLSPLKEVPQLQELYVSHNALESLEGLEDNPNLTILDISNNKIQSLKGLGSLKKIEEVWASYNLISDFNDVTRELSDKESLTTVYFEGNPLQLKQPALYRNKVRLALPQIQQIDASKSHHVCHFHYDI

SEQ ID NO: 25405 - DNA, 2306 bp, Muscodor strobelii; identical to SEQ ID NO: 25402
  misc_feature: SGI EST ID NO. CUFF.60091.0
  misc_feature: Variant of the nucleotide sequence at SEQ ID NO 25403

SEQ ID NO: 25406 - DNA, 969 bp, Muscodor strobelii
  misc_feature: SGI cDNA ID NO. 568671
  misc_feature: Elevated expression when VOC is produced
  misc_feature: Encodes the peptide sequence at SEQ ID NO 25407
atgggcccgactatcaagctcagcagcgggcatgagatgcctcaagtaggcttcggtctgtggaaggttgaaaacgatgtatgtgccgacataatctacaatgccatcaaggtcggctacaggttattcgacggagcctgcgactacggcaacgaaaaagaatgcggcgaaggcatagcccgcgcaataaaagacggcctcgtaaaacgtgaagacctcttcatcacctccaagctctggccaaccttcgaagacggcgacaaagtcgtgggagcctgcgaacgatccctcgcagactggggcctagaatacttcgacctatacctcatccacttcccaggcgcattgcaatacatcgacccagccgagcggtacccacccggttggcatgcagacggcaaatccaagatcgtccgctccaagacgcccatgcacgtaacatgggccagcatggaatcctgcgtagacaaaggtctcgcgaagagcatcggagtatctaacttccaagctcaactaatctacgacatgctgcgctacgccaggatcccgcccgcagctttacaaatcgagcaccatccctacctcgtccagcaggaactcctatcgctctgcaaagaagaaggcatcgccgtaacagcctactcgtccttcggccccgcaagtttcatgactttcggcttcaagaacgccggtgctcttacgcctctcatgcaagacgatctcatcaccgggttggcaaagaagtacagcaaggagccatcccagatcttgctccgctgggcgacgcagagaggtctggctgttatccccaagacgtctcgtcagcaggttatggcgcagaacttggattgcactggttttgatcttgagcagtctgatatcgaggctatttcttcgaaggatgctaatatcaggtttaaccaaccgtcgcagtacttcgagactgagaagatgtggatcttcggttag

SEQ ID NO: 25407 - protein, 322 aa, Muscodor strobelii
  misc_feature: SGI Peptide ID NO. 568671
  misc_feature (7)..(302): Pfam Id: PF00248 Pfam Desc: Aldo/keto reductase family
  misc_feature (1)..(322): NCBI GI: 116182388 Blast Desc: CHGG_01822 [Chaetomium globosum CBS 148.51] gi|88186119|gb|EAQ93587.1| CHGG_01822 [Chaetomium globosum CBS 148.51]
  misc_feature (1)..(322): NCBI GI: 85111427 Blast Desc: xylose reductase [Neurospora crassa OR74A] gi|28925682|gb|EAA34695.1| xylose reductase [Neurospora crassa OR74A] gi|58200719|gb|AAW66609.1| xylose reductase [Neurospora
  misc_feature (3)..(322): NCBI GI: 39943136 Blast Desc: MGG_03648 [Magnaporthe grisea 70-15] gi|76057158|emb|CAI67591.1| D-xylose reductase [Magnaporthe grisea] gi|145009763|gb|EDJ94419.1| MGG_03648 [Magnaporthe grisea
  misc_feature (1)..(322): NCBI GI: 171695324 Blast Desc: protein product [Podospora anserina] gi|170947904|emb|CAP60068.1| protein product [Podospora anserina]
  misc_feature (2)..(322): NCBI GI: 54036586 Blast Desc: XYL1_TRIRE RecName: Full=NAD(P)H-dependent D-xylose reductase; Short=XR gi|28394460|gb|AAM66765.1| D-xylose reductase [Hypocrea jecorina]
  misc_feature (3)..(322): NCBI GI: 261355309 Blast Desc: NAD(P)H-dependent D-xylose reductase [Verticillium albo-atrum VaMs.102]
  misc_feature (1)..(321): NCBI GI: 213515314 Blast Desc: NADPH-dependent D-xylose reductase [Salmo salar] gi|209736332|gb|ACI69035.1| NADPH-dependent D-xylose reductase [Salmo salar]
  misc_feature (3)..(322): NCBI GI: 256730799 Blast Desc: [Nectria haematococca mpVI 77-13-4]
  misc_feature (3)..(315): NCBI GI: 156054126 Blast Desc: SS1G_05911 [Sclerotinia sclerotiorum 1980] gi|154703691|gb|EDO03430.1| SS1G_05911 [Sclerotinia sclerotiorum 1980]
  misc_feature (3)..(312): NCBI GI: 169771035 Blast Desc: [Aspergillus oryzae RIB40] gi|238486464|ref|XP_002374470.1| D-xylose reductase (Xyl1), [Aspergillus flavus NRRL3357] gi|83767846|dbj|BAE57985.1| protein
  misc_feature (2)..(309): SWISSPROT Homolog: EC 1.1.1.175 D-xylose 1-dehydrogenase
  misc_feature: Useful for introducing or modulating the production of volatile compounds
MGPTIKLSSGHEMPQVGFGLWKVENDVCADIIYNAIKVGYRLFDGACDYGNEKECGEGIARAIKDGLVKREDLFITSKLWPTFEDGDKVVGACERSLADWGLEYFDLYLIHFPGALQYIDPAERYPPGWHADGKSKIVRSKTPMHVTWASMESCVDKGLAKSIGVSNFQAQLIYDMLRYARIPPAALQIEHHPYLVQQELLSLCKEEGIAVTAYSSFGPASFMTFGFKNAGALTPLMQDDLITGLAKKYSKEPSQILLRWATQRGLAVIPKTSRQQVMAQNLDCTGFDLEQSDIEAISSKDANIRFNQPSQYFETEKMWIFG

SEQ ID NO: 25408 - DNA, 6120 bp, Muscodor strobelii
  misc_feature: SGI EST ID NO. CUFF.60092.1
  misc_feature: Variant of the nucleotide sequence at SEQ ID NO 25406
cgagtatccctgcttccatgcagatcaaccgtttgaaacgctgtgccaagtccgcccgtcaaactcgctcccgatgccgtgcgcgctacatctcgcatgatatctcggctcagtccgaaaatacagtatccatggctcttaccttgctacatataatgacccaatcttcaactagtctagtgtgcgaggacagccagcgagccgcaacctgagccaaaaaatgcacaatgctattgtgctcgacagcgatgatcatggaaagaagatcgggatgcacgactggcaaagaatgctagcgagtggtgaagaaacgtgtataaaagaagggcagccgtcagaaaattcgtacaaactacggagaacagacatcagaggattccacgagaaaacctattttcattagatccttcaacatgtgggcaaagcagcttctcttgtacacttcacttgtgggaacacaatccactgcactggcatgtcttcacggctatcaatccaaagtcacgactcgcgacatcgaagcacaagccaatgctcgtcaagccccttccgagccgaagaagacggccatccgaaatgtccacgtcttcgacggcgagcgtttcagtgagccgcaaacaattatcatcgccgacggtaccatcacggcggatacggatgatattgagattgaaattgacggctcggacaagttcctcattcctggcctgatggatgctcatgtccacgtgaacgacttaacatcccttgccgccatcacatcatacggagtgacaacggtattcaatatggtgtgctcaggggggtacgcagcatgtgcggcactgaagaacaacaatcagacaggtgtggccgagatcttctcggcaggcatagcagctgtgggatacgcctcaggaaatggcgttcttcagccgcccccagaggatttgatctacccagatacgaaccttgcagagcgagtgtcctgggccttcggcaacggcagtgactactacaagcttgtcgcgaagccagcgagcatcagccaagcgcagcaggatgatatcgtggcggcggcgcatgatactcatggacggcaaactatgactcacgcctctgacatcgtggcgtataaggaggccgtagcgtccaagagcgatggcattcagcatatccccgacgacgggctgctgtcggcctgtacggtcgcagcgattaaggccaacaggcaattcgtgacgcctactatgagtatcttcaactatggatatagcaatccggcagtattcgcgtttttgggccgcacgaattctacaaacgcgacatacgcgcacgtcgaggaaaacgttcgaatcttgcacagagccggtgtaccaatcctcgccggtacggacgccgtcggccgtgtgactccggagatcgatctccccttcggccgaacgctacacggcgagctccaattacttcatagcgcgggtctcacccctcttgaggcacttcgtgccgccaccgttgagcctgcgatttggcatcaattgtctgacaggggcgaggttagggctggcaaacgagctgatttggtgctcctcaattcaaatcctttgctgaatatctccaatacgcaggatattgcgaggatctgggccaatggcgttgaagtgccggatgttgctagattcggatgaagatgtaacacgataggtattagaagcttcatttggtgcgatgcgtgatcaaccctgatttatcttccattttcctcttagttcgcgcatttctcatgtgcctgttttgatgtaatggtcggcaagctctatttctaatacgcatttgttagtcgaaagccaagccggagtcgctcttttggggtccggtaccattacatcatgttgaatagcatgcagctcttttcgatcctgcactcaatctcgaattccacagtttcgaattacttcctgaggtattcatgatcaatgcagctcgaatcacccatagaatggtacacgggcagcctctggtcgtatgtgatatgatcgatcaaagtagaatacattgattataatatgtgttgactcaggtgactattcttcccgttcagacaaaatcagcattggctcgacgagcaccaacagatgcgggatccacagatcttaagcacagtctccaattagccgcaagtggcactcacatctatcgcatcaagcattgagggatattaggctaaatgcaactctgaactgactgaatgattcacgactcaggaattagtcgcagatcgggcgaaaacttgaccaagtaagataacaaatgcgctcgtcagatccactatcgtgagaatcttgttactatccgcctgcgaacccctcacctagcgcaatgggatctttaaacgcacgaatgagaacctagctcttcggcgagattggcaacgcgtttcctcgggacggatgcattctaagattcgctgcatctgcaacaacggacgatccatgtcttcaaatagccatgccaatcagacggaagattgcggtcgcgtggttcgcgccgcaaggaactataaaccatgtagaatttctccgcaccgcacggcggccatggaacgctgtgacgacagccgtgagacgggcgcagcaatataatcatgtatgcaacgagccgtttgcgatgcggggttttagataaagtcaattgcttctgctcgtctcaaacgcgaactctttcgcaatcccatactcgactttattctcaatatctgaaccgccgagctcagacaacactcacaagatcacgagaagcaagcagaccttggcaatacccgatcagagccattacttcgcgccacatagcaacaatgggcccgactatcaagctcagcagcgggcatgagatgcctcaagtaggcttcggtctgtggaaggttgaaaacgatgtatgtgccgacataatctacaatgccatcaaggtcggctacaggttattcgacggagcctgcgactacggcaacgaaaaagaatgcggcgaaggcatagcccgcgcaataaaagacggcctcgtaaaacgtgaagacctcttcatcacctccaagctctggccaaccttcgaagacggcgacaaagtcgtgggagcctgcgaacgatccctcgcagactggggcctagaatacttcgacctatacctcatccacttcccaggcgcattgcaatacatcgacccagccgagcggtacccacccggttggcatgcagacggcaaatccaagatcgtccgctccaagacgcccatgcacgtaacatgggccagcatggaatcctgcgtagacaaaggtctcgcgaagagcatcggagtatctaacttccaagctcaactaatctacgacatgctgcgctacgccaggatcccgcccgcagctttacaaatcgagcaccatccctacctcgtccagcaggaactcctatcgctctgcaaagaagaaggcatcgccgtaacagcctactcgtccttcggccccgcaagtttcatgactttcggcttcaagaacgccggtgctcttacgcctctcatgcaagacgatctcatcaccgggttggcaaagaagtacagcaaggagccatcccagatcttgctccgctgggcgacgcagagaggtctggctgttatccccaagacgtctcgtcagcaggttatggcgcagaacttggattgcactggttttgatcttgagcagtctgatatcgaggctatttcttcgaaggatgctaatatcaggtttaaccaaccgtcgcagtacttcgagactgagaagatgtggatcttcggttagagcatacatcgtatcaaactcaccaaggggttcatcggtctgtatcctagtagtgtaggcacggtagctacgaagtggatagacgtattttccatggctttatgcagagagcaagataatgatcacgttcaggttggagcatgtacagcaggatctcatagataggcagaagacaactgcatttctgatgtcaagactacagcctggtactgattgtagtcaacatgctcatcgtagacaataccggttttttggcttgcaaaaccggcatcggtcacacttgaagacaacgccaaatttttgccaagttctccgtcacaacattccgaccaacatttttgactgcaaaaagctcggtgcaacttctcctgtaaatcgtccttgtgtgcaagagtctgcttccttacatcaatcttttctgtgttgtttcgtccgtaaatgtgagcaaatcacgaaagcaagtcttgtgtgaaaagtaacctgtcctaacaacgccgtcgcatgtcgaaaagccctggggctattggtacccatcctgttaaagcaaatgcacttccataactccgatgctatgcacttaaactcgaggaactgatatgtcctcatcaaaagttgtcgatatcgaaaatggttcaagtggttctgacaaaggctagcgtaaaattgttagatatcgtagtggaaatgacaaacatgatgtgacttactcgcatcgatctgctggatctgcggaagagccagacgaactttgttgcgatacaaagcaggctgcttaagctgcaggggattgccctcaaagtagacagtagtgagactctccttgtccgaaagctctctggtgacatcgttgaaatcagaaatcagattgtagctagcccagacctcctcgatcttcttgaggctaccgaggcccttgaggctttgaatcttgttgttcgaaatgtcgagaattgtcaggttgggattatcctcaagaccctcgagactctcaagagcattgtgcgagacatagagctcttgaagctggggtacctccttcaggggcgaaagatctgagattcggttggactgaatactgagcagtctgagcttgggcaaaccaccgagacccttgagctccgtaatcttattcttagccagccagagctcctccaggttcttcagggcctccaggttctggatctcacgaatgcggttgctacccagttccagttgacggagattgatgagagtgtccaggccttcaatgtggctgatcttgttggatacgaagtagagatcagtgagcttcgtaagatgatcaatgttcttgatatgcttgatcttgttgaaactgaagtcaagagacgtgagttcagtcaaatcgtccagaccgcggatcttggtgattaggttgtcgtaaaagtcgagatcctgaagagtcgaggcaatgaccgaaagaccatcgatgttgacaatcaggttctgacgaaggcacaagcggatgaccttgctaaatcgttcgagacggagggcagggatggaaatgatgcgggactgagtgagggagagctcatcggtctcgggatcctcgtcatcgaggaggtcttgaaccggacaagattagcagacgcgccttcgaggtcgaacaagaactaagaaacaagaaacaagacaataaaacatttgggggttactcaccctcatcggcaccaatagtctcaccatgaaggacattctcgttgtccgagtactcgggatcagagagagcctcagggttctcaagctggattcgagccttgccatcccagcctctgctgtctcgcggtccagcatactgctctccatccgaggtctccaggacatcatcatcggcaggagccgtgatattctcgggagacggagactgatctccgggctcgtgactgacaggaccaggcatggtgtctctggtgctgtggtggttggggggtagggaatgtttaatgtttaccggttgttgaacaggtgagaagagttggagagggcagggaagtatcgaacgggatcataacaagacttgacagatctacaacaagagtgaattgtgatgagtaatctgacaagagacgcgaccggatagagggagtctggggggttgtgatcgaggtggcggatgtgaggataaggtacgatggcgggatagagatgggatgttttggttgatggaattcgagattggagactcacacgcgaatgacgctactgtcttatggaatccccagaagcagaaggaggggttctaatcagggccgcctaatcgttgcagttgaaagctcttgaatggatgcagaatcacg

SEQ ID NO: 25409 - DNA, 879 bp, Muscodor strobelii
  misc_feature: SGI cDNA ID NO. 568672
  misc_feature: Encodes the peptide sequence at SEQ ID NO 25410
atggtgtgctcaggggggtacgcagcatgtgcggcactgaagaacaacaatcagacaggtgtggccgagatcttctcggcaggcatagcagctgtgggatacgcctcaggaaatggcgttcttcagccgcccccagaggatttgatctacccagatacgaaccttgcagagcgagtgtcctgggccttcggcaacggcagtgactactacaagcttgtcgcgaagccagcgagcatcagccaagcgcagcaggatgatatcgtggcggcggcgcatgatactcatggacggcaaactatgactcacgcctctgacatcgtggcgtataaggaggccgtagcgtccaagagcgatggcattcagcatatccccgacgacgggctgctgtcggcctgtacggtcgcagcgattaaggccaacaggcaattcgtgacgcctactatgagtatcttcaactatggatatagcaatccggcagtattcgcgtttttgggccgcacgaattctacaaacgcgacatacgcgcacgtcgaggaaaacgttcgaatcttgcacagagccggtgtaccaatcctcgccggtacggacgccgtcggccgtgtgactccggagatcgatctccccttcggccgaacgctacacggcgagctccaattacttcatagcgcgggtctcacccctcttgaggcacttcgtgccgccaccgttgagcctgcgatttggcatcaattgtctgacaggggcgaggttagggctggcaaacgagctgatttggtgctcctcaattcaaatcctttgctgaatatctccaatacgcaggatattgcgaggatctgggccaatggcgttgaagtgccggatgttgctagattcggatga

SEQ ID NO: 25410 - protein, 292 aa, Muscodor strobelii
  misc_feature: SGI Peptide ID NO. 568672
  misc_feature (1)..(262): Pfam Id: PF01979 Pfam Desc: Amidohydrolase family
  misc_feature (216)..(262): Pfam Id: PF01979 Pfam Desc: Amidohydrolase family
  misc_feature (225)..(260): Pfam Id: PF07969 Pfam Desc: Amidohydrolase family
  misc_feature (16)..(283): NCBI GI: 280962368 Blast Desc: amidohydrolase [Frankia sp. EuI1c] gi|270733603|gb|EFA61810.1| amidohydrolase [Frankia sp. EuI1c]
  misc_feature (20)..(284): NCBI GI: 226362713 Blast Desc: hydrolase [Rhodococcus opacus B4] gi|226241198|dbj|BAH51546.1| hydrolase [Rhodococcus opacus B4]
  misc_feature (65)..(284): NCBI GI: 239983297 Blast Desc: hydrolase [Streptomyces albus J1074]
  misc_feature (10)..(285): NCBI GI: 256671626 Blast Desc: hydrolase [Streptomyces sp. AA4]
  misc_feature (34)..(282): NCBI GI: 284033832 Blast Desc: amidohydrolase [Kribbella flavida DSM 17836] gi|283813125|gb|ADB34964.1| amidohydrolase [Kribbella flavida DSM 17836]
  misc_feature (20)..(284): NCBI GI: 256375015 Blast Desc: amidohydrolase [Actinosynnema mirum DSM 43827] gi|255919318|gb|ACU34829.1| amidohydrolase [Actinosynnema mirum DSM 43827]
  misc_feature (16)..(282): NCBI GI: 116625627 Blast Desc: amidohydrolase [Solibacter usitatus Ellin6076] gi|116228789|gb|ABJ87498.1| amidohydrolase [Candidatus Solibacter usitatus Ellin6076]
  misc_feature (65)..(285): NCBI GI: 226313647 Blast Desc: BBR47_40600 [Brevibacillus brevis NBRC 100599] gi|226096595|dbj|BAH45037.1| conserved [Brevibacillus brevis NBRC 100599]
  misc_feature (65)..(285): NCBI GI: 348315 Blast Desc: BBR47_40600 [Brevibacillus brevis NBRC 100599] gi|226096595|dbj|BAH45037.1| conserved [Brevibacillus brevis NBRC 100599]
  misc_feature (10)..(285): NCBI GI: 226364749 Blast Desc: hydrolase [Rhodococcus opacus B4] gi|226243238|dbj|BAH53586.1| hydrolase [Rhodococcus opacus B4]
MVCSGGYAACAALKNNNQTGVAEIFSAGIAAVGYASGNGVLQPPPEDLIYPDTNLAERVSWAFGNGSDYYKLVAKPASISQAQQDDIVAAAHDTHGRQTMTHASDIVAYKEAVASKSDGIQHIPDDGLLSACTVAAIKANRQFVTPTMSIFNYGYSNPAVFAFLGRTNSTNATYAHVEENVRILHRAGVPILAGTDAVGRVTPEIDLPFGRTLHGELQLLHSAGLTPLEALRAATVEPAIWHQLSDRGEVRAGKRADLVLLNSNPLLNISNTQDIARIWANGVEVPDVARFG

SEQ ID NO: 25411 - DNA, 6120 bp, Muscodor strobelii; identical to SEQ ID NO: 25408
  misc_feature: SGI EST ID NO. CUFF.60092.1
  misc_feature: Variant of the nucleotide sequence at SEQ ID NO 25409

SEQ ID NO: 25412 - DNA, 1254 bp, Muscodor strobelii
  misc_feature: SGI cDNA ID NO. 568673
  misc_feature: Encodes the peptide sequence at SEQ ID NO 25413
atgtgggcaaagcagcttctcttgtacacttcacttgtgggaacacaatccactgcactggcatgtcttcacggctatcaatccaaagtcacgactcgcgacatcgaagcacaagccaatgctcgtcaagccccttccgagccgaagaagacggccatccgaaatgtccacgtcttcgacggcgagcgtttcagtgagccgcaaacaattatcatcgccgacggtaccatcacggcggatacggatgatattgagattgaaattgacggctcggacaagttcctcattcctggcctgatggatgctcatgtccacgtgaacgacttaacatcccttgccgccatcacatcatacggagtgacaacggtattcaatatggtgtgctcaggggggtacgcagcatgtgcggcactgaagaacaacaatcagacaggtgtggccgagatcttctcggcaggcatagcagctgtgggatacgcctcaggaaatggcgttcttcagccgcccccagaggatttgatctacccagatacgaaccttgcagagcgagtgtcctgggccttcggcaacggcagtgactactacaagcttgtcgcgaagccagcgagcatcagccaagcgcagcaggatgatatcgtggcggcggcgcatgatactcatggacggcaaactatgactcacgcctctgacatcgtggcgtataaggaggccgtagcgtccaagagcgatggcattcagcatatccccgacgacgggctgctgtcggcctgtacggtcgcagcgattaaggccaacaggcaattcgtgacgcctactatgagtatcttcaactatggatatagcaatccggcagtattcgcgtttttgggccgcacgaattctacaaacgcgacatacgcgcacgtcgaggaaaacgttcgaatcttgcacagagccggtgtaccaatcctcgccggtacggacgccgtcggccgtgtgactccggagatcgatctccccttcggccgaacgctacacggcgagctccaattacttcatagcgcgggtctcacccctcttgaggcacttcgtgccgccaccgttgagcctgcgatttggcatcaattgtctgacaggggcgaggttagggctggcaaacgagctgatttggtgctcctcaattcaaatcctttgctgaatatctccaatacgcaggatattgcgaggatctgggccaatggcgttgaagtgccggatgttgctagattcggatga

SEQ ID NO: 25413 - protein, 417 aa, Muscodor strobelii
  misc_feature: SGI Peptide ID NO. 568673
  misc_feature (94)..(387): Pfam Id: PF01979 Pfam Desc: Amidohydrolase family
  misc_feature (341)..(387): Pfam Id: PF01979 Pfam Desc: Amidohydrolase family
  misc_feature (350)..(385): Pfam Id: PF07969 Pfam Desc: Amidohydrolase family
  misc_feature (47)..(408): NCBI GI: 280962368 Blast Desc: amidohydrolase [Frankia sp. EuI1c] gi|270733603|gb|EFA61810.1| amidohydrolase [Frankia sp. EuI1c]
  misc_feature (48)..(409): NCBI GI: 226362713 Blast Desc: hydrolase [Rhodococcus opacus B4] gi|226241198|dbj|BAH51546.1| hydrolase [Rhodococcus opacus B4]
  misc_feature (50)..(410): NCBI GI: 256671626 Blast Desc: hydrolase [Streptomyces sp. AA4]
  misc_feature (51)..(409): NCBI GI: 239983297 Blast Desc: hydrolase [Streptomyces albus J1074]
  misc_feature (50)..(409): NCBI GI: 256375015 Blast Desc: amidohydrolase [Actinosynnema mirum DSM 43827] gi|255919318|gb|ACU34829.1| amidohydrolase [Actinosynnema mirum DSM 43827]
  misc_feature (53)..(407): NCBI GI: 116625627 Blast Desc: amidohydrolase [Solibacter usitatus Ellin6076] gi|116228789|gb|ABJ87498.1| amidohydrolase [Candidatus Solibacter usitatus Ellin6076]
  misc_feature (53)..(410): NCBI GI: 348315 Blast Desc: amidohydrolase [Solibacter usitatus Ellin6076] gi|116228789|gb|ABJ87498.1| amidohydrolase [Candidatus Solibacter usitatus Ellin6076]
  misc_feature (51)..(410): NCBI GI: 226364749 Blast Desc: hydrolase [Rhodococcus opacus B4] gi|226243238|dbj|BAH53586.1| hydrolase [Rhodococcus opacus B4]
  misc_feature (41)..(410): NCBI GI: 226313647 Blast Desc: BBR47_40600 [Brevibacillus brevis NBRC 100599] gi|226096595|dbj|BAH45037.1| conserved [Brevibacillus brevis NBRC 100599]
  misc_feature (56)..(407): NCBI GI: 284033832 Blast Desc: amidohydrolase [Kribbella flavida DSM 17836] gi|283813125|gb|ADB34964.1| amidohydrolase [Kribbella flavida DSM 17836]
MWAKQLLLYTSLVGTQSTALACLHGYQSKVTTRDIEAQANARQAPSEPKKTAIRNVHVFDGERFSEPQTIIIADGTITADTDDIEIEIDGSDKFLIPGLMDAHVHVNDLTSLAAITSYGVTTVFNMVCSGGYAACAALKNNNQTGVAEIFSAGIAAVGYASGNGVLQPPPEDLIYPDTNLAERVSWAFGNGSDYYKLVAKPASISQAQQDDIVAAAHDTHGRQTMTHASDIVAYKEAVASKSDGIQHIPDDGLLSACTVAAIKANRQFVTPTMSIFNYGYSNPAVFAFLGRTNSTNATYAHVEENVRILHRAGVPILAGTDAVGRVTPEIDLPFGRTLHGELQLLHSAGLTPLEALRAATVEPAIWHQLSDRGEVRAGKRADLVLLNSNPLLNISNTQDIARIWANGVEVPDVARFG

SEQ ID NO: 25414 - DNA, 6120 bp, Muscodor strobelii; identical to SEQ ID NO: 25408
  misc_feature: SGI EST ID NO. CUFF.60092.1
  misc_feature: Variant of the nucleotide sequence at SEQ ID NO 25412

SEQ ID NO: 25415 - DNA, 861 bp, Muscodor strobelii
  misc_feature: SGI cDNA ID NO. 568674
  misc_feature: Elevated expression when VOC is produced
  misc_feature: Encodes the peptide sequence at SEQ ID NO 25416
atgaagaccaccggtatcgtttccgccctggccctggctggcgccgcctctgccagcaccaaggttgcccgcaaggcctcttaccccacgacgaccattgccaacgtcactgtcatcgacactcccatcgtcagagccgctcgtgagttgattgaggtattcatccccaagcagccctacctgtacaaccatcttatgcgaacatggttgtggggctctgctgccttcaacaacaacgccaccctcaagtctcagatcgatcttgaggtccacgctgttggcactctcctccatgatttgggctgggacatgcgtgagaactctccttgggtcagccagaacctacagttcgaggtcgacagcgccgaaggcgcctacgctttcatcgaccagttcgccgctgacaacaagtgtgccgcctcgtggactcctgaccgcaaggagaaggtttgggatggcatcaccctccaggccaacttcaactacctgcttggcaagtccgtcaaccccaactggatcgcccgcagtgtgttcttcgagttccccggcccccgcaacccccagattcccgaccatgactacgacaccattctcgctgcctaccccaacgattactccttccgtggatccaacgaaacctttacttatctctgcgccaccaagcctaatggaacttatggctctttcatcgagcagttcggtactgcttacgttcccggctacaacgccaccggccaccactcgttcgatcttatcctcgagggtgtcgctggtgaggttgctcagtaccccgatgaggatgcctacactggctctgagctcggcccgggctctgctcctcttttcggctcctccgactaa

SEQ ID NO: 25416 - protein, 286 aa, Muscodor strobelii
  misc_feature: SGI Peptide ID NO. 568674
  misc_feature (28)..(250): NCBI GI: 116200323 Blast Desc: CHGG_08317 [Chaetomium globosum CBS 148.51] gi|88179596|gb|EAQ87064.1| CHGG_08317 [Chaetomium globosum CBS 148.51]
  misc_feature (23)..(250): NCBI GI: 256721693 Blast Desc: NECHADRAFT_44823 [Nectria haematococca mpVI 77-13-4]
  misc_feature (33)..(253): NCBI GI: 116202473 Blast Desc: CHGG_09121 [Chaetomium globosum CBS 148.51] gi|88177639|gb|EAQ85107.1| CHGG_09121 [Chaetomium globosum CBS 148.51]
  misc_feature (28)..(252): NCBI GI: 171681192 Blast Desc: protein product [Podospora anserina] gi|170940554|emb|CAP65782.1| protein product [Podospora anserina]
  misc_feature (18)..(256): NCBI GI: 171693093 Blast Desc: protein product [Podospora anserina] gi|170946495|emb|CAP73296.1| protein product [Podospora anserina]
  misc_feature (32)..(229): NCBI GI: 116204295 Blast Desc: CHGG_10031 [Chaetomium globosum CBS 148.51] gi|88176159|gb|EAQ83627.1| CHGG_10031 [Chaetomium globosum CBS 148.51]
  misc_feature (30)..(232): NCBI GI: 242795716 Blast Desc: conserved [Talaromyces stipitatus ATCC 10500] gi|218719237|gb|EED18657.1| conserved [Talaromyces stipitatus ATCC 10500]
  misc_feature (30)..(252): NCBI GI: 13471098 Blast Desc: mlr0982 [Mesorhizobium loti MAFF303099] gi|14021842|dbj|BAB48453.1| mlr0982 [Mesorhizobium loti MAFF303099]
  misc_feature (32)..(243): NCBI GI: 260460254 Blast Desc: conserved [Mesorhizobium opportunistum WSM2075] gi|259033899|gb|EEW35158.1| conserved [Mesorhizobium opportunistum WSM2075]
  misc_feature (72)..(226): NCBI GI: 116178824 Blast Desc: CHGG_00040 [Chaetomium globosum CBS 148.51] gi|88184337|gb|EAQ91805.1| CHGG_00040 [Chaetomium globosum CBS 148.51]
  misc_feature: Useful for introducing or modulating the production of volatile compounds
MKTTGIVSALALAGAASASTKVARKASYPTTTIANVTVIDTPIVRAARELIEVFIPKQPYLYNHLMRTWLWGSAAFNNNATLKSQIDLEVHAVGTLLHDLGWDMRENSPWVSQNLQFEVDSAEGAYAFIDQFAADNKCAASWTPDRKEKVWDGITLQANFNYLLGKSVNPNWIARSVFFEFPGPRNPQIPDHDYDTILAAYPNDYSFRGSNETFTYLCATKPNGTYGSFIEQFGTAYVPGYNATGHHSFDLILEGVAGEVAQYPDEDAYTGSELGPGSAPLFGSSD

SEQ ID NO: 25417 - DNA, 1427 bp, Muscodor strobelii
  misc_feature: SGI EST ID NO. CUFF.59818.0
  misc_feature: Variant of the nucleotide sequence at SEQ ID NO 25415
ggccgcctcaccacgtttttctcaatgtcagtttccaaatagatgtactaagcgattctgagcctcgcatcggatccatacaccataattagataattaaccatgtctgtgattgtccaaggaataggattaagatcaggcagccaagagatatctgcctacagaagtatataacgatatggcttcctcccattgaacaatactagcatctctggttactcacctcagtcactacctccgacgcaatatactctcagctcctagtcgcccgtttcgatcaagatgaagaccaccggtatcgtttccgccctggccctggctggcgccgcctctgccagcaccaaggttgcccgcaaggcctcttaccccacgacgaccattgccaacgtcactgtcatcgacactcccatcgtcagagccgctcgtgagttgattgaggtattcatccccaagcagccctacctgtacaaccatcttatgcgaacatggttgtggggctctgctgccttcaacaacaacgccaccctcaagtctcagatcgatcttgaggtccacgctgttggcactctcctccatgatttgggctgggacatgcgtgagaactctccttgggtcagccagaacctacagttcgaggtcgacagcgccgaaggcgcctacgctttcatcgaccagttcgccgctgacaacaagtgtgccgcctcgtggactcctgaccgcaaggagaaggtttgggatggcatcaccctccaggccaacttcaactacctgcttggcaagtccgtcaaccccaactggatcgcccgcagtgtgttcttcgagttccccggcccccgcaacccccagattcccgaccatgactacgacaccattctcgctgcctaccccaacgattactccttccgtggatccaacgaaacctttacttatctctgcgccaccaagcctaatggaacttatggctctttcatcgagcagttcggtactgcttacgttcccggctacaacgccaccggccaccactcgttcgatcttatcctcgagggtgtcgctggtgaggttgctcagtaccccgatgaggatgcctacactggctctgagctcggcccgggctctgctcctcttttcggctcctccgactaagcattctatcatcagaacgctcgctcgccatttggcgggcagaagcggtgcttatcgatcataataccatagaataatcttcttgtaaaaagtttctgggataagactgggtactgtcagcggcgcctgaatgagcattggagttgttatgtcatctagcatataaaatattatatacccacgattctcatctgttcatctattgtttcaattttttcacttcggcgacctccaaacatgtgtccgtagtatgtgcaagctatagatctcatagtcaacttgga

SEQ ID NO: 25418 - DNA, 615 bp, Muscodor strobelii
  misc_feature: SGI cDNA ID NO. 568675
  misc_feature: Encodes the peptide sequence at SEQ ID NO 25419
atgaacaaagatcccatactcacattccgggaggaacaaatggatcgacttcggattatggcgccaggaggatttggtcctcatacaaacattattatgaatgagcttatgtggcgagaccactccttcaataatgaccctggcgcagataggaccttgaatctgagaaatggccagcaaattgcaacctacggttacaggctattcaataatcccccagcagaaatagcgagaatcgactatgatctcagagagctagtcgcacgatgtttagccaacaatggccaacagcgaccgacgcttaccgagcttttcgatgttgctgattatcattgtgaacaaggtgatatcgatgctgaggaggcggcttttaacagtcccaacgcgcaggtacaaggatccgccgcatcacaggctcgagcagctcaagacccgacacccccgagtccaacggaacactcggagagaccatctgttggtgatcccgagtccgacgagcttttagagagatttgttcgcaactacattcttgagccttggccgaatgtggacaaatggggaccctattgggaacgttcgcaggtctcggatacgcctacttttattggcttgtga

SEQ ID NO: 25419 - protein, 204 aa, Muscodor strobelii
  misc_feature: SGI Peptide ID NO. 568675
MNKDPILTFREEQMDRLRIMAPGGFGPHTNIIMNELMWRDHSFNNDPGADRTLNLRNGQQIATYGYRLFNNPPAEIARIDYDLRELVARCLANNGQQRPTLTELFDVADYHCEQGDIDAEEAAFNSPNAQVQGSAASQARAAQDPTPPSPTEHSERPSVGDPESDELLERFVRNYILEPWPNVDKWGPYWERSQVSDTPTFIGL

SEQ ID NO: 25420 - DNA, 92 bp, Muscodor strobelii
  misc_feature: SGI EST ID NO. CUFF.59799.0
  misc_feature: Variant of the nucleotide sequence at SEQ ID NO 25418
attatgaatgagcttatgtggcgagaccactccttcaataatgaccctggcgcagataggaccttgaatctgagaaatggccagcaaattgc

SEQ ID NO: 25421 - DNA, 384 bp, Muscodor strobelii
  misc_feature: SGI cDNA ID NO. 568676
  misc_feature: Elevated expression when VOC is produced
  misc_feature: Encodes the peptide sequence at SEQ ID NO 25422
atgcagttctccatcatcgctaatgtcgccttcgccgcagtagcgaagagtgctgcactcaaacccagggatttctcaggctgtagcatcgggcttcagtgtaccgttgcgaatccttcggccgtcggcgaaatactcgtgtacggtgctctcggtaaatggtacagggaaacaggaaagcctgtgaactcgtcgcaactggacttctctcacagcgaatacccctactctgttggctataaagccaacactcttgagagatacgagaccatagacgaactcaaaaaagaacttgatacgtggctcaatacctatttgagaggcgacgataagcccttcgatgatgaggactttttgatcaagaacgtcacttgctctgactaa

SEQ ID NO: 25422 - protein, 127 aa, Muscodor strobelii
  misc_feature: SGI Peptide ID NO. 568676
  misc_feature: Useful for introducing or modulating the production of volatile compounds
MQFSIIANVAFAAVAKSAALKPRDFSGCSIGLQCTVANPSAVGEILVYGALGKWYRETGKPVNSSQLDFSHSEYPYSVGYKANTLERYETIDELKKELDTWLNTYLRGDDKPFDDEDFLIKNVTCSD

SEQ ID NO: 25423 - DNA, 1267 bp, Muscodor strobelii
  misc_feature: SGI EST ID NO. CUFF.59809.0
  misc_feature: Variant of the nucleotide sequence at SEQ ID NO 25421
ccgcaaccctgagttgcattgtacatcggcaatggacacggcaaatcagtctctccactcgatcgcaacagacaatggaaatcgctctgctaattgatccgacaaccaatgcaggattcttgtactatcaggactctagcatgattgtgccatgccgaatacgttagcactgtcctcgacttggaaggttcctactcaagcaagggagctctccatgataccttaagccctgtcggctcttcaaagactgccggcatagctctacttggttaagcgtcgttgtctatatgatacagacttacgtgtaacgtctaattaacttgttcatgttggttcttaattgcagagggccccgcttgcgctcctctgatataaaagctagcaactcgttgcaacagcattgaaatgagcgcttctaacacgctcatgagttttgtggcagcaacaatcgcttcaaattagaaatatgcagttctccatcatcgctaatgtcgccttcgccgcagtagcgaagagtgctgcactcaaacccagggatttctcaggctgtagcatcgggcttcagtgtaccgttgcgaatccttcggccgtcggcgaaatactcgtgtacggtgctctcggtaaatggtacagggaaacaggaaagcctgtgaactcgtcgcaactggacttctctcacagcgaatacccctactctgttggctataaagccaacactcttgagagatacgagaccatagacgaactcaaaaaagaacttgatacgtggctcaatacctatttgagaggcgacgataagcccttcgatgatgaggactttttgatcaagaacgtcacttgctctgactaaatggagaaggcaactcacaaattggaggtctcttagcgtgtcgcaccactatggacaagtctgttaatcgtcgttgttaattgattcagcttacattgagtcttgagcaagtttcgcatatgaatggagacatcatctggtctttgatcactccgttccgaagatatcaggcgttagtgcttaattctagggccctcacgacccaatcctcacgtaccttctgccaagctgccgaattacataacgaacgtctcacggaggtgagactggtaatcgtggaggcttacgaaagtgctgtaaatgctcatgtagggggggtgacaatgggatgactttctacctatcttccgaatgaactggcgaataacgcttatatatatatacacctgaacccctatatcatgctctctagtgcgt

SEQ ID NO: 25424 - DNA, 696 bp, Muscodor strobelii
  misc_feature: SGI cDNA ID NO. 568677
  misc_feature: Encodes the peptide sequence at SEQ ID NO 25425
atgagcgtgactacgcaactcaatgtcgaagcagccattaacgcagctcaacagaacctcaaaggtggctcgagtctcgtcgccgctgggttaagggaagttcacgtacatcatgttcatctcaattcaactaggacttcctctgtgcctgctattggggcgctcgcgggcgagctcgctggagcgctctttgaccggagcgccgaactatggcaacactgggctatcgaagttgatggcatatgtatcgaattgtcgcgacgaagcgacttagaaaagtacacgaagccaaagtactatatcaaagattatttgacggcagatgaatggcgcaagggacgatcgagcgactccgagcatcttgttatctcgaccgtgtcgaggggttatacgagaaaatcgttgcaagagatcaagaatatcgcacacagaatctgggcagaatggcaagcccaatacggcccgaatccttattcgctgacaagccgtaattgtcaagactttgctgatcaggtgctcgaggaaatccttgaggtgaccgatgacgcaacgagtgtagcaacaacacagagcacacgattctcggaagcagtcgacgaagttggcggtgaagtactcgacttcttggaatatgcatatgatggagctagagcgaaagcacggagagctaaatcaagatttggggattggttgtga

SEQ ID NO: 25425 - protein, 231 aa, Muscodor strobelii
  misc_feature: SGI Peptide ID NO. 568677
MSVTTQLNVEAAINAAQQNLKGGSSLVAAGLREVHVHHVHLNSTRTSSVPAIGALAGELAGALFDRSAELWQHWAIEVDGICIELSRRSDLEKYTKPKYYIKDYLTADEWRKGRSSDSEHLVISTVSRGYTRKSLQEIKNIAHRIWAEWQAQYGPNPYSLTSRNCQDFADQVLEEILEVTDDATSVATTQSTRFSEAVDEVGGEVLDFLEYAYDGARAKARRAKSRFGDWL

SEQ ID NO: 25426 - DNA, 2385 bp, Muscodor strobelii
  misc_feature: SGI EST ID NO. CUFF.59861.1
  misc_feature: Variant of the nucleotide sequence at SEQ ID NO 25424
agccggaattcttccaccactttcaagagtgccgcagaatcgttctgggtatttagtatttctttcgtcgggtcgagggtaaagtagtgcaatgccccgttgtacgtgaacgtgattacgggaatgagaaggtggcagaggcagtaccacaccttgatagccgtggagattgaactgcgatgggcgtgcgtttctgctaatcgggttgcctttgatgactctgaactgggagccataatgactttttggtcatgtccgcaagaaagcttggggtgttaatgtcgtgctgggaatacgatcaatatttcgaaattgaaatgattgcaagttgcagactattaatcgggactatccgcacacaaatcttctgcctaacgacaaatataacacaactgcgaagcagcgctaatgcgaaaatcgcttctgatagttacatatatgattgtcggcgataatcatcggtgatactagacttgagggcggatgcagctgttttgttgatgattgacgcggttgttgtgaaggtgtcttcgttagaaatagtactctaaactgagtgatggttccatggttcagagtattgtatgattgtgactaattcatgggttctgtgtccgagtggagagcaacggaagccgactattctacaatttctgtccaggctgcaaatattctgaataatccaagccacgttgtcgtaaggcttagcacaactgtcggttgtcgataattatacaacaaaagcaaagcatagccacgttgattaccattcgagaaggaactcgcgcgcagacgaagaggtggcgagtcttaggcctcttggctccaatgatcattggacagccctggttcgcctgacaatcctgatgttctgaatgcagcacgctctgctagaactggcaggacaggggtggtgccacccaattatactacaatgatgaggctcgtcgggttcagctgacaaaccttcgggcgcttgggggctgagaatcggaggcgtacaattcttcgctatggatagattcaggcagctatcatgtccaatactacgatgaagcagacggcgttatgcgatataacccatttatttcagccgcgttaagtccgtatctctgggatatatatgactcgatgcgctcttgtgaccatgagaatcgtatgctatggacggcggttagcatcttctattaccattcgtcattatatagggaattaccaacttagcatctcaccatgagcgtgactacgcaactcaatgtcgaagcagccattaacgcagctcaacagaacctcaaaggtggctcgagtctcgtcgccgctgggttaagggaagttcacgtacatcatgttcatctcaattcaactaggacttcctctgtgcctgctattggggcgctcgcgggcgagctcgctggagcgctctttgaccggagcgccgaactatggcaacactgggctatcgaagttgatggcatatgtatcgaattgtcgcgacgaagcgacttagaaaagtacacgaagccaaagtactatatcaaagattatttgacggcagatgaatggcgcaagggacgatcgagcgactccgagcatcttgttatctcgaccgtgtcgaggggttatacgagaaaatcgttgcaagagatcaagaatatcgcacacagaatctgggcagaatggcaagcccaatacggcccgaatccttattcgctgacaagccgtaattgtcaagactttgctgatcaggtgctcgaggaaatccttgaggtgaccgatgacgcaacgagtgtagcaacaacacagagcacacgattctcggaagcagtcgacgaagttggcggtgaagtactcgacttcttggaatatgcatatgatggagctagagcgaaagcacggagagctaaatcaagatttggggattggttgtgatggtgatctagctcttgttcgtgcggtgttggctttcgtgttgattattatgataccctggtcgttgactgtatgaaagtgtagatggtgttgatcttaacctaatgctcattaaagcgcgtaaggcagcgtatactacgtattctgctttaatcaaaatccgaaatagattgtgtcacgaagtagcctacttattcgacctcagagttgtgaggcaatacgccatgctcggtggcacctgatatagaggttcaagagtgtatatatatggtgatcatccgcaagttaattcggtagacagtcagagtaacctcaattgctattcccttctaaatgatcatctgcagcacttccacacgtttcctacgatcacgagtgtcttacctccgtgaaagattgaatcaaactccgaatgataatcgggctatatattcggcatactaggtaatatcagag

SEQ ID NO: 25427 - DNA, 1167 bp, Muscodor strobelii
  misc_feature: SGI cDNA ID NO. 568678
  misc_feature: Reduced expression when VOC is produced
  misc_feature: Encodes the peptide sequence at SEQ ID NO 25428
atggcgtctcgtagaaagaacgccaaaaagtcagcaaatgacctagctcgtaaggccgaagaagctgagtggcagcgtgaagctgaacgtgaacgcgcattccgaaagaaactcagggacagtgtgcggttcagggaccatctatttgcccaaccctcctcatatactactccaggtgatgaattcgattccaacaccacagtaacactttcgtctggtaccgaccccacgtattcgacttcgtccatccgcaatagcgacatggagtcttctatcgccactcagttccctcccttgaagatggccgagcgtgcgaagcttaccgcgaccaatgaggaaacacttgaccattcatgtgaaaatatcttttcgtatgacgtcccggattattatcgggattatcaacccacagtcgcgactgagcgctcgtctcgcctcacgaccatgcccgcatcttcgtctttgagcaaagcctctcacgaacctgtcatgcttactctggccactccctgcggcaacgcagaccatatgaagccattcgtcagcaatgagcgtgccctagatcatttgttcgctaaaccgtcatcgtacgacctccccgaatatcatctccctgtcgccaccgactactcatcgtcaatgacacccgcgtcctcgctcaacatcacccaacctaatcattacaacattgccgctcgggtttcaactcccagcactatttccacttcggcttttgacatcggtcaagctgaaacagccgtgcgaatacctaatcgtcttggaaaaagagccagatcatctcatgatgagctgtctgcgaagaagatccgatctgtcacctccagtaatagtcgtgtgccatcaaaatcagcgggtcgtgataatgcccatgctttgatccctgaagacacggatgacgttgagtatctctataccaagcctgtcaaacgaagtggtgacaacgtcactattgacagacctgtcaaatcctcaacccgtcgccgcactgctagccagcaaccagtccattctacgaagcatagcaacgaccatcgagatttgagaattgaaggatcgctttacaatgtcatagaggcacgcaaaagcggccagatctcccttcggggcgagcgtccttggtcaatgagcgaccttgagaaatactag

SEQ ID NO: 25428 - protein, 388 aa, Muscodor strobelii
  misc_feature: SGI Peptide ID NO. 568678
  misc_feature: Useful for introducing or modulating the production of volatile compounds
MASRRKNAKKSANDLARKAEEAEWQREAERERAFRKKLRDSVRFRDHLFAQPSSYTTPGDEFDSNTTVTLSSGTDPTYSTSSIRNSDMESSIATQFPPLKMAERAKLTATNEETLDHSCENIFSYDVPDYYRDYQPTVATERSSRLTTMPASSSLSKASHEPVMLTLATPCGNADHMKPFVSNERALDHLFAKPSSYDLPEYHLPVATDYSSSMTPASSLNITQPNHYNIAARVSTPSTISTSAFDIGQAETAVRIPNRLGKRARSSHDELSAKKIRSVTSSNSRVPSKSAGRDNAHALIPEDTDDVEYLYTKPVKRSGDNVTIDRPVKSSTRRRTASQQPVHSTKHSNDHRDLRIEGSLYNVIEARKSGQISLRGERPWSMSDLEKY

SEQ ID NO: 25429 - DNA, 1698 bp, Muscodor strobelii
  misc_feature: SGI EST ID NO. CUFF.59946.1
  misc_feature: Variant of the nucleotide sequence at SEQ ID NO 25427
gcacaaagccccgaatctcttctgcgtggtctcgatcttatatcaacaccaagttcagccccaccatttgcacaaccacacaaacaccttaaatcccttcatcatacgaatctttctccgacatccggttctcgcaagaaccaacaatcgcgagttgcaaccatggcgtctcgtagaaagaacgccaaaaagtcagcaaatgacctagctcgtaaggccgaagaagctgagtggcagcgtgaagctgaacgtgaacgcgcattccgaaagaaactcagggacagtgtgcggttcagggaccatctatttgcccaaccctcctcatatactactccaggtgatgaattcgattccaacaccacagtaacactttcgtctggtaccgaccccacgtattcgacttcgtccatccgcaatagcgacatggagtcttctatcgccactcagttccctcccttgaagatggccgagcgtgcgaagcttaccgcgaccaatgaggaaacacttgaccattcatgtgaaaatatcttttcgtatgacgtcccggattattatcgggattatcaacccacagtcgcgactgagcgctcgtctcgcctcacgaccatgcccgcatcttcgtctttgagcaaagcctctcacgaacctgtcatgcttactctggccactccctgcggcaacgcagaccatatgaagccattcgtcagcaatgagcgtgccctagatcatttgttcgctaaaccgtcatcgtacgacctccccgaatatcatctccctgtcgccaccgactactcatcgtcaatgacacccgcgtcctcgctcaacatcacccaacctaatcattacaacattgccgctcgggtttcaactcccagcactatttccacttcggcttttgacatcggtcaagctgaaacagccgtgcgaatacctaatcgtcttggaaaaagagccagatcatctcatgatgagctgtctgcgaagaagatccgatctgtcacctccagtaatagtcgtgtgccatcaaaatcagcgggtcgtgataatgcccatgctttgatccctgaagacacggatgacgttgagtatctctataccaagcctgtcaaacgaagtggtgacaacgtcactattgacagacctgtcaaatcctcaacccgtcgccgcactgctagccagcaaccagtccattctacgaagcatagcaacgaccatcgagatttgagaattgaaggatcgctttacaatgtcatagaggcacgcaaaagcggccagatctcccttcggggcgagcgtccttggtcaatgagcgaccttgagaaatactagttatcttgactcagccttatttccgccgctgagcaattttgagttctgtttaagataaaaacagtgtatatggaaaatttctagcgaaaaatggccttgggaaactgaagagtttattgaggagatggtaatttggctagtcagagaagatggctcgcacaccgcgtctatcaagactctagggagattgagaaagaaaacaaaagcccttgtattggcctgtagattattactaaacttagattaacaattgtctacagtatcagttctgtcgtcttctccattgtgatctgttcatgaaagcctcatagtcaccaccttcccacgttgatccttctgccatgccggctcacccagatccgagtgcag

SEQ ID NO: 25430 - DNA, 1017 bp, Muscodor strobelii
  misc_feature: SGI cDNA ID NO. 568679
  misc_feature: Reduced expression when VOC is produced
  misc_feature: Encodes the peptide sequence at SEQ ID NO 25431
atgacacttcgtggaaagatgttcaagctgtcagcagatgagcgagccagcgagtccgagctcgctgagttggatcgagaattcgccgagagcaaacgtgctttacagaaagaactcagagacgcgataaagaagggcgtgagacttattgaccatctcttcgctaaaccctcttcatatggcctctcagatgatgattttaagtccgccatcacaccagaactttcatctagccctacatccgtgccattgagttcaatcgccagcgatgacgacactgactcgactatggccactctggtctcatccaatgagaaagttgagcgtgcggtgccgtccatgggcaacaagagagcctttgaccttgaccatctggacacgcagcctcccgtcccatctacaacccgagtttgtttttgtgggatgactcatcacattccatcccgcggcacgactccgccctcgtcatcagctacaaggaaaacctcggaggaatcgcccaagcctactcgagcttccaacacttataccactgccacccatttcccatctcgcaacaccgctttcgtcttgcctgcaacaacaggccaagttgcaccagactcacatatatccagtcgtcttggcaagcgagatggaccacgcgacgatgagcggattgcgaagaagcttcgaccagctggcagcaatcgtgtgccatatgtcccatcgaattatggttccacgaatcacctttccgataatgactcagacgaccttgagtatctttacaccaaacgggtcaaccgagatcgcaacctgaacagtgactatctcactaaccgccaatcggtcaaatcgccaatcaatcgccgcaatgccaaccaacccttagctatctgcacagatcgcaacaacaaagaattcgatttgagaatcgagggacccctatctgttgttcaacaggcacgcgaatccggacagatttctctccgaggagagcgaccatggtctatcagtgacattcctcaagattga

SEQ ID NO: 25431 - protein, 338 aa, Muscodor strobelii
  misc_feature: SGI Peptide ID NO. 568679
  misc_feature: Useful for introducing or modulating the production of volatile compounds
MTLRGKMFKLSADERASESELAELDREFAESKRALQKELRDAIKKGVRLIDHLFAKPSSYGLSDDDFKSAITPELSSSPTSVPLSSIASDDDTDSTMATLVSSNEKVERAVPSMGNKRAFDLDHLDTQPPVPSTTRVCFCGMTHHIPSRGTTPPSSSATRKTSEESPKPTRASNTYTTATHFPSRNTAFVLPATTGQVAPDSHISSRLGKRDGPRDDERIAKKLRPAGSNRVPYVPSNYGSTNHLSDNDSDDLEYLYTKRVNRDRNLNSDYLTNRQSVKSPINRRNANQPLAICTDRNNKEFDLRIEGPLSVVQQARESGQISLRGERPWSISDIPQD

SEQ ID NO: 25432 - DNA, 1678 bp, Muscodor strobelii
  misc_feature: SGI EST ID NO. CUFF.59830.0
  misc_feature: Variant of the nucleotide sequence at SEQ ID NO 25430
cgacctttcagtgggcctgacattcaatctatccctcagcaatgattcactggtctaccattcactggtcaatgattcactgatcaccattgaattgaatgacgtctacccactgttgctacggacaacaaggtcacctgactttcctggattttccatataaatacctgcccacccccagattttggtccgacatttttcattctttcctccttcttcatcatcagacttgtgtgcgcttgacaacagtcctgttcacagcgattttgatttttcccaaccacaagtcctccaccacccataagcaaccgcgtcaaaacgcctttggtcccctgctcaattgataattcctgcttagtccttttccaaaacgcgcttaggcactactgctcgcaaagcgcaaccatgacacttcgtggaaagatgttcaagctgtcagcagatgagcgagccagcgagtccgagctcgctgagttggatcgagaattcgccgagagcaaacgtgctttacagaaagaactcagagacgcgataaagaagggcgtgagacttattgaccatctcttcgctaaaccctcttcatatggcctctcagatgatgattttaagtccgccatcacaccagaactttcatctagccctacatccgtgccattgagttcaatcgccagcgatgacgacactgactcgactatggccactctggtctcatccaatgagaaagttgagcgtgcggtgccgtccatgggcaacaagagagcctttgaccttgaccatctggacacgcagcctcccgtcccatctacaacccgagtttgtttttgtgggatgactcatcacattccatcccgcggcacgactccgccctcgtcatcagctacaaggaaaacctcggaggaatcgcccaagcctactcgagcttccaacacttataccactgccacccatttcccatctcgcaacaccgctttcgtcttgcctgcaacaacaggccaagttgcaccagactcacatatatccagtcgtcttggcaagcgagatggaccacgcgacgatgagcggattgcgaagaagcttcgaccagctggcagcaatcgtgtgccatatgtcccatcgaattatggttccacgaatcacctttccgataatgactcagacgaccttgagtatctttacaccaaacgggtcaaccgagatcgcaacctgaacagtgactatctcactaaccgccaatcggtcaaatcgccaatcaatcgccgcaatgccaaccaacccttagctatctgcacagatcgcaacaacaaagaattcgatttgagaatcgagggacccctatctgttgttcaacaggcacgcgaatccggacagatttctctccgaggagagcgaccatggtctatcagtgacattcctcaagattgaggttcgccaaacgctcttttccgttgagttgtccatcttgacaatcgtccaagacccaacgagtgtataaggcaaagtgtggtacttaatatggtctcgggaaattgggaaggcgttcaggatataatagaggaacataagcgaataattttctgtagtatagcaaactagctcctagattgtgtatattaaggctacagggaatttgagggaagaacaatttgcgcattaagggttcaggaagtatgatagagca

SEQ ID NO: 25433 - DNA, 1305 bp, Muscodor strobelii
  misc_feature: SGI cDNA ID NO. 568680
  misc_feature: Encodes the peptide sequence at SEQ ID NO 25434
atgccgccccgccgaagggtcgccgagctggtgaataccatgaccgccaaagataaacatcttgctgtatccgattatcggggtccgggaatggccatgcagtcgaagtcgtcgacaaacgtcggagtccccgaccagtctttcgctcatcctggcgatgtgaacaagttcgcagtgtctgcttcacctgctacctcattgctcaaaccgcccactcgccttgctatgacctcctcgccaatcgacctcacgtcagactcaatcgctgagatggcttcgactacgcccgtcggcacagctaagacagatgtcctagctcacgaccatctggttgtgcacactggtgatgcggacagttccggaccttcttctccatctactggcttattcggcacaccaactactctggctaaggccccatcatcagtcaatgccgcgccagactcacgtaccaagatgccttcttcctcgcaaattgccacttctttgcctatttccgagattgcgccttcaagctccaatcgcaaaagaatgagatcgccagataatgacgatgaatgctacatcaccaacatacgcccggccgcacctattattgtagatgcggacaaaattacagaagccgagaaagtctacggtaacaagaaacacaaattctgcgaggagtctgatgaacttgttacgaagacacagaagtgcagcatcccgaagacatcaccattcccaaagaattgcaccacccaacagagaccaggcgacctagagaagactaataatcgcaacacgaagacgattcgtgaggatccttttgctggcgatgaattcactcatgctaccagaactactccgaccgtgggaaggatcgaaagtgacagccaacccgctcaggaatcagcacctataaacaatgtctatgacccggaatcatgcctgcgtgataacagccctgttgtgtatactatccaaaacggagtcatctctgtaactcattcgtctggtagtgagaactcgcagcccactcctaccacgcatatgtcaccatataccaaatcactcgagcaacgagtgaagcaactggaatcagacgtcaagggtctgaagcagagcctaggaagaacgaatgagcagattcgtatgctatcaggaattcaccgtcgcgattatcagccagacagactcagccaagcacgaaagttaatcacagagcctcaacgacatctctctggcatcgccgctcttcgtaacgagggagataaccgtgctactaaaggttccatgccaaccgatgctcaggagctagactag

SEQ ID NO: 25434 - protein, 434 aa, Muscodor strobelii
  misc_feature: SGI Peptide ID NO. 568680
MPPRRRVAELVNTMTAKDKHLAVSDYRGPGMAMQSKSSTNVGVPDQSFAHPGDVNKFAVSASPATSLLKPPTRLAMTSSPIDLTSDSIAEMASTTPVGTAKTDVLAHDHLVVHTGDADSSGPSSPSTGLFGTPTTLAKAPSSVNAAPDSRTKMPSSSQIATSLPISEIAPSSSNRKRMRSPDNDDECYITNIRPAAPIIVDADKITEAEKVYGNKKHKFCEESDELVTKTQKCSIPKTSPFPKNCTTQQRPGDLEKTNNRNTKTIREDPFAGDEFTHATRTTPTVGRIESDSQPAQESAPINNVYDPESCLRDNSPVVYTIQNGVISVTHSSGSENSQPTPTTHMSPYTKSLEQRVKQLESDVKGLKQSLGRTNEQIRMLSGIHRRDYQPDRLSQARKLITEPQRHLSGIAALRNEGDNRATKGSMPTDAQELD

SEQ ID NO: 25435 - DNA, 1296 bp, Muscodor strobelii
  misc_feature: SGI cDNA ID NO. 568681
  misc_feature: Reduced expression when VOC is produced
  misc_feature: Encodes the peptide sequence at SEQ ID NO 25436
atggcccctcgccgcaagaccggcagaaaagccgacgctgaagcctttgcccgtgaggctgaatgggatcagttcaacgaacgtgcggcagaggtcaagcatttctcaacgagtgtgagagctttggaccatctgttcgccaggccggccgactatgatgccagtagtcgtagatataccaccccgccagatgttaaccatacatccatcactaccaccgccccggccctccgcccatcggtcaaagaggccgatcactcttcaattactcgggtctcgtcagataaggttacggaccggccaagatcttacgttggcgatgagaaagcttcagcgcacttattctgtagaccctccgactatccttgccctggatataatgacaatgtcgagcttcagtcggagcaccccaacgtcgagaacatcacccatctcactatggccactcggatttcaaatgatgagaaactaggacgagcccagccattcgtcagcgacaaaagagctctagaccacctgtttgctagaccttcattgtacgatggacatggatataagcccaacgtcgactcgcaatcttcatctgcgtacacaaccgcgcttccttcttctgtgagagaaccagtctcgcccgtcaccagtgacccatcttacggtgtcgacacgacgtcacttgctatctcaaactacacgagatcagttcatggcactagccggcttggcaaacgttccagatcagcactggatgaggattacgaacaagagagcgacgactactccgtcaagaggcccacgacaaacggcgcacagtatgccaccaggggtccgacgcgggctacgagcaaagcttcgtgcagtcgtgtagacgaagacgctcctgatgagcctgaggggtttatcgccaagaaatggacagctatcaaacatattgctccccgattgccctccacaaacagcaatccgatgagcctagacgcagacagtgatacggacgatgtagaatatctgtacacgaagccagttctcaagcgtcacgatgctgtcagccgaagaacgtcgacgaagtctacgaagcctacagagcctgttaagcctgtcagtcctgcaaagcctagcaagacgagaaatcgccgtcatcagtcttatctaaaatcacccgtctcgcccgttgagaaaccgaaaagggatctgcatgtggagggtccactctcgaatgtggtagaggctcgtaagactggcaaaatctccctgcgcggcgaaaggccctggtccatggaagatctaaatggcttttga

SEQ ID NO: 25436 - protein, 431 aa, Muscodor strobelii
  misc_feature: SGI Peptide ID NO. 568681
  misc_feature: Useful for introducing or modulating the production of volatile compounds
MAPRRKTGRKADAEAFAREAEWDQFNERAAEVKHFSTSVRALDHLFARPADYDASSRRYTTPPDVNHTSITTTAPALRPSVKEADHSSITRVSSDKVTDRPRSYVGDEKASAHLFCRPSDYPCPGYNDNVELQSEHPNVENITHLTMATRISNDEKLGRAQPFVSDKRALDHLFARPSLYDGHGYKPNVDSQSSSAYTTALPSSVREPVSPVTSDPSYGVDTTSLAISNYTRSVHGTSRLGKRSRSALDEDYEQESDDYSVKRPTTNGAQYATRGPTRATSKASCSRVDEDAPDEPEGFIAKKWTAIKHIAPRLPSTNSNPMSLDADSDTDDVEYLYTKPVLKRHDAVSRRTSTKSTKPTEPVKPVSPAKPSKTRNRRHQSYLKSPVSPVEKPKRDLHVEGPLSNVVEARKTGKISLRGERPWSMEDLNGF

SEQ ID NO: 25437 - DNA, 1910 bp, Muscodor strobelii
  misc_feature: SGI EST ID NO. CUFF.59855.0
  misc_feature: Variant of the nucleotide sequence at SEQ ID NO 25435
gcggaagtagccacagtcacatgaccctcctgtatataaatacatgtgcactccctcgaaagaattccgatcctccatctcttctactactttctcatcctcacgctacccgcacatctactcaagtcacctttgcgagtaatttcaacaacccttaccccttgctcttccacgattgacatcttatcaataatttctaccaccgacaatttccaggcgctttgcgtgatcatggcccctcgccgcaagaccggcagaaaagccgacgctgaagcctttgcccgtgaggctgaatgggatcagttcaacgaacgtgcggcagaggtcaagcatttctcaacgagtgtgagagctttggaccatctgttcgccaggccggccgactatgatgccagtagtcgtagatataccaccccgccagatgttaaccatacatccatcactaccaccgccccggccctccgcccatcggtcaaagaggccgatcactcttcaattactcgggtctcgtcagataaggttacggaccggccaagatcttacgttggcgatgagaaagcttcagcgcacttattctgtagaccctccgactatccttgccctggatataatgacaatgtcgagcttcagtcggagcaccccaacgtcgagaacatcacccatctcactatggccactcggatttcaaatgatgagaaactaggacgagcccagccattcgtcagcgacaaaagagctctagaccacctgtttgctagaccttcattgtacgatggacatggatataagcccaacgtcgactcgcaatcttcatctgcgtacacaaccgcgcttccttcttctgtgagagaaccagtctcgcccgtcaccagtgacccatcttacggtgtcgacacgacgtcacttgctatctcaaactacacgagatcagttcatggcactagccggcttggcaaacgttccagatcagcactggatgaggattacgaacaagagagcgacgactactccgtcaagaggcccacgacaaacggcgcacagtatgccaccaggggtccgacgcgggctacgagcaaagcttcgtgcagtcgtgtagacgaagacgctcctgatgagcctgaggggtttatcgccaagaaatggacagctatcaaacatattgctccccgattgccctccacaaacagcaatccgatgagcctagacgcagacagtgatacggacgatgtagaatatctgtacacgaagccagttctcaagcgtcacgatgctgtcagccgaagaacgtcgacgaagtctacgaagcctacagagcctgttaagcctgtcagtcctgcaaagcctagcaagacgagaaatcgccgtcatcagtcttatctaaaatcacccgtctcgcccgttgagaaaccgaaaagggatctgcatgtggagggtccactctcgaatgtggtagaggctcgtaagactggcaaaatctccctgcgcggcgaaaggccctggtccatggaagatctaaatggcttttgacgcagacaataaatgataaaggctcatatggatcagattggcattcgtgtcaccggccaatttagtcaggaaaggatgatcatttgttatacacgagatcattcgtaagatgcgacaatagcattgagtttcttttgtttcagaaaaagcgcatacagattgttgttttcttttgtctggatgggtcactggtagtgcattggttatcacgcgttttgtggcacaaggtgcagaataaactcattcatgaggtatttgagggggcttgtatgtttgcgttattaatcgcttggtgtttgatagcagagaaagcctacacggcatagcaaagttagttcaaatataattcggtcgcctcatttacacagttttgcagtttgggt

SEQ ID NO: 25438 - DNA, 222 bp, Muscodor strobelii
  misc_feature: SGI cDNA ID NO. 568682
  misc_feature: Encodes the peptide sequence at SEQ ID NO 25439
atgcatgataaaaaccttgacgacaagaccaagaacgacacacttgttacaactactcaggagcccgacatcaagaagcagaagactcgcacttattctgacctgtccgaggacaccgatgtcaagaaagaggagctgctcaaacacaatagttttcgccgaggcgcacatcgacgaatctactcacagcatcgtatccagatcgacctcggcgtacgttga

SEQ ID NO: 25439 - protein, 73 aa, Muscodor strobelii
  misc_feature: SGI Peptide ID NO. 568682
MHDKNLDDKTKNDTLVTTTQEPDIKKQKTRTYSDLSEDTDVKKEELLKHNSFRRGAHRRIYSQHRIQIDLGVR

SEQ ID NO: 25440 - DNA, 2514 bp, Muscodor strobelii
  misc_feature: SGI cDNA ID NO. 568683
  misc_feature: Elevated expression when VOC is produced
  misc_feature: Encodes the peptide sequence at SEQ ID NO 25441
atggcttctcttggtggtaaccttttaccattgacccccgagctcaaaatctatcttgccggaacaggggtattgctgctcgttgggatatgcttttcgactctcttgataaaccaaaataaggatactaagaatccaacacttcttcagtctctatggctatttttctattcctgcttcttgaagccacatgatggcgatagcaagggtacccaacaggacgccttagagagcttctacaagaagcaggccggtgcgtatgatgcgacgaggaaggctctgttaaaggggcgtgaggatatgcttgctgttaccgctgctcagctcgcttatagggtgaagacggagataaaagattcgaggaacacgaagaagatctgggttgacattggaggaggtactgggtggaacattgaggctatgtcccaatttgtcgacgttccctcgttctttgatagcgtgtatctagtcgatttctcgccatctttgtgcgaagtcgctcggaagaggttcatgagactgggctggaggaacgtcaaggttgtctgtcaagatgcgaggaaattccatcttgaagaccacgaacctgttcttcgcggtggtcgtcctcgctcgcccgatgccagctattcctcccgcgagcagcctcgacatgccggtgctgatcttgtcacaatgtcttatagcttgtcaatgattccggactattactccgttgttgactcggtgtcatctttgctaagccctgagggcgtgattggtgtcgttgacttctatgtccaatctcaagtcgatgtcagcttccgaaattacacgggcggtcttattgatcgtcacgtgaatttcttgggtaggactttctggcgcgcctggttcgacattgacagagtcgctcttgagcctggccgtagagactaccttgaatatcgttttggtacaatcctcaatatcaatactcgcaactatgtgttgggtgcaataccttactacatttggcttggagctcgtaagcagcctcaatcgtccgctcttccacacgaaattgtggagaaggtcgatgctcttgtcactgagtctccttatctctatcctgcaaatcactcccaggttttgtccaaggccgcacaactggcctcgccggaagttcgatctaaagccttcgatgctgccattgtcaatctttcaacgaacctcccattgccttccttcttctatcagaaccatcactatcgcatctactacgacgaccaactgaagaagcatacccagttcaacaatgaatacatctatgcttttacctgggaggacactcgtgtagatgagcgcatcttgaagctcaagtctgatgatgtggttctcgcaatcaccagcgccggtgacaacattctttcttatgctttgcagagtcctgctcgagttcatgccgtggatttgaaccctacacaaaaccatttgcttgagctcaaggcggcggcttaccagtctcttggatacgaagacttttggaagatattcggtgaaggcaagcattccgatttccggtccctactcgtctccaagatgtcaccccatctatcgagccgcgcctttcagtactggctgagcaaccatcgcatcttcactaagagtcaaggtggtctctatgacactggcggctccaagcatggtattcgtatcttccgctggatcactcaagtctttggatgccgggctgcagtcaaggaccttcttgcagcgaagactctcaacgagcaacgcgaaatatggcgcaatcgcattcgacccgctcttctctctcgcatcgtctccaaatttgtcgtgagtcaggagtcgttcctctggactgctctcggtgtgcccaggaaccagcttgccatccttgaagcagatcatgctgtttcgcctgcagttatcggaccaactccaacagcaaaaaacactcggtcgcatgcaatctgggagtacatggtgaacaccttagaccccatggttgagacaacacatattgctactgataacccatactatctcgtgtgcctagacggcaagttctcgcgacaatgtcacccagattacttatcaccgaacgctcatgcacgactctcgaagcccaatgcccttgacaatctgcgtatccacaccgacgagatcgaagaagtgttagctcgtatcacaccgggcactctaaccgtcgccgtcgtcatggacagtatggactggtttgatcccggatcagacgcagcgaagtcacagatcactaagcttaaccgcgcgttgaaaatgggtgggcgagtcatgttgcgctctgctggtctcaaaccgtggtatctgaaggagttcgagaaactcgggttttcggccaagtgtcatggatctcgtgaggacggggcttgtattgatcgcgtgaatatgtatgcttcttgctggatcttgacgaagaaggaggggctggcaccgcctacacccgagatggagtctgttggtggtggggaaatggagtccctgcagctgtag

SEQ ID NO: 25441 - protein, 837 aa, Muscodor strobelii
  misc_feature: SGI Peptide ID NO. 568683
  misc_feature (128)..(193): Pfam Id: PF08241 Pfam Desc: Methyltransferase domain
  misc_feature (1)..(837): NCBI GI: 46107718 Blast Desc: FG00742.1 [Gibberella zeae PH-1]
  misc_feature (19)..(837): NCBI GI: 256734770 Blast Desc: [Nectria haematococca mpVI 77-13-4]
  misc_feature (1)..(837): NCBI GI: 238837532 Blast Desc: conserved [Microsporum canis CBS 113480]
  misc_feature (1)..(833): NCBI GI: 261355152 Blast Desc: conserved [Verticillium albo-atrum VaMs.102]
  misc_feature (1)..(835): NCBI GI: 255950996 Blast Desc: Pc22g23740 [Penicillium chrysogenum Wisconsin 54-1255] gi|211593282|emb|CAP99662.1| Pc22g23740 [Penicillium chrysogenum Wisconsin 54-1255]
  misc_feature (38)..(837): NCBI GI: 154320987 Blast Desc: BC1G_01368 [Botryotinia fuckeliana B05.10] gi|150851906|gb|EDN27098.1| BC1G_01368 [Botryotinia fuckeliana B05.10]
  misc_feature (1)..(831): NCBI GI: 171695198 Blast Desc: protein product [Podospora anserina] gi|170947841|emb|CAP60005.1| protein product [Podospora anserina]
  misc_feature (12)..(817): NCBI GI: 85118249 Blast Desc: NCU03032 [Neurospora crassa OR74A] gi|28927226|gb|EAA36182.1| conserved [Neurospora crassa OR74A] gi|38566962|emb|CAE76263.1| related to 3-amino-3-carboxypropyl
  misc_feature (16)..(825): NCBI GI: 145613844 Blast Desc: MGG_01330 [Magnaporthe grisea 70-15] gi|145020854|gb|EDK04983.1| MGG_01330 [Magnaporthe grisea 70-15]
  misc_feature (5)..(821): NCBI GI: 121715558 Blast Desc: conserved [Aspergillus clavatus NRRL 1] gi|119403545|gb|EAW13962.1| conserved [Aspergillus clavatus NRRL 1]
  misc_feature: Useful for introducing or modulating the production of volatile compounds
MASLGGNLLPLTPELKIYLAGTGVLLLVGICFSTLLINQNKDTKNPTLLQSLWLFFYSCFLKPHDGDSKGTQQDALESFYKKQAGAYDATRKALLKGREDMLAVTAAQLAYRVKTEIKDSRNTKKIWVDIGGGTGWNIEAMSQFVDVPSFFDSVYLVDFSPSLCEVARKRFMRLGWRNVKVVCQDARKFHLEDHEPVLRGGRPRSPDASYSSREQPRHAGADLVTMSYSLSMIPDYYSVVDSVSSLLSPEGVIGVVDFYVQSQVDVSFRNYTGGLIDRHVNFLGRTFWRAWFDIDRVALEPGRRDYLEYRFGTILNINTRNYVLGAIPYYIWLGARKQPQSSALPHEIVEKVDALVTESPYLYPANHSQVLSKAAQLASPEVRSKAFDAAIVNLSTNLPLPSFFYQNHHYRIYYDDQLKKHTQFNNEYIYAFTWEDTRVDERILKLKSDDVVLAITSAGDNILSYALQSPARVHAVDLNPTQNHLLELKAAAYQSLGYEDFWKIFGEGKHSDFRSLLVSKMSPHLSSRAFQYWLSNHRIFTKSQGGLYDTGGSKHGIRIFRWITQVFGCRAAVKDLLAAKTLNEQREIWRNRIRPALLSRIVSKFVVSQESFLWTALGVPRNQLAILEADHAVSPAVIGPTPTAKNTRSHAIWEYMVNTLDPMVETTHIATDNPYYLVCLDGKFSRQCHPDYLSPNAHARLSKPNALDNLRIHTDEIEEVLARITPGTLTVAVVMDSMDWFDPGSDAAKSQITKLNRALKMGGRVMLRSAGLKPWYLKEFEKLGFSAKCHGSREDGACIDRVNMYASCWILTKKEGLAPPTPEMESVGGGEMESLQL

SEQ ID NO: 25442 - DNA, 2899 bp, Muscodor strobelii
  misc_feature: SGI EST ID NO. CUFF.60080.0
  misc_feature: Variant of the nucleotide sequence at SEQ ID NO 25440
caccaattttcaatactttcaacactgtgagatcaatttcaacattacactctccattcatagacatgagagagtaccatggcttctcttggtggtaaccttttaccattgacccccgagctcaaaatctatcttgccggaacaggggtattgctgctcgttgggatatgcttttcgactctcttgataaaccaaaataaggatactaagaatccaacacttcttcagtctctatggctatttttctattcctgcttcttgaagccacatgatggcgatagcaagggtacccaacaggacgccttagagagcttctacaagaagcaggccggtgcgtatgatgcgacgaggaaggctctgttaaaggggcgtgaggatatgcttgctgttaccgctgctcagctcgcttatagggtgaagacggagataaaagattcgaggaacacgaagaagatctgggttgacattggaggaggtactgggtggaacattgaggctatgtcccaatttgtcgacgttccctcgttctttgatagcgtgtatctagtcgatttctcgccatctttgtgcgaagtcgctcggaagaggttcatgagactgggctggaggaacgtcaaggttgtctgtcaagatgcgaggaaattccatcttgaagaccacgaacctgttcttcgcggtggtcgtcctcgctcgcccgatgccagctattcctcccgcgagcagcctcgacatgccggtgctgatcttgtcacaatgtcttatagcttgtcaatgattgtaagttcactaaataggctcgacggtgaggatacgaatttctaaccagcaaccagccggactattactccgttgttgactcggtgtcatctttgctaagccctgagggcgtgattggtgtcgttgacttctatgtccaatctcaagtcgatgtcagcttccgaaattacacgggcggtcttattgatcgtcacgtgaatttcttgggtaggactttctggcgcgcctggttcgacattgacagagtcgctcttgagcctggccgtagagactaccttgaatatcgttttggtacaatcctcaatatcaatactcgcaactatgtgttgggtgcaataccttactacatttggcttggagctcgtaagcagcctcaatcgtccgctcttccacacgaaattgtggagaaggtcgatgctcttgtcactgagtctccttatctctatcctgcaaatcactcccaggttttgtccaaggccgcacaactggcctcgccggaagttcgatctaaagccttcgatgctgccattgtcaatctttcaacgaacctcccattgccttccttcttctatcagaaccatcactatcgcatctactacgacgaccaactgaagaagcatacccagttcaacaatgaatacatctatgcttttacctgggaggacactcgtgtagatgagcgcatcttgaagctcaagtctgatgatgtggttctcgcaatcaccagcgccggtgacaacattctttcttatgctttgcagagtcctgctcgagttcatgccgtggatttgaaccctacacaaaaccatttgcttgagctcaaggcggcggcttaccagtctcttggatacgaagacttttggaagatattcggtgaaggcaagcattccgatttccggtccctactcgtctccaagatgtcaccccatctatcgagccgcgcctttcagtactggctgagcaaccatcgcatcttcactaagagtcaaggtggtctctatgacactggcggctccaagcatggtattcgtatcttccgctggatcactcaagtctttggatgccgggctgcagtcaaggaccttcttgcagcgaagactctcaacgagcaacgcgaaatatggcgcaatcgcattcgacccgctcttctctctcgcatcgtctccaaatttgtcgtgagtcaggagtcgttcctctggactgctctcggtgtgcccaggaaccagcttgccatccttgaagcagatcatgctgtttcgcctgcagttatcggaccaactccaacagcaaaaaacactcggtcgcatgcaatctgggagtacatggtgaacaccttagaccccatggttgagacaacacatattgctactgataacccatactatctcgtgtgcctagacggcaagttctcgcgacaatgtcacccagattacttatcaccgaacgctcatgcacgactctcgaagcccaatgcccttgacaatctgcgtatccacaccgacgagatcgaagaagtgttagctcgtatcacaccgggcactctaaccgtcgccgtcgtcatggacagtatggactggtttgatcccggatcagacgcagcgaagtcacagatcactaagcttaaccgcgcgttgaaaatgggtgggcgagtcatgttgcgctctgctggtctcaaaccgtggtatctgaaggagttcgagaaactcgggttttcggccaagtgtcatggatctcgtgaggacggggcttgtattgatcgcgtgaatatgtatgcttcttgctggatcttgacgaagaaggaggggctggcaccgcctacacccgagatggagtctgttggtggtggggaaatggagtccctgcagctgtagagaagatgtatgaatgtagggcaattgttgctatgaaaaaagcatggaagaattgggaattaggagatgagagtggcggggtgccacagaatcatgatgggatgtcagcggcctgtccaacaccgaccgcgacgtggccttttgcaacgagaggtctgggtcgaaacaatcacaaaaatttgacaaacaaacgaaaaatatgaatagattgaaatctcgtgccaaccgtttctctctcttcttgccgcggg

SEQ ID NO: 25443 - DNA, 954 bp, Muscodor strobelii
  misc_feature: SGI cDNA ID NO. 568684
  misc_feature: Elevated expression when VOC is produced
  misc_feature: Encodes the peptide sequence at SEQ ID NO 25444
atgtcaccccatctatcgagccgcgcctttcagtactggctgagcaaccatcgcatcttcactaagagtcaaggtggtctctatgacactggcggctccaagcatggtattcgtatcttccgctggatcactcaagtctttggatgccgggctgcagtcaaggaccttcttgcagcgaagactctcaacgagcaacgcgaaatatggcgcaatcgcattcgacccgctcttctctctcgcatcgtctccaaatttgtcgtgagtcaggagtcgttcctctggactgctctcggtgtgcccaggaaccagcttgccatccttgaagcagatcatgctgtttcgcctgcagttatcggaccaactccaacagcaaaaaacactcggtcgcatgcaatctgggagtacatggtgaacaccttagaccccatggttgagacaacacatattgctactgataacccatactatctcgtgtgcctagacggcaagttctcgcgacaatgtcacccagattacttatcaccgaacgctcatgcacgactctcgaagcccaatgcccttgacaatctgcgtatccacaccgacgagatcgaagaagtgttagctcgtatcacaccgggcactctaaccgtcgccgtcgtcatggacagtatggactggtttgatcccggatcagacgcagcgaagtcacagatcactaagcttaaccgcgcgttgaaaatgggtgggcgagtcatgttgcgctctgctggtctcaaaccgtggtatctgaaggagttcgagaaactcgggttttcggccaagtgtcatggatctcgtgaggacggggcttgtattgatcgcgtgaatatgtatgcttcttgctggatcttgacgaagaaggaggggctggcaccgcctacacccgagatggagtctgttggtggtggggaaatggagtccctgcagctgtag

SEQ ID NO: 25444 - protein, 317 aa, Muscodor strobelii
  misc_feature: SGI Peptide ID NO. 568684
  misc_feature (1)..(317): NCBI GI: 46107718 Blast Desc: FG00742.1 [Gibberella zeae PH-1]
  misc_feature (1)..(305): NCBI GI: 116182248 Blast Desc: CHGG_01752 [Chaetomium globosum CBS 148.51] gi|88186049|gb|EAQ93517.1| CHGG_01752 [Chaetomium globosum CBS 148.51]
  misc_feature (1)..(317): NCBI GI: 238837532 Blast Desc: conserved [Microsporum canis CBS 113480]
  misc_feature (1)..(313): NCBI GI: 261355152 Blast Desc: conserved [Verticillium albo-atrum VaMs.102]
  misc_feature (1)..(315): NCBI GI: 255950996 Blast Desc: Pc22g23740 [Penicillium chrysogenum Wisconsin 54-1255] gi|211593282|emb|CAP99662.1| Pc22g23740 [Penicillium chrysogenum Wisconsin 54-1255]
  misc_feature (1)..(311): NCBI GI: 171695198 Blast Desc: protein product [Podospora anserina] gi|170947841|emb|CAP60005.1| protein product [Podospora anserina]
  misc_feature (1)..(305): NCBI GI: 145613844 Blast Desc: MGG_01330 [Magnaporthe grisea 70-15] gi|145020854|gb|EDK04983.1| MGG_01330 [Magnaporthe grisea 70-15]
  misc_feature (1)..(317): NCBI GI: 154320987 Blast Desc: BC1G_01368 [Botryotinia fuckeliana B05.10] gi|150851906|gb|EDN27098.1| BC1G_01368 [Botryotinia fuckeliana B05.10]
  misc_feature (1)..(297): NCBI GI: 85118249 Blast Desc: NCU03032 [Neurospora crassa OR74A] gi|28927226|gb|EAA36182.1| conserved [Neurospora crassa OR74A] gi|38566962|emb|CAE76263.1| related to 3-amino-3-carboxypropyl
  misc_feature (18)..(317): NCBI GI: 156054588 Blast Desc: SS1G_06142 [Sclerotinia sclerotiorum 1980] gi|154703922|gb|EDO03661.1| SS1G_06142 [Sclerotinia sclerotiorum 1980]
  misc_feature: Useful for introducing or modulating the production of volatile compounds
MSPHLSSRAFQYWLSNHRIFTKSQGGLYDTGGSKHGIRIFRWITQVFGCRAAVKDLLAAKTLNEQREIWRNRIRPALLSRIVSKFVVSQESFLWTALGVPRNQLAILEADHAVSPAVIGPTPTAKNTRSHAIWEYMVNTLDPMVETTHIATDNPYYLVCLDGKFSRQCHPDYLSPNAHARLSKPNALDNLRIHTDEIEEVLARITPGTLTVAVVMDSMDWFDPGSDAAKSQITKLNRALKMGGRVMLRSAGLKPWYLKEFEKLGFSAKCHGSREDGACIDRVNMYASCWILTKKEGLAPPTPEMESVGGGEMESLQL

SEQ ID NO: 25445 - DNA, 2899 bp, Muscodor strobelii; identical to SEQ ID NO: 25442
  misc_feature: SGI EST ID NO. CUFF.60080.0
  misc_feature: Variant of the nucleotide sequence at SEQ ID NO 25443

SEQ ID NO: 25446 - DNA, 561 bp, Muscodor strobelii
  misc_feature: SGI cDNA ID NO. 568685
  misc_feature: Encodes the peptide sequence at SEQ ID NO 25447
atgaatgtggtgacagaaggagaagtgctgcatcttggtcgattcgccgacgcatcatctcagtttgaagtcggaagcactgtcacgcaaacaattgatagcgaaaagcgtttattgtactcccgttaccataccgctggtcatgtcttgggctcggccgtacgccatctactcgagaaagatgttgacaactttgacgagctgaaggcatctcatttcccagactctgcctcatgtgaatttcagggtttgatagagggaaaatggaaagatgcgatacaggcgcgtcttgacgagtacatcgagaaggatatgcccgtagagatagattggtggactgaggaagattttaaggtcaacgggctagagagactcacgcccgaccgacaggctatgggcatgactgacgacgagaagttccgcgtggtgaggattgtgggcgttgaggtttatccgtgtggaggaacgcatgtcgatagcactcagctttgcggcaagacaaacgtcaagaagattagtcggtcgaaggggacaagtcgggtgagctatctgctaccttga

SEQ ID NO: 25447 - protein, 186 aa, Muscodor strobelii
  misc_feature: SGI Peptide ID NO. 568685
  misc_feature (140)..(182): Pfam Id: PF07973 Pfam Desc: Threonyl and Alanyl tRNA synthetase second additional domain
  misc_feature (1)..(185): NCBI GI: 156049927 Blast Desc: SS1G_07549 [Sclerotinia sclerotiorum 1980] gi|154691951|gb|EDN91689.1| SS1G_07549 [Sclerotinia sclerotiorum 1980]
  misc_feature (1)..(185): NCBI GI: 85111753 Blast Desc: NCU00535 [Neurospora crassa OR74A] gi|28925852|gb|EAA34851.1| NCU00535 [Neurospora crassa OR74A]
  misc_feature (1)..(185): NCBI GI: 154318102 Blast Desc: BC1G_03034 [Botryotinia fuckeliana B05.10] gi|150843692|gb|EDN18885.1| BC1G_03034 [Botryotinia fuckeliana B05.10]
  misc_feature (1)..(185): NCBI GI: 70983967 Blast Desc: alanyl-tRNA synthetase [Aspergillus fumigatus Af293] gi|66845135|gb|EAL85471.1| alanyl-tRNA synthetase, [Aspergillus fumigatus Af293] gi|159123513|gb|EDP48632.1| alanyl-tRNA A1163]
  misc_feature (1)..(186): NCBI GI: 256721319 Blast Desc: NECHADRAFT_52748 [Nectria haematococca mpVI 77-13-4]
  misc_feature (1)..(185): NCBI GI: 46115228 Blast Desc: FG03456.1 [Gibberella zeae PH-1]
  misc_feature (1)..(185): NCBI GI: 238839250 Blast Desc: threonyl/alanyl tRNA synthetase [Microsporum canis CBS 113480]
  misc_feature (1)..(185): NCBI GI: 119485815 Blast Desc: alanyl-tRNA synthetase, [Neosartorya fischeri NRRL 181] gi|119410406|gb|EAW20353.1| alanyl-tRNA synthetase, [Neosartorya fischeri NRRL 181]
  misc_feature (7)..(185): NCBI GI: 255946485 Blast Desc: Pc20g15380 [Penicillium chrysogenum Wisconsin 54-1255] gi|211588745|emb|CAP86867.1| Pc20g15380 [Penicillium chrysogenum Wisconsin 54-1255]
  misc_feature (1)..(185): NCBI GI: 238507095 Blast Desc: alanyl-tRNA synthetase, [Aspergillus flavus NRRL3357] gi|220689462|gb|EED45813.1| alanyl-tRNA synthetase, [Aspergillus flavus NRRL3357]
  misc_feature (7)..(179): SWISSPROT Homolog: EC 6.1.1.7 Alanine--tRNA ligase
MNVVTEGEVLHLGRFADASSQFEVGSTVTQTIDSEKRLLYSRYHTAGHVLGSAVRHLLEKDVDNFDELKASHFPDSASCEFQGLIEGKWKDAIQARLDEYIEKDMPVEIDWWTEEDFKVNGLERLTPDRQAMGMTDDEKFRVVRIVGVEVYPCGGTHVDSTQLCGKTNVKKISRSKGTSRVSYLLP

SEQ ID NO: 25448 - DNA, 2720 bp, Muscodor strobelii
  misc_feature: SGI EST ID NO. CUFF.59953.1
  misc_feature: Variant of the nucleotide sequence at SEQ ID NO 25446
tcttcgggtccgaattctaacgagtcgtcagtccgtcgcggacgagttacacgacaacgcgtccatcttcccatgatagacgaacactatttttggagttctgccgtgcgagtgcgtgctgcccctcattcgtcgggggcccgtaagccaagcctaggggattgggtgactcgcccgtggcggggtgtagggaagtcaggtaacacgcatgaaatgtattgaaactccgtctcgaatcgcagaccgatcgctccctcatcatggaattccccgattacatctccggactggggcccggccgaatttggtgattgatgtcgatggataccgaccttgtcattgtttaggaatgtttgccttagctacggttgatatttttgatatataagagtgcgattctcagactttaagatcagatcatgagaacgctttgacatcatcatccttctgaactctattccactacagcccctgtcctctcgcattcaacgtcaataatcttcaagcatcaactgcattctccatccctctctcaacagcaatccaaaatggtgaccctaaacgtagcatacacagcacctatcaaccccgctggcgcatcgccgacgcttacccagacacaaacatgggaaggtctcaagatcaaagtcaggaaggcgcaagacttcgtctccgcgatcacatcctgtgaggtccttggtgaggagacgctgtctacgggagagttgcagattactaggacggtggaatttgctggtaatgctacgcatggtgctggaaggagtgttaaggaggtctgcgttcattatgagccttgccgcgtcgtcttcaaccaggaggatggaagcaccgtcacgaatgttatcagcaaggatcctgaaggagaactccttatgagctacgtcttcgagtggcgacatcctgatgttgaggctgggagtgatagggcaaagcagcttgaggaggcgcattggaagatggccaaggtcgcggttgagggcagcatccagactattcgtcggctcgtcggcgagggcaagattcagtagagaaggatatgtgagcgcagccggtgttttatgaggatttgtgatgatagtggctgtcggatatctctgctcattcctacctgtcagcaatagatcgccatagtatcaaaagggtattcttcgctctaaagcatgaacaaagcattacgtggcctctaaattgatgaaattcacgtatcgtcgctaacaattattatcatatacgcggatataccgaagctgttgctgactcgcatccgactcgttgaggatacttgcgccgttgcaatgttttatgacacattgactcgtcgaaaactccccagctgggttgagtggcgatcggcggcatgtcaccgattgacccacccaaaaggcgcattgaaatctggaattttccatttcgagcctcaacaaactgcgtctttccttgatcatgcccttcatactccgttcataatagacgacaacttcgctatacaaatccggcatcattctgtgcgttaattcgaaggttgcatcgtcacaacaatctatccggcgttcattgcgcgggattcatgatgcaacgtacttttcttgccttccatcacaatgccaagctacatacccttgacacagtagtgagcgcagtgagatcgatagcctcactcgaggaagccaacaagactctcttcaagaatgcaactgaggaggatcatgttgttgtcacagaaaagacaattttccatccccagggcggcggtcagccttctgatacaggtcacataaaggcagcttctggcgctagctttaacgtatcagcggtgcgcatgaatgtggtgacagaaggagaagtgctgcatcttggtcgattcgccgacgcatcatctcagtttgaagtcggaagcactgtcacgcaaacaattgatagcgaaaagcgtttattgtactcccgttaccataccgctggtcatgtcttgggctcggccgtacgccatctactcgagaaagatgttgacaactttgacgagctgaaggcatctcatttcccagactctgcctcatgtgaatttcagggtttgatagagggaaaatggaaagatgcgatacaggcgcgtcttgacgagtacatcgagaaggatatgcccgtagagatagattggtggactgaggaagattttaaggtcaacgggctagagagactcacgcccgaccgacaggctatgggcatgactgacgacgagaagttccgcgtggtgaggattgtgggcgttgaggtttatccgtgtggaggaacgcatgtcgatagcactcagctttgcggcaagacaaacgtcaagaagattagtcggtcgaaggggacaagtcgggtgagctatctgctaccttgaccgcatctccggttacgtcgatctgctttaaaggtcaaaagatataaacatgccgcgattcagaattagattgcagcttgcgatagaacgactgttatccgtggaacagctggagatagacaagacctgataatagaagaaaatgtggtatcgacgaggaggggtcttaaacagatacctaattgagacacattgccttggtcgagccgcccagccgtctcgcaagacaacttccaattacacaatcaactttttgacaatcttctcccttgacacgagacccttgaatccctttatgtctcaatcgttgtctagggac

SEQ ID NO: 25449 - DNA, 810 bp, Muscodor strobelii
  misc_feature: SGI cDNA ID NO. 568686
  misc_feature: Encodes the peptide sequence at SEQ ID NO 25450
atgcaacgtacttttcttgccttccatcacaatgccaagctacatacccttgacacagtagtgagcgcagtgagatcgatagcctcactcgaggaagccaacaagactctcttcaagaatgcaactgaggaggatcatgttgttgtcacagaaaagacaattttccatccccagggcggcggtcagccttctgatacaggtcacataaaggcagcttctggcgctagctttaacgtatcagcggtgcgcatgaatgtggtgacagaaggagaagtgctgcatcttggtcgattcgccgacgcatcatctcagtttgaagtcggaagcactgtcacgcaaacaattgatagcgaaaagcgtttattgtactcccgttaccataccgctggtcatgtcttgggctcggccgtacgccatctactcgagaaagatgttgacaactttgacgagctgaaggcatctcatttcccagactctgcctcatgtgaatttcagggtttgatagagggaaaatggaaagatgcgatacaggcgcgtcttgacgagtacatcgagaaggatatgcccgtagagatagattggtggactgaggaagattttaaggtcaacgggctagagagactcacgcccgaccgacaggctatgggcatgactgacgacgagaagttccgcgtggtgaggattgtgggcgttgaggtttatccgtgtggaggaacgcatgtcgatagcactcagctttgcggcaagacaaacgtcaagaagattagtcggtcgaaggggacaagtcgggtgagctatctgctaccttga

SEQ ID NO: 25450 - protein, 269 aa, Muscodor strobelii
  misc_feature: SGI Peptide ID NO. 568686
  misc_feature (223)..(265): Pfam Id: PF07973 Pfam Desc: Threonyl and Alanyl tRNA synthetase second additional domain
  misc_feature (40)..(119): Pfam Id: PF01411 Pfam Desc: tRNA synthetases class II (A)
  misc_feature (3)..(268): NCBI GI: 70983967 Blast Desc: alanyl-tRNA synthetase [Aspergillus fumigatus Af293] gi|66845135|gb|EAL85471.1| alanyl-tRNA synthetase, [Aspergillus fumigatus Af293] gi|159123513|gb|EDP48632.1| alanyl-tRNA A1163]
  misc_feature (3)..(266): NCBI GI: 85111753 Blast Desc: NCU00535 [Neurospora crassa OR74A] gi|28925852|gb|EAA34851.1| NCU00535 [Neurospora crassa OR74A]
  misc_feature (1)..(266): NCBI GI: 238839250 Blast Desc: threonyl/alanyl tRNA synthetase [Microsporum canis CBS 113480]
  misc_feature (3)..(268): NCBI GI: 119485815 Blast Desc: alanyl-tRNA synthetase, [Neosartorya fischeri NRRL 181] gi|119410406|gb|EAW20353.1| alanyl-tRNA synthetase, [Neosartorya fischeri NRRL 181]
  misc_feature (2)..(268): NCBI GI: 154318102 Blast Desc: BC1G_03034 [Botryotinia fuckeliana B05.10] gi|150843692|gb|EDN18885.1| BC1G_03034 [Botryotinia fuckeliana B05.10]
  misc_feature (3)..(269): NCBI GI: 256721319 Blast Desc: NECHADRAFT_52748 [Nectria haematococca mpVI 77-13-4]
  misc_feature (3)..(268): NCBI GI: 255946485 Blast Desc: Pc20g15380 [Penicillium chrysogenum Wisconsin 54-1255] gi|211588745|emb|CAP86867.1| Pc20g15380 [Penicillium chrysogenum Wisconsin 54-1255]
  misc_feature (3)..(268): NCBI GI: 46115228 Blast Desc: FG03456.1 [Gibberella zeae PH-1]
  misc_feature (1)..(268): NCBI GI: 156049927 Blast Desc: SS1G_07549 [Sclerotinia sclerotiorum 1980] gi|154691951|gb|EDN91689.1| SS1G_07549 [Sclerotinia sclerotiorum 1980]
  misc_feature (3)..(268): NCBI GI: 121720172 Blast Desc: alanyl-tRNA synthetase, [Aspergillus clavatus NRRL 1] gi|119404996|gb|EAW15358.1| alanyl-tRNA synthetase, [Aspergillus clavatus NRRL 1]
  misc_feature (48)..(266): SWISSPROT Homolog: EC 6.1.1.7 Alanine--tRNA ligase
MQRTFLAFHHNAKLHTLDTVVSAVRSIASLEEANKTLFKNATEEDHVVVTEKTIFHPQGGGQPSDTGHIKAASGASFNVSAVRMNVVTEGEVLHLGRFADASSQFEVGSTVTQTIDSEKRLLYSRYHTAGHVLGSAVRHLLEKDVDNFDELKASHFPDSASCEFQGLIEGKWKDAIQARLDEYIEKDMPVEIDWWTEEDFKVNGLERLTPDRQAMGMTDDEKFRVVRIVGVEVYPCGGTHVDSTQLCGKTNVKKISRSKGTSRVSYLLP

SEQ ID NO: 25451 - DNA, 2720 bp, Muscodor strobelii; identical to SEQ ID NO: 25448
  misc_feature: SGI EST ID NO. CUFF.59953.1
  misc_feature: Variant of the nucleotide sequence at SEQ ID NO 25449

SEQ ID NO: 25452 - DNA, 501 bp, Muscodor strobelii
  misc_feature: SGI cDNA ID NO. 568687
  misc_feature: Encodes the peptide sequence at SEQ ID NO 25453
atggtgaccctaaacgtagcatacacagcacctatcaaccccgctggcgcatcgccgacgcttacccagacacaaacatgggaaggtctcaagatcaaagtcaggaaggcgcaagacttcgtctccgcgatcacatcctgtgaggtccttggtgaggagacgctgtctacgggagagttgcagattactaggacggtggaatttgctggtaatgctacgcatggtgctggaaggagtgttaaggaggtctgcgttcattatgagccttgccgcgtcgtcttcaaccaggaggatggaagcaccgtcacgaatgttatcagcaaggatcctgaaggagaactccttatgagctacgtcttcgagtggcgacatcctgatgttgaggctgggagtgatagggcaaagcagcttgaggaggcgcattggaagatggccaaggtcgcggttgagggcagcatccagactattcgtcggctcgtcggcgagggcaagattcagtag

SEQ ID NO: 25453 - protein, 166 aa, Muscodor strobelii
  misc_feature: SGI Peptide ID NO. 568687
  misc_feature (5)..(165): Pfam Id: PF08982 Pfam Desc: Domain of function (DUF1857)
  misc_feature (1)..(160): NCBI GI: 116178928 Blast Desc: CHGG_00092 [Chaetomium globosum CBS 148.51] gi|88184389|gb|EAQ91857.1| CHGG_00092 [Chaetomium globosum CBS 148.51]
  misc_feature (1)..(165): NCBI GI: 46114540 Blast Desc: FG03112.1 [Gibberella zeae PH-1]
  misc_feature (1)..(165): NCBI GI: 119189269 Blast Desc: CIMG_04682 [Coccidioides immitis RS]
  misc_feature (1)..(147): NCBI GI: 171681425 Blast Desc: protein product [Podospora anserina] gi|170940671|emb|CAP65899.1| protein product [Podospora anserina]
  misc_feature (1)..(166): NCBI GI: 169604390 Blast Desc: SNOG_05207 [Phaeosphaeria nodorum SN15] gi|111066478|gb|EAT87598.1| SNOG_05207 [Phaeosphaeria nodorum SN15]
  misc_feature (3)..(165): NCBI GI: 255936189 Blast Desc: Pc13g06880 [Penicillium chrysogenum Wisconsin 54-1255] gi|211583741|emb|CAP91757.1| Pc13g06880 [Penicillium chrysogenum Wisconsin 54-1255]
  misc_feature (5)..(165): NCBI GI: 212530102 Blast Desc: conserved [Penicillium marneffei ATCC 18224] gi|210074606|gb|EEA28693.1| conserved [Penicillium marneffei ATCC 18224]
  misc_feature (1)..(163): NCBI GI: 121711441 Blast Desc: conserved [Aspergillus clavatus NRRL 1] gi|119401487|gb|EAW11910.1| conserved [Aspergillus clavatus NRRL 1]
  misc_feature (3)..(165): NCBI GI: 119488203 Blast Desc: NFIA_112700 [Neosartorya fischeri NRRL 181] gi|119410801|gb|EAW20746.1| conserved [Neosartorya fischeri NRRL 181]
  misc_feature (1)..(165): NCBI GI: 240111303 Blast Desc: CPC735_071380 [Coccidioides posadasii C735 delta SOWgp]
MVTLNVAYTAPINPAGASPTLTQTQTWEGLKIKVRKAQDFVSAITSCEVLGEETLSTGELQITRTVEFAGNATHGAGRSVKEVCVHYEPCRVVFNQEDGSTVTNVISKDPEGELLMSYVFEWRHPDVEAGSDRAKQLEEAHWKMAKVAVEGSIQTIRRLVGEGKIQ

SEQ ID NO: 25454 - DNA, 2720 bp, Muscodor strobelii; identical to SEQ ID NO: 25448
  misc_feature: SGI EST ID NO. CUFF.59953.1
  misc_feature: Variant of the nucleotide sequence at SEQ ID NO 25452

SEQ ID NO: 25455 - DNA, 2238 bp, Muscodor strobelii
  misc_feature: SGI cDNA ID NO. 568688
  misc_feature: Encodes the peptide sequence at SEQ ID NO 25456
atgggcactttcagtgtcatagcggcgctgaagcgtcatggcatcaccctcatgaacgaaacattggaggctcgatccaaattgctcgcccagctacccgagagctgcgacatgatgaagcatcgtggtatcgaagagacaggcatctggatcaatgagaagaagagtatcggactcggtcagtgccaaccatcggccaagatttcatcttcgggtggcgcgcagcccacctgtgacagtgaggggcatattcatgcggtggttcacggtgatatctacaacaaggaaaagcttctagagcagcacctcagtgtgtttgatcacggtgtcagggctgatagtgatgctgatattatcatatctctctataagcattggttagtgaagttcgacccatacacattcttttttgattgtatcttgacactaattaagtcactaccagtgcgtattcaagcttatcgatgctctctccgagcgctggctggccataccgtcagaaaattgacagttcaagcagatggtgcgcccaagttcctcgaataccttgacggtgagttctcgctggtcatttacgacgaccggagcgacgaggtcatcgttgtcaatgaccggtttggaaataaacctctcttttatatgatcgacgaagaccatcttttcgtcgcatcgaagatgaaggcattcatgccgcttggatggaaaccccagtgggatgtggaagcaatgatcacaggtgcctcaaactacggagatcgtacccagtttcaaggggtgcgtaaggtcaaatctggtacgtatatggttgccaagcccgatggtgttatcgagacgcatcgatactgggacttgacgtacggaaacaaggtatgtgtcttggctgttcagcaaaaactcgttgaagctgtccgcgtacgtgtagagtccggtggacctatggcaatccgtctgtccggaggcctggattcagcagtcatcgctgggatcgtgaagcatgttttggacgaagaagctaccaaatcgggctcagagatcgacatggaacgcatcatctgctcttgcattgcattcgatgcgaattccggctttgatgaatcgccaatcgctcaacgtacggccgacttcctgggttttcagtttcggagcgagcatataggcgacgcggatttggcgaacaacttcgaagaagccgtgttccagaacgaatatgctacttgggatcttgcacccgtaggcgaatattgtcacctgaaaaggctccgcgagcaaggattcgaagacatcttcagtggtgagagcgccgatcagctctttgccggccatacttggtttcctgcggaatttctcctcgagcccgatcactcgatgcctggcctgacgctgcagaaaaatcccgatctgcgtgctcagctataccggagcaccatcgccaacgcggaacggatgttcaatcgtaccgtggatatcacggatcctctaccgacggagcctgaccctgcattgctgaagcgtttgaacaatgttcgcttgccctgtctgatgattacccgcatgacagtagcatccatcttctcccatgagctgcagggcaagtatgatccacaagagcgcttgcagagacggcttgattcattggcccccggagtcgaagccaagatcaaagaggactggcatcccttgcatacttgcttgtacatgtggtctaagagcagcctcatccggcagcacgcagccgggcgacacccttttcaggatcatgagctggtacaattcgtgacacatctcccgccaagcctgaaactcctctacgacacggatgagacagcccgactagagaccggagagacagcgtcgacctggtggaagaacgaaagtagtaatggcgacgaaggacaagtggctcctgctaacgctggtgccgcccagttctgggagaaatgggtgctgcgcgaggcggcaaagccgttccttctagacgaactctatcgtcgacgtaagtttccctacgccgcgccatataagtggcccgaggatgggcatgtgcacaagctccttcagcgcttggttaccaaggagaatgtcgaggcccttggattcttagactgggagctcttgagccaagcgctgaagcgtgcggttgggccggattcgcatctctactcgttccgcgtgtgcctatctgcggcaggcttcatcgctttaggtcaagccttcgatgttccacgggcggaaatttga

SEQ ID NO: 25456 - protein, 745 aa, Muscodor strobelii
  misc_feature: SGI Peptide ID NO. 568688
  misc_feature (294)..(666): Pfam Id: PF00733 Pfam Desc: Asparagine synthase
  misc_feature (294)..(452): Pfam Id: PF00733 Pfam Desc: Asparagine synthase
  misc_feature (579)..(666): Pfam Id: PF00733 Pfam Desc: Asparagine synthase
  misc_feature (31)..(745): NCBI GI: 171678317 Blast Desc: protein product [Podospora anserina] gi|170937228|emb|CAP61885.1| protein product [Podospora anserina]
  misc_feature (28)..(744): NCBI GI: 225682870 Blast Desc: asparagine synthetase [Paracoccidioides brasiliensis Pb03]
  misc_feature (26)..(744): NCBI GI: 226285382 Blast Desc: asparagine synthase [Paracoccidioides brasiliensis Pb01]
  misc_feature (3)..(744): NCBI GI: 154281075 Blast Desc: [Ajellomyces capsulatus NAm1] gi|150411529|gb|EDN06917.1| [Ajellomyces capsulatus NAm1]
  misc_feature (3)..(744): NCBI GI: 240279348 Blast Desc: asparagine synthetase [Ajellomyces capsulatus H143]
  misc_feature (3)..(744): NCBI GI: 225559610 Blast Desc: asparagine synthase [Ajellomyces capsulatus G186AR]
  misc_feature (1)..(745): NCBI GI: 39947139 Blast Desc: MGG_08450 [Magnaporthe grisea 70-15] gi|145012273|gb|EDJ96929.1| MGG_08450 [Magnaporthe grisea 70-15]
  misc_feature (27)..(743): NCBI GI: 46139763 Blast Desc: FG11396.1 [Gibberella zeae PH-1]
  misc_feature (7)..(745): NCBI GI: 238846122 Blast Desc: asparagine synthase [Microsporum canis CBS 113480]
  misc_feature (28)..(744): NCBI GI: 238499511 Blast Desc: asparagine synthetase, [Aspergillus flavus NRRL3357] gi|220692743|gb|EED49089.1| asparagine synthetase, [Aspergillus flavus NRRL3357]
  misc_feature (14)..(444): SWISSPROT Homolog: EC 6.3.5.4 Asparagine synthase (glutamine-hydrolyzing)
MGTFSVIAALKRHGITLMNETLEARSKLLAQLPESCDMMKHRGIEETGIWINEKKSIGLGQCQPSAKISSSGGAQPTCDSEGHIHAVVHGDIYNKEKLLEQHLSVFDHGVRADSDADIIISLYKHWLVKFDPYTFFFDCILTLIKSLPVRIQAYRCSLRALAGHTVRKLTVQADGAPKFLEYLDGEFSLVIYDDRSDEVIVVNDRFGNKPLFYMIDEDHLFVASKMKAFMPLGWKPQWDVEAMITGASNYGDRTQFQGVRKVKSGTYMVAKPDGVIETHRYWDLTYGNKVCVLAVQQKLVEAVRVRVESGGPMAIRLSGGLDSAVIAGIVKHVLDEEATKSGSEIDMERIICSCIAFDANSGFDESPIAQRTADFLGFQFRSEHIGDADLANNFEEAVFQNEYATWDLAPVGEYCHLKRLREQGFEDIFSGESADQLFAGHTWFPAEFLLEPDHSMPGLTLQKNPDLRAQLYRSTIANAERMFNRTVDITDPLPTEPDPALLKRLNNVRLPCLMITRMTVASIFSHELQGKYDPQERLQRRLDSLAPGVEAKIKEDWHPLHTCLYMWSKSSLIRQHAAGRHPFQDHELVQFVTHLPPSLKLLYDTDETARLETGETASTWWKNESSNGDEGQVAPANAGAAQFWEKWVLREAAKPFLLDELYRRRKFPYAAPYKWPEDGHVHKLLQRLVTKENVEALGFLDWELLSQALKRAVGPDSHLYSFRVCLSAAGFIALGQAFDVPRAEI

SEQ ID NO: 25457 - DNA, 1684 bp, Muscodor strobelii
  misc_feature: SGI EST ID NO. CUFF.59868.0
  misc_feature: Variant of the nucleotide sequence at SEQ ID NO 25455
cggtggttcacggtgatatctacaacaaggaaaagcttctagagcagcacctcagtgtgtttgatcacggtgtcagggctgatagtgatgctgatattatcatatctctctataagcattggttagtgaagttcgacccatacacattcttttttgattgtatcttgacactaattaagtcactaccagtgcgtattcaagcttatcgatgctctctccgagcgctggctggccataccgtcagaaaattgacagttcaagcagatggtgcgcccaagttcctcgaataccttgacggtgagttctcgctggtcatttacgacgaccggagcgacgaggtcatcgttgtcaatgaccggtttggaaataaacctctcttttatatgatcgacgaagaccatcttttcgtcgcatcgaagatgaaggcattcatgccgcttggatggaaaccccagtgggatgtggaagcaatgatcacaggtgcctcaaactacggagatcgtacccagtttcaaggggtgcgtaaggtgagtctctcgcaacggccttctaatcagtcacgttacatactaatatcgaatacggttggtaggtcaaatctggtacgtatatggttgccaagcccgatggtgttatcgagacgcatcgatactgggacttgacgtacggaaacaaggtatgtggtgcgcactaggtgtggtgagatgactggtagctgaccagacgatattccagaacacagtagaaacacgttctgttgatgacatagtcttggctgttcagcaaaaactcgttgaagctgtccgcgtacgtgtagagtccggtggacctatggcaatccgtctgtccggaggcctggattcagcagtcatcgctgggatcgtgaagcatgttttggacgaagaagctaccaaatcgggctcagagatcgacatggaacgcatcatctgctcttgcattgcattcgatgcgaattccggctttgatgaatcgccaatcgctcaacgtacggccgacttcctgggttttcagtttcggagcgagcatataggcgacgcggatttggcgaacaacttcgaagaagccgtgttccagaacgaatatgctacttgggatcttgcacccgtaggcgaatattgtcacctgaaaaggctccgcgagcaaggattcgaagacatcttcagtggtgagagcgccgatcagctctttgccggccatacttggtttcctgcggaatttctcctcgagcccgatcactcgatgcctggcctgacgctgcagaaaaatcccgatctgcgtgctcagctataccggagcaccatcgccaacgcggaacggatgttcaatcgtaccgtggatatcacggatcctctaccgacggagcctgaccctgcattgctgaagcgtttgaacaatgttcgcttgccctgtctgatgattacccgcatgacagtagcatccatcttctcccatgagctgcagggcaagtatgatccacaagagcgcttgcagagacggcttgattcattggcccccggagtcgaagccaagatcaaagaggactggcatcccttgcatacttgcttgtacatgtggtctaagagcagcctcatccggcagcacgcagccgggcgacacccttttcaggatcatgagctggtacaattcgtgacacatctcccgc

SEQ ID NO: 25458 - DNA, 2349 bp, Muscodor strobelii
  misc_feature: SGI cDNA ID NO. 568689
  misc_feature: Reduced expression when VOC is produced
  misc_feature: Encodes the peptide sequence at SEQ ID NO 25459
atggcgggcgcaaagaagaacttcaaagccacgaaaaagttcgaagcgcgacatctgtcgggcgccctggacaagaggaaagccggtgccaagataaaacagaaacagattctcaaggcgaagaagggcggtcgcaaagcacaggatgccgagttcttcaagggccccagcgatgccgacaagggcccgaaggccaggacatccaaaaccgctaaggtgaacgagatgagcgtcgacgacttcttcggtggaggcttcgagatcatcgacaaacaacccgccgcccagaagccctccaagaagctcggcaagcgcaagcgagatgcccccgaacccgacactgcctcccagtccggcgaagatagcgacgatctcgacatctccgacgccgaacaacctgtggcaagcgacagcgacgacgatggcaacgaagacatcgacgacgaggggcttggcatgagcaaagagacgatggatgccctcgccaaggacgatcccgacttctacaaattcttgaaggagaacgaccccgacgccctggacttcgacgacgctgaccttgccgaggtcgacgagctgagcgccagcgaggaagaggaccaacccaagaagaagcggaaaaaggctgccgccgcagaagagaagaccgaagtagatgacaacgaactcacacaggagatggtggcccgctggaaaacccgtctcaccgaaacccactctctcaaagccgcccgccaggtggttctggcattccgagcagcggcacatctgaacgaagacgacgtcgatggcgagaggaagcaggcgtacacgatcaacagccccgaggtcttccacgacatacttctcgtcgcgctgaagcaaattcccgaagtcttgcaacaccatgtccctgtcaaagaaaccgcatctggcaagattcacgtacccaccgaatccaagaagttcaagccgttatcggtgctgttgaagagcttcgtctccgccattcttcatcttctccccacgctatccgacgatgccaccctcaaactcacaatctctgctttggaaccccttgttccatatctattgagctatcgcaagctcttgaagagtcttattaagaccgtggtcggcttctggtcccagtctactagcagtgacacgacgagaatcacggccttcctcgttctacggcgactcgtagtggttggagataagggtgtccgcgaggctgtcctcaaagcatcataccaaggtctgattgctggctctcgagtgaccaacgcaaatacagcacagggaatcaatctcatgaagaactcggccgcagagctttggggtcttgatcagagcataggttacacaacggccttcagtttcattcgacagctagccattcacctccgcaacagtattgtgaagaaccaaaacgaatcatacaagaatgtctacaactggcagtacatccactctctcgacttctggtcttgtgtcttgtcagaacactgtaattcgctaaaagaggcagaggctggcaaagagtcccagctgaggctattgatctaccctcttgttcaagtcacactcggggcgatgcgcctcgttcccacttctacgtacttccctctccgtttccacatgatccgatccctattgagaatttcaagatcaactggcacttacattcctcttgcgtcagcgcttttggaagttctgaactcggcggagatgagaaagtcgccgaagcaggctactctgaagtcgctggactttaccgtcgcctacaaagcaccgaagtcatacctacgcacgcgcatataccaagatggcgtgggagatcaggtcgtggacttatttgcggagtactttgtgttgtggtcaaccaacattgccttccccgagttcgccctacccgtcattattatgttgaagcgatggctcaagcaatccaggaagaagaccggcggtaacaacaacggcaaactgcgctcgggcctcgtactgctagtacagaaactcgaggcgaatgccaagttcatcgagggcaagagagctaaagtagacttttcgccccgcgataggtcacaggtcgatgccttcctcaaggacttcgagtgggagaagacaccagtcggtgcctatgtcgtcgcgcagaggaaagcgggagctgagaaggcaaagatgatggagcaggcgagaaaagaagatgagcgaaagcggaaagaggaggagcaagaggctctggaagacaatgtcgccgagatggacgatgaggatgaggaagacgacgatatggaagatcttgatgaagacgagaatggattagaagatgagtcttcggatgaagacgaagacgacgagtaa

SEQ ID NO: 25459 - protein, 782 aa, Muscodor strobelii
  misc_feature: SGI Peptide ID NO. 568689
  misc_feature (400)..(714): Pfam Id: PF03715 Pfam Desc: Noc2p family
  misc_feature (1)..(760): NCBI GI: 116182256 Blast Desc: CHGG_01756 [Chaetomium globosum CBS 148.51] gi|88186053|gb|EAQ93521.1| CHGG_01756 [Chaetomium globosum CBS 148.51]
  misc_feature (1)..(724): NCBI GI: 256735528 Blast Desc: NECHADRAFT_65909 [Nectria haematococca mpVI 77-13-4]
  misc_feature (1)..(747): NCBI GI: 46105328 Blast Desc: FG00292.1 [Gibberella zeae PH-1]
  misc_feature (14)..(724): NCBI GI: 261355327 Blast Desc: nucleolar complex protein [Verticillium albo-atrum VaMs.102]
  misc_feature (1)..(729): NCBI GI: 171695190 Blast Desc: protein product [Podospora anserina] gi|170947837|emb|CAP60001.1| protein product [Podospora anserina]
  misc_feature (6)..(727): NCBI GI: 85113860 Blast Desc: NCU02066 [Neurospora crassa OR74A] gi|28926381|gb|EAA35357.1| NCU02066 [Neurospora crassa OR74A]
  misc_feature (1)..(727): NCBI GI: 39953841 Blast Desc: MGG_08867 [Magnaporthe grisea 70-15] gi|145021194|gb|EDK05323.1| MGG_08867 [Magnaporthe grisea 70-15]
  misc_feature (4)..(741): NCBI GI: 154320989 Blast Desc: BC1G_01369 [Botryotinia fuckeliana B05.10] gi|150851907|gb|EDN27099.1| BC1G_01369 [Botryotinia fuckeliana B05.10]
  misc_feature (4)..(759): NCBI GI: 156054586 Blast Desc: SS1G_06141 [Sclerotinia sclerotiorum 1980] gi|154703921|gb|EDO03660.1| SS1G_06141 [Sclerotinia sclerotiorum 1980]
  misc_feature (1)..(751): NCBI GI: 225561338 Blast Desc: nucleolar complex protein [Ajellomyces capsulatus G186AR]
  misc_feature: Useful for introducing or modulating the production of volatile compounds
MAGAKKNFKATKKFEARHLSGALDKRKAGAKIKQKQILKAKKGGRKAQDAEFFKGPSDADKGPKARTSKTAKVNEMSVDDFFGGGFEIIDKQPAAQKPSKKLGKRKRDAPEPDTASQSGEDSDDLDISDAEQPVASDSDDDGNEDIDDEGLGMSKETMDALAKDDPDFYKFLKENDPDALDFDDADLAEVDELSASEEEDQPKKKRKKAAAAEEKTEVDDNELTQEMVARWKTRLTETHSLKAARQVVLAFRAAAHLNEDDVDGERKQAYTINSPEVFHDILLVALKQIPEVLQHHVPVKETASGKIHVPTESKKFKPLSVLLKSFVSAILHLLPTLSDDATLKLTISALEPLVPYLLSYRKLLKSLIKTVVGFWSQSTSSDTTRITAFLVLRRLVVVGDKGVREAVLKASYQGLIAGSRVTNANTAQGINLMKNSAAELWGLDQSIGYTTAFSFIRQLAIHLRNSIVKNQNESYKNVYNWQYIHSLDFWSCVLSEHCNSLKEAEAGKESQLRLLIYPLVQVTLGAMRLVPTSTYFPLRFHMIRSLLRISRSTGTYIPLASALLEVLNSAEMRKSPKQATLKSLDFTVAYKAPKSYLRTRIYQDGVGDQVVDLFAEYFVLWSTNIAFPEFALPVIIMLKRWLKQSRKKTGGNNNGKLRSGLVLLVQKLEANAKFIEGKRAKVDFSPRDRSQVDAFLKDFEWEKTPVGAYVVAQRKAGAEKAKMMEQARKEDERKRKEEEQEALEDNVAEMDDEDEEDDDMEDLDEDENGLEDESSDEDEDDE

SEQ ID NO: 25460 - DNA, 2548 bp, Muscodor strobelii
  misc_feature: SGI EST ID NO. CUFF.59876.0
  misc_feature: Variant of the nucleotide sequence at SEQ ID NO 25458
gtttttttggccttgtcaaactcccggaacaacaacgtgaccacgcctttcgctaccgcagagcggcacagtcgcaacaatggcgggcgcaaagaagaacttcaaagccacgaaaaagttcgaagcgcgacatctgtcgggcgccctggacaagaggaaagccggtgccaagataaaacagaaacagattctcaaggcgaagaagggcggtcgcaaagcacaggatgccgagttcttcaagggccccagcgatgccgacaagggcccgaaggccaggacatccaaaaccgctaaggtgaacgagatgagcgtcgacgacttcttcggtggaggcttcgagatcatcgacaaacaacccgccgcccagaagccctccaagaagctcggcaagcgcaagcgagatgcccccgaacccgacactgcctcccagtccggcgaagatagcgacgatctcgacatctccgacgccgaacaacctgtggcaagcgacagcgacgacgatggcaacgaagacatcgacgacgaggggcttggcatgagcaaagagacgatggatgccctcgccaaggacgatcccgacttctacaaattcttgaaggagaacgaccccgacgccctggacttcgacgacgctgaccttgccgaggtcgacgagctgagcgccagcgaggaagaggaccaacccaagaagaagcggaaaaaggctgccgccgcagaagagaagaccgaagtagatgacaacgaactcacacaggagatggtggcccgctggaaaacccgtctcaccgaaacccactctctcaaagccgcccgccaggtggttctggcattccgagcagcggcacatctgaacgaagacgacgtcgatggcgagaggaagcaggcgtacacgatcaacagccccgaggtcttccacgacatacttctcgtcgcgctgaagcaaattcccgaagtcttgcaacaccatgtccctgtcaaagaaaccgcatctggcaagattcacgtacccaccgaatccaagaagttcaagccgttatcggtgctgttgaagagcttcgtctccgccattcttcatcttctccccacgctatccgacgatgccaccctcaaactcacaatctctgctttggaaccccttgttccatatctattgagctatcgcaagctcttgaagagtcttattaagaccgtggtcggcttctggtcccagtctactagcagtgacacgacgagaatcacggccttcctcgttctacggcgactcgtagtggttggagataagggtgtccgcgaggctgtcctcaaagcatcataccaaggtctgattgctggctctcgagtgaccaacgcaaatacagcacagggaatcaatctcatgaagaactcggccgcagagctttggggtcttgatcagagcataggttacacaacggccttcagtttcattcgacagctagccattcacctccgcaacagtattgtgaagaaccaaaacgaatcatacaagaatgtctacaactggcagtacatccactctctcgacttctggtcttgtgtcttgtcagaacactgtaattcgctaaaagaggcagaggctggcaaagagtcccagctgaggctattgatctaccctcttgttcaagtcacactcggggcgatgcgcctcgttcccacttctacgtacttccctctccgtttccacatgatccgatccctattgagaatttcaagatcaactggcacttacattcctcttgcgtcagcgcttttggaagttctgaactcggcggagatgagaaagtcgccgaagcaggctactctgaagtcgctggactttaccgtcgcctacaaagcaccgaagtcatacctacgcacgcgcatataccaagatggcgtgggagatcaggtcgtggacttatttgcggagtactttgtgttgtggtcaaccaacattgccttccccgagttcgccctacccgtcattattatgttgaagcgatggctcaagcaatccaggaagaagaccggcggtaacaacaacggcaaactgcgctcgggcctcgtactgctagtacagaaactcgaggcgaatgccaagttcatcgagggcaagagagctaaagtagacttttcgccccgcgataggtcacaggtcgatgccttcctcaaggacttcgagtgggagaagacaccagtcggtgcctatgtcgtcgcgcagaggaaagcgggagctgagaaggcaaagatgatggagcaggcgagaaaagaagatgagcgaaagcggaaagaggaggagcaagaggctctggaagacaatgtcgccgagatggacgatgaggatgaggaagacgacgatatggaagatcttgatgaagacgagaatggattagaagatgagtcttcggatgaagacgaagacgacgagtaaaattaggtgtttctgcttgattagtcacggttcaggtgcggagctgcaaaatgaataccaacaaaattttcatcatttacgtcctaaacttggaatgtgacaaattgagcttactgccgc

SEQ ID NO: 25461 - DNA, 771 bp, Muscodor strobelii
  misc_feature: SGI cDNA ID NO. 568690
  misc_feature: Encodes the peptide sequence at SEQ ID NO 25462
atgcgcctcgttcccacttctacgtacttccctctccgtttccacatgatccgatccctattgagaatttcaagatcaactggcacttacattcctcttgcgtcagcgcttttggaagttctgaactcggcggagatgagaaagtcgccgaagcaggctactctgaagtcgctggactttaccgtcgcctacaaagcaccgaagtcatacctacgcacgcgcatataccaagatggcgtgggagatcaggtcgtggacttatttgcggagtactttgtgttgtggtcaaccaacattgccttccccgagttcgccctacccgtcattattatgttgaagcgatggctcaagcaatccaggaagaagaccggcggtaacaacaacggcaaactgcgctcgggcctcgtactgctagtacagaaactcgaggcgaatgccaagttcatcgagggcaagagagctaaagtagacttttcgccccgcgataggtcacaggtcgatgccttcctcaaggacttcgagtgggagaagacaccagtcggtgcctatgtcgtcgcgcagaggaaagcgggagctgagaaggcaaagatgatggagcaggcgagaaaagaagatgagcgaaagcggaaagaggaggagcaagaggctctggaagacaatgtcgccgagatggacgatgaggatgaggaagacgacgatatggaagatcttgatgaagacgagaatggattagaagatgagtcttcggatgaagacgaagacgacgagtaa

SEQ ID NO: 25462 - protein, 256 aa, Muscodor strobelii
  misc_feature: SGI Peptide ID NO. 568690
  misc_feature (1)..(188): Pfam Id: PF03715 Pfam Desc: Noc2p family
  misc_feature (2)..(188): Pfam Id: PF03715 Pfam Desc: Noc2p family
  misc_feature (1)..(233): NCBI GI: 156054586 Blast Desc: SS1G_06141 [Sclerotinia sclerotiorum 1980] gi|154703921|gb|EDO03660.1| SS1G_06141 [Sclerotinia sclerotiorum 1980]
  misc_feature (1)..(201): NCBI GI: 85113860 Blast Desc: NCU02066 [Neurospora crassa OR74A] gi|28926381|gb|EAA35357.1| NCU02066 [Neurospora crassa OR74A]
  misc_feature (1)..(234): NCBI GI: 116182256 Blast Desc: CHGG_01756 [Chaetomium globosum CBS 148.51] gi|88186053|gb|EAQ93521.1| CHGG_01756 [Chaetomium globosum CBS 148.51]
  misc_feature (1)..(215): NCBI GI: 154320989 Blast Desc: BC1G_01369 [Botryotinia fuckeliana B05.10] gi|150851907|gb|EDN27099.1| BC1G_01369 [Botryotinia fuckeliana B05.10]
  misc_feature (1)..(221): NCBI GI: 46105328 Blast Desc: FG00292.1 [Gibberella zeae PH-1]
  misc_feature (1)..(221): NCBI GI: 169616442 Blast Desc: SNOG_11393 [Phaeosphaeria nodorum SN15] gi|160703185|gb|EAT81101.2| SNOG_11393 [Phaeosphaeria nodorum SN15]
  misc_feature (1)..(203): NCBI GI: 171695190 Blast Desc: protein product [Podospora anserina] gi|170947837|emb|CAP60001.1| protein product [Podospora anserina]
  misc_feature (2)..(198): NCBI GI: 261355327 Blast Desc: nucleolar complex protein [Verticillium albo-atrum VaMs.102]
  misc_feature (1)..(198): NCBI GI: 256735528 Blast Desc: NECHADRAFT_65909 [Nectria haematococca mpVI 77-13-4]
  misc_feature (1)..(226): NCBI GI: 145230381 Blast Desc: An01g10820 [Aspergillus niger] gi|134055616|emb|CAK37262.1| protein product [Aspergillus niger]
MRLVPTSTYFPLRFHMIRSLLRISRSTGTYIPLASALLEVLNSAEMRKSPKQATLKSLDFTVAYKAPKSYLRTRIYQDGVGDQVVDLFAEYFVLWSTNIAFPEFALPVIIMLKRWLKQSRKKTGGNNNGKLRSGLVLLVQKLEANAKFIEGKRAKVDFSPRDRSQVDAFLKDFEWEKTPVGAYVVAQRKAGAEKAKMMEQARKEDERKRKEEEQEALEDNVAEMDDEDEEDDDMEDLDEDENGLEDESSDEDEDDE

SEQ ID NO: 25463 - DNA, 2548 bp, Muscodor strobelii; identical to SEQ ID NO: 25460
  misc_feature: SGI EST ID NO. CUFF.59876.0
  misc_feature: Variant of the nucleotide sequence at SEQ ID NO 25461

SEQ ID NO: 25464 - DNA, 708 bp, Muscodor strobelii
  misc_feature: SGI cDNA ID NO. 568691
  misc_feature: Encodes the peptide sequence at SEQ ID NO 25465
atgtctcgacaggcatatgccccgatgccacacagctatgtgccaaacaccgccctgtcggccacgataaatctcgacgaggaagtgaagctggctgagacaagggcggagcgcgaccttcaagactcacttgctgagattttctctatcatcgtgactctggacgaacttgagagagctttcttgaaggatgctatacctgaagccgattacactgacatctgtgaacgatcacttaagcagtacaagtcaatcttggcagatgaaacagtagctaaggcattcagaggactggaagagttcaaagccgaatgggatctcgaagtccccagggcaactgagagactgaaagtcggcatgccctcgaccgccgtcacagcttctacgggcccggcacctcagcccgtgaccaccatagacagcaaagccggtcagcttatcctcaaggctaccgaagatttcatcaccttcttggatgcacttcgcctgggcttacttgccaaagaccagctacatccgctactcaccgatatcatccagagcgcaaacaaggtcaccgatcaagatttcgagaatcggggcaaaatcatccaatggttgataacattgaatcaaatgaaggccacccaagaacttaccgaggaagaagctcgagagcttgaatccgacatcaactctgcatatacgggctttaagaatgcgctatga

SEQ ID NO: 25465 - protein, 235 aa, Muscodor strobelii
  misc_feature: SGI Peptide ID NO. 568691
  misc_feature (44)..(235): Pfam Id: PF03997 Pfam Desc: VPS28 protein
  misc_feature (1)..(235): NCBI GI: 39953848 Blast Desc: MGG_08868 [Magnaporthe grisea 70-15] gi|145021193|gb|EDK05322.1| MGG_08868 [Magnaporthe grisea 70-15]
  misc_feature (3)..(235): NCBI GI: 261355328 Blast Desc: vacuolar protein sorting-associated protein [Verticillium albo-atrum VaMs.102]
  misc_feature (1)..(235): NCBI GI: 171695188 Blast Desc: protein product [Podospora anserina] gi|170947836|emb|CAP60000.1| protein product [Podospora anserina]
  misc_feature (1)..(235): NCBI GI: 256734816 Blast Desc: [Nectria haematococca mpVI 77-13-4]
  misc_feature (2)..(235): NCBI GI: 154320991 Blast Desc: BC1G_01370 [Botryotinia fuckeliana B05.10] gi|150851908|gb|EDN27100.1| BC1G_01370 [Botryotinia fuckeliana B05.10]
  misc_feature (1)..(235): NCBI GI: 46105326 Blast Desc: FG00291.1 [Gibberella zeae PH-1]
  misc_feature (5)..(235): NCBI GI: 259488765 Blast Desc: TPA: vacuolar protein sorting-associated protein Vps28, (AFU_orthologue; AFUA_1G16320) [Aspergillus nidulans FGSC A4]
  misc_feature (5)..(235): NCBI GI: 67517345 Blast Desc: AN0945.2 [Aspergillus nidulans FGSC A4] gi|40746818|gb|EAA65974.1| AN0945.2 [Aspergillus nidulans FGSC A4]
  misc_feature (5)..(235): NCBI GI: 261191570 Blast Desc: vacuolar protein sorting-associated protein Vps28 [Ajellomyces dermatitidis SLH14081] gi|239589959|gb|EEQ72602.1| vacuolar protein sorting-associated protein Vps28 [Ajellomyces
  misc_feature (5)..(235): NCBI GI: 226295094 Blast Desc: conserved [Paracoccidioides brasiliensis Pb18]
MSRQAYAPMPHSYVPNTALSATINLDEEVKLAETRAERDLQDSLAEIFSIIVTLDELERAFLKDAIPEADYTDICERSLKQYKSILADETVAKAFRGLEEFKAEWDLEVPRATERLKVGMPSTAVTASTGPAPQPVTTIDSKAGQLILKATEDFITFLDALRLGLLAKDQLHPLLTDIIQSANKVTDQDFENRGKIIQWLITLNQMKATQELTEEEARELESDINSAYTGFKNAL

SEQ ID NO: 25466 - DNA, 4068 bp, Muscodor strobelii
  misc_feature: SGI EST ID NO. CUFF.59879.0
  misc_feature: Variant of the nucleotide sequence at SEQ ID NO 25464
tcgcggggcagcttatcgctgaacagcgcgctatccctcaggtactaaaccaaagtggagcttaaggtaggataatggtgcactccctgttgcctgtcgtacgcgtgacagcggcttcgtcattcgtcgctcctgccgttttagaggcctagttgttcttcgatcatcctcagcacctgtttccgaacgtaatagtgattttcattgacatatatatggaaataatttcctttaaaaaaaacccgtctgtcgattgccaacatgtctcgacaggcatatgccccgatgccacacagctatgtgccaaacaccgccctgtcggccacgataaatctcgacgaggaagtgaagctggctgagacaagggcggagcgcgaccttcaagactcacttgctgagattttctctatcatcgtgactctggacgaacttgagagagctttcttgaaggatgctatacctgaagccgattacactgacatctgtgaacgatcacttaagcagtacaagtcaatcttggcagatgaaacagtagctaaggcattcagaggactggaagagttcaaagccgaatgggatctcgaagtccccagggcaactgagagactgaaagtcggcatgccctcgaccgccgtcacagcttctacgggcccggcacctcagcccgtgaccaccatagacagcaaagccggtcagcttatcctcaaggctaccgaagatttcatcaccttcttggatgcacttcgcctgggcttacttgccaaagaccagctacatccgctactcaccgatatcatccagagcgcaaacaaggtcaccgatcaagatttcgagaatcggggcaaaatcatccaatggttgataacattgaatcaaatgaaggccacccaagaacttaccgaggaagaagctcgagagcttgaatccgacatcaactctgcatatacgggctttaagaatgcgctatgaagaatctcttccctcacctccccgcaacgtatgccgcgagacgcgggcaactccacgggattcccgccgagataccatgcaaatgacgcgaaagtggatttccctccaattgttactctattttgccaacagtttccgaaagcatgcagtgcactcaatacaattgtgagtcatgggtatgggagatagaataagaatcctgactctcagcatactcgggtgtcgaggtcgggtggagtagtcggaatacatgccaaacgtgcggctccggcgccccttattcactcagaacaaaacggacttatgagttgcctatacttacaaattggagtaccgttatgtgatcagcgcaatgcggtgtatctcgggtgaaaaacgcttatcctctaccccatggaaccccagtatgatgtcatgttaccgcgtttcgtgtccctcaatcggatgcaacgcggagagctgccgaccgaccattacgatataagacagcaaaatgccgccaataactattttgttccttggtaagcttctcaaaagacaccaagatgacccgagcgctcgtcctagcggcattcgccttggccgcgacggccctctgccagaaggctgggatttgtgttgtggagccagcatgcaacggagcggactcggcgccggccattgttgaagcattccgacgttgcggacacaatgatgagtcgcatcggggcaaagtgattttcaagaatgagacatatcatatcaagagtgttatgaataccacgggacttggcaacgtggacgttgaccaccaaggcactctgctgtgggatcagaatatcccctattggttgaaccactcacttcctgtcggataccagaatcagtcaagcgcttggttatttggcggaaacaacatcaattgggttggccatggatatggtacccttgacggcaatggccaagtttggtatgactttgtgaacggtacaaataattatcctagacgacctcaccagataaccttcaccgaaacacacgacagccatttcagtggtattcgcttcgtccagtctcagatgtggactatgaccctcatccacagcacaaacatcttgctagaagatatctacgtgaatagcactgataccaaacaggaagtcggttttgctttctcgtctcttaatacagacggcgcagatactgtgtacgcggataacatcacgttccgtggatggacagtggacaatggcgacgatagcatcgcgcttaaggccaacagcaccaatattctaattgagaattgccgcttttataccgggctcggcgtcgccatcgggtccattggccagtatcaaggcgtcgtcgagatgattgaaaatatgacggcgcgcaacattgagatcaataacatgcgctacggcgcgtatgtgaagacttggactggcacgcggaacggctatccgcctaacggaggaggcggtggccttggatatgccgccaacatgctcttttccaacttcactttacataacgccacaggcatcttcgccgtgacccaatgcacgcactataatgacgccaccggagattgtgatacatctgagtttcaaatacgaaatctaacgctcgaggactggaagggcgactgcacaagtgatgtcgtggccgatttacagtgtagcgcagcagcaccatgcaccggggttgagattaagggcattgatatcattgacacagtgaacaacacagcgccggccaactacctctgcgatagtgttcttgatccgacgggctttcgcgtttgtacaggggcgccttgggaggaaaaccctcgataagcaatcgtgcgagtagtaccatagatagttagttacctcagtagacacgctcagcttcaacgcttctccatcgctccgtacccaaacatgttcgccctaatcacctatgtctagacaacttcatctgactcaacggattataatctttgacttcactcccctccccctctccttcacccttgcgctctcgccaatcctgttccaaaatccccatctcatgcatatcatgccacttcccctgaaaccaaagcgcctgccgtttgacgccttcctctctgaatcccaacttttggtataatcttatcgcgtcctggttccagccgtagacacttagttcaacgcgatgtaggcgtgcgtagtcgaatgcccagtctaacgcccaggtggtggcttctgtaccgtagccctgtcgttggtatttagaggagattaggagtgatagtgcactgttcgcgtgctgcaccatggttggggagggacgcgttagggagattacgccgatgggctttggcttcttccaggaaatggtggagctggaggtgccggtggtagtggtgatggaagagggaggaaggcagatgtacattagtagtagacgactggatgatagagctgttatgacggattctgtatcgctgcgtttgcgccctatggggagggcgtgtgtgaaattcagcactatgatgtggactgttagtttttttgctgcagcgcatttgatactctgtttgagtctttcgtctttcaatctatcttgaatactcggggttcttcacttgatagattatgactctgtatgaaaattggacacatacttccactgctcatcagcactgttagctaactgcctgagtgtaggattgcggggaaacttacggctcgtcgaatagatcgtgcatgaagtcgtcgtgctctggatgtctctctactgctatgtattgtagacgttgcgatctgaatatgtccatcttgtttgattcttgaaattttgtaagattggtgtagttgttttgagggtgaggctgcactacagtgatgagagtgttgagatgactgagaggtgttcggagttggtggggtagttgtcggacttaagacttgcacaagagattgctctactaagatatgtgcatttcgtataggacaacagtgtaactaaattgccgcgcgtgtgtaacaagtcgtttcctttcgtttattttcaaacatgatcattctggtgtaacttagcacaaatgtatgtgcggttgttgctctcttaggtttatgcctattgcca

SEQ ID NO: 25467 - DNA, 1275 bp, Muscodor strobelii
  misc_feature: SGI cDNA ID NO. 568692
  misc_feature: Encodes the peptide sequence at SEQ ID NO 25468
atgacccgagcgctcgtcctagcggcattcgccttggccgcgacggccctctgccagaaggctgggatttgtgttgtggagccagcatgcaacggagcggactcggcgccggccattgttgaagcattccgacgttgcggacacaatgatgagtcgcatcggggcaaagtgattttcaagaatgagacatatcatatcaagagtgttatgaataccacgggacttggcaacgtggacgttgaccaccaaggcactctgctgtgggatcagaatatcccctattggttgaaccactcacttcctgtcggataccagaatcagtcaagcgcttggttatttggcggaaacaacatcaattgggttggccatggatatggtacccttgacggcaatggccaagtttggtatgactttgtgaacggtacaaataattatcctagacgacctcaccagataaccttcaccgaaacacacgacagccatttcagtggtattcgcttcgtccagtctcagatgtggactatgaccctcatccacagcacaaacatcttgctagaagatatctacgtgaatagcactgataccaaacaggaagtcggttttgctttctcgtctcttaatacagacggcgcagatactgtgtacgcggataacatcacgttccgtggatggacagtggacaatggcgacgatagcatcgcgcttaaggccaacagcaccaatattctaattgagaattgccgcttttataccgggctcggcgtcgccatcgggtccattggccagtatcaaggcgtcgtcgagatgattgaaaatatgacggcgcgcaacattgagatcaataacatgcgctacggcgcgtatgtgaagacttggactggcacgcggaacggctatccgcctaacggaggaggcggtggccttggatatgccgccaacatgctcttttccaacttcactttacataacgccacaggcatcttcgccgtgacccaatgcacgcactataatgacgccaccggagattgtgatacatctgagtttcaaatacgaaatctaacgctcgaggactggaagggcgactgcacaagtgatgtcgtggccgatttacagtgtagcgcagcagcaccatgcaccggggttgagattaagggcattgatatcattgacacagtgaacaacacagcgccggccaactacctctgcgatagtgttcttgatccgacgggctttcgcgtttgtacaggggcgccttgggaggaaaaccctcgataa

SEQ ID NO: 25468 - protein, 424 aa, Muscodor strobelii
  misc_feature: SGI Peptide ID NO. 568692
  misc_feature (46)..(402): Pfam Id: PF00295 Pfam Desc: Glycosyl hydrolases family 28
  misc_feature (123)..(263): Pfam Id: PF00295 Pfam Desc: Glycosyl hydrolases family 28
  misc_feature (1)..(424): NCBI GI: 154294159 Blast Desc: BC1G_13970 [Botryotinia fuckeliana B05.10] gi|150845017|gb|EDN20210.1| BC1G_13970 [Botryotinia fuckeliana B05.10]
  misc_feature (4)..(424): NCBI GI: 156059056 Blast Desc: SS1G_03540 [Sclerotinia sclerotiorum 1980] gi|154701327|gb|EDO01066.1| SS1G_03540 [Sclerotinia sclerotiorum 1980]
  misc_feature (5)..(421): NCBI GI: 159123360 Blast Desc: exo-polygalacturonase, [Aspergillus fumigatus A1163]
  misc_feature (5)..(421): NCBI GI: 70986760 Blast Desc: exo-polygalacturonase [Aspergillus fumigatus Af293] gi|66846499|gb|EAL86831.1| exo-polygalacturonase, [Aspergillus fumigatus Af293]
  misc_feature (5)..(421): NCBI GI: 119483130 Blast Desc: polygalacturonase (pectinase), [Neosartorya fischeri NRRL 181] gi|119409748|gb|EAW19696.1| polygalacturonase (pectinase), [Neosartorya fischeri NRRL 181]
  misc_feature (3)..(416): NCBI GI: 145234917 Blast Desc: An03g02080 [Aspergillus niger] gi|89113912|gb|ABD61567.1| exo-rhamnogalacturonase B [Aspergillus niger] gi|134057783|emb|CAK38178.1| protein product [Aspergillus
  misc_feature (15)..(396): NCBI GI: 154322174 Blast Desc: BC1G_01234 [Botryotinia fuckeliana B05.10] gi|150850481|gb|EDN25674.1| BC1G_01234 [Botryotinia fuckeliana B05.10]
  misc_feature (24)..(418): NCBI GI: 255943211 Blast Desc: Pc18g05470 [Penicillium chrysogenum Wisconsin 54-1255] gi|211587107|emb|CAP94771.1| Pc18g05470 [Penicillium chrysogenum Wisconsin 54-1255]
  misc_feature (16)..(416): NCBI GI: 261358727 Blast Desc: exo-rhamnogalacturonase B [Verticillium albo-atrum VaMs.102]
  misc_feature (6)..(420): NCBI GI: 259487591 Blast Desc: TPA: exo-polygalacturonase, (AFU_orthologue; AFUA_7G06410) [Aspergillus nidulans FGSC A4]
  misc_feature (24)..(388): SWISSPROT Homolog: EC 3.2.1.67 Galacturan 1,4-alpha-galacturonidase
MTRALVLAAFALAATALCQKAGICVVEPACNGADSAPAIVEAFRRCGHNDESHRGKVIFKNETYHIKSVMNTTGLGNVDVDHQGTLLWDQNIPYWLNHSLPVGYQNQSSAWLFGGNNINWVGHGYGTLDGNGQVWYDFVNGTNNYPRRPHQITFTETHDSHFSGIRFVQSQMWTMTLIHSTNILLEDIYVNSTDTKQEVGFAFSSLNTDGADTVYADNITFRGWTVDNGDDSIALKANSTNILIENCRFYTGLGVAIGSIGQYQGVVEMIENMTARNIEINNMRYGAYVKTWTGTRNGYPPNGGGGGLGYAANMLFSNFTLHNATGIFAVTQCTHYNDATGDCDTSEFQIRNLTLEDWKGDCTSDVVADLQCSAAAPCTGVEIKGIDIIDTVNNTAPANYLCDSVLDPTGFRVCTGAPWEENPR

SEQ ID NO: 25469 - DNA, 4068 bp, Muscodor strobelii; identical to SEQ ID NO: 25466
  misc_feature: SGI EST ID NO. CUFF.59879.0
  misc_feature: Variant of the nucleotide sequence at SEQ ID NO 25467

SEQ ID NO: 25470 - DNA, 933 bp, Muscodor strobelii
  misc_feature: SGI cDNA ID NO. 568693
  misc_feature: Encodes the peptide sequence at SEQ ID NO 25471
atgacatcgacgtcgactttgccgccagatatcagtgaaggacctactattaacgccgtggcctggacaggcgcggccgtttccaccatctgtgtcgttttgcggctatacagccgaattttcattatccgagctccaggctgggatgatcccgttgtcgttttggccgccattctaaacatcaccgcgaaggcgctaacttcagtatctatttcccatggcctcggtcgccacgccgtatatctatcaagcaatgatatctcgaagattctatactataccccgatcctggaaacagcggggatcattgcgtattgtctacccaagatcgctatcgtcatcttcattcgaagactaatgggtacggcaaaacgcggtctctgggtcttgtatggtcctaccataggtctttttatttcgttaccagtgtctattgtcatagtattcctcgagtgcaatccacccggcgtcatattgcatccttttgcgccgaagaagggatgtgttccgcgagaggcctatactatcgtcaacacgatagccagtgtatggtcggccgtcgcggatcttgtgttggctgttttccctatatttctcctgtggaaaatccagatggacaagtcgagaaaacgtaccatcatggcaatcatggcgttcggttctttcgccacgatcgcagccattatcaagtcgacacaacttcaccgacaaaactcgcctgacgcaacatatgacatctttgtgctcttgctttccctgtttgtcgagatcgacctttgcatcgttaccgcgtgcgtgccggcgtttcctaagctttggcggcactggtttggcaaagaagatggaatccctgcaaggggacagcattatcgtttggaaagtccgagcggtcattataagggactccatgatcataatgaagtaaacagttga

SEQ ID NO: 25471 - protein, 310 aa, Muscodor strobelii
  misc_feature: SGI Peptide ID NO. 568693
  misc_feature (12)..(307): NCBI GI: 255943321 Blast Desc: Pc18g06020 [Penicillium chrysogenum Wisconsin 54-1255] gi|211587162|emb|CAP94826.1| Pc18g06020 [Penicillium chrysogenum Wisconsin 54-1255]
  misc_feature (12)..(298): NCBI GI: 212526522 Blast Desc: conserved [Penicillium marneffei ATCC 18224] gi|210072816|gb|EEA26903.1| conserved [Penicillium marneffei ATCC 18224]
  misc_feature (12)..(309): NCBI GI: 242783189 Blast Desc: conserved [Talaromyces stipitatus ATCC 10500] gi|218720293|gb|EED19712.1| conserved [Talaromyces stipitatus ATCC 10500]
  misc_feature (5)..(298): NCBI GI: 242781131 Blast Desc: conserved [Talaromyces stipitatus ATCC 10500] gi|218719886|gb|EED19305.1| conserved [Talaromyces stipitatus ATCC 10500]
  misc_feature (10)..(306): NCBI GI: 119175352 Blast Desc: CIMG_09540 [Coccidioides immitis RS]
  misc_feature (8)..(294): NCBI GI: 115390995 Blast Desc: conserved [Aspergillus terreus NIH2624] gi|114193926|gb|EAU35626.1| conserved [Aspergillus terreus NIH2624]
  misc_feature (10)..(272): NCBI GI: 238844609 Blast Desc: integral membrane protein [Microsporum canis CBS 113480]
  misc_feature (10)..(306): NCBI GI: 240107097 Blast Desc: CPC735_018880 [Coccidioides posadasii C735 delta SOWgp]
  misc_feature (9)..(280): NCBI GI: 121709772 Blast Desc: conserved [Aspergillus clavatus NRRL 1] gi|119400665|gb|EAW11090.1| conserved [Aspergillus clavatus NRRL 1]
  misc_feature (9)..(307): NCBI GI: 46111465 Blast Desc: FG02614.1 [Gibberella zeae PH-1]
MTSTSTLPPDISEGPTINAVAWTGAAVSTICVVLRLYSRIFIIRAPGWDDPVVVLAAILNITAKALTSVSISHGLGRHAVYLSSNDISKILYYTPILETAGIIAYCLPKIAIVIFIRRLMGTAKRGLWVLYGPTIGLFISLPVSIVIVFLECNPPGVILHPFAPKKGCVPREAYTIVNTIASVWSAVADLVLAVFPIFLLWKIQMDKSRKRTIMAIMAFGSFATIAAIIKSTQLHRQNSPDATYDIFVLLLSLFVEIDLCIVTACVPAFPKLWRHWFGKEDGIPARGQHYRLESPSGHYKGLHDHNEVNS

SEQ ID NO: 25472 - DNA, 292 bp, Muscodor strobelii
  misc_feature: SGI EST ID NO. CUFF.59885.0
  misc_feature: Variant of the nucleotide sequence at SEQ ID NO 25470
gcgagaggcctatactatcgtcaacacgatagccagtgtatggtcggccgtcgcggatcttgtgttggctgttttccctatatttctcctgtggaaaatccagatggacaagtcgagaaaacgtaccatcatggcaatcatggcgttcggttctttcgccacgatcgcagccattatcaagtcgacacaacttcaccgacaaaactcgcctgacgcaacatatgacatctttgtgctcttgctttccctgtttgtcgagatcgacctttgcatcgttaccgcgtgcgtgccg

SEQ ID NO: 25473 - DNA, 390 bp, Muscodor strobelii
  misc_feature: SGI cDNA ID NO. 568694
  misc_feature: Encodes the peptide sequence at SEQ ID NO 25474
atgcatatcaagaacattcttctcgcatttgccgccctctcactcggcagcgcatccattattcccagttccgaagcaactgcaacaggactcttctccgccgtgtctcgccgagctcaccctgccggctccgacggagcccttcaagctgcggcgcaagctcacaactgggcattaggtcaacctaaatcaaaacccaaggggcactcgcgacggacaacaggccatggcttggcagacagtctgcttgatgcagcaactgccgcgcataagtgggctttgggtcaaaaacactctcgtcgcgaccatgaaggttctgatgatgtgtttgagccggagaacttcccccttgttcaggctgatcgccggaaggcttttgagaagtcttaa

SEQ ID NO: 25474 - protein, 129 aa, Muscodor strobelii
  misc_feature: SGI Peptide ID NO. 568694
MHIKNILLAFAALSLGSASIIPSSEATATGLFSAVSRRAHPAGSDGALQAAAQAHNWALGQPKSKPKGHSRRTTGHGLADSLLDAATAAHKWALGQKHSRRDHEGSDDVFEPENFPLVQADRRKAFEKS

SEQ ID NO: 25475 - DNA, 676 bp, Muscodor strobelii
  misc_feature: SGI EST ID NO. CUFF.59888.0
  misc_feature: Variant of the nucleotide sequence at SEQ ID NO 25473
gcggaactccgtctcctctcgtctccctcatccttcataacagaacatattcaatctcccaagcagtcactctcttttccacgttcctttttttctacattcgcttcgccttcaacctcgttcttactagcttctaatagtagctactacaagactcgctgattatacatcaaccaaaacccaactcaatccatacaaacaacaaaaaatgcatatcaagaacattcttctcgcatttgccgccctctcactcggcagcgcatccattattcccagttccgaagcaactgcaacaggactcttctccgccgtgtctcgccgagctcaccctgccggctccgacggagcccttcaagctgcggcgcaagctcacaactgggcattaggtcaacctaaatcaaaacccaaggggcactcgcgacggacaacaggccatggcttggcagacagtctgcttgatgcagcaactgccgcgcataagtgggctttgggtcaaaaacactctcgtcgcgaccatgaaggttctgatgatgtgtttgagccggagaacttcccccttgttcaggctgatcgccggaaggcttttgagaagtcttaaggggctggttgtgcaagaaacatactacattcttagcagactagatctaaatacaattgtcactcgcttgctcacgcg

SEQ ID NO: 25476 - DNA, 1533 bp, Muscodor strobelii
  misc_feature: SGI cDNA ID NO. 568695
  misc_feature: Encodes the peptide sequence at SEQ ID NO 25477
atgttgtccctcagtcttttcatcgctggggtctccgcagccactctatggccgagacaagccacgagggagctatcagttccctcacaggcacctgcgggaaagcagatcattcccggaaattatcagtcgtattcgattgaattcaattggatgctagactatggtggcaataactctcatccgaacaaattctcctcccaactactgcgaaatcttgccgatatatcgggagcttatccaatcatccgagcaggcgggactacagcgaatagagcggtattcattgcaaaccagacgcaggctcttatccagagattcacgtcaaatgcggatcagcctagttctttaagcattggcccgacgtggattgagagctttcagcaatttcccaagggcacaaagtatatctacaatctgaactttgcagatggcgaggcgggcttgaatcaaaccgttctcgaggccgcgaatgcttttggagggctaggcgagtctttgttcgcttttgaaattgggaatgaggttgacggctggccatgcggatctcgccgtccgtgcaattggactatcaacagttatgtcgaccaatggcttgaatacgccgaagcaattggcgatgaggtaattggcgcctcagccgatgcagaccttgaacctcttttccaaggttgtgcttttgaagcaccgcgacacttgggatacaacaacacgccattctggaacgtcgaaaatgcactgattgctggcatgggcaactccagtcggacaaagacagtagctgatcacgattacatgggctcagcatgcgaaggcacatcacaagtggcaacaatcgcttataacctactgaaccacacgcatatgacatcaatcgcctacttccacgactatctcgggaatgtcacatcgaaatatggcgtcccatactatctcggcgagacgaattccgtttcatgccagggtcttgcgaacgtatccgatgtctttgccgcagcgctttgggctgtggactatacactctacatggcgagtttgaaagtcgcgcaagtatattttcatcaaggaacaccatacagatatagtgcttggcagcccgtcgagtacaacggtacagcagcgagggtcaaaccgttgtattatgcgaatatgctcacgtctactgcttttgctggcggcgataagcaggttgctgtgttgatcaacgagacttcgtttactgcgtatggtatttataatgcgaagctggatggcgcattggattcggttgcattactgaatctcgatgtgttcaattccacgatggatgctgccaacaggccagttactgttgtgcaactgccgggaaatagcagtggcgcgacagtgcaaagacttactagtccgggcgttgagatctccactggtataacatttgcgggccaaaatgtgagcgatgagaatgggactataatgggtgagaagcaactggagcctgtagttgatgggcaggtcaaggttaaagccggcgaggcagtgttggtcaaattttga

SEQ ID NO: 25477 - protein, 510 aa, Muscodor strobelii
  misc_feature: SGI Peptide ID NO. 568695
  misc_feature (1)..(509): NCBI GI: 145248842 Blast Desc: An14g01330 [Aspergillus niger] gi|134081431|emb|CAK41913.1| protein product [Aspergillus niger]
  misc_feature (163)..(509): NCBI GI: 238495758 Blast Desc: conserved [Aspergillus flavus NRRL3357] gi|220695765|gb|EED52108.1| conserved [Aspergillus flavus NRRL3357]
  misc_feature (83)..(510): NCBI GI: 169610051 Blast Desc: SNOG_08119 [Phaeosphaeria nodorum SN15] gi|160701970|gb|EAT84395.2| SNOG_08119 [Phaeosphaeria nodorum SN15]
  misc_feature (42)..(474): NCBI GI: 145233889 Blast Desc: An02g11890 [Aspergillus niger] gi|134057255|emb|CAK96418.1| protein product [Aspergillus niger]
  misc_feature (20)..(510): NCBI GI: 156060939 Blast Desc: SS1G_02612 [Sclerotinia sclerotiorum 1980] gi|154700016|gb|EDN99754.1| SS1G_02612 [Sclerotinia sclerotiorum 1980]
  misc_feature (24)..(503): NCBI GI: 171694932 Blast Desc: protein product [Podospora anserina] gi|170947708|emb|CAP59870.1| protein product [Podospora anserina]
  misc_feature (3)..(378): NCBI GI: 115492861 Blast Desc: [Aspergillus terreus NIH2624] gi|114197918|gb|EAU39618.1| [Aspergillus terreus NIH2624]
  misc_feature (24)..(510): NCBI GI: 85114813 Blast Desc: NCU00937 [Neurospora crassa OR74A] gi|28926556|gb|EAA35527.1| [Neurospora crassa OR74A] gi|156071386|dbj|BAF75800.1| beta-glucuronidase [Neurospora
  misc_feature (34)..(480): NCBI GI: 261358686 Blast Desc: beta-glucuronidase [Verticillium albo-atrum VaMs.102]
  misc_feature (64)..(509): NCBI GI: 169762450 Blast Desc: [Aspergillus oryzae RIB40] gi|83770153|dbj|BAE60286.1| protein product [Aspergillus oryzae]
MLSLSLFIAGVSAATLWPRQATRELSVPSQAPAGKQIIPGNYQSYSIEFNWMLDYGGNNSHPNKFSSQLLRNLADISGAYPIIRAGGTTANRAVFIANQTQALIQRFTSNADQPSSLSIGPTWIESFQQFPKGTKYIYNLNFADGEAGLNQTVLEAANAFGGLGESLFAFEIGNEVDGWPCGSRRPCNWTINSYVDQWLEYAEAIGDEVIGASADADLEPLFQGCAFEAPRHLGYNNTPFWNVENALIAGMGNSSRTKTVADHDYMGSACEGTSQVATIAYNLLNHTHMTSIAYFHDYLGNVTSKYGVPYYLGETNSVSCQGLANVSDVFAAALWAVDYTLYMASLKVAQVYFHQGTPYRYSAWQPVEYNGTAARVKPLYYANMLTSTAFAGGDKQVAVLINETSFTAYGIYNAKLDGALDSVALLNLDVFNSTMDAANRPVTVVQLPGNSSGATVQRLTSPGVEISTGITFAGQNVSDENGTIMGEKQLEPVVDGQVKVKAGEAVLVKF

SEQ ID NO: 25478 - DNA, 549 bp, Muscodor strobelii
  misc_feature: SGI EST ID NO. CUFF.59895.0
  misc_feature: Variant of the nucleotide sequence at SEQ ID NO 25476
ctcacaggcacctgcgggaaagcagatcattcccggaaattatcagtcgtattcgattgaattcaattggatgctagactatggtggcaataactcgttcgtaggatcttcgaatttcgtaaggtccacataactaacttggagcaacaagtcatccgaacaaattctcctcccaactactgcgaaatcttgccgatatatcgggagcttatccaatcatccgagcaggcgggactacagcgaatagagcggtattcattgcaaaccagacgcaggctcttatccagagattcacgtcaaatgcggatcagcctagttctttaagcattggcccgacgtggattgagagctttcagcaatttcccaagggcacaaagtatatctacaatctgaactttgcagatggcgaggcgggcttgaatcaaaccgttctcgaggccgcgaatgcttttggagggctaggcgagtctttgttcgcttttgaaattgggaatgaggttgacggctggccatgcggatctcgccgtccgtgcaattggactatcaaca

SEQ ID NO: 25479 - DNA, 1056 bp, Muscodor strobelii
  misc_feature: SGI cDNA ID NO. 568696
  misc_feature: Encodes the peptide sequence at SEQ ID NO 25480
atgaaggctgtcaagagtatggcattaggacgtcatgagactgtcacgaacgttcccattccttctgccagcggccatcctggctacgttctgatgaaacctaaatacgtcggcgttaatcactgcgactactgtttcgtcgattatgacttcatgttccaggagggcgctacgctaggtagtgagtgctgtggcgaggtcgtggaagtctccgaggagggttgcgagcgcgtaaaagtcggagacattattgcaggctgcgtttttgcaactaatacagaagtcttccccaacgccggatgcttcgccgaatacgcattggtcaaaggggacgcattcttcaacgttcgggctcttggagatgccgcgtccgaggagcaagctgctggtctgggtatcgcattctctactgcatttactgctctttaccatattttgaagcttccgtggcctggaaaacaggatccgagtgtccaagatacgattctcatatgtggtggtgcgaccaataccggcctcattgccatacagctagccaagctctcagggctcgcagtgcttgcaacctcttcgtcaacgaacttcgacctgcttctcaatcgaggcgcagatcacgtgtttgattatagtgacggcgagtcttgtgctgaacagatccgcgagaaaactagaaacaacctcaaactcattgttgattgtgttgggactggtgacggcccgaagctctgtggcgaggtcatcagtagtggcgggacatacgcatcggtatctccatttggcctaccacagaagaacaaagatgtcgccgttcatttcattgaaggcgagaaagtgcttggggagagctttcgaatgatgggcaatatggtacctgcggatatggcattgtacgaggaatggaagaaattcctacctatatgcgagacgctcattcgagagaggaaaattctgctgtcgccaaccaagcttgtcggtggactagatgcattagatgagacattgaatttgttgaggggatggaacaaccatggaacgaagctagtctgctctatgtga

SEQ ID NO: 25480 - protein, 351 aa, Muscodor strobelii
  misc_feature: SGI Peptide ID NO. 568696
  misc_feature (27)..(118): Pfam Id: PF08240 Pfam Desc: Alcohol dehydrogenase GroES-like domain
  misc_feature (158)..(299): Pfam Id: PF00107 Pfam Desc: Zinc-binding dehydrogenase
  misc_feature (1)..(351): NCBI GI: 121699229 Blast Desc: zinc-binding oxidoreductase ToxD, [Aspergillus clavatus NRRL 1] gi|119396093|gb|EAW06525.1| zinc-binding oxidoreductase ToxD, [Aspergillus clavatus NRRL 1]
  misc_feature (14)..(323): NCBI GI: 255939932 Blast Desc: Pc16g03780 [Penicillium chrysogenum Wisconsin 54-1255] gi|211585358|emb|CAP93048.1| Pc16g03780 [Penicillium chrysogenum Wisconsin 54-1255]
  misc_feature (1)..(351): NCBI GI: 115397707 Blast Desc: protein TOXD [Aspergillus terreus NIH2624] gi|114192636|gb|EAU34336.1| protein TOXD [Aspergillus terreus NIH2624]
  misc_feature (29)..(348): NCBI GI: 145239705 Blast Desc: An08g03820 [Aspergillus niger] gi|134077011|emb|CAK39885.1| protein product [Aspergillus niger]
  misc_feature (1)..(351): NCBI GI: 121700476 Blast Desc: zinc-binding oxidoreductase ToxD, [Aspergillus clavatus NRRL 1] gi|119396645|gb|EAW07077.1| zinc-binding oxidoreductase ToxD, [Aspergillus clavatus NRRL 1]
  misc_feature (1)..(351): NCBI GI: 255944689 Blast Desc: Pc20g05830 [Penicillium chrysogenum Wisconsin 54-1255] gi|211587847|emb|CAP85912.1| Pc20g05830 [Penicillium chrysogenum Wisconsin 54-1255]
  misc_feature (15)..(348): NCBI GI: 259483131 Blast Desc: TPA: oxidoreductase (Eurofung) [Aspergillus nidulans FGSC A4]
  misc_feature (1)..(351): NCBI GI: 169766250 Blast Desc: [Aspergillus oryzae RIB40] gi|238482955|ref|XP_002372716.1| zinc-binding oxidoreductase ToxD, [Aspergillus flavus NRRL3357] gi|83765451|dbj|BAE55594.1|
  misc_feature (1)..(351): NCBI GI: 119471203 Blast Desc: zinc-binding oxidoreductase ToxD, [Neosartorya fischeri NRRL 181] gi|119406290|gb|EAW16241.1| zinc-binding oxidoreductase ToxD, [Neosartorya fischeri NRRL 181]
  misc_feature (15)..(338): NCBI GI: 67903328 Blast Desc: AN8651.2 [Aspergillus nidulans FGSC A4] gi|40741495|gb|EAA60685.1| AN8651.2 [Aspergillus nidulans FGSC A4]
MKAVKSMALGRHETVTNVPIPSASGHPGYVLMKPKYVGVNHCDYCFVDYDFMFQEGATLGSECCGEVVEVSEEGCERVKVGDIIAGCVFATNTEVFPNAGCFAEYALVKGDAFFNVRALGDAASEEQAAGLGIAFSTAFTALYHILKLPWPGKQDPSVQDTILICGGATNTGLIAIQLAKLSGLAVLATSSSTNFDLLLNRGADHVFDYSDGESCAEQIREKTRNNLKLIVDCVGTGDGPKLCGEVISSGGTYASVSPFGLPQKNKDVAVHFIEGEKVLGESFRMMGNMVPADMALYEEWKKFLPICETLIRERKILLSPTKLVGGLDALDETLNLLRGWNNHGTKLVCSM

SEQ ID NO: 25481 - DNA, 1311 bp, Muscodor strobelii
  misc_feature: SGI EST ID NO. CUFF.59900.0
  misc_feature: Variant of the nucleotide sequence at SEQ ID NO 25479
cttcaacgtaggccgtatatggcctatatggagctgcatgcaatgaatgtttttttgttttgtttttgtttttaaatctcaacctatcgttcgtcggataccaaagtaaagtacggtagctctagcaatacgatcaccggcatccaagatgaaggctgtcaagagtatggcattaggacgtcatgagactgtcacgaacgttcccattccttctgccagcggccatcctggctacgttctgatgaaacctaaatacgtcggcgttaatcactgcgactactgtttcgtcgattatgacttcatgttccaggagggcgctacgctaggtagtgagtgctgtggcgaggtcgtggaagtctccgaggagggttgcgagcgcgtaaaagtcggagacattattgcaggctgcgtttttgcaactaatacagaagtcttccccaacgccggatgcttcgccgaatacgcattggtcaaaggggacgcattcttcaacgttcgggctcttggagatgccgcgtccgaggagcaagctgctggtctgggtatcgcattctctactgcatttactgctctttaccatattttgaagcttccgtggcctggaaaacaggatccgagtgtccaagatacgattctcatatgtggtggtgcgaccaataccggcctcattgccatacagctagccaagctctcagggctcgcagtgcttgcaacctcttcgtcaacgaacttcgacctgcttctcaatcgaggcgcagatcacgtgtttgattatagtgacggcgagtcttgtgctgaacagatccgcgagaaaactagaaacaacctcaaactcattgttgattgtgttgggactggtgacggcccgaagctctgtggcgaggtcatcagtagtggcgggacatacgcatcggtatctccatttggcctaccacagaagaacaaagatgtcgccgttcatttcattgaaggcgagaaagtgcttggggagagctttcgaatgatgggcaatatggtacctgcggatatggcattgtacgaggaatggaagaaattcctacctatatgcgagacgctcattcgagagaggaaaattctgctgtcgccaaccaagcttgtcggtggactagatgcattagatgagacattgaatttgttgaggggatggaacaaccatggaacgaagctagtctgctctatgtgattggggctgtcaaaatacggctcgacggtcgactccggcccatattccactttcaactatcatgtcacagttaatgcacagcgtcgattgagtaagaacctcccgtg

SEQ ID NO: 25482 - DNA, 888 bp, Muscodor strobelii
  misc_feature: SGI cDNA ID NO. 568697
  misc_feature: Encodes the peptide sequence at SEQ ID NO 25483
atgcggactattctctgcttggcgggcttcgcagccgtcacgagggctttcaagtctacgacactggccagctggacggataacccaagcagcctgaaggcttctatcgtcctgactccggatacaatcaaggagaaaccgggtcttgtattagggcttcatccttgcggtggcactggtcaacagtatcaaggaatgaccactcttccagctcagatcgataagaataacttcatcatgctatttccgacatcgaatgttgaggatgggttcaactgctgggacgctttctcgacaaagactaatgtccatgatggtggcagtgattcggagggactcgccggtctcgtgaagactgtcatggcgcagtacggcgtagatcctgccaaggtcttcattatcggcgcatcttccggagccatggaagcaaatgttctcgctgccacctatccagacatcttcaaggccgctatctcatactctggtgtaccagcaggatgctggcttggcgccgcctcgtcaacaccactggctcgcaatcaggattgcccattgggtaaaaaggcgtccacatatacggcaacacagtggtcggaccttgtcaagcaggcgtatccgggttacaatggaacataccctaagatgatgattgtccacggtaccgccgactccgccgttacaatcaacaacctggccgcccagttgacccagtggtctactatagaaggcgttacattcgcgcagaacgtcagcaacacgcctatcaccaattggaagaaggttgtttacggtgacggcaccaaagttgtaggttatgaggttcagggcggcgggcatattccgccctttcagctcggcatcacgcttaactggtttggcttttcgtag

SEQ ID NO: 25483 - protein, 295 aa, Muscodor strobelii
  misc_feature: SGI Peptide ID NO. 568697
  misc_feature (4)..(293): NCBI GI: 212541749 Blast Desc: acetyl xylan esterase, [Penicillium marneffei ATCC 18224] gi|210065936|gb|EEA20029.1| acetyl xylan esterase, [Penicillium marneffei ATCC 18224]
  misc_feature (4)..(294): NCBI GI: 25090320 Blast Desc: FAEB_PENFN RecName: Full=Feruloyl esterase B; AltName: Full=Ferulic acid esterase B; Short=FAEB; AltName: Full=Cinnamoyl esterase; Flags: Precursor gi|10945109|emb|CAC14144.1| cinnamoyl
  misc_feature (20)..(293): NCBI GI: 242791306 Blast Desc: feruloyl esterase B precursor, [Talaromyces stipitatus ATCC 10500] gi|218718319|gb|EED17739.1| feruloyl esterase B precursor, [Talaromyces stipitatus ATCC 10500]
  misc_feature (2)..(294): NCBI GI: 9955721 Blast Desc: ferulic acid esterase, type B [Neurospora crassa]
  misc_feature (2)..(294): NCBI GI: 85110055 Blast Desc: feruloyl esterase B precursor [Neurospora crassa OR74A] gi|67476933|sp|Q9HGR3.2|FAEB_NEUCR RecName: Full=Feruloyl esterase B; AltName: Full=Ferulic acid esterase B; Short=FAEB; B
  misc_feature (1)..(294): NCBI GI: 116197519 Blast Desc: CHGG_06915 [Chaetomium globosum CBS 148.51] gi|88178194|gb|EAQ85662.1| CHGG_06915 [Chaetomium globosum CBS 148.51]
  misc_feature (22)..(294): NCBI GI: 39971957 Blast Desc: MGG_07294 [Magnaporthe grisea 70-15] gi|145019799|gb|EDK04027.1| MGG_07294 [Magnaporthe grisea 70-15]
  misc_feature (24)..(294): NCBI GI: 116205203 Blast Desc: CHGG_10485 [Chaetomium globosum CBS 148.51] gi|88176613|gb|EAQ84081.1| CHGG_10485 [Chaetomium globosum CBS 148.51]
  misc_feature (28)..(294): NCBI GI: 85083163 Blast Desc: NCU04494 [Neurospora crassa OR74A] gi|28918147|gb|EAA27827.1| conserved [Neurospora crassa OR74A]
  misc_feature (7)..(294): NCBI GI: 171689672 Blast Desc: protein product [Podospora anserina] gi|170944798|emb|CAP70910.1| protein product [Podospora anserina]
  misc_feature (4)..(294): SWISSPROT Homolog: EC 3.1.1.73 Feruloyl esterase
MRTILCLAGFAAVTRAFKSTTLASWTDNPSSLKASIVLTPDTIKEKPGLVLGLHPCGGTGQQYQGMTTLPAQIDKNNFIMLFPTSNVEDGFNCWDAFSTKTNVHDGGSDSEGLAGLVKTVMAQYGVDPAKVFIIGASSGAMEANVLAATYPDIFKAAISYSGVPAGCWLGAASSTPLARNQDCPLGKKASTYTATQWSDLVKQAYPGYNGTYPKMMIVHGTADSAVTINNLAAQLTQWSTIEGVTFAQNVSNTPITNWKKVVYGDGTKVVGYEVQGGGHIPPFQLGITLNWFGFS

SEQ ID NO: 25484 - DNA, 1659 bp, Muscodor strobelii
  misc_feature: SGI cDNA ID NO. 568698
  misc_feature: Elevated expression when VOC is produced
  misc_feature: Encodes the peptide sequence at SEQ ID NO 25485
atgtggccgccaagcctcctcatagctctcgggctctcactcacagcgacctcaagtgtcattaactctagacaataccctacgacaccctccttgattgatgcaacactggatgatctcatatccggcctacaagatggtcgattcacaagcgttgacttagtcaacgcatacacagcgcggatcgccgaggtaaactcaactctgcgtatggtcagatatctcaacccagatgcgctttctctagcagcagaggcagattcactgcgagccaatggaacaattctcggccctttgcacggaattccaatcttgatcaagaacaatattgccacaaatgacagcatgcccaacacggccggttcatacgcacttgtcggcgcagaggtgcccgcggacagcacggtggccgcgaagctaagaaaagcaggcgcaatcatcctgggaaaaacaaatctgtcgcaatgggcgaattggcgcagtgacaatacaagtaatggttggagtgcggatggaggacagacagaggggccatattatccgggacaggacccatctggctcaagttcaggcagtggtgtatcgtcagccctcggtcttgccctcgcagcccttggtactgagacagcgggctcgataatctctccggcggaaaccaataatcttgtcggcatcaagcctaccgttggtctaacatcgcgatacttagttgtaccaatttcacagcaccaagatacggttggacctatggcacgaacagtcaaggatgcagcgtaccttctatccgctattgcaggaaaagatgaaaatgataattacaccagcgccatccccttcgacactatccctgactacgctgcagcctgcaatctctcagcactcagcggtagacgcctcggtattccacggaatttattcgacatcaccgggcaggaggagcaatacggagcaattatatccgcattcaacgcctcactcgacatcttccgagctgccggcgccgagatcgtagatggcctcaatcttgagggctatttcccgctcctgactacgggcggtttcaccagagttctacaagccgactttctcgctgacattagagaatatttcgaggaactatccaagaacccaaacaatatcacaaatctctcagaactgcagaattttactcaagaatctcgtttcgaagactggccagagcgcgatacgctcatatggcaagcttcactcgatctcgggctcgataacaacagtccagagttttggtcaaattacaccacgaacctctattacgccggtcctcttggagtcactggcgccttgaccaactactctctggatgccttaatcctgccttcagcattctcgacgacgctgcctgccgtcatcggctcacccattgtcaccgttccattaggcaagtatcccgacaatcagacggtgtttctgaactcatttggaaatctcaatgcaaccgcgcctaatgttccatttggtatcgctttcctgggcgaacgcttcagcgaggagaagctcattgggcttgcgtatgactttgagcaacgcactatggtcagaaagacaatcaaaccgtatataaaacccaagacggacttggcagatgttatcaatggagggacctcgagctgtcagaactag

SEQ ID NO: 25485 - protein, 552 aa, Muscodor strobelii
  misc_feature: SGI Peptide ID NO. 568698
  misc_feature (53)..(513): Pfam Id: PF01425 Pfam Desc: Amidase
  misc_feature (53)..(318): Pfam Id: PF01425 Pfam Desc: Amidase
  misc_feature (30)..(543): NCBI GI: 171695870 Blast Desc: protein product [Podospora anserina] gi|170948177|emb|CAP60341.1| protein product [Podospora anserina]
  misc_feature (30)..(540): NCBI GI: 70997715 Blast Desc: amidase [Aspergillus fumigatus Af293] gi|66851230|gb|EAL91556.1| amidase, [Aspergillus fumigatus Af293] gi|159126673|gb|EDP51789.1| amidase, [Aspergillus fumigatus
  misc_feature (20)..(543): NCBI GI: 189201323 Blast Desc: glutamyl-tRNA(Gln) amidotransferase subunit A [Pyrenophora tritici-repentis Pt-1C-BFP] gi|187984097|gb|EDU49585.1| glutamyl-tRNA(Gln) amidotransferase A
  misc_feature (30)..(543): NCBI GI: 238837925 Blast Desc: amidase [Microsporum canis CBS 113480]
  misc_feature (29)..(543): NCBI GI: 121713462 Blast Desc: amidase, [Aspergillus clavatus NRRL 1] gi|119402495|gb|EAW12916.1| amidase, [Aspergillus clavatus NRRL 1]
  misc_feature (7)..(546): NCBI GI: 225555498 Blast Desc: amidase [Ajellomyces capsulatus G186AR]
  misc_feature (30)..(546): NCBI GI: 240273757 Blast Desc: amidase [Ajellomyces capsulatus H143]
  misc_feature (11)..(539): NCBI GI: 258572490 Blast Desc: conserved [Uncinocarpus reesii 1704] gi|237905277|gb|EEP79678.1| conserved [Uncinocarpus reesii 1704]
  misc_feature (6)..(539): NCBI GI: 119181312 Blast Desc: CIMG_05773 [Coccidioides immitis RS]
  misc_feature (61)..(539): NCBI GI: 240108933 Blast Desc: Amidase family protein [Coccidioides posadasii C735 delta SOWgp]
  misc_feature (31)..(513): SWISSPROT Homolog: EC 3.5.1.4 Amidase
  misc_feature: Useful for introducing or modulating the production of volatile compounds
MWPPSLLIALGLSLTATSSVINSRQYPTTPSLIDATLDDLISGLQDGRFTSVDLVNAYTARIAEVNSTLRMVRYLNPDALSLAAEADSLRANGTILGPLHGIPILIKNNIATNDSMPNTAGSYALVGAEVPADSTVAAKLRKAGAIILGKTNLSQWANWRSDNTSNGWSADGGQTEGPYYPGQDPSGSSSGSGVSSALGLALAALGTETAGSIISPAETNNLVGIKPTVGLTSRYLVVPISQHQDTVGPMARTVKDAAYLLSAIAGKDENDNYTSAIPFDTIPDYAAACNLSALSGRRLGIPRNLFDITGQEEQYGAIISAFNASLDIFRAAGAEIVDGLNLEGYFPLLTTGGFTRVLQADFLADIREYFEELSKNPNNITNLSELQNFTQESRFEDWPERDTLIWQASLDLGLDNNSPEFWSNYTTNLYYAGPLGVTGALTNYSLDALILPSAFSTTLPAVIGSPIVTVPLGKYPDNQTVFLNSFGNLNATAPNVPFGIAFLGERFSEEKLIGLAYDFEQRTMVRKTIKPYIKPKTDLADVINGGTSSCQN

SEQ ID NO: 25486 - DNA, 1887 bp, Muscodor strobelii
  misc_feature: SGI EST ID NO. CUFF.59912.0
  misc_feature: Variant of the nucleotide sequence at SEQ ID NO 25484
cggggaatctgatgttgacatcaccatataaatatgatctagaccttaaaatgcgctggggaattgtcactttaatctttctcagcttgttggcgacattcgcaaaccttaagtattgtgccgtccagatgtggccgccaagcctcctcatagctctcgggctctcactcacagcgacctcaagtgtcattaactctagacaataccctacgacaccctccttgattgatgcaacactggatgatctcatatccggcctacaagatggtcgattcacaagcgttgacttagtcaacgcatacacagcgcggatcgccgaggtaaactcaactctgcgtatggtcagatatctcaacccagatgcgctttctctagcagcagaggcagattcactgcgagccaatggaacaattctcggccctttgcacggaattccaatcttgatcaagaacaatattgccacaaatgacagcatgcccaacacggccggttcatacgcacttgtcggcgcagaggtgcccgcggacagcacggtggccgcgaagctaagaaaagcaggcgcaatcatcctgggaaaaacaaatctgtcgcaatgggcgaattggcgcagtgacaatacaagtaatggttggagtgcggatggaggacagacagaggggccatattatccgggacaggacccatctggctcaagttcaggcagtggtgtatcgtcagccctcggtcttgccctcgcagcccttggtactgagacagcgggctcgataatctctccggcggaaaccaataatcttgtcggcatcaagcctaccgttggtctaacatcgcgatacttagttgtaccaatttcacagcaccaagatacggttggacctatggcacgaacagtcaaggatgcagcgtaccttctatccgctattgcaggaaaagatgaaaatgataattacaccagcgccatccccttcgacactatccctgactacgctgcagcctgcaatctctcagcactcagcggtagacgcctcggtattccacggaatttattcgacatcaccgggcaggaggagcaatacggagcaattatatccgcattcaacgcctcactcgacatcttccgagctgccggcgccgagatcgtagatggcctcaatcttgagggctatttcccgctcctgactacgggcggtttcaccagagttctacaagccgactttctcgctgacattagagaatatttcgaggaactatccaagaacccaaacaatatcacaaatctctcagaactgcagaattttactcaagaatctcgtttcgaagactggccagagcgcgatacgctcatatggcaagcttcactcgatctcgggctcgataacaacagtccagagttttggtcaaattacaccacgaacctctattacgccggtcctcttggagtcactggcgccttgaccaactactctctggatgccttaatcctgccttcagcattctcgacgacgctgcctgccgtcatcggctcacccattgtcaccgttccattaggcaagtatcccgacaatcagacggtgtttctgaactcatttggaaatctcaatgcaaccgcgcctaatgttccatttggtatcgctttcctgggcgaacgcttcagcgaggagaagctcattgggcttgcgtatgactttgagcaacgcactatggtcagaaagacaatcaaaccgtatataaaacccaagacggacttggcagatgttatcaatggagggacctcgagctgtcagaactagcaggtacgtacgaagtagataaatagcatactctacactcaatgctatgcacaacaaaccgtactcattatctttaatgttctaacgagctggctgatgc

SEQ ID NO: 25487 - DNA, 1350 bp, Muscodor strobelii
  misc_feature: SGI cDNA ID NO. 568699
  misc_feature: Encodes the peptide sequence at SEQ ID NO 25488
atggagcaagagaacgtttatctcggcttctggaccaattactctcgtggatcggtcctcggcgcgactctcaccctcactcataaacatgctaatttgttgattgcttttaccgctatcctggtcccatacgtgtcttctagattctggaagttgtcatgtattgcccttcactacaggcactcaacgtcatccgatcgtgatgctatctatcaccaacgtcaggtcatccttcgcaactcggcatcagcggaatccggcggtttcgaagcttccatcaagagaggaagagtagacccagattcatcaaccttcatccccatcgctgagttatcgcgtctagatggcgaagtgctcttagttttcctgtcaggtaatggtgttaccttcgcacagcccctggacgatgaatggtatcgtgcaacagcggtggcttacaatgtaaccagtaatggtggctctgaccccccgacagcatcactttatatgccagcagaggccgccagcccactaggctgtgttatacagaatcaatggtgcaacagtgcagatggcccaatctcggggaaatgcggaccacttgccagctcatatgatgcagcatacggtgctgcttcgctatttaacactacagagcaagacctcgatctagatagaccttcgtctaattcgtccgaaggctctcgacttatttggccatatctagtccaactatacagctctcatcgtccgactcctgatggagccaaatctctagattctcagaatttgttactacaaggactgcaatatcccctgcctttgaatcagtggcaaatcgatgtcacgaactggtggaatacatcgctcgctacactccaatctacgttcgtgaacacggcaatcggcacaacaacgagaaactggcctcccatcaatggcggagagcggaagctctgcaatagccaaaaaaccacgagcagcgcattcgcttctttcagtgcctttggacttgcaataacatacatcgtcagtgccctagtcgttgtggcctcgtacgttgcagagccaacgatgatgtggctggcgagtcaatatgaattcaaacaatacgagtccctcgaatggatcagcaatgaatctctccagttgcttcgtttagctcacgaagacgacatcgaaacgggaggatggttagggggagctaagaaagtgcccataaccaccaaagccagtgccacgctctcgagacttgatatcagcaacccaaaacatccggtcctggagcaacgccaaatgaccacggaaacagaggagaccaagccctatgagccctctagaagcatgagcggggttggtattgacaactag

SEQ ID NO: 25488 - protein, 449 aa, Muscodor strobelii
  misc_feature: SGI Peptide ID NO. 568699
  misc_feature (96)..(433): NCBI GI: 189194015 Blast Desc: conserved [Pyrenophora tritici-repentis Pt-1C-BFP] gi|187978910|gb|EDU45536.1| conserved [Pyrenophora tritici-repentis Pt-1C-BFP]
  misc_feature (107)..(440): NCBI GI: 169615058 Blast Desc: SNOG_10683 [Phaeosphaeria nodorum SN15] gi|111060957|gb|EAT82077.1| SNOG_10683 [Phaeosphaeria nodorum SN15]
  misc_feature (107)..(435): NCBI GI: 115399382 Blast Desc: [Aspergillus terreus NIH2624] gi|114192163|gb|EAU33863.1| [Aspergillus terreus NIH2624]
  misc_feature (5)..(87): NCBI GI: 169615058 Blast Desc: SNOG_10683 [Phaeosphaeria nodorum SN15] gi|111060957|gb|EAT82077.1| SNOG_10683 [Phaeosphaeria nodorum SN15]
  misc_feature (107)..(403): NCBI GI: 119474227 Blast Desc: NFIA_004500 [Neosartorya fischeri NRRL 181] gi|119407142|gb|EAW17092.1| conserved [Neosartorya fischeri NRRL 181]
  misc_feature (6)..(84): NCBI GI: 169772941 Blast Desc: [Aspergillus oryzae RIB40] gi|83768800|dbj|BAE58937.1| protein product [Aspergillus oryzae]
  misc_feature (107)..(409): NCBI GI: 70986226 Blast Desc: conserved [Aspergillus fumigatus Af293] gi|66846236|gb|EAL86569.1| conserved [Aspergillus fumigatus Af293]
  misc_feature (107)..(409): NCBI GI: 159128250 Blast Desc: conserved [Aspergillus fumigatus A1163]
  misc_feature (15)..(87): NCBI GI: 171688934 Blast Desc: protein product [Podospora anserina] gi|170944429|emb|CAP70540.1| protein product [Podospora anserina]
  misc_feature (2)..(90): NCBI GI: 189194015 Blast Desc: conserved [Pyrenophora tritici-repentis Pt-1C-BFP] gi|187978910|gb|EDU45536.1| conserved [Pyrenophora tritici-repentis Pt-1C-BFP]
MEQENVYLGFWTNYSRGSVLGATLTLTHKHANLLIAFTAILVPYVSSRFWKLSCIALHYRHSTSSDRDAIYHQRQVILRNSASAESGGFEASIKRGRVDPDSSTFIPIAELSRLDGEVLLVFLSGNGVTFAQPLDDEWYRATAVAYNVTSNGGSDPPTASLYMPAEAASPLGCVIQNQWCNSADGPISGKCGPLASSYDAAYGAASLFNTTEQDLDLDRPSSNSSEGSRLIWPYLVQLYSSHRPTPDGAKSLDSQNLLLQGLQYPLPLNQWQIDVTNWWNTSLATLQSTFVNTAIGTTTRNWPPINGGERKLCNSQKTTSSAFASFSAFGLAITYIVSALVVVASYVAEPTMMWLASQYEFKQYESLEWISNESLQLLRLAHEDDIETGGWLGGAKKVPITTKASATLSRLDISNPKHPVLEQRQMTTETEETKPYEPSRSMSGVGIDN

SEQ ID NO: 25489 - DNA, 1812 bp, Muscodor strobelii
  misc_feature: SGI cDNA ID NO. 568700
  misc_feature: Reduced expression when VOC is produced
  misc_feature: Encodes the peptide sequence at SEQ ID NO 25490
atggcggcgccgggtcgttcctctgctccgcctccatcgtcgggatcgcagaaaccacaggcagatggaaaggcatactacggctatctgtttaatggcgaaaagcaaccaactcccttgctagatgcgctgttgcgggctattggtcgccacattattgagaatatcggcaacaaagacgacaaacaactagacgccaagaagctcgctgctttctaccatgctgtaggcggcgactacgattctctcttcgtgaagacacccgagccctctctatcgtacatctggcgagcattgggagttcagcacactctgcagcccacggagaatccctacgaggttccatcaataccggccttgacattggtaggctttgtcagatggcagagtctccagattcttcttggccccgaggaacatgtcccctacatgcaatatgctgttcgcaactggcatctaaaacaccctgacacgggcgaaacttttcctcccaatctgcctgctgattcctttcctgccgtctgtgactccgaggtagacaagtggcacaaggaatgtgctgtcaggttgcgcgacgccgctgcgactcccgagcagcctacaccacccagcgagtcgactccaaagccaggagaaccccatcctctgcgacaccagacatccaatcctcgaatgcgccccgcctacacccaggcacggagcgcaccgatgggtgccgcccctcaacggcctagagctgattatgctcagcgacagagacctatgtcttacatccataccacgacgtctgcgccccggcatgccgaaccccgtccggaggctcgttctcatcagccgacggaaccccattctcatcactatcatagtggcggaagcaatcgcaactctttcgaggaaatccctcggaggagaagctaccaggacatcaaaccacatccgaaggaggacctgcggtcatctgttcacctcgatccgcatccaccttcatcaaacggccgacggcacagtcacagtcactaccaagctccatatgcagcttcgatttcgagctctgatacagaatctgatgtgccaccgcagcgtggtccatcatcacgctctccaccgcgttcagtgccagcacctcgacttgtccaagtcggaccggccccaggagctaatgcatctcgaagtcgtcgaagtaccctgagatctgaggagcctccccgcagcttcgcagccgaaatcaaacataaactagtccctttcttaacctcgtcctcagatcgtccgcgcagcagctctcgtgaccgccgtctgcccgcgctacattcaagcgtacggtatgctcgaaacccagtcagccggagcatgtccagaggctcctacgtcagcggcgaatcggaggaggaaatgtcaccgaaatatactccgccgagtagtcgcgaaagccaccgtgtacgagaacaagaatacgagcgcgatcggcaaatagagcgacaccgagaaagagctcgagaccgcgaacgtcgagagctagaagaggagatagaaaggaagagtcgccaaaaagaaaaggccttccttcgaccaacagtaaaccgcagaacgagcagccatgctgacatcgacaggcgggcgcaagacgtcacgtgggatcctagagatcggcgtcgtgagagcagagatctagaaagagaagtcagaaggaatttgacctcagatgagatggaaagagatagacgggagagaagacggtacaaagacgaggtttccagtcctccggtgacaggtgtcggtgggcggcgatatccccgacaagctgggttttga

SEQ ID NO: 25490 - protein, 603 aa, Muscodor strobelii
  misc_feature: SGI Peptide ID NO. 568700
  misc_feature (10)..(236): NCBI GI: 156040465 Blast Desc: SS1G_12249 [Sclerotinia sclerotiorum 1980] gi|154696305|gb|EDN96043.1| SS1G_12249 [Sclerotinia sclerotiorum 1980]
  misc_feature (1)..(201): NCBI GI: 256735535 Blast Desc: NECHADRAFT_75475 [Nectria haematococca mpVI 77-13-4]
  misc_feature (1)..(209): NCBI GI: 261355318 Blast Desc: conserved [Verticillium albo-atrum VaMs.102]
  misc_feature (19)..(343): NCBI GI: 145615968 Blast Desc: MGG_13488 [Magnaporthe grisea 70-15] gi|145009755|gb|EDJ94411.1| MGG_13488 [Magnaporthe grisea 70-15]
  misc_feature (13)..(259): NCBI GI: 116182374 Blast Desc: CHGG_01815 [Chaetomium globosum CBS 148.51] gi|88186112|gb|EAQ93580.1| CHGG_01815 [Chaetomium globosum CBS 148.51]
  misc_feature (12)..(250): NCBI GI: 154320752 Blast Desc: BC1G_01848 [Botryotinia fuckeliana B05.10] gi|150853537|gb|EDN28729.1| BC1G_01848 [Botryotinia fuckeliana B05.10]
  misc_feature (22)..(195): NCBI GI: 171695310 Blast Desc: protein product [Podospora anserina] gi|170947897|emb|CAP60061.1| protein product [Podospora anserina]
  misc_feature (20)..(200): NCBI GI: 85111441 Blast Desc: NCU08391 [Neurospora crassa OR74A] gi|28925689|gb|EAA34702.1| [Neurospora crassa OR74A]
  misc_feature (17)..(191): NCBI GI: 212526122 Blast Desc: conserved [Penicillium marneffei ATCC 18224] gi|210072616|gb|EEA26703.1| conserved [Penicillium marneffei ATCC 18224]
  misc_feature (16)..(211): NCBI GI: 238843210 Blast Desc: conserved [Microsporum canis CBS 113480]
  misc_feature: Useful for introducing or modulating the production of volatile compounds
MAAPGRSSAPPPSSGSQKPQADGKAYYGYLFNGEKQPTPLLDALLRAIGRHIIENIGNKDDKQLDAKKLAAFYHAVGGDYDSLFVKTPEPSLSYIWRALGVQHTLQPTENPYEVPSIPALTLVGFVRWQSLQILLGPEEHVPYMQYAVRNWHLKHPDTGETFPPNLPADSFPAVCDSEVDKWHKECAVRLRDAAATPEQPTPPSESTPKPGEPHPLRHQTSNPRMRPAYTQARSAPMGAAPQRPRADYAQRQRPMSYIHTTTSAPRHAEPRPEARSHQPTEPHSHHYHSGGSNRNSFEEIPRRRSYQDIKPHPKEDLRSSVHLDPHPPSSNGRRHSHSHYQAPYAASISSSDTESDVPPQRGPSSRSPPRSVPAPRLVQVGPAPGANASRSRRSTLRSEEPPRSFAAEIKHKLVPFLTSSSDRPRSSSRDRRLPALHSSVRYARNPVSRSMSRGSYVSGESEEEMSPKYTPPSSRESHRVREQEYERDRQIERHRERARDRERRELEEEIERKSRQKEKAFLRPTVNRRTSSHADIDRRAQDVTWDPRDRRRESRDLEREVRRNLTSDEMERDRRERRRYKDEVSSPPVTGVGGRRYPRQAGF

SEQ ID NO: 25491 - DNA, 3148 bp, Muscodor strobelii
  misc_feature: SGI EST ID NO. CUFF.60392.1
  misc_feature: Variant of the nucleotide sequence at SEQ ID NO 25489
ttgaggcctcatttgaattggaatattgcatcccactcgtgcccacatgttcgctaggcgcaggcgcagtgggtggctttttcagcggacggacacaatggctcgccgtccaactcctagtaatagggcagcccagcagctctgctagaccgggagatggtcccgcaagctggcgcggcaaggcggctggggtgctggggtgctggggtgctagcgtaaaggcccgtttgtcacattgcaggacatctcgcagctttttagtgcatcgcacgaccgctagaaccttatgtgcttctgcgcgctgcacgtggcggatggctatttggtcaggcatcgcgatccggccagatatgacgtgtggcatgaatgtcgtacggctgatcacttgcagccatggatctcggctgctgcgtgctgctgctatctttgtaacgagcgagaggtcaaccctacaacctaaggccggcgtgcgtctggtctaacaatttcgcgctgattgctcacatcccgcaacatcccgtcagcctaaaagagccaatctgtcgtctgcctgtccttgctgtctaccgactggcctctcctcgcctgtgtcacctttctccaacacgggcgcaccgtaagcatcagcagctaacatatcttgcatctcacccgcgtcgcatcaaattacttaatcccgctattcttctctgtcgcattcgggtctactatacaggctgctgtcatctttggcgtgccctgccgtagtctgtagtttcccttcaaatgcagatattgtcatcttcgccctcgaattctacgccctctttatatcgcagagctgtcagaagtgcacttgtaccgcctcgtttatgtgataccacaggaaacccgacaaagcatcctgtgctgcccaatacatcatcagcgccttagcgttgttgaccttggcggcaagcctccgttgacccctccgtgaaaacactggcgacccctctctcgacgatgctgattgcgccgacttcttctccttgtaccattactttgatagagtctagtcttaatcaactcggtcccatctcctcgccgacttcctcttactagtcgcctctaatggcggcgccgggtcgttcctctgctccgcctccatcgtcgggatcgcagaaaccacaggcagatggaaaggcatactacggctatctgtttaatggcgaaaagcaaccaactcccttgctagatgcgctgttgcgggctattggtcgccacattattgagaatatcggcaacaaagacgacaaacaactagacgccaagaagctcgctgctttctaccatgctgtaggcggcgactacgattctctcttcgtgaagacacccgagccctctctatcgtacatctggcgagcattgggagttcagcacactctgcagcccacggagaatccctacgaggttccatcaataccggccttgacattggtaggctttgtcagatggcagagtctccagattcttcttggccccgaggaacatgtcccctacatgcaatatgctgttcgcaactggcatctaaaacaccctgacacgggcgaaacttttcctcccaatctgcctgctgattcctttcctgccgtctgtgactccgaggtagacaagtggcacaaggaatgtgctgtcaggttgcgcgacgccgctgcgactcccgagcagcctacaccacccagcgagtcgactccaaagccaggagaaccccatcctctgcgacaccagacatccaatcctcgaatgcgccccgcctacacccaggcacggagcgcaccgatgggtgccgcccctcaacggcctagagctgattatgctcagcgacagagacctatgtcttacatccataccacgacgtctgcgccccggcatgccgaaccccgtccggaggctcgttctcatcagccgacggaaccccattctcatcactatcatagtggcggaagcaatcgcaactctttcgaggaaatccctcggaggagaagctaccaggacatcaaaccacatccgaaggaggacctgcggtcatctgttcacctcgatccgcatccaccttcatcaaacggccgacggcacagtcacagtcactaccaagctccatatgcagcttcgatttcgagctctgatacagaatctgatgtgccaccgcagcgtggtccatcatcacgctctccaccgcgttcagtgccagcacctcgacttgtccaagtcggaccggccccaggagctaatgcatctcgaagtcgtcgaagtaccctgagatctgaggagcctccccgcagcttcgcagccgaaatcaaacataaactagtccctttcttaacctcgtcctcagatcgtccgcgcagcagctctcgtgaccgccgtctgcccgcgctacattcaagcgtacggtatgctcgaaacccagtcagccggagcatgtccagaggctcctacgtcagcggcgaatcggaggaggaaatgtcaccgaaatatactccgccgagtagtcgcgaaagccaccgtgtacgagaacaagaatacgagcgcgatcggcaaatagagcgacaccgagaaagagctcgagaccgcgaacgtcgagagctagaagaggagatagaaaggaagagtcgccaaaaagaaaaggccttccttcgaccaacagtaaaccgcagaacgagcagccatgctgacatcgacaggcgggcgcaagacgtcacgtgggatcctagagatcggcgtcgtgagagcagagatctagaaagagaagtcagaaggaatttgacctcagatgagatggaaagagatagacgggagagaagacggtacaaagacgaggtttccagtcctccggtgacaggtgtcggtgggcggcgatatccccgacaagctgggttttgaatacttgggtctgtggcgtgagcgtcttggtataatggatggcatggagttaggggtctcagagcgatctgtgttgtgttttggtggttgtatgacgaatctccccgctgagtaaaaggtgcaaaaagcaactttcttggatgtacatgggatatacgataggtttagatcagagatctatgagaacatgaagaatgttctgttttgagcaatgcaattattctgctctttcactgttgacgat

SEQ ID NO: 25492 - DNA, 498 bp, Muscodor strobelii
  misc_feature: SGI cDNA ID NO. 568701
  misc_feature: Reduced expression when VOC is produced
  misc_feature: Encodes the peptide sequence at SEQ ID NO 25493
atggcacctctatcgaccactattggcctggctgccgccgggtctatcattgtatctggctggtcttcaggaatgggatccggcctctccatcttcggaatcccaacgatactcaacggcggcgcatcaagcgaagttatgatccgccaatggcgccaccagttcctacgcgggaaagccataatcccaggtcttggagcactgaacgcagtcaatttctgggctattgcctatcattgcttctcgcatggcctggaatggaggggtttcgcggcagctggcgcatcaactttcttcgttatcccgtttacgctgatgttcatcatgggtacaaattacaagctattggccgagcatgatagcaaagtgaagactatgagcgaaggcacggttaagtcactcattcagaaatggggagagttgaatgttgtgagggctgttgttcctcttgttgggacggtggcagcgctgtggaatttcggtctgtacttgatgtag

SEQ ID NO: 25493 - protein, 165 aa, Muscodor strobelii
  misc_feature: SGI Peptide ID NO. 568701
  misc_feature (88)..(160): Pfam Id: PF08592 Pfam Desc: Domain of function (DUF1772)
  misc_feature (10)..(155): NCBI GI: 46109262 Blast Desc: FG01513.1 [Gibberella zeae PH-1]
  misc_feature (10)..(156): NCBI GI: 256730794 Blast Desc: NECHADRAFT_89747 [Nectria haematococca mpVI 77-13-4]
  misc_feature (29)..(157): NCBI GI: 171693181 Blast Desc: protein product [Podospora anserina] gi|170946539|emb|CAP73340.1| protein product [Podospora anserina]
  misc_feature (31)..(157): NCBI GI: 197725398 Blast Desc: HypB2 [Aspergillus ochraceoroseus]
  misc_feature (2)..(157): NCBI GI: 39974407 Blast Desc: [Magnaporthe grisea 70-15] gi|145018435|gb|EDK02714.1| [Magnaporthe grisea 70-15]
  misc_feature (7)..(145): NCBI GI: 171695286 Blast Desc: protein product [Podospora anserina] gi|170947885|emb|CAP60049.1| protein product [Podospora anserina]
  misc_feature (13)..(161): NCBI GI: 242820019 Blast Desc: conserved [Talaromyces stipitatus ATCC 10500] gi|218713897|gb|EED13321.1| conserved [Talaromyces stipitatus ATCC 10500]
  misc_feature (1)..(156): NCBI GI: 119189089 Blast Desc: [Coccidioides immitis RS]
  misc_feature (15)..(157): NCBI GI: 259484168 Blast Desc: TPA: conserved [Aspergillus nidulans FGSC A4]
  misc_feature (15)..(154): NCBI GI: 212529428 Blast Desc: conserved [Penicillium marneffei ATCC 18224] gi|210074269|gb|EEA28356.1| conserved [Penicillium marneffei ATCC 18224]
  misc_feature: Useful for introducing or modulating the production of volatile compounds
MAPLSTTIGLAAAGSIIVSGWSSGMGSGLSIFGIPTILNGGASSEVMIRQWRHQFLRGKAIIPGLGALNAVNFWAIAYHCFSHGLEWRGFAAAGASTFFVIPFTLMFIMGTNYKLLAEHDSKVKTMSEGTVKSLIQKWGELNVVRAVVPLVGTVAALWNFGLYLM

SEQ ID NO: 25494 - DNA, 932 bp, Muscodor strobelii
  misc_feature: SGI EST ID NO. CUFF.60402.0
  misc_feature: Variant of the nucleotide sequence at SEQ ID NO 25492
cgctgtgaaacattgaaaaagttgatataagccctttaaccgacatcgtctgaaccatcataacatatcacttttcttcatctatacatctgcattaagcttcatctgacgtagctttgaagttatccttcaagtcaatccagaatatggcacctctatcgaccactattggcctggctgccgccgggtctatcattgtatctggctggtcttcaggaatgggatccggcctctccatcttcggaatcccaacgatactcaacggcggcgcatcaagcgaagttatgatccgccaatggcgccaccagttcctacgcgggaaagccataatcccaggtcttggagcactgaacgcagtcaatttctgggctattgcctatcattgcttctcgcatggcctggaatggaggggtttcgcggcagctggcgcatcaactttcttcgttatcccgtttacgctgatgttcatcatgggtacaaattacaagctattggccgagcatgatagcaaagtgaagactatgagcgaaggcacggttaagtcactcattcagaaatggggagagttgaatgttgtgagggctgttgttcctcttgttgggacggtggcagcgctgtggaatttcggtctgtacttgatgtagccgcggttgtcgggcgaaattttcacataggaggtccgacgatcagatgttgaaatgtcgctggtcgtcataatggagattgaccccatggagatgtaataaatgtcgcatgtacgataggcaccattgtagtatttcggtggagaggtacgggccgaggtttgctgcctcttgctgccttaattctggcctcagggcgttagtatgacgaaatgaatatacccgactctttcttgtaactgtcgaaattgttctacacgtttctttagagttccgaggccagaggcc

SEQ ID NO: 25495 - DNA, 753 bp, Muscodor strobelii
  misc_feature: SGI cDNA ID NO. 568702
  misc_feature: Encodes the peptide sequence at SEQ ID NO 25496
atggccaccccaagcgtcccagcaccaccacacaacccaccacccgtctcacaattagtgaaagtgaaaacaacatggccgaccacgcctctccccctaaacattcatcgacagcccatcctcacaaaacgtctcctaatccgaccctacgaagacacagagtacgacgcaaaagcgatccacgcacttcgcagccagccagaagtcatgatctttacatccgtgggcgtagtagacaaagacctcgaagcctcacgggttttcatccagcgcagcttacctcctaacgacgcgatacgattcaacgcaatcatgatctacctcggagaaaacggcgagctggagggagacgataggataccaattggctgtgggggtgtgcataagactgattttgcgctgggctggcctgaagtgggttatatgatacgaaaggagtactggggaaagggacttgcgactgagttcttgggtgcgtttctagaggcttggtggtctttgcctaggagcgaggtcgagatcgaacttgatgttaacacggttcgggatggagtgaagggggatgatggggtcgtgagggttaatgagaagatgactgctatgattgagtgtaataaccccgggagcaggagggtgctagagaagaatggttttaaggagtataagcaatggcgggaggcggatagtagggaggggtttgagggtaaggttgttacgcttgctgcgcttttgcttgagaagcctggtgcgtga

SEQ ID NO: 25496 - protein, 250 aa, Muscodor strobelii
  misc_feature: SGI Peptide ID NO. 568702
  misc_feature (19)..(248): NCBI GI: 261355317 Blast Desc: conserved [Verticillium albo-atrum VaMs.102]
  misc_feature (13)..(247): NCBI GI: 256730795 Blast Desc: NECHADRAFT_29703 [Nectria haematococca mpVI 77-13-4]
  misc_feature (15)..(239): NCBI GI: 115438332 Blast Desc: [Aspergillus terreus NIH2624] gi|114188854|gb|EAU30554.1| [Aspergillus terreus NIH2624]
  misc_feature (18)..(243): NCBI GI: 255942785 Blast Desc: Pc18g03210 [Penicillium chrysogenum Wisconsin 54-1255] gi|211586894|emb|CAP94545.1| Pc18g03210 [Penicillium chrysogenum Wisconsin 54-1255]
  misc_feature (19)..(238): NCBI GI: 46109746 Blast Desc: FG01755.1 [Gibberella zeae PH-1]
  misc_feature (14)..(229): NCBI GI: 171695312 Blast Desc: protein product [Podospora anserina] gi|170947898|emb|CAP60062.1| protein product [Podospora anserina]
  misc_feature (10)..(238): NCBI GI: 46109264 Blast Desc: FG01514.1 [Gibberella zeae PH-1]
  misc_feature (19)..(231): NCBI GI: 39943148 Blast Desc: MGG_03654 [Magnaporthe grisea 70-15] gi|145009757|gb|EDJ94413.1| MGG_03654 [Magnaporthe grisea 70-15]
  misc_feature (14)..(243): NCBI GI: 85111439 Blast Desc: NCU08390 [Neurospora crassa OR74A] gi|28925688|gb|EAA34701.1| [Neurospora crassa OR74A]
  misc_feature (2)..(149): NCBI GI: 116182376 Blast Desc: CHGG_01816 [Chaetomium globosum CBS 148.51] gi|88186113|gb|EAQ93581.1| CHGG_01816 [Chaetomium globosum CBS 148.51]
MATPSVPAPPHNPPPVSQLVKVKTTWPTTPLPLNIHRQPILTKRLLIRPYEDTEYDAKAIHALRSQPEVMIFTSVGVVDKDLEASRVFIQRSLPPNDAIRFNAIMIYLGENGELEGDDRIPIGCGGVHKTDFALGWPEVGYMIRKEYWGKGLATEFLGAFLEAWWSLPRSEVEIELDVNTVRDGVKGDDGVVRVNEKMTAMIECNNPGSRRVLEKNGFKEYKQWREADSREGFEGKVVTLAALLLEKPGA

SEQ ID NO: 25497 - DNA, 1352 bp, Muscodor strobelii
  misc_feature: SGI EST ID NO. CUFF.60404.0
  misc_feature: Variant of the nucleotide sequence at SEQ ID NO 25495
cgaatataaaacagcatctttgagacttcaagaaagcaaaaagtctcgacaactctcaatctacatccacatctcagggtttgaaagctctcatcactcacaaaatggccaccccaagcgtcccagcaccaccacacaacccaccacccgtctcacaattagtgaaagtgaaaacaacatggccgaccacgcctctccccctaaacattcatcgacagcccatcctcacaaaacgtctcctaatccgaccctacgaagacacagagtacgacgcaaaagcgatccacgcacttcgcagccagccagaagtcatgatctttacatccgtgggcgtagtagacaaagacctcgaagcctcacgggttttcatccagcgcagcttacctcctaacgacgcgatacgattcaacgcaatcatgatctacctcggagaaaacggcgagctggagggagacgataggataccaattggctgtgggggtgtgcataagactgattttgcgctgggctggcctgaagtgggttatatgatacgaaaggagtactggggaaagggacttgcgactgagttcttgggtgcgtttctagaggcttggtggtctttgcctaggagcgaggtcgagatcgaacttgatgttaacacggttcgggatggagtgaagggggatgatggggtcgtgagggttaatgagaagatgactgctatgattgagtgtaataaccccgggagcaggagggtgctagagaagaatggttttaaggagtataagcaatggcgggaggcggatagtagggaggggtttgagggtaaggttgttacgcttgctgcgcttttgcttgagaagcctggtgcgtgagtgatgggtggttgatagacgggatgatgatatcttgttgtttaccggtatgcaatttgtttatagggtgtagaatgccactatcaggttgttattaattcaagctacgtctcggacgaattcggtcgattataacgacttagctatgtcagtgagacagtcttcgtacataatgagactgccatctctgtaacagttaccataagtttcaatttcttgctacgaaacatggtccttgagacatcagagacagagctgtcgagtcatagtaatcgatctggactgaaatactcatcacggcacattacggcacccatgagagttgctgacggagtctaggggaccgggcaccgatgccatggcagtggttcaccgggttggacatgcaattcgggaccgaatgatggctcgctaccaaaacacatgttgactcgcgaatttgatggaacgattgagaggcaaatgcatggaaagtgctgcctgttaagtatgaat

SEQ ID NO: 25498 - DNA, 2700 bp, Muscodor strobelii
  misc_feature: SGI cDNA ID NO. 568703
  misc_feature: Encodes the peptide sequence at SEQ ID NO 25499
atggcgtcccaggctgccggcgacacaaccgaagccggcagacctcagaaaaagccgccgctgagctgcactcaagacgctgtgaccgctcgtaagagcggtcgcaccgcatcttctgtcttcgacgtaagtagatgccgcgccagaaaactcaaatgcgacaaagagagcccgtgccataactgtgttcggagcggcacggaatgcatattcccggcccggaagcgtattcaacggcccaggaaaacgaagaatgccgagctcctgcaacgtctgaatagattggagagcattgtgggcaaagttgggctttccggccttgaggaggcagaggcacagttgaaagatgcttctgctagtccgcctgaagtcgcagcgccgaagcttcatcctgctgttgagagcgcggtcgaggatccggctggcccggatgtcgcatatgatttcaagggtgcctcaagacctacgacaaaggatgctgcggcttcaaagtatatgagcggtgatttttggtcgaggctttgcgatgaggttggagggttgaaacaggcgcttgagcactcaacagattctgaagatgagtgtgagccacccgttcagggactttcgcccgagtctgccggagcgaggtcgagcgtttccatgtcatcgccgggtatggttctcggatcgccacagagtgttggttcgcagacgatttctcaaccatctccgaaccacatccggtatctagtggccacgtacttccgcaacgtggacatgcacttgaagatattgcatcgaccaacagtgtctactgcattatataaccttgctgattacccgaataccgcatcagatctcagtccggaacaagaatctctttacttcgctatatactattccgctgttgcgagtttatcgccgatcgaatgtagtctgagtctcgggcgttctcgcgccgacctagctgcagactatcaagctggaattgagcgcgctttagcacgcgccgactacctgaataatactagtctagagacattacaggccctcacactttatgcctgctgtctgcggaatcataacggatcacgggcctcatgggcaatgatgagtctaccaatccgtcttgcgcaagccataggcatacatcgagacggtgatggtatcaattcgagattcagtccgtatgaagccgaacaacgccgccgtttatggtggcagcttatcgtgctcgatatccgagcagcagaagacagaggaaccgcaacaatcatctcgagagcgagctacaatacacgactcccacacaatatcgatgactctgaatacggacccgataagacagcgccacttgtcgatcgtaccgggccttcagacacgacgttcagcctgtgcaccgcccaaagctcaggaatattcctattcttcgaagcagaagatgaaagccattcccagactgaggaagacaccattcgacaagcacagcatctcgaatcccagttcgtcacaggtgctgacccaaaccatgtcggttcatatcttgcgtcagttctcgtaagactcatcatattaaagctatggctcggtctacgattcccactgcgccggcgtcaagaaggaccacagcgaccttccgttctgccaccagcaaatgcaatggacatcatcacaagcgatattccagtttcaatcaaacctccagggcactgcccttggtcagcatctatcccgccatctcaacacgagataaacacaccagcaggtaaactagcaaccgccttatcccgccaatccacacttcggacagcgatctccatcatcgagctttcagacttcgcccaaaccggcccgtacggtgatagattccgctggtggtcagagacatacgtgcaatggcacccgttagccgtagcactcgcagagctctgcacacagacagaaggcgcaccagtaactcacgcatggcaagtcgtggaatccgtgttcccccgctggagcgaaaagatcgccgacgcacgacgaggaagcttatggcggcccatccgaaaactctacaagaaagccaaagcagcccgagaagcggctctagcgagcaaggctcaagagcaggcacaacaaccctcgataactcagaactggcaatctccagatctagacgcacaaataaacaacatggcactagacccagctctcacacgcccaaacatggccatcccaccaaacatgggcatggacacgtccagacgcacaggcgacaccccaatgtccgacgatccaatcctccaaccgcgcctcctaagcgacatgatactcgccgacccatcagcaaacaccctatcctctcccccaataaatctaaacaccactcaacccatcgatcccttccccgcccaagaaccaaacatgaccacagaccctctctctcaatcattctcccctcgagccttcgacgacctctcaaacaccataacgcaatccctattctcctgggcagacgtaaacttcgacatgtcagccatgccacaacctaatactctccacgggaattcaggaccccagggtatgttcggcgcgcctatgttcccgcagcctgttgctgatgggccgttgaatggcgcggcgatggattggacgccttgggatgagtttgtgcttgatacttttcaggatacggggagtaagtctggggagagtgaggggagtagggggagttag

SEQ ID NO: 25499 - protein, 899 aa, Muscodor strobelii
  misc_feature: SGI Peptide ID NO. 568703
  misc_feature (44)..(78): Pfam Id: PF00172 Pfam Desc: Fungal Zn(2)-Cys(6) binuclear cluster domain
  misc_feature (338)..(436): Pfam Id: PF04082 Pfam Desc: Fungal specific transcription factor domain
  misc_feature (45)..(78): Pfam Id: PF00172 Pfam Desc: Fungal Zn(2)-Cys(6) binuclear cluster domain
  misc_feature (32)..(769): NCBI GI: 46109266 Blast Desc: FG01515.1 [Gibberella zeae PH-1]
  misc_feature (38)..(691): NCBI GI: 256730578 Blast Desc: NECHADRAFT_89749 [Nectria haematococca mpVI 77-13-4]
  misc_feature (20)..(679): NCBI GI: 156053876 Blast Desc: SS1G_05786 [Sclerotinia sclerotiorum 1980] gi|154703566|gb|EDO03305.1| SS1G_05786 [Sclerotinia sclerotiorum 1980]
  misc_feature (44)..(691): NCBI GI: 212529926 Blast Desc: UV radiation resistance protein (UVRAG), [Penicillium marneffei ATCC 18224] gi|210074518|gb|EEA28605.1| UV radiation resistance protein (UVRAG), [Penicillium marneffei ATCC 18224]
  misc_feature (46)..(694): NCBI GI: 242802256 Blast Desc: C6 transcription factor, [Talaromyces stipitatus ATCC 10500] gi|218717282|gb|EED16703.1| C6 transcription factor, [Talaromyces stipitatus ATCC 10500]
  misc_feature (37)..(687): NCBI GI: 121703011 Blast Desc: C6 transcription factor, [Aspergillus clavatus NRRL 1] gi|119397913|gb|EAW08344.1| C6 transcription factor, [Aspergillus clavatus NRRL 1]
  misc_feature (46)..(687): NCBI GI: 212540342 Blast Desc: C6 transcription factor, [Penicillium marneffei ATCC 18224] gi|210067625|gb|EEA21717.1| C6 transcription factor, [Penicillium marneffei ATCC 18224]
  misc_feature (39)..(688): NCBI GI: 70990562 Blast Desc: C6 transcription factor [Aspergillus fumigatus Af293] gi|66847762|gb|EAL88092.1| C6 transcription factor, [Aspergillus fumigatus Af293]
  misc_feature (46)..(879): NCBI GI: 169595454 Blast Desc: SNOG_00466 [Phaeosphaeria nodorum SN15] gi|160701099|gb|EAT91961.2| SNOG_00466 [Phaeosphaeria nodorum SN15]
  misc_feature (46)..(808): NCBI GI: 259481383 Blast Desc: TPA: Zn(II)2Cys6 transcription factor (Eurofung) [Aspergillus nidulans FGSC A4]
MASQAAGDTTEAGRPQKKPPLSCTQDAVTARKSGRTASSVFDVSRCRARKLKCDKESPCHNCVRSGTECIFPARKRIQRPRKTKNAELLQRLNRLESIVGKVGLSGLEEAEAQLKDASASPPEVAAPKLHPAVESAVEDPAGPDVAYDFKGASRPTTKDAAASKYMSGDFWSRLCDEVGGLKQALEHSTDSEDECEPPVQGLSPESAGARSSVSMSSPGMVLGSPQSVGSQTISQPSPNHIRYLVATYFRNVDMHLKILHRPTVSTALYNLADYPNTASDLSPEQESLYFAIYYSAVASLSPIECSLSLGRSRADLAADYQAGIERALARADYLNNTSLETLQALTLYACCLRNHNGSRASWAMMSLPIRLAQAIGIHRDGDGINSRFSPYEAEQRRRLWWQLIVLDIRAAEDRGTATIISRASYNTRLPHNIDDSEYGPDKTAPLVDRTGPSDTTFSLCTAQSSGIFLFFEAEDESHSQTEEDTIRQAQHLESQFVTGADPNHVGSYLASVLVRLIILKLWLGLRFPLRRRQEGPQRPSVLPPANAMDIITSDIPVSIKPPGHCPWSASIPPSQHEINTPAGKLATALSRQSTLRTAISIIELSDFAQTGPYGDRFRWWSETYVQWHPLAVALAELCTQTEGAPVTHAWQVVESVFPRWSEKIADARRGSLWRPIRKLYKKAKAAREAALASKAQEQAQQPSITQNWQSPDLDAQINNMALDPALTRPNMAIPPNMGMDTSRRTGDTPMSDDPILQPRLLSDMILADPSANTLSSPPINLNTTQPIDPFPAQEPNMTTDPLSQSFSPRAFDDLSNTITQSLFSWADVNFDMSAMPQPNTLHGNSGPQGMFGAPMFPQPVADGPLNGAAMDWTPWDEFVLDTFQDTGSKSGESEGSRGS

SEQ ID NO: 25500 - DNA, 3051 bp, Muscodor strobelii
  misc_feature: SGI EST ID NO. CUFF.59949.0
  misc_feature: Variant of the nucleotide sequence at SEQ ID NO 25498
atctcatctgcaggcacaaaagtataacgccacgagtgaagagacttaagatcctaatattactaattgtgtaacgagtcgaggatttctgcggcacaaaactcagcaaaactcgtgaagaacggtgcttgaggcatcgtttgagtgtgatagggtctgcgtatgaacgcctttgctgacatcaccaccatctccgagtgcccctccattccgagagtttggattgacgacgcgggctcaatatggcgtcccaggctgccggcgacacaaccgaagccggcagacctcagaaaaagccgccgctgagctgcactcaatgccgcgccagaaaactcaaatgcgacaaagagagcccgtgccataactgtgttcggagcggcacggaatgcatattcccggcccggaagcgtattcaacggcccaggaaaacgaagaatgccgagctcctgcaacgtctgaatagattggagagcattgtgggcaaagttgggctttccggccttgaggaggcagaggcacagttgaaagatgcttctgctagtccgcctgaagtcgcagcgccgaagcttcatcctgctgttgagagcgcggtcgaggatccggctggcccggatgtcgcatatgatttcaagggtgcctcaagacctacgacaaaggatgctgcggcttcaaagtatatgagcggtgatttttggtcgaggctttgcgatgaggttggagggttgaaacaggcgcttgagcactcaacagattctgaagatgagtgtgagccacccgttcagggactttcgcccgagtctgccggagcgaggtcgagcgtttccatgtcatcgccgggtatggttctcggatcgccacagagtgttggttcgcagacgatttctcaaccatctccgaaccacatccggtatctagtggccacgtacttccgcaacgtggacatgcacttgaagatattgcatcgaccaacagtgtctactgcattatataaccttgctgattacccgaataccgcatcagatctcagtccggaacaagaatctctttacttcgctatatactattccgctgttgcgagtttatcgccgatcgaatgtagtctgagtctcgggcgttctcgcgccgacctagctgcagactatcaagctggaattgagcgcgctttagcacgcgccgactacctgaataatactagtctagagacattacaggccctcacactttatgcctgctgtctgcggaatcataacggatcacgggcctcatgggcaatgatgagtctaccaatccgtcttgcgcaagccataggcatacatcgagacggtgatggtatcaattcgagattcagtccgtatgaagccgaacaacgccgccgtttatggtggcagcttatcgtgctcgatatccgagcagcagaagacagaggaaccgcaacaatcatctcgagagcgagctacaatacacgactcccacacaatatcgatgactctgaatacggacccgataagacagcgccacttgtcgatcgtaccgggccttcagacacgacgttcagcctgtgcaccgcccaaagctcaggaatattcctattcttcgaagcagaagatgaaagccattcccagactgaggaagacaccattcgacaagcacagcatctcgaatcccagttcgtcacaggtgctgacccaaaccatgtcggttcatatcttgcgtcagttctcgtaagactcatcatattaaagctatggctcggtctacgattcccactgcgccggcgtcaagaaggaccacagcgaccttccgttctgccaccagcaaatgcaatggacatcatcacaagcgatattccagtttcaatcaaacctccagggcactgcccttggtcagcatctatcccgccatctcaacacgagataaacacaccagcaggtaaactagcaaccgccttatcccgccaatccacacttcggacagcgatctccatcatcgagctttcagacttcgcccaaaccggcccgtacggtgatagattccgctggtggtcagagacatacgtgcaatggcacccgttagccgtagcactcgcagagctctgcacacagacagaaggcgcaccagtaactcacgcatggcaagtcgtggaatccgtgttcccccgctggagcgaaaagatcgccgacgcacgacgaggaagcttatggcggcccatccgaaaactctacaagaaagccaaagcagcccgagaagcggctctagcgagcaaggctcaagagcaggcacaacaaccctcgataactcagaactggcaatctccagatctagacgcacaaataaacaacatggcactagacccagctctcacacgcccaaacatggccatcccaccaaacatgggcatggacacgtccagacgcacaggcgacaccccaatgtccgacgatccaatcctccaaccgcgcctcctaagcgacatgatactcgccgacccatcagcaaacaccctatcctctcccccaataaatctaaacaccactcaacccatcgatcccttccccgcccaagaaccaaacatgaccacagaccctctctctcaatcattctcccctcgagccttcgacgacctctcaaacaccataacgcaatccctattctcctgggcagacgtaaacttcgacatgtcagccatgccacaacctaatactctccacgggaattcaggaccccagggtatgttcggcgcgcctatgttcccgcagcctgttgctgatgggccgttgaatggcgcggcgatggattggacgccttgggatgagtttgtgcttgatacttttcaggatacggggagtaagtctggggagagtgaggggagtagggggagttaggatgatataaagggtgggatatgtgttagcagaggatgagaaacggaatgcgtcaagctggatatgagatgatgtcttggatgagcacatgatattttaattttctacggatattttggacgtagatatgtacattacgatgcaatacaacccctactttgacgttcag

SEQ ID NO: 25501 - DNA, 534 bp, Muscodor strobelii
  misc_feature: SGI cDNA ID NO. 568704
  misc_feature: Encodes the peptide sequence at SEQ ID NO 25502
atgatggacgcaggtcgtctccaggaataccaggtcattggccgccatctgccttccgaggccaaccccaccccgaagctgtaccgcatgcgcatcttcgcccccaatgaggttgttgccaagtcccgcttctggtacttcttgatgaagctcaagaaggtcaagaaggccaacggcgagatcgtctccctcaacaagatccacgagaagaaccccctccgcgtcaagaacttcggtatctggatccgttacgactctcgctccggcacccacaacatgtacaaggagtaccgtgagctgtcccgcaccgacgccgtcgaggctctctactccgacatggctgcccgccaccgctcccgattccgatccatccacatcctccgcgtcgtcgagatcgagaaggccgaagacgtcaagcgcccctacatcagacagctcatcaccaagaagctgtccttccctctgccccaccgtgtccccaagaccagcaccaagaagatcttcagtgccacccgcccgtctaccttcgcctaa

SEQ ID NO: 25502 - protein, 177 aa, Muscodor strobelii
  misc_feature: SGI Peptide ID NO. 568704
  misc_feature (6)..(177): Pfam Id: PF01775 Pfam Desc: Ribosomal L18ae protein family
  misc_feature (5)..(177): NCBI GI: 225563055 Blast Desc: 60S ribosomal protein L20 [Ajellomyces capsulatus G186AR]
  misc_feature (5)..(177): NCBI GI: 154281365 Blast Desc: 60S ribosomal protein L18A [Ajellomyces capsulatus NAm1] gi|150411674|gb|EDN07062.1| 60S ribosomal protein L18A [Ajellomyces capsulatus NAm1] gi|240279872|gb|EER43377.1| L18ae
  misc_feature (5)..(177): NCBI GI: 226292369 Blast Desc: 60S ribosomal protein L20 [Paracoccidioides brasiliensis Pb18]
  misc_feature (5)..(177): NCBI GI: 226282465 Blast Desc: 60S ribosomal protein L20 [Paracoccidioides brasiliensis Pb01]
  misc_feature (2)..(177): NCBI GI: 256730796 Blast Desc: [Nectria haematococca mpVI 77-13-4]
  misc_feature (5)..(177): NCBI GI: 164424907 Blast Desc: 60S ribosomal protein L20 [Neurospora crassa OR74A] gi|157070711|gb|EAA34700.2| 60S ribosomal protein L20 [Neurospora crassa OR74A]
  misc_feature (5)..(177): NCBI GI: 116182378 Blast Desc: conserved [Chaetomium globosum CBS 148.51] gi|88186114|gb|EAQ93582.1| conserved [Chaetomium globosum CBS 148.51]
  misc_feature (5)..(177): NCBI GI: 239609287 Blast Desc: 60S ribosomal protein L18A [Ajellomyces dermatitidis ER-3]
  misc_feature (5)..(176): NCBI GI: 156054114 Blast Desc: 60S ribosomal protein L20 [Sclerotinia sclerotiorum 1980] gi|154703685|gb|EDO03424.1| 60S ribosomal protein L20 [Sclerotinia sclerotiorum 1980]
  misc_feature (5)..(176): NCBI GI: 154297265 Blast Desc: 60S ribosomal protein L18 [Botryotinia fuckeliana B05.10] gi|150842995|gb|EDN18188.1| 60S ribosomal protein L18 [Botryotinia fuckeliana B05.10]
MMDAGRLQEYQVIGRHLPSEANPTPKLYRMRIFAPNEVVAKSRFWYFLMKLKKVKKANGEIVSLNKIHEKNPLRVKNFGIWIRYDSRSGTHNMYKEYRELSRTDAVEALYSDMAARHRSRFRSIHILRVVEIEKAEDVKRPYIRQLITKKLSFPLPHRVPKTSTKKIFSATRPSTFA

SEQ ID NO: 25503 - DNA, 1146 bp, Muscodor strobelii
  misc_feature: SGI EST ID NO. CUFF.60513.0
  misc_feature: Variant of the nucleotide sequence at SEQ ID NO 25501
cacaacgccacaggacggtggatcgctctcccctctaaaattcccacaactggtcagcctgcaagcacaactttgctagggcggtaaacccttagcacagaacctcgccaaaaagttctggtaaccgaacaagtgccccaagccacctccaccacgtcaacccggtcctctctatattccacgaacgcatcacgacaaccacggccggtcaccaagtcacagtatgttggatctcgaatatctggacactccttcgtcgttactaacatttgccgcagatgggtcgtctccaggaataccaggtcattggccgccatctgccttccgaggccaaccccaccccgaagctgtaccgcatgcgcatcttcgcccccaatgaggttgttgccaagtcccgcttctggtacttcttgatgaagctcaagaaggtcaagaaggccaacggcgagatcgtctccctcaacaagatccacgagaagaaccccctccgcgtcaagaacttcggtatctggatccgttacgactctcgctccggcacccacaacatgtacaaggagtaccgtgagctgtcccgcaccgacgccgtcgaggctctctactccgacatggctgcccgccaccgctcccgattccgatccatccacatcctccgcgtcgtcgagatcgagaaggccgaagacgtcaagcgcccctacatcagacagctcatcaccaagaagctgtccttccctctgccccaccgtgtccccaagaccagcaccaagaagatcttcagtgccacccgcccgtctaccttcgcctaaacgaggcaagaaccaactttttacgtgttgcatgtgttcaggggaagtggttttatgggaaatggtctttgccggtgttcactacggaattgcgcggaaaactttgatcatacacttcacgattcagcatggaggctctaacggtaaaggggcccaaataaatgaatgaaacaaaaaaaattccgcattcttcgtgttttccatactacatacgtgatgctttgaaatgtcgcgatacgcctgctggtcccatttcctcggcgaggcacgcgggagcaatgaacataaaacatgcaaaccaacaggaggtaggcaagatgaaaagatgaagtaaagtaccaga

SEQ ID NO: 25504 - DNA, 525 bp, Muscodor strobelii
  misc_feature: SGI cDNA ID NO. 568705
  misc_feature: Reduced expression when VOC is produced
  misc_feature: Encodes the peptide sequence at SEQ ID NO 25505
atgggtcgtctccaggaataccaggtcattggccgccatctgccttccgaggccaaccccaccccgaagctgtaccgcatgcgcatcttcgcccccaatgaggttgttgccaagtcccgcttctggtacttcttgatgaagctcaagaaggtcaagaaggccaacggcgagatcgtctccctcaacaagatccacgagaagaaccccctccgcgtcaagaacttcggtatctggatccgttacgactctcgctccggcacccacaacatgtacaaggagtaccgtgagctgtcccgcaccgacgccgtcgaggctctctactccgacatggctgcccgccaccgctcccgattccgatccatccacatcctccgcgtcgtcgagatcgagaaggccgaagacgtcaagcgcccctacatcagacagctcatcaccaagaagctgtccttccctctgccccaccgtgtccccaagaccagcaccaagaagatcttcagtgccacccgcccgtctaccttcgcctaa

SEQ ID NO: 25505 - protein, 174 aa, Muscodor strobelii
  misc_feature: SGI Peptide ID NO. 568705
  misc_feature (3)..(174): Pfam Id: PF01775 Pfam Desc: Ribosomal L18ae protein family
  misc_feature (1)..(174): NCBI GI: 225563055 Blast Desc: 60S ribosomal protein L20 [Ajellomyces capsulatus G186AR]
  misc_feature (1)..(174): NCBI GI: 154281365 Blast Desc: 60S ribosomal protein L18A [Ajellomyces capsulatus NAm1] gi|150411674|gb|EDN07062.1| 60S ribosomal protein L18A [Ajellomyces capsulatus NAm1] gi|240279872|gb|EER43377.1| L18ae
  misc_feature (1)..(174): NCBI GI: 226292369 Blast Desc: 60S ribosomal protein L20 [Paracoccidioides brasiliensis Pb18]
  misc_feature (1)..(174): NCBI GI: 226282465 Blast Desc: 60S ribosomal protein L20 [Paracoccidioides brasiliensis Pb01]
  misc_feature (1)..(174): NCBI GI: 164424907 Blast Desc: 60S ribosomal protein L20 [Neurospora crassa OR74A] gi|157070711|gb|EAA34700.2| 60S ribosomal protein L20 [Neurospora crassa OR74A]
  misc_feature (1)..(174): NCBI GI: 116182378 Blast Desc: conserved [Chaetomium globosum CBS 148.51] gi|88186114|gb|EAQ93582.1| conserved [Chaetomium globosum CBS 148.51]
  misc_feature (1)..(174): NCBI GI: 239609287 Blast Desc: 60S ribosomal protein L18A [Ajellomyces dermatitidis ER-3]
  misc_feature (1)..(173): NCBI GI: 156054114 Blast Desc: 60S ribosomal protein L20 [Sclerotinia sclerotiorum 1980] gi|154703685|gb|EDO03424.1| 60S ribosomal protein L20 [Sclerotinia sclerotiorum 1980]
  misc_feature (1)..(173): NCBI GI: 154297265 Blast Desc: 60S ribosomal protein L18 [Botryotinia fuckeliana B05.10] gi|150842995|gb|EDN18188.1| 60S ribosomal protein L18 [Botryotinia fuckeliana B05.10]
  misc_feature (1)..(174): NCBI GI: 39943146 Blast Desc: conserved [Magnaporthe grisea 70-15] gi|58257465|gb|AAW69354.1| 60S ribosomal protein L20-like protein [Magnaporthe grisea] gi|145009758|gb|EDJ94414.1| conserved grisea
  misc_feature: Useful for introducing or modulating the production of volatile compounds
MGRLQEYQVIGRHLPSEANPTPKLYRMRIFAPNEVVAKSRFWYFLMKLKKVKKANGEIVSLNKIHEKNPLRVKNFGIWIRYDSRSGTHNMYKEYRELSRTDAVEALYSDMAARHRSRFRSIHILRVVEIEKAEDVKRPYIRQLITKKLSFPLPHRVPKTSTKKIFSATRPSTFA

SEQ ID NO: 25506 - DNA, 1146 bp, Muscodor strobelii; identical to SEQ ID NO: 25503
  misc_feature: SGI EST ID NO. CUFF.60513.0
  misc_feature: Variant of the nucleotide sequence at SEQ ID NO 25504

SEQ ID NO: 25507 - DNA, 1359 bp, Muscodor strobelii
  misc_feature: SGI cDNA ID NO. 568706
  misc_feature: Encodes the peptide sequence at SEQ ID NO 25508
atggatgctctaatccatgaatggcggacagcatttgttgcttgcaagggtgaccagcttgctgaaacactgcatccagatctccaagcttatcgagccaaattacaaggagtctggggtcgtggagacagtcgatctgctgagacagatcttatctttttatttcaaaaagataaatcaagaccacaactctcaaaggaagaggcaactggctggattgagatttacaaagcctactacaaagcactgggcgaaattctggcagcagaaggtctgcgaagcgatgctcagtctaactgggccagagtctacactgcatggaaggatgtaacgctgcttattgtgcgtggctacactcaccatgattttgaaaactggacgataccatgtctctatgttgccggcaagtacctgagactgtatgccatgcgagccgatgcagaacgagcagctagtggtgatgatgcttcggtcaccggcttccaagacgattttgatccacaggcagaggaaaataagagtctagaagagtgtgccagacatctgaacaggatatttcaactttgcttgaccgacagagctcctcttgaggaatcccggaaatggggtgtctactatgctgtgaatctcttattcaagacctacttcaaattgaactccgaaccactctcaaagaacatcctgaaagctatatcagctggtcgtacagatattccgtcaatcgacaagtttccgaagtctcaacaggttactttcaagtactatgagggtgtcttagcctttcttgaagagaactatgtcgaggcagagaagtgtttagagatggcttggctgatgtgtcacaaagatgcgaaacgtaatcttgaattgatccttacatacctcatcccctgtcgactattgacaactcacactctgccaagcgcaaaactccttgcgcccttccctcgtctacagaagctatttatgccattagcagaggctattagaacatctgacctgaaagcgttcgatatagctcttcgaaagggtgaagacgagttcatcaaacgccgaatctacctcacactagagcgtggcagggacattgctctgcgtaatctgctgcgcaaggtcttcctcgtaggaggcttcgaggaaggcaaagacggtgctgctcctgttcggagaacgcgaatcccggtttccgagttcacagcagctgtatgtctgagcggcggcgagccgatagacacagatgaagtggaatgtctcatggccaatatgatatacaagaacctgatgaaaggctacattgcccacgagcgcggcatcgtggttctgagcaaatctggagccttccctgggacaaaggtgtga

SEQ ID NO: 25508 - protein, 452 aa, Muscodor strobelii
  misc_feature: SGI Peptide ID NO. 568706
  misc_feature (320)..(443): Pfam Id: PF01399 Pfam Desc: PCI domain
  misc_feature (391)..(443): Pfam Id: PF01399 Pfam Desc: PCI domain
  misc_feature (1)..(452): NCBI GI: 85111435 Blast Desc: COP9 signalosome complex subunit 12 [Neurospora crassa OR74A] gi|74617856|sp|Q7SD63.1|CSN12_NEUCR RecName: Full=Protein CSN12 homolog gi|28925686|gb|EAA34699.1| COP9 signalosome complex
  misc_feature (1)..(452): NCBI GI: 256730579 Blast Desc: [Nectria haematococca mpVI 77-13-4]
  misc_feature (1)..(450): NCBI GI: 46109274 Blast Desc: FG01519.1 [Gibberella zeae PH-1] gi|83288031|sp|Q4IMN9.1|CSN12_GIBZE RecName: Full=Protein CSN12 homolog
  misc_feature (3)..(452): NCBI GI: 171695316 Blast Desc: protein product [Podospora anserina] gi|170947900|emb|CAP60064.1| protein product [Podospora anserina]
  misc_feature (1)..(452): NCBI GI: 154297263 Blast Desc: BC1G_12467 [Botryotinia fuckeliana B05.10] gi|150842994|gb|EDN18187.1| BC1G_12467 [Botryotinia fuckeliana B05.10]
  misc_feature (1)..(452): NCBI GI: 156054116 Blast Desc: SS1G_05906 [Sclerotinia sclerotiorum 1980] gi|154703686|gb|EDO03425.1| SS1G_05906 [Sclerotinia sclerotiorum 1980]
  misc_feature (17)..(452): NCBI GI: 115390835 Blast Desc: COP9 signalosome complex subunit 12 [Aspergillus terreus NIH2624] gi|114193846|gb|EAU35546.1| COP9 signalosome complex subunit 12 [Aspergillus terreus NIH2624]
  misc_feature (17)..(452): NCBI GI: 119496877 Blast Desc: NFIA_020230 [Neosartorya fischeri NRRL 181] gi|119413374|gb|EAW23315.1| conserved [Neosartorya fischeri NRRL 181]
  misc_feature (17)..(452): NCBI GI: 70990702 Blast Desc: conserved [Aspergillus fumigatus Af293] gi|74669822|sp|Q4WJX0.1|CSN12_ASPFU RecName: Full=Protein CSN12 homolog gi|66847832|gb|EAL88162.1| conserved [Aspergillus Af293]
  misc_feature (1)..(452): NCBI GI: 121702887 Blast Desc: PCI domain protein [Aspergillus clavatus NRRL 1] gi|119397851|gb|EAW08282.1| PCI domain protein [Aspergillus clavatus NRRL 1]
MDALIHEWRTAFVACKGDQLAETLHPDLQAYRAKLQGVWGRGDSRSAETDLIFLFQKDKSRPQLSKEEATGWIEIYKAYYKALGEILAAEGLRSDAQSNWARVYTAWKDVTLLIVRGYTHHDFENWTIPCLYVAGKYLRLYAMRADAERAASGDDASVTGFQDDFDPQAEENKSLEECARHLNRIFQLCLTDRAPLEESRKWGVYYAVNLLFKTYFKLNSEPLSKNILKAISAGRTDIPSIDKFPKSQQVTFKYYEGVLAFLEENYVEAEKCLEMAWLMCHKDAKRNLELILTYLIPCRLLTTHTLPSAKLLAPFPRLQKLFMPLAEAIRTSDLKAFDIALRKGEDEFIKRRIYLTLERGRDIALRNLLRKVFLVGGFEEGKDGAAPVRRTRIPVSEFTAAVCLSGGEPIDTDEVECLMANMIYKNLMKGYIAHERGIVVLSKSGAFPGTKV

SEQ ID NO: 25509 - DNA, 2387 bp, Muscodor strobelii
  misc_feature: SGI EST ID NO. CUFF.59956.0
  misc_feature: Variant of the nucleotide sequence at SEQ ID NO 25507
gaacgggagatgatgctattttcctgcttcaaggtcatggaatgtccatgaatcattcggcatctacacattgaatgatactgagaatagtgctggaaatatcagcatcaacccacatatattacagcaagtatccggaacctgagccaattgcccaaacttcgcatcggctctgagctgagctccgactgtgtgctatggatgctctaatccatgaatggcggacagcatttgttgcttgcaagggtgaccagcttgctgaaacactgcatccagatctccaagcttatcgagccaaattacaaggagtctggggtcgtggagacagtcgatctgctgagacagatcttatctttttatttcaaaaagataaatcaagaccacaactctcaaaggaagaggcaactggctggattgagatttacaaagcctactacaaagcactgggcgaaattctggcagcagaaggtctgcgaagcgatgctcagtctaactgggccagagtctacactgcatggaaggatgtaacgctgcttattgtgcgtggctacactcaccatgattttgaaaactggacgataccatgtctctatgttgccggcaagtacctgagactgtatgccatgcgagccgatgcagaacgagcagctagtggtgatgatgcttcggtcaccggcttccaagacgattttgatccacaggcagaggaaaataagagtctagaagagtgtgccagacatctgaacaggatatttcaactttgcttgaccgacagagctcctcttgaggaatcccggaaatggggtgtctactatgctgtgaatctcttattcaagacctacttcaaattgaactccgaaccactctcaaagaacatcctgaaagctatatcagctggtcgtacagatattccgtcaatcgacaagtttccgaagtctcaacaggttactttcaagtactatgagggtgtcttagcctttcttgaagagaactatgtcgaggcagagaagtgtttagagatggcttggctgatgtgtcacaaagatgcgaaacgtaatcttgagtgcgcctgtcttcatgtattcttctcggcagactgaactgactggagatagattgatccttacatacctcatcccctgtcgactattgacaactcacactctgccaagcgcaaaactccttgcgcccttccctcgtctacagaagctatttatgccattagcagaggctattagaacatctgacctgaaagcgttcgatatagctcttcgaaagggtgaagacgagttcatcaaacgccgaatctacctcacactagagcgtggcagggacattgctctgcgtaatctgctgcgcaaggtcttcctcgtaggaggcttcgaggaaggcaaagacggtgctgctcctgttcggagaacgcgaatcccggtttccgagttcacagcagctgtatgtctgagcggcggcgagccgatagacacagatgaagtggaatgtctcatggccaatatgatatacaagaacctgatgaaaggctacattgcccacgagcgcggcatcgtggttctgagcaaatctggagccttccctgggacaaaggtgtgagtcagtgaggttacaatatgtgcgacaaatagaaccgcatgtgcccatatgtcagtcttacaagcgcaaggcaatgccaaggcagtaaatggtccatactctgccactatactagcagtactacccaattactattggccctacgttgggctgcaagacgaggcagcccaatgggaggagagacacttagtctttaaccgaatcagttttgaggtggtgtggggaaggcggacaggacatgcaggcttatgctcggtagaggcaaatcgccacagcaaggcattcgttgagtatctgatagtaaaagagataaaggtgtccaaagtaaaatgtggtaatgtatgattagggacagaggtaagacccgtgcaatcactgaaaccccaaagatcgggaatatgcatttgtgctctacattacatgtattgtactgagcggattaaaaatgatgtgcttgaaaaacctaacctctgtctcacttgcgcaatcagggaacaaacaacgtatagaaacacgccagacgtgcttaggacagcaaaattgatcggccaaatggggaacaaggcagtttttcaatactcgaaaaggacaacccaagcttgacgatgagatgcagatacatctccaatgaaagtgttctctcatttcaaacgccaatactctactttgagattcgaagcgtacatttagtgcaactcgttgataacccgacgaacgaaaacatcgattgtatcatggaagtaatttactttttatgcatttcatatcttctcttttac

SEQ ID NO: 25510 - DNA, 870 bp, Muscodor strobelii
  misc_feature: SGI cDNA ID NO. 568707
  misc_feature: Elevated expression when VOC is produced
  misc_feature: Encodes the peptide sequence at SEQ ID NO 25511
atgtcttccaaaatgcacagcaaacgtttcgatccgccactgagcaagagcttttccagaggccacaaatccagcaagtcaaatgtatcattcagcaagacccatggcgtctccaagagtcgacatgagaagtctagtcgtcggttgacaacatccatgtctcatcaaatggatactacaatgacaacagaaagtagtctcacaccctccatcgtgacacttgtgatcggccgagaccagcgaatcttcgcggctcacgaagacgtgctctccgcttcaccatggttccaacaagcgctgtcggaacaatacatggacttacaaaatggcaagcgcatccaccttcccgatgaggagcccgagatattctcttccgtccttgagtacctttacaaaggtgactactatccacgactcattcacaataagcgtcgcaactcctgggagattgaaccagttgatgacgagcatggatcaaatgagtcaacgatctatcatcatgctatcgatggcgatatactcaaggataccatcatctactgcacggcagagagatatggattagaggaattgaagcgtgtcgcgcttcggaagcagggtcttcagtccggtattcaatgcagcacaatcctgacatctgcccgatatgcatacgcaaacacacccgactctgactcgaagcttcgagcacattatctcgctctcatcatccgcagtcgtagcacattcaagcgcagcgggactatgcagcttgagatgtacaacggcggcacccagctgttcttcgatctctttgtcgcgttgtgcaatcatgttgatgatatctcgagcgcttcaaacacgccacgaagcaatcgtcactttttctag

SEQ ID NO: 25511 - protein, 289 aa, Muscodor strobelii
  misc_feature: SGI Peptide ID NO. 568707
  misc_feature (15)..(287): NCBI GI: 46109276 Blast Desc: FG01520.1 [Gibberella zeae PH-1]
  misc_feature (5)..(289): NCBI GI: 39943142 Blast Desc: MGG_03651 [Magnaporthe grisea 70-15] gi|145009760|gb|EDJ94416.1| MGG_03651 [Magnaporthe grisea 70-15]
  misc_feature (7)..(278): NCBI GI: 261355313 Blast Desc: conserved [Verticillium albo-atrum VaMs.102]
  misc_feature (5)..(286): NCBI GI: 171695318 Blast Desc: protein product [Podospora anserina] gi|170947901|emb|CAP60065.1| protein product [Podospora anserina]
  misc_feature (5)..(286): NCBI GI: 116182382 Blast Desc: CHGG_01819 [Chaetomium globosum CBS 148.51] gi|88186116|gb|EAQ93584.1| CHGG_01819 [Chaetomium globosum CBS 148.51]
  misc_feature (5)..(281): NCBI GI: 154297261 Blast Desc: BC1G_12466 [Botryotinia fuckeliana B05.10] gi|150842993|gb|EDN18186.1| BC1G_12466 [Botryotinia fuckeliana B05.10]
  misc_feature (15)..(286): NCBI GI: 156054118 Blast Desc: SS1G_05907 [Sclerotinia sclerotiorum 1980] gi|154703687|gb|EDO03426.1| SS1G_05907 [Sclerotinia sclerotiorum 1980]
  misc_feature (5)..(281): NCBI GI: 85111433 Blast Desc: NCU08387 [Neurospora crassa OR74A] gi|28925685|gb|EAA34698.1| conserved [Neurospora crassa OR74A]
  misc_feature (5)..(282): NCBI GI: 154281361 Blast Desc: conserved [Ajellomyces capsulatus NAm1] gi|150411672|gb|EDN07060.1| conserved [Ajellomyces capsulatus NAm1]
  misc_feature (5)..(282): NCBI GI: 225563053 Blast Desc: conserved [Ajellomyces capsulatus G186AR]
  misc_feature: Useful for introducing or modulating the production of volatile compounds
MSSKMHSKRFDPPLSKSFSRGHKSSKSNVSFSKTHGVSKSRHEKSSRRLTTSMSHQMDTTMTTESSLTPSIVTLVIGRDQRIFAAHEDVLSASPWFQQALSEQYMDLQNGKRIHLPDEEPEIFSSVLEYLYKGDYYPRLIHNKRRNSWEIEPVDDEHGSNESTIYHHAIDGDILKDTIIYCTAERYGLEELKRVALRKQGLQSGIQCSTILTSARYAYANTPDSDSKLRAHYLALIIRSRSTFKRSGTMQLEMYNGGTQLFFDLFVALCNHVDDISSASNTPRSNRHFF

SEQ ID NO: 25512 - DNA, 1840 bp, Muscodor strobelii
  misc_feature: SGI EST ID NO. CUFF.60035.1
  misc_feature: Variant of the nucleotide sequence at SEQ ID NO 25510
gcgctgcccccaaaattttcttcccttctattcatccaaacggaagggaagtcaataggtaggcaaaaattcatcttgtttcatcattgtcgtttgggcttttcattttcattatcacatctaccaccctgcatcgaatgaatgacaccttacgagtaagactcggatttgggacggaacatcacgcaaatacgagttagtgactatctgcgaccgaggcagcattcgtcgacttattaaaatcctccgactgccttgtcgaagacttatatcgtcaccacactcataatcatgtcttccaaaatgcacagcaaacgtttcgatccgccactgagcaagagcttttccagaggccacaaatccagcaagtcaaatgtatcattcagcaagacccatggcgtctccaagagtcgacatgagaagtctagtcgtcggttgacaacatccatgtctcatcaaatggatactacaatgacaacagaaagtagtctcacaccctccatcgtgacacttgtgatcggccgagaccagcgaatcttcgcggctcacgaagacgtgctctccgcttcaccatggttccaacaagcgctgtcggaacaatacatggacttacaaaatggcaagcgcatccaccttcccgatgaggagcccgagatattctcttccgtccttgagtacctttacaaaggtgactactatccacgactcattcacaataagcgtcgcaactcctgggagattgaaccagttgatgacgagcatggatcaaatgagtcaacgatctatcatcatgctatcgatggcgatatactcaaggataccatcatctactgcacggcagagagatatggattagaggaattgaagcgtgtcgcgcttcggaagcagggtcttcagtccggtattcaatgcagcacaatcctgacatctgcccgatatgcatacgcaaacacacccgactctgactcgaagcttcgagcacattatctcgctctcatcatccgcagtcgtagcacattcaagcgcagcgggactatgcagcttgagatgtacaacggcggcacccagctgttcttcgatctctttgtcgcgttgtgcaatcatgttgatgatatctcgagcgcttcaaacacgccacgaagcaatcgtcactttttctaggcgctggttttctcaatgttttaatacaccctcatctcaatactggcttttgaatcccatctcatctcgagatttatcatcatcactagcccggcctctgctttgattaccaatacatgcagagctctaatgatcaatgtcgatttctctgtttatcgtcttggatttccaacatactactgttcgagattggggaataccgctgatacaaataccatacttgggcgttctggtgttctggcattttggatctgtttccttcctctcttttgtctgtcacgctttgtaacatctttgctaccgcgtcgcaccctccagaccgcgatcatggtgatggtgcgaaacagacaacgaaagagaatcggcatccagactgcaagattaggaggaaatttcctcatctttctcataacgtttcaatttccgatttcccagattaacgacaaccccaaaaacatgtactactaaatttcagaactctcgttcacaccccacaagggatcgagttcaatatgtcttctcgagaagcaggaagaccacgagcattcttagaggaaagcgaagcattaccgttgagctcgctatgatgatgatagatttacacttcttgtacacaacttttgataccaaattcttgatgaagtattatttttggaaatctgatcttctctacaatgtg

SEQ ID NO: 25513 - DNA, 324 bp, Muscodor strobelii
  misc_feature: SGI cDNA ID NO. 568708
  misc_feature: Encodes the peptide sequence at SEQ ID NO 25514
atggcgatgcgcgcaaagtcgtctactggaagactatcacgtcagaagaagcgatccaagcatcgcgagcgtaagaacgtcgagcgatctcttgagttctgccctgttgatttcaagaagtacgacgcggaaactgccaatgcggatcaagagccaggcgcctcatccgaggactcatctgacaactcgtgtaccaacgaagaacgtgttcccgtgcgactcttgacagctggatgtgtcgccaactttgagctttttagaggcaacacccacttcgagctgtttggaggtagcaccacaagcgaagaatctgctaccgaatga

SEQ ID NO: 25514 - protein, 107 aa, Muscodor strobelii
  misc_feature: SGI Peptide ID NO. 568708
MAMRAKSSTGRLSRQKKRSKHRERKNVERSLEFCPVDFKKYDAETANADQEPGASSEDSSDNSCTNEERVPVRLLTAGCVANFELFRGNTHFELFGGSTTSEESATE

SEQ ID NO: 25515 - DNA, 6038 bp, Muscodor strobelii
  misc_feature: SGI EST ID NO. CUFF.60201.0
  misc_feature: Variant of the nucleotide sequence at SEQ ID NO 25513
cttgaacgtgtctgtgatatatttgaacacatgagcaccaaactactgacctaccacgaggtcgtggatgctattcgagctagacaacatccgtgtagtaggccccatgtaaatcgggtactcaaggccatgtcgttcatttactccgacttgatacaattttgtttcgatatgtgccaggcattttccctaggaaacccgaaaaaacgtctcctgctgaaatattcgtttttctcatcgttgccgttctcgaaaaccccgttcttcgcaaacccatttagcgcacgctatgatacactactaagacgctgggaacgtcatcaggaaatcatggatgaggagatctcgtccatcctcactgttgagcaacttaggacagctgacagcgtcgaaagcatgcttgaccagctcaataagccatatgcttttctcgatgagaaatcaagagctcagcttgaccgtgataccattgagtcaaatgtccagcgatgggttcactcaccgtcctggcttgaaccatatgagacggctgctgctcgtcgttgcgacgaaactactagttggttcattcaacgagatgagactcggcagtggatggcttctgtcgactccggagacacatccgcaccattgtcggtgttatcagtgcaaggaaaaccaggatttgggaagacagtactatgcacaaagctcatagaacatttgagagagcaccaggagattttagggagaaaggaatatgtttcccatcaaaaggtcgttgccttttattattttgatgggcagagaagagacacaaatacaagctccgccgcattccgagctatcgcactacagctattacatacactgtctcaagaggaccctgacgctctcgacatattcctcattctccgcgagagaagaaccggccaaccaatcgcatctgatgtcgaaattatgtctgccctgtcgttgctaatacaccgtttcgcccgtgtttttcttgttttcgatggaattgatgaatgcattgatcatgagcttatgatgacgagattactatctgtttgtcaagctcccggtttgatctcagttgctttttttagtaggccgacagtgcaactagtctccggcttcaaagagaatgctatccatatcgcactgaatagcgactccaatctggatgacatcaggactttcttgcgctttcgtcttacacatttaaaccgctacggacttctccaagattcggcagatctagaagacatggtggaatctgttgccagtcgcgcgaatggaatgttcttatgggttgcactccttaccaactatctcatcgactcgccgtatctatcgacaagacaacgaagagaggcactccagaacttgaatcgactagaagggcttgataaactctatgggatcatattcagctcattactgtcgtcagacaaagtcacacaagagattgttgttcggatcttcagtatcgttttgtcttcttgtcggtcgctccatatcgaagaactccaacatgcgattgcgactcccctggatcgtggcctacagaacgacgacctgatacctgatatctcacagagactgggtacgatctcgggtgctctgatggaactcgacaacgccaaaaatgtcagattcgtgcacctgtcggttgaagaattcctggctgatccgctcacgagagatggtctctctgttctacctcagagcctagccatggacagagcaagcacgtatagaagactttcaaatatctgtctttcttatctataccatacggtagtgccggagccattagctcgtaatgcaaccattccccctgctgtgagcgagcaacgaataagataccctcttctagactatgcggccgatttctggagcgtacacgttttagattgcttggagactattcaactgtcaccaatggtggaagaagataggacgctagtgaggttggcctcacagtttctcaccaagaaatcagcggtctcagtgtggatcgaagcctcgtggatgtttcaaaggcgacccagggttcgtaatggatcatctgatcctttttttcgaggcatgccacattgcgtgctgcacctcggcgcagaggagaagcagttgttcactgacgcgtcattaacattacttcggctctctcaggatctagataacctccacaaatcctggtcttgcctcctttcggaacgaccaaatgagatttgggaacctagtatatccggctttagccattcgtcattttggcagcgtgtatcaggctccaagatttctggacgcttcccagctgaaaagaaacatggctcacactcagcttgtctcaaatcacagctaacggcagatgggctgggcttgggtatcattcgtatgtacgtctcattgacgccgttacaacctacgttgttcttcgagctgtggtgcactgtccggaataagaaattgaaggagatatgtctacaaattcctcagattcatcttaaacctttcatatcgcttaaatggctgtcttcgcggcacaaatcaagcacacgcgggtacacttgtggtgccattgcctcgaaaatctaccaccttgacgatgatgacagagagatggcaagcataaacgatacgaacggtgacgagaagtctcaacggaacggctttcaccaggttcatctacctgttgcaatctcacattctttcaaccggatagctgctcctggatgtgtttctgacgtgaggcggcaacaaaagatctgcaatgaacgccagccacattttgatgtgcaacaacaattcatagactttacgggtaattgcagtcgttatggcacatttcgattcagctcagaacaatgctgcccaaggtacgatttacagatgtcggcttccggcgaatttcttatgaccattcacaagtcccatggcatgatggacatagatcgtggatggtcatgtgtgatgcgttttgttaccatttaccgagacaagtcagcacaaagttcggaatctccagactacaaatacatcgcttcattggcgttcaaacctaggttccatggtcaggaggacaacgaaggagagttttgtgcactgctaaatcctatcttgcccatcattgccatttcatatgacaatgtgatggttacttgtgctgctgccgcaaaggggtttgaggtggtcggttcgacgggtggtgctgcattatggagtttcactaagaatagtgttaatcgcagggcggacttcaagttcttcgcgaaagctcctagaccacttaagtacgatcaaggtggtgagatcttctgcggtactccggtttacccatggctctctggcacgggctggaccaacacagctgaacaaacagaatcagatgcgcctctgtctctaattacgctgcaaaacatatgcagtcagtcgggtttagttcgcccatatgcgacgaaaccactcgttcagacgcagggtgggataatcagttacaagagcgaaagcacaggcattgccatgtcacagccacatcactctgaaaatggcgagttgatgcttgctacactggagggagatggtcaaatgacagcagagctactgacgcgtctcccgcaatcgatctcgagcgatcacgaggcgatcatgatcaactcatctgatataacaaggtcggacaaacgacagtttctacttggtcccgctactagaccatttgcgcaacatcaaattcaaagtacaagggacagcgaaaatgacaatggatatccgcacttgccagtcatactaaatcgtcagcgcgacacgattcccactataaatggccatgtcgttgggcatcttgaagggactatgctccaattgagaaagagaataggcgaccttgaggatgagcatcggcctatcaagtatcgtcgtggcccgtgagcttgtggctccgctgaagctaggtctctgtcgatcatttgatacacgtcaacgtgcgaaacatgtttgaaaatacactttgcgacacaagcaagagcaaacatatgataaattagtagtaccaaaactacccagaccaagaggcacatcgtcaacaagtaccaagccatacttgagcttcctctgctttcgctcacattgcatctcgtttgccgtattgaagaagaaagcgggttgcaaaattcaatggatctctactcacggcaagtgactctgtatgatctgagctgtgagtgtgcacaatactggctttgggcgcgattcacgagaattatcttatcacttctctatcaggctatctccatagaccgtgtgaaaagttgactgactcgtctttatttatataagcacaggaatagttcagacaagttcggacattataattgttcagcacaggtgccattctcatatccgcttacaaatcttgatagtgcacgaaacagtacaatatgatttatacggcactttgaaaagcattaaagttttactcgtctattggaaaacgcccctcgttgtggactgagactcaaataactcacattggggaagtaggcgcagatttcgcagaactcgcccgggaaagaggtgcaaaatactttcaacaaccttagccagtactatattctcgtcgactcgttgatacaaattgatttgcagcaggtatggcctgcgcagcactagcttcttttaactactactagccactacatcatccgattatcaacttcaagaacctgacagctcatatgatcatttctattctctccacaaccatcgagtctaccagacctatcatcagccatcatccacaacaatgtgcgagcagatctatctctgctttcaggactgcgcctgtcaactcaggtatcgactcgacgaatgccagtacggccgaaccgacccacgctgctttcatgtcacaaagtcactgctctagagcaacagggactactgccgctggcaccggcgatggatggcgatgcgcgcaaagtcgtctactggaagactatcacgtcagaagaagcgatccaagcatcgcgagcgtaagaacgtcgagcgatctcttgagttctgccctgttgatttcaagaagtacgacgcggaaactgccaatgcggatcaagagccaggcgcctcatccgaggactcatctgacaactcgtgtaccaacgaagaacgtgttcccgtgcgactcttgacagctggatgtgtcgccaactttgagctttttagaggcaacacccacttcgagctgtttggaggtagcaccacaagcgaagaatctgctaccgaatgaaccgcatacctcgtcccctaacgacatggatcaatgtccctgtcaccgtttctgcgttgggtataccatcgcacactctgggtatataccagtttctagtatcaaacctttaccaatgacatggaaaatctcgccatagctcaaaaagaaaagaacgccaaaattatcatcgcatcatatcctgacaacatcgttacctcgtattcatcggcaaaatatccaggggcatttaccagccaagatttgctgcaaaaagaacatacagacgaaatgtctatctaaaatgggcaaatggattgcaaattacctagttcgtaggcgtggaatcatcacatcgagaagggagattgggagattgctacatatcaaccaattagctcgtcgggataccagggattcgaccacatccacgcaaaagatacgtagtcatcaataccaatagcttcataaaaagtacagattatctccaaatggtgtgctttttgtgacatgacaaactgtggcggagaaggatttactgagagagcatgggaatgctccgcgaacccagctctctggcatttggctccatgttaccccgctgcggatatgagaggctgtcaggtcttatttggcatggaggtacaagaatggaggcccaagcatgaagaggcatattcacggtgttctcgaaatggtgttagagctcgatcaagattcggcatatgttcgctgccaaattagtagtgcaaagtggcaatcgctgcgagaaggaatccttatcttaaca

SEQ ID NO: 25516 - DNA, 987 bp, Muscodor strobelii
  misc_feature: SGI cDNA ID NO. 568709
  misc_feature: Elevated expression when VOC is produced
  misc_feature: Encodes the peptide sequence at SEQ ID NO 25517
atggacatagatcgtggatggtcatgtgtgatgcgttttgttaccatttaccgagacaagtcagcacaaagttcggaatctccagactacaaatacatcgcttcattggcgttcaaacctaggttccatggtcaggaggacaacgaaggagagttttgtgcactgctaaatcctatcttgcccatcattgccatttcatatgacaatgtgatggttacttgtgctgctgccgcaaaggggtttgaggtggtcggttcgacgggtggtgctgcattatggagtttcactaagaatagtgttaatcgcagggcggacttcaagttcttcgcgaaagctcctagaccacttaagtacgatcaaggtggtgagatcttctgcggtactccggtttacccatggctctctggcacgggctggaccaacacagctgaacaaacagaatcagatgcgcctctgtctctaattacgctgcaaaacatatgcagtcagtcgggtttagttcgcccatatgcgacgaaaccactcgttcagacgcagggtgggataatcagttacaagagcgaaagcacaggcattgccatgtcacagccacatcactctgaaaatggcgagttgatgcttgctacactggagggagatggtcaaatgacagcagagctactgacgcgtctcccgcaatcgatctcgagcgatcacgaggcgatcatgatcaactcatctgatataacaaggtcggacaaacgacagtttctacttggtcccgctactagaccatttgcgcaacatcaaattcaaagtacaagggacagcgaaaatgacaatggatatccgcacttgccagtcatactaaatcgtcagcgcgacacgattcccactataaatggccatgtcgttgggcatcttgaagggactatgctccaattgagaaagagaataggcgaccttgaggatgagcatcggcctatcaagtatcgtcgtggcccgtga

SEQ ID NO: 25517 - protein, 328 aa, Muscodor strobelii
  misc_feature: SGI Peptide ID NO. 568709
  misc_feature: Useful for introducing or modulating the production of volatile compounds
MDIDRGWSCVMRFVTIYRDKSAQSSESPDYKYIASLAFKPRFHGQEDNEGEFCALLNPILPIIAISYDNVMVTCAAAAKGFEVVGSTGGAALWSFTKNSVNRRADFKFFAKAPRPLKYDQGGEIFCGTPVYPWLSGTGWTNTAEQTESDAPLSLITLQNICSQSGLVRPYATKPLVQTQGGIISYKSESTGIAMSQPHHSENGELMLATLEGDGQMTAELLTRLPQSISSDHEAIMINSSDITRSDKRQFLLGPATRPFAQHQIQSTRDSENDNGYPHLPVILNRQRDTIPTINGHVVGHLEGTMLQLRKRIGDLEDEHRPIKYRRGP

SEQ ID NO: 25518 - DNA, 6038 bp, Muscodor strobelii; identical to SEQ ID NO: 25515
  misc_feature: SGI EST ID NO. CUFF.60201.0
  misc_feature: Variant of the nucleotide sequence at SEQ ID NO 25516

SEQ ID NO: 25519 - DNA, 360 bp, Muscodor strobelii
  misc_feature: SGI cDNA ID NO. 568710
  misc_feature: Encodes the peptide sequence at SEQ ID NO 25520
atggatgaggagatctcgtccatcctcactgttgagcaacttaggacagctgacagcgtcgaaagcatgcttgaccagctcaataagccatatgcttttctcgatgagaaatcaagagctcagcttgaccgtgataccattgagtcaaatgtccagcgatgggttcactcaccgtcctggcttgaaccatatgagacggctgctgctcgtcgttgcgacgaaactactagttggttcattcaacgagatgagactcggcagtggatggcttctgtcgactccggagacacatccgcaccattgtcggtgttatcagtgcaaggtatgccaagttccgcccgaggtgatattgcagcctaa

SEQ ID NO: 25520 - protein, 119 aa, Muscodor strobelii
  misc_feature: SGI Peptide ID NO. 568710
MDEEISSILTVEQLRTADSVESMLDQLNKPYAFLDEKSRAQLDRDTIESNVQRWVHSPSWLEPYETAAARRCDETTSWFIQRDETRQWMASVDSGDTSAPLSVLSVQGMPSSARGDIAA

SEQ ID NO: 25521 - DNA, 6038 bp, Muscodor strobelii; identical to SEQ ID NO: 25515
  misc_feature: SGI EST ID NO. CUFF.60201.0
  misc_feature: Variant of the nucleotide sequence at SEQ ID NO 25519

SEQ ID NO: 25522 - DNA, 3783 bp, Muscodor strobelii
  misc_feature: SGI cDNA ID NO. 568711
  misc_feature: Encodes the peptide sequence at SEQ ID NO 25523
atgggcgggacttcggtgatcgtagcgtcgcacacggtgaggaggacgacgaaccacagagccaagacgctcgctgccatccagcactgcttgaggactgtacacttggccagatcgaactcgagatgcaggtccaggacgaggctcgggccggtcaagtgggagggggacgccatagtcgctacaaagaagcccgatgagatcaatctattccgcccggcaccttcaaagtcggatgcactgccaaagggtcagactcaaccaaataaacagcaatctaccgcagtcggcaagcatcgaaaaccttcggcaatgacctggaaattcttcatgtccaagaaggggcgtgaaaaggtcttggaggagcttcctcttttaacacaggagaacctggaaaatccagaaaacttcacaagagactatgttgatagttcgggagagcttccacaaactgatggcataacaagactatttcgctggttcacgaaggcaacccttcccaacatgggatcactctatatcatcggtaagggaatgaagaaggtgctggccaggaaagatgcaagtaatcgattattttttgagatgtacaagacaggcatgctgcataattggtggggaccgttagactacatacccaaaacgatcgctgttaaggagaaggatgccctcatcgatgtgtataactacgctattcagaatggccaactcccaaccatatcgttctcagttattcgacgctcgaaaaacgaaaatgccatttatgtggtgaacttggcgcttgctgcgcacggcatcagcgtctccgccagatcggacagacctcatttcgccgagataaatgctgcgttaaagttcaaaaaggcagcattgtatttccaaaggaacaaggtgctgatatctgatgacgagctcagcaaagcaaggacggcattggaatttggagcggcaccgaatgcagagcctggggaccaagactcctttgcgttgttgccgagtctttcgtcttcgtcattgttgaatagttctacggcccatgagttccttgcttttcttagacgacggtccgtcgtcgatgctgacatagaagtcgtgtgcaaagatcacaatgggggccaatggtccaaggtacgtgtctctaacggagaccgtgtcttcgatcacgagatcctagcagctaccaaacctgcggcgcgtagtcttggatttttagtgggtagtttcttcaaagcgaggcaatatcccgctctattcaaggagttttctgatagcttgcgatcacgcgaccgcgttccgctatccagtccatcctttcaatctgctctagtccctgtgacagcagaagtcatgaatgaaataatgatcatcaaccaaatagcagcgtcctcttctcaagacatccaggaagcatatcaagaggttgatgtaccagagacagtacccgtgcagaatcccaaagctgcgcaggatcatgtactaaagagagccttggaagaatatgaagtacgaccagatctaaacgatatccgccaattaagatctgagctgcccatcagccaatatgcccagaaagtgttgggattggtaaacaagaatgtctatagcatcttgatcggcgatacggggtcgggtaagtcgacccaacttccacaaatactgctggacgaagagatccgcgctggtaatggttcctcctgcaatgtcatatgcactcagccacggcgtatcgctgcctcttcccttgccaggagagtctctactgagcggggcgagccccttcgacacagcgtcggctaccaggttcgctttgatacgcagttgccacgaactcatggtagtatcctgtattgcacaacaggaatcttattacagcgtcttctgcacgctcccgacaacttgttaaatcacgtttcacacctcgtgattgacgaagtacacgagagagatatttccttagacttactactatttgcactcaggagagcccttgcgaggcgagcatcgagaaagctgaggctaccacgtgtagtcttaatgagcgctaccctggatgctaaactttttagtacgtattttcagaatagtttaccgaacgagaaaggcgccgcaaagaatgaatgtccgatcctgaaagttcccggccgaaactttccagtgatgcatcattatctggaagacatctggcccgtcttgcaaaaagattatgatagaacccaagtcggacaaactctagaggattcctacgactatctgaagaaggaggtatccgaattgacacccttccatcttccagctggcactggcagcactgcgcaggtgcgaaaggcagcagatggccacgatgttgaagatgtggaagatatagaccaagaagccgctgtaccgctcggtctagctgccgctacaatcgctcacatttgcaagacctcaagagactgtagcgccattttggtcttcctgcctggtctagaggagatcatcaggctcgaaaagggacttcgagaaggtcggccgctgggcatggatctcggcgacccgagaaaattccacatctttatgctgcactcatccatgccggatagtcaatcgagcgtgttcgattcacttcctggaggctgtcgcaaaattattctcagtacaaatatcgctgagacgtcggtgacagtacctgatgtgattgaaccaccgacggacgtcgccgtaacaactgcggtggaggatttgatgtctcttggtgcgctcgaccgccaagaaacgatttcaccccttggacgtgttttagccttgctaccagtccatccgtcctatggcaagatgattgtattgggcatcatattccgctgtctgagccccatgatagccttagctgcctctgcaggcgaaagccctttcatttggccgcgaggcgaacagcgcatgacgcggcgtcacttaaggaatgccttcgggcaagactcattgagcgatcatatcgtatttctgaatgcgctcgatcagttcagtcagatcaccagtcctggagtaatacagaacaagcgtccccaagactggtgcactgagaactacgtcaatcacaacgccatgaagaggattcagttgatcatcaaacaaattgaaaacactctggtgaaatcgggcctagtcaacgatatcagcagttttaatacaaattcggataacaatgagacaattcgagcactcctcgtcgccgggctatctccgaacatcgccaaacgcacaagcagaagattttggaggtcaggccaaaaggaaaagatcatcaccgcggccaattctgtcaacctcgaattaaataaattccgtttccccactccacttttcacggccttcgacgatctaaacatggctcccggcgaaggcgccttgatcatgcgctctaacacattgatcactccgcttatgatattcttgtttggtgggcgattcgccaacatgcttctattcgatcaatggctcagattccatgtatcgaaaacggttgatgggcagcctatggctgtgcaattagctacgctccttgtcttccgccgtaatctggagcggacactggatgccgcgttctccaagctcaggcaaggacagtctttggacgatgatcctgttctcatggttttgattgagaagatgcctactattttgaaggatatgaacgaggccgctccggaatacttggagctcgttgcttcggtgaagtcgttcgatgaagatgcgtcccttgcggaagagtcggctgaggagcctgatgacttcagccccctatga

SEQ ID NO: 25523 - protein, 1260 aa, Muscodor strobelii
  misc_feature: SGI Peptide ID NO. 568711
  misc_feature (1036)..(1149): Pfam Id: PF07717 Pfam Desc: Domain of function (DUF1605)
  misc_feature (903)..(994): Pfam Id: PF04408 Pfam Desc: Helicase associated domain (HA2)
  misc_feature (226)..(892): NCBI GI: 156056260 Blast Desc: SS1G_05482 [Sclerotinia sclerotiorum 1980] gi|154703266|gb|EDO03005.1| SS1G_05482 [Sclerotinia sclerotiorum 1980]
  misc_feature (500)..(1147): NCBI GI: 242032961 Blast Desc: SORBIDRAFT_01g008080 [Sorghum bicolor] gi|241917729|gb|EER90873.1| SORBIDRAFT_01g008080 [Sorghum bicolor]
  misc_feature (392)..(930): NCBI GI: 213404826 Blast Desc: ATP-dependent RNA helicase A-like protein [Schizosaccharomyces japonicus yFS275] gi|212001232|gb|EEB06892.1| ATP-dependent RNA helicase A-like
  misc_feature (321)..(893): NCBI GI: 169844019 Blast Desc: CC1G_06717 [Coprinopsis cinerea okayama7#130] gi|116510102|gb|EAU92997.1| CC1G_06717 [Coprinopsis cinerea okayama7#130]
  misc_feature (513)..(1167): NCBI GI: 167517411 Blast Desc: [Monosiga brevicollis MX1] gi|163778145|gb|EDQ91760.1| [Monosiga brevicollis MX1]
  misc_feature (493)..(893): NCBI GI: 71023369 Blast Desc: UM05767.1 [Ustilago maydis 521] gi|46100773|gb|EAK86006.1| UM05767.1 [Ustilago maydis 521]
  misc_feature (497)..(893): NCBI GI: 164662138 Blast Desc: MGL_0784 [Malassezia globosa CBS 7966] gi|159106093|gb|EDP44977.1| MGL_0784 [Malassezia globosa CBS 7966]
  misc_feature (470)..(893): NCBI GI: 58262180 Blast Desc: CNM01980 [Cryptococcus neoformans var. neoformans JEC21] gi|134118507|ref|XP_772027.1| CNBM1850 [Cryptococcus neoformans var. neoformans B-3501A] gi|50254633|gb|EAL17380.1|
  misc_feature (497)..(894): NCBI GI: 39960164 Blast Desc: MGG_09375 [Magnaporthe grisea 70-15] gi|145014332|gb|EDJ98900.1| MGG_09375 [Magnaporthe grisea 70-15]
  misc_feature (466)..(893): NCBI GI: 126338459 Blast Desc: : similar to DEAH (Asp-Glu-Ala-His) box polypeptide 36, [Monodelphis domestica]
MGGTSVIVASHTVRRTTNHRAKTLAAIQHCLRTVHLARSNSRCRSRTRLGPVKWEGDAIVATKKPDEINLFRPAPSKSDALPKGQTQPNKQQSTAVGKHRKPSAMTWKFFMSKKGREKVLEELPLLTQENLENPENFTRDYVDSSGELPQTDGITRLFRWFTKATLPNMGSLYIIGKGMKKVLARKDASNRLFFEMYKTGMLHNWWGPLDYIPKTIAVKEKDALIDVYNYAIQNGQLPTISFSVIRRSKNENAIYVVNLALAAHGISVSARSDRPHFAEINAALKFKKAALYFQRNKVLISDDELSKARTALEFGAAPNAEPGDQDSFALLPSLSSSSLLNSSTAHEFLAFLRRRSVVDADIEVVCKDHNGGQWSKVRVSNGDRVFDHEILAATKPAARSLGFLVGSFFKARQYPALFKEFSDSLRSRDRVPLSSPSFQSALVPVTAEVMNEIMIINQIAASSSQDIQEAYQEVDVPETVPVQNPKAAQDHVLKRALEEYEVRPDLNDIRQLRSELPISQYAQKVLGLVNKNVYSILIGDTGSGKSTQLPQILLDEEIRAGNGSSCNVICTQPRRIAASSLARRVSTERGEPLRHSVGYQVRFDTQLPRTHGSILYCTTGILLQRLLHAPDNLLNHVSHLVIDEVHERDISLDLLLFALRRALARRASRKLRLPRVVLMSATLDAKLFSTYFQNSLPNEKGAAKNECPILKVPGRNFPVMHHYLEDIWPVLQKDYDRTQVGQTLEDSYDYLKKEVSELTPFHLPAGTGSTAQVRKAADGHDVEDVEDIDQEAAVPLGLAAATIAHICKTSRDCSAILVFLPGLEEIIRLEKGLREGRPLGMDLGDPRKFHIFMLHSSMPDSQSSVFDSLPGGCRKIILSTNIAETSVTVPDVIEPPTDVAVTTAVEDLMSLGALDRQETISPLGRVLALLPVHPSYGKMIVLGIIFRCLSPMIALAASAGESPFIWPRGEQRMTRRHLRNAFGQDSLSDHIVFLNALDQFSQITSPGVIQNKRPQDWCTENYVNHNAMKRIQLIIKQIENTLVKSGLVNDISSFNTNSDNNETIRALLVAGLSPNIAKRTSRRFWRSGQKEKIITAANSVNLELNKFRFPTPLFTAFDDLNMAPGEGALIMRSNTLITPLMIFLFGGRFANMLLFDQWLRFHVSKTVDGQPMAVQLATLLVFRRNLERTLDAAFSKLRQGQSLDDDPVLMVLIEKMPTILKDMNEAAPEYLELVASVKSFDEDASLAEESAEEPDDFSPL

SEQ ID NO: 25524 - DNA, 2121 bp, Muscodor strobelii
  misc_feature: SGI EST ID NO. CUFF.59980.0
  misc_feature: Variant of the nucleotide sequence at SEQ ID NO 25522
aacacgaagaactcatactgaagcgctcaacaccgcttctaatctgtatacgtcatctaggagtatgagtgttgagatccctaagtgagatcaaaatatctctccaggccaatgcgagcaatgcagtgctcgtgacaagggcgagcgatgggcgggacttcggtgatcgtagcgtcgcacacggtgaggaggacgacgaaccacagagccaagacgctcgctgccatccagcactgcttgaggactgtacacttggccagatcgaactcgagatgcaggtccaggacgaggctcgggccggtcaagtgggagggggacgccatagtcgctacaaagaagcccgatgagatcaatctattccgcccggcaccttcaaagtcggatgcactgccaaagggtcagactcaaccaaataaacagcaatctaccgcagtcggcaagcatcgaaaaccttcggcaatgacctggaaattcttcatgtccaagaaggggcgtgaaaaggtcttggaggagcttcctcttttaacacaggagaacctggaaaatccagaaaacttcacaagagactatgttgatagttcgggagagcttccacaaactgatggcataacaagactatttcgctggttcacgaaggcaacccttcccaacatgggatcactctatatcatcggtaagggaatgaagaaggtgctggccaggaaagatgcaagtaatcgattattttttgagatgtacaagacaggcatgctgcataattggtggggaccgttagactacatacccaaaacgatcgctgttaaggagaaggatgccctcatcgatgtgtataactacgctattcagaatggccaactcccaaccatatcgttctcagttattcgacgctcgaaaaacgaaaatgccatttatgtggtgaacttggcgcttgctgcgcacggcatcagcgtctccgccagatcggacagacctcatttcgccgagataaatgctgcgttaaagttcaaaaaggcagcattgtatttccaaaggaacaaggtgctgatatctgatgacgagctcagcaaagcaaggacggcattggaatttggagcggcaccgaatgcagagcctggggaccaagactcctttgcgttgttgccgagtctttcgtcttcgtcattgttgaatagttctacggcccatgagttccttgcttttcttagacgacggtccgtcgtcgatgctgacatagaagtcgtgtgcaaagatcacaatgggggccaatggtccaaggtacgtgtctctaacggagaccgtgtcttcgatcacgagatcctagcagctaccaaacctgcggcgcgtagtcttggatttttagtgggtagtttcttcaaagcgaggcaatatcccgctctattcaaggagttttctgatagcttgcgatcacgcgaccgcgttccgctatccagtccatcctttcaatctgctctagtccctgtgacagcagaagtcatgaatgaaataatgatcatcaaccaaatagcagcgtcctcttctcaagacatccaggaagcatatcaagaggttgatgtaccagagacagtacccgtgcagaatcccaaagctgcgcaggatcatgtactaaagagagccttggaagaatatgaagtacgaccagatctaaacgatatccgccaattaagatctgagctgcccatcagccaatatgcccagaaagtgttgggattggtaaacaagaatgtctatagcatcttgatcggcgatacggggtcgggtaagtcgacccaacttccacaaatactgctggacgaagagatccgcgctggtaatggttcctcctgcaatgtcatatgcactcagccacggcgtatcgctgcctcttcccttgccaggagagtctctactgagcggggcgagccccttcgacacagcgtcggctaccaggttcgctttgatacgcagttgccacgaactcatggtagtatcctgtattgcacaacaggaatcttattacagcgtcttctgcacgctcccgacaacttgttaaatcacgtttcacacctcgtgattgacgaagtacacgagagagatatttccttagacttactactatttgca

SEQ ID NO: 25525 - DNA, 1596 bp, Muscodor strobelii
  misc_feature: SGI cDNA ID NO. 568712
  misc_feature: Encodes the peptide sequence at SEQ ID NO 25526
atggctcctaagagtgacagcatgagtgacagggatgagatcatactacgactggaggaggccatgactacaattcaatcggttcagaaaatatgccgaaccccttctgtatctgttggcgtgttgcatgaaggcgaaattctatttcgcagaagtattggcctcagagatgttgaggccaatctacaagcagacagtgacactgcatacaacatcgcgtcttgctcaaagctattcacctctgcagctgttggcatgctctctgaagaacactccatttgggaagacaaggtgaaagatcacctcccagattttgatccagttcaagaccctcgtataggaaagacagccactgttgtggacctatgccgccactcaacaggtcttgccaacggcaatgctgtatacatgggcccaggggggacgataaccgtgaaaggggaagaccatcttgccatggtcaaccgatttcctacatccaatgaacatggacagagattcaatgattggtggtattacagcaactctgcgtttgggttgtgtgctgatatcgtccagaagtcatctggaattccgtttgctactttcctgagggatcgtctttgcactccattgggattgacccaaactctactgactgaagccgacctgaaaagtaatggcaacgtcgcacatccctatatgcaaaggactgataacacttgggccaaaatcgataacgactacacaactgagaattacggcccggtcctcgccgctgtaggtatccgcacgtcagtaaacgacttcttggcattccttgccgccgtcatgaatagatacgatcttgagaaagacacgacatcttcgccagaactttcgtctaaatgtcaagacaatccgctacgtgaggtctcgtctatgtgctctttagccacggcatacctcattcccggctcccacacagcaattgttgccttgaccaatgcagcagatgcaggcgacgccgctgaaacagcatcacagatcttacttcaggctctttttgacctgaagcctcatatcgacctgttatcagcactgaaaaaatcggtcgctgaccgcatgaaaatgcatgaagatatggtcaaggactggaaagaacatagggatgtgtctcagtatgatgaaaatatatcggaagaggtcttgggaacatatgtagggtttgatgtctcgtatatccacatcatacctagcgacacgtcgccctgcggtctggctgttagattcgccgaccaagaagcatcgcagcgtgatcttgagccgtacaatacagacgcactgagctttctccccctggatcatcacgaaaagcttgagaggggaatgatagattgggactactgggaggttggtatccttacctttgtccgagaaggacaaactgtcggttcggatttgccggtggcagctctgagttcccaatcggaagaaaaacttatagtagactcttcggtaaatgacaaaaagccagcggagcccgaagcgaaaaagcctattgtagggcttcgatggaaatgggatgaatatgaccagcctggtttctgggtcaaaaaaagcaagggagtgtcatag

SEQ ID NO: 25526 - protein, 531 aa, Muscodor strobelii
  misc_feature: SGI Peptide ID NO. 568712
  misc_feature (21)..(341): Pfam Id: PF00144 Pfam Desc: Beta-lactamase
  misc_feature (21)..(285): Pfam Id: PF00144 Pfam Desc: Beta-lactamase
  misc_feature (25)..(298): NCBI GI: 46126743 Blast Desc: FG07749.1 [Gibberella zeae PH-1]
  misc_feature (13)..(301): NCBI GI: 169768922 Blast Desc: [Aspergillus oryzae RIB40] gi|83766789|dbj|BAE56929.1| protein product [Aspergillus oryzae]
  misc_feature (13)..(301): NCBI GI: 238501352 Blast Desc: penicillin-binding protein, [Aspergillus flavus NRRL3357] gi|220692147|gb|EED48494.1| penicillin-binding protein, [Aspergillus flavus NRRL3357]
  misc_feature (24)..(469): NCBI GI: 46119880 Blast Desc: FG04809.1 [Gibberella zeae PH-1]
  misc_feature (11)..(453): NCBI GI: 258570013 Blast Desc: [Uncinocarpus reesii 1704] gi|237904080|gb|EEP78481.1| [Uncinocarpus reesii 1704]
  misc_feature (13)..(301): NCBI GI: 242821692 Blast Desc: D-aminoacylase, [Talaromyces stipitatus ATCC 10500] gi|218712653|gb|EED12078.1| D-aminoacylase, [Talaromyces stipitatus ATCC 10500]
  misc_feature (3)..(274): NCBI GI: 115398452 Blast Desc: [Aspergillus terreus NIH2624] gi|114191698|gb|EAU33398.1| [Aspergillus terreus NIH2624]
  misc_feature (25)..(476): NCBI GI: 258572668 Blast Desc: [Uncinocarpus reesii 1704] gi|237905366|gb|EEP79767.1| [Uncinocarpus reesii 1704]
  misc_feature (18)..(273): NCBI GI: 89890798 Blast Desc: beta-lactamase [Flavobacteria bacterium BBFL7] gi|89516943|gb|EAS19601.1| beta-lactamase [Flavobacteria bacterium BBFL7]
  misc_feature (9)..(274): NCBI GI: 115389072 Blast Desc: [Aspergillus terreus NIH2624] gi|114194437|gb|EAU36137.1| [Aspergillus terreus NIH2624]
MAPKSDSMSDRDEIILRLEEAMTTIQSVQKICRTPSVSVGVLHEGEILFRRSIGLRDVEANLQADSDTAYNIASCSKLFTSAAVGMLSEEHSIWEDKVKDHLPDFDPVQDPRIGKTATVVDLCRHSTGLANGNAVYMGPGGTITVKGEDHLAMVNRFPTSNEHGQRFNDWWYYSNSAFGLCADIVQKSSGIPFATFLRDRLCTPLGLTQTLLTEADLKSNGNVAHPYMQRTDNTWAKIDNDYTTENYGPVLAAVGIRTSVNDFLAFLAAVMNRYDLEKDTTSSPELSSKCQDNPLREVSSMCSLATAYLIPGSHTAIVALTNAADAGDAAETASQILLQALFDLKPHIDLLSALKKSVADRMKMHEDMVKDWKEHRDVSQYDENISEEVLGTYVGFDVSYIHIIPSDTSPCGLAVRFADQEASQRDLEPYNTDALSFLPLDHHEKLERGMIDWDYWEVGILTFVREGQTVGSDLPVAALSSQSEEKLIVDSSVNDKKPAEPEAKKPIVGLRWKWDEYDQPGFWVKKSKGVS

SEQ ID NO: 25527 - DNA, 357 bp, Muscodor strobelii
  misc_feature: SGI cDNA ID NO. 568713
  misc_feature: Encodes the peptide sequence at SEQ ID NO 25528
atgaagaccaccaccctgttcatcgcagccgctacggtagttgccgcacaaaccacaactcgtgtacccgacactcccgtgacattcctcgccaaactcttcaacaacaccgataactgcagcggaaactactacgcatacgtcggatccctcggcggctgcatcaatagacagatcctcggctccgggtccgcgcagatgacaatagcgaacgtgggaacggactatctgacggcgtggagtgagccagattgcaccggaacgccgttccttgtcatcggaaatgatgtcgagtgtgatgctcttggcggtacggttgcgatgagttggagcaatgatcagcgggtgtttggttga

SEQ ID NO: 25528 - protein, 118 aa, Muscodor strobelii
  misc_feature: SGI Peptide ID NO. 568713
  misc_feature (14)..(118): NCBI GI: 46127189 Blast Desc: FG07972.1 [Gibberella zeae PH-1]
MKTTTLFIAAATVVAAQTTTRVPDTPVTFLAKLFNNTDNCSGNYYAYVGSLGGCINRQILGSGSAQMTIANVGTDYLTAWSEPDCTGTPFLVIGNDVECDALGGTVAMSWSNDQRVFG

SEQ ID NO: 25529 - DNA, 1189 bp, Muscodor strobelii
  misc_feature: SGI EST ID NO. CUFF.60005.0
  misc_feature: Variant of the nucleotide sequence at SEQ ID NO 25527
gaaacttattccagactacttacacaaagcagcagttcaattaacttgtctctttgcctcccgtctcagaacctgagcgaacatgtcttacagaatcattgccaagatgtaactaacaatgcagtccacgatcccatctggacacaccgatacacctgccaaaatagctaggataaggtcaggcaattcgctattgcaaatgccgcgaatccacatatttccggcaccgagaagagtattgtggggagaggacgacatgccgtaagatccttcggatgggtccgccgcgatgcgtccgaaatacttcaaggcagtgtctcatgttaatgtttattatttattcggaatgcgactacgcaatttgcgatggttgaaggattgttcgaaccacttgcccgatatggcaccgtgtacggtttcataagccttataaatggcgtctagacggtggtagtaccgaagacctgttggtataaagacttgacggcagcaaatcagatcaaactacaatctcaacacaggacgcacaatgaagaccaccaccctgttcatcgcagccgctacggtagttgccgcacaaaccacaactcgtgtacccgacactcccgtgacattcctcgccaaactcttcaacaacaccgataactgcagcggaaactactacgcatacgtcggatccctcggcggctgcatcaatagacagatcctcggctccgggtccgcgcagatgacaatagcgaacgtgggaacggactatctgacggcgtggagtgagccagattgcaccggaacgccgttccttgtcatcggaaatgatgtcgagtgtgatgctcttggcggtacggttgcgatgagttggagcaatgatcagcgggtgtttggttgattcagatggcgattttggtagggaagtgaaaagtcattgagttacgtacgacaatcatctgcatcggtagacaaatggaaatgtcatcgagccggtgctgcatatgtcgcgcaatgattgatgatatgctgaatgtgaagagcgggtatgtcttgatgttccatgatcaatatatggagactaaaagaatacgagatgcagtctaagtaagcgtcgaggtatagtctaagtgtacaaaaatggatgtacaataatatacaagattatgagttttaccactgcgtcaacaacgcacgaaacttt

SEQ ID NO: 25530 - DNA, 1752 bp, Muscodor strobelii
  misc_feature: SGI cDNA ID NO. 568714
  misc_feature: Encodes the peptide sequence at SEQ ID NO 25531
atggagaaagtgaaaatagcggtgattgggcttggccctgcaggattaactgcattgaagaacttgcgagaagaggggtttgacgctattgccctcgagagacgggacaagattggtgggctttgggcatttaacgacgatgagagctacacctctgcgctgaaagagactttgtgcaacgtcagcaagtttgtttctggcttcagtgattatccggtatcaaaggatgcttcgatatatttcacctcgcaagaggtagctgaatacttcgagggatatgcatccaagtttggattgcatccgcatatccgctttggtaatacggtccatcgagtgacacgaaatgcagcagaggacaggtgggatgttcatatcacaacttcgaagggctcacaaacgctgtcatttgataaagtggtatttggccatggcaataacagcattccatcataccccgcgatgcccaatcgcagtaaattcaagggaactgtgatgcatggccagtctttcaaaagtccagcaacattcgcaggcaagaaggtccttgtcgtcggtatcggaaacagcgcctgtgatgcttcactgtccttaattggccatgcatcgaaggtgtatcaatcctaccgccgcggacgaatcttgatgtcgcgttacgagaacgacggtttacccctagatgctcagttatcatggcctatgctacggctgaaatacctattagataactgggttccgtcattgatgcgctgggttggcgataaatatatgattggtaagatgataacggacgcttcgaggtctgagcccgcacaaataggagattcgctaaaggacaagcggaaaagaacggagcggcttgttcgtggtgattggcgacttctgcctgctcctagcatggctcatgaaaatccgtcggtccaggaagatttcatccctgcactgcgacgtggtgatatcgtgccgatgcacggtttcaaggacttttgcggcgaatcggaagtgctcttaattgacgggacgattattgaggtcgatgcggtcattttctgcactggatatgaactggacttcagtatcatgcccgagatcgagatagacggtgcatatggtttcgggttgcaaacggctggagatatcatcggcaagcgggagtccgacgaaagtggcgtgatcgtgagaactatagagagacgaaaccctccgcatctcccaagactctatcagatgatctttccaccgcgttgggcttcatcgattgcttttctgagctggatggcgcctcaagagaatgcgtggtgcgtcgcggaactcgcatcgatggctgttgctcagatttgggccggtgagacgacgcgcaagggttctgttgggaatttcacatcggcaaaactgccatcagtagacgagatgaaccgcgaagtcgactcatatcatgcctggtggcgccaacagtggcaagaagaacattccatgctgcccggatatgtacgggcttactcgttctatcaattccttcatgatgctgctggaacgggactctacgaaagactcgatcacatattcacgacgaggggttgggatctctggtggaacgaccacgagctgtggatatggcttgcgaagggtccgatgaatagttattcgtggcgcttatttgacacaaaccctcaaggtattccgggctgtggtcgaagggcgtggcctgaagctagaagggccctaaaagaggcagtaagtgctctgacagattga

SEQ ID NO: 25531 - protein, 583 aa, Muscodor strobelii
  misc_feature: SGI Peptide ID NO. 568714
  misc_feature (3)..(441): Pfam Id: PF00743 Pfam Desc: Flavin-binding monooxygenase-like
  misc_feature (159)..(192): Pfam Id: PF00743 Pfam Desc: Flavin-binding monooxygenase-like
  misc_feature (5)..(40): Pfam Id: PF07992 Pfam Desc: Pyridine nucleotide-disulphide oxidoreductase
  misc_feature (1)..(582): NCBI GI: 256724434 Blast Desc: NECHADRAFT_54967 [Nectria haematococca mpVI 77-13-4]
  misc_feature (1)..(578): NCBI GI: 46126937 Blast Desc: FG07846.1 [Gibberella zeae PH-1]
  misc_feature (6)..(577): NCBI GI: 212542843 Blast Desc: dimethylaniline monooxygenase, [Penicillium marneffei ATCC 18224] gi|210066483|gb|EEA20576.1| dimethylaniline monooxygenase, [Penicillium marneffei ATCC 18224]
  misc_feature (1)..(577): NCBI GI: 46138991 Blast Desc: FG11010.1 [Gibberella zeae PH-1]
  misc_feature (5)..(583): NCBI GI: 256733335 Blast Desc: NECHADRAFT_91608 [Nectria haematococca mpVI 77-13-4]
  misc_feature (1)..(571): NCBI GI: 256724010 Blast Desc: NECHADRAFT_97118 [Nectria haematococca mpVI 77-13-4]
  misc_feature (1)..(574): NCBI GI: 46110891 Blast Desc: FG02327.1 [Gibberella zeae PH-1]
  misc_feature (1)..(576): NCBI GI: 39976263 Blast Desc: MGG_05942 [Magnaporthe grisea 70-15] gi|145011792|gb|EDJ96448.1| MGG_05942 [Magnaporthe grisea 70-15]
  misc_feature (2)..(577): NCBI GI: 256732928 Blast Desc: NECHADRAFT_92490 [Nectria haematococca mpVI 77-13-4]
  misc_feature (2)..(583): NCBI GI: 189196989 Blast Desc: dimethylaniline monooxygenase 2 [Pyrenophora tritici-repentis Pt-1C-BFP] gi|187980780|gb|EDU47406.1| dimethylaniline monooxygenase 2 [Pyrenophora tritici-repentis
  misc_feature (5)..(575): SWISSPROT Homolog: EC 1.14.13.8 Flavin-containing monooxygenase
MEKVKIAVIGLGPAGLTALKNLREEGFDAIALERRDKIGGLWAFNDDESYTSALKETLCNVSKFVSGFSDYPVSKDASIYFTSQEVAEYFEGYASKFGLHPHIRFGNTVHRVTRNAAEDRWDVHITTSKGSQTLSFDKVVFGHGNNSIPSYPAMPNRSKFKGTVMHGQSFKSPATFAGKKVLVVGIGNSACDASLSLIGHASKVYQSYRRGRILMSRYENDGLPLDAQLSWPMLRLKYLLDNWVPSLMRWVGDKYMIGKMITDASRSEPAQIGDSLKDKRKRTERLVRGDWRLLPAPSMAHENPSVQEDFIPALRRGDIVPMHGFKDFCGESEVLLIDGTIIEVDAVIFCTGYELDFSIMPEIEIDGAYGFGLQTAGDIIGKRESDESGVIVRTIERRNPPHLPRLYQMIFPPRWASSIAFLSWMAPQENAWCVAELASMAVAQIWAGETTRKGSVGNFTSAKLPSVDEMNREVDSYHAWWRQQWQEEHSMLPGYVRAYSFYQFLHDAAGTGLYERLDHIFTTRGWDLWWNDHELWIWLAKGPMNSYSWRLFDTNPQGIPGCGRRAWPEARRALKEAVSALTD

SEQ ID NO: 25532 - DNA, 1769 bp, Muscodor strobelii
  misc_feature: SGI EST ID NO. CUFF.60011.0
  misc_feature: Variant of the nucleotide sequence at SEQ ID NO 25530
atcacaacttcgaagggctcacaaacgctgtcatttgataaagtggtatttggccatggcaataacagcattccatcataccccgcgatgcccaatcgcagtaaattcaagggaactgtgatgcatggccagtctttcaaaagtccagcaacattcgcaggcaagaaggtccttgtcgtcggtatcggaaacagcgcctgtgatgcttcactgtccttaattggccatgcatcgaaggtgtatcaatcctaccgccgcggacgaatcttgatgtcgcgttacgagaacgacggtttacccctagatgctcagttatcatggcctatgctacggctgaaatacctattagataactgggttccgtcattgatgcgctgggttggcgataaatatatgattggtaagatgataacggacgcttcgaggtctgagcccgcacaaataggagattcgctaaaggacaagcggaaaagaacggagcggcttgttcgtggtgattggcgacttctgcctgctcctagcatggctcatgaaaatccgtcggtccaggaagatttcatccctgcactgcgacgtggtgatatcgtgccgatgcacggtttcaaggacttttgcggcgaatcggaagtgctcttaattgacgggacgattattgaggtcgatgcggtcattttctgcactggatatgaactggacttcagtatcatgcccgagatcgagatagacggtgcatatggtttcgggttgcaaacggctggagatatcatcggcaagcgggagtccgacgaaagtggcgtgatcgtgagaactatagagagacgaaaccctccgcatctcccaagactctatcagatgatctttccaccgcgttgggcttcatcgattgcttttctgagctggatggcgcctcaagagaatgcgtggtgcgtcgcggaactcgcatcgatggctgttgctcagatttgggccggtgagacgacgcgcaagggttctgttgggaatttcacatcggcaaaactgccatcagtagacgagatgaaccgcgaagtcgactcatatcatgcctggtggcgccaacagtggcaagaagaacattccatgctgcccggatatgtacgggcttactcgttctatcaattccttcatgatgctgctggaacgggactctacgaaagactcgatcacatattcacgacgaggggttgggatctctggtggaacgaccacgagctgtggatatggcttgcgaagggtccgatgaatagttattcgtggcgcttatttgacacaaaccctcaaggtattccgggctgtggtcgaagggcgtggcctgaagctagaagggccctaaaagaggcatacgaaattttccaggatcataaacggcaaacgattgataagtcgaaggatgtgtagattatatgacttggagcatctatcgtggggtggtatctgttggagataagcgcataatcgacgtccgacaaaagataacttgacgagtagctacatccatatgtggtacatcagcggaagtcgcgcctactcaagcaactttttgaaaatacctttttgaagatttccagctcgacgtagagctagaaaagattacgaagaggtacctcgcgatgcagttgttttaaaagaacgaagacataggataccgcacaagaaatatacatagccagcctttgtgctcaaacagcccacagcttgctggaatccaaagctcggaacgatgtgcatctaccgtatattgtcaatctcag

SEQ ID NO: 25533 - DNA, 771 bp, Muscodor strobelii
  misc_feature: SGI cDNA ID NO. 568715
  misc_feature: Encodes the peptide sequence at SEQ ID NO 25534
atgcagatgatcaactttattgccgccatcgccgtcttctccgacgcaacgtatagccaggccgtcaactatggtcactgggacttgaatgtgacctctggtaacgcggcttccggttatcgatggggcgacgtctacgccaattattctggcctgcctgaccgaatcagccatgtcagttgggtatacgacccaagtgtcagattgacgaactggactaccgacaatccagcgtttaatagtagccagattgactactctggaagccacagcatcactgtcatacaaaacatcacgacgtcagacggcaatatcacgcttgttggatcgggaattatagatatgaagtgtggacttggcggggccggacgaggttgcgcaggatctattcgcattgatgccaaaccggaaagtgatacctatggatactgggacgtcaatgtgaccactagtagcgcggcctctggttatcgatggggcgatgtctacgccaattactccggcctacctgaccaaaccgagcacgttggttggatctacggcccaactgcccccaacacaaactggactaaagagaacccggactttgatagtagtggaccggacggaaacgggatgctctctgtcagacagaacgtcacgacatcagacggcaaaatcactcttgttgggtcggcaaaaataagtatgaagtgtggacttggtggtgcggggcgagcttgtgagggatctgttcgtattgatgccgaaccggacagtgatgacgactag

SEQ ID NO: 25534 - protein, 256 aa, Muscodor strobelii
  misc_feature: SGI Peptide ID NO. 568715
MQMINFIAAIAVFSDATYSQAVNYGHWDLNVTSGNAASGYRWGDVYANYSGLPDRISHVSWVYDPSVRLTNWTTDNPAFNSSQIDYSGSHSITVIQNITTSDGNITLVGSGIIDMKCGLGGAGRGCAGSIRIDAKPESDTYGYWDVNVTTSSAASGYRWGDVYANYSGLPDQTEHVGWIYGPTAPNTNWTKENPDFDSSGPDGNGMLSVRQNVTTSDGKITLVGSAKISMKCGLGGAGRACEGSVRIDAEPDSDDD

SEQ ID NO: 25535 - DNA, 874 bp, Muscodor strobelii
  misc_feature: SGI EST ID NO. CUFF.60025.0
  misc_feature: Variant of the nucleotide sequence at SEQ ID NO 25533
aaacatcacgacgtcagacggcaatatcacgcttgttggatcgggaattatagatatgaagtgtggacttggcggggccggacgaggttgcgcaggatctattcgcattgatgccaaaccggaaagtgatacctatggatactgggacgtcaatgtgaccactagtagcgcggcctctggttatcgatggggcgatgtctacgccaattactccggcctacctgaccaaaccgagcacgttggttggatctacggcccaactgcccccaacacaaactggactaaagagaacccggactttgatagtagtggaccggacggaaacgggatgctctctgtcagacagaacgtcacgacatcagacggcaaaatcactcttgttgggtcggcaaaaataagtatgaagtgtggacttggtggtgcggggcgagcttgtgagggatctgttcgtattgatgccgaaccggacagtgatgacgactagtcttgtatgtaatggtggtaaggtgctcacctgccggagtcgcaaatttcaccagcgcgtctgctatgggtgacgcggcatgcctgtttgcttgccgttgcatgggcgggttctgaccagtttctgagaggcaacatttcagttgggaatggtaatatttgatgtattgagtactatgtagcagtacacgagtttgcccgagtctggacatgtaagtctcagctaccattctattacattcaatccgcccagctctcaagtgttgtatatcgatcccagagccatgtggttaaatcatttaacgatcaacgccatcaagcaagggatcacaataggagacgcgatcgtggtgggtactgggtcggtgactggggacgtagagcgtggact

SEQ ID NO: 25536 - DNA, 1458 bp, Muscodor strobelii
  misc_feature: SGI cDNA ID NO. 568716
  misc_feature: Encodes the peptide sequence at SEQ ID NO 25537
atggctgaattcacttcccgcatgggtcgtgaaattgctgcgaactttcaggctcccttctcgcctccatcatcacacggaaatcacgacacgactgcaatgagcggtctttccttagatgaagacacatcacaccacgcttctagcagcccacctagggtcaacacttcagtcctgggtcgcgccttctctgagtggaagcaaacagccaccagtatccaccacaatctcgtcgttgacgatgaaaacaaagaaaacccagtaggtcgcgaggcagctcgcaaagctggtcctccgggtctctcactctcggacgtactatcatcattgcattcgtttgccaacagtatcctgcagcttaagcaccagaagcctaaggcccatcgccagagccgctccagacgcaagtcttcaccacatgttgactacacaagccgctcatttgcgcttcccccaatgaaccatgtcgacaacttcctagctggcaacctgaacaacctgactaccggtattcgcgacagagaggacatcaagtcgaagcttccctttggagacttcgaatccgtcaacatccccgaggcaaacaagatcgcctctaactccttggaggctcttcgtatcgaaattcaaatgctcaaggatcacgccagcggtgcttctgacaaagtacacctacttgagacccaaatgaaggagctaaaggaccgctacgctctcaccgaggaccctggattcactatcctacacaatggcttcttggctgctgttgccgacagaaaccgggtccaaaccgatctatactcctctgaaaccaatgtcaagaccctcgagacccaactgcaagcggttcagactcgtctcgaaagaattatcaaggagcggcgtggattcatcgatgagatcaaaggacatgaggcccgtcttacggacattgggaaggagcgagatgacctgattgagaaagtcagggccgccaaacaaacgaaggcttcgctcaaagccgagatcgcatcacatgaggatcgtgttgctagcatcagcgaggaattgcaccaaggcagggtccgtgcatactccaaaagattcgacatgatgcaccaggaatctctcgccgcccaatatcacacttataacgtctctaagtctatcggtctctctccaaaggtggctccagcatcgactgcgctgttccctgctggcatagaacacactattcgcccttcccaaagcctagatacggctactaggaccctgatggacagtcttcgcaaggaagagaaggatatcgagttcgagatggccaagaagcaaagcgcttacaatgagtgtgaccctaggaggaacaagagagtttggaaggagctaggcgaggagattcgggtgttacaggagcgacgtgaagagaagcgtgagcagatctatacagttgaggacattatcgctcattcagagaattag

SEQ ID NO: 25537 - protein, 485 aa, Muscodor strobelii
  misc_feature: SGI Peptide ID NO. 568716
  misc_feature (402)..(480): NCBI GI: 67522397 Blast Desc: AN1655.2 [Aspergillus nidulans FGSC A4] gi|40745619|gb|EAA64775.1| AN1655.2 [Aspergillus nidulans FGSC A4]
  misc_feature (399)..(480): NCBI GI: 240110064 Blast Desc: CPC735_060960 [Coccidioides posadasii C735 delta SOWgp]
  misc_feature (387)..(480): NCBI GI: 145257430 Blast Desc: An04g03640 [Aspergillus niger] gi|134058645|emb|CAK38629.1| protein product [Aspergillus niger]
MAEFTSRMGREIAANFQAPFSPPSSHGNHDTTAMSGLSLDEDTSHHASSSPPRVNTSVLGRAFSEWKQTATSIHHNLVVDDENKENPVGREAARKAGPPGLSLSDVLSSLHSFANSILQLKHQKPKAHRQSRSRRKSSPHVDYTSRSFALPPMNHVDNFLAGNLNNLTTGIRDREDIKSKLPFGDFESVNIPEANKIASNSLEALRIEIQMLKDHASGASDKVHLLETQMKELKDRYALTEDPGFTILHNGFLAAVADRNRVQTDLYSSETNVKTLETQLQAVQTRLERIIKERRGFIDEIKGHEARLTDIGKERDDLIEKVRAAKQTKASLKAEIASHEDRVASISEELHQGRVRAYSKRFDMMHQESLAAQYHTYNVSKSIGLSPKVAPASTALFPAGIEHTIRPSQSLDTATRTLMDSLRKEEKDIEFEMAKKQSAYNECDPRRNKRVWKELGEEIRVLQERREEKREQIYTVEDIIAHSEN

SEQ ID NO: 25538 - DNA, 1756 bp, Muscodor strobelii
  misc_feature: SGI EST ID NO. CUFF.60167.1
  misc_feature: Variant of the nucleotide sequence at SEQ ID NO 25536
caatatttaacaaacaacgcgtcgcggtctcccatccgtcctcctctcccttcctcattttcaaaacacattgtgtcttgactgcttgaaaccacaactttcatcaattgcaaactgcgcctgtcttttgagacaatcacaccatcaaacttcaatcaatctgaacttgaaccttctcatcgcaccaacaaaattcaattcacccgactgcgcgtgccttttctgacgccatggctgaattcacttcccgcatgggtcgtgaaattgctgcgaactttcaggctcccttctcgcctccatcatcacacggaaatcacgacacgactgcaatgagcggtctttccttagatgaagacacatcacaccacgcttctagcagcccacctagggtcaacacttcagtcctgggtcgcgccttctctgagtggaagcaaacagccaccagtatccaccacaatctcgtcgttgacgatgaaaacaaagaaaacccagtacttaagcaccagaagcctaaggcccatcgccagagccgctccagacgcaagtcttcaccacatgttgactacacaagccgctcatttgcgcttcccccaatgaaccatgtcgacaacttcctagctggcaacctgaacaacctgactaccggtattcgcgacagagaggacatcaagtcgaagcttccctttggagacttcgaatccgtcaacatccccgaggcaaacaagatcgcctctaactccttggaggctcttcgtatcgaaattcaaatgctcaaggatcacgccagcggtgcttctgacaaagtacacctacttgagacccaaatgaaggagctaaaggaccgctacgctctcaccgaggaccctggattcactatcctacacaatggcttcttggctgctgttgccgacagaaaccgggtccaaaccgatctatactcctctgaaaccaatgtcaagaccctcgagacccaactgcaagcggttcagactcgtctcgaaagaattatcaaggagcggcgtggattcatcgatgagatcaaaggacatgaggcccgtcttacggacattgggaaggagcgagatgacctgattgagaaagtcagggccgccaaacaaacgaaggcttcgctcaaagccgagatcgcatcacatgaggatcgtgttgctagcatcagcgaggaattgcaccaaggcagggtccgtgcatactccaaaagattcgacatgatgcaccaggaatctctcgccgcccaatatcacacttataacgtctctaagtctatcggtctctctccaaaggtggctccagcatcgactgcgctgttccctgctggcatagaacacactattcgcccttcccaaagcctagatacggctactaggaccctgatggacagtcttcgcaaggaagagaaggatatcgagttcgagatggccaagaagcaaagcgcttacaatgagtgtgaccctaggaggaacaagagagtttggaaggagctaggcgaggagattcgggtgttacaggagcgacgtgaagagaagcgtgagcagatctatacagttgaggacattatcgctcattcagagaattaggagagtgcgtattcgatagattattcggttgtggccttgtagtatggattatagaacatgaggctcatgcaatggtacatagagatcaaacatacttagcatagggccatagtgccaaaaaccgtatcaacattcgactaataaatcggtttgccttgaga

SEQ ID NO: 25539 - DNA, 1746 bp, Muscodor strobelii
  misc_feature: SGI cDNA ID NO. 568717
  misc_feature: Encodes the peptide sequence at SEQ ID NO 25540
atgtcgcaatcaaagcccttacctaacgccccaaagacgaagcccacttacctcaggttggccaaagagaactccgcgtccaaatacaacgaatgcggtttctgccaactccaaccaggcgtcttatcccacactcctggcaagtgttgcatcgcttgccgtaactacgatctcatcgacgctgcggctatacgatacacgttagcatggatcaagacgcagctcgtcgagactgagaaactgcatcctaagctcaccgtcgaggaactgctcaaggcattgctcgaaattagtctccagtaccagtatgcacattcagcagcggaggagaaattgatgaccataaaagatgttgaccttgcgttacgcattgagcaacgcaaattatcaaaaaaccatgaccgcatcgatagtgaacatagggagaaagcgaccagtgtcaaagacttggcagactttatggctatatttgaagagggcggagacgcgttcattgaccaaattgagaaggacaagaaagagcttgatgttttgaagaagcaacttgatgtcttgaaggagcagcttaaagagagcgacaaaagaatgaacaacaatacgtcgagaagaagtgatatacagctgctccttcgagaacaattgttgctccttaatgatgccaaagaggctgtgatcagaggagattccacaagagctgcttctgccggcgatattgcgaggaggctcgtacagtttgtggtagatgacatgtcttctttgaccctcgctgggggatctcaagacttcaaacttgatccaatcgaccgtgctcgatttttcttcacttggctcgcacattcgattgtgtacgacaaggcaatcaccaatctagagaaaacgaacccctccgcctcgagagatgtcgctagtgccttgtccaatgcgcgggagacctgcttcggcctatcaaaactcttcgaagcgatgtttaatgcgacaagtacgacatcgcacaatccaagcagcactagcgagaaagcgcgtgatccggattgcgccgcgaagttttgcggcggcgaaggtcaccagggacatgaacccctgacgggcaaagctgaccatgcttggaaccaaatcagttttcccggtcaagctgagcctcacttggtcgacatcacgtggggcatgggatacctcgacgagcaagatcaattttacggtctcttccaggcttcatggtttacccggaagcctgaagagttcagacgcacgcatttcgaatatgaccttttggagaaagaccttaggaagaacgccgctctccggccttatgtccagcctcctactacagtgacggacttttatcgaaagtatatcgactacaactccatccagccggcaaactacaacctccaaagtactgtcaagaccgacttcaagctcgccgttcgttgcccacactactcagggtattttccaacgttcgctatcgtgattcccgggaatgagaatgccgcagaagtgatcgtgccgttcgtcaatcgaggtactccgtcggctcccagttggattgctgaagttgatttgccaaagcatcgtgctgctttcaatgccaaacttgagagcgattggtcgacagaagtattgcttgtatgcttgtactggatcaatgagaatccggcgaacaagaagcccctaacggtcggaagtacacttaatgacagtgaatacgtcacttgcaaggttgctgagtggaaactgcggtag

SEQ ID NO: 25540 - protein, 581 aa, Muscodor strobelii
  misc_feature: SGI Peptide ID NO. 568717
  misc_feature (267)..(450): NCBI GI: 221039694 Blast Desc: protein product [Homo sapiens]
  misc_feature (267)..(450): NCBI GI: 148806932 Blast Desc: kyphoscoliosis peptidase [Homo sapiens] gi|119599539|gb|EAW79133.1| kyphoscoliosis peptidase, isoform CRA_c [Homo sapiens]
  misc_feature (267)..(450): NCBI GI: 74730145 Blast Desc: KY_HUMAN RecName: Full=Kyphoscoliosis peptidase gi|21748704|dbj|BAC03471.1| protein product [Homo sapiens]
  misc_feature (267)..(450): NCBI GI: 119599538 Blast Desc: kyphoscoliosis peptidase, isoform CRA_b [Homo sapiens]
  misc_feature (267)..(470): NCBI GI: 73990595 Blast Desc: : similar to kyphoscoliosis [Canis familiaris]
  misc_feature (267)..(470): NCBI GI: 126326017 Blast Desc: : similar to kyphoscoliosis peptidase, [Monodelphis domestica]
  misc_feature (267)..(450): NCBI GI: 34533705 Blast Desc: protein product [Homo sapiens]
  misc_feature (267)..(450): NCBI GI: 81899328 Blast Desc: KY_MOUSE RecName: Full=Kyphoscoliosis peptidase gi|26338560|dbj|BAC32951.1| protein product [Mus musculus]
  misc_feature (267)..(450): NCBI GI: 149729743 Blast Desc: : kyphoscoliosis peptidase isoform 1 [Equus caballus]
  misc_feature (267)..(450): NCBI GI: 114145525 Blast Desc: kyphoscoliosis [Mus musculus] gi|162317892|gb|AAI56645.1| Kyphoscoliosis peptidase [synthetic construct]
MSQSKPLPNAPKTKPTYLRLAKENSASKYNECGFCQLQPGVLSHTPGKCCIACRNYDLIDAAAIRYTLAWIKTQLVETEKLHPKLTVEELLKALLEISLQYQYAHSAAEEKLMTIKDVDLALRIEQRKLSKNHDRIDSEHREKATSVKDLADFMAIFEEGGDAFIDQIEKDKKELDVLKKQLDVLKEQLKESDKRMNNNTSRRSDIQLLLREQLLLLNDAKEAVIRGDSTRAASAGDIARRLVQFVVDDMSSLTLAGGSQDFKLDPIDRARFFFTWLAHSIVYDKAITNLEKTNPSASRDVASALSNARETCFGLSKLFEAMFNATSTTSHNPSSTSEKARDPDCAAKFCGGEGHQGHEPLTGKADHAWNQISFPGQAEPHLVDITWGMGYLDEQDQFYGLFQASWFTRKPEEFRRTHFEYDLLEKDLRKNAALRPYVQPPTTVTDFYRKYIDYNSIQPANYNLQSTVKTDFKLAVRCPHYSGYFPTFAIVIPGNENAAEVIVPFVNRGTPSAPSWIAEVDLPKHRAAFNAKLESDWSTEVLLVCLYWINENPANKKPLTVGSTLNDSEYVTCKVAEWKLR

SEQ ID NO: 25541 - DNA, 204 bp, Muscodor strobelii
  misc_feature: SGI EST ID NO. CUFF.60049.0
  misc_feature: Variant of the nucleotide sequence at SEQ ID NO 25539
cttggaaccaaatcagttttcccggtcaagctgagcctcacttggtcgacatcacgtggggcatgggatacctcgacgagcaagatcaattttacggtctcttccaggcttcatggtttacccggaagcctgaagagttcagacgcacgcatttcgaatatgaccttttggagaaagaccttaggaagaacgccgctctccggc

SEQ ID NO: 25542 - DNA, 462 bp, Muscodor strobelii
  misc_feature: SGI cDNA ID NO. 568718
  misc_feature: Encodes the peptide sequence at SEQ ID NO 25543
atggccgacgtggagatggacgtggacgagcctagctcccctcagaacccgcaggctaacgatggtgacatgaagacccatgccaaagctaccgctgtgcgctccatcgagggctggatcgtcatggtcaccaacgtgcatgaggaggccgacgaagaagctctgcatgacaagtttgctgagtttggcgagattaagaatctgcacctcaacctcgaccgccgcagtggttatgtcaagggatacgccctcgtcgagtatcagactctccaagaagctcgcgctgccatcgatggcgcacacgacaccaagctcctcgaccagaccatctatgtcgatttcgccttcgtcagaccgccgcctggcaagggacggggcgctcgacaatcgcatcgcggtggccggggcagaagccgtagtcgcagcccggaaggaggccgcggtaatgatgcacgagactga

SEQ ID NO: 25543 - protein, 153 aa, Muscodor strobelii
  misc_feature: SGI Peptide ID NO. 568718
  misc_feature (41)..(112): Pfam Id: PF00076 Pfam Desc: RNA recognition motif. (a.k.a. RRM, RBD, or RNP domain)
  misc_feature (1)..(145): NCBI GI: 256735607 Blast Desc: NECHADRAFT_75628 [Nectria haematococca mpVI 77-13-4]
  misc_feature (1)..(153): NCBI GI: 46120534 Blast Desc: FG04914.1 [Gibberella zeae PH-1]
  misc_feature (1)..(150): NCBI GI: 154300489 Blast Desc: BC1G_11068 [Botryotinia fuckeliana B05.10] gi|150856593|gb|EDN31785.1| BC1G_11068 [Botryotinia fuckeliana B05.10]
  misc_feature (1)..(150): NCBI GI: 156040227 Blast Desc: SS1G_12129 [Sclerotinia sclerotiorum 1980] gi|154696186|gb|EDN95924.1| SS1G_12129 [Sclerotinia sclerotiorum 1980]
  misc_feature (1)..(123): NCBI GI: 39943320 Blast Desc: MGG_03740 [Magnaporthe grisea 70-15] gi|145009660|gb|EDJ94316.1| MGG_03740 [Magnaporthe grisea 70-15]
  misc_feature (1)..(123): NCBI GI: 116182620 Blast Desc: CHGG_01938 [Chaetomium globosum CBS 148.51] gi|88186235|gb|EAQ93703.1| CHGG_01938 [Chaetomium globosum CBS 148.51]
  misc_feature (6)..(133): NCBI GI: 171694916 Blast Desc: protein product [Podospora anserina] gi|170947700|emb|CAP59862.1| protein product [Podospora anserina]
  misc_feature (1)..(150): NCBI GI: 189209523 Blast Desc: RNA-binding protein 8A [Pyrenophora tritici-repentis Pt-1C-BFP] gi|187977187|gb|EDU43813.1| RNA-binding protein 8A [Pyrenophora tritici-repentis Pt-1C-BFP]
  misc_feature (1)..(153): NCBI GI: 169595382 Blast Desc: SNOG_00429 [Phaeosphaeria nodorum SN15] gi|111070804|gb|EAT91924.1| SNOG_00429 [Phaeosphaeria nodorum SN15]
  misc_feature (5)..(118): NCBI GI: 85117784 Blast Desc: NCU03226 [Neurospora crassa OR74A] gi|28927133|gb|EAA36090.1| conserved [Neurospora crassa OR74A]
MADVEMDVDEPSSPQNPQANDGDMKTHAKATAVRSIEGWIVMVTNVHEEADEEALHDKFAEFGEIKNLHLNLDRRSGYVKGYALVEYQTLQEARAAIDGAHDTKLLDQTIYVDFAFVRPPPGKGRGARQSHRGGRGRSRSRSPEGGRGNDARD

SEQ ID NO: 25544 - DNA, 1891 bp, Muscodor strobelii
  misc_feature: SGI EST ID NO. CUFF.60073.0
  misc_feature: Variant of the nucleotide sequence at SEQ ID NO 25542
cctgcttcctactctgtatgggaaaggtgaatttgaacttctgaagaatatgaaacatggaggcaactgcaatgtctgactgatgagttgtacctatgtagggcttttgtttggaagtctacatgtaggggttttgagatcgttgtccacttccgtcttcaacaccgttgtgctccagcaatcactttaaggactgctcacaaactttcatcatgtttgggctggagtctgctacgagacacctaaagtacagagctggccgtgagtagatcaatatcaagcagggaatgctagcaggagagacatacatgctttatcaagtacatgcacttaatgtccggaaggtggacatcaccagttttccagacaaaaggaggtcgacgcctagaacccatgttcacattgaagtcagcttgaagtcggctggcggccagctggggcgcgaacacagcaccaaggccactaattctcctaagccaccaggtcgcgtagcgtcacaaaccccaccactgctaggccaagcaacagctacgtctacctgtgctcccgacgacaaaacaccacatcaacctcatacaagatcgccttaatcgccaattcacccatctacactcaagatatagtacttactagcacaacaaagaagaccgagtcaccatggccgacgtggagatggacgtggacgagcctagctcccctcagaacccgcaggctaacgatggtgacatgaagacccatgccaaagctaccgctgtgcgctccatcgagggctggatcgtcatggtcaccaacgtgcatgaggaggccgacgaagaagctctgcatgacaagtttgctgagtttggcgagattaagaatctgcacctcaacctcgaccgccgcagtggttatgtcaagggatacgccctcgtcgagtatcagactctccaagaagctcgcgctgccatcgatggcgcacacgacaccaagctcctcgaccagaccatctatgtcgatttcgccttcgtcagaccgccgcctggcaagggacggggcgctcgacaatcgcatcgcggtggccggggcagaagccgtagtcgcagcccggaaggaggccgcggtaatgatgcacgagactgaagttggacagcaaaaggcggatgagcgagtctgactgaagacaacgcctggagtgttgggacgataccagggtcacggaatcctcgctcaaaatggtatgcgagagatcataatggtgactgaaaagtcatggtcatatatacactggctctagccgatatgtcgccagaataaaagacatgtcggccctcatatattgattacattgctgcatcaaacgtgacagtgcaattgcatacgggctgcatcatgagagacttcggtttgctcacgatactggatacgctgcacctgcaaccccaatccaaagctattcgtgctgcttcgaaacgtctgtggacctttttgacatgttcgtgtcctactgatgtgtaggagccttcgacatgggatcaatagtcataaaagtcgatctcaagataatatgacagatcccgctgtaggtatactcacccttcagtgacgctggccggactctgtcacggccgtgggcatcatttcaacattgctgttcgatatgaggttagataatgtttcgcggctgtccatcggtttttgataccgaaaagccagggaatcaggtcgccgctgtattataattgaatacgtattgccaaacgggtatagaccacgaggatgagaaggcaacctggtttctcccctatttcttgcagctgtgtgtacgagtccctctgttgtcgtgcctacgcattacatgtaccgtcatgagattgtcacactgtattgacaaaacttctggtgttggtcgacc

SEQ ID NO: 25545 - DNA, 1446 bp, Muscodor strobelii
  misc_feature: SGI cDNA ID NO. 568719
  misc_feature: Encodes the peptide sequence at SEQ ID NO 25546
atgactgtcgactcgccatacaaaatccctttcgacagcttccacaacgtcatcaacaatgagttaacagacaccgagacaacacgctacggcatctgttccacaactgaagagcctctctgggatgtgcctgtcgcaggaaaggtggacgtagacaatgccgtcgcggcagcaaagaaggctttcaagtcctggtccaagttatctttcgatgagcgtgccgtctacttaaacaagctcggcgatggcattgaggccaaccgtgaagcccttacctacctcataggaaaggaaaccggaaagcccgtacaggctgctggattcgaagttactcttgccgtccacaaagtgagaggactggcagagttgagactcggcaaggaagagagacctgtggatgatgaaaagcggactgctattgtccggtatgtaccgctcggtgttggtgtaggcatcgtgccgtggaactttcctctcgtgttgggtattggaaaggttattcctgctctgcttgcgggaaacactttcatctggaaaccatcgccatacacaccttactcggccctgaaaatcgctgagatcggtgccaagatcttccctccaggtgttctccaggccatcagcggaacggaagacattggtcccttattcacttctcatcccaatgttgcgaagatcagcttcaccggatctgttcccaccggcaagaaggtcgctgccgcatgcgccgcatcagtgaagcgcgtaaccctagaactcggtggaaacgacgcagcagtaatctgcgaagacgtcgacatcgaagccgtcgccttccaatgcgtgctattcgcattcctccactccggtcaaatctgcatgaacatcaagcgtgtatacgttcacgaaagcatctacgataaattcctcgccgccatggtggccgctgcctcgcacctcaggacaggcgacaacacagatgagactgctgctttcggacccctgcagaatagaatgcagtatgagaaggtcaaggagttatacgcgcaggtccaggaacagggtatgaagacggcgtacgaggagaagattgattttaagaagggcttcttcctcccgccgactatcatcgataacccgcctgaggactcgacgctggtgcaggaggagccgtttggaccgattgtgccggtgctgaagtggagtgatgaggaagatgtgattgagcgggtgaacggcacgaaatttggtttgggcgcttcggcttggagcaaggatgttgatcgggcgctgagaattggtaatcagcttgaggccgggaatatttggattaactgccattttgaacttgcggataatgttccttccggtggtcataaggagagtggtttgggcgttgagtttggaaggcagggacttcaggggtggtgtcagcctcagagtgtgtggattaagcataaggcgtag

SEQ ID NO: 25546 - protein, 481 aa, Muscodor strobelii
  misc_feature: SGI Peptide ID NO. 568719
  misc_feature (22)..(475): Pfam Id: PF00171 Pfam Desc: Aldehyde dehydrogenase family
  misc_feature (36)..(475): Pfam Id: PF00171 Pfam Desc: Aldehyde dehydrogenase family
  misc_feature (1)..(479): NCBI GI: 46110949 Blast Desc: FG02356.1 [Gibberella zeae PH-1]
  misc_feature (8)..(480): NCBI GI: 171676724 Blast Desc: protein product [Podospora anserina] gi|170936429|emb|CAP61086.1| protein product [Podospora anserina]
  misc_feature (13)..(478): NCBI GI: 119487483 Blast Desc: aldehyde dehydrogenase [Neosartorya fischeri NRRL 181] gi|119410691|gb|EAW20637.1| aldehyde dehydrogenase [Neosartorya fischeri NRRL 181]
  misc_feature (13)..(478): NCBI GI: 121714751 Blast Desc: aldehyde dehydrogenase [Aspergillus clavatus NRRL 1] gi|119403140|gb|EAW13560.1| aldehyde dehydrogenase [Aspergillus clavatus NRRL 1]
  misc_feature (11)..(477): NCBI GI: 145249146 Blast Desc: An14g02870 [Aspergillus niger] gi|134081589|emb|CAK41998.1| protein product [Aspergillus niger]
  misc_feature (13)..(478): NCBI GI: 70981881 Blast Desc: aldehyde dehydrogenase [Aspergillus fumigatus Af293] gi|66844092|gb|EAL84431.1| aldehyde dehydrogenase, [Aspergillus fumigatus Af293] gi|159122305|gb|EDP47427.1| aldehyde fumigatus
  misc_feature (13)..(481): NCBI GI: 169768486 Blast Desc: [Aspergillus oryzae RIB40] gi|238497792|ref|XP_002380131.1| aldehyde dehydrogenase, [Aspergillus flavus NRRL3357] gi|83766571|dbj|BAE56711.1| protein
  misc_feature (11)..(476): NCBI GI: 67516917 Blast Desc: AN0740.2 [Aspergillus nidulans FGSC A4] gi|40746226|gb|EAA65382.1| AN0740.2 [Aspergillus nidulans FGSC A4] gi|259488982|tpe|CBF88877.1| TPA: conserved [Aspergillus FGSC
  misc_feature (13)..(478): NCBI GI: 67525495 Blast Desc: AN3205.2 [Aspergillus nidulans FGSC A4] gi|40743743|gb|EAA62930.1| AN3205.2 [Aspergillus nidulans FGSC A4] gi|259485835|tpe|CBF83194.1| TPA: aldehyde dehydrogenase, A4]
  misc_feature (8)..(478): NCBI GI: 145228395 Blast Desc: An01g00620 [Aspergillus niger] gi|134054593|emb|CAK43448.1| protein product [Aspergillus niger]
  misc_feature (65)..(479): SWISSPROT Homolog: EC 1.2.1.39 Phenylacetaldehyde dehydrogenase
  misc_feature: Useful for introducing or modulating the production of volatile compounds
  misc_feature: Useful for fungicidal and/or biocontrol applications
MTVDSPYKIPFDSFHNVINNELTDTETTRYGICSTTEEPLWDVPVAGKVDVDNAVAAAKKAFKSWSKLSFDERAVYLNKLGDGIEANREALTYLIGKETGKPVQAAGFEVTLAVHKVRGLAELRLGKEERPVDDEKRTAIVRYVPLGVGVGIVPWNFPLVLGIGKVIPALLAGNTFIWKPSPYTPYSALKIAEIGAKIFPPGVLQAISGTEDIGPLFTSHPNVAKISFTGSVPTGKKVAAACAASVKRVTLELGGNDAAVICEDVDIEAVAFQCVLFAFLHSGQICMNIKRVYVHESIYDKFLAAMVAAASHLRTGDNTDETAAFGPLQNRMQYEKVKELYAQVQEQGMKTAYEEKIDFKKGFFLPPTIIDNPPEDSTLVQEEPFGPIVPVLKWSDEEDVIERVNGTKFGLGASAWSKDVDRALRIGNQLEAGNIWINCHFELADNVPSGGHKESGLGVEFGRQGLQGWCQPQSVWIKHKA

SEQ ID NO: 25547 - DNA, 2071 bp, Muscodor strobelii
  misc_feature: SGI EST ID NO. CUFF.60104.0
  misc_feature: Variant of the nucleotide sequence at SEQ ID NO 25545
ttcacaccttgtaggatgcaacctctcagcgtggctatatcggatgtggcggactaataacacgtcgtcctcgcgcctatcaatgtagggaataaggcggtgcgagaattggcgatgcagattcttgcctgccgcccggttgccatgcggcatacttgcccacacacccttccagaggttcgacactacgccatggcttctagtgggatcttggatccgttttagtaggcccggagcaatggacatcgataatgccatgtaataagatccttacacatgcaatggaggcttagtggcgatagatattccgtagcaccacatcccgattatactacaccgtacgcccgtacagtaggtagctagacatactatactgcctttgctatattatatttgttggccgctcagagagaactggttgttgtggtgattttatttctctcttcgttctcattcattcactattctttcttttgccacttgatatacccaattgatattccaacttgatacccagaccttagactaccttgacctaaagattttatccgcatatacacatgtagatcatcatgactgtcgactcgccatacaaaatccctttcgacagcttccacaacgtcatcaacaatgagttaacagacaccgagacaacacgctacggcatctgttccacaactgaagagcctctctgggatgtgcctgtcgcaggaaaggtggacgtagacaatgccgtcgcggcagcaaagaaggctttcaagtcctggtccaagttatctttcgatgagcgtgccgtctacttaaacaagctcggcgatggcattgaggccaaccgtgaagcccttacctacctcataggaaaggaaaccggaaagcccgtacaggctgctggattcgaagttactcttgccgtccacaaagtgagaggactggcagagttgagactcggcaaggaagagagacctgtggatgatgaaaagcggactgctattgtccggtatgtaccgctcggtgttggtgtaggcatcgtgccgtggaactttcctctcgtgttgggtattggaaaggttattcctgctctgcttgcgggaaacactttcatctggaaaccatcgccatacacaccttactcggccctgaaaatcgctgagatcggtgccaagatcttccctccaggtgttctccaggccatcagcggaacggaagacattggtcccttattcacttctcatcccaatgttgcgaagatcagcttcaccggatctgttcccaccggcaagaaggtcgctgccgcatgcgccgcatcagtgaagcgcgtaaccctagaactcggtggaaacgacgcagcagtaatctgcgaagacgtcgacatcgaagccgtcgccttccaatgcgtgctattcgcattcctccactccggtcaaatctgcatgaacatcaagcgtgtatacgttcacgaaagcatctacgataaattcctcgccgccatggtggccgctgcctcgcacctcaggacaggcgacaacacagatgagactgctgctttcggacccctgcagaatagaatgcagtatgagaaggtcaaggagttatacgcgcaggtccaggaacagggtatgaagacggcgtacgaggagaagattgattttaagaagggcttcttcctcccgccgactatcatcgataacccgcctgaggactcgacgctggtgcaggaggagccgtttggaccgattgtgccggtgctgaagtggagtgatgaggaagatgtgattgagcgggtgaacggcacgaaatttggtttgggcgcttcggcttggagcaaggatgttgatcgggcgctgagaattggtaatcagcttgaggccgggaatatttggattaactgccattttgaacttgcggataatgttccttccggtggtcataaggagagtggtttgggcgttgagtttggaaggcagggacttcaggggtggtgtcagcctcagagtgtgtggattaagcataaggcgtagatactgagttgttttgtgttcaatatattgagatcaagaacattatggaatgc

SEQ ID NO: 25548 - DNA, 1053 bp, Muscodor strobelii
  misc_feature: SGI cDNA ID NO. 568720
  misc_feature: Encodes the peptide sequence at SEQ ID NO 25549
atgtcaacccgccgcgtcctaataaccggcgcaaacggctacatagccgcgcaaaccgtctcccgtttcctatcagcaggatggacagtccgcggcacagtccgggacctaaacagttcctccgccaaagaactctcctcccatttctcctccgagatcgcctccggccacctcgaactcacagttgtgaaagacataaaatcccccacagccttcaacaccgccgtgcagaactgcgaggcaatcgcacacctagcaacacccgtagtgttcgactccggagacgtgtcctacatcatggatacagccgtgcagggcacgctatccatccttgaatctgctaagaagcacggtggtgatacactgaagagttttgtgctgatgagtagtattgtggcggttaggagccagagaccgggcccttatagttttacggagaaggactggaatgagacggcggagaaacaggtgaaagagttgggcgacaaggcgtttggtcatttgatttatattgcgagtaaagtcgcggctgagagggcgttttggaaatggatggaagagaataggccggggtttgtggggacggcgctacatccttcttgggtcgccggaccgcccctctacactccctcttcgcccgcgggtatagcggagacgaatagatttatctacaccatactctccggcggcgagattcccggaggtcctggaccgggttacgggacacatgtcgacgttcgcgatgtagcgcgaatggtagaatgggctgcgtcacatcctggggtcgccggcggacagcggtacctcgtcggcgggaatggtaatgaggctgttccgcaggctgccgccgatattttgcgagaagcgtatccggagagaaagaacatcataccgcttggtgagccgggcaaaggataccggccggatttgaagccggatccaaatgggacgagtcctgactcaacgaaggctattgaagctactgggcaagggtggattccatatgagaagattgtgttggatgctgcgaagatgtttgaggtgtttctgtag

SEQ ID NO: 25549 - protein, 350 aa, Muscodor strobelii
  misc_feature: SGI Peptide ID NO. 568720
  misc_feature (6)..(271): Pfam Id: PF01370 Pfam Desc: NAD dependent epimerase/dehydratase family
  misc_feature (8)..(253): Pfam Id: PF07993 Pfam Desc: Male sterility protein
  misc_feature (6)..(134): Pfam Id: PF01370 Pfam Desc: NAD dependent epimerase/dehydratase family
  misc_feature (6)..(47): Pfam Id: PF05368 Pfam Desc: NmrA-like family
  misc_feature (6)..(350): NCBI GI: 46115618 Blast Desc: FG03651.1 [Gibberella zeae PH-1]
  misc_feature (1)..(350): NCBI GI: 116203273 Blast Desc: CHGG_09521 [Chaetomium globosum CBS 148.51] gi|88178039|gb|EAQ85507.1| CHGG_09521 [Chaetomium globosum CBS 148.51]
  misc_feature (6)..(350): NCBI GI: 212540674 Blast Desc: NAD dependent epimerase/dehydratase, [Penicillium marneffei ATCC 18224] gi|210067791|gb|EEA21883.1| NAD dependent epimerase/dehydratase, [Penicillium marneffei ATCC 18224]
  misc_feature (1)..(350): NCBI GI: 171680402 Blast Desc: protein product [Podospora anserina] gi|170939828|emb|CAP65053.1| protein product [Podospora anserina]
  misc_feature (6)..(350): NCBI GI: 46127987 Blast Desc: FG08371.1 [Gibberella zeae PH-1]
  misc_feature (6)..(350): NCBI GI: 242801142 Blast Desc: NAD dependent epimerase/dehydratase, [Talaromyces stipitatus ATCC 10500] gi|218717045|gb|EED16466.1| NAD dependent epimerase/dehydratase, [Talaromyces stipitatus ATCC 10500]
  misc_feature (2)..(346): NCBI GI: 116193991 Blast Desc: CHGG_06713 [Chaetomium globosum CBS 148.51] gi|88182626|gb|EAQ90094.1| CHGG_06713 [Chaetomium globosum CBS 148.51]
  misc_feature (99)..(350): NCBI GI: 256733444 Blast Desc: NECHADRAFT_91714 [Nectria haematococca mpVI 77-13-4]
  misc_feature (6)..(350): NCBI GI: 261355361 Blast Desc: ketoreductase [Verticillium albo-atrum VaMs.102]
  misc_feature (5)..(349): NCBI GI: 171683183 Blast Desc: protein product [Podospora anserina] gi|170941551|emb|CAP67203.1| protein product [Podospora anserina]
  misc_feature (6)..(305): SWISSPROT Homolog: EC 1.1.1.283 Methylglyoxal reductase (NADPH-dependent)
MSTRRVLITGANGYIAAQTVSRFLSAGWTVRGTVRDLNSSSAKELSSHFSSEIASGHLELTVVKDIKSPTAFNTAVQNCEAIAHLATPVVFDSGDVSYIMDTAVQGTLSILESAKKHGGDTLKSFVLMSSIVAVRSQRPGPYSFTEKDWNETAEKQVKELGDKAFGHLIYIASKVAAERAFWKWMEENRPGFVGTALHPSWVAGPPLYTPSSPAGIAETNRFIYTILSGGEIPGGPGPGYGTHVDVRDVARMVEWAASHPGVAGGQRYLVGGNGNEAVPQAAADILREAYPERKNIIPLGEPGKGYRPDLKPDPNGTSPDSTKAIEATGQGWIPYEKIVLDAAKMFEVFL

SEQ ID NO: 25550 - DNA, 1453 bp, Muscodor strobelii
  misc_feature: SGI EST ID NO. CUFF.60225.1
  misc_feature: Variant of the nucleotide sequence at SEQ ID NO 25548
cgctgacatatcggcgcttccccgagctccgtacacattagtacggtgggtactatgtgacgtatgatataatcacacaaatgccttccagctgttttgtaagtttgtatgtaaatcaagagtcaaaaggtatataaacaacccatctcatatcctcgactcgaacactaagccaagactctctcactccctcaccctcctatcgccacccctctacccatccatcaagcccctcaaaatgtcaacccgccgcgtcctaataaccggcgcaaacggctacatagccgcgcaaaccgtctcccgtttcctatcagcaggatggacagtccgcggcacagtccgggacctaaacagttcctccgccaaagaactctcctcccatttctcctccgagatcgcctccggccacctcgaactcacagttgtgaaagacataaaatcccccacagccttcaacaccgccgtgcagaactgcgaggcaatcgcacacctagcaacacccgtagtgttcgactccggagacgtgtcctacatcatggatacagccgtgcagggcacgctatccatccttgaatctgctaagaagcacggtggtgatacactgaagagttttgtgctgatgagtagtattgtggcggttaggagccagagaccgggcccttatagttttacggagaaggactggaatgagacggcggagaaacaggtgaaagagttgggcgacaaggcgtttggtcatttgatttatattgcgagtaaagtcgcggctgagagggcgttttggaaatggatggaagagaataggccggggtttgtggggacggcgctacatccttcttgggtcgccggaccgcccctctacactccctcttcgcccgcgggtatagcggagacgaatagatttatctacaccatactctccggcggcgagattcccggaggtcctggaccgggttacgggacacatgtcgacgttcgcgatgtagcgcgaatggtagaatgggctgcgtcacatcctggggtcgccggcggacagcggtacctcgtcggcgggaatggtaatgaggctgttccgcaggctgccgccgatattttgcgagaagcgtatccggagagaaagaacatcataccgcttggtgagccgggcaaaggataccggccggatttgaagccggatccaaatgggacgagtcctgactcaacgaaggctattgaagctactgggcaagggtggattccatatgagaagattgtgttggatgctgcgaagatgtttgaggtgtttctgtagatgagatacaggctgtgagaaatgaaatgggaatcgaagagactcgtgaacggttgactccttcgtttgtagtgtgaagtcatagttgggtggcgttcgcgataccgcgtgctatgccactgaagggtagattcggtgaaaattaatacccacagaccaccg

SEQ ID NO: 25551 - DNA, 1572 bp, Muscodor strobelii
  misc_feature: SGI cDNA ID NO. 568721
  misc_feature: Encodes the peptide sequence at SEQ ID NO 25552
atgtcccttttctctgccgcgttgcatcccaatgtcgggttgggattcataatcctcggcgcatccctccacgatattctcactagactcaaggccgaaccccaacgcttcccaaagttggacttagcctattcgccagctcagcccgtcactgaacccctcgtcctcaccctgcccgcaaacggcgtgcgcttgcgcttcgacggccctgagcaacgcctccgactcatcgaagtcctcgactttaccaagaaccgcatcacctatcaggacaaggacatcgcgaagccacctgcggcccagggaagtctcggctttccgaaaggcggcggagatgctcccactggtcctgctttcaaaaacgtctaccaccgtctatttggtccaacatatgccggggagtatatcccaccgaatggtgacaacaacgatggtataggcacatatatcctgtcatatccaggtgtcgctttcagctttccgctacccccatcggcatattcaccagataaagatgttgtctctttgctctcctcttctgccagccagactgcgacgtcggtagccatatttagtggcaagtcgtgggcacatgcgagagagcaactgtggacagaggtgcttcctagtgtcaagtcggctttcttgttcagcaaaagcaaagaggtggtcccagacgagatctcgctagtgaaaatacatggaggcggaagactacaactatttagaaaatggaccaactcttcagtatggatcaatctcggggaaacgacacctcaggaactcgtcgcagagcttgggcctccggatgctatatatcgaaagaacgaccagcgcatgtacatccacaagacgcgtactgcaagccacagcagatccagatcaaatggaacggactacaagcgtcctgacgatctaacagataccgaccaatcgtctgccccaaccggatctgacgactccgatgacgaggcgatcgatgacgagatgataagcaatgtgtcgggggagtgcttttacaactatttctatctgggatttgatatcctcgtgacaaccccacagcaagcttcgctcaccccgccgtcacaaaagcacccgcatctcgagccattcccaggagcaaatggcttcacaaatgggaatccagatcgattggtagccacgaaagtggtactacacgccaacgttccgggctcgtaccccttcaaccgacaccgcaggtcgcggtgggagatatcatatcttcaatcccaagattcaggcactgtcattaactccgagacgccattcgatgacatagaatcccacctccgacaggagtggaggagtatatatgcatccgaagacgatgcgaagcggcgacagcgaggcatggtcctcaatcgggggtggggcgacagtcccgggagtagttgcgagtttcttggcggctgggaggatagcagtggtggcgttgctgccaagaagtttgacgggaatgaggattctacgacgactttgtatggcttcccaggcttggtgttcgaagtcttgaagaatggctttgtgagtgcggttacggtgtattga

SEQ ID NO: 25552 - protein, 523 aa, Muscodor strobelii
  misc_feature: SGI Peptide ID NO. 568721
  misc_feature (11)..(523): Pfam Id: PF03676 Pfam Desc: Uncharacterised protein family (UPF0183)
  misc_feature (44)..(163): Pfam Id: PF03676 Pfam Desc: Uncharacterised protein family (UPF0183)
  misc_feature (2)..(523): NCBI GI: 116182656 Blast Desc: CHGG_01956 [Chaetomium globosum CBS 148.51] gi|88186253|gb|EAQ93721.1| CHGG_01956 [Chaetomium globosum CBS 148.51]
  misc_feature (1)..(523): NCBI GI: 256735472 Blast Desc: [Nectria haematococca mpVI 77-13-4]
  misc_feature (1)..(523): NCBI GI: 46107648 Blast Desc: FG00707.1 [Gibberella zeae PH-1]
  misc_feature (2)..(523): NCBI GI: 171694850 Blast Desc: protein product [Podospora anserina] gi|170947667|emb|CAP59829.1| protein product [Podospora anserina]
  misc_feature (1)..(523): NCBI GI: 39950031 Blast Desc: MGG_01174 [Magnaporthe grisea 70-15] gi|145021036|gb|EDK05165.1| MGG_01174 [Magnaporthe grisea 70-15]
  misc_feature (3)..(523): NCBI GI: 164428690 Blast Desc: NCU00928 [Neurospora crassa OR74A] gi|157072243|gb|EAA35518.2| conserved [Neurospora crassa OR74A]
  misc_feature (3)..(522): NCBI GI: 38567286 Blast Desc: conserved [Neurospora crassa]
  misc_feature (1)..(523): NCBI GI: 156035545 Blast Desc: SS1G_12976 [Sclerotinia sclerotiorum 1980] gi|154698381|gb|EDN98119.1| SS1G_12976 [Sclerotinia sclerotiorum 1980]
  misc_feature (1)..(523): NCBI GI: 154312473 Blast Desc: BC1G_05839 [Botryotinia fuckeliana B05.10] gi|150849940|gb|EDN25133.1| BC1G_05839 [Botryotinia fuckeliana B05.10]
  misc_feature (5)..(523): NCBI GI: 189202626 Blast Desc: conserved [Pyrenophora tritici-repentis Pt-1C-BFP] gi|187984748|gb|EDU50236.1| conserved [Pyrenophora tritici-repentis Pt-1C-BFP]
MSLFSAALHPNVGLGFIILGASLHDILTRLKAEPQRFPKLDLAYSPAQPVTEPLVLTLPANGVRLRFDGPEQRLRLIEVLDFTKNRITYQDKDIAKPPAAQGSLGFPKGGGDAPTGPAFKNVYHRLFGPTYAGEYIPPNGDNNDGIGTYILSYPGVAFSFPLPPSAYSPDKDVVSLLSSSASQTATSVAIFSGKSWAHAREQLWTEVLPSVKSAFLFSKSKEVVPDEISLVKIHGGGRLQLFRKWTNSSVWINLGETTPQELVAELGPPDAIYRKNDQRMYIHKTRTASHSRSRSNGTDYKRPDDLTDTDQSSAPTGSDDSDDEAIDDEMISNVSGECFYNYFYLGFDILVTTPQQASLTPPSQKHPHLEPFPGANGFTNGNPDRLVATKVVLHANVPGSYPFNRHRRSRWEISYLQSQDSGTVINSETPFDDIESHLRQEWRSIYASEDDAKRRQRGMVLNRGWGDSPGSSCEFLGGWEDSSGGVAAKKFDGNEDSTTTLYGFPGLVFEVLKNGFVSAVTVY

SEQ ID NO: 25553 - DNA, 2230 bp, Muscodor strobelii
  misc_feature: SGI EST ID NO. CUFF.60355.1
  misc_feature: Variant of the nucleotide sequence at SEQ ID NO 25551
tgttccagctcggcaaatactcactctctgcttgcctgctgaccagccctggtgagctgcaatctcatccattccacatattggtcgccttactccccagctggtctgagatgaggtgtctgtgttgtcgtgaatgcttaccttcttcgcttttcttctctttagtaacacatttaacctctagatctcaccgttcgtcactttgactgttgcctctgcctatcccgctaccggacccctccttttctccctaaggtaccgacacagctctccagctgcgccgtcatctacctttgatgtagtcaagaaccacagatagcccctggatctcgctggattaatcatgtcccttttctctgccgcgttgcatcccaatgtcgggttgggattcataatcctcggcgcatccctccacgatattctcactagactcaaggccgaaccccaacgcttcccaaagttggacttagcctattcgccagctcagcccgtcactgaacccctcgtcctcaccctgcccgcaaacggcgtgcgcttgcgcttcgacggccctgagcaacgcctccgactcatcgaagtcctcgactttaccaagaaccgcatcacctatcaggacaaggacatcgcgaagccacctgcggcccagggaagtctcggctttccgaaaggcggcggagatgctcccactggtcctgctttcaaaaacgtctaccaccgtctatttggtccaacatatgccggggagtatatcccaccgaatggtgacaacaacgatggtataggcacatatatcctgtcatatccaggtgtcgctttcagctttccgctacccccatcggcatattcaccagataaagatgttgtctctttgctctcctcttctgccagccagactgcgacgtcggtagccatatttagtggcaagtcgtgggcacatgcgagagagcaactgtggacagaggtgcttcctagtgtcaagtcggctttcttgttcagcaaaagcaaagaggtggtcccagacgagatctcgctagtgaaaatacatggaggcggaagactacaactatttagaaaatggaccaactcttcagtatggatcaatctcggggaaacgacacctcaggaactcgtcgcagagcttgggcctccggatgctatatatcgaaagaacgaccagcgcatgtacatccacaagacgcgtactgcaagccacagcagatccagatcaaatggaacggactacaagcgtcctgacgatctaacagataccgaccaatcgtctgccccaaccggatctgacgactccgatgacgaggcgatcgatgacgagatgataagcaatgtgtcgggggagtgcttttacaactatttctatctgggatttgatatcctcgtgacaaccccacagcaagcttcgctcaccccgccgtcacaaaagcacccgcatctcgagccattcccaggagcaaatggcttcacaaatgggaatccagatcgattggtagccacgaaagtggtactacacgccaacgttccgggctcgtaccccttcaaccgacaccgcaggtcgcggtgggagatatcatatcttcaatcccaagattcaggcactgtcattaactccgagacgccattcgatgacatagaatcccacctccgacaggagtggaggagtatatatgcatccgaagacgatgcgaagcggcgacagcgaggcatggtcctcaatcgggggtggggcgacagtcccgggagtagttgcgagtttcttggcggctgggaggatagcagtggtggcgttgctgccaagaagtttgacgggaatgaggattctacgacgactttgtatggcttcccaggcttggtgttcgaagtcttgaagaatggctttgtgagtgcggttacggtgtattgattgagaggagcatcggacttgggtcttttcacgcgctagggcatggttattagcgatgcgaaccatggagtttccaggctttgatttacgttgggtttgggaattgcgaggattaagcatgggctgctaggctatggagtatttgcatcgtgtgtgatttgtgacttgttgagactatagctgcgatgaaataaacaaactgtttaaactgttgattattgagtcgatgagatataatgaatcaccgaatgtgacggaaaacggcagaaacccaagtagcaccatgtgagattcgttgtgattgttattgtagtg

SEQ ID NO: 25554 - DNA, 3552 bp, Muscodor strobelii
  misc_feature: SGI cDNA ID NO. 568722
  misc_feature: Encodes the peptide sequence at SEQ ID NO 25555
atgcagggccgctctgttaggggcgagagggcccccgtcgctggcacctcgaggattacgaggcccacgagaccagcaacatcctcctcgacttcgtcatccagacaatctactctcaggcagcccatgtaccatcatgctgccgttgccgcccgaatcgatcgcacagccgccccgtccccagctgactctatgatttccgtcgccacatcggggaccaagcgcaaagaacgcgagtacgacctcgacacttcggccctggagaccaacatcaatgtcgtcgtacgatgtcgcggccggacgcagaacgaagtagaggagaacagcgctgtcgttgtctccaccgaaggcgtcaagggaaaggccgtcgatatctccatgggcccaagtgctctcgccaacaaaacctacaactttgatcgcgtcttttcccaggctgccgatcaaggcatgatctacgaagacgtcgtgaagcctatcctagaagaaacacttagtggctacaattgtaccattttcgcgtacggccagaccggcaccggtaagacatacaccatgtcaggagatatgaacgagacatacggcatattgcccgatgaagccggcatcataccccgggtactacactccctcttcaaaaagctcgacgctgaagacaccgagagctttgtgaaatgctcctttatcgaactctacaacgaagaactccgagatctcatgtcagtggaagaaagtgtcaagctgaagatctttgacgacaactctcgcaagggccataccaccactgttgtccaaggcatggaggaggctcacattaccagtgccgctgagggcataaaactgttgcagaggggcagctacaaacgacaagtcgcggcgacgaaatgcaatgatcttagcagtcgaagtcataccgtcttcaccataacggcttgcatcaagaggaccggagaggatggcgaggattgggtcagcgcaggtaaactaaacctggtcgatcttgcgggcagtgaaaatattgggcgatctggcgcagagaagcagcgcgctgccgaagccggtctgatcaacaagagtctgctcactctcggcagggttatcaacgctcttgtcgatcgcagctcacatattccatacagagagtccaagcttacgcgccttttgcaagactcccttggtggccgaactaaaacctgcataattgctaccatttcgccagccaagagcaatcttgaggagactatatccactttagactatgccttccgagccaagaacatccgcaacaagcctcaagtcaatcagatgatcagaaaaggtgctctgctgcgagagttcacccatgaaatcgagaagctcaagagcgagctcatcgctacgcgacagcgtaacggtgtctatttatcgaatgagagttacgaagagatgacagtagtgagtgagtcgcgacgaatcgaaaatgaagaacaggcggcgaaactggaaagcctagagtccaatctacgaaataaagtgcaagagcttttttctctgacctccaatttcatggggctcaaaaaggaccacgatgtgaccaaggtacagttggacgaggcgaggggcgtcctcgatcagaccgaacttgttctagaagcgacccgcaaaactctcgccgaagagacccatctgcgcgaagcccatcagaaaaccgaggaacggatgcgcgcggtcggcggtgagctgatcaataccttgcagaaaacggtcggacatgtcggagggttgcatgcaaaaaacaagaggaagtccgatctacaggccctcaatcgttcgaactggagtctggcccaggaacaggtgtctcatattacatcgctcgtggaaggacgtatcgacgaatttcagagcgagcagcaagaacatttgacctccatctcgggccgcatgcaggccttcgtagaggcagaactagagaaactctcagccacccaatcattcttagaccaaaacctggaagccttcgccaattctaagcatgagcttctgagtcgcaagcggaaatccaaagaggagatggatgaagtgcttgaagagatcaaagaagtacgggaccacatcaagaatcgggttggcgatagtctccgcgccattgctaccgccgcggagacgatatctcatgatgttctgagcgaacttagtgccttccacaacttccttcacacttcgtactctaccttgggcacggatttcaaggccatcttcgaaaatctgctgaaccacatctttgctcagcggaaagagtcggatagtcttagagagcagttgcgcaccgctagcgagactatcatgcgcacaaatgaatctgtatcagctcagatacaggatgtaatcaaccaagaaagggttcaagctgctgaagagcgtcgggctctattagcacaaatcacaagccttgtcaactctcaggctgaagcccaagagacgcgcctcgctaacaaagcggcttacatccaacagacggtccgcggaaacaacacggcgatagagagcagtatatcagaatacaatgaaggtatggagaactggggtagacaagaagacacgttcctgggcaagatgaaaacatcacgcgaaactctgaaaaccaaaatgcagcatgattggacggcggccgacaagtacagcacgtcgattcaggatgtcaccaactccgttcatgcggagacaatacgggtcgttgatgagcaaatgcaagatctggacgagcaaatgacgtcgcttgacgacttcgttacccgagctcgatcgcaaaatgcacaacacgatgagcaacataccgaatccctccaggctctgtcgactacagtagaaaattcttacgccaagatcggagatcactttgagacgacatgctcacgggtagaggaacttggaacggaaatggaggctaacgtcagggccgccggagagactctagagccgctagatacagaactcaacaagccgcttgccgatcttcgcgaggacataaacaacacagtcattcaggagtataaaccaacgggcaatacaccacagaagatgtcatacgaattccccacggagctcccgcgcacgcaggcgcacgattctctgcttgccaagctcaacggagagccgtcgcctagcaaagctagtgtctttatcgacgcggacccaacattggcggaaaaccggtcaccatcgagaccgcctacagacgacgatgttgcgcccctcggcgatcgaacgcgtaatccgatggctatgagtctgagggagctgcatcctaacattaacgatcggttcggattcgactcgaggtccagcttggcgatgggtactgataaggatgtagatgaggatttggacgtgacgatgccattgcttaagaagagtaggacttctagagttggtgggaagccgaagaagacgctgagtgtggatgggagggagaatttaccgatcccgagccttgcgacgcttgtaccggggggcgggaaggagatttttagtcagagtgtttcgaggaggaagagtccgagattgaattag

SEQ ID NO: 25555 - protein, 1183 aa, Muscodor strobelii
  misc_feature: SGI Peptide ID NO. 568722
  misc_feature (96)..(428): Pfam Id: PF00225 Pfam Desc: Kinesin motor domain
  misc_feature (10)..(1182): NCBI GI: 38567287 Blast Desc: kinesin-related protein bimC [Neurospora crassa]
  misc_feature (10)..(1182): NCBI GI: 85114768 Blast Desc: NCU00927 [Neurospora crassa OR74A] gi|28926546|gb|EAA35517.1| conserved [Neurospora crassa OR74A]
  misc_feature (16)..(1182): NCBI GI: 171694852 Blast Desc: protein product [Podospora anserina] gi|170947668|emb|CAP59830.1| protein product [Podospora anserina]
  misc_feature (65)..(1182): NCBI GI: 145614060 Blast Desc: MGG_01175 [Magnaporthe grisea 70-15] gi|145021035|gb|EDK05164.1| MGG_01175 [Magnaporthe grisea 70-15]
  misc_feature (10)..(1181): NCBI GI: 156035543 Blast Desc: SS1G_12975 [Sclerotinia sclerotiorum 1980] gi|154698380|gb|EDN98118.1| SS1G_12975 [Sclerotinia sclerotiorum 1980]
  misc_feature (165)..(1183): NCBI GI: 4092765 Blast Desc: kinesin related protein 2 [Nectria haematococca]
  misc_feature (165)..(1183): NCBI GI: 256735465 Blast Desc: [Nectria haematococca mpVI 77-13-4]
  misc_feature (165)..(1183): NCBI GI: 46107628 Blast Desc: FG00697.1 [Gibberella zeae PH-1]
  misc_feature (26)..(1013): NCBI GI: 29421234 Blast Desc: kinesin [Botryotinia fuckeliana]
  misc_feature (26)..(952): NCBI GI: 154312475 Blast Desc: BC1G_05840 [Botryotinia fuckeliana B05.10] gi|150849941|gb|EDN25134.1| BC1G_05840 [Botryotinia fuckeliana B05.10]
MQGRSVRGERAPVAGTSRITRPTRPATSSSTSSSRQSTLRQPMYHHAAVAARIDRTAAPSPADSMISVATSGTKRKEREYDLDTSALETNINVVVRCRGRTQNEVEENSAVVVSTEGVKGKAVDISMGPSALANKTYNFDRVFSQAADQGMIYEDVVKPILEETLSGYNCTIFAYGQTGTGKTYTMSGDMNETYGILPDEAGIIPRVLHSLFKKLDAEDTESFVKCSFIELYNEELRDLMSVEESVKLKIFDDNSRKGHTTTVVQGMEEAHITSAAEGIKLLQRGSYKRQVAATKCNDLSSRSHTVFTITACIKRTGEDGEDWVSAGKLNLVDLAGSENIGRSGAEKQRAAEAGLINKSLLTLGRVINALVDRSSHIPYRESKLTRLLQDSLGGRTKTCIIATISPAKSNLEETISTLDYAFRAKNIRNKPQVNQMIRKGALLREFTHEIEKLKSELIATRQRNGVYLSNESYEEMTVVSESRRIENEEQAAKLESLESNLRNKVQELFSLTSNFMGLKKDHDVTKVQLDEARGVLDQTELVLEATRKTLAEETHLREAHQKTEERMRAVGGELINTLQKTVGHVGGLHAKNKRKSDLQALNRSNWSLAQEQVSHITSLVEGRIDEFQSEQQEHLTSISGRMQAFVEAELEKLSATQSFLDQNLEAFANSKHELLSRKRKSKEEMDEVLEEIKEVRDHIKNRVGDSLRAIATAAETISHDVLSELSAFHNFLHTSYSTLGTDFKAIFENLLNHIFAQRKESDSLREQLRTASETIMRTNESVSAQIQDVINQERVQAAEERRALLAQITSLVNSQAEAQETRLANKAAYIQQTVRGNNTAIESSISEYNEGMENWGRQEDTFLGKMKTSRETLKTKMQHDWTAADKYSTSIQDVTNSVHAETIRVVDEQMQDLDEQMTSLDDFVTRARSQNAQHDEQHTESLQALSTTVENSYAKIGDHFETTCSRVEELGTEMEANVRAAGETLEPLDTELNKPLADLREDINNTVIQEYKPTGNTPQKMSYEFPTELPRTQAHDSLLAKLNGEPSPSKASVFIDADPTLAENRSPSRPPTDDDVAPLGDRTRNPMAMSLRELHPNINDRFGFDSRSSLAMGTDKDVDEDLDVTMPLLKKSRTSRVGGKPKKTLSVDGRENLPIPSLATLVPGGGKEIFSQSVSRRKSPRLN

SEQ ID NO: 25556 - DNA, 4081 bp, Muscodor strobelii
  misc_feature: SGI EST ID NO. CUFF.60125.0
  misc_feature: Variant of the nucleotide sequence at SEQ ID NO 25554
gaagaattggacctgagcctcgtgtcgcaatttcttccttgcttcgaaccacatcgatgcacgcgtcttccaacttcgacattgctctcagccaagattgtgactgtttgagttaataatttgatattggcataagctctacttcatcccttaccgacaaaaaccgaacaacaacacttagctgtacatcccattacaaccgccaacataccacctctacctccaatgcagggccgctctgttaggggcgagagggcccccgtcgctggcacctcgaggattacgaggcccacgagaccagcaacatcctcctcgacttcgtcatccagacaatctactctcaggcagcccatgtaccatcatgctgccgttgccgcccgaatcgatcgcacagccgccccgtccccagctgactctatgatttccgtcgccacatcggggaccaagcgcaaagaacgcgagtacgacctcgacacttcggccctggagaccaacatcaatgtcgtcgtacgatgtcgcggccggacgcagaacgaagtagaggagaacagcgctgtcgttgtctccaccgaaggcgtcaagggaaaggccgtcgatatctccatgggcccaagtgctctcgccaacaaaacctacaactttgatcgcgtcttttcccaggctgccgatcaaggcatgatctacgaagacgtcgtgaagcctatcctagaagaaacacttagtggctacaattgtaccattttcgcgtacggccagaccggcaccggtaagacatacaccatgtcaggagatatgaacgagacatacggcatattgcccgatgaagccggcatcataccccgggtactacactccctcttcaaaaagctcgacgctgaagacaccgagagctttgtgaaatgctcctttatcgaactctacaacgaagaactccgagatctcatgtcagtggaagaaagtgtcaagctgaagatctttgacgacaactctcgcaagggccataccaccactgttgtccaaggcatggaggaggctcacattaccagtgccgctgagggcataaaactgttgcagaggggcagctacaaacgacaagtcgcggcgacgaaatgcaatgatcttagcagtcgaagtcataccgtcttcaccataacggcttgcatcaagaggaccggagaggatggcgaggattgggtcagcgcaggtaaactaaacctggtcgatcttgcgggcagtgaaaatattgggcgatctggcgcagagaagcagcgcgctgccgaagccggtctgatcaacaagagtctgctcactctcggcagggttatcaacgctcttgtcgatcgcagctcacatattccatacagagagtccaagcttacgcgccttttgcaagactcccttggtggccgaactaaaacctgcataattgctaccatttcgccagccaagagcaatcttgaggagactatatccactttagactatgccttccgagccaagaacatccgcaacaagcctcaagtcaatcagatgatcagaaaaggtgctctgctgcgagagttcacccatgaaatcgagaagctcaagagcgagctcatcgctacgcgacagcgtaacggtgtctatttatcgaatgagagttacgaagagatgacagtagtgagtgagtcgcgacgaatcgaaaatgaagaacaggcggcgaaactggaaagcctagagtccaatctacgaaataaagtgcaagagcttttttctctgacctccaatttcatggggctcaaaaaggaccacgatgtgaccaaggtacagttggacgaggcgaggggcgtcctcgatcagaccgaacttgttctagaagcgacccgcaaaactctcgccgaagagacccatctgcgcgaagcccatcagaaaaccgaggaacggatgcgcgcggtcggcggtgagctgatcaataccttgcagaaaacggtcggacatgtcggagggttgcatgcaaaaaacaagaggaagtccgatctacaggccctcaatcgttcgaactggagtctggcccaggaacaggtgtctcatattacatcgctcgtggaaggacgtatcgacgaatttcagagcgagcagcaagaacatttgacctccatctcgggccgcatgcaggccttcgtagaggcagaactagagaaactctcagccacccaatcattcttagaccaaaacctggaagccttcgccaattctaagcatgagcttctgagtcgcaagcggaaatccaaagaggagatggatgaagtgcttgaagagatcaaagaagtacgggaccacatcaagaatcgggttggcgatagtctccgcgccattgctaccgccgcggagacgatatctcatgatgttctgagcgaacttagtgccttccacaacttccttcacacttcgtactctaccttgggcacggatttcaaggccatcttcgaaaatctgctgaaccacatctttgctcagcggaaagagtcggatagtcttagagagcagttgcgcaccgctagcgagactatcatgcgcacaaatgaatctgtatcagctcagatacaggatgtaatcaaccaagaaagggttcaagctgctgaagagcgtcgggctctattagcacaaatcacaagccttgtcaactctcaggctgaagcccaagagacgcgcctcgctaacaaagcggcttacatccaacagacggtccgcggaaacaacacggcgatagagagcagtatatcagaatacaatgaaggtatggagaactggggtagacaagaagacacgttcctgggcaagatgaaaacatcacgcgaaactctgaaaaccaaaatgcagcatgattggacggcggccgacaagtacagcacgtcgattcaggatgtcaccaactccgttcatgcggagacaatacgggtcgttgatgagcaaatgcaagatctggacgagcaaatgacgtcgcttgacgacttcgttacccgagctcgatcgcaaaatgcacaacacgatgagcaacataccgaatccctccaggctctgtcgactacagtagaaaattcttacgccaagatcggagatcactttgagacgacatgctcacgggtagaggaacttggaacggaaatggaggctaacgtcagggccgccggagagactctagagccgctagatacagaactcaacaagccgcttgccgatcttcgcgaggacataaacaacacagtcattcaggagtataaaccaacgggcaatacaccacagaagatgtcatacgaattccccacggagctcccgcgcacgcaggcgcacgattctctgcttgccaagctcaacggagagccgtcgcctagcaaagctagtgtctttatcgacgcggacccaacattggcggaaaaccggtcaccatcgagaccgcctacagacgacgatgttgcgcccctcggcgatcgaacgcgtaatccgatggctatgagtctgagggagctgcatcctaacattaacgatcggttcggattcgactcgaggtccagcttggcgatgggtactgataaggatgtagatgaggatttggacgtgacgatgccattgcttaagaagagtaggacttctagagttggtgggaagccgaagaagacgctgagtgtggatgggagggagaatttaccgatcccgagccttgcgacgcttgtaccggggggcgggaaggagatttttagtcagagtgtttcgaggaggaagagtccgagattgaattaggggtgtggtgtgagaagaggagtaagttgcaaaatggtgttggaggctacacttgacttcattggtagggcgagtacttttgattgcatgagatacctcactgttggagcctggagtacataattgttttagtactcatacttgttcgttgctggcttgaaggtgcgacagggccggactaaagtacataattttattgcattgaagtgtctttctgagagtgtgatttgatgttgtgagggaatactgtttcgggggcagcgtagaagtcggtgggcagacaggtcttcatggtatgtttgct

SEQ ID NO: 25557 - DNA, 1626 bp, Muscodor strobelii
  misc_feature: SGI cDNA ID NO. 568723
  misc_feature: Encodes the peptide sequence at SEQ ID NO 25558
atgaataacaataataaccccgacgacgtcccgggtggcaaccctggtgacaaccagactagtaatggtggaggaaatcctgctattaacgctggtaatcatcccaacactggtgtcaatactggtgccaatgccggtgttaatcctggtggtcatcctggtggtcatcctggtggtcatcctggtggtcatcctggcacaaacgccggtgtcgttgtcccaattttgacgcagccagcaaacggaggagtgatgctccccattttcggtaccaacactggtaaccaaatcacaaacacggctcagccaaacccacattgggccaccccagctgtccaggccgctgccccagtcgccccggcccccatgttacctgccccctttttcgctcccttcccaggtatcaataacttctggaatcctcccacctggaatgccttggtggacgaaccttggaggaagaccgttgtttgcgttatctgcggcggtgtatgcaagcctgatcagggcattcatcatggcttccatcccggcatcacttctatcgataacctcccagactggatgcgcatgagcctgatcatcgctaagcccaagttcatcgagtggcagaaacaggaacctagtgctacacgtacctacaatcgcgagggagacagcatgattgtggaactttctgtcttggagtttaagggtggatacagtaacatcaagaccaccagcgacaaaaagtatgacttttgcacaaccgatgagagaccggtattaccgattcattcaaactgtctgaagatcgcccgcaaattctgcgagacacagacacagttcgatatcgagttccgattcggcggcggtggaccaccgcagaatcttggtcatctctacgagatctggagcaaacgcgccattgctgcattcccgcgcggtcctcatacccagcccctcccctgtccatttggttaccttggcgccccatgtcaccccaagctcatggactacttcaaggagaccgagggagatcgcacggtgcggtgctacgagaagaatcctttggggctccctaatcttactgagatgatcatggaacaacttgagacaacggacggcaagagcatggaagtacgcgaggatatcaaggaaatttgggagcgtgtgcagagcttgcctggtgagctctatgagcgtatcatagagcatcttctaccgttcgacgccgatgattcgaccatccggaagaataatttcacacgccccagcgtttcactcgagtgttctcgtattcacactcccctgtggtggagagaccagttcctcaatggaaagctcatcccttggattttcgacctagagctcagaaacgtgcaggagtaccgtaaaataacgttttattacaagtccgctgtcgctgagcaagattacgaggaaaagtcgggtatttttgatgagagcatttgggattgggagcttctagtgcgctaccttgcacagccagatgtcttcgagtatcatggccgtcttgccgtctggaagaactcgggactttggaatcgtcgtcgtatctggaagctgcttgacaatgcacgacttggcaacgtcgtcttcttgccagaggtcacaatctcctag

SEQ ID NO: 25558 - protein, 541 aa, Muscodor strobelii
  misc_feature: SGI Peptide ID NO. 568723
  misc_feature (254)..(528): NCBI GI: 212531029 Blast Desc: PMAA_062500 [Penicillium marneffei ATCC 18224] gi|210071035|gb|EEA25124.1| PMAA_062500 [Penicillium marneffei ATCC 18224]
  misc_feature (385)..(532): NCBI GI: 212535358 Blast Desc: PMAA_083290 [Penicillium marneffei ATCC 18224] gi|210070234|gb|EEA24324.1| PMAA_083290 [Penicillium marneffei ATCC 18224]
  misc_feature (252)..(501): NCBI GI: 238489345 Blast Desc: conserved [Aspergillus flavus NRRL3357] gi|220698298|gb|EED54638.1| conserved [Aspergillus flavus NRRL3357]
  misc_feature (252)..(501): NCBI GI: 119482429 Blast Desc: NFIA_093080 [Neosartorya fischeri NRRL 181] gi|119409397|gb|EAW19346.1| NFIA_093080 [Neosartorya fischeri NRRL 181]
  misc_feature (2)..(107): NCBI GI: 83719555 Blast Desc: BTH_I3267 [Burkholderia thailandensis E264] gi|83653380|gb|ABC37443.1| BTH_I3267 [Burkholderia thailandensis E264]
  misc_feature (4)..(71): NCBI GI: 167620928 Blast Desc: BthaB_31778 [Burkholderia thailandensis Bt4]
  misc_feature (305)..(532): NCBI GI: 46102652 Blast Desc: FG00030.1 [Gibberella zeae PH-1]
  misc_feature (2)..(71): NCBI GI: 167620928 Blast Desc: BthaB_31778 [Burkholderia thailandensis Bt4]
  misc_feature (7)..(71): NCBI GI: 167620928 Blast Desc: BthaB_31778 [Burkholderia thailandensis Bt4]
  misc_feature (1)..(71): NCBI GI: 255932071 Blast Desc: Pc12g07570 [Penicillium chrysogenum Wisconsin 54-1255] gi|211582211|emb|CAP80384.1| Pc12g07570 [Penicillium chrysogenum Wisconsin 54-1255]
MNNNNNPDDVPGGNPGDNQTSNGGGNPAINAGNHPNTGVNTGANAGVNPGGHPGGHPGGHPGGHPGTNAGVVVPILTQPANGGVMLPIFGTNTGNQITNTAQPNPHWATPAVQAAAPVAPAPMLPAPFFAPFPGINNFWNPPTWNALVDEPWRKTVVCVICGGVCKPDQGIHHGFHPGITSIDNLPDWMRMSLIIAKPKFIEWQKQEPSATRTYNREGDSMIVELSVLEFKGGYSNIKTTSDKKYDFCTTDERPVLPIHSNCLKIARKFCETQTQFDIEFRFGGGGPPQNLGHLYEIWSKRAIAAFPRGPHTQPLPCPFGYLGAPCHPKLMDYFKETEGDRTVRCYEKNPLGLPNLTEMIMEQLETTDGKSMEVREDIKEIWERVQSLPGELYERIIEHLLPFDADDSTIRKNNFTRPSVSLECSRIHTPLWWRDQFLNGKLIPWIFDLELRNVQEYRKITFYYKSAVAEQDYEEKSGIFDESIWDWELLVRYLAQPDVFEYHGRLAVWKNSGLWNRRRIWKLLDNARLGNVVFLPEVTIS

SEQ ID NO: 25559 - DNA, 224 bp, Muscodor strobelii
  misc_feature: SGI EST ID NO. CUFF.60155.0
  misc_feature: Variant of the nucleotide sequence at SEQ ID NO 25557
gccagatgtcttcgagtatcatggccgtcttgccgtctggaagaactcgggactttggaatcgtcgtcgtatctggaagctgcttgacaatgcacgacttggcaacgtcgtcttcttgccagaggtcacaatctcctaggtgcggaccaatgactctgattcaggcaattaggccatacagacacttgatattacgacatacgaacactactgcgtactccaac

SEQ ID NO: 25560 - DNA, 3081 bp, Muscodor strobelii
  misc_feature: SGI cDNA ID NO. 568724
  misc_feature: Encodes the peptide sequence at SEQ ID NO 25561
atgccgagtctcttttcccggatcaggggcaaggatgggaagcccaagtccaaaaagaatgggaatctcgactctgcaaaccatcaattgtctactaggaaacgctgggacgatgcatatgcgcgcacttctatcgacccggaggaggtccaggacctggtccgaaaatgcacagaggagctcaaagcacgagctctcgacctcccattcttcctattaccctttcgcccaacttcagaccccagcgctgtgcgcaccttcatccgccatttcttcgacaatgagcacttacgtggcgaaaccctcgctcaggagttgcgtatgaccgagccaatggtcatatcaggtgttctgaaatggtgctggagtagaatccccggcggccttgttggctgggatgcctacgaactcttcaaagtcggcgagcaagactcaaacatggctcgcgatgccttcgcgactttcattcctctcagtatcgaaaatcaggctcgatcccagattgtattcgactacttcgacctgctttccgccattgcagcccacggcaagagcaatggcttcactggccgcaagctttcgcgcatggcatcctggtgggcattcgagcacaacgacacaggcaatggcttcgagggcggatacaagtcttggctgcgaggtgcagatgccacgagtcatctcttctttgcttacctgagatcactgtctcccgagaccaagagcgccggcatttccatgttacccatgtccctgcagaagctactgcaagaaaccgagtacccgccgcaggctccaactctactgctctcttcgacatacaaggtcgtcatgatcgtcgatgccgtgtcacccacgcctttcgccctactgcgcagagctaatcacttccaatatcgcgacgacgaccgggccctccaagagttttccgagtacgaggatcctgtcaaggcactgactgaagagtgtcgaagagttcttaaggccatctctctcgcgaatcagtcgcaagtgtcaagcacgaagcactccacgggcttacgggatgcctcctggtcgcggtttgaggatatcgggtttggaggcagtttggaggaagaggatgaagaggaagatacagccaagtattcgcgaacgcagaaccctcccggactccgaacgacgcccgcctccggtggacacatgggagggagaccaacgacaccctcctgggccgatttcctctcctcaggctttgtcgatgattctggaaactcgaacatgttgctgccaccggacaagattctgccacccatcgagacggccgtgcgacagcgaagctcgcagtcgcacagacctcgactagagggcgatagacatctggagcccggtgagctggccagcattaatcgagttgagcttgacgacgtgtttttctgggtctggatgagcagtctcgcacccgaggaaaccgcagaccgtaagtctgcatttggtcgatgcgccgtcatcgagaccatcattcgatccggtagatggctagtgatggaggaaatggtgaagggtgcagctcccgagcctgatgccaacgcatacatcgccgagaagaagggcttcttcagctggacgagacgcggtaaaggcggtgtttctcgcagtaaatcaacgagtaagggtgttttcaaccgaggcgacaaactcactgcgggtagcactgcggggagtggtctaagcaagactagtatcggccctgaccaacatgccaagatccaagcagctgcacagcaactcagcgcgaagcagcagcaagaacgattggcgtctgttgttcccgaaagacgtgggcggacagatgatgttgtactaggagacaagacgaatagcgtcctgactctgcagccagtcataatgagggaggcgtctcccgcgatgaagtgggccaacaagtacgacaaggagaccattcgtgaggcgtacctgggcaacatccatgctgggcgcggtctcgggcagcttaacgggccgaacggggaagacacgaatggttctgtgacacccagaccagaagttcccgagaaggtttcttctccaccacttcaagaggagactcctggttcaccaacaatacaaatcccggaggaaaaagtaccagccgtcccggagaaggatgccgaggatactcatccagctgagcgttctgctgctactggtcggaactcgcccctgcctccccttccaagcgaggagaaagcaacagaggcgcctcgtgagaccatgatgtcgcccgagcctgtttccagcagccccgagagcaagaagcagcacaagaaactccacaaggaggagaagagaactggcggtggattcagaaaactattcggacgcaagaatcggcagtccaagctaccagagaacgccgcctccgacgtgaataacctcttagcagcgcagccgtcccatactacagaaacctctcgagctcagtctccagtgccggagactccaagggcagagacaggattgactgagtctgcgcatgagacttccacgatcaacacagaggatgatagaacacccacccagatgtcagcgatgcagaatcaagagcccacgttcgacccctcggctcacggcgatctttcgcgtgtcaacaccgccgagacgaacgaggctcgaaatgagttttccagatttgatcaagggccattgacggaccaacctgcatttatccctgatgacggtggcagtgacgacgatgccacacctccacccatcgcacgtcgccggatggagagcccgctgactgcagagcctgagcaccgcgaagccgaagctgaagctgccgcaccctcgcccacgattaacgcggaccgatgggctgctatccgaaagaatgctgctgagcgtgtagcccgacagagcgaggagcaaagccgtggtgcctacagtaagacgacagatgatgacgataacactagtggtgaagaagtcgagaccatcgaatcccgtgtcgctcgtattaaggctcgcgttgccgagctgaccggcaatatggagggaacgtcgtctccaggaacaccaccacccgcaagtcgccgttag

SEQ ID NO: 25561 - protein, 1026 aa, Muscodor strobelii
  misc_feature: SGI Peptide ID NO. 568724
  misc_feature (38)..(513): Pfam Id: PF08101 Pfam Desc: Domain of function (DUF1708)
  misc_feature (48)..(295): Pfam Id: PF08101 Pfam Desc: Domain of function (DUF1708)
  misc_feature (443)..(513): Pfam Id: PF08101 Pfam Desc: Domain of function (DUF1708)
  misc_feature (1)..(1022): NCBI GI: 261355176 Blast Desc: conserved [Verticillium albo-atrum VaMs.102]
  misc_feature (1)..(1021): NCBI GI: 256735410 Blast Desc: [Nectria haematococca mpVI 77-13-4]
  misc_feature (1)..(1012): NCBI GI: 85116313 Blast Desc: NCU07481 [Neurospora crassa OR74A] gi|28926829|gb|EAA35792.1| conserved [Neurospora crassa OR74A]
  misc_feature (1)..(1026): NCBI GI: 171687211 Blast Desc: protein product [Podospora anserina] gi|170943567|emb|CAP69219.1| protein product [Podospora anserina]
  misc_feature (1)..(1022): NCBI GI: 46108056 Blast Desc: FG00910.1 [Gibberella zeae PH-1]
  misc_feature (1)..(1026): NCBI GI: 156054858 Blast Desc: SS1G_06277 [Sclerotinia sclerotiorum 1980] gi|154704057|gb|EDO03796.1| SS1G_06277 [Sclerotinia sclerotiorum 1980]
  misc_feature (1)..(1025): NCBI GI: 116180856 Blast Desc: CHGG_01056 [Chaetomium globosum CBS 148.51] gi|88185353|gb|EAQ92821.1| CHGG_01056 [Chaetomium globosum CBS 148.51]
  misc_feature (143)..(1025): NCBI GI: 145615996 Blast Desc: MGG_03633 [Magnaporthe grisea 70-15] gi|145009781|gb|EDJ94437.1| MGG_03633 [Magnaporthe grisea 70-15]
  misc_feature (3)..(1013): NCBI GI: 212546559 Blast Desc: morphogenesis protein (Msb1), [Penicillium marneffei ATCC 18224] gi|210064953|gb|EEA19048.1| morphogenesis protein (Msb1), [Penicillium marneffei ATCC 18224]
  misc_feature (3)..(1013): NCBI GI: 242822982 Blast Desc: morphogenesis protein (Msb1), [Talaromyces stipitatus ATCC 10500] gi|218712919|gb|EED12344.1| morphogenesis protein (Msb1), [Talaromyces stipitatus ATCC 10500]
MPSLFSRIRGKDGKPKSKKNGNLDSANHQLSTRKRWDDAYARTSIDPEEVQDLVRKCTEELKARALDLPFFLLPFRPTSDPSAVRTFIRHFFDNEHLRGETLAQELRMTEPMVISGVLKWCWSRIPGGLVGWDAYELFKVGEQDSNMARDAFATFIPLSIENQARSQIVFDYFDLLSAIAAHGKSNGFTGRKLSRMASWWAFEHNDTGNGFEGGYKSWLRGADATSHLFFAYLRSLSPETKSAGISMLPMSLQKLLQETEYPPQAPTLLLSSTYKVVMIVDAVSPTPFALLRRANHFQYRDDDRALQEFSEYEDPVKALTEECRRVLKAISLANQSQVSSTKHSTGLRDASWSRFEDIGFGGSLEEEDEEEDTAKYSRTQNPPGLRTTPASGGHMGGRPTTPSWADFLSSGFVDDSGNSNMLLPPDKILPPIETAVRQRSSQSHRPRLEGDRHLEPGELASINRVELDDVFFWVWMSSLAPEETADRKSAFGRCAVIETIIRSGRWLVMEEMVKGAAPEPDANAYIAEKKGFFSWTRRGKGGVSRSKSTSKGVFNRGDKLTAGSTAGSGLSKTSIGPDQHAKIQAAAQQLSAKQQQERLASVVPERRGRTDDVVLGDKTNSVLTLQPVIMREASPAMKWANKYDKETIREAYLGNIHAGRGLGQLNGPNGEDTNGSVTPRPEVPEKVSSPPLQEETPGSPTIQIPEEKVPAVPEKDAEDTHPAERSAATGRNSPLPPLPSEEKATEAPRETMMSPEPVSSSPESKKQHKKLHKEEKRTGGGFRKLFGRKNRQSKLPENAASDVNNLLAAQPSHTTETSRAQSPVPETPRAETGLTESAHETSTINTEDDRTPTQMSAMQNQEPTFDPSAHGDLSRVNTAETNEARNEFSRFDQGPLTDQPAFIPDDGGSDDDATPPPIARRRMESPLTAEPEHREAEAEAAAPSPTINADRWAAIRKNAAERVARQSEEQSRGAYSKTTDDDDNTSGEEVETIESRVARIKARVAELTGNMEGTSSPGTPPPASRR

SEQ ID NO: 25562 - DNA, 4797 bp, Muscodor strobelii
  misc_feature: SGI EST ID NO. CUFF.60250.0
  misc_feature: Variant of the nucleotide sequence at SEQ ID NO 25560
cgacagcacgtctaggggattcgagcttgcagaccggcgcgtctaagcagttctctggcggccatttctctcttgcgcgatccgtacattgtgttgtttggcgtttgaggcatcgtcaagtaccgcccagccgtgctagctctccgcactgcatgaccatgtacctcatcttatcatcaactaacaacccctgagctctctgctcttcccgtccggctctcattcattcgtcgcggatcgcgaagattccctctcaccatctcttccccttcccattcgtccattcgctttggtcggtgcactcactcattgttcacatttttcattccttattttgtgatcttgccgtgactcgcccgttcttgaccactgcaacgagtgcccgtcggctgttatcgtgaacatatgcccacggcagtcgtcaccggcctgaggaacacacaccttctctatcctgccattcattcttgctcattcaattgacatcaatcgccgcctatcgctggccaacgaacgtgcatggtttctgccaccatatcttgaccaacagatcggcctttgacaactcacacccacctttttctctcgtccgtaccccagtcgggccaggtcgccctgcattgacgaccatacaaccagttttattactgctaatacccaagcagccccccaccgctgcgttggcgcatcatctgcaacagacctcgtcctttttcgtcactctttttcgaccaaacgtaataacaaccggcatcgattcatattcgagtcgccgtagcagataacacatctgtcaatttctcgtatccagtcattgtcatttcacgtctcgtctatctactcgagaccagagagggaaagcgcgacgcagctggcggatctgccaatcacaatgccgagtctcttttcccggatcaggggcaaggatgggaagcccaagtccaaaaagaatgggaatctcgactctgcaaaccatcaattgtctactaggaaacgctgggacgatgcatatgcgcgcacttctatcgacccggaggaggtccaggacctggtccgaaaatgcacagaggagctcaaagcacgagctctcgacctcccattcttcctattaccctttcgcccaacttcagaccccagcgctgtgcgcaccttcatccgccatttcttcgacaatgagcacttacgtggcgaaaccctcgctcaggagttgcgtatgaccgagccaatggtcatatcaggtgttctgaaatggtgctggagtagaatccccggcggccttgttggctgggatgcctacgaactcttcaaagtcggcgagcaagactcaaacatggctcgcgatgccttcgcgactttcattcctctcagtatcgaaaatcaggctcgatcccagattgtattcgactacttcgacctgctttccgccattgcagcccacggcaagagcaatggcttcactggccgcaagctttcgcgcatggcatcctggtgggcattcgagcacaacgacacaggcaatggcttcgagggcggatacaagtcttggctgcgaggtgcagatgccacgagtcatctcttctttgcttacctgagatcactgtctcccgagaccaagagcgccggcatttccatgttacccatgtccctgcagaagctactgcaagaaaccgagtacccgccgcaggctccaactctactgctctcttcgacatacaaggtcgtcatgatcgtcgatgccgtgtcacccacgcctttcgccctactgcgcagagctaatcacttccaatatcgcgacgacgaccgggccctccaagagttttccgagtacgaggatcctgtcaaggcactgactgaagagtgtcgaagagttcttaaggccatctctctcgcgaatcagtcgcaagtgtcaagcacgaagcactccacgggcttacgggatgcctcctggtcgcggtttgaggatatcgggtttggaggcagtttggaggaagaggatgaagaggaagatacagccaagtattcgcgaacgcagaaccctcccggactccgaacgacgcccgcctccggtggacacatgggagggagaccaacgacaccctcctgggccgatttcctctcctcaggctttgtcgatgattctggaaactcgaacatgttgctgccaccggacaagattctgccacccatcgagacggccgtgcgacagcgaagctcgcagtcgcacagacctcgactagagggcgatagacatctggagcccggtgagctggccagcattaatcgagttgagcttgacgacgtgtttttctgggtctggatgagcagtctcgcacccgaggaaaccgcagaccgtaagtctgcatttggtcgatgcgccgtcatcgagaccatcattcgatccggtagatggctagtgatggaggaaatggtgaagggtgcagctcccgagcctgatgccaacgcatacatcgccgagaagaagggcttcttcagctggacgagacgcggtaaaggcggtgtttctcgcagtaaatcaacgagtaagggtgttttcaaccgaggcgacaaactcactgcgggtagcactgcggggagtggtctaagcaagactagtatcggccctgaccaacatgccaagatccaagcagctgcacagcaactcagcgcgaagcagcagcaagaacgattggcgtctgttgttcccgaaagacgtgggcggacagatgatgttgtactaggagacaagacgaatagcgtcctgactctgcagccagtcataatgagggaggcgtctcccgcgatgaagtgggccaacaagtacgacaaggagaccattcgtgaggcgtacctgggcaacatccatgctgggcgcggtctcgggcagcttaacgggccgaacggggaagacacgaatggttctgtgacacccagaccagaagttcccgagaaggtttcttctccaccacttcaagaggagactcctggttcaccaacaatacaaatcccggaggaaaaagtaccagccgtcccggagaaggatgccgaggatactcatccagctgagcgttctgctgctactggtcggaactcgcccctgcctccccttccaagcgaggagaaagcaacagaggcgcctcgtgagaccatgatgtcgcccgagcctgtttccagcagccccgagagcaagaagcagcacaagaaactccacaaggaggagaagagaactggcggtggattcagaaaactattcggacgcaagaatcggcagtccaagctaccagagaacgccgcctccgacgtgaataacctcttagcagcgcagccgtcccatactacagaaacctctcgagctcagtctccagtgccggagactccaagggcagagacaggattgactgagtctgcgcatgagacttccacgatcaacacagaggatgatagaacacccacccagatgtcagcgatgcagaatcaagagcccacgttcgacccctcggctcacggcgatctttcgcgtgtcaacaccgccgagacgaacgaggctcgaaatgagttttccagatttgatcaagggccattgacggaccaacctgcatttatccctgatgacggtggcagtgacgacgatgccacacctccacccatcgcacgtcgccggatggagagcccgctgactgcagagcctgagcaccgcgaagccgaagctgaagctgccgcaccctcgcccacgattaacgcggaccgatgggctgctatccgaaagaatgctgctgagcgtgtagcccgacagagcgaggagcaaagccgtggtgcctacagtaagacgacagatgatgacgataacactagtggtgaagaagtcgagaccatcgaatcccgtgtcgctcgtattaaggctcgcgttgccgagctgaccggcaatatggagggaacgtcgtctccaggaacaccaccacccgcaagtcgccgttagggatgctacttcgggccttgttaaggtggataggcgagccatgacatcgtggtcgtgaatcgctttgccgacctgcgactcccatgtgtctcgaaaggtcggccactaaatccttttgcgtgtcatatacctgtgcccgttactgttttcattcctcttttcattttcgtgataccactagaacgaacaaccgagaccgaaatttcgccagatcgctgatccgtgataccacttgactcgatgtttggcagtagaccaaactcgcgtttggagtttcggcgtatcttacatcgcttttgtttttcaatccgatccatcttatcgagccacaacccgatccttctaaaagcgaaactctggacatgcgcaccgttcatacgcgaaacagtttggttatgaaccggaccatttttcttgcctttcgacgatacccaccagccaaaggtgcgcgcagattcttaatcttcgacttgggactgactgttggtggagccggtgttccctgtaatgatgtagggggtgttaatgacatgggacgataaggggagctacttaaccggggagatttgaggggagaaaacatacgagatctgtcttgatgagaagtgacctagatcagctgttgccaggccccccagatgggcataattagtcacacgatagccacatgctgaatacagaaacatcagtgatgctacaaagatcaatgatactatggtcgatgtgatgagactatgagatggttcagaggcacgtcagtctagacgcacaatgtgtcatagctacgctacaaaagcacccacgggagaaaagctgctaagaac

SEQ ID NO: 25563 - DNA, 1173 bp, Muscodor strobelii
  misc_feature: SGI cDNA ID NO. 568725
  misc_feature: Encodes the peptide sequence at SEQ ID NO 25564
atgtcatcctcacaaaagcgcaaaagtgacgtcaatggcacagacgcaaacaaaaaggccaaagtaaacggcagcataacgtcattctttggcgctccaaagaacacagccaaagccaacggcacttcatcctcatcctcagctcccgaaccggcaacacccaaattcgacaaagaagcatgggtcgcaacgctcaccccggagcaaaagaagcacctccagctcgagataaacacgctcgatgaatcctggctagtccacctcaaaagcgagatcgtgaaacccgagttcatcaacctgaagaagttcctcgagtctgagatcaagagcggacagaccatcttcccgcctagcgaagatgtatattcatggtcccgccacacaccattcaacaccgtccgcgccgtaatcatcggccaggacccctaccacaaccacaaccaagcgcacggcctctgtttttcagtccgacccccaacacccgcaccaccctcattgaagaacatgtacaaatgcctaaaaatcgactatccatccttcgtcgctcctcctgccaacggcggcttgctcaccccctgggcagagcgcggcgtcctaatgctaaatacttgtctgaccgtgcgcgcccacaacgcaaactcccaccagaaaaaggggtgggaggcattcacccaaaaggtcatcgacctagtcgcagcgaagcgaaccaggggtgttgttttcctcgcctggggaagtccggctgcgaccagggtggtgaaggttgataagaacaggcatttggtgctgaagagcgttcatccgagtccgttatctgcgatgaggggtttcttcgagtgcggtcattttcggaagactaatgagtggcttttgcaacggtatggagaggagggtcagattgattggaatttgaataaggatgggaaaccgacggttattggtgggggcaagaaggaggagaaagaggagaagaaagtcgaggatggggccgatgaagatgccgaggaggctgagaaggagatgcagaatgctgcggagaagaccgaggaaaagactgacgttaagactgttgctacgaagggcaaggtcgatgaccagactaaggaggagattaatgaaatccttgagaggattggtgaggatggggttattgatggggaggagtatatatga

SEQ ID NO: 25564 - protein, 390 aa, Muscodor strobelii
  misc_feature: SGI Peptide ID NO. 568725
  misc_feature (126)..(291): Pfam Id: PF03167 Pfam Desc: Uracil DNA glycosylase superfamily
  misc_feature (4)..(305): NCBI GI: 156054842 Blast Desc: uracil-DNA glycosylase [Sclerotinia sclerotiorum 1980] gi|154704049|gb|EDO03788.1| uracil-DNA glycosylase [Sclerotinia sclerotiorum 1980]
  misc_feature (4)..(365): NCBI GI: 212528796 Blast Desc: uracil DNA N-glycosylase Ung1, [Penicillium marneffei ATCC 18224] gi|210073953|gb|EEA28040.1| uracil DNA N-glycosylase Ung1, [Penicillium marneffei ATCC 18224]
  misc_feature (3)..(304): NCBI GI: 154281449 Blast Desc: uracil-DNA glycosylase [Ajellomyces capsulatus NAm1] gi|150411716|gb|EDN07104.1| uracil-DNA glycosylase [Ajellomyces capsulatus NAm1]
  misc_feature (3)..(306): NCBI GI: 171687209 Blast Desc: protein product [Podospora anserina] gi|170943566|emb|CAP69218.1| protein product [Podospora anserina]
  misc_feature (3)..(304): NCBI GI: 240279918 Blast Desc: uracil-DNA glycosylase [Ajellomyces capsulatus H143]
  misc_feature (3)..(304): NCBI GI: 225563092 Blast Desc: uracil-DNA glycosylase [Ajellomyces capsulatus G186AR]
  misc_feature (3)..(304): NCBI GI: 261194970 Blast Desc: uracil-DNA glycosylase [Ajellomyces dermatitidis SLH14081] gi|239587761|gb|EEQ70404.1| uracil-DNA glycosylase [Ajellomyces dermatitidis SLH14081]
  misc_feature (4)..(305): NCBI GI: 154320504 Blast Desc: BC1G_01724 [Botryotinia fuckeliana B05.10] gi|150853413|gb|EDN28605.1| BC1G_01724 [Botryotinia fuckeliana B05.10]
  misc_feature (23)..(304): NCBI GI: 116180858 Blast Desc: CHGG_01057 [Chaetomium globosum CBS 148.51] gi|88185354|gb|EAQ92822.1| CHGG_01057 [Chaetomium globosum CBS 148.51]
  misc_feature (16)..(365): NCBI GI: 242765465 Blast Desc: uracil DNA N-glycosylase Ung1, [Talaromyces stipitatus ATCC 10500] gi|218724176|gb|EED23593.1| uracil DNA N-glycosylase Ung1, [Talaromyces stipitatus ATCC 10500]
MSSSQKRKSDVNGTDANKKAKVNGSITSFFGAPKNTAKANGTSSSSSAPEPATPKFDKEAWVATLTPEQKKHLQLEINTLDESWLVHLKSEIVKPEFINLKKFLESEIKSGQTIFPPSEDVYSWSRHTPFNTVRAVIIGQDPYHNHNQAHGLCFSVRPPTPAPPSLKNMYKCLKIDYPSFVAPPANGGLLTPWAERGVLMLNTCLTVRAHNANSHQKKGWEAFTQKVIDLVAAKRTRGVVFLAWGSPAATRVVKVDKNRHLVLKSVHPSPLSAMRGFFECGHFRKTNEWLLQRYGEEGQIDWNLNKDGKPTVIGGGKKEEKEEKKVEDGADEDAEEAEKEMQNAAEKTEEKTDVKTVATKGKVDDQTKEEINEILERIGEDGVIDGEEYI

SEQ ID NO: 25565 - DNA, 1966 bp, Muscodor strobelii
  misc_feature: SGI EST ID NO. CUFF.60183.0
  misc_feature: Variant of the nucleotide sequence at SEQ ID NO 25563
aacgcgtccaccgcgtctccgaaaacgcggtcctagtaaattggtattgcttcagccctgcacaccgaatagcgaccctggctgtcttcgcctgcgcctcgccaacttgctctaattactgacaggaaacgagatataataagtcaattggcagctctgatcttcttcataaaccattgtctcatttcctcgagatttgcaccgtttttcgtcctccaagtccagtgttgattgatcgagtctgcgcccacatcgacgtcatacagtccacaacgcaacaacaatctgtcaatgcgagtgaatgctcaccgttgtaagacccatcagacgttggatttggactcgaaaccagactttgcatacgactaccttggtgccacttctgtacagccaaacagatattaggagactacaaattgcactgtcactgccgagtcaactcataccacccgcccgctccatcgcaacatccaccccgaaatcatccacgatgtcatcctcacaaaagcgcaaaagtgacgtcaatggcacagacgcaaacaaaaaggccaaagtaaacggcagcataacgtcattctttggcgctccaaagaacacagccaaagccaacggcacttcatcctcatcctcagctcccgaaccggcaacacccaaattcgacaaagaagcatgggtcgcaacgctcaccccggagcaaaagaagcacctccagctcgagataaacacgctcgatgaatcctggctagtccacctcaaaagcgagatcgtgaaacccgagttcatcaacctgaagaagttcctcgagtctgagatcaagagcggacagaccatcttcccgcctagcgaagatgtatattcatggtcccgccacacaccattcaacaccgtccgcgccgtaatcatcggccaggacccctaccacaaccacaaccaagcgcacggcctctgtttttcagtccgacccccaacacccgcaccaccctcattgaagaacatgtacaaatgcctaaaaatcgactatccatccttcgtcgctcctcctgccaacggcggcttgctcaccccctgggcagagcgcggcgtcctaatgctaaatacttgtctgaccgtgcgcgcccacaacgcaaactcccaccagaaaaaggggtgggaggcattcacccaaaaggtcatcgacctagtcgcagcgaagcgaaccaggggtgttgttttcctcgcctggggaagtccggctgcgaccagggtggtgaaggttgataagaacaggcatttggtgctgaagagcgttcatccgagtccgttatctgcgatgaggggtttcttcgagtgcggtcattttcggaagactaatgagtggcttttgcaacggtatggagaggagggtcagattgattggaatttgaataaggatgggaaaccgacggttattggtgggggcaagaaggaggagaaagaggagaagaaagtcgaggatggggccgatgaagatgccgaggaggctgagaaggagatgcagaatgctgcggagaagaccgaggaaaagactgacgttaagactgttgctacgaagggcaaggtcgatgaccagactaaggaggagattaatgaaatccttgagaggattggtgaggatggggttattgatggggaggagtatatatgatcccttacgtcttgctgtggaaagacggagagagcgagggtttcggtttgttagggtaggatggattggcgttctattgttgtttgaaaaagggctataccctttctcgcgagatgggcctcgtgagatgcgggacgcactcaaggttgactgtacggaataagggtaattaggtaatggcaaaatgggcaaaataggaatcgaagcattgtcaagttctatcaggatgcatcatggtgtgggaaatgagttgcttcattggtgtgttagattgttaattagaactgatttcggtggtcacag

SEQ ID NO: 25566 - DNA, 1218 bp, Muscodor strobelii
  misc_feature: SGI cDNA ID NO. 568726
  misc_feature: Encodes the peptide sequence at SEQ ID NO 25567
atgggaatagcctcgatctcgtcggcgagaatcgcttccccatctatctcgagggtcatctccatgtcctcttctcccagcgctgacgatgtgtcggcctgcaaaatcgccgccatgcaggacatcgatcttagttcaggcttcgggtaccagctcgactgcgcgccaagcgtcggcaccctcagcgcgcacatgatcttcgtcgacttccccgaccagggcgccaccgaaacttcgcccgagactctgcgggatttcttcttgcccgcggccgccaattggtacgccgagtcttcacgcggggctctgcagttgacagtcaccgccgacacatcgcgcttctaccgcatgcccgcccgggcagatagctacaactgggcccgcgggcttacggccgaggcgcacgagaagtatatccaggacgctctggaggcaagtgacgcggccaacaccattgcgcccgttgacgtgctttacgtcgtgcccaccgcgaacgcaaccgcaatctcctttagtccgaccttcatgggcgaggtggtgacgcgcagcgaccagggcaatccaggagtccatattgcccgcaaggctgtcacctttgggctcgatgcctacaaaacctggggctacctcgtgctcaatcacgagacgggccacacgatgtgtttagcagattactacccgtacaacggcagcgccacgggcctgttcattggcggctgggacctcatgggcctaatcagcggacccggcccggactacttcgcctgggacaagtggcggctgggctggctcgcagacgaggagatcgcgtgtgtggccggggagagcgggctgagcacacacacgctattaccattacccgccggtgtgtcaaatgggaccagggcggcggcagaggctaaggccgccgtggtcgtcaggcatagcgacacggaggtgctagtcgccgagctgcgagtggctgcaggactagacgcagacttatgtgcgcctggcatacttctgtataccgtgtcgaccactacgccgtcgggtgagggtccggtgagggtcctagatgcgactccgggttccgagggctgtctaggagacaagctcaacgatgcaaccctgacactggacggcgtgagttcgtacgtggtgccgggatggggcgtcaagattatagtgctcaacaagaatggcaatgcgtacgatgttcaggtcctcgtcccttaa

SEQ ID NO: 25567 - protein, 405 aa, Muscodor strobelii
  misc_feature: SGI Peptide ID NO. 568726
  misc_feature (2)..(404): NCBI GI: 255940652 Blast Desc: Pc16g07710 [Penicillium chrysogenum Wisconsin 54-1255] gi|211585718|emb|CAP93441.1| Pc16g07710 [Penicillium chrysogenum Wisconsin 54-1255]
  misc_feature (31)..(402): NCBI GI: 256720331 Blast Desc: NECHADRAFT_56081 [Nectria haematococca mpVI 77-13-4]
  misc_feature (32)..(374): NCBI GI: 46118096 Blast Desc: FG04684.1 [Gibberella zeae PH-1]
  misc_feature (65)..(402): NCBI GI: 169782752 Blast Desc: [Aspergillus oryzae RIB40] gi|83774582|dbj|BAE64705.1| protein product [Aspergillus oryzae]
  misc_feature (117)..(402): NCBI GI: 238492399 Blast Desc: conserved [Aspergillus flavus NRRL3357] gi|220695930|gb|EED52272.1| conserved [Aspergillus flavus NRRL3357]
  misc_feature (30)..(386): NCBI GI: 261361332 Blast Desc: secreted protein [Verticillium albo-atrum VaMs.102]
  misc_feature (3)..(405): NCBI GI: 282870378 Blast Desc: M6 family metalloprotease domain protein [Streptomyces sp. ACT-1] gi|282576094|gb|EFB81515.1| M6 family metalloprotease domain protein [Streptomyces sp. ACT-1]
  misc_feature (3)..(405): NCBI GI: 182438063 Blast Desc: SGR_4270 [Streptomyces griseus subsp. griseus NBRC 13350] gi|178466579|dbj|BAG21099.1| conserved [Streptomyces griseus subsp. griseus NBRC 13350]
  misc_feature (3)..(405): NCBI GI: 239942008 Blast Desc: SrosN15_13495 [Streptomyces roseosporus NRRL 15998] gi|239988473|ref|ZP_04709137.1| SrosN1_14287 [Streptomyces roseosporus NRRL 11379]
  misc_feature (59)..(356): NCBI GI: 256395886 Blast Desc: M6 family metalloprotease domain protein [Catenulispora acidiphila DSM 44928] gi|256362112|gb|ACU75609.1| M6 family metalloprotease domain protein [Catenulispora DSM
MGIASISSARIASPSISRVISMSSSPSADDVSACKIAAMQDIDLSSGFGYQLDCAPSVGTLSAHMIFVDFPDQGATETSPETLRDFFLPAAANWYAESSRGALQLTVTADTSRFYRMPARADSYNWARGLTAEAHEKYIQDALEASDAANTIAPVDVLYVVPTANATAISFSPTFMGEVVTRSDQGNPGVHIARKAVTFGLDAYKTWGYLVLNHETGHTMCLADYYPYNGSATGLFIGGWDLMGLISGPGPDYFAWDKWRLGWLADEEIACVAGESGLSTHTLLPLPAGVSNGTRAAAEAKAAVVVRHSDTEVLVAELRVAAGLDADLCAPGILLYTVSTTTPSGEGPVRVLDATPGSEGCLGDKLNDATLTLDGVSSYVVPGWGVKIIVLNKNGNAYDVQVLVP

SEQ ID NO: 25568 - DNA, 898 bp, Muscodor strobelii
  misc_feature: SGI EST ID NO. CUFF.60185.0
  misc_feature: Variant of the nucleotide sequence at SEQ ID NO 25566
tatatccaggacgctctggaggcaagtgacgcggccaacaccattgcgcccgttgacgtgctttacgtcgtgcccaccgcgaacgcaaccgcaatctcctttagtccgaccttcatgggcgaggtggtgacgcgcagcgaccagggcaatccaggagtccatattgcccgcaaggctgtcacctttgggctcgatgcctacaaaacctggggctacctcgtgctcaatcacgagacgggccacacgatgtgtttagcagattactacccgtacaacggcagcgccacgggcctgttcattggcggctgggacctcatgggcctaatcagcggacccggcccggactacttcgcctgggacaagtggcggctgggctggctcgcagacgaggagatcgcgtgtgtggccggggagagcgggctgagcacacacacgctattaccattacccgccggtgtgtcaaatgggaccagggcggcggcagaggctaaggccgccgtggtcgtcaggcatagcgacacggaggtgctagtcgccgagctgcgagtggctgcaggactagacgcagacttatgtgcgcctggcatacttctgtataccgtgtcgaccactacgccgtcgggtgagggtccggtgagggtcctagatgcgactccgggttccgagggctgtctaggagacaagctcaacgatgcaaccctgacactggacggcgtgagttcgtacgtggtgccgggatggggcgtcaagattatagtgctcaacaagaatggcaatgcgtacgatgttcaggtcctcgtcccttaaataaaacgggggacgaaataaggtttaaaaagtttgcttaaagactttaaagggttatgatttttcatttatttaagtttttgcccggcta

SEQ ID NO: 25569 - DNA, 1074 bp, Muscodor strobelii
  misc_feature: SGI cDNA ID NO. 568727
  misc_feature: Encodes the peptide sequence at SEQ ID NO 25570
atgcgtgcgcttttcactggagtattacacataattgcattcgccgtcgcgggcgcagctgcggcttcagtgtcctgccgaggcctgcttccagcaattcacctcccagtgatgaccgtagccggtctgaccgcggaaccatcgtttctagagcgtgctattcggcggcccaatggcgatcttgtcgtcacgcaattggagaaagaggcccagctctggatcctgaaagattctgccgcacccgacgcccggctcactcctttacacaacttcacggactcaaatggacttcttggaatagcctccgtggcctatgatacatatatagtctcggcgcaacagttctacagtttcttagacccggttccgaacactactgtcatctgggagattcacttccaaggcacaaagtccgacgtcttcacgctccgcaaggcgggtgaatttccaagcgcaggtctcttcaacggcatggctaccgtaccggaagctcccaccatcgcgctcataggcgactctttcaagggccagattatccggttcgatgtacttgcaggtacgcacgatgtcatcctggatgcgccagaactgcatgccagcaaaggcgctgcttttcccgtgggcattaacggcctgcaaatccacaaaggatacctctactggtcaaataccgcaagagtcggcttttaccggatcgccatcaacagcaatgggcgcttgcggtccggagcccaagtcgaaatcctagctactatccccggcatctcaggtgttgacgactttgttttcgatgcgagggataatctctgggggcttgccaatctcgacaatcaggcgtttgtagtatataaaggctcaaacccgcgtcgtgaatatcagactgttcagttcgtggcaggtagcctgaactcgtctgaaatacctgggcccactgcatttgcttggggctcgaggaacgaaagccattcgctgtatgttactacgtcggggggaagcaaggcacctatcaatggtacatatgtcgagcccgcaaaagttgcagcaatcgataccacatcgttcttcgagggataa

SEQ ID NO: 25570 - protein, 357 aa, Muscodor strobelii
  misc_feature: SGI Peptide ID NO. 568727
  misc_feature (30)..(351): NCBI GI: 256722873 Blast Desc: NECHADRAFT_52990 [Nectria haematococca mpVI 77-13-4]
  misc_feature (35)..(351): NCBI GI: 256729493 Blast Desc: NECHADRAFT_47685 [Nectria haematococca mpVI 77-13-4]
  misc_feature (46)..(354): NCBI GI: 171683788 Blast Desc: protein product [Podospora anserina] gi|170941854|emb|CAP67507.1| protein product [Podospora anserina]
  misc_feature (39)..(349): NCBI GI: 115397413 Blast Desc: [Aspergillus terreus NIH2624] gi|114192489|gb|EAU34189.1| [Aspergillus terreus NIH2624]
  misc_feature (136)..(354): NCBI GI: 85095914 Blast Desc: NCU05626 [Neurospora crassa OR74A] gi|28921649|gb|EAA30934.1| [Neurospora crassa OR74A]
  misc_feature (48)..(348): NCBI GI: 46110901 Blast Desc: FG02332.1 [Gibberella zeae PH-1]
  misc_feature (19)..(352): NCBI GI: 156049683 Blast Desc: SS1G_08548 [Sclerotinia sclerotiorum 1980] gi|154692947|gb|EDN92685.1| SS1G_08548 [Sclerotinia sclerotiorum 1980]
  misc_feature (37)..(349): NCBI GI: 119482818 Blast Desc: NFIA_026140 [Neosartorya fischeri NRRL 181] gi|119409592|gb|EAW19540.1| conserved [Neosartorya fischeri NRRL 181]
  misc_feature (47)..(354): NCBI GI: 154303709 Blast Desc: BC1G_08739 [Botryotinia fuckeliana B05.10] gi|150854533|gb|EDN29725.1| BC1G_08739 [Botryotinia fuckeliana B05.10]
  misc_feature (48)..(352): NCBI GI: 154294557 Blast Desc: BC1G_13881 [Botryotinia fuckeliana B05.10] gi|150844721|gb|EDN19914.1| BC1G_13881 [Botryotinia fuckeliana B05.10]
MRALFTGVLHIIAFAVAGAAAASVSCRGLLPAIHLPVMTVAGLTAEPSFLERAIRRPNGDLVVTQLEKEAQLWILKDSAAPDARLTPLHNFTDSNGLLGIASVAYDTYIVSAQQFYSFLDPVPNTTVIWEIHFQGTKSDVFTLRKAGEFPSAGLFNGMATVPEAPTIALIGDSFKGQIIRFDVLAGTHDVILDAPELHASKGAAFPVGINGLQIHKGYLYWSNTARVGFYRIAINSNGRLRSGAQVEILATIPGISGVDDFVFDARDNLWGLANLDNQAFVVYKGSNPRREYQTVQFVAGSLNSSEIPGPTAFAWGSRNESHSLYVTTSGGSKAPINGTYVEPAKVAAIDTTSFFEG

SEQ ID NO: 25571 - DNA, 2219 bp, Muscodor strobelii
  misc_feature: SGI EST ID NO. CUFF.60422.0
  misc_feature: Variant of the nucleotide sequence at SEQ ID NO 25569
caacatcaagcctcgcaatggatttctaagcctggtctatttccgttgtagggatagacaagtcgctttatcacggtcttacgaagtatataaaggcttgaagatttgggttgaaggtaagagatgtcccctgctaggtgcgcatcccgtcgtactcccttccttagctcaagaacacgatgcgtgcgcttttcactggagtattacacataattgcattcgccgtcgcgggcgcagctgcggcttcagtgtcctgccgaggcctgcttccagcaattcacctcccagtgatgaccgtagccggtctgaccgcggaaccatcgtttctagagcgtgctattcggcggcccaatggcgatcttgtcgtcacgcaattggagaaagaggcccagctctggatcctgaaagattctgccgcacccgacgcccggctcactcctttacacaacttcacggactcaaatggacttcttggaatagcctccgtggcctatgatacatatatagtctcggcgcaacagttctacagtttcttagacccggttccgaacactactgtcatctgggagattcacttccaaggcacaaagtccgacgtcttcacgctccgcaaggcgggtgaatttccaagcgcaggtctcttcaacggcatggctaccgtaccggaagctcccaccatcgcgctcataggcgactctttcaagggccagattatccggttcgatgtacttgcaggtacgcacgatgtcatcctggatgcgccagaactgcatgccagcaaaggcgctgcttttcccgtgggcattaacggcctgcaaatccacaaaggatacctctactggtcaaataccgcaagagtcggcttttaccggatcgccatcaacagcaatgggcgcttgcggtccggagcccaagtcgaaatcctagctactatccccggcatctcaggtgttgacgactttgttttcgatgcgagggataatctctgggggcttgccaatctcgacaatcaggcgtttgtagtatataaaggctcaaacccgcgtcgtgaatatcagactgttcagttcgtggcaggtagcctgaactcgtctgaaatacctgggcccactgcatttgcttggggctcgaggaacgaaagccattcgctgtatgttactacgtcggggggaagcaaggcacctatcaatggtacatatgtcgagcccgcaaaagttgcagcaatcgataccacatcgttcttcgagggataaggtaatcaattcgtacgaataatatgatggtcgcttctttgtataccaatattaaagtatctttccgtcgagcttttgtttgcaaaggcccagctaaatttgtacttgctactcttaaatacatgtatgccacctggttatcgcagcatcgcagtcacccttccttttcgtgggtgatcgtcgtctgaatgtagtaaagcttctctgaagcatgccagcctacctatcgaatacgcccattcaaactgctattgactagtagatcattatctgcgtatttgtttgagaagttatcgacgatcaagatatcgcgagatgtttgaagcctagaatcatttcttgctattatgattgatgttcgcttagtgcctttcagtgccatgtctggctagggggcggtatagtctcggcattgacaacccaaacgcccgtgacaagtcatagaatcgtttgtcattgatctcatgatacgctttgtcaatctaactcggtattaaatgagtggtctattgctcacgttcttggagctgcctggatggaacgcaccttagtaacctcatcattgatataaagaaaggccctcgtaggcttgcaacttgaccatggacacgacagtcacaatgatgatgataaggctccaccaagcccagcctagaaccgacattacctttacacgcgaaagatagcgcaaaatctatactggctagcggattgacgctagaggttcgctcgggatgtccggtgaggaacagcttaaagtaagggagcctacgcagttccgtaaaccctctcctaactcccgattagtcaacagattggctctacccaatcgcaggtgcttacgttcttctcgtctgttctttctgaacctgagccaactgcagcagaagtcatctaatcatatagtcgccattcgttgttatgtcgcgtgctggctttcttgtcacctaatatgtgaagtggcga

SEQ ID NO: 25572 - DNA, 1950 bp, Muscodor strobelii
  misc_feature: SGI cDNA ID NO. 568728
  misc_feature: Encodes the peptide sequence at SEQ ID NO 25573
atggccgacatccgagataagacatatgtggcacggtctcgcgatgatcgcagtacggagctagcgatccagtctgacgatcgaaacgcggatgccttgcttctgctgggtctatcagtgcgcctcaagaatcgggatatccatgtcgactatgcaggtggcttaaacactgtcagaatactcgataaaatactgggatggggtattatgggctttttcaaggcgtaccagcttgtctggtcatcatctactcctgtcattagtaccggagtagagggaagagaagaatcaggagcgggaaagaaggagacggaacgccaaacggcaaaagtacccagtctgagagatgctcttgcagaagctgcgccaggctatgctcaagggccgaggtttgtaaaggaagatggggcagacaagttgaaaaaagccgtagcggagagaacaatcgccgaacggacgttcgggagagtgactgcgttgattgacactatagcccttgctgagttggccagacggcttttatacgcccgaaagcagagcacgggtgatgagttcttgcagagtcagatatccatcccattacccaatataagtgatccgttttatggctccggacatttgttctatatgatcctgttctgcgatgatggatcgcggcggcctttgaagtggatcgttaaaattcctaacatggggttggaagactgctgggacacacctgcccttgaacggctgcgaacagaagcggcgcttcttcgcacgttgagaatggaagcgagtgttccggtaccggccgtcatcgcggcagagttcaaagttgacaacgagtgcaacgtgccatacttgattatggaatttgtcgaggggaagaagttaaccgacgtctggttcggatgtgatcgagaggactttatagatgacagcgcgttgagaaggaggagggaaaagattctggagaatgtcgctaaggccatgtttaggcttggaagacatcagtttgatgagggcggttctccagtattcgatgataagtcgagacgctggcatgttggaccgatcagtgagcttgatatacagatgatggttgatcgatggtatcagaacggagagcaggatcggacactattgtggagggaacatgggccttggcatgataccgtggaaatgtatactgctttactcgatgctcacccgcctgtcaccgagatggaaaggggtatatatgctggattgcggctgttccttagtcaaattcgtgagccgtcggattcgagtcttgcaggacggcaggggaagtttgcactctgccatcctgatcttagtctgcgcaacatcatcatggcagaagacggaacgacgatcaagacaatagtgggctgggatggtgcaaaaatagcaccacatagtattgggaatatgagttttccctcctggctcgtccgcgacttcaatcctttcgcctggcgctggaagccaacgctggcggctgattcttggcagcgaaacctactcagccacgactgtaacaggtttgaagatgcgccgtgggtcttgcgagagttacgagagttctatatacagacagttgagagaataagtgaggctgatggtgtaagcgagcaagaacgggataaagtaatggacggtaatcacagcaatcgtcgatgtcaagagcgtggtactacaagacacggcatggcagatataacggcacaatctttggtagcgctttcgctcgatgccgcgattcatgatccgcggtgcagggtcgctaacctgcggcagctattgcagaaatgttctcgaccatctgaaatgttcatgttcgacgaaattgtccacacattaggtcaagggcgcagtcttgagagtgcaaagcagtgttgtctattagccaattttatggaactggctaccaggggtgatgtaaaagggtctgctatttggtga

SEQ ID NO: 25573 - protein, 649 aa, Muscodor strobelii
  misc_feature: SGI Peptide ID NO. 568728
  misc_feature (197)..(601): NCBI GI: 240110703 Blast Desc: CPC735_035650 [Coccidioides posadasii C735 delta SOWgp]
  misc_feature (197)..(601): NCBI GI: 119197311 Blast Desc: CIMG_10419 [Coccidioides immitis RS]
  misc_feature (197)..(537): NCBI GI: 169783966 Blast Desc: [Aspergillus oryzae RIB40] gi|83775189|dbj|BAE65312.1| protein product [Aspergillus oryzae]
  misc_feature (197)..(599): NCBI GI: 240106621 Blast Desc: CPC735_001540 [Coccidioides posadasii C735 delta SOWgp]
  misc_feature (153)..(532): NCBI GI: 238843061 Blast Desc: conserved [Microsporum canis CBS 113480]
  misc_feature (201)..(525): NCBI GI: 238502793 Blast Desc: conserved [Aspergillus flavus NRRL3357] gi|220691440|gb|EED47788.1| conserved [Aspergillus flavus NRRL3357]
  misc_feature (160)..(623): NCBI GI: 238842934 Blast Desc: conserved [Microsporum canis CBS 113480]
  misc_feature (159)..(532): NCBI GI: 255957021 Blast Desc: Pc21g22960 [Penicillium chrysogenum Wisconsin 54-1255] gi|211590974|emb|CAP97193.1| Pc21g22960 [Penicillium chrysogenum Wisconsin 54-1255]
  misc_feature (284)..(599): NCBI GI: 255941388 Blast Desc: Pc16g11610 [Penicillium chrysogenum Wisconsin 54-1255] gi|211586086|emb|CAP93831.1| Pc16g11610 [Penicillium chrysogenum Wisconsin 54-1255]
  misc_feature (154)..(488): NCBI GI: 169776105 Blast Desc: [Aspergillus oryzae RIB40] gi|83771254|dbj|BAE61386.1| protein product [Aspergillus oryzae]
MADIRDKTYVARSRDDRSTELAIQSDDRNADALLLLGLSVRLKNRDIHVDYAGGLNTVRILDKILGWGIMGFFKAYQLVWSSSTPVISTGVEGREESGAGKKETERQTAKVPSLRDALAEAAPGYAQGPRFVKEDGADKLKKAVAERTIAERTFGRVTALIDTIALAELARRLLYARKQSTGDEFLQSQISIPLPNISDPFYGSGHLFYMILFCDDGSRRPLKWIVKIPNMGLEDCWDTPALERLRTEAALLRTLRMEASVPVPAVIAAEFKVDNECNVPYLIMEFVEGKKLTDVWFGCDREDFIDDSALRRRREKILENVAKAMFRLGRHQFDEGGSPVFDDKSRRWHVGPISELDIQMMVDRWYQNGEQDRTLLWREHGPWHDTVEMYTALLDAHPPVTEMERGIYAGLRLFLSQIREPSDSSLAGRQGKFALCHPDLSLRNIIMAEDGTTIKTIVGWDGAKIAPHSIGNMSFPSWLVRDFNPFAWRWKPTLAADSWQRNLLSHDCNRFEDAPWVLRELREFYIQTVERISEADGVSEQERDKVMDGNHSNRRCQERGTTRHGMADITAQSLVALSLDAAIHDPRCRVANLRQLLQKCSRPSEMFMFDEIVHTLGQGRSLESAKQCCLLANFMELATRGDVKGSAIW

SEQ ID NO: 25574 - DNA, 1741 bp, Muscodor strobelii
  misc_feature: SGI EST ID NO. CUFF.60429.0
  misc_feature: Variant of the nucleotide sequence at SEQ ID NO 25572
ctgcgccaggctatgctcaagggccgaggtttgtaaaggaagatggggcagacaagttgaaaaaagccgtagcggagagaacaatcgccgaacggacgttcgggagagtgactgcgttgattgacactatagcccttgctgagttggccagacggcttttatacgcccgaaagcagagcacgggtgatgagttcttgcagagtcagatatccatcccattacccaatataagtgatccgttttatggctccggacatttgttctatatgatcctgttctgcgatgatggatcgcggcggcctttgaagtggatcgttaaaattcctaacatggggttggaagactgctgggacacacctgcccttgaacggctgcgaacagaagcggcgcttcttcgcacgttgagaatggaagcgagtgttccggtaccggccgtcatcgcggcagagttcaaagttgacaacgagtgcaacgtgccatacttgattatggaatttgtcgaggggaagaagttaaccgacgtctggttcggatgtgatcgagaggactttatagatgacagcgcgttgagaaggaggagggaaaagattctggagaatgtcgctaaggccatgtttaggcttggaagacatcagtttgatgagggcggttctccagtattcgatgataagtcgagacgctggcatgttggaccgatcagtgagcttgatatacagatgatggttgatcgatggtatcagaacggagagcaggatcggacactattgtggagggaacatgggccttggcatgataccgtggaaatgtatactgctttactcgatgctcacccgcctgtcaccgagatggaaaggggtatatatgctggattgcggctgttccttagtcaaattcgtgagccgtcggattcgagtcttgcaggacggcaggggaagtttgcactctgccatcctgatcttagtctgcgcaacatcatcatggcagaagacggaacgacgatcaagacaatagtgggctgggatggtgcaaaaatagcaccacatagtattgggaatatgagttttccctcctggctcgtccgcgacttcaatcctttcgcctggcgctggaagccaacgctggcggctgattcttggcagcgaaacctactcagccacgactgtaacaggtttgaagatgcgccgtgggtcttgcgagagttacgagagttctatatacagacagttgagagaataagtgaggctgatggtgtaagcgagcaagaacgggataaagtaatggacggtaatcacagcaatcgtcgatgtcaagagcgtggtactacaagacacggcatggcagatataacggcacaatctttggtagcgctttcgctcgatgccgcgattcatgatccgcggtgcagggtcgctaacctgcggcagctattgcagaaatgttctcgaccatctgaaatgttcatgttcgacgaaattgtccacacattaggtcaagggcgcagtcttgagagtgcaaagcagtgttgtctattagccaattttatggaactggctaccaggggtgatgtaaaagggtctgctatttggtgatgtaattatatacgcctcgaggacgcaaggactcgtctagagatcccgccaggtattaagcatttctgattcctttgcttcatgtgcagatcgttagttggaaaagggttgcacatacaagtacataacatagaccgtacggacattttgag

SEQ ID NO: 25575 - DNA, 1485 bp, Muscodor strobelii
  misc_feature: SGI cDNA ID NO. 568729
  misc_feature: Encodes the peptide sequence at SEQ ID NO 25576
atgcgggcctcactttccttggtcgccgtcgcgggcatcgccacctccgccgccgcccagcgcgtcctgcccgtcagcatctccaagccccacgcacgcggcaagacggccgtcaacaccttctccaagcgcgccagcaacttcacgcaggccatcgacaacgagatcaacgcgggcggctactatgcgaccgtgtcggtgggcacgccggcgcaggaggtgacgctgatcctcgacacgggcagctcggacgtctggatcctcgacagcgaggcggacctgtgccagtcggagcggctgcaggcgtactacggcgactgcctgacgacgttcgaccacacggccagcaccacgtacgaggtcgtcgacgccaacggcttcgacatcagctacgtcgacggctccggctcctcgggcgactacatcgccgacaccttccgcatcgccggcgccagcatcaaggccctgcagatggggctcgcggctgagagcaccatcaactcgggcctcatcggcgtcggcttcgacaccaacgtcgccgccgcccgcgtctactccaacctcatcgacgagttcatggtccaggacgtcatcgccaccaagagctacagcctctacctcaacgacctcgaggccagcaccggcaccatcctgttcggcggcatcgacaccaagaagttcatcggcgacctcaaggtcgtcgacatccagcccgagacgctcggcggccagcaggtctacagctccttcgccgtcaccctgaccggcctcgagatcaccgacggcgacaccaacaagagctacatctccacgcccatcgacgtcgtcctcgactccggcaccacgctgacctacctgcccgcgaccgtcgccgagcgcgtcttcgccgccttcgccgcctacgacgactcgcagggcaccggcctcgtctacgtcaactgcgactacctgaccaacaagcccgacatgaccttcgacttccgcttcggcgccaccgggcccctcatccgcgtgcccgtcgacgagatgatcctcgacaacgtcaaggcctacgtcgacctcggcctggagctgccccctctcgacttcgacaacgtctgcagcctcggcctccaggccctcgacgactactacctgctgggggacaccttcctgcgctccgcctacgtcgtctacgacataagcagtctgagcatcggcatggcccaggccaacctcaacagcacggacagcaacatcgtcgagatcggcacctccggcatccccctcgagaccggcgtcgactctcagacgtccactgccgactcgccctcgggcactgacggcaccagcactggggaccccaccgtcaccgtgaccacggacccgtcagatactggcagtgccggcgtccgcaccgtcccgccgcccagctgggaggcagccagcgtgactttgatcgcagctctcctcggccttgctggtgccactcttttcacattgtag

SEQ ID NO: 25576 - protein, 494 aa, Muscodor strobelii
  misc_feature: SGI Peptide ID NO. 568729
  misc_feature (60)..(404): Pfam Id: PF00026 Pfam Desc: Eukaryotic aspartyl protease
  misc_feature (44)..(494): NCBI GI: 39971095 Blast Desc: MGG_03014 [Magnaporthe grisea 70-15] gi|149210653|ref|XP_001522701.1| MGCH7_ch7g799 [Magnaporthe grisea 70-15] gi|86196754|gb|EAQ71392.1| MGCH7_ch7g799 grisea
  misc_feature (1)..(435): NCBI GI: 85113736 Blast Desc: NCU03168 [Neurospora crassa OR74A] gi|28926361|gb|EAA35338.1| conserved [Neurospora crassa OR74A] gi|38567249|emb|CAE76540.1| related to aspartyl proteinase SAP3
  misc_feature (5)..(494): NCBI GI: 171684437 Blast Desc: protein product [Podospora anserina] gi|170942179|emb|CAP67831.1| protein product [Podospora anserina]
  misc_feature (8)..(492): NCBI GI: 116181454 Blast Desc: CHGG_01355 [Chaetomium globosum CBS 148.51] gi|88185652|gb|EAQ93120.1| CHGG_01355 [Chaetomium globosum CBS 148.51]
  misc_feature (1)..(494): NCBI GI: 171695874 Blast Desc: protein product [Podospora anserina] gi|170948179|emb|CAP60343.1| protein product [Podospora anserina]
  misc_feature (54)..(434): NCBI GI: 46128411 Blast Desc: FG08583.1 [Gibberella zeae PH-1]
  misc_feature (18)..(462): NCBI GI: 154312485 Blast Desc: BC1G_05845 [Botryotinia fuckeliana B05.10] gi|114149216|gb|AAR87746.3| aspartic proteinase precursor [Botryotinia fuckeliana] gi|150849946|gb|EDN25139.1| BC1G_05845
  misc_feature (19)..(406): NCBI GI: 154322142 Blast Desc: BC1G_01218 [Botryotinia fuckeliana B05.10] gi|150850465|gb|EDN25658.1| BC1G_01218 [Botryotinia fuckeliana B05.10]
  misc_feature (3)..(463): NCBI GI: 85117939 Blast Desc: NCU02956 [Neurospora crassa OR74A] gi|28927151|gb|EAA36107.1| conserved [Neurospora crassa OR74A] gi|38566948|emb|CAE76250.1| related to acid proteinase PEPI
  misc_feature (39)..(416): NCBI GI: 256733571 Blast Desc: NECHADRAFT_91934 [Nectria haematococca mpVI 77-13-4]
  misc_feature (61)..(420): SWISSPROT Homolog: EC 3.4.23.35 Barrierpepsin
MRASLSLVAVAGIATSAAAQRVLPVSISKPHARGKTAVNTFSKRASNFTQAIDNEINAGGYYATVSVGTPAQEVTLILDTGSSDVWILDSEADLCQSERLQAYYGDCLTTFDHTASTTYEVVDANGFDISYVDGSGSSGDYIADTFRIAGASIKALQMGLAAESTINSGLIGVGFDTNVAAARVYSNLIDEFMVQDVIATKSYSLYLNDLEASTGTILFGGIDTKKFIGDLKVVDIQPETLGGQQVYSSFAVTLTGLEITDGDTNKSYISTPIDVVLDSGTTLTYLPATVAERVFAAFAAYDDSQGTGLVYVNCDYLTNKPDMTFDFRFGATGPLIRVPVDEMILDNVKAYVDLGLELPPLDFDNVCSLGLQALDDYYLLGDTFLRSAYVVYDISSLSIGMAQANLNSTDSNIVEIGTSGIPLETGVDSQTSTADSPSGTDGTSTGDPTVTVTTDPSDTGSAGVRTVPPPSWEAASVTLIAALLGLAGATLFTL

SEQ ID NO: 25577 - DNA, 3643 bp, Muscodor strobelii
  misc_feature: SGI EST ID NO. CUFF.60568.1
  misc_feature: Variant of the nucleotide sequence at SEQ ID NO 25575
ctagtatgggcaactttttgcatcgcatgaagttgccggatggatggacacaagaggcttgtatcacgtattaggtataggcgcactctgccaattcttctttgaccaatcctggagttgaccatgggctcggcaagactgggcagctgaaggctaacagattggaggagcagaagaaggagccggcccttgttgcctccgttcaaatatccgttgttttccagacttccactcggaactcggaacttgaaaaagtctcgaacaaatctacctacctatcattcttgatcgcggcggcattgatattcgcatgtattgcggtggacgatgcgactttggctattggcaccattgattcgattgctatggactcgattcccaccatctgtctggcctagcacagacccagtgaacacagtcgcgttgcagcaccagcgactctgccttttgcatcctggatgataatttgcacgtatttcgtatgtgccgccgagacgaagcgcatcgcaacaggctccccatgtcataaaggtaatgagttgtaacgacaagagccttggctgtgggaatgcccagacggccaaggcttggactaagacgaagatggctgccgcctgtcgtagtgactcggctccaacaacgacgctgcactcgcactggctgacccgtatctgcggcgttgtttgcggagcggcgtatccatcttcaggactctctgtagaaattttggagtttgcctgcccagcccggctgcccggagacagagtgcctcccactcattgcatcccgtcgcaccctgttgcatttgttgtgaacctgagtgtgataataatgcacgatgcattgttggctatcctacgcgtgaacgtctgatctacggctcggtcaacaacgccgggatcaatactgcagcagcgaatgacaacagtgtcatccaatcttgaagtcttggacatatccccagagcagccggggcagctaataatagcaggttgcgagtatcaaaatctcacctggggcccctgacgctaacacaacgccacctcctccactgcatctacgcctcgagcttggcgggcagaatctcacgatccagccaagccagcacgcccccgaagtgtgttattgtacagtatattcctgccgcaaagcctggcgtgttccgtacctcattttctttcattcgttactgttttatttcttgttgtcgttcccttcctcgtacctccccccgtgaccttgcttgcccgacatgcgggcctcactttccttggtcgccgtcgcgggcatcgccacctccgccgccgcccagcgcgtcctgcccgtcagcatctccaagccccacgcacgcggcaagacggccgtcaacaccttctccaagcgcgccagcaacttcacgcaggccatcgacaacgagatcaacgcgggcggctactatgcgaccgtgtcggtgggcacgccggcgcaggaggtgacgctgatcctcgacacgggcagctcggacgtctggatcctcgacagcgaggcggacctgtgccagtcggagcggctgcaggcgtactacggcgactgcctgacgacgttcgaccacacggccagcaccacgtacgaggtcgtcgacgccaacggcttcgacatcagctacgtcgacggctccggctcctcgggcgactacatcgccgacaccttccgcatcgccggcgccagcatcaaggccctgcagatggggctcgcggctgagagcaccatcaactcgggcctcatcggcgtcggcttcgacaccaacgtcgccgccgcccgcgtctactccaacctcatcgacgagttcatggtccaggacgtcatcgccaccaagagctacagcctctacctcaacgacctcgaggccagcaccggcaccatcctgttcggcggcatcgacaccaagaagttcatcggcgacctcaaggtcgtcgacatccagcccgagacgctcggcggccagcaggtctacagctccttcgccgtcaccctgaccggcctcgagatcaccgacggcgacaccaacaagagctacatctccacgcccatcgacgtcgtcctcgactccggcaccacgctgacctacctgcccgcgaccgtcgccgagcgcgtcttcgccgccttcgccgcctacgacgactcgcagggcaccggcctcgtctacgtcaactgcgactacctgaccaacaagcccgacatgaccttcgacttccgcttcggcgccaccgggcccctcatccgcgtgcccgtcgacgagatgatcctcgacaacgtcaaggcctacgtcgacctcggcctggagctgccccctctcgacttcgacaacgtctgcagcctcggcctccaggccctcgacgactactacctgctgggggacaccttcctgcgctccgcctacgtcgtctacgacataagcagtctgagcatcggcatggcccaggccaacctcaacagcacggacagcaacatcgtcgagatcggcacctccggcatccccctcgagaccggcgtcgactctcagacgtccactgccgactcgccctcgggcactgacggcaccagcactggggaccccaccgtcaccgtgaccacggacccgtcagatactggcagtgccggcgtccgcaccgtcccgccgcccagctgggaggcagccagcgtgactttgatcgcagctctcctcggccttgctggtgccactcttttcacattgtagagcatatttcctgttgcctaccgatagcttcggcctcggtggcgaggtgttgaaaaacatgcgatcgacacgacatcatatacatgacgttttcgtaattacatacacatcaattgagcattgcacgatgagttagcacatgtgcgtctggccaattgacggcgagctgctactgctgcatgaagatcgaggcatcctacatagagagatacctacaaagagatgtggaggagcattgagccttggtgtatagagaagacatagctttggacataaaatgataccctaattctatggcatttgcatttttcatgcttgcataaactggcttcttacgggatgatgacgatctgttgcagcttttatcctttataaagcttggctgtccgaaacgcattggcctggtgactgtgaactctgtcggcttcgcgctagaacacggctttgtctgcttgtctgttccagcagcttgcaggtctttagtaaggtgtatctcaccactaggcagctgtggtagagacaggtacatttgtctttgttcacctctcttctttgttggtctatacaactactctggaggtcttgtcataggcatcgtgtcgattgagcagcgatgatgggtaagcatccggagttccaatcaaatttaggtttcccaagcttggtttgacgtcttccttaagatgccaggtgaaacatggccgacatccgagataagacatatgtggcacggtctcgcgatgatcgcagtacggagctagcgatccagtctgacgatcgaaacgcggatgccttgcttctgctgggtctatcagtgcgcctcaagaatcgggatatccatgtcgactatgcaggtggcttaaacactgtcagaatactcgataaaatactgggatggggtattat

SEQ ID NO: 25578 - DNA, 519 bp, Muscodor strobelii
  misc_feature: SGI cDNA ID NO. 568730
  misc_feature: Elevated expression when VOC is produced
  misc_feature: Encodes the peptide sequence at SEQ ID NO 25579
atgaccttcgacttccgcttcggcgccaccgggcccctcatccgcgtgcccgtcgacgagatgatcctcgacaacgtcaaggcctacgtcgacctcggcctggagctgccccctctcgacttcgacaacgtctgcagcctcggcctccaggccctcgacgactactacctgctgggggacaccttcctgcgctccgcctacgtcgtctacgacataagcagtctgagcatcggcatggcccaggccaacctcaacagcacggacagcaacatcgtcgagatcggcacctccggcatccccctcgagaccggcgtcgactctcagacgtccactgccgactcgccctcgggcactgacggcaccagcactggggaccccaccgtcaccgtgaccacggacccgtcagatactggcagtgccggcgtccgcaccgtcccgccgcccagctgggaggcagccagcgtgactttgatcgcagctctcctcggccttgctggtgccactcttttcacattgtag

SEQ ID NO: 25579 - protein, 172 aa, Muscodor strobelii
  misc_feature: SGI Peptide ID NO. 568730
  misc_feature (44)..(82): Pfam Id: PF00026 Pfam Desc: Eukaryotic aspartyl protease
  misc_feature (1)..(172): NCBI GI: 39971095 Blast Desc: MGG_03014 [Magnaporthe grisea 70-15] gi|149210653|ref|XP_001522701.1| MGCH7_ch7g799 [Magnaporthe grisea 70-15] gi|86196754|gb|EAQ71392.1| MGCH7_ch7g799 grisea
  misc_feature (1)..(113): NCBI GI: 85113736 Blast Desc: NCU03168 [Neurospora crassa OR74A] gi|28926361|gb|EAA35338.1| conserved [Neurospora crassa OR74A] gi|38567249|emb|CAE76540.1| related to aspartyl proteinase SAP3
  misc_feature (2)..(110): NCBI GI: 145583131 Blast Desc: aspartic endopeptidase [Hypocrea lixii]
  misc_feature (1)..(172): NCBI GI: 171684437 Blast Desc: protein product [Podospora anserina] gi|170942179|emb|CAP67831.1| protein product [Podospora anserina]
  misc_feature (3)..(172): NCBI GI: 171695874 Blast Desc: protein product [Podospora anserina] gi|170948179|emb|CAP60343.1| protein product [Podospora anserina]
  misc_feature (1)..(94): NCBI GI: 256733571 Blast Desc: NECHADRAFT_91934 [Nectria haematococca mpVI 77-13-4]
  misc_feature (3)..(172): NCBI GI: 85117939 Blast Desc: NCU02956 [Neurospora crassa OR74A] gi|28927151|gb|EAA36107.1| conserved [Neurospora crassa OR74A] gi|38566948|emb|CAE76250.1| related to acid proteinase PEPI
  misc_feature (3)..(170): NCBI GI: 116181454 Blast Desc: CHGG_01355 [Chaetomium globosum CBS 148.51] gi|88185652|gb|EAQ93120.1| CHGG_01355 [Chaetomium globosum CBS 148.51]
  misc_feature (1)..(94): NCBI GI: 156060855 Blast Desc: SS1G_02570 [Sclerotinia sclerotiorum 1980] gi|154699974|gb|EDN99712.1| SS1G_02570 [Sclerotinia sclerotiorum 1980]
  misc_feature (2)..(132): NCBI GI: 242800629 Blast Desc: yapsin, [Talaromyces stipitatus ATCC 10500] gi|218716972|gb|EED16393.1| yapsin, [Talaromyces stipitatus ATCC 10500]
  misc_feature: Useful for introducing or modulating the production of volatile compounds
MTFDFRFGATGPLIRVPVDEMILDNVKAYVDLGLELPPLDFDNVCSLGLQALDDYYLLGDTFLRSAYVVYDISSLSIGMAQANLNSTDSNIVEIGTSGIPLETGVDSQTSTADSPSGTDGTSTGDPTVTVTTDPSDTGSAGVRTVPPPSWEAASVTLIAALLGLAGATLFTL

SEQ ID NO: 25580 - DNA, 3643 bp, Muscodor strobelii; identical to SEQ ID NO: 25577
  misc_feature: SGI EST ID NO. CUFF.60568.1
  misc_feature: Variant of the nucleotide sequence at SEQ ID NO 25578

SEQ ID NO: 25581 - DNA, 1608 bp, Muscodor strobelii
  misc_feature: SGI cDNA ID NO. 568731
  misc_feature: Encodes the peptide sequence at SEQ ID NO 25582
atggtgtaccgacatctcgttggaggttggcgccaggcgcttctgatagcaattcttttgcttggactattattctcaagcttagatgcctcaattgtctcaacgtcgctagtcaccatctcgatagaccttcaggatttcctggatgcaccctgggtcgttctctcgtatctcttagcttaccttggcttggctatcggctttgcgaaaatgagtgatatatacggccgccgagataccatttgcgccgcttgggtgctgttctccgggttttccattggatgtgccactgcaacaactatgccacagctcattgtttgtcgggcttttcagggcatgggagcttccgggctctatagtctcggtcagatagctttgttcgaggtcggtcctgtgcataaaccaagtctcatgggggccttggtcggcctcactctcgccgtatcatatgtcttaggtccagtattaggaggcgtaatctcctcgacgacttcctggagatggattttctggatcaacgtcccctttggttttctcctcgttgctggcctatatctcacttggcctggcggtgttggtcggagactttacggctgggaggcagtccggcgaatcgacttcgtagggaatatcctgattgtatcggcctgcacgctgctcgtctttgctctccaggaagccggtgcttacagctttgcctggaacagtgctgtcatcatcttggccttggtagtttctgtcctcagctggcttggattcgtcgcgtgggagtttcttctcagtctccgaccttacagccgcatcgagccaattttgccgttacggttggtgacaagccgagtgtatgctgcttgtgtcttgtgcacattctgtaccgggtttgtctatctctccatccttgtcatattgcccgagcggttccagattgtcaacggcgacaatgccctcttatcgggcattcacttgcttcccatgcttggagctacttctcttggcgcattctttgctggcgccgtctcgcgccgtcgcaacaacacgtcttggacgctcatggtagctcatgctttgcagctgctcggtattggtttgatggcaaccttgcgcgacaccacgaccgagatcaaggctcaatacggatttcaagtgattcttggcttaggcatcggcctgtctcttggggctgtgaccataatggcgtcagttcagtctcaccaggctgatctcgctgtagcccaaggcgttgttgcgcaggctcgtgtactcggtggaagcattggcatcgcagcatgcactatcctcttcaatgctaaagtcgctcacaacttaaccaatatcatggatccggaagatcttgcagcgctccatcatagtccgactatcgcaacatggctcccacctgaaattcagcagcgtgtcaaattagtgtatgcctcagccttcaccggtgacgtggacgtcatgattgccgtggctatattggggaccatcgcgagctgcattgcatacgaaaaacgaccgcccccgatgcctggtacttcatcggcaaaggaagccttgggtacggagcagagcgagctggagatggatgagtttgctatccatcgctag

SEQ ID NO: 25582 - protein, 535 aa, Muscodor strobelii
  misc_feature: SGI Peptide ID NO. 568731
  misc_feature (19)..(427): Pfam Id: PF07690 Pfam Desc: Major Facilitator Superfamily
  misc_feature (19)..(224): Pfam Id: PF07690 Pfam Desc: Major Facilitator Superfamily
  misc_feature (227)..(427): Pfam Id: PF07690 Pfam Desc: Major Facilitator Superfamily
  misc_feature (4)..(509): NCBI GI: 46128985 Blast Desc: FG08794.1 [Gibberella zeae PH-1]
  misc_feature (9)..(525): NCBI GI: 212536432 Blast Desc: conserved [Penicillium marneffei ATCC 18224] gi|210070771|gb|EEA24861.1| conserved [Penicillium marneffei ATCC 18224]
  misc_feature (21)..(530): NCBI GI: 145236922 Blast Desc: An07g00150 [Aspergillus niger] gi|134075573|emb|CAK39239.1| protein product [Aspergillus niger]
  misc_feature (24)..(529): NCBI GI: 171684429 Blast Desc: protein product [Podospora anserina] gi|170942175|emb|CAP67827.1| protein product [Podospora anserina]
  misc_feature (10)..(528): NCBI GI: 212531315 Blast Desc: conserved [Penicillium marneffei ATCC 18224] gi|210071178|gb|EEA25267.1| conserved [Penicillium marneffei ATCC 18224]
  misc_feature (9)..(506): NCBI GI: 242816096 Blast Desc: MFS multidrug transporter, [Talaromyces stipitatus ATCC 10500] gi|218715041|gb|EED14464.1| MFS multidrug transporter, [Talaromyces stipitatus ATCC 10500]
  misc_feature (121)..(529): NCBI GI: 261353155 Blast Desc: drug resistance transporter [Verticillium albo-atrum VaMs.102]
  misc_feature (1)..(507): NCBI GI: 116207616 Blast Desc: CHGG_03101 [Chaetomium globosum CBS 148.51] gi|88183698|gb|EAQ91166.1| CHGG_03101 [Chaetomium globosum CBS 148.51]
  misc_feature (18)..(506): NCBI GI: 154315844 Blast Desc: BC1G_04494 [Botryotinia fuckeliana B05.10] gi|150846890|gb|EDN22083.1| BC1G_04494 [Botryotinia fuckeliana B05.10]
  misc_feature (7)..(506): NCBI GI: 225556984 Blast Desc: drug resistance transporter EmrB/QacA subfamily [Ajellomyces capsulatus G186AR]
MVYRHLVGGWRQALLIAILLLGLLFSSLDASIVSTSLVTISIDLQDFLDAPWVVLSYLLAYLGLAIGFAKMSDIYGRRDTICAAWVLFSGFSIGCATATTMPQLIVCRAFQGMGASGLYSLGQIALFEVGPVHKPSLMGALVGLTLAVSYVLGPVLGGVISSTTSWRWIFWINVPFGFLLVAGLYLTWPGGVGRRLYGWEAVRRIDFVGNILIVSACTLLVFALQEAGAYSFAWNSAVIILALVVSVLSWLGFVAWEFLLSLRPYSRIEPILPLRLVTSRVYAACVLCTFCTGFVYLSILVILPERFQIVNGDNALLSGIHLLPMLGATSLGAFFAGAVSRRRNNTSWTLMVAHALQLLGIGLMATLRDTTTEIKAQYGFQVILGLGIGLSLGAVTIMASVQSHQADLAVAQGVVAQARVLGGSIGIAACTILFNAKVAHNLTNIMDPEDLAALHHSPTIATWLPPEIQQRVKLVYASAFTGDVDVMIAVAILGTIASCIAYEKRPPPMPGTSSAKEALGTEQSELEMDEFAIHR

SEQ ID NO: 25583 - DNA, 2001 bp, Muscodor strobelii
  misc_feature: SGI EST ID NO. CUFF.60209.0
  misc_feature: Variant of the nucleotide sequence at SEQ ID NO 25581
tctcgatagaccttcaggatttcctggatgcaccctgggtcgttctctcgtatctcttagcttaccttggcttggctatcggctttgcgaaaatgagtgatatatacggccgccgagataccatttgcgccgcttgggtgctgttctccgggttttccattggatgtgccactgcaacaactatgccacagctcattgtttgtcgggcttttcagggcatgggagcttccgggctctatagtctcggtcagatagctttgttcgaggtcggtcctgtgcataaaccaagtctcatgggggccttggtcggcctcactctcgccgtatcatatgtcttaggtccagtattaggaggcgtaatctcctcgacgacttcctggagatggattttctggatcaacgtcccctttggttttctcctcgttgctggcctatatctcacttggcctggcggtgttggtcggagactttacggctgggaggcagtccggcgaatcgacttcgtagggaatatcctgattgtatcggcctgcacgctgctcgtctttgctctccaggaagccggtgcttacagctttgcctggaacagtgctgtcatcatcttggccttggtagtttctgtcctcagctggcttggattcgtcgcgtgggagtttcttctcagtctccgaccttacagccgcatcgagccaattttgccgttacggttggtgacaagccgagtgtatgctgcttgtgtcttgtgcacattctgtaccgggtttgtctatctctccatccttgtcatattgcccgagcggttccagattgtcaacggcgacaatgccctcttatcgggcattcacttgcttcccatgcttggagctacttctcttggcgcattctttgctggcgccgtctcgcgccgtcgcaacaacacgtcttggacgctcatggtagctcatgctttgcagctgctcggtattggtttgatggcaaccttgcgcgacaccacgaccgagatcaaggctcaatacggatttcaagtgattcttggcttaggcatcggcctgtctcttggggctgtgaccataatggcgtcagttcagtctcaccaggctgatctcgctgtagcccaaggcgttgttgcgcaggctcgtgtactcggtggaagcattggcatcgcagcatgcactatcctcttcaatgctaaagtcgctcacaacttaaccaatatcatggatccggaagatcttgcagcgctccatcatagtccgactatcgcaacatggctcccacctgaaattcagcagcgtgtcaaattagtgtatgcctcagccttcaccggtgacgtggacgtcatgattgccgtggctatattggggaccatcgcgagctgcattgcatacgaaaaacgaccgcccccgatgcctggtacttcatcggcaaaggaagccttgggtacggagcagagcgagctggagatggatgagtttgctatccatcgctagactccacgttgtggtaggagaaagaagctatgtatgtgtgctaactaccacctggaggagccaacatcaagctaagtatatctaagtaggcagtgctcccatggctcgcctgaagatttcatgagtttcagggcctatatgttaattgtgcatgtaggggatgtttggcgtacggttgcttctaagccgttgtctttgtttttcaattgtatatctttcatgattcggttcagataagacaccatagtgctatttccaggtagtatacagttgcttaacgaggtgtgcgcagtggacatgaatgcaatacgacaagagtgtaacatagcagacgtcttgacgcacttgtagcaatcaaactggaccctcccatggttgcgatccgttcccgtaccatttgaggctctgtgaaggggaatcttcggatacatacccttatgtggtgatgaatctggatcaccagttcttgggaaactgaacggatactggacaagattatcagatgccaaaa

SEQ ID NO: 25584 - DNA, 684 bp, Muscodor strobelii
  misc_feature: SGI cDNA ID NO. 568732
  misc_feature: Encodes the peptide sequence at SEQ ID NO 25585
atggcagatacacgagatccaattgtgactgctctgcagggctacacatcgtgggttagatgtgacgtttcggatgcgctctgcaaattgaaattcaagaatggcggttttctatctggtctgaccatgtggtcgccgcttcgccagtccggccctaccaagatcgtcggccctgcttacaccgtctcatacgtcccacttgacgacccggccccaaagcttcaaggtcactatattgatactgttccccgaggggccgttatcttcgtctcttgtcccgctagaacacctaacgctgtgtacggtgggcttatgtctacccgcgctcagtatctgggggccgttggttcgataatcgatggtcggttccgtgatctgcaagagcagcgtgagctatcatatcccatatttgcaagggatacgggtacagcgccacctgcggagctcctgaaggtcgcagccgtaaatgtagctgtcaaacttcagacagacgagcaggatatggagattcggcctggtgattatttaattgcagatgtcaacggggtcgtcgtcctaccggttgaactggcagaacaagcattgcccttaatgcagaaacaagtcgaggcggatgacaaaatggcggtggaaatcaagaaaggaatgagtttcgtagaggcaagcaagcaattcagatcttag

SEQ ID NO: 25585 - protein, 227 aa, Muscodor strobelii
  misc_feature: SGI Peptide ID NO. 568732
  misc_feature (20)..(185): Pfam Id: PF03737 Pfam Desc: Demethylmenaquinone methyltransferase
  misc_feature (53)..(185): Pfam Id: PF03737 Pfam Desc: Demethylmenaquinone methyltransferase
  misc_feature (1)..(227): NCBI GI: 39942426 Blast Desc: MGG_03293 [Magnaporthe grisea 70-15] gi|145015701|gb|EDK00191.1| MGG_03293 [Magnaporthe grisea 70-15]
  misc_feature (6)..(226): NCBI GI: 171695850 Blast Desc: protein product [Podospora anserina] gi|170948167|emb|CAP60331.1| protein product [Podospora anserina]
  misc_feature (6)..(226): NCBI GI: 85119329 Blast Desc: NCU02941 [Neurospora crassa OR74A] gi|28927434|gb|EAA36387.1| conserved [Neurospora crassa OR74A]
  misc_feature (2)..(226): NCBI GI: 169768416 Blast Desc: [Aspergillus oryzae RIB40] gi|83766536|dbj|BAE56676.1| protein product [Aspergillus oryzae]
  misc_feature (2)..(226): NCBI GI: 238497722 Blast Desc: conserved [Aspergillus flavus NRRL3357] gi|220693370|gb|EED49715.1| conserved [Aspergillus flavus NRRL3357]
  misc_feature (18)..(226): NCBI GI: 145251630 Blast Desc: An16g00140 [Aspergillus niger] gi|134082864|emb|CAK42694.1| protein product [Aspergillus niger]
  misc_feature (5)..(136): NCBI GI: 116181432 Blast Desc: CHGG_01344 [Chaetomium globosum CBS 148.51] gi|88185641|gb|EAQ93109.1| CHGG_01344 [Chaetomium globosum CBS 148.51]
  misc_feature (8)..(227): NCBI GI: 190345742 Blast Desc: PGUG_01776 [Pichia guilliermondii ATCC 6260]
  misc_feature (4)..(226): NCBI GI: 238481931 Blast Desc: conserved [Aspergillus flavus NRRL3357] gi|220700254|gb|EED56592.1| conserved [Aspergillus flavus NRRL3357]
  misc_feature (8)..(227): NCBI GI: 146420297 Blast Desc: PGUG_01776 [Pichia guilliermondii ATCC 6260]
  misc_feature (54)..(220): SWISSPROT Homolog: EC 4.1.2.43 3-hexulose-6-phosphate synthase
MADTRDPIVTALQGYTSWVRCDVSDALCKLKFKNGGFLSGLTMWSPLRQSGPTKIVGPAYTVSYVPLDDPAPKLQGHYIDTVPRGAVIFVSCPARTPNAVYGGLMSTRAQYLGAVGSIIDGRFRDLQEQRELSYPIFARDTGTAPPAELLKVAAVNVAVKLQTDEQDMEIRPGDYLIADVNGVVVLPVELAEQALPLMQKQVEADDKMAVEIKKGMSFVEASKQFRS

SEQ ID NO: 25586 - DNA, 1249 bp, Muscodor strobelii
  misc_feature: SGI EST ID NO. CUFF.60212.0
  misc_feature: Variant of the nucleotide sequence at SEQ ID NO 25584
aaaaaaaagaagggtaactaggctgcatagaaaagaatttttgccgcaaatttcggctgtcctagtcgagctgatgggattttatgtatgacacgcattttcctggcatgcctcccaatgttggtaacctcggatgcgaaacgtatgagcgattccccacccgatttaatccggtcgacaattacatcactcgactagagggtagtccatccgctcttggagaacaacaaacatacacgggcacaaatttagcaggtcgatcctgttagattcgttagatggcagatacacgagatccaattgtgactgctctgcagggctacacatcatgtgacgtttcggatgcgctctgcaaattgaaattcaagaatggcggttttctatctggtctgaccatgtggtcgccgcttcgccagtccggccctaccaagatcgtcggccctgcttacaccgtctcatacgtcccacttgacgacccggccccaaagcttcaaggtcactatattgatactgttccccgaggggccgttatcttcgtctcttgtcccgctagaacacctaacgctgtgtacggtgggcttatgtctacccgcgctcagtatctgggggccgttggttcgataatcgatggtcggttccgtgatctgcaagagcagcgtgagctatcatatcccatatttgcaagggatacgggtacagcgccacctgcggagctcctgaaggtcgcagccgtaaatgtagctgtcaaacttcagacagacgagcaggatatggagattcggcctggtgattatttaattgcagatgtcaacggggtcgtcgtcctaccggttgaactggcagaacaagcattgcccttaatgcagaaacaagtcgaggcggatgacaaaatggcggtggaaatcaagaaaggaatgagtttcgtagaggcaagcaagcaattcagatcttagcttcccccaatggcaagatcaacaagatagatcgcagtgtacgatcatgtagttcaagttcggcacgggtgtaatattacattctcgaagtctctctcattcttggtaccggaacttcatttgaactacagagtagtcgcagcttcaaagtagactgtcataacaccctgcggtccaccagatatcccgaatgtcttagcttttgccttgagttctgcgtgcgccttgcaatcttcgtcatagtagcgcatttcttcgagattggcgaacctagatatgtcaaaagaatgtaagcc

SEQ ID NO: 25587 - DNA, 339 bp, Muscodor strobelii
  misc_feature: SGI cDNA ID NO. 568733
  misc_feature: Encodes the peptide sequence at SEQ ID NO 25588
atggcaagaatccataggatcaccatgttcaagcttccagataccgaagggcagcaaaaactaattgaagcctatcagcaattagcgaaagaccagcgaaagggagacgacaagccatacattatatccatgacaacgggaaaagtgatggacgacccccggtctcagggatggacagtcgtcaacaaggctgagttcgccaatctcgaagaaatgcgctactatgacgaagattgcaaggcgcacgcagaactcaaggcaaaagctaagacattcgggatatctggtggaccgcagggtgttatgacagtctactttgaagctgcgactactctgtag

SEQ ID NO: 25588 - protein, 112 aa, Muscodor strobelii
  misc_feature: SGI Peptide ID NO. 568733
  misc_feature (4)..(108): Pfam Id: PF07876 Pfam Desc: Stress responsive A/B Barrel Domain
  misc_feature (3)..(107): NCBI GI: 256734010 Blast Desc: NECHADRAFT_77697 [Nectria haematococca mpVI 77-13-4]
  misc_feature (3)..(112): NCBI GI: 39970369 Blast Desc: MGG_02651 [Magnaporthe grisea 70-15] gi|149209791|ref|XP_001522270.1| MGCH7_ch7g378 [Magnaporthe grisea 70-15] gi|86196333|gb|EAQ70971.1| MGCH7_ch7g378 grisea
  misc_feature (3)..(107): NCBI GI: 46128981 Blast Desc: FG08792.1 [Gibberella zeae PH-1]
  misc_feature (2)..(106): NCBI GI: 226286215 Blast Desc: stress responsive A/B barrel domain-containing protein [Paracoccidioides brasiliensis Pb01]
  misc_feature (2)..(107): NCBI GI: 226291678 Blast Desc: stress responsive A/B barrel domain-containing protein [Paracoccidioides brasiliensis Pb18]
  misc_feature (3)..(111): NCBI GI: 46127657 Blast Desc: FG08206.1 [Gibberella zeae PH-1]
  misc_feature (3)..(111): NCBI GI: 154304925 Blast Desc: BC1G_09048 [Botryotinia fuckeliana B05.10] gi|150853910|gb|EDN29102.1| BC1G_09048 [Botryotinia fuckeliana B05.10]
  misc_feature (4)..(111): NCBI GI: 240104701 Blast Desc: CPC735_021960 [Coccidioides posadasii C735 delta SOWgp]
  misc_feature (3)..(98): NCBI GI: 85113714 Blast Desc: NCU03163 [Neurospora crassa OR74A] gi|28926356|gb|EAA35333.1| [Neurospora crassa OR74A]
  misc_feature (4)..(111): NCBI GI: 258577469 Blast Desc: conserved [Uncinocarpus reesii 1704] gi|237903182|gb|EEP77583.1| conserved [Uncinocarpus reesii 1704]
MARIHRITMFKLPDTEGQQKLIEAYQQLAKDQRKGDDKPYIISMTTGKVMDDPRSQGWTVVNKAEFANLEEMRYYDEDCKAHAELKAKAKTFGISGGPQGVMTVYFEAATTL

SEQ ID NO: 25589 - DNA, 315 bp, Muscodor strobelii
  misc_feature: SGI cDNA ID NO. 568734
  misc_feature: Encodes the peptide sequence at SEQ ID NO 25590
atgttcaagcttccagataccgaagggcagcaaaaactaattgaagcctatcagcaattagcgaaagaccagcgaaagggagacgacaagccatacattatatccatgacaacgggaaaagtgatggacgacccccggtctcagggatggacagtcgtcaacaaggctgagttcgccaatctcgaagaaatgcgctactatgacgaagattgcaaggcgcacgcagaactcaaggcaaaagctaagacattcgggatatctggtggaccgcagggtgttatgacagtctactttgaagctgcgactactctgtag

SEQ ID NO: 25590 - protein, 104 aa, Muscodor strobelii
  misc_feature: SGI Peptide ID NO. 568734
  misc_feature (1)..(100): Pfam Id: PF07876 Pfam Desc: Stress responsive A/B Barrel Domain
  misc_feature (1)..(99): NCBI GI: 256734010 Blast Desc: NECHADRAFT_77697 [Nectria haematococca mpVI 77-13-4]
  misc_feature (1)..(98): NCBI GI: 226286215 Blast Desc: stress responsive A/B barrel domain-containing protein [Paracoccidioides brasiliensis Pb01]
  misc_feature (1)..(99): NCBI GI: 226291678 Blast Desc: stress responsive A/B barrel domain-containing protein [Paracoccidioides brasiliensis Pb18]
  misc_feature (1)..(104): NCBI GI: 39970369 Blast Desc: MGG_02651 [Magnaporthe grisea 70-15] gi|149209791|ref|XP_001522270.1| MGCH7_ch7g378 [Magnaporthe grisea 70-15] gi|86196333|gb|EAQ70971.1| MGCH7_ch7g378 grisea
  misc_feature (1)..(99): NCBI GI: 46128981 Blast Desc: FG08792.1 [Gibberella zeae PH-1]
  misc_feature (1)..(103): NCBI GI: 240104701 Blast Desc: CPC735_021960 [Coccidioides posadasii C735 delta SOWgp]
  misc_feature (1)..(103): NCBI GI: 258577469 Blast Desc: conserved [Uncinocarpus reesii 1704] gi|237903182|gb|EEP77583.1| conserved [Uncinocarpus reesii 1704]
  misc_feature (1)..(103): NCBI GI: 46127657 Blast Desc: FG08206.1 [Gibberella zeae PH-1]
  misc_feature (1)..(103): NCBI GI: 154304925 Blast Desc: BC1G_09048 [Botryotinia fuckeliana B05.10] gi|150853910|gb|EDN29102.1| BC1G_09048 [Botryotinia fuckeliana B05.10]
  misc_feature (1)..(90): NCBI GI: 85113714 Blast Desc: NCU03163 [Neurospora crassa OR74A] gi|28926356|gb|EAA35333.1| [Neurospora crassa OR74A]
MFKLPDTEGQQKLIEAYQQLAKDQRKGDDKPYIISMTTGKVMDDPRSQGWTVVNKAEFANLEEMRYYDEDCKAHAELKAKAKTFGISGGPQGVMTVYFEAATTL

SEQ ID NO: 25591 - DNA, 573 bp, Muscodor strobelii
  misc_feature: SGI cDNA ID NO. 568735
  misc_feature: Encodes the peptide sequence at SEQ ID NO 25592
atggcaccaaaccgtggtgcttcgcctattagcactcgagctttgggtacgcaagcactccgaaccctcggcttattccaagccatcatcgcattcccagtagtgctttttctgggcggttgtgcattttactggttgtacgatgattactatagttactatggacggttttactactttttcagtgacttcatcaacgcgcttctaggcgctgggataattttcatcgtgctaatacaacgaaaaacccgcctggacaaagtgaagacgttggtattcgagggtatcaagagtattcttgtgacagcaatgtggctatggttattgttcgatactctgttcggtccatggcaggatggttttcgagacgatacgagagagcgtgctaaggcgacccggcttgcaaggacaggcactgctgttcttattctgttgcttttcttttatccatcggtggcgtacgcgtactaccaatggaaaacatgcgaaggcgatgccgcgaatgaagccgaggccgagtcagagcaacgggaggggcgtgagccagacgagcagagccctttgctggcatga

SEQ ID NO: 25592 - protein, 190 aa, Muscodor strobelii
  misc_feature: SGI Peptide ID NO. 568735
MAPNRGASPISTRALGTQALRTLGLFQAIIAFPVVLFLGGCAFYWLYDDYYSYYGRFYYFFSDFINALLGAGIIFIVLIQRKTRLDKVKTLVFEGIKSILVTAMWLWLLFDTLFGPWQDGFRDDTRERAKATRLARTGTAVLILLLFFYPSVAYAYYQWKTCEGDAANEAEAESEQREGREPDEQSPLLA

SEQ ID NO: 25593 - DNA, 1417 bp, Muscodor strobelii
  misc_feature: SGI EST ID NO. CUFF.60327.0
  misc_feature: Variant of the nucleotide sequence at SEQ ID NO 25591
ctcaatccttatgagacgtctagcgaagtagtttccatagaattcaattacacgcttgatcgcccaactcgacggagatctcaagacataccagtatcccagccaagcaaacaatggcaccaaaccgtggtgcttcgcctattagcactcgagctttgggtacgcaagcactccgaaccctcggcttattccaagccatcatcgcattcccagtagtgctttttctgggcggttgtgcattttactggttgtacgatgattactatagttactatggacggttttactactttttgtacgcaactggtctccgcttatacagttcagtttagcgagctaacacccttgaagcagtgacttcatcaacgcgcttctaggcgctgggataattttcatcgtgctaatacaacgaaaaacccgcctggacaaagtgaagacgttggtattcgagggtatcaagagtattcttgtgacagcaatgtggctatggttattgttcgatactctgttcggtccatggcaggatggttttcgagacgatacgagagagcgtgctaaggcgacccggcttgcaaggacaggcactgctgttcttattctgttgcttttcttttatccatcggtggcgtacgcgtactaccaatggaaaacatgcgaaggcgatgccgcgaatgaagccgaggccgagtcagagcaacgggaggggcgtgagccagacgagcagagccctttgctggcatgagagcaccaaagaaattcgacctgagtggccggaggccgccaggcggtccgagacacacatagtgctcacgcggtcatattatcaaggcattgatatgctctaccttcgcatactctgtgtgagaatctcgcgatagaatacctgcctgttaacgctcgttgaccaatttttccggtgtcctctccctcgaacttcgtatattgtcgacgcagatacggtgccgggcgctttgctccaaggcccaatagtcacactgtgcagcactgatgcatatttgctgtgctccaatgaaaacagttatcgcccttttggggatataatgtcgatagggctcgccaaaatacgggttgcattttggggggatcatggtgtattgtacagctcagaacagtgtccttaggtaaactctggtcctgatataagctcgatccgagtaagcatacggaactagcaaacgcgcacaggcctcatgttctatgagcctcttcgtctcgatagaattgagttctaagtaatgatatgggtttgaatgccaatccaagtagacttaggcacagaaacaagaggcaaattaatactataaatcaaacagtaagcttcagatacattaataataaccagctacaatggggatgtcaaaatggaagagcaaacaatcaagggctagcagccagt

SEQ ID NO: 25594 - DNA, 723 bp, Muscodor strobelii
  misc_feature: SGI cDNA ID NO. 568736
  misc_feature: Elevated expression when VOC is produced
  misc_feature: Encodes the peptide sequence at SEQ ID NO 25595
atgcatctaccgccgcctccagagccttatggggacgatcttgactttcacatcaactcaatttcaacgcatcccacaaccactccgacaataggcttcaacaaccttctcgccgatatcttcggtcctgatatggaagagcaccctcatgatatcatttcgggagagcaccaccatgacatgacgttggacacccggagactgcagtcgcaacacaccacaacgggttaccgtgaaggcattactgcaggcaaggccaaaagcatccaagctggatttgaccaaggcttcgaacttggggcaaatgtcggccttcgggctggtgagatacttggcctccttgagggaattagcgctgctcttgcggagactggtagctctgaagccaccaagcacgcggatcttctcttatccgaagcttccgctgatctcagacctgaaagcatcttcacgtcagaattctgggaaccagacggaacttggaagtttcccatccagtcctcgcgtgaagatggagagctcatctatcaggatgttgctgacaaccaccctctaatactgaaatggcaccggaaagtgtctgatgaggttgagaagtggaatatagacaagaccttaccagttctcgacaaagaggccgacatccaagacggcctggtgcaaataacgacggcgaacaccctcgagtcaagtctaacttctaggaatgctattgactggtga

SEQ ID NO: 25595 - protein, 240 aa, Muscodor strobelii
  misc_feature: SGI Peptide ID NO. 568736
  misc_feature (34)..(240): NCBI GI: 46129244 Blast Desc: FG08807.1 [Gibberella zeae PH-1]
  misc_feature (1)..(225): NCBI GI: 39951849 Blast Desc: MGG_01567 [Magnaporthe grisea 70-15] gi|172044441|sp|A4RK96.1|YAE1_MAGGR RecName: Full=Uncharacterized protein YAE1 gi|145020588|gb|EDK04717.1| MGG_01567 [Magnaporthe
  misc_feature (34)..(212): NCBI GI: 256733659 Blast Desc: NECHADRAFT_35892 [Nectria haematococca mpVI 77-13-4]
  misc_feature (13)..(203): NCBI GI: 156060877 Blast Desc: SS1G_02581 [Sclerotinia sclerotiorum 1980] gi|171704406|sp|A7EB95.1|YAE1_SCLS1 RecName: Full=Uncharacterized protein yae1 gi|154699985|gb|EDN99723.1| SS1G_02581 [Sclerotinia
  misc_feature (9)..(206): NCBI GI: 154322120 Blast Desc: BC1G_01207 [Botryotinia fuckeliana B05.10] gi|172052490|sp|A6RL85.1|YAE1_BOTFB RecName: Full=Uncharacterized protein yae1 gi|150850454|gb|EDN25647.1| BC1G_01207 [Botryotinia
  misc_feature (20)..(218): NCBI GI: 171695868 Blast Desc: protein product [Podospora anserina] gi|170948176|emb|CAP60340.1| protein product [Podospora anserina]
  misc_feature (57)..(203): NCBI GI: 116181440 Blast Desc: CHGG_01348 [Chaetomium globosum CBS 148.51] gi|88185645|gb|EAQ93113.1| CHGG_01348 [Chaetomium globosum CBS 148.51]
  misc_feature (29)..(203): NCBI GI: 189201892 Blast Desc: ABC1 domain containing protein [Pyrenophora tritici-repentis Pt-1C-BFP] gi|187984381|gb|EDU49869.1| ABC1 domain containing protein [Pyrenophora tritici-repentis
  misc_feature (53)..(207): NCBI GI: 85119360 Blast Desc: NCU02949 [Neurospora crassa OR74A] gi|28927442|gb|EAA36395.1| [Neurospora crassa OR74A] gi|38566941|emb|CAE76243.1| [Neurospora crassa]
  misc_feature (2)..(203): NCBI GI: 169595848 Blast Desc: SNOG_00668 [Phaeosphaeria nodorum SN15] gi|121751459|sp|Q0V5P6.1|YAE1_PHANO RecName: Full=Uncharacterized protein YAE1 gi|111071043|gb|EAT92163.1| SNOG_00668 nodorum SN15]
  misc_feature: Useful for introducing or modulating the production of volatile compounds
MHLPPPPEPYGDDLDFHINSISTHPTTTPTIGFNNLLADIFGPDMEEHPHDIISGEHHHDMTLDTRRLQSQHTTTGYREGITAGKAKSIQAGFDQGFELGANVGLRAGEILGLLEGISAALAETGSSEATKHADLLLSEASADLRPESIFTSEFWEPDGTWKFPIQSSREDGELIYQDVADNHPLILKWHRKVSDEVEKWNIDKTLPVLDKEADIQDGLVQITTANTLESSLTSRNAIDW

SEQ ID NO: 25596 - DNA, 2784 bp, Muscodor strobelii
  misc_feature: SGI EST ID NO. CUFF.60228.0
  misc_feature: Variant of the nucleotide sequence at SEQ ID NO 25594
ctgatatgcattgaaatgattgaacgttttaaaccaaagctggaactcttaggaatactatatggaatatttcatgatttcctaggtacgtaagagtgaacggcgtgatctgggcttgtcagtgtaatggaaatattacacttaaatgcactgtgcatggcgcaccgctggactagaaacctccatatctgcatacatctcatctacgtgcacgttctctctgaaagcctcgcaactccgcacgggagacgagaatcatttagtgattaaagatatatcacaaagtttctctacctccatgcgcattgccctgttcatgcatgcgcatcatctccagggatcacacgtaaaattcgtttcccatgcatctaccgccgcctccagagccttatggggacgatcttgactttcacatcaactcaatttcaacgcatcccacaaccactccgacaataggcttcaacaaccttctcgccgatatcttcggtcctgatatggaagagcaccctcatgatatcatttcgggagagcaccaccatgacatgacgttggacacccggagactgcagtcgcaacacaccacaacgggttaccgtgaaggcattactgcaggcaaggccaaaagcatccaagctggatttgaccaaggcttcgaacttggggcaaatgtcggccttcgggctggtgagatacttggcctccttgagggaattagcgctgctcttgcggagactggtagctctgaagccaccaagcacgcggatcttctcttatccgaagcttccgctgatctcagacctgaaagcatcttcacgtcagaattctgggaaccagacggaacttggaagtttcccatccagtcctcgcgtgaagatggagagctcatctatcaggatgttgctgacaaccaccctctaatactgaaatggcaccggaaagtgtctgatgaggttgagaagtggaatatagacaagaccttaccagttctcgacaaagaggccgacatccaagacggcctggtgcaaataacgacggcgaacaccctcgagtcaagtctaacttctaggaatgctattgactggtgaggcatcactagtatcaagatgcatccagtcgtaacgccctgctcgactatgcactaaaccttcttgctacctgtcttggacgatttaacagcgatcacatgaaagtaccaacaagcttgcagcagcgagcagtcgaagtgcccacttgtgtttctccgctcatgcgatggacaacggcccctacatctctctggtcattcgctacgagcactgaagctctatcaaagagctcatgaaaatggagaaatctcgtcaaaattgtactagggcgtaggatcttcacggtcgtcgtgacaatgacaagccctcgtgtcaaatggcgggtaattttttgttgggatcaacgaatgaagtcgaggcctttgtgccttatataccacgtgcatttggatagtatctatcgatcgcaacccatactatagttgcatctgaaatactatgaaaatcatcgcggagctcggcacactgaacccaactcatatgaatcgtcaatcactcttctgtcctcgcacaattcacctggctcaaggctttggagctcgaaaatgattatcatcatcaacttcgtattcccaaattcttagagtgagcaacctacgatggggtaaataaaagactagagccttgtgctaagacaaccatagggagacaccacaacccagattcatagccattccgactcaacgctagtatatataataggaaccttgcattgcggagtgttggcggcgctggctatcgaaaattacaggttttacatcaacttgcgtcggtttctgacaccctatcgggtgggattgctatggagtcctgccttccatctgttgtcatcaaactggccctccaatcctactggagcccagtccactttcatggaattttcaactgcccattgcttgattgcgttgaaatctctgcatgaatgcttccccacgccagcggccgttacgctatatcatactcagcaacaactcacagtggctagatatgatctcggatacactagtttaaaccaagtaggaaattttgatattgaatacttactggttcgtgtccgaaacatactcccacgaatgcggcgtgatgtcagatccgcacatgagagcctcacgtagggcctcaacacaatgatctatttatgtcaatcaggcggcttccagcagcagtttaggtcataaggttttggcctagatatagggaaaccaaccctggtgcatagcagccatctcgcgtgaaacgttgtaccgctcctctactgtaccataatattccggccagatcatcttgcgcagttcgtctctaattttagataggccgatgtcagagcacactcgagatgcccacaccatagtgtacgacttacagacaatggagcgaatggaaaacctcgacagtgacgacgtattggccaggatcatctataatctcagctgtaggcgtgtcgagatgctgtgcctcgctcttgggaatactattgagaaagctatactatttttcatcaaattttgtcagtcttgtgtatcatccatatttaccgagtctctcgaaccatgttcgtctggatctgaataaaaagatttcctggggagtgaccattttcaggaccgcaaggatatattggagacatacagactgcctccaagcacgactggtagccggaaacgtctcacgttagttatttttcacgactttcccctgc

SEQ ID NO: 25597 - DNA, 519 bp, Muscodor strobelii
  misc_feature: SGI cDNA ID NO. 568737
  misc_feature: Encodes the peptide sequence at SEQ ID NO 25598
atgcactatcaactttcttcgctcctatttttcgccttatgcgtctctgccatgcccgcgcctggggccggcaagagcatggctcgacaccccgctacacaagatgaagataactacggattcattgtgggtggcgggaaagacaaggtcaaaacccgtcatcctgacaatcagaatgaagacaattacggattcattgtcggaggtgggcgtcgcctcaaaactcgcaatccccacagtcaaaccgaggataactatggttttattgtcggcggcggtgacgacaaggttaaacctcgtcaccctgataaccaaaacgaagacacttacggattcattgtcggtggtgggcgtcgtcttcaagtccgcagccctcatccccagaccgaagacaattatgggttcatcgtgggtggtggcgatgataagctaaagtcccgtgaccctggctccgctaacgaggatgcgtatggcttcattgttgggtgcaaacgaagccctgatggaagctgcgagtaa

SEQ ID NO: 25598 - protein, 172 aa, Muscodor strobelii
  misc_feature: SGI Peptide ID NO. 568737
MHYQLSSLLFFALCVSAMPAPGAGKSMARHPATQDEDNYGFIVGGGKDKVKTRHPDNQNEDNYGFIVGGGRRLKTRNPHSQTEDNYGFIVGGGDDKVKPRHPDNQNEDTYGFIVGGGRRLQVRSPHPQTEDNYGFIVGGGDDKLKSRDPGSANEDAYGFIVGCKRSPDGSCE

SEQ ID NO: 25599 - DNA, 438 bp, Muscodor strobelii
  misc_feature: SGI EST ID NO. CUFF.60231.0
  misc_feature: Variant of the nucleotide sequence at SEQ ID NO 25597
caagccatcaggtcaggaaaaagactggttgactgaagtagtaccaatgatctagaaagcgcgagaacatctcacagtctcaccactgttgtaagactaaatgaagttgttcgtgttcaattatctcgatatgccagagggttattcattgtaagtaaaaggacttaagtagttctcacgctattttgcgggcaagctaggaagggcttcatttaagcctacaagaggcagtgaattcgtgcacaagagatggtcctatgcgccaagtccatggttataaaaacgacactttaccctcgctctatttgaagatagtagaacaagaacatacaatcaaacactacgaccccatcgatcaactgcctcgagactttacgcactcttgaaccatgcactatcaactttcttcgctcctatttttcgccttatgcgtctctg

SEQ ID NO: 25600 - DNA, 480 bp, Muscodor strobelii
  misc_feature: SGI cDNA ID NO. 568738
  misc_feature: Encodes the peptide sequence at SEQ ID NO 25601
gcccctccgccgccctccaagcccgtcatcgcccgcgccagggccctgtacaagtacaccgccgccgacgaccgcgacctgtccttcgagcgcgacgacagggtcgccgtccacgagtacatgaatgccgactggtggatgggccgcaacgagaggaccggcgccgagggcatcttccccaagaactacgtccacgtcgacggccccagcgagaaggccgacttctacgccccgcagcagcccacctacgcctcgcccgccccgaccaacggaggctacccgcccccgcccaagcagcagaacccctacaacgcccacgtcccgcccatggccgtcgcccaggccggcgagggctcgtctggcggttcgggaagcaaagtgggcgagcacggcaagaagttcggcaagaagctcgggaatgcggccgtcttcggcgccggtgccacgctcggtggcaagattgtgaacagcatcttctga

SEQ ID NO: 25601 - protein, 159 aa, Muscodor strobelii
  misc_feature: SGI Peptide ID NO. 568738
  misc_feature (11)..(67): Pfam Id: PF00018 Pfam Desc: SH3 domain
  misc_feature (12)..(67): Pfam Id: PF07653 Pfam Desc: Variant SH3 domain
  misc_feature (7)..(159): NCBI GI: 256734201 Blast Desc: NECHADRAFT_67619 [Nectria haematococca mpVI 77-13-4]
  misc_feature (7)..(159): NCBI GI: 46129330 Blast Desc: FG08850.1 [Gibberella zeae PH-1]
  misc_feature (2)..(159): NCBI GI: 171684475 Blast Desc: protein product [Podospora anserina] gi|170942198|emb|CAP67850.1| protein product [Podospora anserina]
  misc_feature (4)..(159): NCBI GI: 156055916 Blast Desc: SS1G_05310 [Sclerotinia sclerotiorum 1980] gi|154703094|gb|EDO02833.1| SS1G_05310 [Sclerotinia sclerotiorum 1980]
  misc_feature (4)..(159): NCBI GI: 154302330 Blast Desc: BC1G_09949 [Botryotinia fuckeliana B05.10] gi|150855437|gb|EDN30629.1| BC1G_09949 [Botryotinia fuckeliana B05.10]
  misc_feature (6)..(113): NCBI GI: 261352158 Blast Desc: conserved [Verticillium albo-atrum VaMs.102]
  misc_feature (7)..(159): NCBI GI: 116193305 Blast Desc: CHGG_06370 [Chaetomium globosum CBS 148.51] gi|88182283|gb|EAQ89751.1| CHGG_06370 [Chaetomium globosum CBS 148.51]
  misc_feature (6)..(159): NCBI GI: 39970737 Blast Desc: MGG_02835 [Magnaporthe grisea 70-15] gi|145017350|gb|EDK01713.1| MGG_02835 [Magnaporthe grisea 70-15]
  misc_feature (1)..(159): NCBI GI: 259486059 Blast Desc: TPA: SH3 domain protein (AFU_orthologue; AFUA_3G08620) [Aspergillus nidulans FGSC A4]
  misc_feature (1)..(159): NCBI GI: 67525075 Blast Desc: AN2995.2 [Aspergillus nidulans FGSC A4] gi|40744390|gb|EAA63566.1| AN2995.2 [Aspergillus nidulans FGSC A4]
APPPPSKPVIARARALYKYTAADDRDLSFERDDRVAVHEYMNADWWMGRNERTGAEGIFPKNYVHVDGPSEKADFYAPQQPTYASPAPTNGGYPPPPKQQNPYNAHVPPMAVAQAGEGSSGGSGSKVGEHGKKFGKKLGNAAVFGAGATLGGKIVNSIF

SEQ ID NO: 25602 - DNA, 926 bp, Muscodor strobelii
  misc_feature: SGI EST ID NO. CUFF.60246.0
  misc_feature: Variant of the nucleotide sequence at SEQ ID NO 25600
cggcccctccgccgccctccaagcccgtcatcgcccgcgccagggccctgtacaagtacaccgccgccgacgaccgcgacctgtccttcgagcgcgacgacagggtcgccgtccacgagtacatgaatgccgactggtggatgggccgcaacgagaggaccggcgccgagggcatcttccccaagaactacgtccacgtcgacggccccagcgagaaggccgacttctacgccccgcagcagcccacctacgcctcgcccgccccgaccaacggaggctacccgcccccgcccaagcagcagaacccctacaacgcccacgtcccgcccatggccgtcgcccaggccggcgagggctcgtctggcggttcgggaagcaaagtgggcgagcacggcaagaagttcggcaagaagctcgggaatgcggccgtcttcggcgccggtgccacgctcggtggcaagattgtgaacagcatcttctgagcggtatgggactatagggttttttttattttttaaacacgtttcgggcttggttgggaagtgcattagactgttgtggtttatcatgagatgatgcggtccggaacagagaccgacggcatggatgtctgcttgcaaagcgcagatcggaagaaggactgcaatttgttcatcgtcacgcgaggctcattatatttatttgtcatcacttatttcggctgcacgatgtcgcaaattacaatgcaaagattgtgtattttcacaagctctgctgtcttgatgattccactaaaccgatatgccggttgattgcactatgggacagctgcagtggcgattacttcttacgcattgaacagggtgaagctcatgattgtgtgggctttatagaagtgattgagcccctaaactagcacatccgaccacaggatcaagaaaactcgg

SEQ ID NO: 25603 - DNA, 801 bp, Muscodor strobelii
  misc_feature: SGI cDNA ID NO. 568739
  misc_feature: Encodes the peptide sequence at SEQ ID NO 25604
atgctaggacgtgccgggcgtccgcagttcgacaaaagcgctaatgcgattatcataacgcgaaagagccaagttcgacaatataagcgcctagttgcaggcgaagaattgtttgaaagcactctgcatctgaatttgattaagcatatcaactcggaaatcggacttggcacgattcaagatatacaaacggctaagaaatggatcagtggcacgtttttgaatgtgcgcatacgccaatctccatcgtcgtacgaacttaataagtcatttcgatctggttcctatgagccggtcaccataacgttacaagtgtgtctaagtcacagcaactcgcaggcagtacctcagtgggatggcagagccccagggctgaccttgattgccgttactaatgatgaccgcttggcatatttctggcgtggaaacatgcaaaagatcaacggtttaactggcttgaatatcagatccttcgttaccctcacagcaccaaatcagacgatcacctgccagttcagttgtgaagagattgtgggtactcaggtttcgaagaccgtagagccgagcctcgggacttatttttacaaagatccaattccaccgagtggcctcagcaataatacccaggtcgaggaagagggctatgaggaaattcctgacgaagtcatgcttgaagcgttgagtctgagaaatgatcgacatcagcaatgtctacaagaacctctaggcgacgtctttgaagatgaagacttccttttgattgatgatattttaccattcgagccttttatggctgcttaa

SEQ ID NO: 25604 - protein, 266 aa, Muscodor strobelii
  misc_feature: SGI Peptide ID NO. 568739
  misc_feature (1)..(90): NCBI GI: 171682840 Blast Desc: protein product [Podospora anserina] gi|170941379|emb|CAP67029.1| protein product [Podospora anserina]
  misc_feature (1)..(95): NCBI GI: 116192171 Blast Desc: CHGG_05803 [Chaetomium globosum CBS 148.51] gi|88181716|gb|EAQ89184.1| CHGG_05803 [Chaetomium globosum CBS 148.51]
  misc_feature (1)..(89): NCBI GI: 255946984 Blast Desc: Pc22g02150 [Penicillium chrysogenum Wisconsin 54-1255] gi|211591276|emb|CAP97503.1| Pc22g02150 [Penicillium chrysogenum Wisconsin 54-1255]
  misc_feature (1)..(87): NCBI GI: 219963257 Blast Desc: meiotic helicase [Sordaria macrospora]
  misc_feature (1)..(89): NCBI GI: 119472921 Blast Desc: DEAD/DEAH box DNA helicase (Mer3), [Neosartorya fischeri NRRL 181] gi|119406598|gb|EAW16549.1| DEAD/DEAH box DNA helicase (Mer3), [Neosartorya fischeri NRRL 181]
  misc_feature (1)..(87): NCBI GI: 116203115 Blast Desc: CHGG_09442 [Chaetomium globosum CBS 148.51] gi|88177960|gb|EAQ85428.1| CHGG_09442 [Chaetomium globosum CBS 148.51]
  misc_feature (1)..(87): NCBI GI: 226293340 Blast Desc: conserved [Paracoccidioides brasiliensis Pb18]
  misc_feature (1)..(87): NCBI GI: 169607078 Blast Desc: SNOG_06592 [Phaeosphaeria nodorum SN15] gi|160707149|gb|EAT86423.2| SNOG_06592 [Phaeosphaeria nodorum SN15]
  misc_feature (1)..(87): NCBI GI: 225683950 Blast Desc: conserved [Paracoccidioides brasiliensis Pb03]
  misc_feature (1)..(89): NCBI GI: 226278372 Blast Desc: conserved [Paracoccidioides brasiliensis Pb01]
MLGRAGRPQFDKSANAIIITRKSQVRQYKRLVAGEELFESTLHLNLIKHINSEIGLGTIQDIQTAKKWISGTFLNVRIRQSPSSYELNKSFRSGSYEPVTITLQVCLSHSNSQAVPQWDGRAPGLTLIAVTNDDRLAYFWRGNMQKINGLTGLNIRSFVTLTAPNQTITCQFSCEEIVGTQVSKTVEPSLGTYFYKDPIPPSGLSNNTQVEEEGYEEIPDEVMLEALSLRNDRHQQCLQEPLGDVFEDEDFLLIDDILPFEPFMAA

SEQ ID NO: 25605 - DNA, 1336 bp, Muscodor strobelii
  misc_feature: SGI EST ID NO. CUFF.60258.0
  misc_feature: Variant of the nucleotide sequence at SEQ ID NO 25603
ccagggctgaccttgattgccgttactaatgatgaccgcttggcatatttctggcgtggaaacatgcaaaagatcaacggtttaactggcttgaatatcagatccttcgttaccctcacagcaccaaatcagacgatcacctgccagttcagttgtgaagagattgtgggtactcaggtttcgaagaccgtagagccgagcctcgggacttatttttacaaagatccaattccaccgagtggcctcagcaataatacccaggtcgaggaagagggctatgaggaaattcctgacgaagtcatgcttgaagcgttgagtctgagaaatgatcgacatcagcaatgtctacaagaacctctaggcgacgtctttgaagatgaagacttccttttgattgatgatattttaccattcgagccttttatggctgcttaaccccagcgtacaagcacatccaagtcatagctatctgctaataggcatttctacactgatacaccgaataaccttgaatatattgatctaactaacataagcgacgccgaaatcgctccgcattctccaaaggactgtaacccggcaagccgacgactaaagcgaacgcttgtgtatgttgaaggggttcggcgcgattatgcaggctccgttgaaggtagtgagagattgcgtgcgaaggccgcatcgcctccttatgagagaagtctatcttgttataagaggacagctaattaggcacttgatagcgacattgacgacgagatatctgtattttctgacatatctgatgacctcctagacatatcttcgttgtgtcaaaatggcagccatgacgataaggccctgtatcctgaggcaagacacattctaaatcaaatgttggaaaacgaatcggaatctcacctgagctctgtctttatgaatgagccacacggagcacgcaaacgtttgcgactgagtctagattcaacatggccacccggaattcagcatggcgccgacacgcacgctgtctgaaaattcgcgactggtctcctcaaatccaaatacatccttgcaagaggttgaaggtcatggtgctgagagtgtcactacgggatatgaaagaggcagcgatcgacgatgcgcctgtggattgcaaaactcatactgctgtagataacacgggttcagcttttgataactaaacaggctatagagagagaatcaacgtatggcaaggcaccgggagagcgggcatgtgcggctcaatttgatcctgacttgaacgagagtctcctcgactagtcggctcgaagaggggttgctagagtactggaatgcttctctatttcacgaa

SEQ ID NO: 25606 - DNA, 1101 bp, Muscodor strobelii
  misc_feature: SGI cDNA ID NO. 568740
  misc_feature: Encodes the peptide sequence at SEQ ID NO 25607
atgtggcttctatgcagcctcttcagcgtgttccatcacgagctcgtcgccaacctccttcacagaacaatgcaatctggctggaccaactctcaccactgccctcttgcgagcccagagtcggtcaaagtagccctcgctggcgtggatactctccgcgtggatcgatcttattgtcatccccatcttctaccggtaaaaaagacaacagacttgcctacttcctccgcagcggcccagaatcgccagcttggtcttgaccaggtccccgatttatcaccaaccatcaatgacacccgccttatcaatccccgcgacgccctgcctggcgaagtacataccatttttctatactccttcttcaacgccattcaatcaaagtgcttccgcctaatttttggcacggatgacaatgttgtcgtttctgctcctacaggctcaggcaaaacagtattactcgagatggccatctgcaagcttgtagtgggccaaagtacaggaaactccaaaatcaagttcgcccatgtggggctccaatgtgttgacctaaccaaagacacgtcccataccgaagctcgacgtatcggagccgcatcgattatcgtgactactcctaagaagtgggattcggtcacaaggaaatggaaaaatcatagtaagctcttcgaactaatacgtcttgttcttatcgacgtagtccatatcgtggcaaacgcccggggtacaaccctcgaagccgtcgtgtctcgcttgaaggctctcggaacaaacattcgttttatcgctcttagcgcaacaattctcaacattaaaaatgtggctcgatggctgggtctcagccataagacaccagaggagcctgcaagatttaaagcttttggagaacaatctcgtcccgtcaagctaaaaagatacgtatacggctacgacattgcgcgcaacaacgactttctcttcgaacaggggctagataaagagctgactcttctgcttgcaaaacattccgagaaaaagcccatcattggtcttctgcatgacgcgaaagtcgtgcgagcgcacagctcgatttctcgcccagtggtagtcgacttgcccaactaa

SEQ ID NO: 25607 - protein, 366 aa, Muscodor strobelii
  misc_feature: SGI Peptide ID NO. 568740
  misc_feature (122)..(273): Pfam Id: PF00270 Pfam Desc: DEAD/DEAH box helicase
  misc_feature (122)..(161): Pfam Id: PF00270 Pfam Desc: DEAD/DEAH box helicase
  misc_feature (91)..(341): NCBI GI: 219963257 Blast Desc: meiotic helicase [Sordaria macrospora]
  misc_feature (93)..(366): NCBI GI: 171682840 Blast Desc: protein product [Podospora anserina] gi|170941379|emb|CAP67029.1| protein product [Podospora anserina]
  misc_feature (93)..(366): NCBI GI: 116203115 Blast Desc: CHGG_09442 [Chaetomium globosum CBS 148.51] gi|88177960|gb|EAQ85428.1| CHGG_09442 [Chaetomium globosum CBS 148.51]
  misc_feature (94)..(341): NCBI GI: 156042175 Blast Desc: SS1G_11638 [Sclerotinia sclerotiorum 1980] gi|154696021|gb|EDN95759.1| SS1G_11638 [Sclerotinia sclerotiorum 1980]
  misc_feature (74)..(341): NCBI GI: 212534272 Blast Desc: DEAD/DEAH box DNA helicase (Mer3), [Penicillium marneffei ATCC 18224] gi|210069691|gb|EEA23781.1| DEAD/DEAH box DNA helicase (Mer3), [Penicillium marneffei ATCC 18224]
  misc_feature (94)..(341): NCBI GI: 189190768 Blast Desc: ATP-dependent DNA helicase MER3 [Pyrenophora tritici-repentis Pt-1C-BFP] gi|187973329|gb|EDU40828.1| ATP-dependent DNA helicase MER3 [Pyrenophora tritici-repentis
  misc_feature (61)..(341): NCBI GI: 238840801 Blast Desc: ATP-dependent DNA helicase MER3 [Microsporum canis CBS 113480]
  misc_feature (70)..(341): NCBI GI: 119194603 Blast Desc: CIMG_01676 [Coccidioides immitis RS]
  misc_feature (131)..(341): NCBI GI: 85096049 Blast Desc: NCU09793 [Neurospora crassa OR74A] gi|28921672|gb|EAA30955.1| NCU09793 [Neurospora crassa OR74A]
  misc_feature (70)..(341): NCBI GI: 240105240 Blast Desc: DEAD/DEAH box helicase family protein [Coccidioides posadasii C735 delta SOWgp]
MWLLCSLFSVFHHELVANLLHRTMQSGWTNSHHCPLASPESVKVALAGVDTLRVDRSYCHPHLLPVKKTTDLPTSSAAAQNRQLGLDQVPDLSPTINDTRLINPRDALPGEVHTIFLYSFFNAIQSKCFRLIFGTDDNVVVSAPTGSGKTVLLEMAICKLVVGQSTGNSKIKFAHVGLQCVDLTKDTSHTEARRIGAASIIVTTPKKWDSVTRKWKNHSKLFELIRLVLIDVVHIVANARGTTLEAVVSRLKALGTNIRFIALSATILNIKNVARWLGLSHKTPEEPARFKAFGEQSRPVKLKRYVYGYDIARNNDFLFEQGLDKELTLLLAKHSEKKPIIGLLHDAKVVRAHSSISRPVVVDLPN

SEQ ID NO: 25608 - DNA, 414 bp, Muscodor strobelii
  misc_feature: SGI cDNA ID NO. 568741
  misc_feature: Encodes the peptide sequence at SEQ ID NO 25609
atgggaaacaacgaggacaagctccgcagcgagctcattaagagcttcttgacccaggcaaaaatctcagatcgcgccaagccctcgatggcagagttcctgtctattgttaccgaatgctccgatcacgactctatggcctacaagattattttcgttagtctctcgtacttccagcagagcaaccgaatctccgacgaggagaagactcacttgctgtttgctggagcttggctcgagaagactcttccccgtggcaatgataagatccaggcgatcgagaataccgccagtgtcaagcacgtagccgtcaatatgtcacagaaatccaatcatgtctcgagcaccgggtaccctcctgcccagaacgaaagagtctttgatagttcgacttacaatcacacccagccttag

SEQ ID NO: 25609 - protein, 137 aa, Muscodor strobelii
  misc_feature: SGI Peptide ID NO. 568741
MGNNEDKLRSELIKSFLTQAKISDRAKPSMAEFLSIVTECSDHDSMAYKIIFVSLSYFQQSNRISDEEKTHLLFAGAWLEKTLPRGNDKIQAIENTASVKHVAVNMSQKSNHVSSTGYPPAQNERVFDSSTYNHTQP

SEQ ID NO: 25610 - DNA, 1251 bp, Muscodor strobelii
  misc_feature: SGI cDNA ID NO. 568742
  misc_feature: Encodes the peptide sequence at SEQ ID NO 25611
atgtgctcacgtattcacagtctggcagcacaaatcagcgagagctgtgaagccatcgccaactatctcgatgagaataacctgccacatccgtcgttcgacgcagatgggccgataaatttaggtctctcccaggaggtggaccgcgcgcgctttacggccattgacgctctgcaggacttgctagatttgctgcaaggaccaatagcttgcatgattcctaattataatgctacaagcttgcaagtcatttcacgccatgatattgctcgtaaagtgcccattcaaggcacagtttcgtttgtcgagcttgctcgagcaacgaacctacatgtcaacgatgtcaggcggatcgtgagatatgctatatgctttcatcgactatttgcggagcctgaagaaggctttgtagcacactctgcgggatcaaagctacttgccactgatggtaccgttcgcgcagggcttgcacaatcattcgatgagttctatcctgctttcgcaagagtatgtgttcaccctagtatacatgaaaaagtcgcttcgacattaaacgctgagcagggatttgcattggcacataatagcaataagaccatgttcgacttcttacgtatgcaacccaccaaagccgatcaatttagcaaggcaatgcgtttttacgccgcaggcgtgcctgggtattcggaatcccatctcgtagaaggctacgactggggctcccttggtacaggaacggtggtcgatgttgggggtgcagatggtcatgtcggtcaaacactaattaacgcgtatgagcaattacatgtagtggttgaagacttgccagatgttgttgcaaaagcagtgccggtgaccacacaccgcatccgttatcagccgcacgatttcttttcgccacagcctatcaagggagcagcagtctacctatttcgatgggtgtttcatgactggccggatcattgggtagtgcgaatcttgcgagcacaggtgcctgcgcttcgtaaagggagccgggtcgtcgtgaatgagagcctgcgacctctgcctgggtctttgccagtcacgctcgagcgaaacattcactttatcgatatgctacttttgacaacgaacaactcgcggctccgttctcaacccgagtggggtgaccttttcaagacggcggatgctcgatttggggacgttttatgtctttctcctccgaatgctgctcttgcaattttggaggtcacctggcatgggaaataa

SEQ ID NO: 25611 - protein, 416 aa, Muscodor strobelii
  misc_feature: SGI Peptide ID NO. 568742
  misc_feature (131)..(387): Pfam Id: PF00891 Pfam Desc: O-methyltransferase
  misc_feature (246)..(387): Pfam Id: PF00891 Pfam Desc: O-methyltransferase
  misc_feature (2)..(415): NCBI GI: 154317924 Blast Desc: BC1G_02945 [Botryotinia fuckeliana B05.10] gi|150843603|gb|EDN18796.1| BC1G_02945 [Botryotinia fuckeliana B05.10]
  misc_feature (3)..(414): NCBI GI: 242800307 Blast Desc: O-methyltransferase, [Talaromyces stipitatus ATCC 10500] gi|218716905|gb|EED16326.1| O-methyltransferase, [Talaromyces stipitatus ATCC 10500]
  misc_feature (3)..(414): NCBI GI: 212534482 Blast Desc: O-methyltransferase, [Penicillium marneffei ATCC 18224] gi|210069796|gb|EEA23886.1| O-methyltransferase, [Penicillium marneffei ATCC 18224]
  misc_feature (5)..(415): NCBI GI: 238507580 Blast Desc: O-methyltransferase, [Aspergillus flavus NRRL3357] gi|220688510|gb|EED44862.1| O-methyltransferase, [Aspergillus flavus NRRL3357]
  misc_feature (2)..(415): NCBI GI: 212545252 Blast Desc: O-methyltransferase, [Penicillium marneffei ATCC 18224] gi|210065749|gb|EEA19843.1| O-methyltransferase, [Penicillium marneffei ATCC 18224]
  misc_feature (3)..(414): NCBI GI: 212536596 Blast Desc: O-methyltransferase, [Penicillium marneffei ATCC 18224] gi|210070853|gb|EEA24943.1| O-methyltransferase, [Penicillium marneffei ATCC 18224]
  misc_feature (2)..(415): NCBI GI: 242813653 Blast Desc: hydroxyindole O-methyltransferase, [Talaromyces stipitatus ATCC 10500] gi|218714548|gb|EED13971.1| hydroxyindole O-methyltransferase, [Talaromyces stipitatus ATCC 10500]
  misc_feature (2)..(413): NCBI GI: 189208266 Blast Desc: sterigmatocystin 8-O-methyltransferase precursor [Pyrenophora tritici-repentis Pt-1C-BFP] gi|187976559|gb|EDU43185.1| sterigmatocystin precursor Pt-1C-BFP]
  misc_feature (4)..(415): NCBI GI: 238841485 Blast Desc: sterigmatocystin 8-O-methyltransferase [Microsporum canis CBS 113480]
  misc_feature (3)..(413): NCBI GI: 169613869 Blast Desc: SNOG_10068 [Phaeosphaeria nodorum SN15] gi|111061283|gb|EAT82403.1| SNOG_10068 [Phaeosphaeria nodorum SN15]
  misc_feature (99)..(393): SWISSPROT Homolog: EC 2.1.1.110 Sterigmatocystin 8-O-methyltransferase
MCSRIHSLAAQISESCEAIANYLDENNLPHPSFDADGPINLGLSQEVDRARFTAIDALQDLLDLLQGPIACMIPNYNATSLQVISRHDIARKVPIQGTVSFVELARATNLHVNDVRRIVRYAICFHRLFAEPEEGFVAHSAGSKLLATDGTVRAGLAQSFDEFYPAFARVCVHPSIHEKVASTLNAEQGFALAHNSNKTMFDFLRMQPTKADQFSKAMRFYAAGVPGYSESHLVEGYDWGSLGTGTVVDVGGADGHVGQTLINAYEQLHVVVEDLPDVVAKAVPVTTHRIRYQPHDFFSPQPIKGAAVYLFRWVFHDWPDHWVVRILRAQVPALRKGSRVVVNESLRPLPGSLPVTLERNIHFIDMLLLTTNNSRLRSQPEWGDLFKTADARFGDVLCLSPPNAALAILEVTWHGK

SEQ ID NO: 25612 - DNA, 1150 bp, Muscodor strobelii
  misc_feature: SGI EST ID NO. CUFF.60280.1
  misc_feature: Variant of the nucleotide sequence at SEQ ID NO 25610
atttcacgccatgatattgctcgtaaagtgcccattcaaggcacagtttcgtttgtcgagcttgctcgagcaacgaacctacatgtcaacgatgtcaggcggatcgtgagatatgctatatgctttcatcgactatttgcggagcctgaagaaggctttgtagcacactctgcgggatcaaagctacttgccactgatggtaccgttcgcgcagggcttgcacaatcattcgatgagttctatcctgctttcgcaagaactgcggatgcactagatagcttcaacgacggcgagcctaatcacactggatttgcattggcacataatagcaataagaccatgttcgacttcttacgtatgcaacccaccaaagccgatcaatttagcaaggcaatgcgtttttacgccgcaggcgtgcctgggtattcggaatcccatctcgtagaaggctacgactggggctcccttggtacaggaacggtggtcgatgttgggggtgcagatggtcatgtcggtcaaacactaattaacgcgtatgagcaattacatgtagtggttgaagacttgccagatgttgttgcaaaagcagtgccggtgaccacacaccgcatccgttatcagccgcacgatttcttttcgccacagcctatcaagggagcagcagtctacctatttcgatgggtgtttcatgactggccggatcattgggtagtgcgaatcttgcgagcacaggtgcctgcgcttcgtaaagggagccgggtcgtcgtgaatgagagcctgcgacctctgcctgggtctttgccagtcacgctcgagcgaaacattcactttatcgatatgctacttttgacaacgaacaactcgcggctccgttctcaacccgagtggggtgaccttttcaagacggcggatgctcgatttggggacgttttatgtctttctcctccgaatgctgctcttgcaattttggaggtcacctggcatgggaaataattcagagtggctgaagtacaagtttgtacaagacatgccaaccgtaggaaacagaaaaaattttcggctgcgttgctatatgtatcgaaagtgttgacactcactgggtttgggaattcttcttacctctctgaagatgaggagaggcctacgcatg

SEQ ID NO: 25613 - DNA, 231 bp, Muscodor strobelii
  misc_feature: SGI cDNA ID NO. 568743
  misc_feature: Encodes the peptide sequence at SEQ ID NO 25614
atgcatttgatgtcaattctcatgctaggtcttctagccagcgcggcgccgctgagctccaatcatgcgatgagccccgacgaggttgatttcgcctccgttggcgacgcttacaaaagaaatatcgaaagccctgatgaggtgaattttgaggaagtgggcgatgcctacaaacgtagttctcagagccctgatgaagttgactttgatgctgtgggtgacgcttactga

SEQ ID NO: 25614 - protein, 76 aa, Muscodor strobelii
  misc_feature: SGI Peptide ID NO. 568743
MHLMSILMLGLLASAAPLSSNHAMSPDEVDFASVGDAYKRNIESPDEVNFEEVGDAYKRSSQSPDEVDFDAVGDAY

SEQ ID NO: 25615 - DNA, 1077 bp, Muscodor strobelii
  misc_feature: SGI cDNA ID NO. 568744
  misc_feature: Elevated expression when VOC is produced
  misc_feature: Encodes the peptide sequence at SEQ ID NO 25616
atgccggcaaatgagaacgagcaagatgaggaccttcgaactagctcacagcctctcatagaaaagccggaagcagttaccacgtcatacttcttacacaaaaagtatcttgctacgactatcagcactgcaatcatactggtcctcatatcgtcatacttttgggcatcacacagcaaggcactcggattgagtctcagtcacattacgtgtcagaaccctgctgtccgtgttgaatggcgaaatctcaaaagccatgagcgtctggagtatcttcgcgcggtcaagtgcttatcgtccgtaccatccactagttgcaacggaagcttgcacgacgaattcgcatacactcaccgcaatgtcggagaatactctcacgaagctgcaccattcttaccatggcatcgatatttcatatatctatacgagagaacgttaaaactacgttgcggatacaaaggagctctgccatactgggattggacgctagactcggatgatctgatccaggccccagtctgggatgcaagcgagggctttggtggcaatggtaacgtgaactcgcccgtcattgtgggcggtggttattgtgtggaagacgggcctttcgcggggttgcaggtccagtactataatggggaatggtccccgcactgcctttcaaggggcttcctgacgggagcattgctggaccattttggagcacaaagactcaacagtaccgccgttgccagagtgttgagtgcacccaactattatgagtttttgttgatgttagaagatggaccgcactcctccgtccccactactgtacgaggagatttcttacgtttcaccgcacctaacgatcccgtcttcttccttcaccatgcacagatcgatcggctctggtggatatggcaaacccgaaatctcgcttcccgggcggcagcttacgatggccctgcaaaaaccaactcgtccgttgctgcgcgactcactgacctaatcgagatggatggccttggcccagacctgccggttagttctgtcatgagtgtcaggtctggcattttgtgttacgaataccaaaactag

SEQ ID NO: 25616 - protein, 358 aa, Muscodor strobelii
  misc_feature: SGI Peptide ID NO. 568744
  misc_feature (45)..(343): Pfam Id: PF00264 Pfam Desc: Common central domain of tyrosinase
  misc_feature (279)..(303): Pfam Id: PF00264 Pfam Desc: Common central domain of tyrosinase
  misc_feature (122)..(162): Pfam Id: PF00264 Pfam Desc: Common central domain of tyrosinase
  misc_feature (60)..(356): NCBI GI: 154311963 Blast Desc: BC1G_06015 [Botryotinia fuckeliana B05.10] gi|150850665|gb|EDN25858.1| BC1G_06015 [Botryotinia fuckeliana B05.10]
  misc_feature (71)..(356): NCBI GI: 169779525 Blast Desc: [Aspergillus oryzae RIB40] gi|238500183|ref|XP_002381326.1| tyrosinase, [Aspergillus flavus NRRL3357] gi|83772966|dbj|BAE63094.1| protein product oryzae]
  misc_feature (71)..(356): NCBI GI: 164422542 Blast Desc: NCU10031 [Neurospora crassa OR74A] gi|157069708|gb|EAA28788.2| conserved [Neurospora crassa OR74A]
  misc_feature (70)..(356): NCBI GI: 116208326 Blast Desc: CHGG_03456 [Chaetomium globosum CBS 148.51] gi|88184053|gb|EAQ91521.1| CHGG_03456 [Chaetomium globosum CBS 148.51]
  misc_feature (73)..(356): NCBI GI: 39969953 Blast Desc: MGG_10585 [Magnaporthe grisea 70-15] gi|145021738|gb|EDK05815.1| MGG_10585 [Magnaporthe grisea 70-15]
  misc_feature (86)..(357): NCBI GI: 242774860 Blast Desc: conserved [Talaromyces stipitatus ATCC 10500] gi|218722146|gb|EED21564.1| conserved [Talaromyces stipitatus ATCC 10500]
  misc_feature (56)..(358): NCBI GI: 46115378 Blast Desc: FG03531.1 [Gibberella zeae PH-1] gi|28202139|gb|AAO34676.1| monooxygenase [Gibberella zeae]
  misc_feature (45)..(358): NCBI GI: 27924026 Blast Desc: monooxygenase [Fusarium sporotrichioides]
  misc_feature (71)..(356): NCBI GI: 46127259 Blast Desc: FG08007.1 [Gibberella zeae PH-1]
  misc_feature (73)..(336): NCBI GI: 149209289 Blast Desc: MGCH7_ch7g137 [Magnaporthe grisea 70-15] gi|86196092|gb|EAQ70730.1| MGCH7_ch7g137 [Magnaporthe grisea 70-15]
  misc_feature (76)..(333): SWISSPROT Homolog: EC 1.14.18.1 Monophenol monooxygenase
  misc_feature: Useful for introducing or modulating the production of volatile compounds
MPANENEQDEDLRTSSQPLIEKPEAVTTSYFLHKKYLATTISTAIILVLISSYFWASHSKALGLSLSHITCQNPAVRVEWRNLKSHERLEYLRAVKCLSSVPSTSCNGSLHDEFAYTHRNVGEYSHEAAPFLPWHRYFIYLYERTLKLRCGYKGALPYWDWTLDSDDLIQAPVWDASEGFGGNGNVNSPVIVGGGYCVEDGPFAGLQVQYYNGEWSPHCLSRGFLTGALLDHFGAQRLNSTAVARVLSAPNYYEFLLMLEDGPHSSVPTTVRGDFLRFTAPNDPVFFLHHAQIDRLWWIWQTRNLASRAAAYDGPAKTNSSVAARLTDLIEMDGLGPDLPVSSVMSVRSGILCYEYQN

SEQ ID NO: 25617 - DNA, 725 bp, Muscodor strobelii
  misc_feature: SGI EST ID NO. CUFF.60297.0
  misc_feature: Variant of the nucleotide sequence at SEQ ID NO 25615
gcggatacaaaggagctctgccgtaagcggactagatttaatttttcttggcaatcagctaatggtttgcagatactgggattggacgctagactcggatgatctgatccaggccccagtctgggatgcaagcgagggctttggtggcaatggtaacgtgaactcgcccgtcattgtgggcggtggttattgtgtggaagacgggcctttcgcggggttgcaggtccagtactataatggggaatggtccccgcactgcctttcaaggggcttcctgacgggagcattgctggaccattttggagcacaaagactcaacagtaccgccgttgccagagtgttgagtgcacccaactattatgagtttttgttgatgttagaagatggaccgcactcctccgtccccactactgtacgaggagatttcttacgtttcaccgcacctaacgatcccgtcttcttccttcaccatgcacagatcgatcggctctggtggatatggcaaacccgaaatctcgcttcccgggcggcagcttacgatggccctgcaaaaaccaactcgtccgttgctgcgcgactcactgacctaatcgagatggatggccttggcccagacctgccggttagttctgtcatgagtgtcaggtctggcattttgtgttacgaataccaaaactagagagaaaggttatgtagtataatacacctactaacatatataaaaa

SEQ ID NO: 25618 - DNA, 1239 bp, Muscodor strobelii
  misc_feature: SGI cDNA ID NO. 568745
  misc_feature: Encodes the peptide sequence at SEQ ID NO 25619
atgcagcgtgattcttttcaattagtgacacccggggttgatctgatctcagcggccgatgtagacatacgctcagatgcagagctcattgaggctcttaggaagcctgtctcagtacgtcacgaacgaaacgtctggtgtttttggaatacgggatgggacgatatgaagccttggactcagcgtaacgttctcggctggattcgtcgtcaaggtccctcttgggacgtccgacttcttgatatggttcctgagtcgactacaaatgtgcggaattttgttccaccagattacctccctgattgcttgaagaatggtaacatggacggcccaacaaaaggccaacacgagagcgatctcgcacggctgcctttgttatatctatacgggggggtctggctggatgtcggttcaattttgtttcgacgattcgatgatatctcttggcgaaatcttgaggactctgcgtcgccctacgaaatgggaatttctttatttcaatcaagaaagtaccctgggcaatgcttgactgggttcatagctgcgcgcaagggaaatccttttattgagcgatggatgcaggtgactttggagctttggaaagggcctgaccgcaccaattgctttgggctccatgaacacccactcatcaaacccttaggcttgtgcgtcccaccagactggcaagaaaacgagaacccacgtacaatcgacatgggaggctctggcgaggctttcgatctcgcaattttgacagattatctagcattcaacatggcttatgagcgagttcggcttcttgtagacgaaagcacgggctggaatggaccagcctactatcgtacccacgtacacttgatcgacacgatcgatgagctgtggaaatcgcatgagatgatgctacaagacgaggtcttcccccttttgtcgcttccctttcaacctgattcctcagacttccagcagaaagccgctgccgactacgtcggatatatcctcgccaactgcagtatcgctaagcatagtcagggtcattggcagcccggaaacaggattcctgtggcgatgtcctggagcatgccagaaaatgaggatgctgatatcaagaagggaacctggtctgagtacatgcgatgggcaagtttgttctgcgaacagactcgcttccggggccaatgtttgcctagtcttgagctcggggaagaaaaggatgagctaataagagggagtttgttgtga

SEQ ID NO: 25619 - protein, 412 aa, Muscodor strobelii
  misc_feature: SGI Peptide ID NO. 568745
  misc_feature (9)..(389): NCBI GI: 242804552 Blast Desc: capsule polysaccharide biosynthesis protein, [Talaromyces stipitatus ATCC 10500] gi|218717743|gb|EED17164.1| capsule polysaccharide biosynthesis protein, [Talaromyces ATCC
  misc_feature (11)..(389): NCBI GI: 212539426 Blast Desc: conserved [Penicillium marneffei ATCC 18224] gi|210067167|gb|EEA21259.1| conserved [Penicillium marneffei ATCC 18224]
  misc_feature (25)..(388): NCBI GI: 121701753 Blast Desc: conserved [Aspergillus clavatus NRRL 1] gi|119397284|gb|EAW07715.1| conserved [Aspergillus clavatus NRRL 1]
  misc_feature (19)..(388): NCBI GI: 70985642 Blast Desc: capsule polysaccharide biosynthesis protein [Aspergillus fumigatus Af293] gi|66845955|gb|EAL86289.1| capsule polysaccharide biosynthesis protein, [Aspergillus fumigatus
  misc_feature (22)..(412): NCBI GI: 212538985 Blast Desc: capsule polysaccharide biosynthesis protein, [Penicillium marneffei ATCC 18224] gi|210069390|gb|EEA23481.1| capsule polysaccharide biosynthesis protein, [Penicillium ATCC
  misc_feature (15)..(388): NCBI GI: 67538582 Blast Desc: AN5461.2 [Aspergillus nidulans FGSC A4] gi|40743431|gb|EAA62621.1| [Aspergillus nidulans FGSC A4] gi|259485092|tpe|CBF81870.1| TPA: capsule polysaccharide protein,
  misc_feature (12)..(410): NCBI GI: 46127047 Blast Desc: FG07901.1 [Gibberella zeae PH-1]
  misc_feature (13)..(411): NCBI GI: 225683101 Blast Desc: conserved [Paracoccidioides brasiliensis Pb03]
  misc_feature (16)..(294): NCBI GI: 240104775 Blast Desc: CPC735_019980 [Coccidioides posadasii C735 delta SOWgp]
  misc_feature (1)..(411): NCBI GI: 255952538 Blast Desc: Pc17g00710 [Penicillium chrysogenum Wisconsin 54-1255] gi|211586525|emb|CAP79358.1| Pc17g00710 [Penicillium chrysogenum Wisconsin 54-1255]
MQRDSFQLVTPGVDLISAADVDIRSDAELIEALRKPVSVRHERNVWCFWNTGWDDMKPWTQRNVLGWIRRQGPSWDVRLLDMVPESTTNVRNFVPPDYLPDCLKNGNMDGPTKGQHESDLARLPLLYLYGGVWLDVGSILFRRFDDISWRNLEDSASPYEMGISLFQSRKYPGQCLTGFIAARKGNPFIERWMQVTLELWKGPDRTNCFGLHEHPLIKPLGLCVPPDWQENENPRTIDMGGSGEAFDLAILTDYLAFNMAYERVRLLVDESTGWNGPAYYRTHVHLIDTIDELWKSHEMMLQDEVFPLLSLPFQPDSSDFQQKAAADYVGYILANCSIAKHSQGHWQPGNRIPVAMSWSMPENEDADIKKGTWSEYMRWASLFCEQTRFRGQCLPSLELGEEKDELIRGSLL

SEQ ID NO: 25620 - DNA, 712 bp, Muscodor strobelii
  misc_feature: SGI EST ID NO. CUFF.60312.0
  misc_feature: Variant of the nucleotide sequence at SEQ ID NO 25618
gcgaggctttcgatctcgcaattttgacagattatctagcattcaacatggcttatgagcgagttcggcttcttgtagacgaaagcacgggctggaatggaccagcctactatcgtacccacgtacacttgatcgacacgatcgatgagctgtggaaatcgcatgagatgatgctacaagacgaggtcttcccccttttgtcgcttccctttcaacctgattcctcagacttccagcagaaagccgctgccgactacgtcggatatatcctcgccaactgcagtatcgctaagcatagtcagggtcattggcagcccggaaacaggattcctgtggcgatgtcctggagcatgccagaaaatgaggatgctgatatcaagaagggaacctggtctgagtacatgcgatgggcaagtttgttctgcgaacagactcgcttccggggccaatgtttgcctagtcttgagctcggggaagaaaaggatgagctaataagagggagtttgttgtgaacagttacagaagatgctctcatgagttagcgctcatggagcgaatcaagctccctaaatccgagcaatgctcttattctttattctactctgcaaatatccgttactctacggtattacgcgcagattcgaattataattagcatccatgtagttttgcgtgggaaccccatgatgtatgcattcacgttctgaacaag

SEQ ID NO: 25621 - DNA, 901 bp, Muscodor strobelii
  misc_feature: SGI cDNA ID NO. 568746
  misc_feature: Encodes the peptide sequence at SEQ ID NO 25622
atgaagcctacgggagtactcatggtcggcagcctccccgggaattctgcaacagaggttttcactcgcttggtcgctgcccttccatcgcgcttacaagctattccagatggcgaaacaggggcaagatggaactacatcgcatggcaagtagcatgctttcctcgtctggcgcgacgggccgagacaggaggaattccacttgatgcagtcaaaaccccttcgtttaccctagacgatatcaagtcgacgggctacgacgacgcagcattatcatcttacattgagttccaacaactacggacacaaaacattataccttcgagcgttcgctttcagattagcttgccttcaccgtacagcgtgataaccggacacgtaaagccagaggtggctatcctaatcgaaacattttatgaggaacgttttgcggaagcgataagtcgtatcatgcagattcctcacgaagatatggtgatacagtgggatctttgtttcgaggttactgcactcgagtttgaacgaggacgagttcacgatacatggcatcaatgctacttttcgccgccccacggccaaagcgtgctgcagggccttgtggagcgcattgttcgcatctgcaagcacattcctgatgatgttaaattggcgtttcatttttgctacggagaccttggacaccgccacttcgttgaacctcaagacacttcgcttgtggtcgaattcgccaatgtgttgctcgccagtgacagcatcagctcgcggacagaatggattcacttgccggtcccgaaggatcgtattgatgcaacgtacttcaaacctctgacttttcttcagggttccggtctaccaccaccccaagtgtaccttggattagtgcatgcgaatgatgaagctg

SEQ ID NO: 25622 - protein, 300 aa, Muscodor strobelii
  misc_feature: SGI Peptide ID NO. 568746
  misc_feature (3)..(299): NCBI GI: 145237842 Blast Desc: An07g04850 [Aspergillus niger] gi|134076045|emb|CAK39404.1| protein product [Aspergillus niger]
  misc_feature (3)..(299): NCBI GI: 169782772 Blast Desc: [Aspergillus oryzae RIB40] gi|238492417|ref|XP_002377445.1| conserved [Aspergillus flavus NRRL3357] gi|83774592|dbj|BAE64715.1| protein product oryzae]
  misc_feature (3)..(298): NCBI GI: 269837873 Blast Desc: Sthe_1846 [Sphaerobacter thermophilus DSM 20745] gi|269787136|gb|ACZ39279.1| conserved [Sphaerobacter thermophilus DSM 20745]
  misc_feature (3)..(298): NCBI GI: 154298904 Blast Desc: BC1G_11699 [Botryotinia fuckeliana B05.10] gi|150857604|gb|EDN32796.1| BC1G_11699 [Botryotinia fuckeliana B05.10]
  misc_feature (3)..(298): NCBI GI: 22417097 Blast Desc: [Sphingobium chlorophenolicum L-1]
  misc_feature (1)..(300): NCBI GI: 257068281 Blast Desc: Bfae_10980 [Brachybacterium faecium DSM 4810] gi|256559099|gb|ACU84946.1| Bfae_10980 [Brachybacterium faecium DSM 4810]
  misc_feature (2)..(161): NCBI GI: 169781340 Blast Desc: [Aspergillus oryzae RIB40] gi|83773875|dbj|BAE64000.1| protein product [Aspergillus oryzae]
  misc_feature (2)..(161): NCBI GI: 238501190 Blast Desc: conserved [Aspergillus flavus NRRL3357] gi|220692066|gb|EED48413.1| conserved [Aspergillus flavus NRRL3357]
  misc_feature (32)..(300): NCBI GI: 134098299 Blast Desc: SACE_1717 [Saccharopolyspora erythraea NRRL 2338] gi|133910922|emb|CAM01035.1| [Saccharopolyspora erythraea NRRL 2338]
  misc_feature (5)..(172): NCBI GI: 156064075 Blast Desc: SS1G_00045 [Sclerotinia sclerotiorum 1980] gi|154690907|gb|EDN90645.1| SS1G_00045 [Sclerotinia sclerotiorum 1980]
MKPTGVLMVGSLPGNSATEVFTRLVAALPSRLQAIPDGETGARWNYIAWQVACFPRLARRAETGGIPLDAVKTPSFTLDDIKSTGYDDAALSSYIEFQQLRTQNIIPSSVRFQISLPSPYSVITGHVKPEVAILIETFYEERFAEAISRIMQIPHEDMVIQWDLCFEVTALEFERGRVHDTWHQCYFSPPHGQSVLQGLVERIVRICKHIPDDVKLAFHFCYGDLGHRHFVEPQDTSLVVEFANVLLASDSISSRTEWIHLPVPKDRIDATYFKPLTFLQGSGLPPPQVYLGLVHANDEA

SEQ ID NO: 25623 - DNA, 279 bp, Muscodor strobelii
  misc_feature: SGI EST ID NO. CUFF.60318.0
  misc_feature: Variant of the nucleotide sequence at SEQ ID NO 25621
cggacacgtaaagccagaggtggctatcctaatcgaaacattttatgaggaacgttttgcggaagcgataagtcgtatcatgcagattcctcacgaagatatggtgatacagtgggatctttgtttcgaggttactgcactcgagtttgaacgaggacgagttcacgatacatggcatcaatgctacttttcgccgccccacggccaaagcgtgctgcagggccttgtggagcgcattgttcgcatctgcaagcacattcctgatgatgttaaattggc

SEQ ID NO: 25624 - DNA, 4810 bp, Muscodor strobelii
  misc_feature: SGI cDNA ID NO. 568747
  misc_feature: Reduced expression when VOC is produced
  misc_feature: Encodes the peptide sequence at SEQ ID NO 25625
atggactatggaaagctgagagctgctgctctccgagacggcgaggatgaagaagcagtcactgtcgatacccgcgccctcatcgacaaggtcctcgcacgatattcgggagaatggactacgcttcgagagctcattcaaaatgctgccgacgcccaagccaccactgtcaagatcaaatgggagacattgccttcgaccaatgtctccctcccctcctccaccgacctatctgagatcctgaagcacaccatatcccaccacactctgcgtcgcctggtcgtccagaacaatggccagcccttcgccaagaccgattggcacaggctgaagaggatcgccgagggcaacccggacgagaccaagatcggtgcttttggtgttggcttctacagtgtcttcgccgactgcgaggagcccttcgtcagctccggagacgaagctatggcattctactggaagggcaatgccctcttcaccagaaagctccagctaccactcgaccagcgcactcccgataccacctttgttctcgattaccggaactctaccacgactctacccaacctgctttctgtcagccagttcttggccacaagtctgacattcgttgcattggagaacatagagttctggatagacgactacaaagtgttggcattgcacaaaaaggccagcccaagtgtagatgtcgccatatccagagatatagaaacgacgaccaaggaacggctgatgaaggttcaaagcgtagaacgctccagtgcccagatcgatgcttccttcatgagtgccgtcggatggaagcctcaggtcgccgtctctaagatggagacatacggccttgctacttcagagatgccatctctgcgtagtttcttctctagactaacttcaacgaattccaaggcggccaaggctgtgaaagaggagcgggccatccaggaagtcatctctgaagacattaccgccttatcgacgtcgagtatctctcttcgagttagcaccgctgctctcaagacgtctgtcactggccagtttgcatctgagctagaaagagccaccaagaaacctcctccaaaggtcactaagctttccattctgacctctacctttgatgatgcggaagcagcctcaaagaagtcacagagctccagcaatgtcacatcagccaccgatatcttcgcttctgttctccccagcaaaaaaggtggacgtgtgtttattgggttcccaactgcccaaacgaccggtgctggcatgcatatttctgcgccctctgttatcccgaccgtagagcgtgaggccatcgatctcaatgcccgatggataaggacttggaacatggaaatgctccgagccgcaggtatcatatcgcggctagcattctcccacgagatgacagagcttcaggcaaagctgcagaaggctgcagatacagcggggacgaaaatcacctccaaggagactgccgagttcatgtctgaagctttatttgtgctgaactcatttacttttggtgattccacacctagcgggcatgtttcccaaatcatcgaggaaacattttggacttgctataaactcccctttgtagacatatatagcacacgcggtgtacttccgacaacccaagtccggctaggctccgaagagctctccaagtttgtggatggaattcctgtagttcctaaagagctggagacgaccgtctttgttaaaaagttgagagacttcgatttgttgtctcaaatcaccacggacgatatacgacgggagctatcgggcaaaccactgactgaagaccaacttgtcaacttcatcctctgggctggcaaaacagcagtaaagggcgagcttgatgcggctactcgcgatagacttctcgacgtcgctgttgccatagtcaacaaggccggtggccagaatcagggcgacattattgctctcggcagcatctggtatttcgtgacgacgcagaagtaccccttaggcgtgccaattcctccagaggcaataccatttgaatacaccaagagttgtccactcaacgatttacaagcgcttggctgggtccaattggacttcttaccgtgggtccgatttctcatggaaacacggtatcaagacatgaccaaatcacccgaatttgcaagcaaaattctttctgtcctgtcaaaaggctgggacaacacaagccaaaacaacaaggccacaattgcgctcttgttacaggcgcaaacgacaatgcccactaaggctgggatgagaaagccacaggaatcattcttcccgtccgtgaagttatttgacgatctccccatcatcgattgtccgcagttgaaagaaaagtttctggtcgcattaggtgtcagaaagacgctggatcttgacacaattttcaagcgtcttttaagccctccatctgagaaagaaggcgctgcaccggcaagatggagccatgtagagctcatcaagtatttagcgtcggtccgtaacgatattccaaatgaagacctcaagaagctgagagattctcgcatctgccctgccgaagccggggcgtttggtatgcaggcaagcactcagctttacaaagtttctgagctcttcgagcctaatcggcttctacggggtcttcaactcaagatgcttcagtggcctggcgggactttgaatcgtgggtctcacgaggggagatttttgagcatccttggtctgcgtgtgcatccctctgcgcccgagctggtagaaatgatgtgctctccagacgagagcctccgtaatagtgcgatgtcgtattacgtgacttactacagcactaacggatacgcaagctttcatatgggagcttgcactcgagcgttcctccctctccaaaaaaatccaaagaagcttgtgtcgccatctgaatgttttgtcaacgaagctgctgccgttcttggattcgacatcctgaagaaggaactccatggggatgcacagaaattcggcgtagccagagatccaccgatccgagactgtgtccaggtcctcatcaaaaatcctcccaattcccaacaggaagcggaaccggtgttccgttacttcgcgagccggttgaatgacttgagcgcagacacaactacgcagctttcagggctttcaattgtgcccgttgtacgaagaacacgagcgtcagggatctcatcccatgcggactccaaaggcaaagccgggccagtcgttcatttaagccctcggaactgttatctggggcgctcatcgatgtatagcgaaatctttgactttgttgactttggacagtctgccaatgcattcttaaccgcttgcggatccaagactgaacctactaaattagagatcgcccagttggcagcgggagagcctgcaagactgctgagtgtactgcagagccctgacaaatatctcaaccttctcagacttttggctgaagatatgtctatccttagacgggacaaagacttgtggaagaagatgaagacatcccctttccttctggccttcaaagagatatcgaatccctcaaaagagaaatctgccgatcatgaagaggaagaagaggctgtcaaagtatatcagcttgcggcgccttctaatattgtcatattggacgactacatcagctatagactcttcaaggaacaccttgtttgtgcgccggaagaagacactctagagtctttctacatggcccttggtgccccggcactctccaccgccgttcaggaagaactgaagattggatctcacatcgagaagcaagatggtgcgatttggctcaggaagcatgtcctcgaacgatcgaaattattcatacatgaatatgccaaatacttccgggatgctatcaagcacgatgctaaatggctcgagaagaacctgggtgtagaggtggttcgatccgttgcccttcgtcgctctcttggcaaatctggcaaatctcacaccgagaagaggtcagcagccagcactcagactcgcatgggttgggtcctctatgtcgccgcggaatccacccgtcctgacatgtatcaagttggacaagctttgtgccaactgattctgacccgaccaagtcagcaagcttacttcttcttcgagccgttccttaagcttgacctcctagacttgaggtcgcgtggttacaacgttgaccgtatattgagggcaaaggcagcggaagccaggattgcggaggaagaaaggcgacgcgccctagatgaagagcaggccagaattcgcgaacgtgagcaagaatttgatcgaaacagccaaacggcaactgcggcagctgcaagagaacagaatcgaacgccgcctccacaaatgcctggcagcttcaactcccctgaagaacatgacacgccgccagcgcccaccccggttccttcccacacaagaagaagccgagggcttttctcaaatctttctaagcgattcggatttgatgccaacgaagagacggacgagaaaatgcaaagattcattgattcgacgccagatcctgcccagcttccgcctgctgagtcgtcctcctccagttccaagcccaaccaaaacgggcaaagtggacaagtcaccaatcctgccatcgtccaacagaatcttctcaatgctatcaaagcaacgcgtgcttacgactcgtcaatgctatactcgcctccaaatacccgtgacgtgaaagagcaggcgacatattgtgaccacaatgcggggcacaacatcgcccgagttgctgacgcatcgaacggaatgcatgtcttcgtatccaaagatgttcctcatc

SEQ ID NO: 25625 - protein, 1603 aa, Muscodor strobelii
  misc_feature: SGI Peptide ID NO. 568747
  misc_feature (1)..(1601): NCBI GI: 145607161 Blast Desc: MGG_04037 [Magnaporthe grisea 70-15] gi|145014759|gb|EDJ99327.1| MGG_04037 [Magnaporthe grisea 70-15]
  misc_feature (1)..(1601): NCBI GI: 46123439 Blast Desc: FG06097.1 [Gibberella zeae PH-1]
  misc_feature (1)..(1601): NCBI GI: 256731424 Blast Desc: [Nectria haematococca mpVI 77-13-4]
  misc_feature (1)..(1601): NCBI GI: 171694105 Blast Desc: protein product [Podospora anserina] gi|170947001|emb|CAP73805.1| protein product [Podospora anserina]
  misc_feature (1)..(1603): NCBI GI: 116198211 Blast Desc: CHGG_07261 [Chaetomium globosum CBS 148.51] gi|88178540|gb|EAQ86008.1| CHGG_07261 [Chaetomium globosum CBS 148.51]
  misc_feature (1)..(1601): NCBI GI: 164426926 Blast Desc: NCU03811 [Neurospora crassa OR74A] gi|157071533|gb|EAA31964.2| conserved [Neurospora crassa OR74A]
  misc_feature (1)..(1601): NCBI GI: 16944574 Blast Desc: [Neurospora crassa]
  misc_feature (1)..(1600): NCBI GI: 156048576 Blast Desc: SS1G_09019 [Sclerotinia sclerotiorum 1980] gi|154693416|gb|EDN93154.1| SS1G_09019 [Sclerotinia sclerotiorum 1980]
  misc_feature (1)..(1601): NCBI GI: 154272519 Blast Desc: conserved [Ajellomyces capsulatus NAm1] gi|150409099|gb|EDN04555.1| conserved [Ajellomyces capsulatus NAm1]
  misc_feature (1)..(1601): NCBI GI: 225678506 Blast Desc: conserved [Paracoccidioides brasiliensis Pb03]
  misc_feature: Useful for introducing or modulating the production of volatile compounds
MDYGKLRAAALRDGEDEEAVTVDTRALIDKVLARYSGEWTTLRELIQNAADAQATTVKIKWETLPSTNVSLPSSTDLSEILKHTISHHTLRRLVVQNNGQPFAKTDWHRLKRIAEGNPDETKIGAFGVGFYSVFADCEEPFVSSGDEAMAFYWKGNALFTRKLQLPLDQRTPDTTFVLDYRNSTTTLPNLLSVSQFLATSLTFVALENIEFWIDDYKVLALHKKASPSVDVAISRDIETTTKERLMKVQSVERSSAQIDASFMSAVGWKPQVAVSKMETYGLATSEMPSLRSFFSRLTSTNSKAAKAVKEERAIQEVISEDITALSTSSISLRVSTAALKTSVTGQFASELERATKKPPPKVTKLSILTSTFDDAEAASKKSQSSSNVTSATDIFASVLPSKKGGRVFIGFPTAQTTGAGMHISAPSVIPTVEREAIDLNARWIRTWNMEMLRAAGIISRLAFSHEMTELQAKLQKAADTAGTKITSKETAEFMSEALFVLNSFTFGDSTPSGHVSQIIEETFWTCYKLPFVDIYSTRGVLPTTQVRLGSEELSKFVDGIPVVPKELETTVFVKKLRDFDLLSQITTDDIRRELSGKPLTEDQLVNFILWAGKTAVKGELDAATRDRLLDVAVAIVNKAGGQNQGDIIALGSIWYFVTTQKYPLGVPIPPEAIPFEYTKSCPLNDLQALGWVQLDFLPWVRFLMETRYQDMTKSPEFASKILSVLSKGWDNTSQNNKATIALLLQAQTTMPTKAGMRKPQESFFPSVKLFDDLPIIDCPQLKEKFLVALGVRKTLDLDTIFKRLLSPPSEKEGAAPARWSHVELIKYLASVRNDIPNEDLKKLRDSRICPAEAGAFGMQASTQLYKVSELFEPNRLLRGLQLKMLQWPGGTLNRGSHEGRFLSILGLRVHPSAPELVEMMCSPDESLRNSAMSYYVTYYSTNGYASFHMGACTRAFLPLQKNPKKLVSPSECFVNEAAAVLGFDILKKELHGDAQKFGVARDPPIRDCVQVLIKNPPNSQQEAEPVFRYFASRLNDLSADTTTQLSGLSIVPVVRRTRASGISSHADSKGKAGPVVHLSPRNCYLGRSSMYSEIFDFVDFGQSANAFLTACGSKTEPTKLEIAQLAAGEPARLLSVLQSPDKYLNLLRLLAEDMSILRRDKDLWKKMKTSPFLLAFKEISNPSKEKSADHEEEEEAVKVYQLAAPSNIVILDDYISYRLFKEHLVCAPEEDTLESFYMALGAPALSTAVQEELKIGSHIEKQDGAIWLRKHVLERSKLFIHEYAKYFRDAIKHDAKWLEKNLGVEVVRSVALRRSLGKSGKSHTEKRSAASTQTRMGWVLYVAAESTRPDMYQVGQALCQLILTRPSQQAYFFFEPFLKLDLLDLRSRGYNVDRILRAKAAEARIAEEERRRALDEEQARIREREQEFDRNSQTATAAAAREQNRTPPPQMPGSFNSPEEHDTPPAPTPVPSHTRRSRGLFSNLSKRFGFDANEETDEKMQRFIDSTPDPAQLPPAESSSSSSKPNQNGQSGQVTNPAIVQQNLLNAIKATRAYDSSMLYSPPNTRDVKEQATYCDHNAGHNIARVADASNGMHVFVSKDVPH

SEQ ID NO: 25626 - DNA, 5267 bp, Muscodor strobelii
  misc_feature: SGI EST ID NO. CUFF.60321.0
  misc_feature: Variant of the nucleotide sequence at SEQ ID NO 25624
cgtcaccgtcgactctggagctgagactcagcctttgatcattcgccagagaaacaactgtttccttgaccgagcccttacaatgctcagtgtcttcgtcgttgctagcgctagactttccatttcttaggacctcggttactgggtgcacgtgtgtctttgttgttctgcttctagcggctgccgcgagcatcggccgcgtagaatcatctgccttgggggcaactctattcgactgtgttccattccccagacacttctctctaaattgggcaccctcgtcctttttaagagcgaccagaccttgaactgttcactgcaggacttggattatttttgttgacatcttgtttttaccttaattcaatacaatacaaacctaccattacctgacgacccttgacctccgtcatgcactccgtgatcccacgcgctactcacctctctactacctgaaatggactatggaaagctgagagctgctgctctccgagacggcgaggatgaagaagcagtcactgtcgatacccgcgccctcatcgacaaggtcctcgcacgatattcgggagaatggactacgcttcgagagctcattcaaaatgctgccgacgcccaagccaccactgtcaagatcaaatgggagacattgccttcgaccaatgtctccctcccctcctccaccgacctatctgagatcctgaagcacaccatatcccaccacactctgcgtcgcctggtcgtccagaacaatggccagcccttcgccaagaccgattggcacaggctgaagaggatcgccgagggcaacccggacgagaccaagatcggtgcttttggtgttggcttctacagtgtcttcgccgactgcgaggagcccttcgtcagctccggagacgaagctatggcattctactggaagggcaatgccctcttcaccagaaagctccagctaccactcgaccagcgcactcccgataccacctttgttctcgattaccggaactctaccacgactctacccaacctgctttctgtcagccagttcttggccacaagtctgacattcgttgcattggagaacatagagttctggatagacgactacaaagtgttggcattgcacaaaaaggccagcccaagtgtagatgtcgccatatccagagatatagaaacgacgaccaaggaacggctgatgaaggttcaaagcgtagaacgctccagtgcccagatcgatgcttccttcatgagtgccgtcggatggaagcctcaggtcgccgtctctaagatggagacatacggccttgctacttcagagatgccatctctgcgtagtttcttctctagactaacttcaacgaattccaaggcggccaaggctgtgaaagaggagcgggccatccaggaagtcatctctgaagacattaccgccttatcgacgtcgagtatctctcttcgagttagcaccgctgctctcaagacgtctgtcactggccagtttgcatctgagctagaaagagccaccaagaaacctcctccaaaggtcactaagctttccattctgacctctacctttgatgatgcggaagcagcctcaaagaagtcacagagctccagcaatgtcacatcagccaccgatatcttcgcttctgttctccccagcaaaaaaggtggacgtgtgtttattgggttcccaactgcccaaacgaccggtgctggcatgcatatttctgcgccctctgttatcccgaccgtagagcgtgaggccatcgatctcaatgcccgatggataaggacttggaacatggaaatgctccgagccgcaggtatcatatcgcggctagcattctcccacgagatgacagagcttcaggcaaagctgcagaaggctgcagatacagcggggacgaaaatcacctccaaggagactgccgagttcatgtctgaagctttatttgtgctgaactcatttacttttggtgattccacacctagcgggcatgtttcccaaatcatcgaggaaacattttggacttgctataaactcccctttgtagacatatatagcacacgcggtgtacttccgacaacccaagtccggctaggctccgaagagctctccaagtttgtggatggaattcctgtagttcctaaagagctggagacgaccgtctttgttaaaaagttgagagacttcgatttgttgtctcaaatcaccacggacgatatacgacgggagctatcgggcaaaccactgactgaagaccaacttgtcaacttcatcctctgggctggcaaaacagcagtaaagggcgagcttgatgcggctactcgcgatagacttctcgacgtcgctgttgccatagtcaacaaggccggtggccagaatcagggcgacattattgctctcggcagcatctggtatttcgtgacgacgcagaagtaccccttaggcgtgccaattcctccagaggcaataccatttgaatacaccaagagttgtccactcaacgatttacaagcgcttggctgggtccaattggacttcttaccgtgggtccgatttctcatggaaacacggtatcaagacatgaccaaatcacccgaatttgcaagcaaaattctttctgtcctgtcaaaaggctgggacaacacaagccaaaacaacaaggccacaattgcgctcttgttacaggcgcaaacgacaatgcccactaaggctgggatgagaaagccacaggaatcattcttcccgtccgtgaagttatttgacgatctccccatcatcgattgtccgcagttgaaagaaaagtttctggtcgcattaggtgtcagaaagacgctggatcttgacacaattttcaagcgtcttttaagccctccatctgagaaagaaggcgctgcaccggcaagatggagccatgtagagctcatcaagtatttagcgtcggtccgtaacgatattccaaatgaagacctcaagaagctgagagattctcgcatctgccctgccgaagccggggcgtttggtatgcaggcaagcactcagctttacaaagtttctgagctcttcgagcctaatcggcttctacggggtcttcaactcaagatgcttcagtggcctggcgggactttgaatcgtgggtctcacgaggggagatttttgagcatccttggtctgcgtgtgcatccctctgcgcccgagctggtagaaatgatgtgctctccagacgagagcctccgtaatagtgcgatgtcgtattacgtgacttactacagcactaacggatacgcaagctttcatatgggagcttgcactcgagcgttcctccctctccaaaaaaatccaaagaagcttgtgtcgccatctgaatgttttgtcaacgaagctgctgccgttcttggattcgacatcctgaagaaggaactccatggggatgcacagaaattcggcgtagccagagatccaccgatccgagactgtgtccaggtcctcatcaaaaatcctcccaattcccaacaggaagcggaaccggtgttccgttacttcgcgagccggttgaatgacttgagcgcagacacaactacgcagctttcagggctttcaattgtgcccgttgtacgaagaacacgagcgtcagggatctcatcccatgcggactccaaaggcaaagccgggccagtcgttcatttaagccctcggaactgttatctggggcgctcatcgatgtatagcgaaatctttgactttgttgactttggacagtctgccaatgcattcttaaccgcttgcggatccaagactgaacctactaaattagagatcgcccagttggcagcgggagagcctgcaagactgctgagtgtactgcagagccctgacaaatatctcaaccttctcagacttttggctgaagatatgtctatccttagacgggacaaagacttgtggaagaagatgaagacatcccctttccttctggccttcaaagagatatcgaatccctcaaaagagaaatctgccgatcatgaagaggaagaagaggctgtcaaagtatatcagcttgcggcgccttctaatattgtcatattggacgactacatcagctatagactcttcaaggaacaccttgtttgtgcgccggaagaagacactctagagtctttctacatggcccttggtgccccggcactctccaccgccgttcaggaagaactgaagattggatctcacatcgagaagcaagatggtgcgatttggctcaggaagcatgtcctcgaacgatcgaaattattcatacatgaatatgccaaatacttccgggatgctatcaagcacgatgctaaatggctcgagaagaacctgggtgtagaggtggttcgatccgttgcccttcgtcgctctcttggcaaatctggcaaatctcacaccgagaagaggtcagcagccagcactcagactcgcatgggttgggtcctctatgtcgccgcggaatccacccgtcctgacatgtatcaagttggacaagctttgtgccaactgattctgacccgaccaagtcagcaagcttacttcttcttcgagccgttccttaagcttgacctcctagacttgaggtcgcgtggttacaacgttgaccgtatattgagggcaaaggcagcggaagccaggattgcggaggaagaaaggcgacgcgccctagatgaagagcaggccagaattcgcgaacgtgagcaagaatttgatcgaaacagccaaacggcaactgcggcagctgcaagagaacagaatcgaacgccgcctccacaaatgcctggcagcttcaactcccctgaagaacatgacacgccgccagcgcccaccccggttccttcccacacaagaagaagccgagggcttttctcaaatctttctaagcgattcggatttgatgccaacgaagagacggacgagaaaatgcaaagattcattgattcgacgccagatcctgcccagcttccgcctgctgagtcgtcctcctccagttccaagcccaaccaaaacgggcaaagtggacaagtcaccaatcctgccatcgtccaacagaatcttctcaatgctatcaaagcaacgcgtgcttacgactcgtcaatgctatactcgcctccaaatacccgtgacgtgaaagagcaggcgacatattgtgaccacaatgcggggcacaacatcgcccgagttgctgacgcatcgaacggaatgcatgtcttcgtatccaaagatgttcctcatc

SEQ ID NO: 25627 - DNA, 837 bp, Muscodor strobelii
  misc_feature: SGI cDNA ID NO. 568748
  misc_feature: Reduced expression when VOC is produced
  misc_feature: Encodes the peptide sequence at SEQ ID NO 25628
atggatctcgtttccagcatccgcaagacggggtcgcgtggaggcgtcaacttcaactgggaagatgtcgcgacctctgcgcaccgcgaaaactaccttgggcacagtctgaaagctccagtcggccgctggcaacaaggaagggatctcaactggtatgcgaagggcgatgccgacgatcaatctgccaatgagacagccgaagagaccgccgcccggaaaagaaaagaggagctgcagaagattaaagaagctgaagaggatgctattgcccgcgcactcggactgcccgcccctgttcgaaatgctagtggagcgaatgctgtagatgttggcacatctcgaatcgggccacaagaaggctctcctcccgccgaaaaggctgctgcatcgaacgaggctcgcctagcgaaaccgcagcgccaggaagactccgaaagaagacacagaaagagacatcggaccgtgatcgagctagacggcgtgacagatcaccgaaaacacgggacgagaggcaccaccatcggcatagaggcgcaagggatgatggggacaacagatatgacagagggtcacatcacagacaaagaagccacagtgcagatggtgataggcatagatccgaaggcttccaaggacggaattggcatagaagccgcagtgcagagagatctggacggcgacagagttacagagatggtcatcgatcaagatcgagagaccgcagacggagcagaagtccggaccgtcggagaaggggaagcccggaacgagattgagcagaacagattacaccaactctgtgtatatggtggactgagaagtaaaactcggtga

SEQ ID NO: 25628 - protein, 278 aa, Muscodor strobelii
  misc_feature: SGI Peptide ID NO. 568748
  misc_feature (1)..(111): NCBI GI: 171694109 Blast Desc: protein product [Podospora anserina] gi|170947003|emb|CAP73807.1| protein product [Podospora anserina]
  misc_feature (1)..(116): NCBI GI: 116198209 Blast Desc: CHGG_07260 [Chaetomium globosum CBS 148.51] gi|88178539|gb|EAQ86007.1| CHGG_07260 [Chaetomium globosum CBS 148.51]
  misc_feature (1)..(117): NCBI GI: 145607163 Blast Desc: MGG_12133 [Magnaporthe grisea 70-15] gi|145014760|gb|EDJ99328.1| MGG_12133 [Magnaporthe grisea 70-15]
  misc_feature (1)..(112): NCBI GI: 154300735 Blast Desc: BC1G_10667 [Botryotinia fuckeliana B05.10] gi|150856415|gb|EDN31607.1| BC1G_10667 [Botryotinia fuckeliana B05.10]
  misc_feature (1)..(152): NCBI GI: 85101704 Blast Desc: NCU03810 [Neurospora crassa OR74A] gi|11595629|emb|CAC18249.1| conserved [Neurospora crassa] gi|28922740|gb|EAA31963.1| [Neurospora crassa OR74A]
  misc_feature (1)..(112): NCBI GI: 261196227 Blast Desc: conserved [Ajellomyces dermatitidis SLH14081] gi|239587650|gb|EEQ70293.1| conserved [Ajellomyces dermatitidis SLH14081]
  misc_feature (1)..(116): NCBI GI: 239614609 Blast Desc: conserved [Ajellomyces dermatitidis ER-3]
  misc_feature (1)..(102): NCBI GI: 256731425 Blast Desc: NECHADRAFT_84865 [Nectria haematococca mpVI 77-13-4]
  misc_feature (1)..(116): NCBI GI: 240280440 Blast Desc: conserved [Ajellomyces capsulatus H143]
  misc_feature (1)..(112): NCBI GI: 225561002 Blast Desc: conserved [Ajellomyces capsulatus G186AR]
  misc_feature: Useful for introducing or modulating the production of volatile compounds
MDLVSSIRKTGSRGGVNFNWEDVATSAHRENYLGHSLKAPVGRWQQGRDLNWYAKGDADDQSANETAEETAARKRKEELQKIKEAEEDAIARALGLPAPVRNASGANAVDVGTSRIGPQEGSPPAEKAAASNEARLAKPQRQEDSERRHRKRHRTVIELDGVTDHRKHGTRGTTIGIEAQGMMGTTDMTEGHITDKEATVQMVIGIDPKASKDGIGIEAAVQRDLDGDRVTEMVIDQDRETADGAEVRTVGEGEARNEIEQNRLHQLCVYGGLRSKTR

SEQ ID NO: 25629 - DNA, 462 bp, Muscodor strobelii
  misc_feature: SGI cDNA ID NO. 568749
  misc_feature: Encodes the peptide sequence at SEQ ID NO 25630
atgtctctccagcctgactcgcctatgcagctagtcgacatccgtcgccatgctacaccaacgggcgatagctccaatgtccctcctgcaacccttctcggcgaggcccagaccaatgcacaccttgacggttcggcccatgacgcagcaggtgctgacggtcaccatgatgacaccctgaatgagcatgccgagcatgccaacaacacgaataccgtccatgttgatacggctcagcgccaagatgaggaaaatcaagtcgataacgcagaactccgtcgtattgcaagccgcaaacaactcggtattatccttgttcttggtgtagttgttattgctatcaccgcttccgccatgaaagcggctggttatacttatgacgacatcaaattcccaatcaccgtcgaactcatgatactctcggccttcctcacgccaacctatgctaacagcatcgcctag

SEQ ID NO: 25630 - protein, 153 aa, Muscodor strobelii
  misc_feature: SGI Peptide ID NO. 568749
MSLQPDSPMQLVDIRRHATPTGDSSNVPPATLLGEAQTNAHLDGSAHDAAGADGHHDDTLNEHAEHANNTNTVHVDTAQRQDEENQVDNAELRRIASRKQLGIILVLGVVVIAITASAMKAAGYTYDDIKFPITVELMILSAFLTPTYANSIA

SEQ ID NO: 25631 - DNA, 2233 bp, Muscodor strobelii
  misc_feature: SGI EST ID NO. CUFF.60589.0
  misc_feature: Variant of the nucleotide sequence at SEQ ID NO 25629
aaccgaacatcggacccgttttctgagcggctcaacagttgacagggcacccgccctctcatctgaggccctttctctcaaacctcacggtctgaatttgtgaggccctttcattcaaaccttatgatctgaagcgcctgcagccccccaagcacctcatttcagcatgtctctccagcctgactcgcctatgcagctagtcgacatccgtcgccatgctacaccaacgggcgatagctccaatgtccctcctgcaacccttctcggcgaggcccagaccaatgcacaccttgacggttcggcccatgacgcagcaggtgctgacggtcaccatgatgacaccctgaatgagcatgccgagcatgccaacaacacgaataccgtccatgttgatacggctcagcgccaagatgaggaaaatcaagtcgataacgcagaactccgtcgtattgcaagccgcaaacaactcggtattatccttgttcttggtgtagttgttattgctatcaccgcttccgccatgaaagcggctggttatacttatgacgacatcaaattcccaatcaccgtcgaactcatgatactctcggccttcctcacgccaacctatgctaacagcatcgcctagcgtgcggctgctgcagatttaggccatacgagaggtactcaagtcgctagatatcattgtacagattaccatattttaggattactcatttaatacgctgtgtcactgttatgcatggtcttgctgtcataatttatcgattgacattgaatcttgtgcatctaaattcccttttgcgcttggacgaccccgaggacccaagccagcccggcagctcttcacgtgtaccacaaactctgtagtgctagacattgtcaacccgcatctacatctaaaatgcgaactcttgccgtatgaactcttgcaagacgcggtatggcgtagaaaattatctttgcgagtgtcatgtttatcgcatcgacaaacataggcgggttcacggccagcacggtgcttcttggtacgattatgtcgcattaaatccttcttatgcttgaatgcagcgccacagtagtcacaagcattgggtttctgaggtgcgtgaacactcggtgaagtaggttcagagctttcgtttgggcgtgaagaaatccctgccgcaaccgttgtcgtaggtgttccggaaatgggcggcaacatgctgctgctacttccacatatgctttccagttcggtcatcaagcctgtggcgaagaagccgccaatctgttggtagtggttagggagatcatctccagtcccaaacaccgcacccgctccttctatgtcttccaagcgcacatttttcatcgcatgataaacctcggggacttctactatctgaggggccacaaatcctgagacaatcagcatacaccaataccatagctaccggataaagacaccttacttgacggtaggatgtcttgatttggaaacaaaacccgccagagctctgaccatgaactaactttgcgatcatttttgcgttctgctagaatgccttcgatctcttcatcgatgccgtctgccgggtcgaaaccttctccaggacgtcgtcggtggtaatttcggatatgccgcctgaaacgcgttaggccaggttgcaaatctgttcctctatcaataggtaggccaatacatacttgagcgtcgcgagatctccaaatccgttcatagcacagttcggaaagtccctgatgttgaatctagctggatatcgtatccgatacgggcagccgagcttctccggttcgggcgacagatactgctctggttcgggcgatagacaatactcaaaagtgggagcacggggatcatgaatagaatagtcataagctggtccaaagcgggaatagtcgagcgtgtttgaatcaatgtacgtaggatacgttgaaacaggctccgcagtagaaaataaaggatcatgaagtgacacagagggtatcaagtcgtcagtgtcgttgcggtcgttgcggtcgacgagttcgaagtccgcacttgaaatgggatgcgacattcttcgtcggtcaaggagggcgatacggaaagtggcgggtagtcatctggcaacaggagaatactccccatgattatggaccgagtcctgccagagcgaaatcagaatcgccatgcagttgctggctcctaggagaggagaggcaacagaatgcgcaatcgtttgta

SEQ ID NO: 25632 - DNA, 687 bp, Muscodor strobelii
  misc_feature: SGI cDNA ID NO. 568750
  misc_feature: Encodes the peptide sequence at SEQ ID NO 25633
atgtcgcatcccatttcaagtgcggacttcgaactcgtcgaccgcaacgaccgcaacgacactgacgacttgataccctctgtgtcacttcatgatcctttattttctactgcggagcctgtttcaacgtatcctacgtacattgattcaaacacgctcgactattcccgctttggaccagcttatgactattctattcatgatccccgtgctcccacttttgagtattgtctatcgcccgaaccagagcagtatctgtcgcccgaaccggagaagctcggctgcccgtatcggatacgatatccagctagattcaacatcagggactttccgaactgtgctatgaacggatttggagatctcgcgacgctcaagcggcatatccgaaattaccaccgacgacgtcctggagaaggtttcgacccggcagacggcatcgatgaagagatcgaaggcattctagcagaacgcaaaaatgatcgcaaagttagttcatggtcagagctctggcgggttttgtttccaaatcaagacatcctaccgtcaagatttgtggcccctcagatagtagaagtccccgaggtttatcatgcgatgaaaaatcagcagcatgttgccgcccatttccggaacacctacgacaacggttgcggcagggatttcttcacgcccaaacgaaagctctga

SEQ ID NO: 25633 - protein, 228 aa, Muscodor strobelii
  misc_feature: SGI Peptide ID NO. 568750
  misc_feature (91)..(196): NCBI GI: 171683808 Blast Desc: protein product [Podospora anserina] gi|170941864|emb|CAP67517.1| protein product [Podospora anserina]
  misc_feature (91)..(213): NCBI GI: 85096153 Blast Desc: NCU05648 [Neurospora crassa OR74A] gi|28921691|gb|EAA30973.1| [Neurospora crassa OR74A]
  misc_feature (95)..(218): NCBI GI: 116200319 Blast Desc: CHGG_08315 [Chaetomium globosum CBS 148.51] gi|88179594|gb|EAQ87062.1| CHGG_08315 [Chaetomium globosum CBS 148.51]
  misc_feature (86)..(191): NCBI GI: 256723923 Blast Desc: [Nectria haematococca mpVI 77-13-4]
  misc_feature (78)..(181): NCBI GI: 116195222 Blast Desc: CHGG_04209 [Chaetomium globosum CBS 148.51] gi|88180122|gb|EAQ87590.1| CHGG_04209 [Chaetomium globosum CBS 148.51]
  misc_feature (83)..(206): NCBI GI: 171691202 Blast Desc: protein product [Podospora anserina] gi|170945549|emb|CAP71661.1| protein product [Podospora anserina]
  misc_feature (91)..(174): NCBI GI: 11359463 Blast Desc: protein product [Podospora anserina] gi|170945549|emb|CAP71661.1| protein product [Podospora anserina]
  misc_feature (24)..(195): NCBI GI: 256729277 Blast Desc: NECHADRAFT_84077 [Nectria haematococca mpVI 77-13-4]
  misc_feature (91)..(201): NCBI GI: 28881343 Blast Desc: [Neurospora crassa]
  misc_feature (81)..(176): NCBI GI: 261361115 Blast Desc: conserved [Verticillium albo-atrum VaMs.102]
MSHPISSADFELVDRNDRNDTDDLIPSVSLHDPLFSTAEPVSTYPTYIDSNTLDYSRFGPAYDYSIHDPRAPTFEYCLSPEPEQYLSPEPEKLGCPYRIRYPARFNIRDFPNCAMNGFGDLATLKRHIRNYHRRRPGEGFDPADGIDEEIEGILAERKNDRKVSSWSELWRVLFPNQDILPSRFVAPQIVEVPEVYHAMKNQQHVAAHFRNTYDNGCGRDFFTPKRKL

SEQ ID NO: 25634 - DNA, 2314 bp, Muscodor strobelii
  misc_feature: SGI EST ID NO. CUFF.60590.1
  misc_feature: Variant of the nucleotide sequence at SEQ ID NO 25632
tacaaacgattgcgcattctgttgcctctcctctcctaggagccagcaactgcatggcgattctgatttcgctctggcaggactcggtccataatcatggggagtattctcctgttgccagatgactacccgccactttccgtatcgccctccttgaccgacgaagaatgtcgcatcccatttcaagtgcggacttcgaactcgtcgaccgcaacgaccgcaacgacactgacgacttgataccctctgtgtcacttcatgatcctttattttctactgcggagcctgtttcaacgtatcctacgtacattgattcaaacacgctcgactattcccgctttggaccagcttatgactattctattcatgatccccgtgctcccacttttgagtattgtctatcgcccgaaccagagcagtatctgtcgcccgaaccggagaagctcggctgcccgtatcggatacgatatccagctagattcaacatcagggactttccgaactgtgctatgaacggatttggagatctcgcgacgctcaagcggcatatccgaaattaccaccgacgacgtcctggagaaggtttcgacccggcagacggcatcgatgaagagatcgaaggcattctagcagaacgcaaaaatgatcgcaaagttagttcatggtcagagctctggcgggttttgtttccaaatcaagacatcctaccgtcaagatttgtggcccctcagatagtagaagtccccgaggtttatcatgcgatgaaaaatgtgcgcttggaagacatagaaggagcgggtgcggtgtttgggactggagatgatctccctaaccactaccaacagattggcggcttcttcgccacaggcttgatgaccgaactggaaagcatatgtggaagtagcagcagcatgttgccgcccatttccggaacacctacgacaacggttgcggcagggatttcttcacgcccaaacgaaagctctgaacctacttcaccgagtgttcacgcacctcagaaacccaatgcttgtgactactgtggcgctgcattcaagcataagaaggatttaatgcgacataatcgtaccaagaagcaccgtgctggccgtgaacccgcctatgtttgtcgatgcgataaacatgacactcgcaaagataattttctacgccataccgcgtcttgcaagagttcatacggcaagagttcgcattttagatgtagatgcgggttgacaatgtctagcactacagagtttgtggtacacgtgaagagctgccgggctggcttgggtcctcggggtcgtccaagcgcaaaagggaatttagatgcacaagattcaatgtcaatcgataaattatgacagcaagaccatgcataacagtgacacagcgtattaaatgagtaatcctaaaatatggtaatctgtacaatgatatctagcgacttgagtacctctcgtatggcctaaatctgcagcagccgcacgctaggcgatgctgttagcataggttggcgtgaggaaggccgagagtatcatgagttcgacggtgattgggaatttgatgtcgtcataagtataaccagccgctttcatggcggaagcggtgatagcaataacaactacaccaagaacaaggataataccgactaatcaaagacaaacatgagcatgtaatcgagataattcgactggttttggagaaatatgcatgcttacgttgtttgcggcttgcaatacgacggagttctgcgttatcgacttgattttcctcatcttggcgctgagccgtatcaacatggacggtattcgtgttgttggcatgctcggcatgctcattcagggtgtcatcatggtgaccgtcagcacctgctgcgtcatgggccgaaccgtcaaggtgtgcattggtctgggcctcgccgagaagggttgcaggagggacattggagctatcgcccgctacttcacgtgtaagctggggccggaaaattataaatgggttgcacttggggtgacttacttggtgtagcatggcgacggatgtcgactagctgcactacaaagaacgtgtcaataacgctagaagaaccttgttacagtggataatgatcagtaacatactaggcgagtcaggctggagagacatgctgaaatgaggtgcttggggggctgcaggcgcttcagatcataaggtttgaatgaaagggcctcacaaattcagaccgtgaggtttgagagaaagggcctcagatgagagggcgggtgccctgtcaactgttgagccgctcagaaaacgggtccgatgttcggtt

SEQ ID NO: 25635 - DNA, 1863 bp, Muscodor strobelii
  misc_feature: SGI cDNA ID NO. 568751
  misc_feature: Encodes the peptide sequence at SEQ ID NO 25636
atggccaaaaatcttgagttcccgacaatatacctgttgccgacccacttcaacgatgatgagctaccagaactcgaaagtcagatccctaccctgacctatgacatcaatgaagccagaatcatattggggaaagtgaccaggaggctgcgtgcaattctagagctcaaatttcggaaactttcaactgaggagattgccttagcgcccaccgaaaccaaagccgtcgatagctcaggcagctcacaacccagagcaaagcgtagaaaggttgaaggcaaaggacctcactcacccagatctgacgaaagcacagcttcggataccgattccaatgacggagacgctgcaagcaatctttcgtcgccgagccgtcctcggaatgatgatgattcaatagtcgaggtggtcaagcttgcttggttcaccgattgccaagcgcagggcgaagttttacctgtgaaggactatttggtgtaccgaggccggaaacagtcgcctatcattacgaaagtggtcaacaaacctcggcctgatccgaaagacatactgaggcgtgccagggaagatatagaaggcgctgtaggttcatctcagggtcaatcacgttctggtcatgcacactccaaatatcacccccgatcaagccaggcaaagcgtccacatcttgttccggagacgacttcagaagacgaggacgcggcaaatttgccgcctgtgcccaaatatttacatacgccatactcctgtcagcgacctactccttccaacccacgaaacgatgcattcatcgagcagctgaagaaggtgaggacgctcagacaattagagggcgatgaagtgggagtgagggcatactcttcaagtattgcagctgtggcggcgtaccctcatttactctcgtcttcaattgaggttgcgagactacctgggtgtagttctaaaatcgcagctctttaccaacaatggaaaaccaacgggtatctggacgaagttcaagaggctgcctccgacgagcggctgagggtactcttgctgttctacgatatatggggcgtggccgcgaaaaccgctcacgacttttacaacaagggctggagggatctcgacgacattgcggagttcggctgggatgatatcagtcgagtccaacaaatcggcttgaagtactacgatgacatccaagaacgaatctcccgcacagaagttgaatccattgctggtaccatcttgaaacatgcaaaaaagattgaagagggctttcagatggtcatcgtaggaggctatcgaagaggcaagtcgacctgtggtgatgttgacgtcatactgagccacccggacccgaaggccacacacttctttatcaatgctattgtaaggagcctcgagggtggtggctacatcacccatatgctcacaatgtccgacaagaatagtgagcgtggccaggatccggtagcttggaaaggagaggacaagaaagccggaggattcgacacgttagataaagccttggtcatgtggcaagatccagtctgggacaaaaaagtggcagctaaaaatcccaatacacgtcgccgagtcgatatcatcatatctccatggaaaacagtagggtgtgcgatagtaggctggacgggcgccacgacatttgagcgtgatcttcgacgttattgcaataaagagaagcggctcaagttcgatagcagtggtgcgcggagtcgtaccggtaacggggaatgggtagatctcgagagcgacgcgcatgggaatcccgcgccggatatgctgactgcagagagacgggtgtttgagaggttggggcttgaatggcggccgccggaagaacgatgtacgggttga

SEQ ID NO: 25636 - protein, 620 aa, Muscodor strobelii
  misc_feature: SGI Peptide ID NO. 568751
  misc_feature (4)..(620): NCBI GI: 85102863 Blast Desc: NCU01321 [Neurospora crassa OR74A] gi|11595591|emb|CAC18211.1| related to DNA polymerase Tdt-N [Neurospora crassa] gi|28922952|gb|EAA32171.1| conserved crassa
  misc_feature (1)..(619): NCBI GI: 171692149 Blast Desc: protein product [Podospora anserina] gi|170946023|emb|CAP72824.1| protein product [Podospora anserina]
  misc_feature (5)..(620): NCBI GI: 39978047 Blast Desc: MGG_06908 [Magnaporthe grisea 70-15] gi|145013523|gb|EDJ98164.1| MGG_06908 [Magnaporthe grisea 70-15]
  misc_feature (4)..(620): NCBI GI: 116206616 Blast Desc: CHGG_02601 [Chaetomium globosum CBS 148.51] gi|88183198|gb|EAQ90666.1| CHGG_02601 [Chaetomium globosum CBS 148.51]
  misc_feature (6)..(620): NCBI GI: 256728475 Blast Desc: NECHADRAFT_50658 [Nectria haematococca mpVI 77-13-4]
  misc_feature (7)..(620): NCBI GI: 46110028 Blast Desc: FG01896.1 [Gibberella zeae PH-1]
  misc_feature (17)..(620): NCBI GI: 156048408 Blast Desc: SS1G_08935 [Sclerotinia sclerotiorum 1980] gi|154693332|gb|EDN93070.1| SS1G_08935 [Sclerotinia sclerotiorum 1980]
  misc_feature (7)..(619): NCBI GI: 159129305 Blast Desc: terminal deoxynucleotidyl transferase, [Aspergillus fumigatus A1163]
  misc_feature (7)..(619): NCBI GI: 71001074 Blast Desc: terminal deoxynucleotidyl transferase [Aspergillus fumigatus Af293] gi|66852856|gb|EAL93180.1| terminal deoxynucleotidyl transferase, [Aspergillus fumigatus Af293]
  misc_feature (7)..(619): NCBI GI: 169621167 Blast Desc: SNOG_13791 [Phaeosphaeria nodorum SN15] gi|160704194|gb|EAT78815.2| SNOG_13791 [Phaeosphaeria nodorum SN15]
  misc_feature (231)..(620): SWISSPROT Homolog: EC 2.7.7.7 DNA-directed DNA polymerase
MAKNLEFPTIYLLPTHFNDDELPELESQIPTLTYDINEARIILGKVTRRLRAILELKFRKLSTEEIALAPTETKAVDSSGSSQPRAKRRKVEGKGPHSPRSDESTASDTDSNDGDAASNLSSPSRPRNDDDSIVEVVKLAWFTDCQAQGEVLPVKDYLVYRGRKQSPIITKVVNKPRPDPKDILRRAREDIEGAVGSSQGQSRSGHAHSKYHPRSSQAKRPHLVPETTSEDEDAANLPPVPKYLHTPYSCQRPTPSNPRNDAFIEQLKKVRTLRQLEGDEVGVRAYSSSIAAVAAYPHLLSSSIEVARLPGCSSKIAALYQQWKTNGYLDEVQEAASDERLRVLLLFYDIWGVAAKTAHDFYNKGWRDLDDIAEFGWDDISRVQQIGLKYYDDIQERISRTEVESIAGTILKHAKKIEEGFQMVIVGGYRRGKSTCGDVDVILSHPDPKATHFFINAIVRSLEGGGYITHMLTMSDKNSERGQDPVAWKGEDKKAGGFDTLDKALVMWQDPVWDKKVAAKNPNTRRRVDIIISPWKTVGCAIVGWTGATTFERDLRRYCNKEKRLKFDSSGARSRTGNGEWVDLESDAHGNPAPDMLTAERRVFERLGLEWRPPEERCTG

SEQ ID NO: 25637 - DNA, 3780 bp, Muscodor strobelii
  misc_feature: SGI EST ID NO. CUFF.60683.0
  misc_feature: Variant of the nucleotide sequence at SEQ ID NO 25635
agtcaacaggcttcatggctcgaatttttttcatcctatgttcagctcgtagtgtcacaaatctacctttccaaggctatatctcatttcgagttccctgtcttttgaaaactatcagtctgtacccttccgccgcgccggtttatacacctcagtgtgaactttgacaggaacgggtgaaggaatgggatcctgtgatgaaatgaaacgcaaaagcgcttgtcgcatcaagacggctgtagcagcgcgacatcatggccaaaaatcttgagttcccgacaatatacctgttgccgacccacttcaacgatgatgagctaccagaactcgaaagtcagatccctaccctgacctatgacatcaatgaagccagaatcatattggggaaagtgaccaggaggctgcgtgcaattctagagctcaaatttcggaaactttcaactgaggagattgccttagcgcccaccgaaaccaaagccgtcgatagctcaggcagctcacaacccagagcaaagcgtagaaaggttgaaggcaaaggacctcactcacccagatctgacgaaagcacagcttcggataccgattccaatgacggagacgctgcaagcaatctttcgtcgccgagccgtcctcggaatgatgatgattcaatagtcgaggtggtcaagcttgcttggttcaccgattgccaagcgcagggcgaagttttacctgtgaaggactatttggtgtaccgaggccggaaacagtcgcctatcattacgaaagtggtcaacaaacctcggcctgatccgaaagacatactgaggcgtgccagggaagatatagaaggcgctgtaggttcatctcagggtcaatcacgttctggtcatgcacactccaaatatcacccccgatcaagccaggcaaagcgtccacatcttgttccggagacgacttcagaagacgaggacgcggcaaatttgccgcctgtgcccaaatatttacatacgccatactcctgtcagcgacctactccttccaacccacgaaacgatgcattcatcgagcagctgaagaaggtgaggacgctcagacaattagagggcgatgaagtgggagtgagggcatactcttcaagtattgcagctgtggcggcgtaccctcatttactctcgtcttcaattgaggttgcgagactacctgggtgtagttctaaaatcgcagctctttaccaacaatggaaaaccaacgggtatctggacgaagttcaagaggctgcctccgacgagcggctgagggtactcttgctgttctacgatatatggggcgtggccgcgaaaaccgctcacgacttttacaacaagggctggagggatctcgacgacattgcggagttcggctgggatgatatcagtcgagtccaacaaatcggcttgaagtactacgatgacatccaagaacgaatctcccgcacagaagttgaatccattgctggtaccatcttgaaacatgcaaaaaagattgaagagggctttcagatggtcatcgtaggaggctatcgaagaggcaagtcgacctgtggtgatgttgacgtcatactgagccacccggacccgaaggccacacacttctttatcaatgctattgtaaggagcctcgagggtggtggctacatcacccatatgctcacaatgtccgacaagaatagtgagcgtggccaggatccggtagcttggaaaggagaggacaagaaagccggaggattcgacacgttagataaagccttggtcatgtggcaagatccagtctgggacaaaaaagtggcagctaaaaatcccaatacacgtcgccgagtcgatatcatcatatctccatggaaaacagtagggtgtgcgatagtaggctggacgggcgccacgacatttgagcgtgatcttcgacgttattgcaataaagagaagcggctcaagttcgatagcagtggtgcgcggagtcgtaccggtaacggggaatgggtagatctcgagagcgacgcgcatgggaatcccgcgccggatatgctgactgcagagagacgggtgtttgagaggttggggcttgaatggcggccgccggaagaacgatgtacgggttgataagaagcggaacattgaaaacgttcgctgtaggaaaatcaccggcatttttacattggatgctttagtcctatcagttagcacctgacaattccaatctaaacatctaggcttaccggcgcaagtaggcgctttcccggtaaaactcgccagtatgaaatcatacaatgcggcatagtccggcatctcttattaatgcgatatgcatacagtaactacaacaattcgtcaagaaacaacatacattatcattaggccatcctatctcacactcggctcattggccccttacccacatctcacaattttgactccggagcagccgccgcatcaccactcctctcgagaatccacgacgcaacatcctcgtaaaactcctccctcccaggatcagcatgaagctgatgcaagaatccggggaaactcttaaacttcttatccttgatcgtagtctggcgatcacaccactctttactcttatcgtggctcgtcgtcttgtcgccatcaccgtgcatcatgaacagcgagtggacattcttgcttatcacaagtttcccatccgataagccattcgtccggtctagcattcctgaaagtccctgcaaagtaccgtagtcgtgcataagcggatcgttgcggatagattcctgcacgtccactgaccgcgtgatgtgctcgggtgggatcggtctgtacatcttgaagttgggcatgacgtgcgctgcgagacgaccgctggcgactgtgagccagctcggctttaactcgggtgcgaaaccgacgaacggcgattctaggatccagccgcgaatttgcttgactatgtcctcgtactctggtgttgaggcgagggtgagagcttgaccgccgcccattgagtggccgagtatgaagacgggcacttctgagggaagttgggtcttgatgaaagtcaccatgtccgcgagtacacgctttgtgggaccggtcttgcctttgtcttcatggtttggtgcgctgcgcccccatcctcgctgatcgaagccgtacactgctatgccgcgctctgcgagatatggaaagaagcctagataccggtccatgtggtcactgaatccgtggatcatgatcattttggcttttagtggaccctcgggctattgcaaggtcagcgagtgatttggagacgggatatgcttgcaatatgctgtgatgtaggcgataggcgatatgtagtgtaacagtatagctgatttgtactcactacccatgattttgtgaagaggctcgcgccatcgatattaattgtgccttctgtaaccttcgccatctcgaattctaatgagactgacaggtctaagatggttgaaagtttggatggttcagatgaaatgatgaagttctctttcttgatttgaattgagtttgtttgaaaggagtatgaggtcaagatgcgcgtattccaatcgggttcgaattatgatccttggattggaatgatgggtgtcatgcagcaactgaatcgtcaaatggtacctgaatcattcgatgaatgagaccgacttgtccaatagcgatcgtctttcatatattgtattctcagcacaataaggaaggaaatgatgaaagagtaattttagagtgctgagacagtgcttctcgattgaccgaggcacaatgtcag

SEQ ID NO: 25638 - DNA, 903 bp, Muscodor strobelii
  misc_feature: SGI cDNA ID NO. 568752
  misc_feature: Reduced expression when VOC is produced
  misc_feature: Encodes the peptide sequence at SEQ ID NO 25639
atggcgaaggttacagaaggcacaattaatatcgatggcgcgagcctcttcacaaaatcatgggtacccgagggtccactaaaagccaaaatgatcatgatccacggattcagtgaccacatggaccggtatctaggcttctttccatatctcgcagagcgcggcatagcagtgtacggcttcgatcagcgaggatgggggcgcagcgcaccaaaccatgaagacaaaggcaagaccggtcccacaaagcgtgtactcgcggacatggtgactttcatcaagacccaacttccctcagaagtgcccgtcttcatactcggccactcaatgggcggcggtcaagctctcaccctcgcctcaacaccagagtacgaggacatagtcaagcaaattcgcggctggatcctagaatcgccgttcgtcggtttcgcacccgagttaaagccgagctggctcacagtcgccagcggtcgtctcgcagcgcacgtcatgcccaacttcaagatgtacagaccgatcccacccgagcacatcacgcggtcagtggacgtgcaggaatctatccgcaacgatccgcttatgcacgactacggtactttgcagggactttcaggaatgctagaccggacgaatggcttatcggatgggaaacttgtgataagcaagaatgtccactcgctgttcatgatgcacggtgatggcgacaagacgacgagccacgataagagtaaagagtggtgtgatcgccagactacgatcaaggataagaagtttaagagtttccccggattcttgcatcagcttcatgctgatcctgggagggaggagttttacgaggatgttgcgtcgtggattctcgagaggagtggtgatgcggcggctgctccggagtcaaaattgtga

SEQ ID NO: 25639 - protein, 300 aa, Muscodor strobelii
  misc_feature: SGI Peptide ID NO. 568752
  misc_feature (56)..(121): Pfam Id: PF00561 Pfam Desc: alpha/beta hydrolase fold
  misc_feature (1)..(292): NCBI GI: 85100701 Blast Desc: NCU06700 [Neurospora crassa OR74A] gi|28922551|gb|EAA31779.1| NCU06700 [Neurospora crassa OR74A] gi|28949938|emb|CAD70924.1| conserved [Neurospora crassa]
  misc_feature (1)..(300): NCBI GI: 256728484 Blast Desc: NECHADRAFT_50788 [Nectria haematococca mpVI 77-13-4]
  misc_feature (1)..(290): NCBI GI: 171692839 Blast Desc: protein product [Podospora anserina] gi|170946368|emb|CAP73169.1| protein product [Podospora anserina]
  misc_feature (1)..(289): NCBI GI: 46110004 Blast Desc: FG01884.1 [Gibberella zeae PH-1]
  misc_feature (1)..(291): NCBI GI: 261360808 Blast Desc: hydrolase [Verticillium albo-atrum VaMs.102]
  misc_feature (1)..(297): NCBI GI: 39943976 Blast Desc: conserved [Magnaporthe grisea 70-15] gi|59803162|gb|AAX07731.1| [Magnaporthe grisea] gi|145014719|gb|EDJ99287.1| conserved [Magnaporthe grisea 70-15]
  misc_feature (4)..(288): NCBI GI: 119489986 Blast Desc: alpha/beta hydrolase, [Neosartorya fischeri NRRL 181] gi|119411108|gb|EAW21051.1| alpha/beta hydrolase, [Neosartorya fischeri NRRL 181]
  misc_feature (4)..(288): NCBI GI: 70998807 Blast Desc: alpha/beta hydrolase [Aspergillus fumigatus Af293] gi|66851762|gb|EAL92087.1| alpha/beta hydrolase, [Aspergillus fumigatus Af293] gi|159127145|gb|EDP52260.1| alpha/beta fumigatus
  misc_feature (4)..(288): NCBI GI: 238505858 Blast Desc: alpha/beta hydrolase, [Aspergillus flavus NRRL3357] gi|220690245|gb|EED46595.1| alpha/beta hydrolase, [Aspergillus flavus NRRL3357]
  misc_feature (4)..(288): NCBI GI: 169780092 Blast Desc: [Aspergillus oryzae RIB40] gi|83773250|dbj|BAE63377.1| protein product [Aspergillus oryzae]
  misc_feature (9)..(294): SWISSPROT Homolog: EC 3.1.1.23 Acylglycerol lipase
  misc_feature: Useful for introducing or modulating the production of volatile compounds
MAKVTEGTINIDGASLFTKSWVPEGPLKAKMIMIHGFSDHMDRYLGFFPYLAERGIAVYGFDQRGWGRSAPNHEDKGKTGPTKRVLADMVTFIKTQLPSEVPVFILGHSMGGGQALTLASTPEYEDIVKQIRGWILESPFVGFAPELKPSWLTVASGRLAAHVMPNFKMYRPIPPEHITRSVDVQESIRNDPLMHDYGTLQGLSGMLDRTNGLSDGKLVISKNVHSLFMMHGDGDKTTSHDKSKEWCDRQTTIKDKKFKSFPGFLHQLHADPGREEFYEDVASWILERSGDAAAAPESKL

SEQ ID NO: 25640 - DNA, 3725 bp, Muscodor strobelii
  misc_feature: SGI EST ID NO. CUFF.60684.1
  misc_feature: Variant of the nucleotide sequence at SEQ ID NO 25638
ctgacattgtgcctcggtcaatcgagaagcactgtctcagcactctaaaattactctttcatcatttccttccttattgtgctgagaatacaatatatgaaagacgatcgctattggacaagtcggtctcattcatcgaatgattcaggtaccatttgacgattcagttgctgcatgacacccatcattccaatccaaggatcataattcgaacccgattggaatacgcgcatcttgacctcatactcctttcaaacaaactcaattcaaatcaagaaagagaacttcatcatttcatctgaaccatccaaactttcaaccatcttagacctgtcagtctcattagaattcgagatggcgaaggttacagaaggcacaattaatatcgatggcgcgagcctcttcacaaaatcatgggtacccgagggtccactaaaagccaaaatgatcatgatccacggattcagtgaccacatggaccggtatctaggcttctttccatatctcgcagagcgcggcatagcagtgtacggcttcgatcagcgaggatgggggcgcagcgcaccaaaccatgaagacaaaggcaagaccggtcccacaaagcgtgtactcgcggacatggtgactttcatcaagacccaacttccctcagaagtgcccgtcttcatactcggccactcaatgggcggcggtcaagctctcaccctcgcctcaacaccagagtacgaggacatagtcaagcaaattcgcggctggatcctagaatcgccgttcgtcggtttcgcacccgagttaaagccgagctggctcacagtcgccagcggtcgtctcgcagcgcacgtcatgcccaacttcaagatgtacagaccgatcccacccgagcacatcacgcggtcagtggacgtgcaggaatctatccgcaacgatccgcttatgcacgactacggtactttgcagggactttcaggaatgctagaccggacgaatggcttatcggatgggaaacttgtgataagcaagaatgtccactcgctgttcatgatgcacggtgatggcgacaagacgacgagccacgataagagtaaagagtggtgtgatcgccagactacgatcaaggataagaagtttaagagtttccccggattcttgcatcagcttcatgctgatcctgggagggaggagttttacgaggatgttgcgtcgtggattctcgagaggagtggtgatgcggcggctgctccggagtcaaaattgtgagatgtgggtaaggggccaatgagccgagtgtgagataggatggcctaatgataatgtatgttgtttcttgacgaattgttgtagttactgtatgcatatcgcattaataagagatgccggactatgccgcattgtatgatttcatactggcgagttttaccgggaaagcgcctacttgcgccggtaagcctagatgtttagattggaattgtcaggtgctaactgataggactaaagcatccaatgtaaaaatgccggtgattttcctacagcgaacgttttcaatgttccgcttcttatcaacccgtacatcgttcttccggcggccgccattcaagccccaacctctcaaacacccgtctctctgcagtcagcatatccggcgcgggattcccatgcgcgtcgctctcgagatctacccattccccgttaccggtacgactccgcgcaccactgctatcgaacttgagccgcttctctttattgcaataacgtcgaagatcacgctcaaatgtcgtggcgcccgtccagcctactatcgcacaccctactgttttccatggagatatgatgatatcgactcggcgacgtgtattgggatttttagctgccacttttttgtcccagactggatcttgccacatgaccaaggctttatctaacgtgtcgaatcctccggctttcttgtcctctcctttccaagctaccggatcctggccacgctcactattcttgtcggacattgtgagcatatgggtgatgtagccaccaccctcgaggctccttacaatagcattgataaagaagtgtgtggccttcgggtccgggtggctcagtatgacgtcaacatcaccacaggtcgacttgcctcttcgatagcctcctacgatgaccatctgaaagccctcttcaatcttttttgcatgtttcaagatggtaccagcaatggattcaacttctgtgcgggagattcgttcttggatgtcatcgtagtacttcaagccgatttgttggactcgactgatatcatcccagccgaactccgcaatgtcgtcgagatccctccagcccttgttgtaaaagtcgtgagcggttttcgcggccacgccccatatatcgtagaacagcaagagtaccctcagccgctcgtcggaggcagcctcttgaacttcgtccagatacccgttggttttccattgttggtaaagagctgcgattttagaactacacccaggtagtctcgcaacctctgcaaaagaatgagtcttgtcgagggaccctgacgtggatagtatgcttaccaattgaagacgagagtaaatgagggtacgccgccacagctgcaatacttgaagagtatgccctcactcccacttcatcgccctctaattgtctgagcgtcctcaccttcttcagctgctcgatgaatgcatcgtttcgtgggttggaaggagtaggtcgctgacaggagtatggcgtatgtaaatatttgggcacaggcggcaaatttgccgcgtcctcgtcttctgaagtcgtctccggaacaagatgtggacgctttgcctggcttgatcgggggtgatatttggagtgtgcatgaccagaacgtgattgaccctgagatgaacctacagcgccttctatatcttccctggcacgcctcagtatgtctttcggatcaggccgaggtttgttgaccactttcgtaatgataggcgactgtttccggcctcggtacaccaaatagtccttcacaggtaaaacttcgccctgcgcttggcaatcggtgaaccaagcaagcttgaccacctcgactattgaatcatcatcattccgaggacggctcggcgacgaaagattgcttgcagcgtctccgtcattggaatcggtatccgaagctgtgctttcgtcagatctgggtgagtgaggtcctttgccttcaacctttctacgctttgctctgggttgtgagctgcctgagctatcgacggctttggtttcggtgggcgctaaggcaatctcctcagttgaaagtttccgaaatttgagctctagaattgcacgcagcctcctggtcactttccccaatatgattctggcttcattgatgtcataggtcagggtagggatctgactttcgagttctggtagctcatcatcgttgaagtgggtcggcaacaggtatattgtcgggaactcaagatttttggccatgatgtcgcgctgctacagccgtcttgatgcgacaagcgcttttgcgtttcatttcatcacaggatcccattccttcacccgttcctgtcaaagttcacactgaggtgtataaaccggcgcggcggaagggtacagactgatagttttcaaaagacagggaactcgaaatgagatatagccttggaaaggtagatttgtgacactacgagctgaacataggatgaaaaaaattcgagccatgaagcctgttgact

SEQ ID NO: 25641 - DNA, 1131 bp, Muscodor strobelii
  misc_feature: SGI cDNA ID NO. 568753
  misc_feature: Encodes the peptide sequence at SEQ ID NO 25642
atgtcggatgaggctggtccttctggaacgcaaagcttgccgccgagcgaagtagccttgcctagtagcgattcttccgcatctaccagttcacgtaataacactcctcagagttcgactgttgtcgtgagctccaccgtagaaggcacaagcgatgttgctcgacaagggtcagacgaagtggacttaagcctctctcgtagtgccattcgattctggaacgaaatgcgggtgtggagaagacatacttatcaaatattgcatgaatatgttcgctggaatccacctaccaacaccctgaccaatcgcggagccgatgaacgaacagctctcctatcggagacaactccctctaatactgctgctatcgtttccgcggcagagacaggtgccgataattattacaacagtaacatatcttgggaaaaggctttgaccctagaacagggcagcgaagtaaaagcacacctggatactattacacgaatactcaataacatgaaactcgacgccaaaaatagtgctcgattacagaaaatcgaagcagaagccaaagctacagcagaagccgctgatgaggcagagaccagcgctcaagcagaagccaagggcaagaaagtagctggtagggaacaaggcgatggcgatggcgactcatctgacgaattctcattctcgaaaaaagagcaggaaatcatccgactctactggaagcttatctgtacgaggacattatggttgatggaatccgtcgccagaagatcaacatggttcttttatccgactcaaacaagcctgctaattcgcgaactcaaaaacacaacaggcccaaccgtccaagggtatcttctccaggccgagagagaattgataatgattgaggccctgccgcggacggagcgtgcaccaaaagttctcggagcagtagagaccctcgccaagcgaatagacgatgcagtttcaaacaataacaagcaccggcaccaagggacaaagatcatcagcacgagaattacgtggatgttcggcatcacactaagcaccgggttgaccgtcgccggctggtatgctggcaaaaaggccggtcaaagagctctggaaggttctcaaactggagccgagggggcctaa

SEQ ID NO: 25642 - protein, 376 aa, Muscodor strobelii
  misc_feature: SGI Peptide ID NO. 568753
MSDEAGPSGTQSLPPSEVALPSSDSSASTSSRNNTPQSSTVVVSSTVEGTSDVARQGSDEVDLSLSRSAIRFWNEMRVWRRHTYQILHEYVRWNPPTNTLTNRGADERTALLSETTPSNTAAIVSAAETGADNYYNSNISWEKALTLEQGSEVKAHLDTITRILNNMKLDAKNSARLQKIEAEAKATAEAADEAETSAQAEAKGKKVAGREQGDGDGDSSDEFSFSKKEQEIIRLYWKLICTRTLWLMESVARRSTWFFYPTQTSLLIRELKNTTGPTVQGYLLQAERELIMIEALPRTERAPKVLGAVETLAKRIDDAVSNNNKHRHQGTKIISTRITWMFGITLSTGLTVAGWYAGKKAGQRALEGSQTGAEGA

SEQ ID NO: 25643 - DNA, 795 bp, Muscodor strobelii
  misc_feature: SGI cDNA ID NO. 568754
  misc_feature: Reduced expression when VOC is produced
  misc_feature: Encodes the peptide sequence at SEQ ID NO 25644
atgtccgcatccaaatctaagatcaagctaggcgtctatatccctggcgaagtgcaactactagacctagcttgcgtagatctctttcatatgatgagcaaagagtacttgcaagtgatacctatgttaccaaagcacatagtcgatatagcgccgagcgtagacatcctatacatcacggccgccactacacctcggtcatcagtcactccatcggacacaactacaacaagcgcttctaagaggctcatggtgccgctctcggctcaagcgacgatgcgggcaacacatcagatcactgacgccgaagtccaaccagggagtcttgacattctcctcgtaccgggcccggatcccagcgcgtcatgggaccagccagtgctcgacttcctgcgagcgcacggcgaggcatcgggcacagacgtgctcagcatctgcacgggaatcttcctttgcggcgccgcaggtctactagacggcgggcgaaccgcgtgcggaccacgtggtctgcaggatattgtgcgcaagaaacatccaggcgtcatattagtcggcgagaagtatcgatggattcaagacggcaacttttggtcatcaggcggcatcaccaacggcaatgatctcgtagctgcgtacgcgcggacgggaaagcattttccatcggccatcgttgaagtggcttgtaagatggcggacgtgggggatcgcggccagctgtactcagaaggacaaacggctttcaccattgggttcgtgtggcagttggtgaagggatggttttctccacgccggtaa

SEQ ID NO: 25644 - protein, 264 aa, Muscodor strobelii
  misc_feature: SGI Peptide ID NO. 568754
  misc_feature (4)..(260): NCBI GI: 256734433 Blast Desc: NECHADRAFT_74693 [Nectria haematococca mpVI 77-13-4]
  misc_feature (1)..(260): NCBI GI: 46108356 Blast Desc: FG01060.1 [Gibberella zeae PH-1]
  misc_feature (1)..(199): NCBI GI: 116182512 Blast Desc: CHGG_01884 [Chaetomium globosum CBS 148.51] gi|88186181|gb|EAQ93649.1| CHGG_01884 [Chaetomium globosum CBS 148.51]
  misc_feature (8)..(258): NCBI GI: 121704858 Blast Desc: ThiJ/PfpI family protein [Aspergillus clavatus NRRL 1] gi|119398838|gb|EAW09266.1| ThiJ/PfpI family protein [Aspergillus clavatus NRRL 1]
  misc_feature (7)..(241): NCBI GI: 212544622 Blast Desc: ThiJ/PfpI family protein [Penicillium marneffei ATCC 18224] gi|210065434|gb|EEA19528.1| ThiJ/PfpI family protein [Penicillium marneffei ATCC 18224]
  misc_feature (1)..(243): NCBI GI: 240109940 Blast Desc: DJ-1/PfpI family protein [Coccidioides posadasii C735 delta SOWgp]
  misc_feature (6)..(263): NCBI GI: 255944175 Blast Desc: Pc20g03020 [Penicillium chrysogenum Wisconsin 54-1255] gi|211587590|emb|CAP85631.1| Pc20g03020 [Penicillium chrysogenum Wisconsin 54-1255]
  misc_feature (1)..(226): NCBI GI: 119184665 Blast Desc: CIMG_07108 [Coccidioides immitis RS]
  misc_feature (4)..(258): NCBI GI: 119493047 Blast Desc: ThiJ/PfpI family protein [Neosartorya fischeri NRRL 181] gi|119411939|gb|EAW21882.1| ThiJ/PfpI family protein [Neosartorya fischeri NRRL 181]
  misc_feature (5)..(258): NCBI GI: 71000501 Blast Desc: ThiJ/PfpI family protein [Aspergillus fumigatus Af293] gi|66852571|gb|EAL92896.1| ThiJ/PfpI family protein [Aspergillus fumigatus Af293] gi|159127947|gb|EDP53062.1| ThiJ/PfpI family
  misc_feature: Useful for introducing or modulating the production of volatile compounds
MSASKSKIKLGVYIPGEVQLLDLACVDLFHMMSKEYLQVIPMLPKHIVDIAPSVDILYITAATTPRSSVTPSDTTTTSASKRLMVPLSAQATMRATHQITDAEVQPGSLDILLVPGPDPSASWDQPVLDFLRAHGEASGTDVLSICTGIFLCGAAGLLDGGRTACGPRGLQDIVRKKHPGVILVGEKYRWIQDGNFWSSGGITNGNDLVAAYARTGKHFPSAIVEVACKMADVGDRGQLYSEGQTAFTIGFVWQLVKGWFSPRR

SEQ ID NO: 25645 - DNA, 4295 bp, Muscodor strobelii
  misc_feature: SGI EST ID NO. CUFF.60746.0
  misc_feature: Variant of the nucleotide sequence at SEQ ID NO 25643
ttcatcttcaatagaaccagaccattcattcaacgataaatcatctccctataattgattatcgtatcaggagacaccattatgtccgcatccaaatctaagatcaagctaggcgtctatatccctggcgaagtgcaactactagacctagcttgcgtagatctctttcatatgatgagcaaagagtacttgcaagtgatacctatgttaccaaagcacatagtcgatatagcgccgagcgtagacatcctatacatcacggccgccactacacctcggtcatcagtcactccatcggacacaactacaacaagcgcttctaagaggctcatggtgccgctctcggctcaagcgacgatgcgggcaacacatcagatcactgacgccgaagtccaaccagggagtcttgacattctcctcgtaccgggcccggatcccagcgcgtcatgggaccagccagtgctcgacttcctgcgagcgcacggcgaggcatcgggcacagacgtgctcagcatctgcacgggaatcttcctttgcggcgccgcaggtctactagacggcgggcgaaccgcgtgcggaccacgtggtctgcaggatattgtgcgcaagaaacatccaggcgtcatattagtcggcgagaagtatcgatggattcaagacggcaacttttggtcatcaggcggcatcaccaacggcaatgatctcgtagctgcgtacgcgcggacgggaaagcattttccatcggccatcgttgaagtggcttgtaagatggcggacgtgggggatcgcggccagctgtactcagaaggacaaacggctttcaccattgggttcgtgtggcagttggtgaagggatggttttctccacgccggtaatgggcaaggcattcaagagaagatcgtctgatttcttataggacaagggcgcgagggagacctccgtgccatagaaagacggagacatatattaatcaaacctgtcataggtagctatagctagcaataccactttcaactgcaggtgtctagtacaggaatttcgagttaggggtatcatccgtcaacatgacaagcctcgaaatatccaagtgtacgatgcatcattttcctccgaagatccgcataagacgatctactgaatagtggtacatagctaagttgtagacaagcacaactcatgggtaaggaagtatagaacatcgatagttttgtcgaggacttctattgttaagtacctggacgagggaagtcacgtgttttcgagacagaaaaagatgatgaacgcgccatgtttttagcggccgatgatccctacgacgctgggcgtgacgtagccccctcctcggcctgcgactcactctctgactcccattccaagggtttgcgcacaccatcctcacattgatattttggcatgattatggcacatagagagcagcccattgactgcgcgattcgtctgtcgatttgcttcatacagccatgcacgatgaatgcgcccggcgtctagcaatgatgttcccaaccgctatatagtgcaatacgtcccagccacgccagctatccggtcgcaatggttggcaggaagcgcaaagctcctgccgggcagtcctcctcgtcgcgacggacaagatcgagcgcccggccagatgatgtgcccgacatctaccgcaacatgctcaaggatgcccacgtccagcccaccgccgccccgacttccacttcccccgaccggcccatcaagagacgacgtcccggacagcgcccgcagcagcctgctaaatcaccaaactccgacaaaggaaaggcagtcgagagtttcgtagcagtaccatcgaatgcagaccaagactccgggagcgagggcgagagcgagagcgacgacgatgtgcagttcgaagatgtcgcagtccccaccgccactgtccagacgctgtatcgcgactccgacgatgaagcagactccgacgaggatgccgccgacttcgaagatgttgactttgctgccctacatgcgtccgtcatggaccctgtgcccaatgctcctgccgaaatagaactcgatctatctgcccggactcagaatgcgccttctaggactgtcgatcggcggaagccaatcaacaaggaagagaaagaccgccgcattgagattcacaagactcatcttctctgcttattgagtcacgtcgctcgtaggaatcgctggtgcaacgatacccaggttcaagatagtctgcggccactcttgaccaagaagatgatcaaggagctgaacccgccttcccatctcacccagttcggacaggccaactcgatcaaagaagggctcgccaaggtcaatagcatgtttaatgtcaagtttcaaatcaccgagcgaggcatgaggagagccctatgggcagagaaggaggagcatctaacagattacaatctgccgcccaatgccgaatcgcccatggacaagtccgacttcagagaagctgcgaagacgctggagggctcgcgtgacgtgggtgcccaactgtattgcgcgcttctgcgttctgcaggtgtggatgccaggctggtttgctcactgcagccgctctcatttagctctgctgggccatacatgggagccggtcgaaaaaggaagcaaatactatctctagaacagaaatatggccagctattcaaagacgagagccctgttgcagatccttcaggtccccttccacctcggagacggctaggacatccgagtgcggcagctttcaagctccctgaaattagtgcgccctcatcacagcaaatgacaccagcatccaagaatattcgcgaatccccttatccagtttattgggtggaggttctagatataggccatcagaaatggcaacccaccgatccactagctacggaatccatctggaaaccccagaaactcgagccgccagcaaccgatcgagagaattgcatgacatacgtagtaggatttgaagacgatggaacggcaaaagatatcaccaagcgttacacgaaagcgtacaatgcaaaaactagaaagttgcggatagaaagcgtagtcgcgaatggcgaccgctggtggcgcaaagctcttcgagcctactcgcgaggcttcacgagcgacctggaccaaatcgaaaccaacgaattggctgcggccgaatcgcgcgagccaatgccgcgcaacattgcagacttcaaagatcatcctgtttatgctttggagcgccatttcaggaggcaagaagtcctggtgcctggcgctaaattatctggcaccgttggagctggtagtacagcccctgttgagaagatatacagacgcacagatgttcgaattgctcgtagcagggacaaatggtatcggctagggagagaagtcaagcccaacgaaataccagcaaagttcttaacaaagctatcacagatgcacgaagatcttttcagcgatgacataccggaactgagagaaggtgagacaaatggcacgccgatttatacaatagaccagaccgatctttataagccaccccctgttttgaacggcaaagtgcccaaaaatcgatatggtaatttggatttatatgtccccagtatggttccggatggtgggacgtacattgcagatgatttaggtgctcgtgcggctttcatcttgggaatcgattatgcgcctgctcttaccgggttccttttcaaagggagaaagggaacagctgttatccatggcgttgttgtcgcgacggagaacgcagaggcggtgcgagccgtaattactgggcttagggatcaggagaccgaaatggaaagtgagaggaggacgcgagaagtgctgagaacatggagacgatacttgatgagccttcgaataaggcaacggatttgggcgggagcggatcccgatgatgaggacggagatgacgtggaagacgaggcaaaacgggcccccgatacccccgacagccccgaaattgatgatgactatgcgggaggctttgttctagactgatcaatctgccatgccaatacgcgatacgacgatggaggaatctcaaagaacttggggtctatgaacactcgtatgataggtagtggctttgcattcttggcctatcgcggtggaatagtggcatactcaatcgggcaactgttcctacgaaggaattcggcaaaccttgccggaaattggacagggatgacaaatactacactatgcgcccgtacactgataattttgcatcgcgtagttaatctcgcgtttagtgatttctctcaatgtgtacgtg

SEQ ID NO: 25646 - DNA, 2445 bp, Muscodor strobelii
  misc_feature: SGI cDNA ID NO. 568755
  misc_feature: Reduced expression when VOC is produced
  misc_feature: Encodes the peptide sequence at SEQ ID NO 25647
atggttggcaggaagcgcaaagctcctgccgggcagtcctcctcgtcgcgacggacaagatcgagcgcccggccagatgatgtgcccgacatctaccgcaacatgctcaaggatgcccacgtccagcccaccgccgccccgacttccacttcccccgaccggcccatcaagagacgacgtcccggacagcgcccgcagcagcctgctaaatcaccaaactccgacaaaggaaaggcagtcgagagtttcgtagcagtaccatcgaatgcagaccaagactccgggagcgagggcgagagcgagagcgacgacgatgtgcagttcgaagatgtcgcagtccccaccgccactgtccagacgctgtatcgcgactccgacgatgaagcagactccgacgaggatgccgccgacttcgaagatgttgactttgctgccctacatgcgtccgtcatggaccctgtgcccaatgctcctgccgaaatagaactcgatctatctgcccggactcagaatgcgccttctaggactgtcgatcggcggaagccaatcaacaaggaagagaaagaccgccgcattgagattcacaagactcatcttctctgcttattgagtcacgtcgctcgtaggaatcgctggtgcaacgatacccaggttcaagatagtctgcggccactcttgaccaagaagatgatcaaggagctgaacccgccttcccatctcacccagttcggacaggccaactcgatcaaagaagggctcgccaaggtcaatagcatgtttaatgtcaagtttcaaatcaccgagcgaggcatgaggagagccctatgggcagagaaggaggagcatctaacagattacaatctgccgcccaatgccgaatcgcccatggacaagtccgacttcagagaagctgcgaagacgctggagggctcgcgtgacgtgggtgcccaactgtattgcgcgcttctgcgttctgcaggtgtggatgccaggctggtttgctcactgcagccgctctcatttagctctgctgggccatacatgggagccggtcgaaaaaggaagcaaatactatctctagaacagaaatatggccagctattcaaagacgagagccctgttgcagatccttcaggtccccttccacctcggagacggctaggacatccgagtgcggcagctttcaagctccctgaaattagtgcgccctcatcacagcaaatgacaccagcatccaagaatattcgcgaatccccttatccagtttattgggtggaggttctagatataggccatcagaaatggcaacccaccgatccactagctacggaatccatctggaaaccccagaaactcgagccgccagcaaccgatcgagagaattgcatgacatacgtagtaggatttgaagacgatggaacggcaaaagatatcaccaagcgttacacgaaagcgtacaatgcaaaaactagaaagttgcggatagaaagcgtagtcgcgaatggcgaccgctggtggcgcaaagctcttcgagcctactcgcgaggcttcacgagcgacctggaccaaatcgaaaccaacgaattggctgcggccgaatcgcgcgagccaatgccgcgcaacattgcagacttcaaagatcatcctgtttatgctttggagcgccatttcaggaggcaagaagtcctggtgcctggcgctaaattatctggcaccgttggagctggtagtacagcccctgttgagaagatatacagacgcacagatgttcgaattgctcgtagcagggacaaatggtatcggctagggagagaagtcaagcccaacgaaataccagcaaagttcttaacaaagctatcacagatgcacgaagatcttttcagcgatgacataccggaactgagagaaggtgagacaaatggcacgccgatttatacaatagaccagaccgatctttataagccaccccctgttttgaacggcaaagtgcccaaaaatcgatatggtaatttggatttatatgtccccagtatggttccggatggtgggacgtacattgcagatgatttaggtgctcgtgcggctttcatcttgggaatcgattatgcgcctgctcttaccgggttccttttcaaagggagaaagggaacagctgttatccatggcgttgttgtcgcgacggagaacgcagaggcggtgcgagccgtaattactgggcttagggatcaggagaccgaaatggaaagtgagaggaggacgcgagaagtgctgagaacatggagacgatacttgatgagccttcgaataaggcaacggatttgggcgggagcggatcccgatgatgaggacggagatgacgtggaagacgaggcaaaacgggcccccgatacccccgacagccccgaaattgatgatgactatgcgggaggctttgttctagactga

SEQ ID NO: 25647 - protein, 814 aa, Muscodor strobelii
  misc_feature: SGI Peptide ID NO. 568755
  misc_feature (393)..(776): Pfam Id: PF03835 Pfam Desc: DNA repair protein Rad4
  misc_feature (420)..(773): Pfam Id: PF03835 Pfam Desc: DNA repair protein Rad4
  misc_feature (1)..(781): NCBI GI: 46127989 Blast Desc: FG08372.1 [Gibberella zeae PH-1]
  misc_feature (1)..(793): NCBI GI: 256733927 Blast Desc: [Nectria haematococca mpVI 77-13-4]
  misc_feature (1)..(813): NCBI GI: 145607525 Blast Desc: MGG_12211 [Magnaporthe grisea 70-15] gi|145015052|gb|EDJ99620.1| MGG_12211 [Magnaporthe grisea 70-15]
  misc_feature (28)..(774): NCBI GI: 164426063 Blast Desc: NCU04821 [Neurospora crassa OR74A] gi|157071184|gb|EAA31144.2| [Neurospora crassa OR74A]
  misc_feature (4)..(773): NCBI GI: 156047701 Blast Desc: SS1G_09540 [Sclerotinia sclerotiorum 1980] gi|154693935|gb|EDN93673.1| SS1G_09540 [Sclerotinia sclerotiorum 1980]
  misc_feature (22)..(786): NCBI GI: 154293651 Blast Desc: nitrilase [Botryotinia fuckeliana B05.10] gi|150845239|gb|EDN20432.1| nitrilase [Botryotinia fuckeliana B05.10]
  misc_feature (1)..(786): NCBI GI: 261360758 Blast Desc: DNA repair protein rhp41 [Verticillium albo-atrum VaMs.102]
  misc_feature (6)..(812): NCBI GI: 119480163 Blast Desc: DNA repair protein Rad4, [Neosartorya fischeri NRRL 181] gi|119408264|gb|EAW18213.1| DNA repair protein Rad4, [Neosartorya fischeri NRRL 181]
  misc_feature (3)..(790): NCBI GI: 255932581 Blast Desc: Pc12g10230 [Penicillium chrysogenum Wisconsin 54-1255] gi|211582466|emb|CAP80650.1| Pc12g10230 [Penicillium chrysogenum Wisconsin 54-1255]
  misc_feature (26)..(812): NCBI GI: 238487604 Blast Desc: DNA repair protein Rad4, [Aspergillus flavus NRRL3357] gi|220699919|gb|EED56258.1| DNA repair protein Rad4, [Aspergillus flavus NRRL3357]
  misc_feature: Useful for introducing or modulating the production of volatile compounds
MVGRKRKAPAGQSSSSRRTRSSARPDDVPDIYRNMLKDAHVQPTAAPTSTSPDRPIKRRRPGQRPQQPAKSPNSDKGKAVESFVAVPSNADQDSGSEGESESDDDVQFEDVAVPTATVQTLYRDSDDEADSDEDAADFEDVDFAALHASVMDPVPNAPAEIELDLSARTQNAPSRTVDRRKPINKEEKDRRIEIHKTHLLCLLSHVARRNRWCNDTQVQDSLRPLLTKKMIKELNPPSHLTQFGQANSIKEGLAKVNSMFNVKFQITERGMRRALWAEKEEHLTDYNLPPNAESPMDKSDFREAAKTLEGSRDVGAQLYCALLRSAGVDARLVCSLQPLSFSSAGPYMGAGRKRKQILSLEQKYGQLFKDESPVADPSGPLPPRRRLGHPSAAAFKLPEISAPSSQQMTPASKNIRESPYPVYWVEVLDIGHQKWQPTDPLATESIWKPQKLEPPATDRENCMTYVVGFEDDGTAKDITKRYTKAYNAKTRKLRIESVVANGDRWWRKALRAYSRGFTSDLDQIETNELAAAESREPMPRNIADFKDHPVYALERHFRRQEVLVPGAKLSGTVGAGSTAPVEKIYRRTDVRIARSRDKWYRLGREVKPNEIPAKFLTKLSQMHEDLFSDDIPELREGETNGTPIYTIDQTDLYKPPPVLNGKVPKNRYGNLDLYVPSMVPDGGTYIADDLGARAAFILGIDYAPALTGFLFKGRKGTAVIHGVVVATENAEAVRAVITGLRDQETEMESERRTREVLRTWRRYLMSLRIRQRIWAGADPDDEDGDDVEDEAKRAPDTPDSPEIDDDYAGGFVLD

SEQ ID NO: 25648 - DNA, 4352 bp, Muscodor strobelii
  misc_feature: SGI EST ID NO. CUFF.60746.1
  misc_feature: Variant of the nucleotide sequence at SEQ ID NO 25646
ttcatcttcaatagaaccagaccattcattcaacgataaatcatctccctataattgattatcgtatcaggagacaccattatgtccgcatccaaatctaagatcaagctaggcgtctatatccctggcgaagtgcaactactagacctagcttgcgtagatctctttcatatgatgagcaaagagtacttgcaagtgatacctatgttaccaaagcacatagtcgatatagcgccgagcgtagacatcctatacatcacggccgccactacacctcggtcatcagtcactccatcggacacaactacaacaagcgcttctaagaggctcatggtgccgctctcggctcaagcgacgatgcgggcaacacatcagatcactgacgccgaagtccaaccagggagtcttgacattctcctcgtaccgggcccggatcccagcgcgtcatgggaccagccagtgctcgacttcctgcgagcgcacggcgaggcatcgggcacagacgtgctcagcatctgcacgggaatcttcctttgcggcgccgcaggtctactagacggcgggcgaaccgcgtgcggaccacgtggtctgcaggatattgtgcgcaagaaacatccaggcgtcatattagtcggcgagaagtatcgatggattcaagacggcaacttttggtcatcaggtgtgttatgctcgtttcctgttgcagtaccgagatggaactaaccggcaattctaggcggcatcaccaacggcaatgatctcgtagctgcgtacgcgcggacgggaaagcattttccatcggccatcgttgaagtggcttgtaagatggcggacgtgggggatcgcggccagctgtactcagaaggacaaacggctttcaccattgggttcgtgtggcagttggtgaagggatggttttctccacgccggtaatgggcaaggcattcaagagaagatcgtctgatttcttataggacaagggcgcgagggagacctccgtgccatagaaagacggagacatatattaatcaaacctgtcataggtagctatagctagcaataccactttcaactgcaggtgtctagtacaggaatttcgagttaggggtatcatccgtcaacatgacaagcctcgaaatatccaagtgtacgatgcatcattttcctccgaagatccgcataagacgatctactgaatagtggtacatagctaagttgtagacaagcacaactcatgggtaaggaagtatagaacatcgatagttttgtcgaggacttctattgttaagtacctggacgagggaagtcacgtgttttcgagacagaaaaagatgatgaacgcgccatgtttttagcggccgatgatccctacgacgctgggcgtgacgtagccccctcctcggcctgcgactcactctctgactcccattccaagggtttgcgcacaccatcctcacattgatattttggcatgattatggcacatagagagcagcccattgactgcgcgattcgtctgtcgatttgcttcatacagccatgcacgatgaatgcgcccggcgtctagcaatgatgttcccaaccgctatatagtgcaatacgtcccagccacgccagctatccggtcgcaatggttggcaggaagcgcaaagctcctgccgggcagtcctcctcgtcgcgacggacaagatcgagcgcccggccagatgatgtgcccgacatctaccgcaacatgctcaaggatgcccacgtccagcccaccgccgccccgacttccacttcccccgaccggcccatcaagagacgacgtcccggacagcgcccgcagcagcctgctaaatcaccaaactccgacaaaggaaaggcagtcgagagtttcgtagcagtaccatcgaatgcagaccaagactccgggagcgagggcgagagcgagagcgacgacgatgtgcagttcgaagatgtcgcagtccccaccgccactgtccagacgctgtatcgcgactccgacgatgaagcagactccgacgaggatgccgccgacttcgaagatgttgactttgctgccctacatgcgtccgtcatggaccctgtgcccaatgctcctgccgaaatagaactcgatctatctgcccggactcagaatgcgccttctaggactgtcgatcggcggaagccaatcaacaaggaagagaaagaccgccgcattgagattcacaagactcatcttctctgcttattgagtcacgtcgctcgtaggaatcgctggtgcaacgatacccaggttcaagatagtctgcggccactcttgaccaagaagatgatcaaggagctgaacccgccttcccatctcacccagttcggacaggccaactcgatcaaagaagggctcgccaaggtcaatagcatgtttaatgtcaagtttcaaatcaccgagcgaggcatgaggagagccctatgggcagagaaggaggagcatctaacagattacaatctgccgcccaatgccgaatcgcccatggacaagtccgacttcagagaagctgcgaagacgctggagggctcgcgtgacgtgggtgcccaactgtattgcgcgcttctgcgttctgcaggtgtggatgccaggctggtttgctcactgcagccgctctcatttagctctgctgggccatacatgggagccggtcgaaaaaggaagcaaatactatctctagaacagaaatatggccagctattcaaagacgagagccctgttgcagatccttcaggtccccttccacctcggagacggctaggacatccgagtgcggcagctttcaagctccctgaaattagtgcgccctcatcacagcaaatgacaccagcatccaagaatattcgcgaatccccttatccagtttattgggtggaggttctagatataggccatcagaaatggcaacccaccgatccactagctacggaatccatctggaaaccccagaaactcgagccgccagcaaccgatcgagagaattgcatgacatacgtagtaggatttgaagacgatggaacggcaaaagatatcaccaagcgttacacgaaagcgtacaatgcaaaaactagaaagttgcggatagaaagcgtagtcgcgaatggcgaccgctggtggcgcaaagctcttcgagcctactcgcgaggcttcacgagcgacctggaccaaatcgaaaccaacgaattggctgcggccgaatcgcgcgagccaatgccgcgcaacattgcagacttcaaagatcatcctgtttatgctttggagcgccatttcaggaggcaagaagtcctggtgcctggcgctaaattatctggcaccgttggagctggtagtacagcccctgttgagaagatatacagacgcacagatgttcgaattgctcgtagcagggacaaatggtatcggctagggagagaagtcaagcccaacgaaataccagcaaagttcttaacaaagctatcacagatgcacgaagatcttttcagcgatgacataccggaactgagagaaggtgagacaaatggcacgccgatttatacaatagaccagaccgatctttataagccaccccctgttttgaacggcaaagtgcccaaaaatcgatatggtaatttggatttatatgtccccagtatggttccggatggtgggacgtacattgcagatgatttaggtgctcgtgcggctttcatcttgggaatcgattatgcgcctgctcttaccgggttccttttcaaagggagaaagggaacagctgttatccatggcgttgttgtcgcgacggagaacgcagaggcggtgcgagccgtaattactgggcttagggatcaggagaccgaaatggaaagtgagaggaggacgcgagaagtgctgagaacatggagacgatacttgatgagccttcgaataaggcaacggatttgggcgggagcggatcccgatgatgaggacggagatgacgtggaagacgaggcaaaacgggcccccgatacccccgacagccccgaaattgatgatgactatgcgggaggctttgttctagactgatcaatctgccatgccaatacgcgatacgacgatggaggaatctcaaagaacttggggtctatgaacactcgtatgataggtagtggctttgcattcttggcctatcgcggtggaatagtggcatactcaatcgggcaactgttcctacgaaggaattcggcaaaccttgccggaaattggacagggatgacaaatactacactatgcgcccgtacactgataattttgcatcgcgtagttaatctcgcgtttagtgatttctctcaatgtgtacgtg

SEQ ID NO: 25649 - DNA, 4812 bp, Muscodor strobelii
  misc_feature: SGI cDNA ID NO. 568756
  misc_feature: Encodes the peptide sequence at SEQ ID NO 25650
atgactggattctttcgccagacgtggacgttgacggctaagaacttcaaaattattgtacagcggcatccgctttctacagtcatccgagcattcattttgccgattgcactcgcggcattcttaagcttcgcccgaaacctcttcgtctctccagcgcagtacggcattggcgaatcccgctctgtgagatctttggacaatgcgcttcaagctgcagcttcaagtgaacgggacacggtcgccttcgtgaacagtggcttgactggaggtgatattgataaaattatcgatacattagccgatacggttacgaacgctgggaaaaaggcagtaaaactcaccgcggttggagagttaacctcagtatgtcgaagcagtctacgcgggtcatcatattgctatggcgccgtcgtgttcaactcttcgcctaacgagggcaatggcggtatctggaactacactctacgcgcggatggatcgctcggaagtgcaatcatgactgaccaggctgataacgatggccaaatttatacgctgcctctgcaacgtgctgtggactccgccattgcgagtctcggggccccgaatggttcgtctacagccttaccagacacgacagacgaatatccctttacggatttgacccagaaagagcgcgagcaactcattcgccggaactaccagggcgcattaacaaatttccttgcggttgcctttgtcatcatcgtgatcggtgtttgttaccatatgaccggccacatggctacggaacgagaaataggcatgtcacagcttgtcgatgccatgatgcccacacgctatctatggcaagctcaggtcgctcgattatggtctcatcacatctctttctctgtcgtctaccttccaggctgggtcattggctctatcatcgtcgcccggggtgtctgggcgaatactagtgtggcggttgtgcttatatacttcatactagccggtcttgcattctgctcgctgtccattctcggcgctgcatttttcaaaaagtctcagctttctggtgtcgtgacgaccatcgtttatatccttttggctattctcgcccagactctaacgtcgccgaagaccgcaacagtcactgttctcagcttgcttttcacgccttgcaactttgtctactttatgacattcattgcgcggtgggagaaacaaggatttcgtacagatctgcttcatacacctcccgataacccgtgggatttgccaggcctagttctttggattttcctagttgtgcaaattttcgtctaccctattattggcgcctatcttgagcgtgtctttcatgggtctacgactcatggtcgcactatacttcgtggcgaagcggcagctacagctcccgactatgccgttcgcttagaaggattcacgaagatctacaagccgagcgagtttcgacgaatgttctcgttcatttcgaagcctagagacgcagtggtcgctgttgataagctatcgttagatgcagggcgaggtcagatccttgcacttcttggagcaaacggaagcggaaaaagtacgactctcgactcgatcgctggcattagcagggtgacaagtggcggtatcactatcgatggatccggcggcttgggaattgcacctcagaagaatgttttgtgggacgatttgactgtcatggagcacatcaaaattttcaaccggctgaagtcgcctgggaatactgcttcaaaagatgagattcgggcgctcgtcacatctgtagaccttgctcttaaactcgacgcgaagtccaagacattgtctggtggtcaaaaacggaaactacaactgggcatgatgttgacgggtggaagcgccgtgtgctgtgtcgacgaggtttcatctggaattgaccctttgagtcggcgtaaaatctgggacatccttttggcggagcgaggcaaacgaactattattctgacgacgcatttcctcgacgaggccgacctactcgctgaccacattgccatactttcgaaaggtactctccgggcacaaggctcatctgttgagctcaaagagaggttaggctcgggttaccgcattcacgttttcaacgccaaggaaaaccatgactcccctgagatcgaaggtgtcaaacgagtaaaatcttttgacgtgattagctatttggcaccctcttccaaccttgctgctcaagtcatccgcgctttagaagctgcagatattcacgactataagttttccagcccgaccattgaagatgtctttctgcaggtcgccgaggaggtcaagagcgagacaattaggacacccaattgcgaatccaccggtgaaaagaacacgtctttggaagatatcggagttattggagccgaacctgagaaagacaaactcgagctcctctcgggtcgaccaattggcttcttccgacaaacagtagtcttgctgcagaagcgagctacagtcttcaagacgaattggtttccttacgttgctgctctcctcattcccatcgttgccgcagcactggtctcgctctatgtgaaaaatcaaactctcatcagctgtactcccagcgacgcggatgctgctgggaaaacatctgattatacagcattatatgacaacttgtacattgtagctggtccgtcttcagattttgatcctagtacattatcagccctgttcacgccggtcctttcgggctcagacggcaactctggtaccgcgcagaatgcgacgaacagttttgctaaagctctacaccttgttggtaactacgctgatttcaacaacgaggtgattcagtaccgtcgaaatatcacgcccgctgcgtggtgggttggtgacgacaactcgcctccgaccgttgcttacctagctgatagagacgacgtgtatacttcggtgtttggccagaatgcacttgacatcatcctttcaaacacaagtatcgcaacggcgttctctccgtttgcctcgttatttgttcccggcacaggcaactctttacagttgctcgtctatctctgtctcgcattatctgcctatccggctttcctaggtctatacccaaatgtggagcgtcggcgaaatgttcgtggtctacaatactccaacggtgtgcgttcccttccgctgtggtgtgcgtacgtcgctttcgacttcagcatagtcattgtatcatcagcggccgtagctgggatttttgcctcaacggccgacgcatggtaccatgtcgaatacatgttcttgatttttctgctatatggcctggcttcgatattgctgtcatacgtcatctcattgttttgcagcaatcagctctcgacctacgccttcagtgccgctgggcaagctgtgggattcctcgtttatctcatcgcctatttggctgttctcacttacaccccagtcaacaagatcgatcataaccttctaattgtacatttcgttatttcggcctttttcccgatcggcaacgtggttcgcgctctgttcgttggcttgaacctgttttcaaccacatgcgacgggcagcagttccgcaataaccccggtgatatcctcaactatggcggacccattctttacttgattttacaatgtgtcattcttttcattgtactcttatggcatgacagcggtgctggcagaacatttatcagccgcttgacacaaaaggctgtcaaacctaagacggagccatccgcgtcagacgacgaagaggtcgcacatgaacttgatcgcgtcacaagcagcccttcccaggatgatggcctacagaccctacatctgacgaagtcctttggcaagttcacagcggtcgacaatgtcacatttggtgtcaagcatggtgaggtatttgcgcttctcggacccaacggggccggtaaatcaacgacaatttccctgattcgcggtgatatccaacccagccgtaatggcggcgatattcttgtcgagaatacttccgtcacccgcagccgtgccaccgctcgatcccacttaggtgtctgtccccagtttgatgccatcgactcgatgacagtcgaagagcatctaagattctacgcgcgagtccgtggtatccccgacattgagcacaacgtgcgagctgtgctccgagctgtcggtctcgaggcattctcaactcgtatggcgcatgccctctcgggcggcaacaaacgcaaactttcgctcggcattgctttaatgggcaatcctagtgttgtgttgttggatgaaccgtcttctggcctcgatgcagcagcgaagcgtatcatgtggcggacgttaggcgctattgttcctggacgatcaatccttctaacgacgcatagtatggaggaagccgatgctctcgccagtcgcgccggaatcctagcgaagcgaatgctggccatgggcaccattgacaaccttcgcgagcgctttggagacgcagttcacgttcatcttgtaagcaaaacagcgcctcactctacggatgcggaaatggatcatatgcgtgcgtgggtcgtgaagactctccctggcgccgtcgtcgagtccaagacatatcacgggcagatgcggttctcagtcccgggcaactcgatcgggggccgagacgctaccgccaacagcgcggtgggtaaacttgtggtcatgcttgaggaacaaaaggagaaccttggaattgagcattattcatgcacaccaactacgctagatcaagttttcctgacgattgtgggccgacacaacgtacaggaggagggatacacggaaaagaagaaaccgtggtggaggaaatga

SEQ ID NO: 25650 - protein, 1603 aa, Muscodor strobelii
  misc_feature: SGI Peptide ID NO. 568756
  misc_feature (1290)..(1469): Pfam Id: PF00005 Pfam Desc: ABC transporter
  misc_feature (507)..(677): Pfam Id: PF00005 Pfam Desc: ABC transporter
  misc_feature (5)..(1591): NCBI GI: 210076156 Blast Desc: YALI0E16775p [Yarrowia lipolytica] gi|199426928|emb|CAG79630.2| YALI0E16775p [Yarrowia lipolytica]
  misc_feature (4)..(1603): NCBI GI: 171695174 Blast Desc: protein product [Podospora anserina] gi|170947829|emb|CAP59993.1| protein product [Podospora anserina]
  misc_feature (1)..(1600): NCBI GI: 256734425 Blast Desc: NECHADRAFT_31723 [Nectria haematococca mpVI 77-13-4]
  misc_feature (1)..(1599): NCBI GI: 261360611 Blast Desc: ATP-binding cassette sub-family A member 9 [Verticillium albo-atrum VaMs.102]
  misc_feature (31)..(1602): NCBI GI: 145605337 Blast Desc: MGG_09941 [Magnaporthe grisea 70-15] gi|145013156|gb|EDJ97797.1| MGG_09941 [Magnaporthe grisea 70-15]
  misc_feature (4)..(1600): NCBI GI: 169845567 Blast Desc: CC1G_00682 [Coprinopsis cinerea okayama7#130] gi|116509568|gb|EAU92463.1| CC1G_00682 [Coprinopsis cinerea okayama7#130]
  misc_feature (4)..(1591): NCBI GI: 170085915 Blast Desc: [Laccaria bicolor S238N-H82] gi|164651733|gb|EDR15973.1| [Laccaria bicolor S238N-H82]
  misc_feature (4)..(1588): NCBI GI: 242207493 Blast Desc: [Postia placenta Mad-698-R] gi|220731404|gb|EED85249.1| [Postia placenta Mad-698-R]
  misc_feature (78)..(864): NCBI GI: 225683512 Blast Desc: nod factor export ATP-binding protein I [Paracoccidioides brasiliensis Pb03]
  misc_feature (1008)..(1582): NCBI GI: 225683512 Blast Desc: nod factor export ATP-binding protein I [Paracoccidioides brasiliensis Pb03]
MTGFFRQTWTLTAKNFKIIVQRHPLSTVIRAFILPIALAAFLSFARNLFVSPAQYGIGESRSVRSLDNALQAAASSERDTVAFVNSGLTGGDIDKIIDTLADTVTNAGKKAVKLTAVGELTSVCRSSLRGSSYCYGAVVFNSSPNEGNGGIWNYTLRADGSLGSAIMTDQADNDGQIYTLPLQRAVDSAIASLGAPNGSSTALPDTTDEYPFTDLTQKEREQLIRRNYQGALTNFLAVAFVIIVIGVCYHMTGHMATEREIGMSQLVDAMMPTRYLWQAQVARLWSHHISFSVVYLPGWVIGSIIVARGVWANTSVAVVLIYFILAGLAFCSLSILGAAFFKKSQLSGVVTTIVYILLAILAQTLTSPKTATVTVLSLLFTPCNFVYFMTFIARWEKQGFRTDLLHTPPDNPWDLPGLVLWIFLVVQIFVYPIIGAYLERVFHGSTTHGRTILRGEAAATAPDYAVRLEGFTKIYKPSEFRRMFSFISKPRDAVVAVDKLSLDAGRGQILALLGANGSGKSTTLDSIAGISRVTSGGITIDGSGGLGIAPQKNVLWDDLTVMEHIKIFNRLKSPGNTASKDEIRALVTSVDLALKLDAKSKTLSGGQKRKLQLGMMLTGGSAVCCVDEVSSGIDPLSRRKIWDILLAERGKRTIILTTHFLDEADLLADHIAILSKGTLRAQGSSVELKERLGSGYRIHVFNAKENHDSPEIEGVKRVKSFDVISYLAPSSNLAAQVIRALEAADIHDYKFSSPTIEDVFLQVAEEVKSETIRTPNCESTGEKNTSLEDIGVIGAEPEKDKLELLSGRPIGFFRQTVVLLQKRATVFKTNWFPYVAALLIPIVAAALVSLYVKNQTLISCTPSDADAAGKTSDYTALYDNLYIVAGPSSDFDPSTLSALFTPVLSGSDGNSGTAQNATNSFAKALHLVGNYADFNNEVIQYRRNITPAAWWVGDDNSPPTVAYLADRDDVYTSVFGQNALDIILSNTSIATAFSPFASLFVPGTGNSLQLLVYLCLALSAYPAFLGLYPNVERRRNVRGLQYSNGVRSLPLWCAYVAFDFSIVIVSSAAVAGIFASTADAWYHVEYMFLIFLLYGLASILLSYVISLFCSNQLSTYAFSAAGQAVGFLVYLIAYLAVLTYTPVNKIDHNLLIVHFVISAFFPIGNVVRALFVGLNLFSTTCDGQQFRNNPGDILNYGGPILYLILQCVILFIVLLWHDSGAGRTFISRLTQKAVKPKTEPSASDDEEVAHELDRVTSSPSQDDGLQTLHLTKSFGKFTAVDNVTFGVKHGEVFALLGPNGAGKSTTISLIRGDIQPSRNGGDILVENTSVTRSRATARSHLGVCPQFDAIDSMTVEEHLRFYARVRGIPDIEHNVRAVLRAVGLEAFSTRMAHALSGGNKRKLSLGIALMGNPSVVLLDEPSSGLDAAAKRIMWRTLGAIVPGRSILLTTHSMEEADALASRAGILAKRMLAMGTIDNLRERFGDAVHVHLVSKTAPHSTDAEMDHMRAWVVKTLPGAVVESKTYHGQMRFSVPGNSIGGRDATANSAVGKLVVMLEEQKENLGIEHYSCTPTTLDQVFLTIVGRHNVQEEGYTEKKKPWWRK

SEQ ID NO: 25651 - DNA, 7072 bp, Muscodor strobelii
  misc_feature: SGI EST ID NO. CUFF.61247.0
  misc_feature: Variant of the nucleotide sequence at SEQ ID NO 25649
aaacaatattgcaggggttcacagcctccatggccagactcagtcagaacaaaaatgcacaaaactgagagaaccccaccaaaacccgcaccaggcatcagctttcctcaggattaagcctgcaaacgatccccagtagcacacccgtcccacgtcctgcagcagccctcatcccctaacaacggagcgttagacgcatcattatccgtcgttagctcaaacagaggggcgaacttatcacttttgaacgtcgactagtaataggctcattggcatacgtcgtccaagttgtaacacatattttgtatctgtcattccttcattttgttttcttccttctcgtgataggcgcgatctcgtaatttttctacgtttgctcatgagaaggtcatgagtattttgttgtaacacatctaagtggcagcgtcagcgcgccgaccatagcacggatatagcaaacccggcgcacccggatttggtccacctcgaagtcctgcaccatgactggattctttcgccagacgtggacgttgacggctaagaacttcaaaattattgtacagcggcatccgctttctacagtcatccgagcattcattttgccgattgcactcgcggcattcttaagcttcgcccgaaacctcttcgtctctccagcgcagtacggcattggcgaatcccgctctgtgagatctttggacaatgcgcttcaagctgcagcttcaagtgaacgggacacggtcgccttcgtgaacagtggcttgactggaggtgatattgataaaattatcgatacattagccgatacggttacgaacgctgggaaaaaggcagtaaaactcaccgcggttggagagttaacctcagtatgtcgaagcagtctacgcgggtcatcatattgctatggcgccgtcgtgttcaactcttcgcctaacgagggcaatggcggtatctggaactacactctacgcgcggatggatcgctcggaagtgcaatcatgactgaccaggctgataacgatggccaaatttatacgctgcctctgcaacgtgctgtggactccgccattgcgagtctcggggccccgaatggttcgtctacagccttaccagacacgacagacgaatatccctttacggatttgacccagaaagagcgcgagcaactcattcgccggaactaccagggcgcattaacaaatttccttgcggttgcctttgtcatcatcgtgatcggtgtttgttaccatatgaccggccacatggctacggaacgagaaataggcatgtcacagcttgtcgatgccatgatgcccacacgctatctatggcaagctcaggtcgctcgattatggtctcatcacatctctttctctgtcgtctaccttccaggctgggtcattggctctatcatcgtcgcccggggtgtctgggcgaatactagtgtggcggttgtgcttatatacttcatactagccggtcttgcattctgctcgctgtccattctcggcgctgcatttttcaaaaagtctcagctttctggtgtcgtgacgaccatcgtttatatccttttggctattctcgcccagactctaacgtcgccgaagaccgcaacagtcactgttctcagcttgcttttcacgccttgcaactttgtctactttatgacattcattgcgcggtgggagaaacaaggatttcgtacagatctgcttcatacacctcccgataacccgtgggatttgccaggcctagttctttggattttcctagttgtgcaaattttcgtctaccctattattggcgcctatcttgagcgtgtctttcatgggtctacgactcatggtcgcactatacttcgtggcgaagcggcagctacagctcccgactatgccgttcgcttagaaggattcacgaagatctacaagccgagcgagtttcgacgaatgttctcgttcatttcgaagcctagagacgcagtggtcgctgttgataagctatcgttagatgcagggcgaggtcagatccttgcacttcttggagcaaacggaagcggaaaaagtacgactctcgactcgatcgctggcattagcagggtgacaagtggcggtatcactatcgatggatccggcggcttgggaattgcacctcagaagaatgttttgtgggacgatttgactgtcatggagcacatcaaaattttcaaccggctgaagtcgcctgggaatactgcttcaaaagatgagattcgggcgctcgtcacatctgtagaccttgctcttaaactcgacgcgaagtccaagacattgtctggtggtcaaaaacggaaactacaactgggcatgatgttgacgggtggaagcgccgtgtgctgtgtcgacgaggtttcatctggaattgaccctttgagtcggcgtaaaatctgggacatccttttggcggagcgaggcaaacgaactattattctgacgacgcatttcctcgacgaggccgacctactcgctgaccacattgccatactttcgaaaggtactctccgggcacaaggctcatctgttgagctcaaagagaggttaggctcgggttaccgcattcacgttttcaacgccaaggaaaaccatgactcccctgagatcgaaggtgtcaaacgagtaaaatcttttgacgtgattagctatttggcaccctcttccaaccttgctgctcaagtcatccgcgctttagaagctgcagatattcacgactataagttttccagcccgaccattgaagatgtctttctgcaggtcgccgaggaggtcaagagcgagacaattaggacacccaattgcgaatccaccggtgaaaagaacacgtctttggaagatatcggagttattggagccgaacctgagaaagacaaactcgagctcctctcgggtcgaccaattggcttcttccgacaaacagtagtcttgctgcagaagcgagctacagtcttcaagacgaattggtttccttacgttgctgctctcctcattcccatcgttgccgcagcactggtctcgctctatgtgaaaaatcaaactctcatcagctgtactcccagcgacgcggatgctgctgggaaaacatctgattatacagcattatatgacaacttgtacattgtagctggtccgtcttcagattttgatcctagtacattatcagccctgttcacgccggtcctttcgggctcagacggcaactctggtaccgcgcagaatgcgacgaacagttttgctaaagctctacaccttgttggtaactacgctgatttcaacaacgaggtgattcagtaccgtcgaaatatcacgcccgctgcgtggtgggttggtgacgacaactcgcctccgaccgttgcttacctagctgatagagacgacgtgtatacttcggtgtttggccagaatgcacttgacatcatcctttcaaacacaagtatcgcaacggcgttctctccgtttgcctcgttatttgttcccggcacaggcaactctttacagttgctcgtctatctctgtctcgcattatctgcctatccggctttcctaggtctatacccaaatgtggagcgtcggcgaaatgttcgtggtctacaatactccaacggtgtgcgttcccttccgctgtggtgtgcgtacgtcgctttcgacttcagcatagtcattgtatcatcagcggccgtagctgggatttttgcctcaacggccgacgcatggtaccatgtcgaatacatgttcttgatttttctgctatatggcctggcttcgatattgctgtcatacgtcatctcattgttttgcagcaatcagctctcgacctacgccttcagtgccgctgggcaagctgtgggattcctcgtttatctcatcgcctatttggctgttctcacttacaccccagtcaacaagatcgatcataaccttctaattgtacatttcgttatttcggcctttttcccgatcggcaacgtggttcgcgctctgttcgttggcttgaacctgttttcaaccacatgcgacgggcagcagttccgcaataaccccggtgatatcctcaactatggcggacccattctttacttgattttacaatgtgtcattcttttcattgtactcttatggcatgacagcggtgctggcagaacatttatcagccgcttgacacaaaaggctgtcaaacctaagacggagccatccgcgtcagacgacgaagaggtcgcacatgaacttgatcgcgtcacaagcagcccttcccaggatgatggcctacagaccctacatctgacgaagtcctttggcaagttcacagcggtcgacaatgtcacatttggtgtcaagcatggtgaggtatttgcgcttctcggacccaacggggccggtaaatcaacgacaatttccctgattcgcggtgatatccaacccagccgtaatggcggcgatattcttgtcgagaatacttccgtcacccgcagccgtgccaccgctcgatcccacttaggtgtctgtccccagtttgatgccatcgactcgatgacagtcgaagagcatctaagattctacgcgcgagtccgtggtatccccgacattgagcacaacgtgcgagctgtgctccgagctgtcggtctcgaggcattctcaactcgtatggcgcatgccctctcgggcggcaacaaacgcaaactttcgctcggcattgctttaatgggcaatcctagtgttgtgttgttggatgaaccgtcttctggcctcgatgcagcagcgaagcgtatcatgtggcggacgttaggcgctattgttcctggacgatcaatccttctaacgacgcatagtatggaggaagccgatgctctcgccagtcgcgccggaatcctagcgaagcgaatgctggccatgggcaccattgacaaccttcgcgagcgctttggagacgcagttcacgttcatcttgtaagcaaaacagcgcctcactctacggatgcggaaatggatcatatgcgtgcgtgggtcgtgaagactctccctggcgccgtcgtcgagtccaagacatatcacgggcagatgcggttctcagtcccgggcaactcgatcgggggccgagacgctaccgccaacagcgcggtgggtaaacttgtggtcatgcttgaggaacaaaaggagaaccttggaattgagcattattcatgcacaccaactacgctagatcaagttttcctgacgattgtgggccgacacaacgtacaggaggagggatacacggaaaagaagaaaccgtggtggaggaaatgatgcgagtttcgaattattttatacccgctttgtaaatatcatgggcgaattcagttatggatttctttttgtgcatacacacgtacaggtaggaggaaatctcgcctcgatgtctacttgagagatggaacatggcgttgggactcgttcggatttgtgaactgtatagacacgcatcgcatacatgcaatagattccccttttgtttttcgtgctcgtttcgctcagacttggtcacattgggggttggcagtgaggcgaagatgctgtgcggtttcattcgaagtgctatattcgataccatgacaggccttgttgagtcgatggccccgactatttaaatccgttaatccggttcgggttagcttcacaagcattttcacctctcgtaaatatcccgtgtcggagtaattgctcaaagaatagaacctgcgacagtgtagaatcctacgatgatacttcagccctggggataacagggatagctgtcgaagaaatggtgcaggaatgcgagcgagcgcaaatacccaattgaggttgaacgcaggcataagaacagctctcgttggtcagtctcatacggccttgtgttaggcgaagacatccgtgatgctagtaaaataaccgcatgagagcctcgtcaaccctcgagatggattcacgtctcggactcggatcgcgcaatgtgaaccacatttgctcttccaagacgtataagtcctgtataggagaagcttcaagcaggtcgcatggagggattcaacgtccgagtggtctgttcaggctggatttagaaacatggagttaacaatatcgaagctctgttgaagatggagatcttcgacaccagttgattcgtgtataagtacagcgcattctgtctatctggttcacgatcaatcttgaagtccatcacacatcatctacaggtttcttagattcattaataacagcgacaggcttttagtctccaactaagttgaaactccgaacctgacttctcactcaactcaatgctcttcaacaaactctacctcgccgcatcgatcatggcatccagcacagtcgcgaaatcatcatgcggcactatctacactccacctggatttactcctgctgttcactcgagactgaatgttgtctactctgagctctcatcacccatcgaacccggctctgcccatgtgcgtgctgagctcgtccctcagccatctttggctctcgaccacaaggtgaccaaggaagaccagacgtatttggccatgctcgttgatatcgaccttgtcctgagtgccgacacaccaccgaccaaattgctccattggctcgcgcaagactcgacgctcaagcctggctcagagcacggcctctcctcgctcgccaacacgacggccaacgccgggttctacattgagcctcagccacccaccaacacgacgcatcgctacgtctacttggcttatgagcagcccaagaacttcaagattcctaacggcaccgactacaatgcggatgtaccgaacagccgattctactttgacattgatgcctttgctaaggacgctggtctcggtgcacctgttgccgctaactggatctctgttactggcccaaaagaatgatatggtagaatgtcgagacgataatggtgaagaaacgcatccgtgattcttccaaaagcgaatcgtctgccggccctatgtcttctgtctttctcgacttagcaccagcacctgttaggatagcaatgagaacctaag

SEQ ID NO: 25652 - DNA, 609 bp, Muscodor strobelii
  misc_feature: SGI cDNA ID NO. 568757
  misc_feature: Encodes the peptide sequence at SEQ ID NO 25653
atgctcttcaacaaactctacctcgccgcatcgatcatggcatccagcacagtcgcgaaatcatcatgcggcactatctacactccacctggatttactcctgctgttcactcgagactgaatgttgtctactctgagctctcatcacccatcgaacccggctctgcccatgtgcgtgctgagctcgtccctcagccatctttggctctcgaccacaaggtgaccaaggaagaccagacgtatttggccatgctcgttgatatcgaccttgtcctgagtgccgacacaccaccgaccaaattgctccattggctcgcgcaagactcgacgctcaagcctggctcagagcacggcctctcctcgctcgccaacacgacggccaacgccgggttctacattgagcctcagccacccaccaacacgacgcatcgctacgtctacttggcttatgagcagcccaagaacttcaagattcctaacggcaccgactacaatgcggatgtaccgaacagccgattctactttgacattgatgcctttgctaaggacgctggtctcggtgcacctgttgccgctaactggatctctgttactggcccaaaagaatga

SEQ ID NO: 25653 - protein, 202 aa, Muscodor strobelii
  misc_feature: SGI Peptide ID NO. 568757
  misc_feature (14)..(199): NCBI GI: 189209766 Blast Desc: conserved [Pyrenophora tritici-repentis Pt-1C-BFP] gi|187977308|gb|EDU43934.1| conserved [Pyrenophora tritici-repentis Pt-1C-BFP]
  misc_feature (6)..(199): NCBI GI: 169615585 Blast Desc: SNOG_10951 [Phaeosphaeria nodorum SN15] gi|111060330|gb|EAT81450.1| SNOG_10951 [Phaeosphaeria nodorum SN15]
  misc_feature (51)..(198): NCBI GI: 145605814 Blast Desc: [Magnaporthe grisea 70-15] gi|145013598|gb|EDJ98239.1| [Magnaporthe grisea 70-15]
  misc_feature (29)..(197): NCBI GI: 119481933 Blast Desc: NFIA_090560 [Neosartorya fischeri NRRL 181] gi|119409149|gb|EAW19098.1| conserved [Neosartorya fischeri NRRL 181]
  misc_feature (28)..(201): NCBI GI: 242796577 Blast Desc: conserved [Talaromyces stipitatus ATCC 10500] gi|218719416|gb|EED18836.1| conserved [Talaromyces stipitatus ATCC 10500]
  misc_feature (51)..(197): NCBI GI: 121716468 Blast Desc: conserved [Aspergillus clavatus NRRL 1] gi|119403974|gb|EAW14391.1| conserved [Aspergillus clavatus NRRL 1]
  misc_feature (28)..(200): NCBI GI: 145229777 Blast Desc: An01g07730 [Aspergillus niger] gi|134055308|emb|CAK43870.1| protein product [Aspergillus niger]
  misc_feature (51)..(197): NCBI GI: 71002374 Blast Desc: conserved [Aspergillus fumigatus Af293] gi|66853506|gb|EAL93830.1| conserved [Aspergillus fumigatus Af293] gi|159129924|gb|EDP55038.1| conserved [Aspergillus A1163]
  misc_feature (28)..(195): NCBI GI: 242809416 Blast Desc: conserved [Talaromyces stipitatus ATCC 10500] gi|218715989|gb|EED15411.1| conserved [Talaromyces stipitatus ATCC 10500]
  misc_feature (8)..(197): NCBI GI: 169601368 Blast Desc: SNOG_03548 [Phaeosphaeria nodorum SN15] gi|111067633|gb|EAT88753.1| SNOG_03548 [Phaeosphaeria nodorum SN15]
MLFNKLYLAASIMASSTVAKSSCGTIYTPPGFTPAVHSRLNVVYSELSSPIEPGSAHVRAELVPQPSLALDHKVTKEDQTYLAMLVDIDLVLSADTPPTKLLHWLAQDSTLKPGSEHGLSSLANTTANAGFYIEPQPPTNTTHRYVYLAYEQPKNFKIPNGTDYNADVPNSRFYFDIDAFAKDAGLGAPVAANWISVTGPKE

SEQ ID NO: 25654 - DNA, 7072 bp, Muscodor strobelii; identical to SEQ ID NO: 25651
  misc_feature: SGI EST ID NO. CUFF.61247.0
  misc_feature: Variant of the nucleotide sequence at SEQ ID NO 25652

SEQ ID NO: 25655 - DNA, 1008 bp, Muscodor strobelii
  misc_feature: SGI cDNA ID NO. 568758
  misc_feature: Elevated expression when VOC is produced
  misc_feature: Encodes the peptide sequence at SEQ ID NO 25656
atgccgagcttcctctccgtggtcttcggctcgtcaaacaaaggcggtgccaaattcgaagccaaacgggatatcccatccctagcgggaaaagtcatactggtcactggggccgcaggcgacttgggcagacaaacggccacagagctgtcgcgatacggacgcccggcccgtctgtacatcgccgatcttccacgcgatgaggttgcgaagaaagaggtcgttaaccgtgtctcgcgtgacgcgtatagcgaggaaacaaccaaggaaggcgaagcaagtgcccaaacagaagtccactttctagacttagatctttcgtcctttgagagtatcagaaagtgcgccacagaatttctcgtcaaggaaaaccgtctagatattcttgtcttgaacgccggcataatcagtgtaccgccgaaaacgacggggcagaattatgaaatccacttcgggatcaactacctcggacacacgcttttcacgcgattattaacaccagtgttgttacgaacggcggaggaggagaagtccgctgtgcggctagtgattgtgtccagcgaaggccataccgtgacgcctaaaggcgggatccaattcaacaggctgaagtctccaatggatgggttgtcatggacctctcggtacgggcagagtaaattagcgcttctcgctctgacacgagggctcgccaaacgctatccacagataacggtcgcggctgtgcatcccggacgagtcatcacgggcatgggtgacaagctccgtaaggaaagcgttctcatacgcatgacgaagccgatcgcgccgttggtcgccgttcccgtgaccgttggcgccaggaatcatctctgggttgctactagccctcaagtagtcagtggcagctactacgaacctgttggtgtgttagccgaaggatcagcaatgtcaagagatgaaaagcttattgagaagctctgggagtggactgataccgagctaaagggtcacgactcgcttgaataa

SEQ ID NO: 25656 - protein, 335 aa, Muscodor strobelii
  misc_feature: SGI Peptide ID NO. 568758
  misc_feature (31)..(235): Pfam Id: PF00106 Pfam Desc: short chain dehydrogenase
  misc_feature (7)..(335): NCBI GI: 119490106 Blast Desc: NFIA_062320 [Neosartorya fischeri NRRL 181] gi|119411128|gb|EAW21071.1| NFIA_062320 [Neosartorya fischeri NRRL 181]
  misc_feature (19)..(331): NCBI GI: 145246022 Blast Desc: An12g01730 [Aspergillus niger] gi|134079972|emb|CAK48456.1| protein product [Aspergillus niger]
  misc_feature (19)..(332): NCBI GI: 255953377 Blast Desc: Pc21g03920 [Penicillium chrysogenum Wisconsin 54-1255] gi|211589152|emb|CAP95289.1| Pc21g03920 [Penicillium chrysogenum Wisconsin 54-1255]
  misc_feature (15)..(331): NCBI GI: 256730450 Blast Desc: NECHADRAFT_29805 [Nectria haematococca mpVI 77-13-4]
  misc_feature (19)..(331): NCBI GI: 145253595 Blast Desc: An17g00810 [Aspergillus niger] gi|134083878|emb|CAK43009.1| protein product [Aspergillus niger]
  misc_feature (16)..(331): NCBI GI: 261205394 Blast Desc: short-chain dehydrogenase/reductase [Ajellomyces dermatitidis SLH14081] gi|239592493|gb|EEQ75074.1| short-chain dehydrogenase/reductase [Ajellomyces dermatitidis SLH14081]
  misc_feature (16)..(331): NCBI GI: 239611352 Blast Desc: short-chain dehydrogenase/reductase [Ajellomyces dermatitidis ER-3]
  misc_feature (15)..(331): NCBI GI: 156043893 Blast Desc: SS1G_10950 [Sclerotinia sclerotiorum 1980] gi|154695337|gb|EDN95075.1| SS1G_10950 [Sclerotinia sclerotiorum 1980]
  misc_feature (19)..(331): NCBI GI: 115399782 Blast Desc: conserved [Aspergillus terreus NIH2624] gi|114191146|gb|EAU32846.1| conserved [Aspergillus terreus NIH2624]
  misc_feature (22)..(328): NCBI GI: 256729544 Blast Desc: NECHADRAFT_84229 [Nectria haematococca mpVI 77-13-4]
  misc_feature (33)..(249): SWISSPROT Homolog: EC 1.3.1.33 Protochlorophyllide reductase
  misc_feature: Useful for introducing or modulating the production of volatile compounds
MPSFLSVVFGSSNKGGAKFEAKRDIPSLAGKVILVTGAAGDLGRQTATELSRYGRPARLYIADLPRDEVAKKEVVNRVSRDAYSEETTKEGEASAQTEVHFLDLDLSSFESIRKCATEFLVKENRLDILVLNAGIISVPPKTTGQNYEIHFGINYLGHTLFTRLLTPVLLRTAEEEKSAVRLVIVSSEGHTVTPKGGIQFNRLKSPMDGLSWTSRYGQSKLALLALTRGLAKRYPQITVAAVHPGRVITGMGDKLRKESVLIRMTKPIAPLVAVPVTVGARNHLWVATSPQVVSGSYYEPVGVLAEGSAMSRDEKLIEKLWEWTDTELKGHDSLE

SEQ ID NO: 25657 - DNA, 1822 bp, Muscodor strobelii
  misc_feature: SGI EST ID NO. CUFF.60364.0
  misc_feature: Variant of the nucleotide sequence at SEQ ID NO 25655
acgacgttaagatataaactggacggcttataaacaatgaagaagattgagatgtctatcttgaggatcatcgatatatcccaaaactatcgttatgattatggaataatatatagctacgcagacatcatctctcaccaacccctgtccacacgaattcgaatctgactagcctcagtaaattcaaggattaacaggctatcccttcatcagcgtcgcatgcatcttcaacaccagcagatcttgggtttgccataactcgccttcaacatgccgagcttcctctccgtggtcttcggctcgtcaaacaaaggcggtgccaaattcgaagccaaacgggatatcccatccctagcgggaaaagtcatactggtcactggggccgcaggcgacttgggcagacaaacggccacagagctgtcgcgatacggacgcccggcccgtctgtacatcgccgatcttccacgcgatgaggttgcgaagaaagaggtcgttaaccgtgtctcgcgtgacgcgtatagcgaggaaacaaccaaggaaggcgaagcaagtgcccaaacagaagtccactttctagacttagatctttcgtcctttgagagtatcagaaagtgcgccacagaatttctcgtcaaggaaaaccgtctagatattcttgtcttgaacgccggcataatcagtgtaccgccgaaaacgacggggcagaattatgaaatccacttcgggatcaactacctcggacacacgcttttcacgcgattattaacaccagtgttgttacgaacggcggaggaggagaagtccgctgtgcggctagtgattgtgtccagcgaaggccataccgtgacgcctaaaggcgggatccaattcaacaggctgaagtctccaatggatgggttgtcatggacctctcggtacgggcagagtaaattagcgcttctcgctctgacacgagggctcgccaaacgctatccacagataacggtcgcggctgtgcatcccggacgagtcatcacgggcatgggtgacaagctccgtaaggaaagcgttctcatacgcatgacgaagccgatcgcgccgttggtcgccgttcccgtgaccgttggcgccaggaatcatctctgggttgctactagccctcaagtagtcagtggcagctactacgaacctgttggtgtgttagccgaaggatcagcaatgtcaagagatgaaaagcttattgagaagctctgggagtggactgataccgagctaaagggtcacgactcgcttgaataatgcatgttgaaagcatcacctgagaaatgtataatcgagatccaacactggggatctatatttctgcaaggtcttcaatgctgcttccttgactgctcatttgtattttcatatagattgataccttttgtttcaagatagtacttgtactacttttccactggtcaagcatgtctcatctgcaggtattggacttgcgacaccacgttctcgtggggtacttaccttaggcatgtgcaccatcttcaaggtgtgcatcatctcgaaatctgccatgcgatctaatcttatcgaatttgatgtcagatttggagtgaatgcctatttcgatttcccacgttattcatgatattggaatacaacacgtgcgggcgaaatgctcgaaatatgtcgtcaccttgtctcgccctagttttgtgcgagttgacggctgacctgccacgtcaacctaagtcacagccctaaagttcagcgtaaatgtgatatgttccttatcgggctgatggttggggttgccgacattttttgatattgtcgactccgg

SEQ ID NO: 25658 - DNA, 2076 bp, Muscodor strobelii
  misc_feature: SGI cDNA ID NO. 568759
  misc_feature: Encodes the peptide sequence at SEQ ID NO 25659
atgatgaatacagacagggcagctatcgacggccgacaggctgtagctgaagctccctcaaatcgcgtggtgcataaacccgttccaaattcccaagctcaagacccccggagataccaaattgatcaagtgaaaagacgttattcaccgacacagggaatgctgcagaatggaacgacagcacttcgttttcacttcaagccgtcagaccccgacttccctttcgagttggagcatctagactgtgagctgcaaatacctgcctcatatcctactggagcacccacgttgttagtgaggaataaggacataccgcgtggttttggtgttaacattgagcgaggatgggataaactagtcgcagagcagccacgttcaactctcttaagcctcattagtgcgctggataaaaacctggaagcttttttgtcggaacagaaagttgagactgtcacattgatgtccttcaaagacacaagacatctagagagccaagggacttccctcggcaagcaaccagcagtttcctctgcagtgcatccggaacaaaagccgccagcagccccagcagctccagtacttcgaaaaccatacgtgccagaagtttcctttacgaacgagcagatcgccggtgccaaagcgcggcgcgctcaagagatccgacagcttgaagctagaatgggtcgtttgtcactataccagaagtccgcggatggcattgtatacactttacctctagaaccgagacggcgagcagaattaccaccagaattcaaatctgtgcagtccgtgcagcttattatcccactactctaccctctccaagcacttcgaatattactaaacgatgtggagtcgaaagatgccgaaccattggaagaagcgtttggggtaagggctgttcagcagcaaagccagatgactttgatgagccatttgaactacctttcacaaaacatgctggcgcttatcaagcagacgaagacaacgaagcaagaacccgctacaccgatttcagaggatacatcgagagaacgtagcacaaatgcgtcggtaacccaagttgctgcgcctcatgaagaagccaaaagccatattcaagttataccacgccccccagaatggcatcatcaagacttaagtgaatcagactctgactccgagtcgtggacttctggagatgattccgaggaaggcggagcaacagtagaatcacatcattttcagacccctaccgtcacagaacaaatcgaaaagggaacggcgatatcctttcccactattgagcttcatagcatcgaattattgcaagtttcaatcctgaatataagtgtgaaatgccaaagatgcaagacaataaacgaaatcacaggactcaaaactggcacggagaaagcagctagctgcaaaaaatgtagctctccgatgacagccatgttccgagctgagatggtacaccaaaactcctcgagggctggatttgtcgaccttactggctgtacgattgccgatatgctaccaagcactttcatacctagttgcgctacctgctcgaaacagagtcaaggcatagtctcagtacgaggcgaggtcattaccaacgtttgtagagaatgccatggtcgctttacattcaagataccacaagtcaagtttttcaccgttacacctggatctacgctaccactttcaatcggaccacgacgacgagaagagaaactcggactgcacgctggagatccgctgccagaccgtggggcatgttctcactacaggaaatcgtataggtggttcagattctcttgctgtagcaaagtgcatccatgtgataaatgccacgatgaagcccaagatcatccacacgaatgggccaaccggatgatatgcggctggtgtagcagagagcaaaactatgccgtcgaagcctgcgcattctgtgggcgaagcgtcattggcaaaaggggtaagggtttctgggaaggaggcaaagggacccgagacaagactcaaatgagccgtaaagataagcggaaatttaggcgggctggtggtggtgaggcaaataaaagggattga

SEQ ID NO: 25659 - protein, 691 aa, Muscodor strobelii
  misc_feature: SGI Peptide ID NO. 568759
  misc_feature (588)..(648): Pfam Id: PF05495 Pfam Desc: CHY zinc finger
  misc_feature (588)..(639): Pfam Id: PF05495 Pfam Desc: CHY zinc finger
  misc_feature (12)..(681): NCBI GI: 46135893 Blast Desc: FG09462.1 [Gibberella zeae PH-1]
  misc_feature (1)..(691): NCBI GI: 39968817 Blast Desc: MGG_02501 [Magnaporthe grisea 70-15] gi|145013884|gb|EDJ98525.1| MGG_02501 [Magnaporthe grisea 70-15]
  misc_feature (1)..(683): NCBI GI: 261359397 Blast Desc: CHY zinc finger domain-containing protein [Verticillium albo-atrum VaMs.102]
  misc_feature (13)..(689): NCBI GI: 171682496 Blast Desc: protein product [Podospora anserina] gi|170941207|emb|CAP66857.1| protein product [Podospora anserina]
  misc_feature (12)..(689): NCBI GI: 85096352 Blast Desc: NCU04713 [Neurospora crassa OR74A] gi|28921728|gb|EAA31008.1| conserved [Neurospora crassa OR74A]
  misc_feature (13)..(685): NCBI GI: 156034268 Blast Desc: SS1G_13437 [Sclerotinia sclerotiorum 1980] gi|154698840|gb|EDN98578.1| SS1G_13437 [Sclerotinia sclerotiorum 1980]
  misc_feature (12)..(691): NCBI GI: 116202655 Blast Desc: CHGG_09212 [Chaetomium globosum CBS 148.51] gi|88177730|gb|EAQ85198.1| CHGG_09212 [Chaetomium globosum CBS 148.51]
  misc_feature (20)..(690): NCBI GI: 238487768 Blast Desc: conserved [Aspergillus flavus NRRL3357] gi|220700001|gb|EED56340.1| conserved [Aspergillus flavus NRRL3357]
  misc_feature (22)..(681): NCBI GI: 212529522 Blast Desc: conserved [Penicillium marneffei ATCC 18224] gi|210074316|gb|EEA28403.1| conserved [Penicillium marneffei ATCC 18224]
  misc_feature (227)..(689): NCBI GI: 154310893 Blast Desc: BC1G_06425 [Botryotinia fuckeliana B05.10] gi|150851224|gb|EDN26417.1| BC1G_06425 [Botryotinia fuckeliana B05.10]
MMNTDRAAIDGRQAVAEAPSNRVVHKPVPNSQAQDPRRYQIDQVKRRYSPTQGMLQNGTTALRFHFKPSDPDFPFELEHLDCELQIPASYPTGAPTLLVRNKDIPRGFGVNIERGWDKLVAEQPRSTLLSLISALDKNLEAFLSEQKVETVTLMSFKDTRHLESQGTSLGKQPAVSSAVHPEQKPPAAPAAPVLRKPYVPEVSFTNEQIAGAKARRAQEIRQLEARMGRLSLYQKSADGIVYTLPLEPRRRAELPPEFKSVQSVQLIIPLLYPLQALRILLNDVESKDAEPLEEAFGVRAVQQQSQMTLMSHLNYLSQNMLALIKQTKTTKQEPATPISEDTSRERSTNASVTQVAAPHEEAKSHIQVIPRPPEWHHQDLSESDSDSESWTSGDDSEEGGATVESHHFQTPTVTEQIEKGTAISFPTIELHSIELLQVSILNISVKCQRCKTINEITGLKTGTEKAASCKKCSSPMTAMFRAEMVHQNSSRAGFVDLTGCTIADMLPSTFIPSCATCSKQSQGIVSVRGEVITNVCRECHGRFTFKIPQVKFFTVTPGSTLPLSIGPRRREEKLGLHAGDPLPDRGACSHYRKSYRWFRFSCCSKVHPCDKCHDEAQDHPHEWANRMICGWCSREQNYAVEACAFCGRSVIGKRGKGFWEGGKGTRDKTQMSRKDKRKFRRAGGGEANKRD

SEQ ID NO: 25660 - DNA, 2461 bp, Muscodor strobelii
  misc_feature: SGI EST ID NO. CUFF.60376.0
  misc_feature: Variant of the nucleotide sequence at SEQ ID NO 25658
agtcaatcagcgtgcaaaatcaatcattttatgccagcgtagtctgttatgctcttgctagtagatgtggaattatctcacgcactctgctcttaccttttgcttggtgtagaaaagcaagaacctatgccttcaggctctggtctttcactcacggcacaacccccactaaactcattatcaacgcacatagcctaggccactcccagcagcaacgctgacatatatctttaagaacactaaacacgccacactacactctatcagctgacactcaagacgagatcccttctcaccatgatgaatacagacagggcagctatcgacggccgacaggctgtagctgaagctccctcaaatcgcgtggtgcataaacccgttccaaattcccaagctcaagacccccggagataccaaattgatcaagtgaaaagacgttattcaccgacacagggaatgctgcagaatggaacgacagcacttcgttttcacttcaagccgtcagaccccgacttccctttcgagttggagcatctagactgtgagctgcaaatacctgcctcatatcctactggagcacccacgttgttagtgaggaataaggacataccgcgtggttttggtgttaacattgagcgaggatgggataaactagtcgcagagcagccacgttcaactctcttaagcctcattagtgcgctggataaaaacctggaagcttttttgtcggaacagaaagttgagactgtcacattgatgtccttcaaagacacaagacatctagagagccaagggacttccctcggcaagcaaccagcagtttcctctgcagtgcatccggaacaaaagccgccagcagccccagcagctccagtacttcgaaaaccatacgtgccagaagtttcctttacgaacgagcagatcgccggtgccaaagcgcggcgcgctcaagagatccgacagcttgaagctagaatgggtcgtttgtcactataccagaagtccgcggatggcattgtatacactttacctctagaaccgagacggcgagcagaattaccaccagaattcaaatctgtgcagtccgtgcagcttattatcccactactctaccctctccaagcacttcgaatattactaaacgatgtggagtcgaaagatgccgaaccattggaagaagcgtttggggtaagggctgttcagcagcaaagccagatgactttgatgagccatttgaactacctttcacaaaacatgctggcgcttatcaagcagacgaagacaacgaagcaagaacccgctacaccgatttcagaggatacatcgagagaacgtagcacaaatgcgtcggtaacccaagttgctgcgcctcatgaagaagccaaaagccatattcaagttataccacgccccccagaatggcatcatcaagacttaagtgaatcagactctgactccgagtcgtggacttctggagatgattccgaggaaggcggagcaacagtagaatcacatcattttcagacccctaccgtcacagaacaaatcgaaaagggaacggcgatatcctttcccactattgagcttcatagcatcgaattattgcaagtttcaatcctgaatataagtgtgaaatgccaaagatgcaagacaataaacgaaatcacaggactcaaaactggcacggagaaagcagctagctgcaaaaaatgtagctctccgatgacagccatgttccgagctgagatggtacaccaaaactcctcgagggctggatttgtcgaccttactggctgtacgattgccgatatgctaccaagcactttcatacctagttgcgctacctgctcgaaacagagtcaaggcatagtctcagtacgaggcgaggtcattaccaacgtttgtagagaatgccatggtcgctttacattcaagataccacaagtcaagtttttcaccgttacacctggatctacgctaccactttcaatcggaccacgacgacgagaagagaaactcggactgcacgctggagatccgctgccagaccgtggggcatgttctcactacaggaaatcgtataggtggttcagattctcttgctgtagcaaagtgcatccatgtgataaatgccacgatgaagcccaagatcatccacacgaatgggccaaccggatgatatgcggctggtgtagcagagagcaaaactatgccgtcgaagcctgcgcattctgtgggcgaagcgtcattggcaaaaggggtaagggtttctgggaaggaggcaaagggacccgagacaagactcaaatgagccgtaaagataagcggaaatttaggcgggctggtggtggtgaggcaaataaaagggattgacgatcgttggatgaaggcagtaattatatcgccgcgtcttcgtagttcactgaatacacacctcctatagggcctgcgctacgcgcaa

SEQ ID NO: 25661 - DNA, 525 bp, Muscodor strobelii
  misc_feature: SGI cDNA ID NO. 568760
  misc_feature: Reduced expression when VOC is produced
  misc_feature: Encodes the peptide sequence at SEQ ID NO 25662
atgccggaagagccaccaccagccgcacacggcgaggagggagacaacaaggatgcaaagaagggccccacaacgaaagagaaattgcttgaagagattaccaaaaagatcgaggagtcaaagtcactgcagcaggagtctatagacctacacaaacgagcagaagaagtggcagagcatgacccacagcttgcggaggatctgaagttcaaggctcgcgagatcgacaagaaagctacgaagctgttaaagacagcgaagcgtcttgaatccgggtggatgcaaggtggcgccgccggggccggcataggggccggcgttgcaacggggctgggcatgacagttgggacgattgtcagtggccttgttgctattccgaccacagggcttggaattcttgttggcgctggcactggattagttcatggaccttgggtaaaattcactgacgcgtttacgaaggatgaggtatctgagatcgatcaagaagctgaggaggaggcaaagagaatcgcagagggatga

SEQ ID NO: 25662 - protein, 174 aa, Muscodor strobelii
  misc_feature: SGI Peptide ID NO. 568760
  misc_feature (11)..(171): NCBI GI: 256730357 Blast Desc: NECHADRAFT_101111 [Nectria haematococca mpVI 77-13-4]
  misc_feature (25)..(174): NCBI GI: 46127421 Blast Desc: FG08088.1 [Gibberella zeae PH-1]
  misc_feature: Useful for introducing or modulating the production of volatile compounds
MPEEPPPAAHGEEGDNKDAKKGPTTKEKLLEEITKKIEESKSLQQESIDLHKRAEEVAEHDPQLAEDLKFKAREIDKKATKLLKTAKRLESGWMQGGAAGAGIGAGVATGLGMTVGTIVSGLVAIPTTGLGILVGAGTGLVHGPWVKFTDAFTKDEVSEIDQEAEEEAKRIAEG

SEQ ID NO: 25663 - DNA, 1743 bp, Muscodor strobelii
  misc_feature: SGI cDNA ID NO. 568761
  misc_feature: Reduced expression when VOC is produced
  misc_feature: Encodes the peptide sequence at SEQ ID NO 25664
atgccgggtaaagcggaagggttggtcctcacagtggaccccaaggttatccacaaggtcgacaccaacaacccccagaacctcttcagcatgtggaccgtattctccagatgcgccgagtccgtcgagcagggaagacggctagagaacctgagctggcggctatggaacagagagaccttctgctgcgagacggccgccgccaagacgctgcccgccaccacagtcagctgcttgccccaggacatccccgagaggcagcagatccccgacgtgccacagctcagcggcagcgtcgattccgttgtcgacgacgaggccatcgacctcaacaccgagtccgaccccctcgacatcctgcgcccacgcatcctccgccaggactcgtgcgccagcagccgcagccgcggccgcgagcgacacatcacctccgaccacctcgagaagatggtcgtcaccatcatcaaggagaaggagcccaacctatcgcccctgcccgacatggtctcgtctctcgagtcggagagcgatgctctgcagtcgtcctgctctgacgtcgaggagacccccgtcaccatcgccaccgagtccaccgagtgcgagtcctcggcccggacatcacaggcttcctcgtctagcctcgcctccacgggcagccacgccctcaacgtcgtacgcggattctcgccctcccaaatcccctcccctcgagtcttccaccaagtgagctcgccccgcctcgacaccatccccgagccagagtcccatccagcacccaagcctgtgcagtctaagaaacagccggcattcaccctgggagcttcctctggatcctcggagagccccgagtcccccaagcccatcgctcctaagaagagcaagatgtttcagcttggcggctcatcaggttcggccgaagacccaagcccgtcgctcaagagtgcattgcactcagccaagcaggcctccctcaacgcccacaagaagcagacttcgttcagcaaccaagtcactacccggactatatcgactcctagtgatcagtcgggctcgggcagctacgtagacgagagcgccatcgacgatgacgaggacgactccgagtgggaagattcgattgaggagaacggcaagccgagcatcgaggaagaggtcaaattcatcaagcgccccgactcgaagcccaacctgacctctcagccgtctttgatcagcctaatgctcgctggacaggacgagcggaagaatggtctcaccaactatgcttctctttccacgccagccatcgctctgcgttcccgtcaacagcaactgcacaacggccccaacggtgcatcgcccaacgatggcgacgatgccggtttggaaatgagaaggggtcagcgccgtacgcctctgaacccgatcaacgagatcccgcgatccggagctcagcccatcatgtcgaagcctcagattcaccactaccaacaggctgccctgtctcctagaactaccaggcgcaatatgttggcaacggaactgactgagtcgctgaggcggcaacttctctgggagcggcagcaaaagtcttcaaccgctaatgccgtgttgaaacgccgccatacctccctcgacatccaaaacctaaagcaatacccggagacatcctacatgaacaaagctaaggacgagacgagcgcaactagctggaaccagtatctccgagaagactatagcggctaccacgtccagggctggtaa

SEQ ID NO: 25664 - protein, 580 aa, Muscodor strobelii
  misc_feature: SGI Peptide ID NO. 568761
  misc_feature (1)..(580): Pfam Id: PF08550 Pfam Desc: Fungal protein of function (DUF1752)
  misc_feature (1)..(580): NCBI GI: 46135883 Blast Desc: FG09457.1 [Gibberella zeae PH-1]
  misc_feature (1)..(580): NCBI GI: 85096371 Blast Desc: NCU04718 [Neurospora crassa OR74A] gi|28921733|gb|EAA31013.1| conserved [Neurospora crassa OR74A]
  misc_feature (1)..(580): NCBI GI: 116202663 Blast Desc: CHGG_09216 [Chaetomium globosum CBS 148.51] gi|88177734|gb|EAQ85202.1| CHGG_09216 [Chaetomium globosum CBS 148.51]
  misc_feature (9)..(580): NCBI GI: 39968813 Blast Desc: MGG_02499 [Magnaporthe grisea 70-15] gi|145013887|gb|EDJ98528.1| MGG_02499 [Magnaporthe grisea 70-15]
  misc_feature (1)..(580): NCBI GI: 156034280 Blast Desc: SS1G_13443 [Sclerotinia sclerotiorum 1980] gi|154698846|gb|EDN98584.1| SS1G_13443 [Sclerotinia sclerotiorum 1980]
  misc_feature (1)..(561): NCBI GI: 256725132 Blast Desc: NECHADRAFT_55279 [Nectria haematococca mpVI 77-13-4]
  misc_feature (1)..(580): NCBI GI: 154310885 Blast Desc: BC1G_06421 [Botryotinia fuckeliana B05.10] gi|150851220|gb|EDN26413.1| BC1G_06421 [Botryotinia fuckeliana B05.10]
  misc_feature (1)..(580): NCBI GI: 119193809 Blast Desc: CIMG_01279 [Coccidioides immitis RS]
  misc_feature (1)..(580): NCBI GI: 240105560 Blast Desc: CPC735_051230 [Coccidioides posadasii C735 delta SOWgp]
  misc_feature (1)..(580): NCBI GI: 121710304 Blast Desc: conserved [Aspergillus clavatus NRRL 1] gi|119400918|gb|EAW11342.1| conserved [Aspergillus clavatus NRRL 1]
  misc_feature: Useful for introducing or modulating the production of volatile compounds
MPGKAEGLVLTVDPKVIHKVDTNNPQNLFSMWTVFSRCAESVEQGRRLENLSWRLWNRETFCCETAAAKTLPATTVSCLPQDIPERQQIPDVPQLSGSVDSVVDDEAIDLNTESDPLDILRPRILRQDSCASSRSRGRERHITSDHLEKMVVTIIKEKEPNLSPLPDMVSSLESESDALQSSCSDVEETPVTIATESTECESSARTSQASSSSLASTGSHALNVVRGFSPSQIPSPRVFHQVSSPRLDTIPEPESHPAPKPVQSKKQPAFTLGASSGSSESPESPKPIAPKKSKMFQLGGSSGSAEDPSPSLKSALHSAKQASLNAHKKQTSFSNQVTTRTISTPSDQSGSGSYVDESAIDDDEDDSEWEDSIEENGKPSIEEEVKFIKRPDSKPNLTSQPSLISLMLAGQDERKNGLTNYASLSTPAIALRSRQQQLHNGPNGASPNDGDDAGLEMRRGQRRTPLNPINEIPRSGAQPIMSKPQIHHYQQAALSPRTTRRNMLATELTESLRRQLLWERQQKSSTANAVLKRRHTSLDIQNLKQYPETSYMNKAKDETSATSWNQYLREDYSGYHVQGW

SEQ ID NO: 25665 - DNA, 3008 bp, Muscodor strobelii
  misc_feature: SGI EST ID NO. CUFF.60723.1
  misc_feature: Variant of the nucleotide sequence at SEQ ID NO 25663
gcctgccctccaccagcgcactatcaaataccaaatacataatatgcactggactacccacacccttctttccatactcacagcaccgtctgccacgtccaccgtccctcgacgacactgacattgattgacgttgcgataatcaagcgcgaacattgatctctctcacctcgcccgtcctgcacagcacgcacgtccgcatccatccaccgccgccaccacccagcgcccagcatctgctatacacacaacatacatcaccagctcaccagctcaccagctcctgtttctgagaccgcacatcttgaggacgacgactttgcacgacggcgacgagataatattccaggatcgaatcgaccagcaccacccgtcccacgcctgcacgcaaccgactgaactagcagaggaggatagacagcgccgggctctttgttcgcatccgtcgaccacgtacgacctgcgaacctcaccacccgcaccgagacgaacaccacaacacagctctgccttatgagcacaacactcagccagaatgccgggtaaagcggaagggttggtcctcacagtggaccccaaggttatccacaaggtcgacaccaacaacccccagaacctcttcagcatgtggaccgtattctccagatgcgccgagtccgtcgagcagggaagacggctagagaacctgagctggcggctatggaacagagagaccttctgctgcgagacggccgccgccaagacgctgcccgccaccacagtcagctgcttgccccaggacatccccgagaggcagcagatccccgacgtgccacagctcagcggcagcgtcgattccgttgtcgacgacgaggccatcgacctcaacaccgagtccgaccccctcgacatcctgcgcccacgcatcctccgccaggactcgtgcgccagcagccgcagccgcggccgcgagcgacacatcacctccgaccacctcgagaagatggtcgtcaccatcatcaaggagaaggagcccaacctatcgcccctgcccgacatggtctcgtctctcgagtcggagagcgatgctctgcagtcgtcctgctctgacgtcgaggagacccccgtcaccatcgccaccgagtccaccgagtgcgagtcctcggcccggacatcacaggcttcctcgtctagcctcgcctccacgggcagccacgccctcaacgtcgtacgcggattctcgccctcccaaatcccctcccctcgagtcttccaccaagtgagctcgccccgcctcgacaccatccccgagccagagtcccatccagcacccaagcctgtgcagtctaagaaacagccggcattcaccctgggagcttcctctggatcctcggagagccccgagtcccccaagcccatcgctcctaagaagagcaagatgtttcagcttggcggctcatcaggttcggccgaagacccaagcccgtcgctcaagagtgcattgcactcagccaagcaggcctccctcaacgcccacaagaagcagacttcgttcagcaaccaagtcactacccggactatatcgactcctagtgatcagtcgggctcgggcagctacgtagacgagagcgccatcgacgatgacgaggacgactccgagtgggaagattcgattgaggagaacggcaagccgagcatcgaggaagaggtcaaattcatcaagcgccccgactcgaagcccaacctgacctctcagccgtctttgatcagcctaatgctcgctggacaggacgagcggaagaatggtctcaccaactatgcttctctttccacgccagccatcgctctgcgttcccgtcaacagcaactgcacaacggccccaacggtgcatcgcccaacgatggcgacgatgccggtttggaaatgagaaggggtcagcgccgtacgcctctgaacccgatcaacgagatcccgcgatccggagctcagcccatcatgtcgaagcctcagattcaccactaccaacaggctgccctgtctcctagaactaccaggcgcaatatgttggcaacggaactgactgagtcgctgaggcggcaacttctctgggagcggcagcaaaagtcttcaaccgctaatgccgtgttgaaacgccgccatacctccctcgacatccaaaacctaaagcaatacccggagacatcctacatgaacaaagctaaggacgagacgagcgcaactagctggaaccagtatctccgagaagactatagcggctaccacgtccagggctggtaaacgagacattctctttgccctttcgatccgcccaaagatgccacccatcaagccagcagccctgactgctgtgtacaaattcatttctgtttcatttcccccattttgcatggcgaggtggcaactgcgtttcacaataccattgcatgcatcaggtcggcgtttacagcctcgttttcacatgcgaggcattctacctacatgagcgacctctcgcatggtcactttaatggtaaccttaatggccatgcctcacggctcggttacaacactcctccattgtcaccaatggagcgatgataacgactcggacacaccttcgtgtctactttctcatcattctggcactaatttggcgttgttgcaccaatgataccacggtttgcgtttttgatttgcccctccgcttcgaggtggccatttctccttcagtgccggcgagtagtgaaggagacggaggaaaagaaaaggcgcgtataatgtactctagcaaagaaccacaagagggcaacctactttcgggctgaagaggcgaagacgaacagtccaattggtcccagaaggacacttctaaaagcaatgcgacgcgccatgacccaaaaaggacagcggaaaatttacaggagcttctaaaacaaaataaaagttgatgaccacatcatgaattctgccccttgattgatatcctagtgtatttcttcgtgacatgcttccatacttgtgcctcgtg

SEQ ID NO: 25666 - DNA, 1326 bp, Muscodor strobelii
  misc_feature: SGI cDNA ID NO. 568762
  misc_feature: Elevated expression when VOC is produced
  misc_feature: Encodes the peptide sequence at SEQ ID NO 25667
atgttctcacagaaaaaaccatactcggcggttaccgtcacagttgagcgcctcaccagcgaaacattcgaggaagatgacctaagtggtattccggaccttgttgaggttatcaagctgcaggcaacaggtcctgccgaggcagcgcgagctcttaggaagaagctgaagtacggaagcgtacatcgccagattagggctttggtactcctcgatgggcttatccagaatgctggaccgcgcttccagcgtacattcatcgacgagcctttgctcgaacgtcttcgtgtatgcggcacttcggacttatcagatcctgacgtgaagaagaagtgcttggagctatttagtagctgggctcgcgagtacaagaccgcgccgggcctcgaacgcgttgctgcactctataaggaacttccccgacgtaaacaggtcgttacccaagaaaaatctaaggtcattcgtgagacggaacaagacccctttcgcgactctgaagatgaggccgagaaacaacagagttctcctatctctcacgctccacaggctccgtcttctcgaccagccgtgtccttcccgcagtcttctcatacaagctcgtctcatagccacgccagagcagcttctggttccggatctcttttctccagttcgtccaaagacaagaaaaagaaggataagaataagaccaaatcaaaaccattcaacctagctgcttcgaaggattctatgaaagtagcaatagctgactcttctattgccgctactaacttgtctaatgccttgcaaagcattgatcgagagaaagaacgaatctcggaaaacgccacggctgttcaacgatttgaagactgcaagcgacttaggagagagattgtacgctatatccgccatgtcgccaatttaccgctcacgggcgaagacgagggttggcttgatggtctcctgcaagccaacgacaggcttgttgttactctgatgacatttgagcagctagatcgttctattgatgcagacagcgattctgaagacgagatagctgagcaagcacatctttaccgaatggctacggagaagcacaagcaaacgatgtctcccaccggttcttctcctccttcaaaggggaagcttccagacttgggcaatctttctctcaatccaaatcttcctcctcgtccaggtgcaccttctgcttcttctcctcaggttcagtcacatgcgcaccaggtcgctgaggaagactctgatgatgaaaacgacccatttgcggataggaatgcttacgttgagacaccaatggccgaaagagatgagccgagatggtga

SEQ ID NO: 25667 - protein, 441 aa, Muscodor strobelii
  misc_feature: SGI Peptide ID NO. 568762
  misc_feature (5)..(143): Pfam Id: PF00790 Pfam Desc: VHS domain
  misc_feature (1)..(354): NCBI GI: 39940570 Blast Desc: MGG_04955 [Magnaporthe grisea 70-15] gi|145010810|gb|EDJ95466.1| MGG_04955 [Magnaporthe grisea 70-15]
  misc_feature (1)..(441): NCBI GI: 256734044 Blast Desc: NECHADRAFT_77760 [Nectria haematococca mpVI 77-13-4]
  misc_feature (1)..(441): NCBI GI: 46128475 Blast Desc: FG08615.1 [Gibberella zeae PH-1]
  misc_feature (1)..(441): NCBI GI: 261359407 Blast Desc: VHS domain-containing protein [Verticillium albo-atrum VaMs.102]
  misc_feature (1)..(430): NCBI GI: 171682494 Blast Desc: protein product [Podospora anserina] gi|170941206|emb|CAP66856.1| protein product [Podospora anserina]
  misc_feature (1)..(428): NCBI GI: 156034250 Blast Desc: SS1G_13428 [Sclerotinia sclerotiorum 1980] gi|154698831|gb|EDN98569.1| SS1G_13428 [Sclerotinia sclerotiorum 1980]
  misc_feature (1)..(428): NCBI GI: 154310869 Blast Desc: BC1G_06413 [Botryotinia fuckeliana B05.10] gi|150851212|gb|EDN26405.1| BC1G_06413 [Botryotinia fuckeliana B05.10]
  misc_feature (1)..(441): NCBI GI: 164425988 Blast Desc: NCU04724 [Neurospora crassa OR74A] gi|157071154|gb|EAA31123.2| conserved [Neurospora crassa OR74A]
  misc_feature (1)..(435): NCBI GI: 67522623 Blast Desc: AN1768.2 [Aspergillus nidulans FGSC A4] gi|40744788|gb|EAA63944.1| AN1768.2 [Aspergillus nidulans FGSC A4] gi|259487112|tpe|CBF85525.1| TPA: VHS domain protein nidulans
  misc_feature (1)..(320): NCBI GI: 116202653 Blast Desc: CHGG_09211 [Chaetomium globosum CBS 148.51] gi|88177729|gb|EAQ85197.1| CHGG_09211 [Chaetomium globosum CBS 148.51]
  misc_feature: Useful for introducing or modulating the production of volatile compounds
MFSQKKPYSAVTVTVERLTSETFEEDDLSGIPDLVEVIKLQATGPAEAARALRKKLKYGSVHRQIRALVLLDGLIQNAGPRFQRTFIDEPLLERLRVCGTSDLSDPDVKKKCLELFSSWAREYKTAPGLERVAALYKELPRRKQVVTQEKSKVIRETEQDPFRDSEDEAEKQQSSPISHAPQAPSSRPAVSFPQSSHTSSSHSHARAASGSGSLFSSSSKDKKKKDKNKTKSKPFNLAASKDSMKVAIADSSIAATNLSNALQSIDREKERISENATAVQRFEDCKRLRREIVRYIRHVANLPLTGEDEGWLDGLLQANDRLVVTLMTFEQLDRSIDADSDSEDEIAEQAHLYRMATEKHKQTMSPTGSSPPSKGKLPDLGNLSLNPNLPPRPGAPSASSPQVQSHAHQVAEEDSDDENDPFADRNAYVETPMAERDEPRW

SEQ ID NO: 25668 - DNA, 4325 bp, Muscodor strobelii
  misc_feature: SGI EST ID NO. CUFF.60507.0
  misc_feature: Variant of the nucleotide sequence at SEQ ID NO 25666
cgcggattcgggaggctcaaacgtcggtcttggccgccttgttgtcttcggctttgagtttatctattttgtcttagcatttgcaacttcgatcccagtcaaatactattcatcaaaaattctgtagggcacgatagcagctaagccttcatttaaagcccaatccaaggccgtgaacaaaccccgcgagacttacagacgcgtcatctgtcactgtcgacgcagccttctctgtagcagctcctagctaaagcccggacaccttgcagaccatacccttaggtccttcgacatcaactttatgctttttaccgagagcaacagtcgccgacccagccactcctcctaacaacgtctggaacccctacgagaccagtctgacgtcattaacagagccggggtcgttgtttgagccatgttctcacagaaaaaaccatactcggcggttaccgtcacagttgagcgcctcaccagcgaaacattcgaggaagatgacctaagtggtattccggaccttgttgaggttatcaagctgcaggcaacaggtcctgccgaggcagcgcgagctcttaggaagaagctgaagtacggaagcgtacatcgccagattagggctttggtactcctcgatgggcttatccagaatgctggaccgcgcttccagcgtacattcatcgacgagcctttgctcgaacgtcttcgtgtatgcggcacttcggacttatcagatcctgacgtgaagaagaagtgcttggagctatttagtagctgggctcgcgagtacaagaccgcgccgggcctcgaacgcgttgctgcactctataaggaacttccccgacgtaaacaggtcgttacccaagaaaaatctaaggtcattcgtgagacggaacaagacccctttcgcgactctgaagatgaggccgagaaacaacagagttctcctatctctcacgctccacaggctccgtcttctcgaccagccgtgtccttcccgcagtcttctcatacaagctcgtctcatagccacgccagagcagcttctggttccggatctcttttctccagttcgtccaaagacaagaaaaagaaggataagaataagaccaaatcaaaaccattcaacctagctgcttcgaaggattctatgaaagtagcaatagctgactcttctattgccgctactaacttgtctaatgccttgcaaagcattgatcgagagaaagaacgaatctcggaaaacgccacggctgttcaacgatttgaagactgcaagcgacttaggagagagattgtacgctatatccgccatgtcgccaatttaccgctcacgggcgaagacgagggttggcttgatggtctcctgcaagccaacgacaggcttgttgttactctgatgacatttgagcagctagatcgttctattgatgcagacagcgattctgaagacgagatagctgagcaagcacatctttaccgaatggctacggagaagcacaagcaaacgatgtctcccaccggttcttctcctccttcaaaggggaagcttccagacttgggcaatctttctctcaatccaaatcttcctcctcgtccaggtgcaccttctgcttcttctcctcaggttcagtcacatgcgcaccaggtcgctgaggaagactctgatgatgaaaacgacccatttgcggataggaatgcttacgttgagacaccaatggccgaaagagatgagccgagatggtgattcagatattgagtaacttgtggagttatcgccatatggggcgaaccatggttactgttgtgatagtggtggctctgagtactacagacattttgatacctttgtgtgcaatcttcgaagctctttcttgtgttgttcacgacggaggaacgagtcacaaagtcataagtgtcatgttcaaagtcagtcggcttttcgtgttatgctctgtggcaagtactatttcggcatttgtagcatgaatttatttgagactcaggtggtttatttgagaatttgatgttagaatggagaacttgtcatcgtaatttttgagtcgactgatgcccccaaaagttcatattcgagactcgcttagaggcagtatcagaacacttcacatgagccactacatactcgcttcgacttccacatataatccctctttgagaataggaacgatttgacgtgcacgatatatcgccttggttccatcttgtctgtgtcgtctggatgactccgaccttgacacgaagatcggggtagacaacgcttctacccgagcataccttacattctgtgtgcagacatcatcagttagtgtcaagtctgtgacatgagtgctgaatactttctgcatcagccatgcgatggagagcctgcagttcttggactagaagttcagcctctgctagattattggtggaaaccgacggcgtgaactatgtcaccctccgaatctcccactgatagtaacgagattgtctgccagtacagcaaaataccactaagcttggcgctgttcatttggacgttcaatgcatcaaggtgtattactgttcctcaccgtgtgatggaatgcagacaatatgaatgttgctgcgtgttactcgtaaagcggtaggccgacgagcccattgcccgaggccgcgcgttgcattcacgaactcaaaattgaactagtactgttcgtgttcattgacatttaaccacgtttaatgataatatcaaagaattagaaaaatacaattttcgccatcatctgatggtctcatggaatatctgcctccacacgcgttcatgagcgactatctcccagtatatcatgtatcatcatgagcggtatccatatgcgtcccatctattttaatcgagtctatttctcactccgttgaacacgaactccgaactcggccatgttgaatattttcctcaatacaaatacaagtgtaaaatggtccacaatgttctgaattcaatttcagcgtagcggtgccttggaacgctcgtcaatggatcggtcatcacaacggccattgcctcctgatcattcagcagatgtccatccaaggcaaatttaaattaagagcatctcttgaactccggaatcttactctacggccaagaataagatctccaggatataggtacataggttgtttgtccatgaacacacgccgtgatgttgtcagagacacgactgttcatgtgatgttatgagaagctccagacaggactctcataaccgagcgtatgaagacttgcggatctgaaacccgcatatgctcatcaaagttgatacataaaacggtacccatcatgacaggcataggacaaaaggcctgcaacatcatattgatcggtgtgcgttacttcgccttgggagcagtgtcggtaggctcggtcagtcaaaggctgagctgtcaagacctattcttgaccagttggcgttggcgcgtgacgatatgacatgcggggaacgggagcaagcgagccctgtaactgatgaagatcgcctgccacctgcctatcgcaaagactgggttgcatgtctaaagcatcgtgcacgttggagacaacagatctgggaatcattattaatagtcgagtcctagaacgtctctgctcccttcctacttcgggtcgggcgaaccgagattaagcatttgtgtcagaggttggtggttggtgggagcacgcggtatgccaccgaggtcctcatggtcgtattgcatctcagccccatgttctgggccaggagcaacaagcttggagaaacatggagtaggacaggagccggaccacgccgtcgggagaacggggcgatttcacgcggcagtagatcggtcctgggcgatcctgttaaaggctatcaaagaatcggaatggttgtagtgttgtactgtcgctgttcaccgcttgatcgcgtggcgagtggttgcacttgaagtcagcgcgctgtccaatagttagctccggctttggatgatctgagacaccaagagtcgaaggacagttcatctccaactttcgaccctattcctcttcagcttattcattcagtcctgcagggagcaatgatcctcagtatgtgtcgccaagtgaatcggactcattactgaatctgttctcatcgacgcgtgaccctgtgagatatcgccgccgagacggggacaacgtcacaccgtggcctgtaacggtttgcgaatatgaggagaaaacttgcagtaacgtcgactaagtatgaattccttcctcatatggcttatttgcaggcataacttcgtaaccgggagacgtcaggttagaatgctttgggattttt

SEQ ID NO: 25669 - DNA, 5700 bp, Muscodor strobelii
  misc_feature: SGI cDNA ID NO. 568763
  misc_feature: Encodes the peptide sequence at SEQ ID NO 25670
atggatgataaggcgcctctaaaacttctatcactcgatggtggaggcatccgtggtttggcatcgttgatcatcctcaagcacctcatgctgcgagtggaccatgagaacccacccaagccatatgaatattttgatttgatcggtgggacgagcacaggaggtctgattgccattatgctaggccgtctacagatgggagttgatgaatgcacacagaagtatctcgacgtttcatcagccgcattccaacccaagaggtccaaagtcaacgttcttggtcgagctaagggccttgtcaagggcgaaggggcgtataagggtgaaagtcttgccacggagttcaagaaggctgctttagctttcgacggtagtgaggatgcgaagctcttttgtgagacgtcaccctgtaaagtattcgtctatgtcgatggagcaacagggttgaataaccccgttgagagtgtgctagaagaggcccggcgcctctggcctgacgcggtagcacgcattcattcaataatcagcattggaactggagtccctcaacccaaagattttgggaacgatctcaaaaacattatacgaaccttgaagtcgatcgcgactgagactgagcagacacatctgaggtttctcaaaactcacgttgaccttggactcaagggccgttactttcgattcaatgtcgaaaaaggtttatcagacgtacgattagatgagtttgctaaagttgcaattattgaggctgcaactagagtctacctcgacacccccgaagtgcaaggtgcactttcgtcattcacggcgctatcgccgccgaaaacgcgtttcatgagcgttgatgataaagaccgaaccttgggttggttgccatgctctgaccaacgacaattctataacgaggccgctggcctacgacaaatggatgaagcaggtgcatggttcattaggggacacttgttgccttggatgaaccagcccgggcccttactgtggctctatgcgggtgctggctctggcaagaccgttctcacctctaaaatcattgaagagatcgaacaacacacagacggctctcttgcgtattattacttttcgttccaaaggaaagagagtcaggacatgagagatatcaaacatgctcttttggttcaactcgtccaacatatttcccagagaactcgtaacaagcagaatatgtttctcgttccacaggcatttactcgtctccgggaaaagtattacccatcacaaagccccacaatggaggatcttgacattacgctcgtcgacatcatcaatcggtcaccaaggacatttattgtcgttgacgccctagatgaatgcgaaaatctaatgcttcgggccaacataatgaagtttcttctgcaactaatagagaacacttacactgatctgtatattattatcacaagccgcccagagcttgatatcaaagactacgtgttatcgatgccggtcacgaagcgactggtcgggttcgacacgaataaggtcgaccaggacatacgcactcacctcagacaacaaatgaaagaaccgccgtactcgaaatggtctggccaactccgaaatgaagttatagattacatttctcagcgatcaggtggggtatttcgctgggccgatttgcagtttcaagcacttcgaggcaaaactagagagatcgacgtaaggagagctctcaggaaccttccaagaacactaggagatacttacaaacgtatacttgatcgaattgagcttgaagggtacaagaacgagactattgcaatccttagatggctcgcctacgcacagagacctttgcgcctttctgaagtggctgaaattgcagcatttgatattgaggctataggggatcacaagctggctatctctgatccaacgccttgcaagattacttttcagccacagcatagatttgatgaccctgcagattttcttcgctttttgggcaatctcgtcactgtctcggactccgatgctggtgatctgcagaaggagacagatgagcgccttgtttcgttttcacacttctccgtcagagaatacctcgagtcagacgaagcaccccctctgtttaagcttcaaagccaaaactgtcacaaatttatttatatgagctgtctcgcttatattgaccagtatgactcttcgtacacggagaaccatttgttgcccacgcatcccttgctgttgtatgcttgtttacatatctgggatcatacggaagagctcatttcatgctcaaaagccactggtaatgtcatacagactatacttcaaatactgctactatatacaaatttgggatatgcttttcacgttgctcttcaacgtcttggcatggatgtgcttggtggatcacaaagtatatccatatttcttgctagactcccagagaagatctcgacctcgaaattcttggaagctatctctctcggtagtcggcgtttgctagagttcctgtcccatagtggagcgaagctgccaattagtccctttcttggaggaccacaacatgttggaaatctcggagactccttgcgcagctggccggagaccgaaacggcactgaagaaagcctccaaacaagaagcctttgcgaatatctttcttcctctatatagcacactaacgtgcgttgatgagaagcacctcgacgtgcaaaggaccgtttgggatcttctgctgttgatccccggtatcaatctcaatgatatcaatgatgcagaacagacaccgctcttgatagcggcacttcaagggaatgaatcattctttcggttcttatttgacttgcagggcgtggatcaaaatcatcgcgacgtccacggctggagcatcgggacatgtgctgttatcggagcgaacggtcggattattgatattttgctcgcctcacctggcatcgactggcacacggttgattcgtacggatggacacctctaaaatgggcttactacaaaggcctcgacactctgattagaactcagagacctcattctatgcatcttgattttgcagacttaaggaagacagacacctttttatcatgcgaagaaagttgtagcaacaaaatcgacactgcaatcatagcccgtagtgcgagtttctctaacgcaggtgataagttagcagtcttaagagacgtgagcgcttcagtcgctggcgatataagttcccattgcgttatatacgagatgtcttcaactaccaataccacgactctgtttgatgagattggtggagtttttggcagcatttcgtggagccctgatgattccatgatattgatatacggttggagttcagctaagctattcagtcttaaggatggaaagtgcattactgtcatcgagcgcaacagcccatttaccaaaattgtgtggctaccaacaggaaactccttgtttataagcgaccaagataagttcggaagcattcgtcgcttcaatttgatacaagatcctcgaagtggtagcacaaacgtaaagagtgaagaagcagaatggcattttccccacctcaatattcatgatatggaaacgtctgcagatggccaacatctggtcgccgccggtccacgaacaatgtatgtttttcagattgagacgaactcggaagtctacagtctcaataccccccgcgcgattcttaatgttaccatcagtccggactcacaacgcgttctcatcagtatgcttggtttggcccggctggtaaacattgctgatgggacttgggtacgcgacttccctaaacttccgacgtttggtgaatattactgtgcccccgaaagcacgttcttaggcccggatggctcatggctactgcagtcacaagaagatgggtacataacaatatgggactggaaatccggacaactccttggtcactcaccaggccataaaccagcacacacaagatgcatcgcacggcgaccgggcgactttaacgaatttgcttccgtagggtatgatggtcatgttaaactgaatcagaatgaaagaaagggatctgaggcgaacaggcatagcgagaccaaccgccagcctacgatgggatggataagatcagttagacaagaactaagccgtgtgggcccgggcaaagtcgaacccccagccttgctatcaatcgcactccgatacgcctcacacccgctgaggaaatttcctgggcctcgactagcacggatcactgatggctacgctgggcttcacgccacccggaaaaggcttcatcttgtcacataccaaggccatcagaaatatggcccagttgtaagacaaggaccgaatcgtctcgtcttcaataccgtcacggcgcttcgagacatatatctcaaccaacgagtgactaagagtagaatctatctaaactcgctcttgagcacccgagtacccagcatgttcaatgccttggataaagaagtacatagtcacaagaggcgagtaatcgggcagctcctctcggaccgctcaatgcgtatctttgagcccgccatgtcgcagcagattgatgtgttccggcgtcagaatctggcgtcaagccagaagggcgaatttgtcaatatgacgacacgatgccagagattgagtaccgatatcatcggactcctcgcttttggctaccacctgaagacacagacaggggatgccaacatcatcatcccagccgccatgaagtcgactagttaccgcattaatctgtatatggcatggcctaagatctctcttatcgatcctgtaattcaatggcttggccgaaagcaaagtcctatattctaccgggcgttgaggaatatgataagtcgacgcatgcaaatgccgaaggatgcggcgcatgatctctatgctatcgcctctggggacgtcacactcagtggcgataagggcttgcaggacacagacttgtggtctgaagcgtcattcttcgtcatggccggcggtatgaccgtatcaacactcatgagcgccgtattcttcgcactttcccatcatccagttgtgtacaaacgcttagttcaggagatccgcaccacttttcactctggctcatcaatcaaaggcggtccacagcttagctcttgcaaatatctccgtgccgttattgacgaaacgatgcgtatgtcgcctccaacaacgggcactccctggcgtgaagaagacatctactccgcaatgccgcctccctcgagtagaccattcgttgttgatggctttgtgatcacgcacgggactgccgttggcgtcagtccgtacagcctgatgcataacgagaaatatttttccgacccatttgcttttattcctgagcgatggcttgacgacaacggtgacagcaacagctttgacgagttcacaaaagctaccatgcgccgcgcgtttgtgccattcgcattaggtgatcgtggctgtgctggaaagtctatggcatacttagagacaagcttgacagtcgctaaaacattgtggtattttgattttcacattgcactaggttccgaggggaaagttggtggtggaacgcctgggaggacggatggccggcatcgtccagacgagtatcaactgtatgatatctttacagcagatcatgatgggccggtcctggaattggaaccacgtgcgagtgtttcgagcgatctgagaagcttctgtgagtga

SEQ ID NO: 25670 - protein, 1899 aa, Muscodor strobelii
  misc_feature: SGI Peptide ID NO. 568763
  misc_feature (1403)..(1871): Pfam Id: PF00067 Pfam Desc: Cytochrome P450
  misc_feature (10)..(157): Pfam Id: PF01734 Pfam Desc: Patatin-like phospholipase
  misc_feature (920)..(953): Pfam Id: PF00023 Pfam Desc: Ankyrin repeat
  misc_feature (1656)..(1842): Pfam Id: PF00067 Pfam Desc: Cytochrome P450
  misc_feature (10)..(83): Pfam Id: PF01734 Pfam Desc: Patatin-like phospholipase
  misc_feature (1583)..(1894): NCBI GI: 156056276 Blast Desc: SS1G_05490 [Sclerotinia sclerotiorum 1980] gi|154703274|gb|EDO03013.1| SS1G_05490 [Sclerotinia sclerotiorum 1980]
  misc_feature (1397)..(1887): NCBI GI: 145256217 Blast Desc: An10g00660 [Aspergillus niger CBS 513.88] gi|134078632|emb|CAK40505.1| protein product [Aspergillus niger]
  misc_feature (1397)..(1887): NCBI GI: 121710976 Blast Desc: benzoate 4-monooxygenase cytochrome P450 [Aspergillus clavatus NRRL 1] gi|119401254|gb|EAW11678.1| benzoate 4-monooxygenase cytochrome P450 [Aspergillus clavatus NRRL 1]
  misc_feature (1581)..(1895): NCBI GI: 156060449 Blast Desc: SS1G_02363 [Sclerotinia sclerotiorum 1980] gi|154699771|gb|EDN99509.1| SS1G_02363 [Sclerotinia sclerotiorum 1980]
  misc_feature (1386)..(1887): NCBI GI: 255954725 Blast Desc: Pc21g10830 [Penicillium chrysogenum Wisconsin 54-1255] gi|211589826|emb|CAP95980.1| Pc21g10830 [Penicillium chrysogenum Wisconsin 54-1255]
  misc_feature (1390)..(1887): NCBI GI: 145608110 Blast Desc: MGG_03375 [Magnaporthe grisea 70-15] gi|145015610|gb|EDK00100.1| MGG_03375 [Magnaporthe grisea 70-15]
  misc_feature (1397)..(1887): NCBI GI: 242771379 Blast Desc: cytochrome P450, [Talaromyces stipitatus ATCC 10500] gi|218721449|gb|EED20867.1| cytochrome P450, [Talaromyces stipitatus ATCC 10500]
  misc_feature (1390)..(1892): NCBI GI: 256733020 Blast Desc: [Nectria haematococca mpVI 77-13-4]
  misc_feature (1397)..(1887): NCBI GI: 212529440 Blast Desc: benzoate 4-monooxygenase cytochrome P450, [Penicillium marneffei ATCC 18224] gi|210074275|gb|EEA28362.1| benzoate 4-monooxygenase cytochrome P450, [Penicillium marneffei ATCC
  misc_feature (1390)..(1892): NCBI GI: 85092131 Blast Desc: NCU06895 [Neurospora crassa OR74A] gi|28920645|gb|EAA30006.1| conserved [Neurospora crassa OR74A]
MDDKAPLKLLSLDGGGIRGLASLIILKHLMLRVDHENPPKPYEYFDLIGGTSTGGLIAIMLGRLQMGVDECTQKYLDVSSAAFQPKRSKVNVLGRAKGLVKGEGAYKGESLATEFKKAALAFDGSEDAKLFCETSPCKVFVYVDGATGLNNPVESVLEEARRLWPDAVARIHSIISIGTGVPQPKDFGNDLKNIIRTLKSIATETEQTHLRFLKTHVDLGLKGRYFRFNVEKGLSDVRLDEFAKVAIIEAATRVYLDTPEVQGALSSFTALSPPKTRFMSVDDKDRTLGWLPCSDQRQFYNEAAGLRQMDEAGAWFIRGHLLPWMNQPGPLLWLYAGAGSGKTVLTSKIIEEIEQHTDGSLAYYYFSFQRKESQDMRDIKHALLVQLVQHISQRTRNKQNMFLVPQAFTRLREKYYPSQSPTMEDLDITLVDIINRSPRTFIVVDALDECENLMLRANIMKFLLQLIENTYTDLYIIITSRPELDIKDYVLSMPVTKRLVGFDTNKVDQDIRTHLRQQMKEPPYSKWSGQLRNEVIDYISQRSGGVFRWADLQFQALRGKTREIDVRRALRNLPRTLGDTYKRILDRIELEGYKNETIAILRWLAYAQRPLRLSEVAEIAAFDIEAIGDHKLAISDPTPCKITFQPQHRFDDPADFLRFLGNLVTVSDSDAGDLQKETDERLVSFSHFSVREYLESDEAPPLFKLQSQNCHKFIYMSCLAYIDQYDSSYTENHLLPTHPLLLYACLHIWDHTEELISCSKATGNVIQTILQILLLYTNLGYAFHVALQRLGMDVLGGSQSISIFLARLPEKISTSKFLEAISLGSRRLLEFLSHSGAKLPISPFLGGPQHVGNLGDSLRSWPETETALKKASKQEAFANIFLPLYSTLTCVDEKHLDVQRTVWDLLLLIPGINLNDINDAEQTPLLIAALQGNESFFRFLFDLQGVDQNHRDVHGWSIGTCAVIGANGRIIDILLASPGIDWHTVDSYGWTPLKWAYYKGLDTLIRTQRPHSMHLDFADLRKTDTFLSCEESCSNKIDTAIIARSASFSNAGDKLAVLRDVSASVAGDISSHCVIYEMSSTTNTTTLFDEIGGVFGSISWSPDDSMILIYGWSSAKLFSLKDGKCITVIERNSPFTKIVWLPTGNSLFISDQDKFGSIRRFNLIQDPRSGSTNVKSEEAEWHFPHLNIHDMETSADGQHLVAAGPRTMYVFQIETNSEVYSLNTPRAILNVTISPDSQRVLISMLGLARLVNIADGTWVRDFPKLPTFGEYYCAPESTFLGPDGSWLLQSQEDGYITIWDWKSGQLLGHSPGHKPAHTRCIARRPGDFNEFASVGYDGHVKLNQNERKGSEANRHSETNRQPTMGWIRSVRQELSRVGPGKVEPPALLSIALRYASHPLRKFPGPRLARITDGYAGLHATRKRLHLVTYQGHQKYGPVVRQGPNRLVFNTVTALRDIYLNQRVTKSRIYLNSLLSTRVPSMFNALDKEVHSHKRRVIGQLLSDRSMRIFEPAMSQQIDVFRRQNLASSQKGEFVNMTTRCQRLSTDIIGLLAFGYHLKTQTGDANIIIPAAMKSTSYRINLYMAWPKISLIDPVIQWLGRKQSPIFYRALRNMISRRMQMPKDAAHDLYAIASGDVTLSGDKGLQDTDLWSEASFFVMAGGMTVSTLMSAVFFALSHHPVVYKRLVQEIRTTFHSGSSIKGGPQLSSCKYLRAVIDETMRMSPPTTGTPWREEDIYSAMPPPSSRPFVVDGFVITHGTAVGVSPYSLMHNEKYFSDPFAFIPERWLDDNGDSNSFDEFTKATMRRAFVPFALGDRGCAGKSMAYLETSLTVAKTLWYFDFHIALGSEGKVGGGTPGRTDGRHRPDEYQLYDIFTADHDGPVLELEPRASVSSDLRSFCE

SEQ ID NO: 25671 - DNA, 1840 bp, Muscodor strobelii
  misc_feature: SGI EST ID NO. CUFF.60491.0
  misc_feature: Variant of the nucleotide sequence at SEQ ID NO 25669
cgcggtagcacgcattcattcaataatcagcattggaactggagtccctcaacccaaagattttgggaacgatctcaaaaacattatacgaaccttgaagtcgatcgcgactgagactgagcagacacatctgaggtttctcaaaactcacgttgaccttggactcaagggccgttactttcgattcaatgtcgaaaaaggtttatcagacgtacgattagatgagtttgctaaagttgcaattattgaggctgcaactagagtctacctcgacacccccgaagtgcaaggtgcactttcgtcattcacggcgctatcgccgccgaaaacgcgtttcatgagcgttgatgataaagaccgaaccttgggttggttgccatgctctgaccaacgacaattctataacgaggccgctggcctacgacaaatggatgaagcaggtgcatggttcattaggggacacttgttgccttggatgaaccagcccgggcccttactgtggctctatgcgggtgctggctctggcaagaccgttctcacctctaaaatcattgaagagatcgaacaacacacagacggctctcttgcgtattattacttttcgttccaaaggaaagagagtcaggacatgagagatatcaaacatgctcttttggttcaactcgtccaacatatttcccagagaactcgtaacaagcagaatatgtttctcgttccacaggcatttactcgtctccgggaaaagtattacccatcacaaagccccacaatggaggatcttgacattacgctcgtcgacatcatcaatcggtcaccaaggacatttattgtcgttgacgccctagatgaatgcgaaaatctaatgcttcgggccaacataatgaagtttcttctgcaactaatagagaacacttacactgatctgtatattattatcacaagccgcccagagcttgatatcaaagactacgtgttatcgatgccggtcacgaagcgactggtcgggttcgacacgaataaggtcgaccaggacatacgcactcacctcagacaacaaatgaaagaaccgccgtactcgaaatggtctggccaactccgaaatgaagttatagattacatttctcagcgatcaggtggggtatttcgctgggccgatttgcagtttcaagcacttcgaggcaaaactagagagatcgacgtaaggagagctctcaggaaccttccaagaacactaggagatacttacaaacgtatacttgatcgaattgagcttgaagggtacaagaacgagactattgcaatccttagatggctcgcctacgcacagagacctttgcgcctttctgaagtggctgaaattgcagcatttgatattgaggctataggggatcacaagctggctatctctgatccaacgccttgcaagattacttttcagccacagcatagatttgatgaccctgcagattttcttcgctttttgggcaatctcgtcactgtctcggactccgatgctggtgatctgcagaaggagacagatgagcgccttgtttcgttttcacacttctccgtcagagaatacctcgagtcagacgaagcaccccctctgtttaagcttcaaagccaaaactgtcacaaatttatttatatgagctgtctcgcttatattgaccagtatgactcttcgtacacggagaaccatttgttgcccacgcatcccttgctgttgtatgcttgtttacatatctgggatcatacggaagagctcatttcatgctcaaaagccactggtaatgtcatacagactatacttcaaatactgctactatatacaaatttg

SEQ ID NO: 25672 - DNA, 4386 bp, Muscodor strobelii
  misc_feature: SGI cDNA ID NO. 568764
  misc_feature: Encodes the peptide sequence at SEQ ID NO 25673
atggatgataaggcgcctctaaaacttctatcactcgatggtggaggcatccgtggtttggcatcgttgatcatcctcaagcacctcatgctgcgagtggaccatgagaacccacccaagccatatgaatattttgatttgatcggtgggacgagcacaggaggtctgattgccattatgctaggccgtctacagatgggagttgatgaatgcacacagaagtatctcgacgtttcatcagccgcattccaacccaagaggtccaaagtcaacgttcttggtcgagctaagggccttgtcaagggcgaaggggcgtataagggtgaaagtcttgccacggagttcaagaaggctgctttagctttcgacggtagtgaggatgcgaagctcttttatgtcgatggagcaacagggttgaataaccccgttgagagtgtgctagaagaggcccggcgcctctggcctgacgcggtagcacgcattcattcaataatcagcattggaactggagtccctcaacccaaagattttgggaacgatctcaaaaacattatacgaaccttgaagtcgatcgcgactgagactgagcagacacatctgaggtttctcaaaactcacgttgaccttggactcaagggccgttactttcgattcaatgtcgaaaaaggtttatcagacgtacgattagatgagtttgctaaagttgcaattattgaggctgcaactagagtctacctcgacacccccgaagtgcaaggtgcactttcgtcattcacggcgctatcgccgccgaaaacgcgtttcatgagcgttgatgataaagaccgaaccttgggttggttgccatgctctgaccaacgacaattctataacgaggccgctggcctacgacaaatggatgaagcaggtgcatggttcattaggggacacttgttgccttggatgaaccagcccgggcccttactgtggctctatgcgggtgctggctctggcaagaccgttctcacctctaaaatcattgaagagatcgaacaacacacagacggctctcttgcgtattattacttttcgttccaaaggaaagagagtcaggacatgagagatatcaaacatgctcttttggttcaactcgtccaacatatttcccagagaactcgtaacaagcagaatatgtttctcgttccacaggcatttactcgtctccgggaaaagtattacccatcacaaagccccacaatggaggatcttgacattacgctcgtcgacatcatcaatcggtcaccaaggacatttattgtcgttgacgccctagatgaatgcgaaaatctaatgcttcgggccaacataatgaagtttcttctgcaactaatagagaacacttacactgatctgtatattattatcacaagccgcccagagcttgatatcaaagactacgtgttatcgatgccggtcacgaagcgactggtcgggttcgacacgaataaggtcgaccaggacatacgcactcacctcagacaacaaatgaaagaaccgccgtactcgaaatggtctggccaactccgaaatgaagttatagattacatttctcagcgatcaggtggggtatttcgctgggccgatttgcagtttcaagcacttcgaggcaaaactagagagatcgacgtaaggagagctctcaggaaccttccaagaacactaggagatacttacaaacgtatacttgatcgaattgagcttgaagggtacaagaacgagactattgcaatccttagatggctcgcctacgcacagagacctttgcgcctttctgaagtggctgaaattgcagcatttgatattgaggctataggggatcacaagctggctatctctgatccaacgccttgcaagattacttttcagccacagcatagatttgatgaccctgcagattttcttcgctttttgggcaatctcgtcactgtctcggactccgatgctggtgatctgcagaaggagacagatgagcgccttgtttcgttttcacacttctccgtcagagaatacctcgagtcagacgaagcaccccctctgtttaagcttcaaagccaaaactgtcacaaatttatttatatgagctgtctcgcttatattgaccagtatgactcttcgtacacggagaaccatttgttgcccacgcatcccttgctgttgtatgcttgtttacatatctgggatcatacggaagagctcatttcatgctcaaaagccactggtaatgtcatacagactatacttcaaatactgctactatatacaaatttgggatatgcttttcacgttgctcttcaacgtcttggcatggatgtgcttggtggatcacaaagtatatccatatttcttgctagactcccagagaagatctcgacctcgaaattcttggaagctatctctctcggtagtcggcgtttgctagagttcctgtcccatagtggagcgaagctgccaattagtccctttcttggaggaccacaacatgttggaaatctcggagactccttgcgcagctggccggagaccgaaacggcactgaagaaagcctccaaacaagaagcctttgcgaatatctttcttcctctatatagcacactaacgtgcgttgatgagaagcacctcgacgtgcaaaggaccgtttgggatcttctgctgttgatccccggtatcaatctcaatgatatcaatgatgcagaacagacaccgctcttgatagcggcacttcaagggaatgaatcattctttcggttcttatttgacttgcagggcgtggatcaaaatcatcgcgacgtccacggctggagcatcgggacatgtgctgttatcggagcgaacggtcggattattgatattttgctcgcctcacctggcatcgactggcacacggttgattcgtacggatggacacctctaaaatgggcttactacaaaggcctcgacactctgattagaactcagagacctcattctatgcatcttgattttgcagacttaaggaagacagacacctttttatcatgcgaagaaagttgtagcaacaaaatcgacactgcaatcatagcccgtagtgcgagtttctctaacgcaggtgataagttagcagtcttaagagacgtgagcgcttcagtcgctggcgatataagttcccattgcgttatatacgagatgtcttcaactaccaataccacgactctgtttgatgagattggtggagtttttggcagcatttcgtggagccctgatgattccatgatattgatatacggttggagttcagctaagctattcagtcttaaggatggaaagtgcattactgtcatcgagcgcaacagcccatttaccaaaattgtgtggctaccaacaggaaactccttgtttataagcgaccaagataagttcggaagcattcgtcgcttcaatttgatacaagatcctcgaagtggtagcacaaacgtaaagagtgaagaagcagaatggcattttccccacctcaatattcatgatatggaaacgtctgcagatggccaacatctggtcgccgccggtccacgaacaatgtatgtttttcagattgagacgaactcggaagtctacagtctcaataccccccgcgcgattcttaatgttaccatcagtccggactcacaacgcgttctcatcagtatgcttggtttggcccggctggtaaacattgctgatgggacttgggtacgcgacttccctaaacttccgacgtttggtgaatattactgtgcccccgaaagcacgttcttaggcccggatggctcatggctactgcagtcacaagaagatgggtacataacaatatgggactggaaatccggacaactccttggtcactcaccaggccataaaccagcacacacaagatgcatcgcacggcgaccgggcgactttaacgaatttgcttccgtagggtatgatggtcatgttaaactgaatcagaatgaaagaaagggatctgaggcgaacaggcatagcgagaccaaccgccagcctacgatgggatggataagatcagttagacaagaactaagccgtgtgggcccgggcaaagtcgaacccccagccttgctatcaatcgcactccgatacgcctcacacccgctgaggaaatttcctgggcctcgactagcacggatcactgatggctacgctgggcttcacgccacccggaaaaggcttcatcttgtcacataccaaggccatcagaaatatggcccagttgtaagacaaggaccgaatcgtctcgtcttcaataccgtcacggcgcttcgaggtggaaacgccgtacttttcagagcatggcgcattgctaataagaggtag

SEQ ID NO: 25673 - protein, 1461 aa, Muscodor strobelii
  misc_feature: SGI Peptide ID NO. 568764
  misc_feature (10)..(147): Pfam Id: PF01734 Pfam Desc: Patatin-like phospholipase
  misc_feature (910)..(943): Pfam Id: PF00023 Pfam Desc: Ankyrin repeat
  misc_feature (10)..(83): Pfam Id: PF01734 Pfam Desc: Patatin-like phospholipase
  misc_feature (328)..(716): NCBI GI: 116197186 Blast Desc: CHGG_05191 [Chaetomium globosum CBS 148.51] gi|88181104|gb|EAQ88572.1| CHGG_05191 [Chaetomium globosum CBS 148.51]
  misc_feature (266)..(1003): NCBI GI: 169596849 Blast Desc: SNOG_01194 [Phaeosphaeria nodorum SN15] gi|111069723|gb|EAT90843.1| SNOG_01194 [Phaeosphaeria nodorum SN15]
  misc_feature (276)..(687): NCBI GI: 169607437 Blast Desc: SNOG_06775 [Phaeosphaeria nodorum SN15] gi|160701409|gb|EAT85426.2| SNOG_06775 [Phaeosphaeria nodorum SN15]
  misc_feature (209)..(735): NCBI GI: 238845951 Blast Desc: ankyrin repeat protein [Microsporum canis CBS 113480]
  misc_feature (280)..(716): NCBI GI: 212545278 Blast Desc: NACHT domain protein [Penicillium marneffei ATCC 18224] gi|210065762|gb|EEA19856.1| NACHT domain protein [Penicillium marneffei ATCC 18224]
  misc_feature (303)..(996): NCBI GI: 119473749 Blast Desc: Ankyrin repeat protein [Neosartorya fischeri NRRL 181] gi|119406903|gb|EAW16853.1| Ankyrin repeat protein [Neosartorya fischeri NRRL 181]
  misc_feature (303)..(712): NCBI GI: 225555145 Blast Desc: ankyrin repeat protein [Ajellomyces capsulatus G186AR]
  misc_feature (241)..(773): NCBI GI: 159122813 Blast Desc: Pfs, NACHT and Ankyrin domain protein [Aspergillus fumigatus A1163]
  misc_feature (303)..(712): NCBI GI: 240281360 Blast Desc: ankyrin repeat protein [Ajellomyces capsulatus H143]
  misc_feature (239)..(826): NCBI GI: 212532817 Blast Desc: multiple ankyrin repeats single kh domain protein, [Penicillium marneffei ATCC 18224] gi|210071929|gb|EEA26018.1| multiple ankyrin repeats single kh domain protein, [Penicillium
MDDKAPLKLLSLDGGGIRGLASLIILKHLMLRVDHENPPKPYEYFDLIGGTSTGGLIAIMLGRLQMGVDECTQKYLDVSSAAFQPKRSKVNVLGRAKGLVKGEGAYKGESLATEFKKAALAFDGSEDAKLFYVDGATGLNNPVESVLEEARRLWPDAVARIHSIISIGTGVPQPKDFGNDLKNIIRTLKSIATETEQTHLRFLKTHVDLGLKGRYFRFNVEKGLSDVRLDEFAKVAIIEAATRVYLDTPEVQGALSSFTALSPPKTRFMSVDDKDRTLGWLPCSDQRQFYNEAAGLRQMDEAGAWFIRGHLLPWMNQPGPLLWLYAGAGSGKTVLTSKIIEEIEQHTDGSLAYYYFSFQRKESQDMRDIKHALLVQLVQHISQRTRNKQNMFLVPQAFTRLREKYYPSQSPTMEDLDITLVDIINRSPRTFIVVDALDECENLMLRANIMKFLLQLIENTYTDLYIIITSRPELDIKDYVLSMPVTKRLVGFDTNKVDQDIRTHLRQQMKEPPYSKWSGQLRNEVIDYISQRSGGVFRWADLQFQALRGKTREIDVRRALRNLPRTLGDTYKRILDRIELEGYKNETIAILRWLAYAQRPLRLSEVAEIAAFDIEAIGDHKLAISDPTPCKITFQPQHRFDDPADFLRFLGNLVTVSDSDAGDLQKETDERLVSFSHFSVREYLESDEAPPLFKLQSQNCHKFIYMSCLAYIDQYDSSYTENHLLPTHPLLLYACLHIWDHTEELISCSKATGNVIQTILQILLLYTNLGYAFHVALQRLGMDVLGGSQSISIFLARLPEKISTSKFLEAISLGSRRLLEFLSHSGAKLPISPFLGGPQHVGNLGDSLRSWPETETALKKASKQEAFANIFLPLYSTLTCVDEKHLDVQRTVWDLLLLIPGINLNDINDAEQTPLLIAALQGNESFFRFLFDLQGVDQNHRDVHGWSIGTCAVIGANGRIIDILLASPGIDWHTVDSYGWTPLKWAYYKGLDTLIRTQRPHSMHLDFADLRKTDTFLSCEESCSNKIDTAIIARSASFSNAGDKLAVLRDVSASVAGDISSHCVIYEMSSTTNTTTLFDEIGGVFGSISWSPDDSMILIYGWSSAKLFSLKDGKCITVIERNSPFTKIVWLPTGNSLFISDQDKFGSIRRFNLIQDPRSGSTNVKSEEAEWHFPHLNIHDMETSADGQHLVAAGPRTMYVFQIETNSEVYSLNTPRAILNVTISPDSQRVLISMLGLARLVNIADGTWVRDFPKLPTFGEYYCAPESTFLGPDGSWLLQSQEDGYITIWDWKSGQLLGHSPGHKPAHTRCIARRPGDFNEFASVGYDGHVKLNQNERKGSEANRHSETNRQPTMGWIRSVRQELSRVGPGKVEPPALLSIALRYASHPLRKFPGPRLARITDGYAGLHATRKRLHLVTYQGHQKYGPVVRQGPNRLVFNTVTALRGGNAVLFRAWRIANKR

SEQ ID NO: 25674 - DNA, 1840 bp, Muscodor strobelii; identical to SEQ ID NO: 25671
  misc_feature: SGI EST ID NO. CUFF.60491.0
  misc_feature: Variant of the nucleotide sequence at SEQ ID NO 25672

SEQ ID NO: 25675 - DNA, 1983 bp, Muscodor strobelii
  misc_feature: SGI cDNA ID NO. 568765
  misc_feature: Elevated expression when VOC is produced
  misc_feature: Encodes the peptide sequence at SEQ ID NO 25676
atggctgaagccttgggtgtcttggcaagtggcattgccgtagggcaacttgcggctagtatcatcaaaggcgttcaaaatattcgtggtgtctggtctgcatttagagatgcaccccaggacattgacaacatcctggaagaactagagattctctgtcaaacgctgcttgtcctccgaaacaacgttcaatctcgtccatgcgacatcgatctaaccacatcacttgggggaattctcgaaattacacagaaggccgcttcgcagctgaacgatgttgccacgagattgtccccggataatcaacaaagcaagacgcggcaatatgttaaaagatggcaggttatcattaagaaaggggaaattgagggtatccgtgagaagctccagcgtgttgtcagatatttaaacttagcgatcagccttcttgtctcgagtaagaatcaaagcttagatttgatcaagcagtttacttctcgacctgtgcctcttgttttagctgaagctgaaacactagacttgaatgaacgggttactatccagtcgggtcctcttcttctaactgaagacgaaacctgcggcgaacagcttatagggaaaggattgcgggtagctccacgactaattcagcgtgaaagaacgcggaagtctgtcgacttgctcgggtttggcacgttcgtctacagcacgacaaccgaagtcacacgatggaaacagtcgaagcttgctgatcaggttaacatggaaaagacccgcgaagaaaggcggtttctgccgtctggctggactggaatgaatgcaataaacatattgcggaccagatcgctcggcgattggcatttttcattcaggtcattttacgtcgtagatcgggactcctctcccataatgatcgcgtgtagagcaggtgatatcgagcaagtcgtcagattgttgacaaaaggggctgctacagtcaatgatgtcgaccaatacggccacacacttctacatgaagctagctacttgaaccggcctgagttgtgtaaatggctcattgcacatggtgctgacgctgattcaagatgtcgtattggctggaccccactatattattctgctaaggcagtgcataaccccggcatgtgcctcgatactatgcgcgtactgttggacgacaaaattcccgacatcgtgttcgacgacgatcacaattgcctttgcagctcatttaggttctgcgaaggtcctctcgaggctgttgattatctgtcaacgttcatgtataaaggttatgatcctgacctgaagtatatcgaggcatggcaagccgggtggtgccaagggccatactcaacaatgtacgccaaagccgccttcggcagaataccaatatggccaaaaagagccaacggcattccctatttttctatcagccgccgctctattctacatgcggtggcttcaaatctcttgctttcagtcgaggatgttttcggtgagtcagatgtcatgtacattttggaccaggttctcgccacctatccttatctccatccgcttgatgtatatggagcgacgccattcgactacctacttggattttggtcaagccgaagatttcgtgaagtcaaaccaagagataataggcttgctgtaggtatttggttacgggcgctttattccagaggtgtcgatatccaacattacgtcaagaccgagggagacctccacaaagatggtgttttgattagtcccggagtaagaagagtaagagtagagcgacgctttacttatagtacttcgggtcataaagttggtgtatgcatatctgtgagggacgtaagggtgcagcaaaataacgttcctggcgcttggccggcatttggtggcgacgacgacaagcgcaggattattgacgctgatcatatcaaatatcgggctaattggacactgcgtgtcgagccaatctctcctctagttgagcgattacgtggtaagtag

SEQ ID NO: 25676 - protein, 660 aa, Muscodor strobelii
  misc_feature: SGI Peptide ID NO. 568765
  misc_feature (325)..(357): Pfam Id: PF00023 Pfam Desc: Ankyrin repeat
  misc_feature (1)..(351): NCBI GI: 154310991 Blast Desc: BC1G_06474 [Botryotinia fuckeliana B05.10] gi|150851273|gb|EDN26466.1| BC1G_06474 [Botryotinia fuckeliana B05.10]
  misc_feature (1)..(353): NCBI GI: 154318556 Blast Desc: [Botryotinia fuckeliana B05.10] gi|150857797|gb|EDN32989.1| [Botryotinia fuckeliana B05.10]
  misc_feature (1)..(141): NCBI GI: 154317802 Blast Desc: [Botryotinia fuckeliana B05.10] gi|150843542|gb|EDN18735.1| [Botryotinia fuckeliana B05.10]
  misc_feature (286)..(409): NCBI GI: 260948240 Blast Desc: CLUG_01876 [Clavispora lusitaniae ATCC 42720] gi|238848289|gb|EEQ37753.1| CLUG_01876 [Clavispora lusitaniae ATCC 42720]
  misc_feature (293)..(367): NCBI GI: 225621066 Blast Desc: ankyrin repeat-containing protein [Brachyspira hyodysenteriae WA1] gi|225215886|gb|ACN84620.1| ankyrin repeat-containing protein [Brachyspira hyodysenteriae WA1]
  misc_feature (257)..(351): NCBI GI: 238488137 Blast Desc: AFLA_012860 [Aspergillus flavus NRRL3357] gi|220697694|gb|EED54034.1| AFLA_012860 [Aspergillus flavus NRRL3357]
  misc_feature (296)..(369): NCBI GI: 225849928 Blast Desc: pfs, nacht and ankyrin domain protein [Persephonella marina EX-H1] gi|225646310|gb|ACO04496.1| pfs, nacht and ankyrin domain protein [Persephonella marina EX-H1]
  misc_feature (294)..(435): NCBI GI: 157106389 Blast Desc: ankyrin 2,3/unc44 [Aedes aegypti] gi|108868849|gb|EAT33074.1| ankyrin 2,3/unc44 [Aedes aegypti]
  misc_feature (290)..(417): NCBI GI: 154420340 Blast Desc: ankyrin repeat protein [Trichomonas vaginalis G3] gi|121917425|gb|EAY22199.1| ankyrin repeat protein, [Trichomonas vaginalis G3]
  misc_feature (306)..(388): NCBI GI: 123468855 Blast Desc: ankyrin repeat protein [Trichomonas vaginalis G3] gi|121900382|gb|EAY05420.1| ankyrin repeat protein, [Trichomonas vaginalis G3]
  misc_feature: Useful for introducing or modulating the production of volatile compounds
MAEALGVLASGIAVGQLAASIIKGVQNIRGVWSAFRDAPQDIDNILEELEILCQTLLVLRNNVQSRPCDIDLTTSLGGILEITQKAASQLNDVATRLSPDNQQSKTRQYVKRWQVIIKKGEIEGIREKLQRVVRYLNLAISLLVSSKNQSLDLIKQFTSRPVPLVLAEAETLDLNERVTIQSGPLLLTEDETCGEQLIGKGLRVAPRLIQRERTRKSVDLLGFGTFVYSTTTEVTRWKQSKLADQVNMEKTREERRFLPSGWTGMNAINILRTRSLGDWHFSFRSFYVVDRDSSPIMIACRAGDIEQVVRLLTKGAATVNDVDQYGHTLLHEASYLNRPELCKWLIAHGADADSRCRIGWTPLYYSAKAVHNPGMCLDTMRVLLDDKIPDIVFDDDHNCLCSSFRFCEGPLEAVDYLSTFMYKGYDPDLKYIEAWQAGWCQGPYSTMYAKAAFGRIPIWPKRANGIPYFSISRRSILHAVASNLLLSVEDVFGESDVMYILDQVLATYPYLHPLDVYGATPFDYLLGFWSSRRFREVKPRDNRLAVGIWLRALYSRGVDIQHYVKTEGDLHKDGVLISPGVRRVRVERRFTYSTSGHKVGVCISVRDVRVQQNNVPGAWPAFGGDDDKRRIIDADHIKYRANWTLRVEPISPLVERLRGK

SEQ ID NO: 25677 - DNA, 3891 bp, Muscodor strobelii
  misc_feature: SGI EST ID NO. CUFF.60518.0
  misc_feature: Variant of the nucleotide sequence at SEQ ID NO 25675
ttcagcgtgaaagaacgcggaagtctgtcgacttgctcgggtttggcacgttcgtctacagcacgacaaccgaagtcacacgatggaaacagtcgaagcttgctgatcaggttaacatggaaaagacccgcgaagaaaggcggtttctgccgtctggctggactggaatgaatgcaataaacatattgcggaccagatcgctcggcgattggcatttttcattcaggtcattttacgtcgtagatcgggactcctctcccataatgatcgcgtgtagagcaggtgatatcgagcaagtcgtcagattgttgacaaaaggggctgctacagtcaatgatgtcgaccaatacggccacacacttctacatgaagctagctacttgaaccggcctgagttgtgtaaatggctcattgcacatggtgctgacgctgattcaagatgtcgtattggctggaccccactatattattctgctaaggcagtgcataaccccggcatgtgcctcgatactatgcgcgtactgttggacgacaaaattcccgacatcgtgttcgacgacgatcacaattgcctttgcagctcatttaggttctgcgaaggtcctctcgaggctgttgattatctgtcaacgttcatgtataaaggttatgatcctgacctgaagtatatcgaggcatggcaagccgggtggtgccaagggccatactcaacaatgtacgccaaagccgccttcggcagaataccaatatggccaaaaagagccaacggcattccctatttttctatcagccgccgctctattctacatgcggtggcttcaaatctcttgctttcagtcgaggatgttttcggtgagtcagatgtcatgtacattttggaccaggttctcgccacctatccttatctccatccgcttgatgtatatggagcgacgccattcgactacctacttggattttggtcaagccgaagatttcgtgaagtcaaaccaagagataataggcttgctgtaggtatttggttacgggcgctttattccagaggtgtcgatatccaacattacgtcaagaccgagggagacctccacaaagatggtgttttgattagtcccggagtaagaagagtaagagtagagcgacgctttacttatagtacttcgggtcataaagttggtgtatgcatatctgtgagggacgtaagggtgcagcaaaataacgttcctggcgcttggccggcatttggtggcgacgacgacaagcgcaggattattgacgctgatcatatcaaatatcgggctaattggacactgcgtgtcgagccaatctctcctctagttgagcgattacgtgatgcatatacaagatcaggactctgtatccggtcatctcgcaaggcgatgaagatctatgcacaaagacaacgaaagcgaataaaggcgagacggagaatatatggcagcgcgaatcaatgtctacattatctttgcgcacgctctacgctaccagatattactaactaggagaatatctaaagatcggatcgacgttcgggcttcggtaataagtatgttcctcggttagacatacgtagagtgacaggattattcccgattaagtgtataatcttccatgaacaagtcgctataaatataagttctgcggtaccttttattcccgactcgccttgccagtcgatctggctgactctttgtgcaggaacaccaaattcatctatcaagcaagcattacatgtatgttagcaacaaaactaatctgatctattatatgtgctcgaatatgctgtgttctcgctgccaagtcgcatcatcaagtctatgtacctcttaccttacatatatgactgagctcgactcctacgcacgtagctaagacagccgaagccagggcaaatacaccatcacaaacccagggtatcgtaaccatgaaactacaacttcgaaataacaagacttccactcccctccccaatctccaaccccacagccttcgccgccatctcataagcatcattctccccatatctcgtcaaactatttggatcaatttcactctccatcaaagtcttcgccttgacatacgtgtaccgcgacttcacctcctcacccgccgtcacagtcttgataaaccccgcccaagactcataacaccgtctcgccccctcaatcttcggcatcaccgcacaaaacgtatgaggcatcgcctcgtactcctcaaacacgacaggcactctatttgctgtgagcttcgcgacgagatacttgtcttcgtccgctagacactcccacccgcatactatccacatcggcgggctgcctgcccagcttttcgccagatgaggcgagacgagtgggtgcaggagcagagcatcgggcgcgtagacgtgccgccgcggaggtgttgcgggccatactgagtctgctgggggttggttttctgaaagtaggactggtggaccgaggaaatcccatttttgattgcgttcccacgatggcatgctttgcagtacgtccgtccatggtgagaggcatgtaacaccggcggggagcggtgcttcgcggtcgacgccgtaccatgggaccttacggccttgcttgcgaagctcaaggaggagttgaatgagtgatagagcgagaccacctccagcgctgttatcataacctttgttagtcgtctttacatgtatcccagcaaggaagaagtctcacctatctccagcaaaaacaacatcaccagcatcgacaggctcatgcatcgacccagacgggggataaagcaacataaaatacgcaacaaaaatatccaacaacgccgccggaaacggattctgcggcgccagcctatacctcaccgagtacactcttccccccgtcaacttcgccaaagtcttcgtaagcggtctatgcgtcgagggatcacaaagatagaaagcaccaccatgcatatacaacaccgtagccttactcgtacactccttcatcatccccttataccgttcctcctcgctaatgtccggcaacggctcatcggccttaacaccacttctataacccgtccactccgcctctacaggtgcaagatccggaatcccaaaactccactcatttagcggtgtttcactcataccgtgaataacatcgagcaaaacatctcttatccccgtttctggcgggattggagatgttgccctagatatccatatttcccccttcacaccagggtctaggagggtcagagcctgagtctgtttgtatccccgccgcggaccgtgtaagactgcgcggagaatggtgagtgtgatgtcggtctcgagggacagatatttggatgcttctgatattcttaagacgtggagtaggataacgcgagcgatgagcgggattttggggagtaatcgccagaggagagcttgtcgtgcttttttcaactttgccgcctggtttacttctgtgactgtggacattgtggccggaactttacgagtgttgcgtgagttagtcggagagttgcggtattgagtgagatagtcgtgtaggacactgcagcaggcgagctacgtgcctcggctcaactcccaggtgcacgatcttagatcgtgatcagcgagaagtagaacggtaaaatcgcagtcattcaaaatatctccgatgcaattttattttagaaacagataatggtgaattttgaaaggggatgtgtcctgttcagaaacatccaccgcatctaaggtatcgtcctgtctgtccactaagcacgataagatacgcgctatgagttggtttctaggatttggaacggcccgctttcgtcaacgatcaggtcgaaagcagggatttacgcagtgatggcatcaagggcattaatgacaaggaa

SEQ ID NO: 25678 - DNA, 1473 bp, Muscodor strobelii
  misc_feature: SGI cDNA ID NO. 568766
  misc_feature: Encodes the peptide sequence at SEQ ID NO 25679
atgtccacagtcacagaagtaaaccaggcggcaaagttgaaaaaagcacgacaagctctcctctggcgattactccccaaaatcccgctcatcgctcgcgttatcctactccacgtcttaagaatatcagaagcatccaaatatctgtccctcgagaccgacatcacactcaccattctccgcgcagtcttacacggtccgcggcggggatacaaacagactcaggctctgaccctcctagaccctggtgtgaagggggaaatatggatatctagggcaacatctccaatcccgccagaaacggggataagagatgttttgctcgatgttattcacggtatgagtgaaacaccgctaaatgagtggagttttgggattccggatcttgcacctgtagaggcggagtggacgggttatagaagtggtgttaaggccgatgagccgttgccggacattagcgaggaggaacggtataaggggatgatgaaggagtgtacgagtaaggctacggtgttgtatatgcatggtggtgctttctatctttgtgatccctcgacgcatagaccgcttacgaagactttggcgaagttgacggggggaagagtgtactcggtgaggtataggctggcgccgcagaatccgtttccggcggcgttgttggatatttttgttgcgtattttatgttgctttatcccccgtctgggtcgatgcatgagcctgtcgatgctggtgatgttgtttttgctggagatagcgctggaggtggtctcgctctatcactcattcaactcctccttgagcttcgcaagcaaggccgtaaggtcccatggtacggcgtcgaccgcgaagcaccgctccccgccggtgttacatgcctctcaccatggacggacgtactgcaaagcatgccatcgtgggaacgcaatcaaaaatgggatttcctcggtccaccagtcctactttcagaaaaccaacccccagcagactcagtatggcccgcaacacctccgcggcggcacgtctacgcgcccgatgctctgctcctgcacccactcgtctcgcctcatctggcgaaaagctgggcaggcagcccgccgatgtggatagtatgcgggtgggagtgtctagcggacgaagacaagtatctcgtcgcgaagctcacagcaaatagagtgcctgtcgtgtttgaggagtacgaggcgatgcctcatacgttttgtgcggtgatgccgaagattgagggggcgagacggtgttatgagtcttgggcggggtttatcaagactgtgacggcgggtgaggaggtgaagtcgcggtacacgtatgtcaaggcgaagactttgatggagagtgaaattgatccaaatagtttgacgagatatggggagaatgatgcttatgagatggcggcgaaggctgtggggttggagattggggaggggagtggaagtcttgttatttcgaagttgtag

SEQ ID NO: 25679 - protein, 490 aa, Muscodor strobelii
  misc_feature: SGI Peptide ID NO. 568766
  misc_feature (171)..(408): Pfam Id: PF07859 Pfam Desc: alpha/beta hydrolase fold
  misc_feature (27)..(490): NCBI GI: 39973649 Blast Desc: conserved [Magnaporthe grisea 70-15] gi|58257407|gb|AAW69325.1| acetyl-hydrolase-like protein [Magnaporthe grisea] gi|145018015|gb|EDK02294.1| conserved grisea
  misc_feature (24)..(477): NCBI GI: 256727156 Blast Desc: NECHADRAFT_32766 [Nectria haematococca mpVI 77-13-4]
  misc_feature (2)..(475): NCBI GI: 261359658 Blast Desc: conserved [Verticillium albo-atrum VaMs.102]
  misc_feature (24)..(480): NCBI GI: 46134249 Blast Desc: FG09264.1 [Gibberella zeae PH-1]
  misc_feature (17)..(477): NCBI GI: 85085666 Blast Desc: NCU03903 [Neurospora crassa OR74A] gi|7899389|emb|CAB91679.1| conserved [Neurospora crassa] gi|28918635|gb|EAA28306.1| conserved [Neurospora crassa OR74A]
  misc_feature (28)..(458): NCBI GI: 154304031 Blast Desc: BC1G_09651 [Botryotinia fuckeliana B05.10] gi|150854286|gb|EDN29478.1| BC1G_09651 [Botryotinia fuckeliana B05.10]
  misc_feature (36)..(472): NCBI GI: 189204592 Blast Desc: acetyl-hydrolase [Pyrenophora tritici-repentis Pt-1C-BFP] gi|187985730|gb|EDU51218.1| acetyl-hydrolase [Pyrenophora tritici-repentis Pt-1C-BFP]
  misc_feature (28)..(458): NCBI GI: 156030677 Blast Desc: SS1G_14434 [Sclerotinia sclerotiorum 1980] gi|154700825|gb|EDO00564.1| SS1G_14434 [Sclerotinia sclerotiorum 1980]
  misc_feature (20)..(376): NCBI GI: 116202561 Blast Desc: CHGG_09165 [Chaetomium globosum CBS 148.51] gi|88177683|gb|EAQ85151.1| CHGG_09165 [Chaetomium globosum CBS 148.51]
  misc_feature (19)..(434): NCBI GI: 258563826 Blast Desc: [Uncinocarpus reesii 1704] gi|237908165|gb|EEP82566.1| [Uncinocarpus reesii 1704]
MSTVTEVNQAAKLKKARQALLWRLLPKIPLIARVILLHVLRISEASKYLSLETDITLTILRAVLHGPRRGYKQTQALTLLDPGVKGEIWISRATSPIPPETGIRDVLLDVIHGMSETPLNEWSFGIPDLAPVEAEWTGYRSGVKADEPLPDISEEERYKGMMKECTSKATVLYMHGGAFYLCDPSTHRPLTKTLAKLTGGRVYSVRYRLAPQNPFPAALLDIFVAYFMLLYPPSGSMHEPVDAGDVVFAGDSAGGGLALSLIQLLLELRKQGRKVPWYGVDREAPLPAGVTCLSPWTDVLQSMPSWERNQKWDFLGPPVLLSENQPPADSVWPATPPRRHVYAPDALLLHPLVSPHLAKSWAGSPPMWIVCGWECLADEDKYLVAKLTANRVPVVFEEYEAMPHTFCAVMPKIEGARRCYESWAGFIKTVTAGEEVKSRYTYVKAKTLMESEIDPNSLTRYGENDAYEMAAKAVGLEIGEGSGSLVISKL

SEQ ID NO: 25680 - DNA, 3484 bp, Muscodor strobelii
  misc_feature: SGI EST ID NO. CUFF.60519.1
  misc_feature: Variant of the nucleotide sequence at SEQ ID NO 25678
cgtaaatccctgctttcgacctgatcgttgacgaaagcgggccgttccaaatcctagaaaccaactcatagcgcgtatcttatcgtgcttagtggacagacaggacgataccttagatgcggtggatgtttctgaacaggacacatcccctttcaaaattcaccattatctgtttctaaaataaaattgcatcggagatattttgaatgactgcgattttaccgttctacttctcgctgatcacgatctaagatcgtgcacctgggagttgagccgaggcacgtagctcgcctgctgcagtgtcctacacgactatctcactcaataccgcaactctccgactaactcacgcaacactcgtaaagttccggccacaatgtccacagtcacagaagtaaaccaggcggcaaagttgaaaaaagcacgacaagctctcctctggcgattactccccaaaatcccgctcatcgctcgcgttatcctactccacgtcttaagaatatcagaagcatccaaatatctgtccctcgagaccgacatcacactcaccattctccgcgcagtcttacacggtccgcggcggggatacaaacagactcaggctctgaccctcctagaccctggtgtgaagggggaaatatggatatctagggcaacatctccaatcccgccagaaacggggataagagatgttttgctcgatgttattcacggtatgagtgaaacaccgctaaatgagtggagttttgggattccggatcttgcacctgtagaggcggagtggacgggttatagaagtggtgttaaggccgatgagccgttgccggacattagcgaggaggaacggtataaggggatgatgaaggagtgtacgagtaaggctacggtgttgtatatgcatggtggtgctttctatctttgtgatccctcgacgcatagaccgcttacgaagactttggcgaagttgacggggggaagagtgtactcggtgaggtataggctggcgccgcagaatccgtttccggcggcgttgttggatatttttgttgcgtattttatgttgctttatcccccgtctgggtcgatgcatgagcctgtcgatgctggtgatgttgtttttgctggagatagcgctggaggtggtctcgctctatcactcattcaactcctccttgagcttcgcaagcaaggccgtaaggtcccatggtacggcgtcgaccgcgaagcaccgctccccgccggtgttacatgcctctcaccatggacggacgtactgcaaagcatgccatcgtgggaacgcaatcaaaaatgggatttcctcggtccaccagtcctactttcagaaaaccaacccccagcagactcagtatggcccgcaacacctccgcggcggcacgtctacgcgcccgatgctctgctcctgcacccactcgtctcgcctcatctggcgaaaagctgggcaggcagcccgccgatgtggatagtatgcgggtgggagtgtctagcggacgaagacaagtatctcgtcgcgaagctcacagcaaatagagtgcctgtcgtgtttgaggagtacgaggcgatgcctcatacgttttgtgcggtgatgccgaagattgagggggcgagacggtgttatgagtcttgggcggggtttatcaagactgtgacggcgggtgaggaggtgaagtcgcggtacacgtatgtcaaggcgaagactttgatggagagtgaaattgatccaaatagtttgacgagatatggggagaatgatgcttatgagatggcggcgaaggctgtggggttggagattggggaggggagtggaagtcttgttatttcgaagttgtagtttcatggttacgataccctgggtttgtgatggtgtatttgccctggcttcggctgtcttagctacgtgcgtaggagtcgagctcagtcatatatgtaaggtaagaggtacatagacttgatgatgcgacttggcagcgagaacacagcatattcgagcacatataatagatcagattagttttgttgctaacatacatgtaatgcttgcttgatagatgaatttggtgttcctgcacaaagagtcagccagatcgactggcaaggcgagtcgggaataaaaggtaccgcagaacttatatttatagcgacttgttcatggaagattatacacttaatcgggaataatcctgtcactctacgtatgtctaaccgaggaacatacttattaccgaagcccgaacgtcgatccgatctttagatattctcctagttagtaatatctggtagcgtagagcgtgcgcaaagataatgtagacattgattcgcgctgccatatattctccgtctcgcctttattcgctttcgttgtctttgtgcatagatcttcatcgccttgcgagatgaccggatacagagtcctgatcttgtatatgcatctgcatcacttaggtcagtctctcaaacgtgctaatcactgttaaaatcaaagagtatggtagactactaactacttaccacgtaatcgctcaactagaggagagattggctcgacacgcagtgtccaattagcccgatatttgatatgatcagcgtcaataatcctgcgcttgtcgtcgtcgccaccaaatgccggccaagcgccaggaacgttattttgctgcacccttacgtccctcacagatatgcatacaccaactttatgacccgaagtactataagtaaagcgtcgctctactcttactcttcttactccgggactaatcaaaacaccatctttgtggaggtctccctcggtcttgacgtaatgttggatatcgacacctctggaataaagcgcccgtaaccaaatacctacagcaagcctattatctcttggtttgacttcacgaaatcttcggcttgaccaaaatccaagtaggtagtcgaatggcgtcgctccatatacatcaagcggatggagataaggataggtggcgagaacctggtccaaaatgtacatgacatctgactcaccgaaaacatcctcgactgaaagcaagagatttgaagccaccgcatgtagaatagagcggcggctgatagaaaaatagggaatgccgttggctctttttggccatattggtattctgccgaaggcggctttggcgtacattgttgagtatggcccttggcaccacccggcttgccatgcctcgatatacttcaggtcaggatcataacctttatacatgaacgttgacagataatcaacagcctcgagaggaccttcgcagaacctaaatgagctgcaaaggcaattgtgatcgtcgtcgaacacgatgtcgggaattttgtcgtccaacagtacgcgcatagtatcgaggcacatgccggggttatgcactgccttagcagaataatatagtggggtcctgtgtttattggctattaggtaggtggacaatgataaaaaggtgccgtaaggttctcacca

SEQ ID NO: 25681 - DNA, 1053 bp, Muscodor strobelii
  misc_feature: SGI cDNA ID NO. 568767
  misc_feature: Reduced expression when VOC is produced
  misc_feature: Encodes the peptide sequence at SEQ ID NO 25682
atggcgatacgcgaggacattgtctcctctgcggttaacttcctgcaggatcccaacgttgcctcgtcccctctagagaacaagctctccttcttacggtccaagaacttgacccaagaagagatcgatgccgctttcgcccgcaccggcgcctctcctcctccggcctccgcatcgccatccgctggccctgttgctcagcagcagcagtactaccctcaatatccacagcagcctccctatggctggcaatcacctccacaggcgcctccgaggagggactggcgggattggttcatcatggccaccgccgtcggaggtgtagggtacggtctatacttcctcactaagcgatacatctatcccttggtagcgccaccgaccccggagaagctcgagcaggacaaagccagcgtcgacgacaagttcgcccaagcattcgcaaccatcgagcaactagccaaagacaccgaagagctgaaaagctccgagcaagaacgagttgagaagctcgacaagattatcgacgacatggagaaatttgtcgaggacgttaagtactccacgcgccgacaagacgaggagatggaacgtatgcgtgacgacatcaagggcgtcaaggaccttgttcccaagtccatggcgaaccacaaagacttcaccgaatctcggctgaaagagatcagcaacgaggtgaagagcctaaagtctctgattacacaacgcatgactgcgccagcccccgctgcagcctcgacacccgcacctagccaatctcactccacgaacaactaccttcagactgttaatggcagttcggcagccgcaagccccgccccggccacgagcccggctccagaggcatcggctcccaaggagaatggaacacccgcagccagcaagcaggactacatatcatcactcaacggccgagccagcccctttagcagcggcatgccggccgccaaggcatcgatcccggcgtggcagttggccgccagcaagagcgcggacacagccggcagcagttcccaggctggaagcagctcttag

SEQ ID NO: 25682 - protein, 350 aa, Muscodor strobelii
  misc_feature: SGI Peptide ID NO. 568767
  misc_feature (3)..(124): Pfam Id: PF04695 Pfam Desc: Peroxisomal membrane anchor protein (Pex14p) conserved region
  misc_feature (1)..(350): NCBI GI: 85085658 Blast Desc: NCU03901 [Neurospora crassa OR74A] gi|16945424|emb|CAB91677.2| related to PEROXISOMAL MEMBRANE PROTEIN PER10 [Neurospora crassa] gi|28918633|gb|EAA28304.1|
  misc_feature (1)..(350): NCBI GI: 116202563 Blast Desc: CHGG_09166 [Chaetomium globosum CBS 148.51] gi|88177684|gb|EAQ85152.1| CHGG_09166 [Chaetomium globosum CBS 148.51]
  misc_feature (1)..(340): NCBI GI: 156030679 Blast Desc: SS1G_14435 [Sclerotinia sclerotiorum 1980] gi|154700826|gb|EDO00565.1| SS1G_14435 [Sclerotinia sclerotiorum 1980]
  misc_feature (1)..(350): NCBI GI: 119491889 Blast Desc: peroxisomal membrane anchor protein (Pex14), [Neosartorya fischeri NRRL 181] gi|119411599|gb|EAW21542.1| peroxisomal membrane anchor protein (Pex14), [Neosartorya NRRL
  misc_feature (3)..(348): NCBI GI: 259482159 Blast Desc: TPA: microbody (peroxisome) biogenesis protein peroxin 14 (Eurofung) [Aspergillus nidulans FGSC A4]
  misc_feature (1)..(331): NCBI GI: 171681980 Blast Desc: protein product [Podospora anserina] gi|170940949|emb|CAP66599.1| protein product [Podospora anserina]
  misc_feature (1)..(340): NCBI GI: 240281456 Blast Desc: peroxin 14 [Ajellomyces capsulatus H143]
  misc_feature (4)..(350): NCBI GI: 240108346 Blast Desc: Peroxisomal membrane anchor family protein [Coccidioides posadasii C735 delta SOWgp]
  misc_feature (3)..(350): NCBI GI: 189204608 Blast Desc: peroxisomal membrane anchor protein (Pex14) [Pyrenophora tritici-repentis Pt-1C-BFP] gi|187985738|gb|EDU51226.1| peroxisomal membrane anchor protein
  misc_feature (1)..(349): NCBI GI: 39973651 Blast Desc: MGG_01028 [Magnaporthe grisea 70-15] gi|145018016|gb|EDK02295.1| MGG_01028 [Magnaporthe grisea 70-15]
  misc_feature: Useful for introducing or modulating the production of volatile compounds
MAIREDIVSSAVNFLQDPNVASSPLENKLSFLRSKNLTQEEIDAAFARTGASPPPASASPSAGPVAQQQQYYPQYPQQPPYGWQSPPQAPPRRDWRDWFIMATAVGGVGYGLYFLTKRYIYPLVAPPTPEKLEQDKASVDDKFAQAFATIEQLAKDTEELKSSEQERVEKLDKIIDDMEKFVEDVKYSTRRQDEEMERMRDDIKGVKDLVPKSMANHKDFTESRLKEISNEVKSLKSLITQRMTAPAPAAASTPAPSQSHSTNNYLQTVNGSSAAASPAPATSPAPEASAPKENGTPAASKQDYISSLNGRASPFSSGMPAAKASIPAWQLAASKSADTAGSSSQAGSSS

SEQ ID NO: 25683 - DNA, 1739 bp, Muscodor strobelii
  misc_feature: SGI EST ID NO. CUFF.60584.1
  misc_feature: Variant of the nucleotide sequence at SEQ ID NO 25681
gacgtggttggactggggtgaaacacaaccgcgagcctcggtccaaaccggcgttctccatttcgactagggtcgtcatcaaatgccagcgctccagagcgccatctcatctgtttgcgcgtgcgccgaccaaatctcgtttcctcagcagacgaccgtcaagtcctccaccggcaacattccgcgatagacatgacatgagcgccacttaaacagagacgactttatctgcaaagatggcgatacgcgaggacattgtctcctctgcggttaacttcctgcaggatcccaacgttgcctcgtcccctctagagaacaagctctccttcttacggtccaagaacttgacccaagaagagatcgatgccgctttcgcccgcaccggcgcctctcctcctccggcctccgcatcgccatccgctggccctgttgctcagcagcagcagtactaccctcaatatccacagcagcctccctatggctggcaatcacctccacaggcgcctccgaggagggactggcgggattggttcatcatggccaccgccgtcggaggtgtagggtacggtctatacttcctcactaagcgatacatctatcccttggtagcgccaccgaccccggagaagctcgagcaggacaaagccagcgtcgacgacaagttcgcccaagcattcgcaaccatcgagcaactagccaaagacaccgaagagctgaaaagctccgagcaagaacgagttgagaagctcgacaagattatcgacgacatggagaaatttgtcgaggacgttaagtactccacgcgccgacaagacgaggagatggaacgtatgcgtgacgacatcaagggcgtcaaggaccttgttcccaagtccatggcgaaccacaaagacttcaccgaatctcggctgaaagagatcagcaacgaggtgaagagcctaaagtctctgattacacaacgcatgactgcgccagcccccgctgcagcctcgacacccgcacctagccaatctcactccacgaacaactaccttcagactgttaatggcagttcggcagccgcaagccccgccccggccacgagcccggctccagaggcatcggctcccaaggagaatggaacacccgcagccagcaagcaggactacatatcatcactcaacggccgagccagcccctttagcagcggcatgccggccgccaaggcatcgatcccggcgtggcagttggccgccagcaagagcgcggacacagccggcagcagttcccaggctggaagcagctcttagaaaggcggctcaacgggacaagcagcacgcaagacgagcaacagcccactgaccaatcgaaacagctcttagaaagaggacatgatgggactgggaagcagtcctatgagcattgggggcagctcctatcaccgaacatgcaaacataggaattcttgggatgggaagctcccggtacggacaggtgtgcgcaagtatcggtgatcagagcgctgtataaatatggatcatatatgactttagcatggtatgcatggtttggcacgcgaggacattaatggcgacgaggaaaggaaatgtcttctgtgtgaattataggactgttttaggaccaatattaatactttgaaacatgtgctgtctgtatcgagtttcgagacatgtggctgtttttttggtcacctggagcatcgccttaagatgcaaacgatatattcttaactgtatcac

SEQ ID NO: 25684 - DNA, 1113 bp, Muscodor strobelii
  misc_feature: SGI cDNA ID NO. 568768
  misc_feature: Reduced expression when VOC is produced
  misc_feature: Encodes the peptide sequence at SEQ ID NO 25685
atgacggtaccgtcgtcttccgaacaccgccagcctcccctgaagcaaaagatggctttgggcctcaagtcgcttcttggtggcgcgaagagactggcgaccggcgaggaaccctccacagcggctgatatctcgaaattgttcccgcctacggaccccaccatcgatggtgacgactgttcgcatgactgcgaaagctgtcatgtttcgtatccccggggtttcaagatcgacgagagcgacttgctctatggccatgtcaagggctggaagacacatgtcattgtagccacgggcaaggcagattgggtgcgggatgtcgaggatgagaagggcagtgtgatgcaggcttttggtcgcgccgaaaagccgaacaatggacgcctcatgctctctgcctccaacatacccacgccctcccactcttcagactactccgaaccgacgacaattatcctcctcccagccttcatagtcatcgagaacgtcacaccagcggctgtgccgtccttaatcacatcatacatcaatgtcgccccaacatctgccgatcctcttgggcccgttactctacctcgatcccttctacttcccaacctcccagatgctcaggaactccttgcacggccatctccccaccgtgcactcatactcctgtgttcgcaaaagacacgcgatgcgcgttgtggtcagagcgcgcctatactgcgcaaggagctagaacggcacttgagaccgctgggtctattccgcgacttagacgatgagcgaccgggtggcgtgggcatctacttcatttcccatgtgggtggacacaaatactcagcgaatgtcatggtgtaccggagaccagatgcattcggtgtcgatgccattgagagaggtaaattgccggctggagaagagttgaaaatccaacaagctccggtcgtagcaaacggcgaaggagaaagtctggatgtcggtgcagggcaatgcatctggcttgcgcgcgtcaagccggaagactgcgaaaatctggtcaagtacaccgtgctccagggcaaggtggtgaagccagacagtcagctgcgtggcgggtttgatcgtgggaaggggctgttcagttggtga

SEQ ID NO: 25685 - protein, 370 aa, Muscodor strobelii
  misc_feature: SGI Peptide ID NO. 568768
  misc_feature (82)..(361): Pfam Id: PF06999 Pfam Desc: Sucrase/ferredoxin-like
  misc_feature (14)..(370): NCBI GI: 156064941 Blast Desc: SS1G_00480 [Sclerotinia sclerotiorum 1980] gi|154691340|gb|EDN91078.1| SS1G_00480 [Sclerotinia sclerotiorum 1980]
  misc_feature (15)..(358): NCBI GI: 154322573 Blast Desc: BC1G_00629 [Botryotinia fuckeliana B05.10] gi|150847963|gb|EDN23156.1| BC1G_00629 [Botryotinia fuckeliana B05.10]
  misc_feature (18)..(370): NCBI GI: 171682142 Blast Desc: protein product [Podospora anserina] gi|170941030|emb|CAP66680.1| protein product [Podospora anserina]
  misc_feature (22)..(370): NCBI GI: 85090899 Blast Desc: NCU05986 [Neurospora crassa OR74A] gi|28920016|gb|EAA29403.1| conserved [Neurospora crassa OR74A]
  misc_feature (22)..(370): NCBI GI: 261359507 Blast Desc: actin patches distal protein [Verticillium albo-atrum VaMs.102]
  misc_feature (4)..(370): NCBI GI: 256733517 Blast Desc: [Nectria haematococca mpVI 77-13-4]
  misc_feature (11)..(370): NCBI GI: 46128777 Blast Desc: FG08766.1 [Gibberella zeae PH-1]
  misc_feature (9)..(369): NCBI GI: 189190830 Blast Desc: sucrase/ferredoxin domain containing protein [Pyrenophora tritici-repentis Pt-1C-BFP] gi|187973360|gb|EDU40859.1| sucrase/ferredoxin domain containing
  misc_feature (12)..(370): NCBI GI: 145613900 Blast Desc: MGG_01277 [Magnaporthe grisea 70-15] gi|145020911|gb|EDK05040.1| MGG_01277 [Magnaporthe grisea 70-15]
  misc_feature (41)..(370): NCBI GI: 169606934 Blast Desc: SNOG_06519 [Phaeosphaeria nodorum SN15] gi|160707115|gb|EAT86350.2| SNOG_06519 [Phaeosphaeria nodorum SN15]
  misc_feature: Useful for introducing or modulating the production of volatile compounds
MTVPSSSEHRQPPLKQKMALGLKSLLGGAKRLATGEEPSTAADISKLFPPTDPTIDGDDCSHDCESCHVSYPRGFKIDESDLLYGHVKGWKTHVIVATGKADWVRDVEDEKGSVMQAFGRAEKPNNGRLMLSASNIPTPSHSSDYSEPTTIILLPAFIVIENVTPAAVPSLITSYINVAPTSADPLGPVTLPRSLLLPNLPDAQELLARPSPHRALILLCSQKTRDARCGQSAPILRKELERHLRPLGLFRDLDDERPGGVGIYFISHVGGHKYSANVMVYRRPDAFGVDAIERGKLPAGEELKIQQAPVVANGEGESLDVGAGQCIWLARVKPEDCENLVKYTVLQGKVVKPDSQLRGGFDRGKGLFSW

SEQ ID NO: 25686 - DNA, 1558 bp, Muscodor strobelii
  misc_feature: SGI EST ID NO. CUFF.60547.1
  misc_feature: Variant of the nucleotide sequence at SEQ ID NO 25684
cagaaataaaacgggtgggattcccgttaaataccaaaatgacggtaccgtcgtcttccgaacaccgccagcctcccctgaagcaaaagatggctttgggcctcaagtcgcttcttggtggcgcgaagagactggcgaccggcgaggaaccctccacagcggctgatatctcgaaattgttcccgcctacggaccccaccatcgatggtgacgactgttcgcatgactgcgaaagctgtcatgtttcgtatccccggggtttcaagatcgacgagagcgacttgctctatggccatgtcaagggctggaagacacatgtcattgtagccacgggcaaggcagattgggtgcgggatgtcgaggatgagaagggcagtgtgatgcaggcttttggtcgcgccgaaaagccgaacaatggacgcctcatgctctctgcctccaacatacccacgccctcccactcttcagactactccgaaccgacgacaattatcctcctcccagccttcatagtcatcgagaacgtcacaccagcggctgtgccgtccttaatcacatcatacatcaatgtcgccccaacatctgccgatcctcttgggcccgttactctacctcgatcccttctacttcccaacctcccagatgctcaggaactccttgcacggccatctccccaccgtgcactcatactcctgtgttcgcaaaagacacgcgatgcgcgttgtggtcagagcgcgcctatactgcgcaaggagctagaacggcacttgagaccgctgggtctattccgcgacttagacgatgagcgaccgggtggcgtgggcatctacttcatttcccatgtgggtggacacaaatactcagcgaatgtcatggtgtaccggagaccagatgcattcggtgtcgatgccattgagagaggtaaattgccggctggagaagagttgaaaatccaacaagctccggtcgtagcaaacggcgaaggagaaagtctggatgtcggtgcagggcaatgcatctggcttgcgcgcgtcaagccggaagactgcgaaaatctggtcaagtacaccgtgctccagggcaaggtggtgaagccagacagtcagctgcgtggcgggtttgatcgtgggaaggggctgttcagttggtgagctgctgagctgtttagtgatgctagctagaatcactgttatcagcaagaacggagagtatatatcagatctcaattttggtgggaggcatggagtttctagaaatgcgcgcgggtaggaagacattgcgttccagccaagttagggtggtgtcggaaatacggaaactcatcggagcgcaaccagactgcgcaaataatgacctagattatgagtgcatatagtacatagagtttgcatgttagaaagactcggcgtttgatagaaaaaacgatcatcattcgctggtgccaacattcatatggattcaatctgtgaagtgaaaaacccgggcgaagcggagatgctgatttttgaaatactccgaacccgaggaataggaatagtaataccacactaaatctgag

SEQ ID NO: 25687 - DNA, 1851 bp, Muscodor strobelii
  misc_feature: SGI cDNA ID NO. 568769
  misc_feature: Encodes the peptide sequence at SEQ ID NO 25688
atgtggctcatcaacgttcaaactttcgaacttaaacagtttattagtagaaggacccgcccgccatatgcgatcctttcccatacttggggcgatgaagagctgacattcaaggagatgatcaaggggaggggtcaaaataaaaaggggtttcgcaaaattcaactggcttgcgagcaagctataaaggatggattgaaatgggcatgggtcgatacctgctgcatcgataaacgcagcagtacggagctatcagaagctataaactccatgttcaggtggtatgtagaagctgttgtctgttatgtatatcttgacgacgtctgccttgaagacatggggcgggttcaaaagtctaatacaacggccattttcgaaacctgtcgatggacacgcagaggttggacattgcaagagttgctggcgccatacgccgtgatcttcttcgatagccaatggacgcttataggaaataaagtagagctttcctctgcgctctcggcagctacgggaatcattcctgccttcattaaaacaactgctcctcttttcagggcaaacgttgccgagaaaatgagctgggcaggcaatcgaaagacaagccgagaagaggacatggcctactgtcttcttggtatcttcgatgtaaatatgccgttgctatatggggaagggggcgcggaggcattcaggcgactccaagagcagatagtgagaaagggagatgatgcgacagtgttcggttgtcggattgacaagaataccattaccgtactaccagcccagttaggcgacatacacgcactctcgagatctgattggaatcaagatgtcatggctaacagtcctcaagatttttgtaatggccaacagctagagctcaatcagcaatggcccccaactacgagagcgcctcctactctgcagaaagactcacttattatcagcgtgcccattatggaactggatatgtccgatatcattccaaaggaccgtggagtttcagaattggtagtcttagcactgttcggttttcgactcagaagctgggactgcgacacccttggcctaattttgtaccgctcacatagcaaacacgacctgtactcgatgaaaaatgagggccggtatcgttggatacgattacccgttccaaatgacgacttcttgataagtcgtatcaaaacagtcaagatcggaaggatcaagtcgggacggggcaatcaacatatgatgctagatggaatcctcctagacaagtttatcggattcaatcctggacttgagcttaattctttcatagcggttgcacctaccacgtatgacccggaaacgggatgggtgcgtgatctgagctaccgaacttgcataatgtttgttttgatctacaatgggctgaaagggggtcgcttcggtctcatattccgcagaacggaaggaagtttcgacatcatagttcgacctgcccaccatgatcaagacgaaagtctatccctagcacagactgccacctacaatgacgcttctcgaggtcccgaggtagtgcaagttcctgaatattcactgctcgattacttaaaggtatctcagaacttggtgcctggtacgcctcgtcaggagtgctatctgccgcataccttcaatcttatccagaagaggttgagtttgggacttgttttggaatcggacgaagtagaaacacctgaccactcgaacgtaacgtcaagatgctggcgcataatcatatccgaaaaggaaagcaatggctcgaagtttgtcttcgtgctgaagaatattgcagagaatctactattccacttccttggtggctcgacagcccttaattactga

SEQ ID NO: 25688 - protein, 616 aa, Muscodor strobelii
  misc_feature: SGI Peptide ID NO. 568769
  misc_feature (23)..(139): Pfam Id: PF06985 Pfam Desc: Heterokaryon incompatibility protein (HET)
  misc_feature (23)..(114): Pfam Id: PF06985 Pfam Desc: Heterokaryon incompatibility protein (HET)
  misc_feature (1)..(320): NCBI GI: 145608538 Blast Desc: MGG_06555 [Magnaporthe grisea 70-15] gi|145016004|gb|EDK00494.1| MGG_06555 [Magnaporthe grisea 70-15]
  misc_feature (1)..(322): NCBI GI: 238493477 Blast Desc: conserved [Aspergillus flavus NRRL3357] gi|220696469|gb|EED52811.1| conserved [Aspergillus flavus NRRL3357]
  misc_feature (1)..(320): NCBI GI: 145244357 Blast Desc: An11g06570 [Aspergillus niger] gi|134079325|emb|CAK96954.1| protein product [Aspergillus niger]
  misc_feature (1)..(286): NCBI GI: 261358772 Blast Desc: HET domain-containing protein [Verticillium albo-atrum VaMs.102]
  misc_feature (1)..(320): NCBI GI: 169595686 Blast Desc: SNOG_00587 [Phaeosphaeria nodorum SN15] gi|111070962|gb|EAT92082.1| SNOG_00587 [Phaeosphaeria nodorum SN15]
  misc_feature (7)..(341): NCBI GI: 171677823 Blast Desc: protein product [Podospora anserina] gi|170936980|emb|CAP61638.1| protein product [Podospora anserina]
  misc_feature (1)..(322): NCBI GI: 261354085 Blast Desc: HET domain-containing protein [Verticillium albo-atrum VaMs.102]
  misc_feature (1)..(248): NCBI GI: 256722255 Blast Desc: NECHADRAFT_52327 [Nectria haematococca mpVI 77-13-4]
  misc_feature (1)..(248): NCBI GI: 238507085 Blast Desc: conserved [Aspergillus flavus NRRL3357] gi|220689457|gb|EED45808.1| conserved [Aspergillus flavus NRRL3357]
  misc_feature (1)..(248): NCBI GI: 169776259 Blast Desc: [Aspergillus oryzae RIB40] gi|83771331|dbj|BAE61463.1| protein product [Aspergillus oryzae]
MWLINVQTFELKQFISRRTRPPYAILSHTWGDEELTFKEMIKGRGQNKKGFRKIQLACEQAIKDGLKWAWVDTCCIDKRSSTELSEAINSMFRWYVEAVVCYVYLDDVCLEDMGRVQKSNTTAIFETCRWTRRGWTLQELLAPYAVIFFDSQWTLIGNKVELSSALSAATGIIPAFIKTTAPLFRANVAEKMSWAGNRKTSREEDMAYCLLGIFDVNMPLLYGEGGAEAFRRLQEQIVRKGDDATVFGCRIDKNTITVLPAQLGDIHALSRSDWNQDVMANSPQDFCNGQQLELNQQWPPTTRAPPTLQKDSLIISVPIMELDMSDIIPKDRGVSELVVLALFGFRLRSWDCDTLGLILYRSHSKHDLYSMKNEGRYRWIRLPVPNDDFLISRIKTVKIGRIKSGRGNQHMMLDGILLDKFIGFNPGLELNSFIAVAPTTYDPETGWVRDLSYRTCIMFVLIYNGLKGGRFGLIFRRTEGSFDIIVRPAHHDQDESLSLAQTATYNDASRGPEVVQVPEYSLLDYLKVSQNLVPGTPRQECYLPHTFNLIQKRLSLGLVLESDEVETPDHSNVTSRCWRIIISEKESNGSKFVFVLKNIAENLLFHFLGGSTALNY

SEQ ID NO: 25689 - DNA, 1141 bp, Muscodor strobelii
  misc_feature: SGI EST ID NO. CUFF.60535.0
  misc_feature: Variant of the nucleotide sequence at SEQ ID NO 25687
cagcctcatgctttgtgaacgtgttcaccacaaaacaccattttagtgtatctacgtggctcgaaaacgtagttcagaatgtggctcatcaacgttcaaactttcgaacttaaacagtttattagtagaaggacccgcccgccatatgcgatcctttcccatacttggggcgatgaagagctgacattcaaggagatgatcaaggggaggggtcaaaataaaaaggggtttcgcaaaattcaactggcttgcgagcaagctataaaggatggattgaaatgggcatgggtcgatacctgctgcatcgataaacgcagcagtacggagctatcagaagctataaactccatgttcaggtggtatgtagaagctgttgtctgttatgtatatcttgacgacgtctgccttgaagacatggggcgggttcaaaagtctaatacaacggccattttcgaaacctgtcgatggacacgcagaggttggacattgcaagagttgctggcgccatacgccgtgatcttcttcgatagccaatggacgcttataggaaataaagtagagctttcctctgcgctctcggcagctacgggaatcattcctgccttcattaaaacaactgctcctcttttcagggcaaacgttgccgagaaaatgagctgggcaggcaatcgaaagacaagccgagaagaggacatggcctactgtcttcttggtatcttcgatgtaaatatgccgttgctatatggggaagggggcgcggaggcattcaggcgactccaagagcagatagtgagaaagggagatgatgcgacagtgttcggttgtcggattgacaagaataccattaccgtactaccagcccagttaggcgacatacacgcactctcgagatctgattggaatcaagatgtcatggctaacagtcctcaagatttttgtaatggccaacagctagagctcaatcagcaatggcccccaactacgagagcgcctcctactctgcagaaagactcacttattatcagcgtgcccattatggaactggatatgtccgatatcattccaaaggaccgtggagtttcagaattggtagtcttagcactgttcggttttcgactcagaagctgggactgcgacaccc

SEQ ID NO: 25690 - DNA, 1686 bp, Muscodor strobelii
  misc_feature: SGI cDNA ID NO. 568770
  misc_feature: Reduced expression when VOC is produced
  misc_feature: Encodes the peptide sequence at SEQ ID NO 25691
atgttcggcggaaacaccgtacgttttgacgatgcgcagcgcaacgcaaagggcaaagaggcgagtctcgattactcgcctctgaagcgcataacaggccggtccttcgtaatgggtcttcttgtgtctatgggaggtctgatcttcggctacgacacaggccaaatctcgggtttccttgagatgcccgatttcctgcaccgtttcgcagaacagggcgaggatggatcatacaaattctccaccgtacgaagcggtctggtcgtcgctctcttgtctatcggatgtctagtcggtgctcttgtcgccgcctcaatcgcggataagatcggtcgcaggctctccatcacgttctggtgcggtgtcacttccattgccttcctgatccaaatcgccgccaacacctcctgggtccaactcaccatcggacgtctaatcgcaggatttggtgtcggcgccctctctcttttagtcccaatgtaccaagcagaaaccgcaccaccatggattcgcggagctctcgtctgtacctatcaactcttcatcaccctcggtatcttcctcgccgcagccttcaacctaggaacctaccagcacctcgccaactcctcagcatcttggcgcatcgtgctcggtctcggttggatcttcaccctgggtcttggtttcggcatgctagtcttcaacgaaaccccacgtttcgacttccgccgcggccgcgtcgaagaagcccgaaagacactcatgcgcgtctacggcgcaccagcgaaccattacgcgatctacacacaaatgcgtgagatcgaagaaaaacttaaggccgaatccacggtaaagagtggtttcgtcgccggctacgtcgaagcattcaaagcccctcgcatggcttaccgcatcttattgggcatcgccctgcagatgttccagcagctcacgggcgcaaactacttcttctactacggcacgacaatcttccaatccgtgcaaatctcctccttcatcacgcaggtcatcctcaacgtcatcaacttctctgtgacgttcatcggtctctacctcgtcgagcactacggccgtcgcgtgtcgctgatcgccggctcgatttggatgtccatctgcttcctcatcttcgcctcagtgggccatttcctcctggatatcgataacccagcgaacacacccaccgcgggcatcgtcctcatcgtcttcgcggctgtcttcatccttgggtttgcgactacctggggccccatggtctggacgctcatcgccgagatctaccccacgaagtaccgtgctcgcgccatgtcgctcgccacggccagcaactgggtctggaacttcctcctcgctttctttacacccttcatcacgaaggacatcgacttccgatacggatacgtcttcgccgcgtcgaatgtcgttggtggtctcatcgtgtacttcttcgtcatcgagggacaaggtcgtaccctcgaggagatcgacaccatgtacgttgagcatgtcccgccgcgccagtccgcgaaatgggttgcgccgcctccggaacaactcgctgagattcgtcgcgcggctggtaccgccgacgatgctggattaccgtcgggctcggagtctgaagctgagaagggaactggagctggcgtgaccaagcatgagggtgaccataatgagagagtgtaa

SEQ ID NO: 25691 - protein, 561 aa, Muscodor strobelii
  misc_feature: SGI Peptide ID NO. 568770
  misc_feature (35)..(451): Pfam Id: PF07690 Pfam Desc: Major Facilitator Superfamily
  misc_feature (38)..(499): Pfam Id: PF00083 Pfam Desc: Sugar (and other) transporter
  misc_feature (6)..(560): NCBI GI: 46126409 Blast Desc: FG07582.1 [Gibberella zeae PH-1]
  misc_feature (3)..(560): NCBI GI: 256724745 Blast Desc: [Nectria haematococca mpVI 77-13-4]
  misc_feature (6)..(561): NCBI GI: 261354606 Blast Desc: low-affinity glucose transporter [Verticillium albo-atrum VaMs.102]
  misc_feature (6)..(555): NCBI GI: 186910052 Blast Desc: hexose transporter [Sporothrix schenckii]
  misc_feature (18)..(560): NCBI GI: 189207941 Blast Desc: siderophore iron transporter mirC [Pyrenophora tritici-repentis Pt-1C-BFP] gi|187976397|gb|EDU43023.1| siderophore iron transporter mirC [Pyrenophora tritici-repentis
  misc_feature (15)..(547): NCBI GI: 115389086 Blast Desc: ATEG_02870 [Aspergillus terreus NIH2624] gi|114194444|gb|EAU36144.1| ATEG_02870 [Aspergillus terreus NIH2624]
  misc_feature (8)..(543): NCBI GI: 169780286 Blast Desc: [Aspergillus oryzae RIB40] gi|83773347|dbj|BAE63474.1| protein product [Aspergillus oryzae]
  misc_feature (8)..(543): NCBI GI: 238505618 Blast Desc: MFS monosaccharide transporter, [Aspergillus flavus NRRL3357] gi|220690139|gb|EED46489.1| MFS monosaccharide transporter, [Aspergillus flavus NRRL3357]
  misc_feature (17)..(559): NCBI GI: 67528142 Blast Desc: AN4277.2 [Aspergillus nidulans FGSC A4] gi|40739625|gb|EAA58815.1| AN4277.2 [Aspergillus nidulans FGSC A4] gi|259481108|tpe|CBF74338.1| TPA: conserved - sugar nidulans
  misc_feature (12)..(544): NCBI GI: 119499325 Blast Desc: MFS monosaccharide transporter, [Neosartorya fischeri NRRL 181] gi|119414584|gb|EAW24523.1| MFS monosaccharide transporter, [Neosartorya fischeri NRRL 181]
  misc_feature: Useful for introducing or modulating the production of volatile compounds
MFGGNTVRFDDAQRNAKGKEASLDYSPLKRITGRSFVMGLLVSMGGLIFGYDTGQISGFLEMPDFLHRFAEQGEDGSYKFSTVRSGLVVALLSIGCLVGALVAASIADKIGRRLSITFWCGVTSIAFLIQIAANTSWVQLTIGRLIAGFGVGALSLLVPMYQAETAPPWIRGALVCTYQLFITLGIFLAAAFNLGTYQHLANSSASWRIVLGLGWIFTLGLGFGMLVFNETPRFDFRRGRVEEARKTLMRVYGAPANHYAIYTQMREIEEKLKAESTVKSGFVAGYVEAFKAPRMAYRILLGIALQMFQQLTGANYFFYYGTTIFQSVQISSFITQVILNVINFSVTFIGLYLVEHYGRRVSLIAGSIWMSICFLIFASVGHFLLDIDNPANTPTAGIVLIVFAAVFILGFATTWGPMVWTLIAEIYPTKYRARAMSLATASNWVWNFLLAFFTPFITKDIDFRYGYVFAASNVVGGLIVYFFVIEGQGRTLEEIDTMYVEHVPPRQSAKWVAPPPEQLAEIRRAAGTADDAGLPSGSESEAEKGTGAGVTKHEGDHNERV

SEQ ID NO: 25692 - DNA, 2072 bp, Muscodor strobelii
  misc_feature: SGI EST ID NO. CUFF.60543.0
  misc_feature: Variant of the nucleotide sequence at SEQ ID NO 25690
gaaatatgtcagctttcgctctcacctcgctgactagcgagactagcttgtacatacataaatccttccccgtcctcagcgcattcccacgtggatgctttgttctactgctcaaggtgtcttacaccagacctacctcttccctcacctaccaccggtctcttcatttccggatctcgaataaggaagtcaatagataccacatctagagagcataaacacaaataagtcaaaatgttcggcggaaacaccgtacgttttgacgatgcgcagcgcaacgcaaagggcaaagaggcgagtctcgattactcgcctctgaagcgcataacaggccggtccttcgtaatgggtcttcttgtgtctatgggaggtctgatcttcggctacgacacaggccaaatctcgggtttccttgagatgcccgatttcctgcaccgtttcgcagaacagggcgaggatggatcatacaaattctccaccgtacgaagcggtctggtcgtcgctctcttgtctatcggatgtctagtcggtgctcttgtcgccgcctcaatcgcggataagatcggtcgcaggctctccatcacgttctggtgcggtgtcacttccattgccttcctgatccaaatcgccgccaacacctcctgggtccaactcaccatcggacgtctaatcgcaggatttggtgtcggcgccctctctcttttagtcccaatgtaccaagcagaaaccgcaccaccatggattcgcggagctctcgtctgtacctatcaactcttcatcaccctcggtatcttcctcgccgcagccttcaacctaggaacctaccagcacctcgccaactcctcagcatcttggcgcatcgtgctcggtctcggttggatcttcaccctgggtcttggtttcggcatgctagtcttcaacgaaaccccacgtttcgacttccgccgcggccgcgtcgaagaagcccgaaagacactcatgcgcgtctacggcgcaccagcgaaccattacgcgatctacacacaaatgcgtgagatcgaagaaaaacttaaggccgaatccacggtaaagagtggtttcgtcgccggctacgtcgaagcattcaaagcccctcgcatggcttaccgcatcttattgggcatcgccctgcagatgttccagcagctcacgggcgcaaactacttcttctactacggcacgacaatcttccaatccgtgcaaatctcctccttcatcacgcaggtcatcctcaacgtcatcaacttctctgtgacgttcatcggtctctacctcgtcgagcactacggccgtcgcgtgtcgctgatcgccggctcgatttggatgtccatctgcttcctcatcttcgcctcagtgggccatttcctcctggatatcgataacccagcgaacacacccaccgcgggcatcgtcctcatcgtcttcgcggctgtcttcatccttgggtttgcgactacctggggccccatggtctggacgctcatcgccgagatctaccccacgaagtaccgtgctcgcgccatgtcgctcgccacggccagcaactgggtctggaacttcctcctcgctttctttacacccttcatcacgaaggacatcgacttccgatacggatacgtcttcgccgcgtcgaatgtcgttggtggtctcatcgtgtacttcttcgtcatcgagggacaaggtcgtaccctcgaggagatcgacaccatgtacgttgagcatgtcccgccgcgccagtccgcgaaatgggttgcgccgcctccggaacaactcgctgagattcgtcgcgcggctggtaccgccgacgatgctggattaccgtcgggctcggagtctgaagctgagaagggaactggagctggcgtgaccaagcatgagggtgaccataatgagagagtgtaatgtgttatgagatgtagcatgggagtttgttgctttaaggaggtgtataagcagaatcagcattgtagttgtaggtatcacgatatatacccattccttcgactcaaatatttcataaaaaaattcgaaccaaataacttaattagctacaa

SEQ ID NO: 25693 - DNA, 1098 bp, Muscodor strobelii
  misc_feature: SGI cDNA ID NO. 568771
  misc_feature: Reduced expression when VOC is produced
  misc_feature: Encodes the peptide sequence at SEQ ID NO 25694
atgaaggccctcattctcgttggtggcttcggcacccgtctgcgtcctctgacgctcaccatgcccaagccgctggtcgagtttgccaacaagcccatgatcctgcaccagatcgaggcattggctgccgtcggtgtcactgacgttgtcctggccgtcaactaccgccccgagatcatggaacgtgtcttgaaagagtacgaggacactctgggcgtcaagatccatttctccctcgagagcgagcccctcggcaccgctggccccctcaagttggccgaagagatcctcgctaagaacgacgagcccttctttgtcctcaactccgatgtcacctgcgagttccccttcaagcagctggccgagttccacaaggcccacggcgacgagggcaccattgtcgtcaccaaggtcgaggagccctccaagtacggcgtcatcgtccacaagcccaaccacccctcccgcatcgaccgctttgtcgagaagcccgtcgagttcgtcggcaaccgcatcaacgccggcctctacatcctcaacacctccgtcctcagccgcatcgagaagaaccgccccacctccatcgagcaggagaccttccccgccgttgtccgcgatggccagctgcactcgttcgatctcgagggcttctggatggacgtcggccagcccaaggatttcctgactggcatgtgcctctacctctcctccctcgccaagaaggaccccaaggctctggtctcccccagcgagagctacgtcaacggcggcaacgtcatggtcgacgagtccgccaagatcggcaagaactgccgcatcggacccaacgtagtcatcggcaagggctgcgtcattggcgacggtgtccgtctcacgcggtgcacactcctccccggctccaaggtcaaggaccacgctttcgtcaagagcaccatcgtcggctggaacagcaccgtcggcaagtgggctcgtcttgagaacgtcactgtccttggcgacgacgtcaccattggcgacgagatcttcgtcaacggcggcagtgtccttccccacaagagcatcaaggccaacgttgatgttcccgctatcatcatgtaa

SEQ ID NO: 25694 - protein, 365 aa, Muscodor strobelii
  misc_feature: SGI Peptide ID NO. 568771
  misc_feature (2)..(237): Pfam Id: PF00483 Pfam Desc: Nucleotidyl transferase
  misc_feature (276)..(293): Pfam Id: PF00132 Pfam Desc: Bacterial transferase hexapeptide (three repeats)
  misc_feature (1)..(365): NCBI GI: 116202459 Blast Desc: CHGG_09114 [Chaetomium globosum CBS 148.51] gi|88177632|gb|EAQ85100.1| CHGG_09114 [Chaetomium globosum CBS 148.51]
  misc_feature (1)..(365): NCBI GI: 85091252 Blast Desc: mannose-1-phosphate guanyltransferase [Neurospora crassa OR74A] gi|74613414|sp|Q7RVR8.1|MPG1_NEUCR RecName: Full=Mannose-1-phosphate guanyltransferase; AltName: AltName:
  misc_feature (1)..(365): NCBI GI: 242769220 Blast Desc: mannose-1-phosphate guanylyltransferase [Talaromyces stipitatus ATCC 10500] gi|218724922|gb|EED24339.1| mannose-1-phosphate guanylyltransferase [Talaromyces stipitatus
  misc_feature (1)..(365): NCBI GI: 119194403 Blast Desc: CIMG_01576 [Coccidioides immitis RS]
  misc_feature (1)..(365): NCBI GI: 259484952 Blast Desc: TPA: Mannose-1-phosphate guanyltransferase (EC 2.7.7.13)(GTP-mannose-1-phosphate guanylyltransferase)(GDP-mannose pyrophosphorylase) [Aspergillus
  misc_feature (1)..(365): NCBI GI: 240105327 Blast Desc: mannose-1-phosphate guanyltransferase, [Coccidioides posadasii C735 delta SOWgp]
  misc_feature (1)..(365): NCBI GI: 171682234 Blast Desc: protein product [Podospora anserina] gi|170941076|emb|CAP66726.1| protein product [Podospora anserina]
  misc_feature (1)..(365): NCBI GI: 261191729 Blast Desc: mannose-1-phosphate guanylyltransferase [Ajellomyces dermatitidis SLH14081] gi|239589588|gb|EEQ72231.1| mannose-1-phosphate guanylyltransferase [Ajellomyces dermatitidis
  misc_feature (1)..(365): NCBI GI: 74665871 Blast Desc: MPG1_ASPFU RecName: Full=Mannose-1-phosphate guanyltransferase; AltName: Full=GTP-mannose-1-phosphate guanylyltransferase; AltName: Full=GDP-mannose pyrophosphorylase
  misc_feature (1)..(365): NCBI GI: 239608669 Blast Desc: mannose-1-phosphate guanylyltransferase [Ajellomyces dermatitidis ER-3]
  misc_feature (1)..(365): SWISSPROT Homolog: EC 2.7.7.13 Mannose-1-phosphate guanylyltransferase
  misc_feature: Useful for introducing or modulating the production of volatile compounds
MKALILVGGFGTRLRPLTLTMPKPLVEFANKPMILHQIEALAAVGVTDVVLAVNYRPEIMERVLKEYEDTLGVKIHFSLESEPLGTAGPLKLAEEILAKNDEPFFVLNSDVTCEFPFKQLAEFHKAHGDEGTIVVTKVEEPSKYGVIVHKPNHPSRIDRFVEKPVEFVGNRINAGLYILNTSVLSRIEKNRPTSIEQETFPAVVRDGQLHSFDLEGFWMDVGQPKDFLTGMCLYLSSLAKKDPKALVSPSESYVNGGNVMVDESAKIGKNCRIGPNVVIGKGCVIGDGVRLTRCTLLPGSKVKDHAFVKSTIVGWNSTVGKWARLENVTVLGDDVTIGDEIFVNGGSVLPHKSIKANVDVPAIIM

SEQ ID NO: 25695 - DNA, 2190 bp, Muscodor strobelii
  misc_feature: SGI EST ID NO. CUFF.60757.0
  misc_feature: Variant of the nucleotide sequence at SEQ ID NO 25693
gctaccccgaatctcagcagcgcaactctgtccccttttgacaggccatgcggtgaactcaaaatttccaattgccatcttctctataacaacgcccgacgcccacccgcagcacacttgtatttgttctgctctttgacttctttttgccctccgcaccgcgccttcaatcacgtgtaccttttaaatattctactgccctttccgagtacagttgctgtgctcgcctgcaaagtcactcgttcaggacaggtacctccaaaaacatcaccatgaaggccctcattctcgttggtggcttcggcacccgtctgcgtcctctgacgctcaccatgcccaagccgctggtcgagtttgccaacaagcccatgatcctgcaccagatcgaggcattggctgccgtcggtgtcactgacgttgtcctggccgtcaactaccgccccgagatcatggaacgtgtcttgaaagaggttggtgcccgatatcccctatccccttgcacccctctcctcgctctaagacatacatacatcgaaacataaatagctatatctatccatgcatacatatgcaactggcctctgtatttggtgtcggatggtggactgattttagcaatcgaagactgactaaatattgaatgacagtacgaggacactctgggcgtcaagatccatttctccctcgagagcgagcccctcggcaccgctggccccctcaagttggccgaagagatcctcgctaagaacgacgagcccttctttgtcctcaactccgatgtcacctgcgagttccccttcaagcagctggccgagttccacaaggcccacggcgacgagggcaccattgtcgtcaccaaggtcgaggagccctccaagtacggcgtcatcgtccacaagcccaaccacccctcccgcatcgaccgctttgtcgagaagcccgtcgagttcgtcggcaaccgcatcaacgccggcctctacatcctcaacacctccgtcctcagccgcatcgagaagaaccgccccacctccatcgagcaggagaccttccccgccgttgtccgcgatggccagctgcactcgttcgatctcgagggcttctggatggacgtcggccagcccaaggatttcctgactggcatgtgcctctacctctcctccctcgccaagaaggaccccaaggctctggtctcccccagcgagagctacgtcaacggcggcaacgtcatggtcgacgagtccgccaagatcggcaagaactgccgcatcggacccaacgtagtcatcggcaagggctgcgtcattggcgacggtgtccgtctcacgcggtgcacactcctccccggctccaaggtcaaggaccacgctttcgtcaagagcaccatcgtcggctggaacagcaccgtcggcaagtgggctcgtcttgagaacgtcactgtccttggcgacgacgtcaccattggcgacgagatcttcgtcaacggcggcagtgtccttccccacaagagcatcaaggccaacgttgatgttcccgctatcatcatgtaagatggctatagcgacagatacccctatgtcttctcgattttgcgttacccttatatccaactttcgagtgtatatctccggccacttgcgattctttctctacaacttgataatactccaaatttcgacttcggcctggcagaaatcgcttctcgctttatttgcatgcatgtttctgagaggggtggcgttcacatggactcaaaatacggggcaggctggccgcaacgacgcacggtgcatggcatgggtcatggttacaatgtgtgttggtttgtcacaggctcgcagaagaagcccatgaaactctagatgtcttttgtcatgaaagggtagacaaatggtactagatggcagcgatagactcacctcctaaaaggtctgcgatgggacacgaatagcatttggtacttgtgctctcctgtggataggagtgtggctcattgagacctaatgtaatgatgtcgccttcaaaaggctaataaacgaaattatgactgaaataaccatactcacttgagcaattcttatcatccttcgtgcgtacacgtcgactccagactgctctcatcctcacttgttgagtatccaagccattaaaggacaatgaggtcgatgccacatgcaaaataaacgagacgct

SEQ ID NO: 25696 - DNA, 1392 bp, Muscodor strobelii
  misc_feature: SGI cDNA ID NO. 568772
  misc_feature: Encodes the peptide sequence at SEQ ID NO 25697
atgtcgagaccacgaaggagcagtagcatcactcgagaattatcccgcgatgaggtcacggagccggaccagcctcaacatccagtgccgagtcttttcactcaagatcccccaataaaagatgatctagtcacagatacatcaaaacagcaagacctcgtcatcgacgactgtgtaccgcttttgtcaggtttctacgacgacataaagctcaacaaatttggggtatcatctctcaggcaccaccagaatcgccatatcaaatatttgaggggagggctaggtccattgccttctgggttcaaagctgcagacgctagtaggccatggtttttctattggtgtttgaatgggttggcgctcctgggagctgatgtggcagaataccgcgctggcctcgtggagactgcccgctctatacagaacgagagcggtggttttggcggaggcttcggccaaaaatctcatcttgcaactacttatgccttggtgttggctctagcaattgtaggaggtgaaagcgcatacgaagtcattgaccgacgagccatgtggaaatggcttggttcgctcaaacaagcggacggaggattccagttgaccgtaggtggcgaggttgatgttagaggagcgtattgtgccgctgttctgatcaaattactcaacctaccccttgatctaccacctgactctcctttgtcggcatctaaaggggcaaatctgttcacgggcctagagggatatgtacgccgatgccaaacttttgaaggcggaatctcggcacgaccaggtgcagaagcccacggtgcatatgcattttgcgctctgggatgccttgctattctcgacgctccgaatcgcattttcccaaagtccctcgatatgccacgcttcatatcttggctatcatcgcgtcaatatgctcctgaaggtggattttgcgggcgaactaacaaactggtcgatggttgttacagtcactgggttggtggatgttggcccctaattgcaacagcccttcaaaagtccactactactaacattgataccaacaacatgtactcacgcgagggacttatcaggtacatactatgctgctgtcaggacttctcctccaggggtggtctgagagataagccgaccaagagctccgacgcttatcatacctgctacgttctaagtggtctctctgcggctcaacgcacccaccgtttagtcttcccagagggcgacggagagggcatgccttgggactacgagatgactcaagatacagaaacacatgtttatgacgcaaaggaccttgtttcaacccttgacccagtctatgttattcctccgaaagcaaaggaggacatcatgtcatacttctcctcaaagacaggattctga

SEQ ID NO: 25697 - protein, 463 aa, Muscodor strobelii
  misc_feature: SGI Peptide ID NO. 568772
  misc_feature (240)..(283): Pfam Id: PF00432 Pfam Desc: Prenyltransferase and squalene oxidase repeat
  misc_feature (293)..(337): Pfam Id: PF00432 Pfam Desc: Prenyltransferase and squalene oxidase repeat
  misc_feature (128)..(171): Pfam Id: PF00432 Pfam Desc: Prenyltransferase and squalene oxidase repeat
  misc_feature (179)..(222): Pfam Id: PF00432 Pfam Desc: Prenyltransferase and squalene oxidase repeat
  misc_feature (354)..(400): Pfam Id: PF00432 Pfam Desc: Prenyltransferase and squalene oxidase repeat
  misc_feature (26)..(463): NCBI GI: 46128787 Blast Desc: FG08771.1 [Gibberella zeae PH-1]
  misc_feature (29)..(463): NCBI GI: 145613884 Blast Desc: MGG_01287 [Magnaporthe grisea 70-15] gi|145020901|gb|EDK05030.1| MGG_01287 [Magnaporthe grisea 70-15]
  misc_feature (10)..(463): NCBI GI: 116202453 Blast Desc: CHGG_09111 [Chaetomium globosum CBS 148.51] gi|88177629|gb|EAQ85097.1| CHGG_09111 [Chaetomium globosum CBS 148.51]
  misc_feature (29)..(463): NCBI GI: 156064323 Blast Desc: SS1G_00169 [Sclerotinia sclerotiorum 1980] gi|154691031|gb|EDN90769.1| SS1G_00169 [Sclerotinia sclerotiorum 1980]
  misc_feature (29)..(463): NCBI GI: 154312170 Blast Desc: BC1G_06118 [Botryotinia fuckeliana B05.10] gi|150850081|gb|EDN25274.1| BC1G_06118 [Botryotinia fuckeliana B05.10]
  misc_feature (25)..(460): NCBI GI: 240106113 Blast Desc: protein farnesyltransferase beta subunit, [Coccidioides posadasii C735 delta SOWgp]
  misc_feature (29)..(463): NCBI GI: 255948836 Blast Desc: Pc22g12410 [Penicillium chrysogenum Wisconsin 54-1255] gi|211592202|emb|CAP98529.1| Pc22g12410 [Penicillium chrysogenum Wisconsin 54-1255]
  misc_feature (32)..(456): NCBI GI: 238843985 Blast Desc: CaaX farnesyltransferase beta subunit Ram1 [Microsporum canis CBS 113480]
  misc_feature (26)..(456): NCBI GI: 226281102 Blast Desc: CaaX farnesyltransferase beta subunit [Paracoccidioides brasiliensis Pb01]
  misc_feature (4)..(453): NCBI GI: 145258389 Blast Desc: An04g06620 [Aspergillus niger] gi|134074632|emb|CAK44665.1| protein product [Aspergillus niger]
  misc_feature (39)..(460): SWISSPROT Homolog: EC 2.5.1.58 Protein farnesyltransferase
MSRPRRSSSITRELSRDEVTEPDQPQHPVPSLFTQDPPIKDDLVTDTSKQQDLVIDDCVPLLSGFYDDIKLNKFGVSSLRHHQNRHIKYLRGGLGPLPSGFKAADASRPWFFYWCLNGLALLGADVAEYRAGLVETARSIQNESGGFGGGFGQKSHLATTYALVLALAIVGGESAYEVIDRRAMWKWLGSLKQADGGFQLTVGGEVDVRGAYCAAVLIKLLNLPLDLPPDSPLSASKGANLFTGLEGYVRRCQTFEGGISARPGAEAHGAYAFCALGCLAILDAPNRIFPKSLDMPRFISWLSSRQYAPEGGFCGRTNKLVDGCYSHWVGGCWPLIATALQKSTTTNIDTNNMYSREGLIRYILCCCQDFSSRGGLRDKPTKSSDAYHTCYVLSGLSAAQRTHRLVFPEGDGEGMPWDYEMTQDTETHVYDAKDLVSTLDPVYVIPPKAKEDIMSYFSSKTGF

SEQ ID NO: 25698 - DNA, 3575 bp, Muscodor strobelii
  misc_feature: SGI EST ID NO. CUFF.60581.0
  misc_feature: Variant of the nucleotide sequence at SEQ ID NO 25696
gcttagattacccatcaaataatccagtcattcacaacacacaaaacagtgaactcaaggtcaaagagcagagtgaaataatagcgagactctgcgaagctacctgggcaaggacatgcagtctgtcgaatcggcactgacagacactaattgaatatttctagtgcttcataagtgattccatgatgtcatccgtactatttgacgcattgagaagcccgacaagaaggaatacctgccacaatatgtcacttcggatcagaacgttgtgatgaaagcagtcgcggtggtgcaaatgtggaagttttaccgggcctttgccggacgggcagcacagtgggcgttcaacgcgccggtacgtacctcctaaaactactgcgaccatccaccacgacttccggctccgccatcaacaccggggatttcgagtccatcgaacaatggaccactgaatgctcatctcatcaagaaattggccttattccattgtttcgcaacatcaactctacaagcgcctcctgagtgtcgaatttttagcaattttgcgcagaatttcaacctcgcagggagaaaccccaccctgccttgctagtaccagcgcctccctaacattgcagccgcgtacgttgcgtctggactatatccccaaccaagacagagtgcttgggttcaatactttataagttgatgccagttaagacgagtctcgctcgagcacgcttgagctccaggcttccaaataagaagaccatgtcgagaccacgaaggagcagtagcatcactcgagaattatcccgcgatgaggtcacggagccggaccagcctcaacatccagtgccgagtcttttcactcaagatcccccaataaaagatgatctagtcacagatacatcaaaacagcaagacctcgtcatcgacgactgtgtaccgcttttgtcaggtttctacgacgacataaagctcaacaaatttggggtatcatctctcaggcaccaccagaatcgccatatcaaatatttgaggggagggctaggtccattgccttctgggttcaaagctgcagacgctagtaggccatggtttttctattggtgtttgaatgggttggcgctcctgggagctgatgtggcagaataccgcgctggcctcgtggagactgcccgctctatacagaacgagagcggtggttttggcggaggcttcggccaaaaatctcatcttgcaactacttatgccttggtgttggctctagcaattgtaggaggtgaaagcgcatacgaagtcattgaccgacgagccatgtggaaatggcttggttcgctcaaacaagcggacggaggattccagttgaccgtaggtggcgaggttgatgttagaggagcgtattgtgccgctgttctgatcaaattactcaacctaccccttgatctaccacctgactctcctttgtcggcatctaaaggggcaaatctgttcacgggcctagagggatatgtacgccgatgccaaacttttgaaggcggaatctcggcacgaccaggtgcagaagcccacggtgcatatgcattttgcgctctgggatgccttgctattctcgacgctccgaatcgcattttcccaaagtccctcgatatgccacgcttcatatcttggctatcatcgcgtcaatatgctcctgaaggtggattttgcgggcgaactaacaaactggtcgatggttgttacagtcactgggttggtggatgttggcccctaattgcaacagcccttcaaaagtccactactactaacattgataccaacaacatgtactcacgcgagggacttatcaggtacatactatgctgctgtcaggacttctcctccaggggtggtctgagagataagccgaccaagagctccgacgcttatcatacctgctacgttctaagtggtctctctgcggctcaacgcacccaccgtttagtcttcccagagggcgacggagagggcatgccttgggactacgagatgactcaagatacagaaacacatgtttatgacgcaaaggaccttgtttcaacccttgacccagtctatgttattcctccgaaagcaaaggaggacatcatgtcatacttctcctcaaagacaggattctgaagtgtaattgacccgtccgtggccgcatattgggcctcatccgacagcctgccaagcctggaatctaaggggcgggccgtgcaggtcttcgttcgtggccgagcaaagtatcgaaagcgtcccgcttcctaagagtcttctatctagtttgctccagtataaattaggattaccgctattgccgtccaacagacgtcgttcttcgcgacaggtcggcttatggtccttgtgtcaggagatcatgtcggatgtaatcactaagaatgaccacggcatctgtctcgtcgctacatgatatgaattatgcggctatacttgatgaagggaaagaggattggtcgactcgtcccaacgacagtcgtcatatccctttaccagcccatttccacgaatgcgtacagatatcagcatgcaaccttaggccagcatgctggctgattatccatggtcgtacagaagcaggctcgcgagtgtctctcgcccggttgaaacacgacgaactttgaggaaactcgcccaatgttcttcagtatttcttctccacaaacactgtcgtcgcacggcatggaccaaccctcctccagcaactggttgcgagtcactgcaggctggcggggcaggaaggccgtcgagagctgggcttttggagtcagctggcgacgattccgaagaggcgccactctcgctaatactatgtgctcataattatcgatgctgacggcaaagtgcagtttttgtcaagcgtgattgtctacgttcctagatggccatagtcccggaccaaaaaccgtgacctaacgacaaaatccccaagctaacatggtagatacttttgtaagacacgactgtacgcataattgtcaatagaaaagctaccattttaaactgatcattttaatgttgttgacattttgccacatgttatggttaacttgcaggagagccacaacatccacagcaacaggagcacaacgacttttttgacgtggcagtctccattgtggtcgcgcacctgcggccaacatgaataaccccagggaattatgagctattgatgccgagtgattcatcgagaggcaatctggccatattccgttgatcgctatgtagctctccgcgtacgatttgagttggatgctgtgcaacggaatcacaagccaatgtccacagcctctcaacgttttgaaatctactcatgttgtcctcgaaatggtcgcgaaataggcctcaaaaccgtgactcaaatctcgatacgtacggtgactctatctcgtctcattttccctctgctgtgtttaatcgtttgtgaaaggccagcaaagcttcggatgagagtggggtacacgataataacaacttcctttactcgagacacttcccagctattgctccatataacctagatacgaaagacacatacatggcggtgttcg

SEQ ID NO: 25699 - DNA, 2508 bp, Muscodor strobelii
  misc_feature: SGI cDNA ID NO. 568773
  misc_feature: Encodes the peptide sequence at SEQ ID NO 25700
atgaccctcgactttaatgccgccgggggagatgcgctgctggatctgaactcattcgaccatcgggaccgttacccctacaccaccaccaccccgaccaatccccaaatagcggcaaccactatgccgccccggaaccaacagcagtgggcaatgggactcgagatggcgagtcaccatagcacgtccccgagtaatgtctcctcgccaggcgagtctcatcattcgcagtcgcaaacacagtcacctgcccagtcgagcgcgagtccacttcagcactcgccctaccagcaagccgtcacgcagccaggcccagctaccgccttactgacagactggacgctactccagcaccagcagcaattcccgcaacagcagccgcccgtgcaggatctatcacagtttattcagccagacggtgccttgataccgttcaaccccttttctgcgggttaccagaccaatgccattgagtacataccggcaacgacgcaggcaacattaagcacaggactcgccatggagcaaaatttcagcaatgtgtcgccgatagaagacgttcggacgctgcagcagcaatggggcaatgggatgggcatgggtaattggcaagatttcggaacgtcattacagtatcctgcagatggtcttccacgatttacaactagcatgggtagtcagtcaccaacaggcacatacctagaagtcctgtcgttgccaggatcaagcgataatggctggtcccatgtcgaagtgtatcagaactacaaccagtatgatcaagcacaagcacaagcgcaggtacaagcgcaagcacaggctcagaacacggccatctttaaccccagccagactctccatttaagaacgaattccgattcttctgagaacggcagcggccaagcagtcgagttcggcagcagctacgaagatatcactttcaattattcgccatattctcctggttccgataccttctctgatcctgctaatcatcggaactgcttccacggcgagaatcatcattcacacgagattatcagccctgctgcggctgtcgcccccatggctattaaagcatcaagttccacacggccaagccctgctagcggatctggcgttgcatcgccgccacacaacaacgccgcccgtcgcaattcgggacccaagaagagtcccatccagaaatcgacgaaatctgtcattcgacggacatcaaacgggaagaaagatggtattgtggagaagaaggttggacgcagaaagggaccgttgctgcctgagcaacgcaagcaagctagcgagatcagaaaactccgagcttgtctgcgatgcaagttcctcaagaagacatgtgacaagggcgagccttgcggtggctgtcagccatcccatgctcgcctctggcaggttccttgcactcgtattgacatcaaggatattggctatttcatgaaggactggaaggccgactacgagcgacatcttagccgtggtgtctcagtatacaatgtgaaaggttttgcacccaaggagacgttgatgtggatcactcacggctacggcttctgcctcccagtcatggtccgtgaggtatatgtcgccgacgacagctgtttcacggttgactgggttgaatcataccaagtcgatcaagagccaatcgagtttgatatcaagacggaaagacttgatattggtgaaggtggcattaacatcgaggctctggctgagtacttggacaagcacattgaaagtggttttgagaacttcatcgatgaccactttgaaggcactccattcctcacagaaattttcaaaacggcctaccgcttctacaacaaggagaagctccccgtcattcgaaaggccctgaagctggtattggcgtataacttgaccatgcacatcaccttggtagagcagcaaggctccgagcagacacttgacggccagattgacgacgaagactcgaaatacttcggaaaatacgtcgctccggttatgattaactttcagatcaagtgtgccatggccgatatgtggcgcgaactgcagaaggagatattagaagagctctcgtctctgtactctagtgtgtacagtggtgaccgtctcaagaactggcctaccatcttcatgttggcctgtatccttctggctgtatgggaagagatgcaatttgactgcaattaccgtgttcctgacccactcgctgtcgagaagttctgcaatgacatggagtccacgcccgttggcgttataactggtcttttccatgccatctctcagaaactccccgccttgatggactgggacaccgcccgccatggtcatgtactgaacaacaacgtcgccgtgtgcgaagctatgacggaagtgcggcagcatgtcttgaagcacgaacaataccttcggggtagacatagcaccgccaaattcgacagatacgactttgactcgttgtcgaacaagttcctatccaagttggtcatcaagtccaactga

SEQ ID NO: 25700 - protein, 835 aa, Muscodor strobelii
  misc_feature: SGI Peptide ID NO. 568773
  misc_feature (440)..(483): Pfam Id: PF00172 Pfam Desc: Fungal Zn(2)-Cys(6) binuclear cluster domain
  misc_feature (1)..(835): NCBI GI: 171682226 Blast Desc: protein product [Podospora anserina] gi|170941072|emb|CAP66722.1| protein product [Podospora anserina]
  misc_feature (1)..(835): NCBI GI: 116202451 Blast Desc: CHGG_09110 [Chaetomium globosum CBS 148.51] gi|88177628|gb|EAQ85096.1| CHGG_09110 [Chaetomium globosum CBS 148.51]
  misc_feature (1)..(835): NCBI GI: 85091238 Blast Desc: NCU05996 [Neurospora crassa OR74A] gi|28920190|gb|EAA29568.1| conserved [Neurospora crassa OR74A]
  misc_feature (50)..(835): NCBI GI: 145613888 Blast Desc: MGG_01285 [Magnaporthe grisea 70-15] gi|145020903|gb|EDK05032.1| MGG_01285 [Magnaporthe grisea 70-15]
  misc_feature (1)..(835): NCBI GI: 46128783 Blast Desc: FG08769.1 [Gibberella zeae PH-1]
  misc_feature (50)..(835): NCBI GI: 154312176 Blast Desc: BC1G_06121 [Botryotinia fuckeliana B05.10] gi|150850084|gb|EDN25277.1| BC1G_06121 [Botryotinia fuckeliana B05.10]
  misc_feature (50)..(835): NCBI GI: 156064325 Blast Desc: SS1G_00170 [Sclerotinia sclerotiorum 1980] gi|154691032|gb|EDN90770.1| SS1G_00170 [Sclerotinia sclerotiorum 1980]
  misc_feature (67)..(835): NCBI GI: 240106112 Blast Desc: Fungal Zn binuclear cluster domain containing protein [Coccidioides posadasii C735 delta SOWgp]
  misc_feature (67)..(835): NCBI GI: 119192378 Blast Desc: CIMG_00566 [Coccidioides immitis RS]
  misc_feature (52)..(835): NCBI GI: 121707677 Blast Desc: C6 finger domain protein, [Aspergillus clavatus NRRL 1] gi|119400056|gb|EAW10482.1| C6 finger domain protein, [Aspergillus clavatus NRRL 1]
MTLDFNAAGGDALLDLNSFDHRDRYPYTTTTPTNPQIAATTMPPRNQQQWAMGLEMASHHSTSPSNVSSPGESHHSQSQTQSPAQSSASPLQHSPYQQAVTQPGPATALLTDWTLLQHQQQFPQQQPPVQDLSQFIQPDGALIPFNPFSAGYQTNAIEYIPATTQATLSTGLAMEQNFSNVSPIEDVRTLQQQWGNGMGMGNWQDFGTSLQYPADGLPRFTTSMGSQSPTGTYLEVLSLPGSSDNGWSHVEVYQNYNQYDQAQAQAQVQAQAQAQNTAIFNPSQTLHLRTNSDSSENGSGQAVEFGSSYEDITFNYSPYSPGSDTFSDPANHRNCFHGENHHSHEIISPAAAVAPMAIKASSSTRPSPASGSGVASPPHNNAARRNSGPKKSPIQKSTKSVIRRTSNGKKDGIVEKKVGRRKGPLLPEQRKQASEIRKLRACLRCKFLKKTCDKGEPCGGCQPSHARLWQVPCTRIDIKDIGYFMKDWKADYERHLSRGVSVYNVKGFAPKETLMWITHGYGFCLPVMVREVYVADDSCFTVDWVESYQVDQEPIEFDIKTERLDIGEGGINIEALAEYLDKHIESGFENFIDDHFEGTPFLTEIFKTAYRFYNKEKLPVIRKALKLVLAYNLTMHITLVEQQGSEQTLDGQIDDEDSKYFGKYVAPVMINFQIKCAMADMWRELQKEILEELSSLYSSVYSGDRLKNWPTIFMLACILLAVWEEMQFDCNYRVPDPLAVEKFCNDMESTPVGVITGLFHAISQKLPALMDWDTARHGHVLNNNVAVCEAMTEVRQHVLKHEQYLRGRHSTAKFDRYDFDSLSNKFLSKLVIKSN

SEQ ID NO: 25701 - DNA, 4086 bp, Muscodor strobelii
  misc_feature: SGI EST ID NO. CUFF.60802.1
  misc_feature: Variant of the nucleotide sequence at SEQ ID NO 25699
cctgctgccagtccacgaccagcccacggacggtccatggccaccagccccagcaagtgtggtgtggttaaggacaggtcgagagtggtagagagcgcttccgagtgggagtggtttgcgagagaggtccttgttctccctgttagaccctgtctcgcccgtcagaggtccatcctgtcgctgtcttgcccagccccacgatgctggccgatggggacagggtagggtccgtgatggcggtttgattgggtcgtctcccgtaggagctgcagcggcatgcagcttgcaggtgggtaggcgacgccagcgaatgcgcttctcaccgccattctcccggccgtcctcgcacaatcgaatgcctcctctcgccatcatctgcctctcctccccccatcctaccctcgatctcactcgacctcccgcataatctcacctccgcatctcactaaccttctttccctctccctgccaggtcgagagtcttcacatccaaagagcggtgtcgacctcgtctggctcataatactagcggagctctcctccaatcctcccactgactcttcctcccttttcctgacttctgacaacaatgaccctcgactttaatgccgccgggggagatgcgctgctggatctgaactcattcgaccatcgggaccgttacccctacaccaccaccaccccgaccaatccccaaatagcggcaaccactatgccgccccggaaccaacagcagtgggcaatgggactcgagatggcgagtcaccatagcacgtccccgagtaatgtctcctcgccaggcgagtctcatcattcgcagtcgcaaacacagtcacctgcccagtcgagcgcgagtccacttcagcactcgccctaccagcaagccgtcacgcagccaggcccagctaccgccttactgacagactggacgctactccagcaccagcagcaattcccgcaacagcagccgcccgtgcaggatctatcacagtttattcagccagacggtgccttgataccgttcaaccccttttctgcgggttaccagaccaatgccattgagtacataccggcaacgacgcaggcaacattaagcacaggactcgccatggagcaaaatttcagcaatgtgtcgccgatagaagacgttcggacgctgcagcagcaatggggcaatgggatgggcatgggtaattggcaagatttcggaacgtcattacagtatcctgcagatggtcttccacgatttacaactagcatgggtagtcagtcaccaacaggcacatacctagaagtcctgtcgttgccaggatcaagcgataatggctggtcccatgtcgaagtgtatcagaactacaaccagtatgatcaagcacaagcacaagcgcaggtacaagcgcaagcacaggctcagaacacggccatctttaaccccagccagactctccatttaagaacgaattccgattcttctgagaacggcagcggccaagcagtcgagttcggcagcagctacgaagatatcactttcaattattcgccatattctcctggttccgataccttctctgatcctgctaatcatcggaactgcttccacggcgagaatcatcattcacacgagattatcagccctgctgcggctgtcgcccccatggctattaaagcatcaagttccacacggccaagccctgctagcggatctggcgttgcatcgccgccacacaacaacgccgcccgtcgcaattcgggacccaagaagagtcccatccagaaatcgacgaaatctgtcattcgacggacatcaaacgggaagaaagatggtattgtggagaagaaggttggacgcagaaagggaccgttgctgcctgagcaacgcaagcaagctagcgagatcagaaaactccgagcttgtctgcgatgcaagttcctcaagaagacatgtgacaagggcgagccttgcggtggctgtcagccatcccatgctcgcctctggcaggttccttgcactcgtattgacatcaaggatattggctatttcatgaaggactggaaggccgactacgagcgacatcttagccgtggtgtctcagtatacaatgtgaaaggttttgcacccaaggagacgttgatgtggatcactcacggctacggcttctgcctcccagtcatggtccgtgaggtatatgtcgccgacgacagctgtttcacggttgactgggttgaatcataccaagtcgatcaagagccaatcgagtttgatatcaagacggaaagacttgatattggtgaaggtggcattaacatcgaggctctggctgagtacttggacaagcacattgaaagtggttttgagaacttcatcgatgaccactttgaaggcactccattcctcacagaaattttcaaaacggcctaccgcttctacaacaaggagaagctccccgtcattcgaaaggccctgaagctggtattggcgtataacttgaccatgcacatcaccttggtagagcagcaaggctccgagcagacacttgacggccagattgacgacgaagactcgaaatacttcggaaaatacgtcgctccggttatgattaactttcagatcaagtgtgccatggccgatatgtggcgcgaactgcagaaggagatattagaagagctctcgtctctgtactctagtgtgtacagtggtgaccgtctcaagaactggcctaccatcttcatgttggcctgtatccttctggctgtatgggaagagatgcaatttgactgcaattaccgtgttcctgacccactcgctgtcgagaagttctgcaatgacatggagtccacgcccgttggcgttataactggtcttttccatgccatctctcagaaactccccgccttgatggactgggacaccgcccgccatggtcatgtactgaacaacaacgtcgccgtgtgcgaagctatgacggaagtgcggcagcatgtcttgaagcacgaacaataccttcggggtagacatagcaccgccaaattcgacagatacgactttgactcgttgtcgaacaagttcctatccaagttggtcatcaagtccaactgagagagaacttgagagtctataccttttcctttgttttgcgttatcattgagcattcccatgtgcaaactgcttgggacatttagcgacggcgttatacgtggacatgatccttcatgacgactaccatactacctgtcgaatatttaactccgccttacctcttccacgtacaacttctctccggctggccaccgccccccattacgcacattgacgcattgcaatgtttatgccccacgtcgctcacgatttaccatgcgaaatttgacgccatgttgtcacgcaaccccaattttacgaaccctttttacggctatttcaatgactgtatgatctggatggaaactctgtcgaaagaaaaagcttattctgtttggatacacaagaaagcgccgcaaagcgtctagtttttcatacttatttatgaatttttgattttcgttttttatggaacttgcgggattggaaacacaggcatctactcgcgagatgaaagagaaagagatacagagacttatatgcgagcgatgtcatcgtttatcgttattaaaccgctgcatagaaatacaacgggcttggagaattggtcctattcacttcggaccatctcctgcattcgccgacaaggctggactgagaggcaaaggccctcgatgggcatgaaactcatgatatctcggggactattgagggaaggggggtagaactagctactttacccctctttcctttccgctcggaatgaaagaaatgatactatggaggtttagagaagcgcgcttggttttctctcgtttgataccaaaacctaacgttacgttacctgatcttagcgtgtatgacagagcctatctttttgctttgctttgccaatgagcgcatgcgaaaatgagaaccagaatgagatataattggtccttcacactatatgaaattccgcactgagagacttgatcatgatgctgatgagcgtgagatttaattaccg

SEQ ID NO: 25702 - DNA, 4701 bp, Muscodor strobelii
  misc_feature: SGI cDNA ID NO. 568774
  misc_feature: Encodes the peptide sequence at SEQ ID NO 25703
atgagctttggcttcggcgttggcgattttttggccgtgatcaagctcgccattaagatacgcaaggatttcttggacgctccccaagaataccaagctttggctcaagacgtccgaagtctttccatagccctacaagatgccgagattagtcgcttacaattagacggccaaaacttggacgacttcgagcaggtagtggctgagtgcaatggcttattgaaacgccttcaggagactctaaaacaatgcaagaacctcgctcaagatgctacagcaaaacaacgacgagagttcaaatatatctggaagcgtttcaagttcgagcccaatgatgtacgcgccttacacagccaaatcactctcaagatttcgagtctccgcaccttcaatgacagactactcgcgaacaagatcgacaccctagtaaaggatcaaggagacaataatcgactgctttcaaacaagattgacaatctagctcagcatagtggagagtatgtccggaaagacttgcttgaatggattagtgcagtggacatggtggcacagcagaacgatctcgtaagccgttgccaggaaggttcgcgacgatggctctttgactcggcgatttaccaagggtggctcagcatgaacaatagaattctcttctgtcatggcaagttagggacaggcaaaacctacaccatggccatggtcaccgagagtctgcagaagacaaatcatgccactgcccttaccgtccacctgtactgctcttacagcgatcgcactcaaaccgctggcgggctgctccgtagcctattgcggggggctttagaggaggcaacactagcagcggcagacacaatttctgaatgcacgcgcttgagaaaagcccaacaagcattatcgaggcatagtgctttgccgcttctagtcagcttattctctaggttctcacgggtcaatcttctggtagatgcactagatgagttgcctaccgacgttcgacagcccttcatcaacgacttacttcatatccataaagtgaacaacaacacgaccctgtttctcacgactcgtgacaactccgaaatctggcaacgattcgaaaaagaggataattgtacacccttggaaatcagggccagtgatgtcgacatccggcaatatctccgtgaaaatctctatcgtatgccgaaatttgtcagaaaccattccgagctacaagacgagcttattgattcgatcacgaagatctgtgatggaatgttcttgctagccgaattgcaactcaagtcgctgaccaatatcttaacgattcgtaattttcgcctcgagctttctcaactatcgagcggatcaaatcgctacgacgatctatatgataaagcaatggaacgaatcaaattccaaggccctaaagctgagcaaaccgcacgacaaacgctgatgataatgagctgcgcccggcggatactttccactcaagagcttgtacatgcaatttctttagatgacgactgcgaagagctagacgaggacatgattcccgacataaatgatgcggtgtccacttgcgacgggttggtagtggttgacgatgccagcgatgcggtccgccttgtgcacaaatcaacacaggattacttcgaacgtaatagatcccggtggtttcccgaggctcacagaaaagtcgcgaaaatctgtctccagtatctggagactgtgaagttgagtcgcattagacgggagtcggacattggcacctactcattttatgcctacgccacagaaaattggggctatcacgaccagtttgacgacaccaaaggccatgcgcagacctcgaatctcaaatctgttggtgacaccaaccaagagacctatattacgacgatagatcgatggggtgcgaggcagatagctgaggacgtagttgatgtcgaatctaatattatcggtgcctgccataccgacagggtcaactgggtggaactcctcttgaccgtgcggaaatatgacatcaaccagaacggcggtcaaatttatgatccactagcgtttcgggacgctcgagataacgtgttgttaaccatcgcggctgctcggggcaatgagagcatgaccaagatgctactttcgcatggagccaatcctaatgtgcacagcgccaaaaaccagacacctttgatgatagcggtaaccaatgagtctcctacccttgtcgcgctgcttttggaacagcgaattacagatccagacatatcgagccaattctccgactcagttttcatatatgtcacgactacaccgtttctcgccgcagttagcctggggaatctggaacttgtgcggttattggtagaaaaatcgaacagatcggctagagattcgcagaaccgaggcgcaatatgtctcgccgcagctctttgctcttatgatgtgttaaacgagctaatgaagtggcccgacatagagtgtgactatctcgatttagactggtgcttttcgcctctggccgctgctatccggaacggtcgaacggaagccgcttttattctcctgcctcatacagagcctcgaagatgcaacagttgcggtcaaaatgccgtatattttgcacttgtttcacaacagtacagcctccttaggcaattcatactagtggacccatctcaggtcaataacgacgcatccgagggaatgaaacctcccaataaacgagatcccgatagactgcgatacaataaatcaatcgatcggccatgccactctgacaaggccagatatatttttcccttaatggcagctgttgctgcgaacgattttgagggcgcgaagatcctgttaccctacgccaacgtgaatcaagaaacttcaagggataagtggcgatcacttcacgaggcagccgagtctggaaacgcggacattgtgcagttgcttctctcgaaagaggacattgagccggatcctgttgataataagggccgctctccttttctactagcagcccaatttggacgcgtcaaggtgctagaagtcctgattcgtcatggtggtgtctcttacgaccgaaaagaccatgaaggacacggggccactcattacatctttaacccctacttcaccaacctgtcatttcttgaaacgttgacacctgttctgcagcacgagatcgcctcaaaagactctgatcttctccaccaagcttgcagtctgagcccccgggtcagttacaaatacgaatcgcatacctatcatacccaacaatcatatgatgtgtctcgaccctatcaagatgttggtccttttgtgtccagcctactcaaagtaccaggggtcaatccgaatcaaactaacttagaaggggatacgccactccacctcgcagttagacattatcaatctgccgctgttgctgctcttttgaagcatccagatattgatttatgtgtcacggatgcatcaggagagaccccactcttcatcgcatctgcaaataaccccctcagaaccggtggtcgcccaactgaatgcgacgtatccgacttgcaagccggggaaaatgttatagagacgtgcaaagaatgcaacgaggcgacttttatcactctcatcaaagacggccggtcaaagctatatgactataatgggcgcagtgttttgtctcaagtcctggttcaagggactgcggcaatgattcaagctgtgttggacttcacggatttggcgtccgagcttggcgaaatctctgaagataatagcagtatcttatctactgcaatgcgcatgcggaagccgagtgatattgtcgcgcttctcttctctcgatcaccctctagtgtgcttgatattgctgatagcgatgaacgcactcctctgtcctacgtacaggaacgatatatcgatattattgacttagtgggcccgtatttcgtagctgcaaacctcgatcttgcagttgcagacaataacggacgtgccattttatcgcacgcggcagaaagaggttcctctaatggagtacggtggcttctcaactcagtagctatagatatcagccttccagacggcaaaggccgcagtgcgttatcatacgctgcagaatctggtaagcctgaaacggtgcagctacttcttgatcacacagaggttggatttaatggttcagcggatcatcaagacagaatggctccatcacacagatcccaatgcgaacgtacaaagtctgttacgaagatacgaagctgtgcacacggcatcaatgatcgagacattgagggattaaccgcacttcaccacgcagcaaaagctgtaatcaaatttggatattataaatattctgcacacatggatagacttgggacgttgctcgttcttttagaggacccagatactgacattgggatcgcggacaagaacggtcacacagctctctgcagtattctgcagataggaatttccgatgacgacaagaagatcgcagacaagatttgccgccttctactagcacgcgataccaataagcgttctgtcaatcgccacgccgcttcatcatttgtatgcttactcgggtcgacaagcggcttttggttctacaaaagcttcatgcctttatttgaggacgctcatcctggcatgggtccgcgcaaagggcggccaaaggacgaactactcacagaactcttaagaacgcaacgacacaaatag

SEQ ID NO: 25703 - protein, 1566 aa, Muscodor strobelii
  misc_feature: SGI Peptide ID NO. 568774
  misc_feature (688)..(720): Pfam Id: PF00023 Pfam Desc: Ankyrin repeat
  misc_feature (1119)..(1152): Pfam Id: PF00023 Pfam Desc: Ankyrin repeat
  misc_feature (1)..(1028): NCBI GI: 46105222 Blast Desc: FG00239.1 [Gibberella zeae PH-1]
  misc_feature (1)..(1033): NCBI GI: 154313093 Blast Desc: BC1G_05548 [Botryotinia fuckeliana B05.10] gi|150849633|gb|EDN24826.1| BC1G_05548 [Botryotinia fuckeliana B05.10]
  misc_feature (1)..(1005): NCBI GI: 255939916 Blast Desc: Pc16g03680 [Penicillium chrysogenum Wisconsin 54-1255] gi|211585350|emb|CAP93038.1| Pc16g03680 [Penicillium chrysogenum Wisconsin 54-1255]
  misc_feature (1)..(1018): NCBI GI: 255957133 Blast Desc: Pc21g23520 [Penicillium chrysogenum Wisconsin 54-1255] gi|211591030|emb|CAP97249.1| Pc21g23520 [Penicillium chrysogenum Wisconsin 54-1255]
  misc_feature (1)..(1030): NCBI GI: 145251379 Blast Desc: An15g06750 [Aspergillus niger] gi|134082735|emb|CAK42627.1| protein product [Aspergillus niger]
  misc_feature (12)..(817): NCBI GI: 159123469 Blast Desc: Ankyrin repeat protein [Aspergillus fumigatus A1163]
  misc_feature (1)..(851): NCBI GI: 212534788 Blast Desc: ankyrin repeat-containing protein, [Penicillium marneffei ATCC 18224] gi|210069949|gb|EEA24039.1| ankyrin repeat-containing protein, [Penicillium marneffei ATCC 18224]
  misc_feature (172)..(1164): NCBI GI: 238508580 Blast Desc: Pfs, NACHT and Ankyrin domain protein [Aspergillus flavus NRRL3357] gi|220688371|gb|EED44724.1| Pfs, NACHT and Ankyrin domain protein [Aspergillus flavus NRRL3357]
  misc_feature (99)..(804): NCBI GI: 119497765 Blast Desc: Ankyrin repeat protein [Neosartorya fischeri NRRL 181] gi|119413804|gb|EAW23743.1| Ankyrin repeat protein [Neosartorya fischeri NRRL 181]
  misc_feature (172)..(856): NCBI GI: 169784486 Blast Desc: [Aspergillus oryzae RIB40] gi|83775451|dbj|BAE65571.1| protein product [Aspergillus oryzae]
MSFGFGVGDFLAVIKLAIKIRKDFLDAPQEYQALAQDVRSLSIALQDAEISRLQLDGQNLDDFEQVVAECNGLLKRLQETLKQCKNLAQDATAKQRREFKYIWKRFKFEPNDVRALHSQITLKISSLRTFNDRLLANKIDTLVKDQGDNNRLLSNKIDNLAQHSGEYVRKDLLEWISAVDMVAQQNDLVSRCQEGSRRWLFDSAIYQGWLSMNNRILFCHGKLGTGKTYTMAMVTESLQKTNHATALTVHLYCSYSDRTQTAGGLLRSLLRGALEEATLAAADTISECTRLRKAQQALSRHSALPLLVSLFSRFSRVNLLVDALDELPTDVRQPFINDLLHIHKVNNNTTLFLTTRDNSEIWQRFEKEDNCTPLEIRASDVDIRQYLRENLYRMPKFVRNHSELQDELIDSITKICDGMFLLAELQLKSLTNILTIRNFRLELSQLSSGSNRYDDLYDKAMERIKFQGPKAEQTARQTLMIMSCARRILSTQELVHAISLDDDCEELDEDMIPDINDAVSTCDGLVVVDDASDAVRLVHKSTQDYFERNRSRWFPEAHRKVAKICLQYLETVKLSRIRRESDIGTYSFYAYATENWGYHDQFDDTKGHAQTSNLKSVGDTNQETYITTIDRWGARQIAEDVVDVESNIIGACHTDRVNWVELLLTVRKYDINQNGGQIYDPLAFRDARDNVLLTIAAARGNESMTKMLLSHGANPNVHSAKNQTPLMIAVTNESPTLVALLLEQRITDPDISSQFSDSVFIYVTTTPFLAAVSLGNLELVRLLVEKSNRSARDSQNRGAICLAAALCSYDVLNELMKWPDIECDYLDLDWCFSPLAAAIRNGRTEAAFILLPHTEPRRCNSCGQNAVYFALVSQQYSLLRQFILVDPSQVNNDASEGMKPPNKRDPDRLRYNKSIDRPCHSDKARYIFPLMAAVAANDFEGAKILLPYANVNQETSRDKWRSLHEAAESGNADIVQLLLSKEDIEPDPVDNKGRSPFLLAAQFGRVKVLEVLIRHGGVSYDRKDHEGHGATHYIFNPYFTNLSFLETLTPVLQHEIASKDSDLLHQACSLSPRVSYKYESHTYHTQQSYDVSRPYQDVGPFVSSLLKVPGVNPNQTNLEGDTPLHLAVRHYQSAAVAALLKHPDIDLCVTDASGETPLFIASANNPLRTGGRPTECDVSDLQAGENVIETCKECNEATFITLIKDGRSKLYDYNGRSVLSQVLVQGTAAMIQAVLDFTDLASELGEISEDNSSILSTAMRMRKPSDIVALLFSRSPSSVLDIADSDERTPLSYVQERYIDIIDLVGPYFVAANLDLAVADNNGRAILSHAAERGSSNGVRWLLNSVAIDISLPDGKGRSALSYAAESGKPETVQLLLDHTEVGFNGSADHQDRMAPSHRSQCERTKSVTKIRSCAHGINDRDIEGLTALHHAAKAVIKFGYYKYSAHMDRLGTLLVLLEDPDTDIGIADKNGHTALCSILQIGISDDDKKIADKICRLLLARDTNKRSVNRHAASSFVCLLGSTSGFWFYKSFMPLFEDAHPGMGPRKGRPKDELLTELLRTQRHK

SEQ ID NO: 25704 - DNA, 5129 bp, Muscodor strobelii
  misc_feature: SGI EST ID NO. CUFF.60593.0
  misc_feature: Variant of the nucleotide sequence at SEQ ID NO 25702
gttgcaatttcgttgaattcccacctcaaaacaataaccgctgttctctggattcttagattttgttgccatgagctttggcttcggcgttggcgattttttggccgtgatcaagctcgccattaagatacgcaaggatttcttggacgctccccaagaataccaagctttggctcaagacgtccgaagtctttccatagccctacaagatgccgagattagtcgcttacaattagacggccaaaacttggacgacttcgagcaggtagtggctgagtgcaatggcttattgaaacgccttcaggagactctaaaacaatgcaagaacctcgctcaagatgctacagcaaaacaacgacgagagttcaaatatatctggaagcgtttcaagttcgagcccaatgatgtacgcgccttacacagccaaatcactctcaagatttcgagtctccgcaccttcaatgacagactactcgcgaacaagatcgacaccctagtaaaggatcaaggagacaataatcgactgctttcaaacaagattgacaatctagctcagcatagtggagagtatgtccggaaagacttgcttgaatggattagtgcagtggacatggtggcacagcagaacgatctcgtaagccgttgccaggaaggttcgcgacgatggctctttgactcggcgatttaccaagggtggctcagcatgaacaatagaattctcttctgtcatggcaagttagggacaggcaaaacctacaccatggccatggtcaccgagagtctgcagaagacaaatcatgccactgcccttaccgtccacctgtactgctcttacagcgatcgcactcaaaccgctggcgggctgctccgtagcctattgcggggggctttagaggaggcaacactagcagcggcagacacaatttctgaatgcacgcgcttgagaaaagcccaacaagcattatcgaggcatagtgctttgccgcttctagtcagcttattctctaggttctcacgggtcaatcttctggtagatgcactagatgagttgcctaccgacgttcgacagcccttcatcaacgacttacttcatatccataaagtgaacaacaacacgaccctgtttctcacgactcgtgacaactccgaaatctggcaacgattcgaaaaagaggataattgtacacccttggaaatcagggccagtgatgtcgacatccggcaatatctccgtgaaaatctctatcgtatgccgaaatttgtcagaaaccattccgagctacaagacgagcttattgattcgatcacgaagatctgtgatggaatgttcttgctagccgaattgcaactcaagtcgctgaccaatatcttaacgattcgtaattttcgcctcgagctttctcaactatcgagcggatcaaatcgctacgacgatctatatgataaagcaatggaacgaatcaaattccaaggccctaaagctgagcaaaccgcacgacaaacgctgatgataatgagctgcgcccggcggatactttccactcaagagcttgtacatgcaatttctttagatgacgactgcgaagagctagacgaggacatgattcccgacataaatgatgcggtgtccacttgcgacgggttggtagtggttgacgatgccagcgatgcggtccgccttgtgcacaaatcaacacaggattacttcgaacgtaatagatcccggtggtttcccgaggctcacagaaaagtcgcgaaaatctgtctccagtatctggagactgtgaagttgagtcgcattagacgggagtcggacattggcacctactcattttatgcctacgccacagaaaattggggctatcacgaccagtttgacgacaccaaaggccatgcgcagacctcgaatctcaaatctgttggtgacaccaaccaagagacctatattacgacgatagatcgatggggtgcgaggcagatagctgaggacgtagttgatgtcgaatctaatattatcggtgcctgccataccgacagggtcaactgggtggaactcctcttgaccgtgcggaaatatgacatcaaccagaacggcggtcaaatttatgatccactagcgtttcgggacgctcgagataacgtgttgttaaccatcgcggctgctcggggcaatgagagcatgaccaagatgctactttcgcatggagccaatcctaatgtgcacagcgccaaaaaccagacacctttgatgatagcggtaaccaatgagtctcctacccttgtcgcgctgcttttggaacagcgaattacagatccagacatatcgagccaattctccgactcagttttcatatatgtcacgactacaccgtttctcgccgcagttagcctggggaatctggaacttgtgcggttattggtagaaaaatcgaacagatcggctagagattcgcagaaccgaggcgcaatatgtctcgccgcagctctttgctcttatgatgtgttaaacgagctaatgaagtggcccgacatagagtgtgactatctcgatttagactggtgcttttcgcctctggccgctgctatccggaacggtcgaacggaagccgcttttattctcctgcctcatacagagcctcgaagatgcaacagttgcggtcaaaatgccgtatattttgcacttgtttcacaacagtacagcctccttaggcaattcatactagtggacccatctcaggtcaataacgacgcatccgagggaatgaaacctcccaataaacgagatcccgatagactgcgatacaataaatcaatcgatcggccatgccactctgacaaggccagatatatttttcccttaatggcagctgttgctgcgaacgattttgagggcgcgaagatcctgttaccctacgccaacgtgaatcaagaaacttcaagggataagtggcgatcacttcacgaggcagccgagtctggaaacgcggacattgtgcagttgcttctctcgaaagaggacattgagccggatcctgttgataataagggccgctctccttttctactagcagcccaatttggacgcgtcaaggtgctagaagtcctgattcgtcatggtggtgtctcttacgaccgaaaagaccatgaaggacacggggccactcattacatctttaacccctacttcaccaacctgtcatttcttgaaacgttgacacctgttctgcagcacgagatcgcctcaaaagactctgatcttctccaccaagcttgcagtctgagcccccgggtcagttacaaatacgaatcgcatacctatcatacccaacaatcatatgatgtgtctcgaccctatcaagatgttggtccttttgtgtccagcctactcaaagtaccaggggtcaatccgaatcaaactaacttagaaggggatacgccactccacctcgcagttagacattatcaatctgccgctgttgctgctcttttgaagcatccagatattgatttatgtgtcacggatgcatcaggagagaccccactcttcatcgcatctgcaaataaccccctcagaaccggtggtcgcccaactgaatgcgacgtatccgacttgcaagccggggaaaatgttatagagacgtgcaaagaatgcaacgaggcgacttttatcactctcatcaaagacggccggtcaaagctatatgactataatgggcgcagtgttttgtctcaagtcctggttcaagggactgcggcaatgattcaagctgtgttggacttcacggatttggcgtccgagcttggcgaaatctctgaagataatagcagtatcttatctactgcaatgcgcatgcggaagccgagtgatattgtcgcgcttctcttctctcgatcaccctctagtgtgcttgatattgctgatagcgatgaacgcactcctctgtcctacgtacaggaacgatatatcgatattattgacttagtgggcccgtatttcgtagctgcaaacctcgatcttgcagttgcagacaataacggacgtgccattttatcgcacgcggcagaaagaggttcctctaatggagtacggtggcttctcaactcagtagctatagatatcagccttccagacggcaaaggccgcagtgcgttatcatacgctgcagaatctggtaagcctgaaacggtgcagctacttcttgatcacacagaggttggatttaatggttcagcggatcatcaagacagaatggctccatcacacagatcccaatgcgaacgtacaaagtctgttacgaagatacgaagctgtgcacacggcatcaatgatcgagacattgagggattaaccgcacttcaccacgcagcaaaagctgtaatcaaatttggatattataaatattctgcacacatggatagacttgggacgttgctcgttcttttagaggacccagatactgacattgggatcgcggacaagaacggtcacacagctctctgcagtattctgcagataggaatttccgatgacgacaagaagatcgcagacaagatttgccgccttctactagcacgcgataccaataagcgttctgtcaatcgccacgccgcttcatcatttgtatgcttactcgggtcgacaagcggcttttggttctacaaaagcttcatgcctttatttgaggacgctcatcctggcatgggtccgcgcaaagggcggccaaaggacgaactactcacagaactcttaagaacgcaacgacacaaataggtcgcatgatctaagggcatgtgttgggtttgaggtgtccgactacattgatagatcttgttgttgaaaaagagaaagcatcatcgcggagtatgagaagcaattgtctgcgccggaaacataagtcagtatctgtgatactatctctagagatatgattgcgcattgctacagtgtcggcatcattggtactcatatcgtgaattggtgcatatcgttaaaagtcattctacatcagaggcgagagtaacaggtcttgatttttcagtgccgaccgagttattctacattccctcttcatcagcattgaacttaatcgaaactacgaacatacgatagtaatatctcagcagtttat

SEQ ID NO: 25705 - DNA, 942 bp, Muscodor strobelii
  misc_feature: SGI cDNA ID NO. 568775
  misc_feature: Reduced expression when VOC is produced
  misc_feature: Encodes the peptide sequence at SEQ ID NO 25706
atggcttctgagatacatcggagacgaacaggaagaggtctcaaggttagcgaagagattgttctcaaagaagagatgtacgaagaggaggaagatgacttgccacggtcttataggcagttgacggcacacctgcagactaactcgcccgagatgaattcgcgatttagcgcctacgtatcgacacaaaccgcattggccaccatgcagcgctacaacgaggtaaatcgcctattccgggatgcattctcaccctctgccgtcgcctatcagcagcaactcaacaattcggtgtacatggctcctctattcaacaacggcataccctcaccatcaagcagcagaaactcggtgtctgctgcacagccccagtttgatggtgcaggtaggaagccttcaacaaacccgcagtcaaaccgcactgatagcactgccacaattgcgtcaatcgcaacgccgcccgcagtacccagcccgatacctacatccatagatcctccagatgccaagggaaaatcggcgtttcacatacctgaagccggtttaccgaacataccattggacccccagctacgccagcagcctaccagtagcttcacgtctgaactcccaaacgagatcaagatgctgggtaatttcgacatgagcgaccctttagccatccatttcttcggcgaagcatcaccggcgttgcagatgttgaacgagcagggagatatgcccgagtgggatgatgttcatgctggcctcacggaactgcacagcccagcgaatcaacatagtcacgacgatcaattgtatttttcgccagtcgaaaattctgtggatcacttcgactccctaccttcggaggcgttcgataacaccgatgcggcaactggaggatatgacgattgggaaacctggcttgacttagattcaaacgccccagtgtctggctag

SEQ ID NO: 25706 - protein, 313 aa, Muscodor strobelii
  misc_feature: SGI Peptide ID NO. 568775
  misc_feature (1)..(224): NCBI GI: 261358969 Blast Desc: conserved [Verticillium albo-atrum VaMs.102]
  misc_feature (1)..(217): NCBI GI: 46125323 Blast Desc: FG07039.1 [Gibberella zeae PH-1]
  misc_feature (2)..(87): NCBI GI: 256732599 Blast Desc: NECHADRAFT_100020 [Nectria haematococca mpVI 77-13-4]
  misc_feature (2)..(69): NCBI GI: 169622549 Blast Desc: SNOG_14499 [Phaeosphaeria nodorum SN15] gi|160704797|gb|EAT78039.2| SNOG_14499 [Phaeosphaeria nodorum SN15]
  misc_feature (1)..(83): NCBI GI: 256729523 Blast Desc: expressed protein [Nectria haematococca mpVI 77-13-4]
  misc_feature (1)..(83): NCBI GI: 85094956 Blast Desc: NCU06125 [Neurospora crassa OR74A] gi|28921445|gb|EAA30751.1| NCU06125 [Neurospora crassa OR74A]
  misc_feature (12)..(83): NCBI GI: 145606931 Blast Desc: MGG_03871 [Magnaporthe grisea 70-15] gi|145014561|gb|EDJ99129.1| MGG_03871 [Magnaporthe grisea 70-15]
  misc_feature (2)..(60): NCBI GI: 154278477 Blast Desc: [Ajellomyces capsulatus NAm1] gi|150413637|gb|EDN09020.1| [Ajellomyces capsulatus NAm1]
  misc_feature (2)..(60): NCBI GI: 261206260 Blast Desc: conserved [Ajellomyces dermatitidis SLH14081] gi|239592926|gb|EEQ75507.1| conserved [Ajellomyces dermatitidis SLH14081] gi|239610900|gb|EEQ87887.1| conserved [Ajellomyces
  misc_feature (2)..(60): NCBI GI: 240280177 Blast Desc: conserved [Ajellomyces capsulatus H143]
  misc_feature: Useful for introducing or modulating the production of volatile compounds
MASEIHRRRTGRGLKVSEEIVLKEEMYEEEEDDLPRSYRQLTAHLQTNSPEMNSRFSAYVSTQTALATMQRYNEVNRLFRDAFSPSAVAYQQQLNNSVYMAPLFNNGIPSPSSSRNSVSAAQPQFDGAGRKPSTNPQSNRTDSTATIASIATPPAVPSPIPTSIDPPDAKGKSAFHIPEAGLPNIPLDPQLRQQPTSSFTSELPNEIKMLGNFDMSDPLAIHFFGEASPALQMLNEQGDMPEWDDVHAGLTELHSPANQHSHDDQLYFSPVENSVDHFDSLPSEAFDNTDAATGGYDDWETWLDLDSNAPVSG

SEQ ID NO: 25707 - DNA, 2478 bp, Muscodor strobelii
  misc_feature: SGI EST ID NO. CUFF.60597.0
  misc_feature: Variant of the nucleotide sequence at SEQ ID NO 25705
ttacggcttgtctctttgttattcgcctttatgtgaattggtttgttccaactcgactattccacagacaagcaacaaccagcaagcagcaaagcaatacactcaaaactagtcagcacttacggccttgcacttggtctagcttcgcttgtcgctcttcttcgccttcttcggggactagaacgtgcttcacgacttaataacctagctttaatagctatcaaatcgagctcttttcgtgccgaagcaaccttgaaggcagcggcaacttacaaccatcgaaagcttgaccttgttttggctaattgcagaggaacggcttcagcgtctcgactatctggctctctggcttcattaaaactctaagggttacctaaggtcatctgccagctacgccaccggcgctgtcttccctctacgtttgacttcgtggcacttatgcgagcgaagcctaggcgccacctcttagatcaggtctctcacgaatatcgagccgtctagatcggtccctacgcatctcgacccgacgaatctatcggggatttatatgatcctatccgcggactaagccactctgtcttgagcgctcttccaggagactcattacctcatcgacttccggtgccagcatcatcacttgctggactgtgtgcttcgagcctgaacatcgacgtcaacgaaattaaggaagagtcatctcgatgccgaagagaccatctccaacagcgactgcaatgtcggctgatacccaaatcccaccagctaaggtgcagaagacggagagatctcacgaggaaaaccaagaaagggcatatatcgcggcctcgaggagagccgataggagtcttgaagccagggttcagtcagctaagatggcttctgagatacatcggagacgaacaggaagaggtctcaaggttagcgaagagattgttctcaaagaagagatgtacgaagaggaggaagatgacttgccacggtcttataggcagttgacggcacacctgcagactaactcgcccgagatgaattcgcgatttagcgcctacgtatcgacacaaaccgcattggccaccatgcagcgctacaacgaggtaaatcgcctattccgggatgcattctcaccctctgccgtcgcctatcagcagcaactcaacaattcggtgtacatggctcctctattcaacaacggcataccctcaccatcaagcagcagaaactcggtgtctgctgcacagccccagtttgatggtgcaggtaggaagccttcaacaaacccgcagtcaaaccgcactgatagcactgccacaattgcgtcaatcgcaacgccgcccgcagtacccagcccgatacctacatccatagatcctccagatgccaagggaaaatcggcgtttcacatacctgaagccggtttaccgaacataccattggacccccagctacgccagcagcctaccagtagcttcacgtctgaactcccaaacgagatcaagatgctgggtaatttcgacatgagcgaccctttagccatccatttcttcggcgaagcatcaccggcgttgcagatgttgaacgagcagggagatatgcccgagtgggatgatgttcatgctggcctcacggaactgcacagcccagcgaatcaacatagtcacgacgatcaattgtatttttcgccagtcgaaaattctgtggatcacttcgactccctaccttcggaggcgttcgataacaccgatgcggcaactggaggatatgacgattgggaaacctggcttgacttagattcaaacgccccagtgtctggctaggtttcatccagtgcgcaatcgaatcttcgattctcatcaagctcccgaccagtctcctttattgccttagcgcagtaataacggatggaggcaaattctcaatcctaggaaggtcgtcatcttcggcctctgattttttcatcctcctcgtcccattcaagggatttattacgatttaatgatgtatgatcacctatcagggttatgagcggcatttgggcgcattacacaagcatcagcatcatcattggtttttacgattatttttttcatggctggttggcaatttgctacatactcttgcgccatgcgcaaacgacatatgatacccagatttgagcattggcgtcaaacatgacgcaagggataatagagacgatcttgctattaggcgatcaggacggttgataacttggtaattcacgattcacctcttccatcatcaaatcctccatctttgcggttgttgtcatacttatggcatgatatcgaaatgataatctctttggcggacattggaaagaggaaacggacagcgatggcaactgagaatggctcgataaggagtcagaaccttcacatcttggactgcctccatgtgaaaagattcaaatcgggcgataaaaagaataaaactggaaacagataataaaaaacgaagaaa

SEQ ID NO: 25708 - DNA, 1080 bp, Muscodor strobelii
  misc_feature: SGI cDNA ID NO. 568776
  misc_feature: Encodes the peptide sequence at SEQ ID NO 25709
atgtcggctgatacccaaatcccaccagctaaggtgcagaagacggagagatctcacgaggaaaaccaagaaagggcatatatcgcggcctcgaggagagccgataggagtcttgaagccagggttcagtcagctaagatggcttctgagatacatcggagacgaacaggaagaggtctcaaggttagcgaagagattgttctcaaagaagagatgtacgaagaggaggaagatgacttgccacggtcttataggcagttgacggcacacctgcagactaactcgcccgagatgaattcgcgatttagcgcctacgtatcgacacaaaccgcattggccaccatgcagcgctacaacgaggtaaatcgcctattccgggatgcattctcaccctctgccgtcgcctatcagcagcaactcaacaattcggtgtacatggctcctctattcaacaacggcataccctcaccatcaagcagcagaaactcggtgtctgctgcacagccccagtttgatggtgcaggtaggaagccttcaacaaacccgcagtcaaaccgcactgatagcactgccacaattgcgtcaatcgcaacgccgcccgcagtacccagcccgatacctacatccatagatcctccagatgccaagggaaaatcggcgtttcacatacctgaagccggtttaccgaacataccattggacccccagctacgccagcagcctaccagtagcttcacgtctgaactcccaaacgagatcaagatgctgggtaatttcgacatgagcgaccctttagccatccatttcttcggcgaagcatcaccggcgttgcagatgttgaacgagcagggagatatgcccgagtgggatgatgttcatgctggcctcacggaactgcacagcccagcgaatcaacatagtcacgacgatcaattgtatttttcgccagtcgaaaattctgtggatcacttcgactccctaccttcggaggcgttcgataacaccgatgcggcaactggaggatatgacgattgggaaacctggcttgacttagattcaaacgccccagtgtctggctag

SEQ ID NO: 25709 - protein, 359 aa, Muscodor strobelii
  misc_feature: SGI Peptide ID NO. 568776
  misc_feature (9)..(263): NCBI GI: 46125323 Blast Desc: FG07039.1 [Gibberella zeae PH-1]
  misc_feature (8)..(133): NCBI GI: 256732599 Blast Desc: NECHADRAFT_100020 [Nectria haematococca mpVI 77-13-4]
  misc_feature (17)..(129): NCBI GI: 85094956 Blast Desc: NCU06125 [Neurospora crassa OR74A] gi|28921445|gb|EAA30751.1| NCU06125 [Neurospora crassa OR74A]
  misc_feature (46)..(270): NCBI GI: 261358969 Blast Desc: conserved [Verticillium albo-atrum VaMs.102]
  misc_feature (15)..(129): NCBI GI: 256729523 Blast Desc: expressed protein [Nectria haematococca mpVI 77-13-4]
  misc_feature (14)..(115): NCBI GI: 169622549 Blast Desc: SNOG_14499 [Phaeosphaeria nodorum SN15] gi|160704797|gb|EAT78039.2| SNOG_14499 [Phaeosphaeria nodorum SN15]
  misc_feature (12)..(213): NCBI GI: 242766860 Blast Desc: conserved [Talaromyces stipitatus ATCC 10500] gi|218724450|gb|EED23867.1| conserved [Talaromyces stipitatus ATCC 10500]
  misc_feature (12)..(209): NCBI GI: 145255628 Blast Desc: An18g05730 [Aspergillus niger] gi|134084616|emb|CAK97492.1| [Aspergillus niger]
  misc_feature (12)..(102): NCBI GI: 115389254 Blast Desc: [Aspergillus terreus NIH2624] gi|114194528|gb|EAU36228.1| [Aspergillus terreus NIH2624]
  misc_feature (21)..(202): NCBI GI: 154278477 Blast Desc: [Ajellomyces capsulatus NAm1] gi|150413637|gb|EDN09020.1| [Ajellomyces capsulatus NAm1]
MSADTQIPPAKVQKTERSHEENQERAYIAASRRADRSLEARVQSAKMASEIHRRRTGRGLKVSEEIVLKEEMYEEEEDDLPRSYRQLTAHLQTNSPEMNSRFSAYVSTQTALATMQRYNEVNRLFRDAFSPSAVAYQQQLNNSVYMAPLFNNGIPSPSSSRNSVSAAQPQFDGAGRKPSTNPQSNRTDSTATIASIATPPAVPSPIPTSIDPPDAKGKSAFHIPEAGLPNIPLDPQLRQQPTSSFTSELPNEIKMLGNFDMSDPLAIHFFGEASPALQMLNEQGDMPEWDDVHAGLTELHSPANQHSHDDQLYFSPVENSVDHFDSLPSEAFDNTDAATGGYDDWETWLDLDSNAPVSG

SEQ ID NO: 25710 - DNA, 2478 bp, Muscodor strobelii; identical to SEQ ID NO: 25707
  misc_feature: SGI EST ID NO. CUFF.60597.0
  misc_feature: Variant of the nucleotide sequence at SEQ ID NO 25708

SEQ ID NO: 25711 - DNA, 1260 bp, Muscodor strobelii
  misc_feature: SGI cDNA ID NO. 568777
  misc_feature: Encodes the peptide sequence at SEQ ID NO 25712
atgtggctcaagtccctcaagcaccggaagaagcacgagcacgacgaggaagaggggagacttactaataaatcacccctgaacggtggaaatgtagtagtctgggataaatctaacaacgattatgcaaacgacaccttgatcacagcagaaggcgctctggtggtgcccagcggaacggcgacaaaacgtcttcagaaaacacttcaatatgacaccgaatacgcagtatggcgcgaaccattcggagacaaaactagaatgccgccttgcgaaactgcgctagagtaccgacagtataacaacacgttcatgagagctgtctggtctatgctgccgcctcagccaagtatcaagcgcgttcgatacgatgacatcgtctcccacgacggcgcaacaataagcgtgacacgcttcgcgactgccgagcaacttagtccaacaccacccgagagaacgtcctcgatcttgcgcaatgatagcggtgcaggcgcgccggcactactttatgcgcacggcggtggtatggtagcagtctccgtcgacattttcgcaccgcacctcgcgacactcgccgcgaactccggagtccaagtcttcggtatcgagtatcgccttgcacctgaacatcctgctcctacgccggtcgaggactgctatgcggcactcgtatggctacatgcgcatgctgctgagcttgggctcgaccgcgctcgcatcggcattatgggagacagtgccggaggcggtttagcagctgctactgcgttgttggcgagagataggggtctaaatccaccgctgaagtcccaggttcttgtataccctatgcttgatgatcgagctgctacaaacttggttgccggcggtcggtcgggtacagctcatgggggtgagactgtacatcgacatgagtcgcctcttcttggcttcgcgacagtgccgctacagagtgtgaggatgtgctggcgcgcgtaccttgggcttggagcgggacagagtaatgctgagatcagtccctatgctgcgccgggacgggcttcagatctgagggggttgccggcgacttatatcgatgttggaggtttggatctgtttagggatgagagtttagaatttgtgcggaaacttgtcgcggctgatgtccaggttgagttccatctcctacctggcgtgccgcacggttttgagtctgcgagtgagattggggttacgaggagtgctgttgaggggaggatgagatggattaggggtttgtga

SEQ ID NO: 25712 - protein, 419 aa, Muscodor strobelii
  misc_feature: SGI Peptide ID NO. 568777
  misc_feature (168)..(398): Pfam Id: PF07859 Pfam Desc: alpha/beta hydrolase fold
  misc_feature (65)..(419): NCBI GI: 256720381 Blast Desc: NECHADRAFT_56005 [Nectria haematococca mpVI 77-13-4]
  misc_feature (69)..(417): NCBI GI: 256723044 Blast Desc: NECHADRAFT_42631 [Nectria haematococca mpVI 77-13-4]
  misc_feature (68)..(397): NCBI GI: 256725631 Blast Desc: NECHADRAFT_43364 [Nectria haematococca mpVI 77-13-4]
  misc_feature (107)..(419): NCBI GI: 115384184 Blast Desc: [Aspergillus terreus NIH2624] gi|114196331|gb|EAU38031.1| [Aspergillus terreus NIH2624]
  misc_feature (69)..(419): NCBI GI: 71001912 Blast Desc: arylesterase/monoxygenase [Aspergillus fumigatus Af293] gi|66853275|gb|EAL93599.1| arylesterase/monoxygenase [Aspergillus fumigatus Af293] gi|159129694|gb|EDP54808.1| A1163]
  misc_feature (69)..(419): NCBI GI: 119481471 Blast Desc: arylesterase/monoxygenase [Neosartorya fischeri NRRL 181] gi|119408918|gb|EAW18867.1| arylesterase/monoxygenase [Neosartorya fischeri NRRL 181]
  misc_feature (68)..(419): NCBI GI: 121715942 Blast Desc: arylesterase/monoxygenase [Aspergillus clavatus NRRL 1] gi|119403737|gb|EAW14154.1| arylesterase/monoxygenase [Aspergillus clavatus NRRL 1]
  misc_feature (70)..(419): NCBI GI: 85091131 Blast Desc: NCU09409 [Neurospora crassa OR74A] gi|28920135|gb|EAA29516.1| conserved [Neurospora crassa OR74A]
  misc_feature (69)..(419): NCBI GI: 46115000 Blast Desc: FG03342.1 [Gibberella zeae PH-1]
  misc_feature (69)..(397): NCBI GI: 46111155 Blast Desc: FG02459.1 [Gibberella zeae PH-1]
  misc_feature (126)..(396): SWISSPROT Homolog: EC 3.1.1.3 Triacylglycerol lipase
MWLKSLKHRKKHEHDEEEGRLTNKSPLNGGNVVVWDKSNNDYANDTLITAEGALVVPSGTATKRLQKTLQYDTEYAVWREPFGDKTRMPPCETALEYRQYNNTFMRAVWSMLPPQPSIKRVRYDDIVSHDGATISVTRFATAEQLSPTPPERTSSILRNDSGAGAPALLYAHGGGMVAVSVDIFAPHLATLAANSGVQVFGIEYRLAPEHPAPTPVEDCYAALVWLHAHAAELGLDRARIGIMGDSAGGGLAAATALLARDRGLNPPLKSQVLVYPMLDDRAATNLVAGGRSGTAHGGETVHRHESPLLGFATVPLQSVRMCWRAYLGLGAGQSNAEISPYAAPGRASDLRGLPATYIDVGGLDLFRDESLEFVRKLVAADVQVEFHLLPGVPHGFESASEIGVTRSAVEGRMRWIRGL

SEQ ID NO: 25713 - DNA, 929 bp, Muscodor strobelii
  misc_feature: SGI EST ID NO. CUFF.60620.0
  misc_feature: Variant of the nucleotide sequence at SEQ ID NO 25711
gcggtgcattataacactacatctcacgcagcagcaaggggtttgaagggtgaagactggtgtaggagactcgcgatggagggacccccacgatcctttccaatataagtgacaaaaggaagtagacgtactgttattaagaacttagatgtgtgaaacaccaagcggcatgcttgatataagggtgtaaagccggcctaagtgcgtgtatcctcaatattgagtcacatagcgcaagcgcacacacgctcgtacaggaagactctccatgttggctcgatattcgatcagtgttgagcgtgagaaaagatatagagtttctgagtgtttcactgagcttggtcaccgtcggatcattacaccagcatcatgacaatgtggctcaagtccctcaagcaccggaagaagcacgagcacgacgaggaagaggggagacttactaataaatcacccctgaacggtggaaatgtagtagtctgggataaatctaacaacgattatgcaaacgacaccttgatcacagcagaaggcgctctggtggtgcccagcggaacggcgacaaaacgtcttcagaaaacacttcaatatgacaccgaatacgcagtatggcgcgaaccattcggagacaaaactagaatgccgccttgcgaaactgcgctagagtaccgacagtataacaacacgttcatgagagctgtctggtctatgctgccgcctcagccaagtatcaagcgcgttcgatacgatgacatcgtctcccacgacggcgcaacaataagcgtgacacgcttcgcgactgccgagcaacttagtccaacaccacccgagagaacgtcctcgatcttgcgcaatgatagcggtgcaggcgcgccggcactactttatgcgcacggcggtggtatggtagcagtctccgtcgacattttcgc

SEQ ID NO: 25714 - DNA, 1563 bp, Muscodor strobelii
  misc_feature: SGI cDNA ID NO. 568778
  misc_feature: Encodes the peptide sequence at SEQ ID NO 25715
atgtacacgatctcttgcgcggccctcttaggacttggagctactctggctacagcacaagcgacgaattcttcaacgccatggcctcatcaaacattcaagtcggaacccgcattccagcctccggtgtggaagacgacccggggacagggcactcctgctgatggctatattttctatgcgccagctggtaataccctcgatccagcgccgctgatcgtgacgaacgatggcgaccttgtctggcatggaccctacgcagcaggtttcgcgaactcggtgtgggaatataagggccagccggtcctggcatactggaatggtactggattcgcagaaccaattggtcgaggatatggctatgtcgtgttactagaccaatcatacaatctcgtagccaatgtcaccctcccaggcaacttcgttacatcagagggcctgactttcgatacgaatatcgacttgcatgagatttatatcactaaccgcggaactatgttggtaacggccaacaatgtcacgcaagcagacttgagttctgtcggtggccctcccgatggttgggtggtagacgctcagttccacgagattgacatcgagacgaacgagattctctttagctggagctctgtgaagcacgctgatagcaaaattccgttcaccgattcggtctacactattgggactgatgggttgaccggacagagtcaaagtactgcctggggatacttccatatcaatgctgttgcgccgtacaatgatggctacataatatcctcgcgctttatgtgttcagaataccacattgactctcaaggcacggttgcttggcgccttggtggcgtcgacggaggcgacttcacgaaagggccagatacagatttctgctatcaacatgatattcggccggtctatagtgatgttaacaactacacagttcctaagaatgcaactttgcatctttttgataacgccaattgccaatcagacaatgggactacgccaacttctgggttgatccttgaaatcgatacggaggaaatgcacgtccaacgggtccaacggtacatgaaccccgacaaggagttgtacgctgttgcccaggggtctttccaagtcttgcaaggtccaggcagccaaaacaacgtgctcgctggctatggcttcatcccttatatccaggaattcacgcccgatggtcgtagtgtgcaggtgatacaattcggcgcgtcaatatcaactccgctctcgtatcgtgcgtttaaggagtcatggactggatgccccacgaccaggccggcggtcgtagtagagaaaggatcaggtagcaaatcaaacgtttatgtaagttggaatggggcgacggatgttgtctcgtggaaagtgcttggtggtgataagaatggaaatttacacgtcctaaaccaggctcctagcactgggtttgagaccaggattactgtcccgacgacagcggaggttcaagttcaagctgttttaaagaatggaagcgcctgcaagatgagctgtggagctggcgtttcgagtttgattgaagtctag

SEQ ID NO: 25715 - protein, 520 aa, Muscodor strobelii
  misc_feature: SGI Peptide ID NO. 568778
  misc_feature (8)..(507): NCBI GI: 121713570 Blast Desc: conserved [Aspergillus clavatus NRRL 1] gi|119402549|gb|EAW12970.1| conserved [Aspergillus clavatus NRRL 1]
  misc_feature (10)..(486): NCBI GI: 169775373 Blast Desc: [Aspergillus oryzae RIB40] gi|83770017|dbj|BAE60152.1| protein product [Aspergillus oryzae]
  misc_feature (10)..(486): NCBI GI: 238495979 Blast Desc: conserved [Aspergillus flavus NRRL3357] gi|220694105|gb|EED50449.1| conserved [Aspergillus flavus NRRL3357]
  misc_feature (4)..(500): NCBI GI: 119173205 Blast Desc: CIMG_10119 [Coccidioides immitis RS]
  misc_feature (1)..(500): NCBI GI: 240111777 Blast Desc: CPC735_012400 [Coccidioides posadasii C735 delta SOWgp]
  misc_feature (7)..(498): NCBI GI: 255950132 Blast Desc: Pc22g19300 [Penicillium chrysogenum Wisconsin 54-1255] gi|211592850|emb|CAP99218.1| Pc22g19300 [Penicillium chrysogenum Wisconsin 54-1255]
  misc_feature (10)..(507): NCBI GI: 115443062 Blast Desc: [Aspergillus terreus NIH2624] gi|114188207|gb|EAU29907.1| [Aspergillus terreus NIH2624]
  misc_feature (19)..(488): NCBI GI: 145254530 Blast Desc: An18g01950 [Aspergillus niger] gi|134084235|emb|CAK47267.1| protein product [Aspergillus niger]
  misc_feature (8)..(488): NCBI GI: 255931075 Blast Desc: Pc12g02000 [Penicillium chrysogenum Wisconsin 54-1255] gi|211581713|emb|CAP79827.1| Pc12g02000 [Penicillium chrysogenum Wisconsin 54-1255]
  misc_feature (10)..(499): NCBI GI: 238838999 Blast Desc: conserved [Microsporum canis CBS 113480]
MYTISCAALLGLGATLATAQATNSSTPWPHQTFKSEPAFQPPVWKTTRGQGTPADGYIFYAPAGNTLDPAPLIVTNDGDLVWHGPYAAGFANSVWEYKGQPVLAYWNGTGFAEPIGRGYGYVVLLDQSYNLVANVTLPGNFVTSEGLTFDTNIDLHEIYITNRGTMLVTANNVTQADLSSVGGPPDGWVVDAQFHEIDIETNEILFSWSSVKHADSKIPFTDSVYTIGTDGLTGQSQSTAWGYFHINAVAPYNDGYIISSRFMCSEYHIDSQGTVAWRLGGVDGGDFTKGPDTDFCYQHDIRPVYSDVNNYTVPKNATLHLFDNANCQSDNGTTPTSGLILEIDTEEMHVQRVQRYMNPDKELYAVAQGSFQVLQGPGSQNNVLAGYGFIPYIQEFTPDGRSVQVIQFGASISTPLSYRAFKESWTGCPTTRPAVVVEKGSGSKSNVYVSWNGATDVVSWKVLGGDKNGNLHVLNQAPSTGFETRITVPTTAEVQVQAVLKNGSACKMSCGAGVSSLIEV

SEQ ID NO: 25716 - DNA, 918 bp, Muscodor strobelii
  misc_feature: SGI cDNA ID NO. 568779
  misc_feature: Elevated expression when VOC is produced
  misc_feature: Encodes the peptide sequence at SEQ ID NO 25717
atgcttttcgtagatattctggccggggccggcccgggcactttcaacatcaccgagatagttgcaaatatcgatcacggaagcattgaatggggtcatgatttactcaaggccgtctaccgccagaacattttcttcggattcgcgatcaccttcgtcaaattgtctatcctattcttctacaacgatctcttctcgatttcaaagacattccaaaagtggaacttcgcggtagcaggtctatgcatcatctggttcttcgttactacagggctcttcgcattccagtgcagacctgtcagcgcgttctgggagaagcttgcgtccgaagaagtatgcattcccacagataagatctgggaggggtacgaggttaccaatctctttctcgatatttcaattctcgtcctccccactgttatgatttatcaactccggcttccgacggcaaagaagtggtctgtttctggtatctttctactcggtagtctagtgtgtgttgccagtatagtgcgattggctctgatctttcacccgacagagaacagcaatgtcaagaacatctctaatctcgtcctcaccgcttcgatccaactaggacttgcaacgctctgtgcatgtctccctacttattctccgcttattggtatgtgccggcggggcgctacgagactttcggaatcaaagagcatgcaggaaacaacgaaagactctgcgacgaataagtctcaatctaagcggttcaccagcgacacaagcaaaagccgagatctcgagatcgcgccgtattaccgcgtcgatgttgagtcacgctcgcaggattcatttcctttgcattctatcatggtagagaagagcgtagatgtggataggagtcaaacgagctggtacatagccaaagatagcgagagtatgtag

SEQ ID NO: 25717 - protein, 305 aa, Muscodor strobelii
  misc_feature: SGI Peptide ID NO. 568779
  misc_feature (1)..(290): NCBI GI: 145250869 Blast Desc: An15g04130 [Aspergillus niger] gi|134082472|emb|CAK97280.1| protein product [Aspergillus niger]
  misc_feature (37)..(289): NCBI GI: 156040850 Blast Desc: SS1G_11403 [Sclerotinia sclerotiorum 1980] gi|154695787|gb|EDN95525.1| SS1G_11403 [Sclerotinia sclerotiorum 1980]
  misc_feature (36)..(293): NCBI GI: 156059168 Blast Desc: SS1G_03596 [Sclerotinia sclerotiorum 1980] gi|154701383|gb|EDO01122.1| SS1G_03596 [Sclerotinia sclerotiorum 1980]
  misc_feature (49)..(258): NCBI GI: 189195358 Blast Desc: [Pyrenophora tritici-repentis Pt-1C-BFP] gi|187979896|gb|EDU46522.1| [Pyrenophora tritici-repentis Pt-1C-BFP]
  misc_feature (46)..(301): NCBI GI: 256723915 Blast Desc: NECHADRAFT_37170 [Nectria haematococca mpVI 77-13-4]
  misc_feature (28)..(256): NCBI GI: 256727151 Blast Desc: NECHADRAFT_76849 [Nectria haematococca mpVI 77-13-4]
  misc_feature (34)..(275): NCBI GI: 46102717 Blast Desc: FG00057.1 [Gibberella zeae PH-1]
  misc_feature (36)..(256): NCBI GI: 156032776 Blast Desc: SS1G_13793 [Sclerotinia sclerotiorum 1980] gi|154699196|gb|EDN98934.1| SS1G_13793 [Sclerotinia sclerotiorum 1980]
  misc_feature (9)..(245): NCBI GI: 238502239 Blast Desc: conserved [Aspergillus flavus NRRL3357] gi|220691163|gb|EED47511.1| conserved [Aspergillus flavus NRRL3357]
  misc_feature (53)..(270): NCBI GI: 212533581 Blast Desc: integral membrane protein [Penicillium marneffei ATCC 18224] gi|210072311|gb|EEA26400.1| integral membrane protein [Penicillium marneffei ATCC 18224]
  misc_feature: Useful for introducing or modulating the production of volatile compounds
MLFVDILAGAGPGTFNITEIVANIDHGSIEWGHDLLKAVYRQNIFFGFAITFVKLSILFFYNDLFSISKTFQKWNFAVAGLCIIWFFVTTGLFAFQCRPVSAFWEKLASEEVCIPTDKIWEGYEVTNLFLDISILVLPTVMIYQLRLPTAKKWSVSGIFLLGSLVCVASIVRLALIFHPTENSNVKNISNLVLTASIQLGLATLCACLPTYSPLIGMCRRGATRLSESKSMQETTKDSATNKSQSKRFTSDTSKSRDLEIAPYYRVDVESRSQDSFPLHSIMVEKSVDVDRSQTSWYIAKDSESM

SEQ ID NO: 25718 - DNA, 1619 bp, Muscodor strobelii
  misc_feature: SGI EST ID NO. CUFF.60651.0
  misc_feature: Variant of the nucleotide sequence at SEQ ID NO 25716
actggatacagtaatctcggtatgcactccaacgtcaacattcgagaccaatatgcagacacccgcaccaataaactgctaaaaacaacaagcgggatgctcctctggagctttgtagtagtgatggccacaatcgatgtcaaggatgtgattcctgtgcaatgtcgtcttaacttactcctttggaacggcccgcgcctgatgccttacacgcatggcgcttctcgcttattctatactaccttctcccgagataaccacccccagaaatggccatttctcctttcatactttgcaagagacttatctctttcttttgaccctatactcttaaaagacctttcctcttctcaacttcgtgtcataggcggtgatcccgcaaagtacaggcaccggctgccgtcatatggcgggcgcttatcgccacctcgatcaaatacgtcaatatgaaatcccttagtgtatctggggtcagcaacctatgggtcgcggggtcaatgttggttctctcagttcttgcggttgcgcttcgggttttcgtgcggttcaaagcaggactcgcgcatacttggtcggactatttgatatggttatcgttaacaatgaccattgcatggtctgcctcgatcatgcagtatattctggccggggccggcccgggcactttcaacatcaccgagatagttgcaaatatcgatcacggaagcattgaatggggtcatgatttactcaaggccgtctaccgccagaacattttcttcggattcgcgatcaccttcgtcaaattgtctatcctattcttctacaacgatctcttctcgatttcaaagacattccaaaagtggaacttcgcggtagcaggtctatgcatcatctggttcttcgttactacagggctcttcgcattccagtgcagacctgtcagcgcgttctgggagaagcttgcgtccgaagaagtatgcattcccacagataagatctgggaggggtacgaggttaccaatctctttctcgatatttcaattctcgtcctccccactgttatgatttatcaactccggcttccgacggcaaagaagtggtctgtttctggtatctttctactcggtagtctagtgtgtgttgccagtatagtgcgattggctctgatctttcacccgacagagaacagcaatgtcaagaacatctctaatctcgtcctcaccgcttcgatccaactaggacttgcaacgctctgtgcatgtctccctacttattctccgcttattggtatgtgccggcggggcgctacgagactttcggaatcaaagagcatgcaggaaacaacgaaagactctgcgacgaataagtctcaatctaagcggttcaccagcgacacaagcaaaagccgagatctcgagatcgcgccgtattaccgcgtcgatggtgatttgacatggcaccctcatcgaacgctaataactggcaattcagttgagtcacgctcgcaggattcatttcctttgcattctatcatggtagagaagagcgtagatgtggataggagtcaaacgagctggtacatagccaaagatagcgagagtatgtagactcgtgtagaaactcaattgaaggcagag

SEQ ID NO: 25719 - DNA, 636 bp, Muscodor strobelii
  misc_feature: SGI cDNA ID NO. 568780
  misc_feature: Encodes the peptide sequence at SEQ ID NO 25720
atgcgcattcgcgtgccattcgcagtcggcttcgtggtgctctgcctcctcgcggcttatgtcggcctctcgtccctcaacctcgaccacatcgtcaacgacaaagtcctgcacgtcctcgtcttctttaccatcaccttcgtcttctactgggtcatcgacacctcccgccgccgcatcctcaacctaaccctcgctgtctgcaccctcggtcttggtgtcggctccgagtttctgcaggcctggctgcccaacggccgcaacttcgatttatacgacatcatcggcaacgttgttggtagtcttggtgccattgcgctatgctcatggtaccatctacgcatgctcgagcgcaaacgccagcgccgatatagtaccgtcccaggtgaggagcctgatgatgtggagttggggctctcaagtgagataattgaccaagaggaaggtatcttggcgcccgagtctgctcaccaccgctctctagaagatgaagtcgacaactgggatgagaatgccgtcgacaactgggacgaagacgacgagcccgagggcgatataggcgcctccggtaaatcagcggctgtcgaacagaacggagagggctcaaagggcaccgacaagaaacgagccgattaa

SEQ ID NO: 25720 - protein, 211 aa, Muscodor strobelii
  misc_feature: SGI Peptide ID NO. 568780
  misc_feature (9)..(118): Pfam Id: PF04892 Pfam Desc: VanZ like family
  misc_feature (26)..(118): Pfam Id: PF04892 Pfam Desc: VanZ like family
  misc_feature (1)..(206): NCBI GI: 256732935 Blast Desc: NECHADRAFT_78725 [Nectria haematococca mpVI 77-13-4]
  misc_feature (1)..(211): NCBI GI: 169770673 Blast Desc: [Aspergillus oryzae RIB40] gi|238486878|ref|XP_002374677.1| VanZ domain protein, [Aspergillus flavus NRRL3357] gi|83767665|dbj|BAE57804.1| protein
  misc_feature (1)..(194): NCBI GI: 67537450 Blast Desc: AN4895.2 [Aspergillus nidulans FGSC A4] gi|40741783|gb|EAA60973.1| AN4895.2 [Aspergillus nidulans FGSC A4] gi|259482239|tpe|CBF76530.1| TPA: VanZ domain protein, FGSC
  misc_feature (1)..(206): NCBI GI: 119491731 Blast Desc: VanZ domain protein, [Neosartorya fischeri NRRL 181] gi|119411520|gb|EAW21463.1| VanZ domain protein, [Neosartorya fischeri NRRL 181]
  misc_feature (1)..(211): NCBI GI: 46123829 Blast Desc: FG06292.1 [Gibberella zeae PH-1]
  misc_feature (1)..(209): NCBI GI: 239607077 Blast Desc: VanZ domain-containing protein [Ajellomyces dermatitidis ER-3]
  misc_feature (1)..(208): NCBI GI: 156039387 Blast Desc: SS1G_11830 [Sclerotinia sclerotiorum 1980] gi|154697567|gb|EDN97305.1| SS1G_11830 [Sclerotinia sclerotiorum 1980]
  misc_feature (1)..(190): NCBI GI: 240108171 Blast Desc: CPC735_005170 [Coccidioides posadasii C735 delta SOWgp]
  misc_feature (1)..(190): NCBI GI: 119187503 Blast Desc: CIMG_03799 [Coccidioides immitis RS]
  misc_feature (1)..(211): NCBI GI: 154294303 Blast Desc: BC1G_13924 [Botryotinia fuckeliana B05.10] gi|150844763|gb|EDN19956.1| BC1G_13924 [Botryotinia fuckeliana B05.10]
MRIRVPFAVGFVVLCLLAAYVGLSSLNLDHIVNDKVLHVLVFFTITFVFYWVIDTSRRRILNLTLAVCTLGLGVGSEFLQAWLPNGRNFDLYDIIGNVVGSLGAIALCSWYHLRMLERKRQRRYSTVPGEEPDDVELGLSSEIIDQEEGILAPESAHHRSLEDEVDNWDENAVDNWDEDDEPEGDIGASGKSAAVEQNGEGSKGTDKKRAD

SEQ ID NO: 25721 - DNA, 1490 bp, Muscodor strobelii
  misc_feature: SGI EST ID NO. CUFF.60675.0
  misc_feature: Variant of the nucleotide sequence at SEQ ID NO 25719
gccgagacctgccaagacctttattgggggaggcttgggagcgtggagctgtgacgcatccccaccgtcgcagcacagcgcagctcagcgggaagttgctgtcgtcgctgggactggagctctccgagcttccttccgttgattccagcttcccgtcgttacctccagcctcgccgatttattccccaactttttttcaaaaacacaccaaaccaacgacaaaacaacaacaagtcttgcgccgccctcctctctccctttttaaacacactgacatcgccgcttttattctctctgatacctgtcatcccacgtaccacctcgttgttccgccggatcatgcctgcctagcgaacctcgacatctgtcctgttccctagagatttacaacgagtgaccatgcgcattcgcgtgccattcgcagtcggcttcgtggtgctctgcctcctcgcggcttatgtcggcctctcgtccctcaacctcgaccacatcgtcaacgacaaagtcctgcacgtcctcgtcttctttaccatcaccttcgtcttctactgggtcatcgacacctcccgccgccgcatcctcaacctaaccctcgctgtctgcaccctcggtcttggtgtcggctccgagtttctgcaggcctggctgcccaacggccgcaacttcgatttatacgacatcatcggcaacgttgttggtagtcttggtgccattgcgctatgctcatggtaccatctacgcatgctcgagcgcaaacgccagcgccgatatagtaccgtcccaggtgaggagcctgatgatgtggagttggggctctcaagtgagataattgaccaagaggaaggtatcttggcgcccgagtctgctcaccaccgctctctagaagatgaagtcgacaactgggatgagaatgccgtcgacaactgggacgaagacgacgagcccgagggcgatataggcgcctccggtaaatcagcggctgtcgaacagaacggagagggctcaaagggcaccgacaagaaacgagccgattaagatcccattttcttggctattgcaacaccgatgttttaagctcacagcaaatcacggatagaagagacagagtgtgtgcctgcatgtgggcgaaatcttacggatgaatggatgagcatggcttggcttggcttttggacgtttagctgcatctcgtctaaaggcgttagggaattctgatttttgacatggcaaaggaagggaatctgggggcgaaaaagctcattcttgcaaaaactactgcacgatctgtaccaccaaaatgagcgacgactttcacgcccctgaatacaaatcgactgagaatagctatcgtctgccactgcaggacgatcaatggtagatatgctggcatcgatgtgcaaactatgttctcattctcgcaaaagttcgtgtgtataaccctgaataagccagttgtctttgactctatactagtggacgggatagagcag

SEQ ID NO: 25722 - DNA, 3408 bp, Muscodor strobelii
  misc_feature: SGI cDNA ID NO. 568781
  misc_feature: Encodes the peptide sequence at SEQ ID NO 25723
atgtccctcgtgaacggccagcccgcctggccccctcccctgccgcacagctcctccgccatcaacggcaccccctcgcgctctttccgctcgcaagacgatgcccccgccgagatgcacgacggcgctgatcccgccggcggcttggtgcctgaggccaccgacctcgaggaggagcgccgacgcgccgagctcgccgactcctatcggcgcaccgagcagcgcatcgccgacatgttcaacgaggatggctcctacaactacgacgccatcaactcctggcgccgtcccccgagcccctccgcctccctgccgcccaccaccgatcacgcgcccatcgaggagcgccccgccaagagggtcaagagggtcatcgacgaagacgactacggcgacgatgatgatgacgaggaggatgaagacgatgacctccaacaccaaagccattccggccccatctcctccggcagctcccccgtcccttccatcccatccccagacaagtccaaagaagatggctcgcaagcatcgcagggctcccagaaccagaccagtgcctccgtcgatgcgcgcaagcagctcgaggacgcccgcaaggacaccgaggagacggccaagcgcagctttcataccctcttttacactctagagaacgaccgcactgctatgttggagcagcagcaattggaagtgtctgaaaaggccctacaggatgaaatggacaagaacagcaacaacaccaccgccggaggagccagtggagaaaaccatggctcgctcagcagtgccaacctcggcgcatctagccttaccctgaaacatcttattgcgcgcatcgatatgaagcgcgatcaagtgcgcgcctccgatgccgagttgcgctcgctcatgaacgaagtcagaaagaatcggagcaagtgggccagcgaagagaacgtcaaccaggaagaactttacgaagccctagagaaggtcttgactgagctcaaggcgcacaccgagtactccacaccgtttcttcagagggtcaataagagagatgctccggattattacaactttatcaaacagccaatggacctaggcactatgactaagaagctaaagcagttgcaatacaagtccaaggccgacttcgtccaggatcttaacctaatatgggacaactgtctccgatacaaccaagagatgacaaacccgctccggcgaatggctaatggcatgcgcaaggaagcggagaagttaattcctctgatccccgagctgaccgtccggcctcgtgctgaggtggaagcagaggagcgacggaaacagaatggtggtgaagacgatggcggtgacgacagtgacgacgagccgataatgacgtctcgcggccgtgttgccggtgctggtactaagagtactaagtcgaggaaggctcctaatgatcagaaggaggggacacctaatgtcgatcagaagcccgtattacagctaaacggtctactcgccaaacaagggcgggagggttctgaacttgacggtagtaatggttttgggacgccacttatgggcggctcgatgactccaaacggtcttaacgggcattcaggaatggggagtaatgtggatgccatggacttggatgatccatccatcaacggtttctccttgggccaagccttgaacaatgcagagcagcaggtctatgaggatgaagagtacaagatttggaaacaggtcaccaagaaggaccgcgcccttgtcacgaaagaaaggtttcagcttttcgacggtaacaagcttaatgttgaccagcctgcactcttgcggaccagagccggcatgcggcgattccttcggtctcggcagcaggcgactcaagtcggtctgggcggatttatcgagggcgaagcttctgcggcttctgcgaaagagtctgccaaagcaaccgagacattggccgagggtatggaagaagaggaagagagagtactaccagcctactacgagccccagaccacggtgctcgatatgccaactcgtctccagtggatcgaggattccgagggccaagtcatcaaccagcacgaagaattcctccgagctctccctccaggctacttcacggctccaaaaagccttctcagtcagaagtttgatgcgaatctgcgccagatgcaagagacccggaagctctgttccaaaataggggtcatcaaacagatgcagcttcagacacagatctacaccaaccaatttcccaagtataatcctgaccccttccacgaagccgacatcgagccgcatgtcgtatgcggtgatgatctggtcatggccccagaagtctgccgcgctgctctacaacgatccgtggcaaaactcttctaccatgccggcttcgaagaatatcagccgtcggcgctggatgccatcacggacattgcagctgatttctttgggaagatggttcagactttcaagacttatacagaaactgagaagcaagatttcgtatccgtcgccgatggtggtgccattactattcaaccccggtatacggacgagcaggtcatgctacatactctggctgagaacgggtactctgtagacgccctagaaagctacgccaaggacgaagtagatcgactgggcaacaaactgagcggcatccacgagcgcatgaagatccacctcactgaccttgtgcgacctgccgttgctgataatggcggcgcggacggtgcaggtgcgttcagggacgacagcgaacagtgggtcggaggaaactttgccgaggatgttggcgaggactacttcggcttcaaagagctcggtctttccgaagagcttggtggcatgctgtccgtgcctctgcatctgttgcagtctagagtccgcagccattaccaagctcagaaccaaacgcaaggcgtgggaccgaccgacgcagccttgtttgaggatctgtcagaccctgaccctgtcaccaaggaaaacatccaagaacaagtcggccttgtcaagaacttcttcctcgcgaaactgcacgctaatggcgacacaccgttggtggaagataaagacctgcccgtcaagcaacgaagacctcaaccccgacttggagccacaggaaagatcgtatcgcctcagaaacggcctcccaaagaacagaacgctatcaacaagaaaaagaagaagctggagcagcaggccgccgaggccaagaagctcaaggctgaagctgaaaagtctgctgccatgaagaagagcaattcgctaccgaacggagctgtctctacgaattcgtcttttgcagtcgctccgcccatggaacggatggagagtatgcagagtcaggggggcaacagccaaactgacaaggacgacacgggcatgatgagccccgaaagcatcgagcgctag

SEQ ID NO: 25723 - protein, 1135 aa, Muscodor strobelii
  misc_feature: SGI Peptide ID NO. 568781
  misc_feature (318)..(406): Pfam Id: PF00439 Pfam Desc: Bromodomain
  misc_feature (775)..(813): Pfam Id: PF07524 Pfam Desc: Bromodomain associated
  misc_feature (318)..(396): Pfam Id: PF00439 Pfam Desc: Bromodomain
  misc_feature (1)..(1135): NCBI GI: 85094611 Blast Desc: NCU02276 [Neurospora crassa OR74A] gi|28921377|gb|EAA30684.1| NCU02276 [Neurospora crassa OR74A] gi|40804611|emb|CAF05871.1| related to transcription regulator
  misc_feature (1)..(1134): NCBI GI: 116203553 Blast Desc: CHGG_09660 [Chaetomium globosum CBS 148.51] gi|88175788|gb|EAQ83256.1| CHGG_09660 [Chaetomium globosum CBS 148.51]
  misc_feature (1)..(1063): NCBI GI: 171679539 Blast Desc: protein product [Podospora anserina] gi|170939395|emb|CAP64623.1| protein product [Podospora anserina]
  misc_feature (1)..(1133): NCBI GI: 256732480 Blast Desc: SAGA complex protein [Nectria haematococca mpVI 77-13-4]
  misc_feature (1)..(1133): NCBI GI: 46123827 Blast Desc: FG06291.1 [Gibberella zeae PH-1]
  misc_feature (1)..(1132): NCBI GI: 145610761 Blast Desc: MGG_00924 [Magnaporthe grisea 70-15] gi|145018127|gb|EDK02406.1| MGG_00924 [Magnaporthe grisea 70-15]
  misc_feature (1)..(967): NCBI GI: 261355053 Blast Desc: bromodomain-containing protein [Verticillium albo-atrum VaMs.102]
  misc_feature (57)..(1133): NCBI GI: 154294301 Blast Desc: BC1G_13923 [Botryotinia fuckeliana B05.10] gi|150844762|gb|EDN19955.1| BC1G_13923 [Botryotinia fuckeliana B05.10]
  misc_feature (57)..(1133): NCBI GI: 156039383 Blast Desc: SS1G_11828 [Sclerotinia sclerotiorum 1980] gi|154697565|gb|EDN97303.1| SS1G_11828 [Sclerotinia sclerotiorum 1980]
  misc_feature (189)..(1048): NCBI GI: 261201153 Blast Desc: transcriptional activator spt7 [Ajellomyces dermatitidis SLH14081] gi|239594049|gb|EEQ76630.1| transcriptional activator spt7 [Ajellomyces dermatitidis
MSLVNGQPAWPPPLPHSSSAINGTPSRSFRSQDDAPAEMHDGADPAGGLVPEATDLEEERRRAELADSYRRTEQRIADMFNEDGSYNYDAINSWRRPPSPSASLPPTTDHAPIEERPAKRVKRVIDEDDYGDDDDDEEDEDDDLQHQSHSGPISSGSSPVPSIPSPDKSKEDGSQASQGSQNQTSASVDARKQLEDARKDTEETAKRSFHTLFYTLENDRTAMLEQQQLEVSEKALQDEMDKNSNNTTAGGASGENHGSLSSANLGASSLTLKHLIARIDMKRDQVRASDAELRSLMNEVRKNRSKWASEENVNQEELYEALEKVLTELKAHTEYSTPFLQRVNKRDAPDYYNFIKQPMDLGTMTKKLKQLQYKSKADFVQDLNLIWDNCLRYNQEMTNPLRRMANGMRKEAEKLIPLIPELTVRPRAEVEAEERRKQNGGEDDGGDDSDDEPIMTSRGRVAGAGTKSTKSRKAPNDQKEGTPNVDQKPVLQLNGLLAKQGREGSELDGSNGFGTPLMGGSMTPNGLNGHSGMGSNVDAMDLDDPSINGFSLGQALNNAEQQVYEDEEYKIWKQVTKKDRALVTKERFQLFDGNKLNVDQPALLRTRAGMRRFLRSRQQATQVGLGGFIEGEASAASAKESAKATETLAEGMEEEEERVLPAYYEPQTTVLDMPTRLQWIEDSEGQVINQHEEFLRALPPGYFTAPKSLLSQKFDANLRQMQETRKLCSKIGVIKQMQLQTQIYTNQFPKYNPDPFHEADIEPHVVCGDDLVMAPEVCRAALQRSVAKLFYHAGFEEYQPSALDAITDIAADFFGKMVQTFKTYTETEKQDFVSVADGGAITIQPRYTDEQVMLHTLAENGYSVDALESYAKDEVDRLGNKLSGIHERMKIHLTDLVRPAVADNGGADGAGAFRDDSEQWVGGNFAEDVGEDYFGFKELGLSEELGGMLSVPLHLLQSRVRSHYQAQNQTQGVGPTDAALFEDLSDPDPVTKENIQEQVGLVKNFFLAKLHANGDTPLVEDKDLPVKQRRPQPRLGATGKIVSPQKRPPKEQNAINKKKKKLEQQAAEAKKLKAEAEKSAAMKKSNSLPNGAVSTNSSFAVAPPMERMESMQSQGGNSQTDKDDTGMMSPESIER

SEQ ID NO: 25724 - DNA, 4483 bp, Muscodor strobelii
  misc_feature: SGI EST ID NO. CUFF.60680.0
  misc_feature: Variant of the nucleotide sequence at SEQ ID NO 25722
cggcggactgtcctctgaggtaggtactctgggcactgtcatgcaatgtagggtacccactcaaaacctcacttcgacttcactcgatcaagccacgcgaattggcaggcgcttcaatccatcagatcgcaccccatccttatcccaatctgccccaaaaccgcgtcgccatctccgcccatgtcgctcgctgccaccgtctaattttcggcgtccctcgcgcccgcccgctaccccgacgcgactctgcgtgccgcccacgcatggcgacccccgacgccccagcgcacacataaaccgccgacctggtcatcatgtccctcgtgaacggccagcccgcctggccccctcccctgccgcacagctcctccgccatcaacggcaccccctcgcgctctttccgctcgcaagacgatgcccccgccgagatgcacgacggcgctgatcccgccggcggcttggtgcctgaggccaccgacctcgaggaggagcgccgacgcgccgagctcgccgactcctatcggcgcaccgagcagcgcatcgccgacatgttcaacgaggatggctcctacaactacgacgccatcaactcctggcgccgtcccccgagcccctccgcctccctgccgcccaccaccgatcacgcgcccatcgaggagcgccccgccaagagggtcaagagggtcatcgacgaagacgactacggcgacgatgatgatgacgaggaggatgaagacgatgacctccaacaccaaagccattccggccccatctccgtctctcccttaaaatccaaaaccgcctcggcacacaaaggggctcctgtcccccctccaagtccggcagctcccccgtcccttccatcccatccccagacaagtccaaagaagatggctcgcaagcatcgcagggctcccagaaccagaccagtgcctccgtcgatgcgcgcaagcagctcgaggacgcccgcaaggacaccgaggagacggccaagcgcagctttcataccctcttttacactctagagaacgaccgcactgctatgttggagcagcagcaattggaagtgtctgaaaaggccctacaggatgaaatggacaagaacagcaacaacaccaccgccggaggagccagtggagaaaaccatggctcgctcagcagtgccaacctcggcgcatctagccttaccctgaaacatcttattgcgcgcatcgatatgaagcgcgatcaagtgcgcgcctccgatgccgagttgcgctcgctcatgaacgaagtcagaaagaatcggagcaagtgggccagcgaagagaacgtcaaccaggaagaactttacgaagccctagagaaggtcttgactgagctcaaggcgcacaccgagtactccacaccgtttcttcagagggtcaataagagagatgctccggattattacaactttatcaaacagccaatggacctaggcactatgactaagaagctaaagcagttgcaatacaagtccaaggccgacttcgtccaggatcttaacctaatatgggacaactgtctccgatacaaccaagagatgacaaacccgctccggcgaatggctaatggcatgcgcaaggaagcggagaagttaattcctctgatccccgagctgaccgtccggcctcgtgctgaggtggaagcagaggagcgacggaaacagaatggtggtgaagacgatggcggtgacgacagtgacgacgagccgataatgacgtctcgcggccgtgttgccggtgctggtactaagagtactaagtcgaggaaggctcctaatgatcagaaggaggggacacctaatgtcgatcagaagcccgtattacagctaaacggtctactcgccaaacaagggcgggagggttctgaacttgacggtagtaatggttttgggacgccacttatgggcggctcgatgactccaaacggtcttaacgggcattcaggaatggggagtaatgtggatgccatggacttggatgatccatccatcaacggtttctccttgggccaagccttgaacaatgcagagcagcaggtctatgaggatgaagagtacaagatttggaaacaggtcaccaagaaggaccgcgcccttgtcacgaaagaaaggtttcagcttttcgacggtaacaagcttaatgttgaccagcctgcactcttgcggaccagagccggcatgcggcgattccttcggtctcggcagcaggcgactcaagtcggtctgggcggatttatcgagggcgaagcttctgcggcttctgcgaaagagtctgccaaagcaaccgagacattggccgagggtatggaagaagaggaagagagagtactaccagcctactacgagccccagaccacggtgctcgatatgccaactcgtctccagtggatcgaggattccgagggccaagtcatcaaccagcacgaagaattcctccgagctctccctccaggctacttcacggctccaaaaagccttctcagtcagaagtttgatgcgaatctgcgccagatgcaagagacccggaagctctgttccaaaataggggtcatcaaacagatgcagcttcagacacagatctacaccaaccaatttcccaagtataatcctgaccccttccacgaagccgacatcgagccgcatgtcgtatgcggtgatgatctggtcatggccccagaagtctgccgcgctgctctacaacgatccgtggcaaaactcttctaccatgccggcttcgaagaatatcagccgtcggcgctggatgccatcacggacattgcagctgatttctttgggaagatggttcagactttcaagacttatacagaaactgagaagcaagatttcgtatccgtcgccgatggtggtgccattactattcaaccccggtatacggacgagcaggtcatgctacatactctggctgagaacgggtactctgtagacgccctagaaagctacgccaaggacgaagtagatcgactgggcaacaaactgagcggcatccacgagcgcatgaagatccacctcactgaccttgtgcgacctgccgttgctgataatggcggcgcggacggtgcaggtgcgttcagggacgacagcgaacagtgggtcggaggaaactttgccgaggatgttggcgaggactacttcggcttcaaagagctcggtctttccgaagagcttggtggcatgctgtccgtgcctctgcatctgttgcagtctagagtccgcagccattaccaagctcagaaccaaacgcaaggcgtgggaccgaccgacgcagccttgtttgaggatctgtcagaccctgaccctgtcaccaaggaaaacatccaagaacaagtcggccttgtcaagaacttcttcctcgcgaaactgcacgctaatggcgacacaccgttggtggaagataaagacctgcccgtcaagcaacgaagacctcaaccccgacttggagccacaggaaagatcgtatcgcctcagaaacggcctcccaaagaacagaacgctatcaacaagaaaaagaagaagctggagcagcaggccgccgaggccaagaagctcaaggctgaagctgaaaagtctgctgccatgaagaagagcaattcgctaccgaacggagctgtctctacgaattcgtcttttgcagtcgctccgcccatggaacggatggagagtatgcagagtcaggggggcaacagccaaactgacaaggacgacacgggcatgatgagccccgaaagcatcgagcgctagaagtctcggaactctgcttcattccctcgcaaacattcacggtctacaagacgacgccgacggcattgacgagacgacgtaatacacaccagcacccaaaacatgtactccttacgatactcttcaccgtccttccttgctgcctcgcgccttttgacatcaaaactttttcgtcctgatctcctttagtcgctatcttataccccatgcggtgggaagttcatgctttagaaagcggcgcagaatggtcacggtttccggcacaactaggcgttctcgattacctcgttaccttttctttcccgcaatactacaaaacctctcgatgtcggtctctcctacttgcattccggacaggtcggcaatcggatcgagacttgacgtcttcttgaggattactctttttacgtttactcaactacatataccaaagtggatgacgaagatcaggacgaggatgaagatgaattgggatctgacgagagccagggatgacacgtttggggatgtttggtatgtacatataaagcaggcccaccagaagagggtgcggaaagaaggagcgaaggcgcttggacgaaatatcagaaggaaagcgaaagagacagaagttcgtagtcataccctagggattattgaatacgatacgatgtcatgaaatgataacctgactttattgtgattgtgcatgtgtgaact

SEQ ID NO: 25725 - DNA, 4512 bp, Muscodor strobelii
  misc_feature: SGI cDNA ID NO. 568782
  misc_feature: Encodes the peptide sequence at SEQ ID NO 25726
atggcaccgacagcggcgaggctcgatgcgaaacagcacataacagacattcgcaagaacaaagggctggataatccgaccagaaatgctggattaatcgccgagtttgaaagggcaatcgaagtgatttcagatacattataccgcgaatcaacccatttcctattggagatactccaaaatgccgatgacaacaagtacgccggtgtcgagccctccttgaagtttaccctcaagtcaaactccctccagatcgactgcaatgagataggattcacgcggcagaatgttgactcaatctgcaccgtggccctcagcacaaagaccggtattaataagaactccgagttcgtcggcgagaagggaatcggtttcaaatctgtcttcaaggtggcgtcggtggtctggatctcgtcgagggcttactcgtttaagttcgacaaaactaagccgctgggtatgattgcgccaatttgggatgaagcttttcccggcacaaaaaagcacgctcacacttctttcttccttgagttgcagcctgaatgcaatcttgaggggctactgagagatttgaagaacatcgaccgcaggtctatgatatttttacgaaatatcagacagatcacgatacaagatttgcggtcgccaaattcgcgagtgtatgagatagatgtccaaaaggatgagtctacggggggtgacttcacgcgtgtggtagttcgagagaatggaaatagagaacatttcttggcctacaagcagctggtagatggccttcctgtcgaccccgggcaaagacggcccactgaatcgctggtgacgattgcgttgccattaagcggcgaaaatcaacccaaggtcgagcagcaatctttatacgctttccttcctatccggagttacggcttcaagttcctactgaatgcggatttcatcttgactgcgagcagggaagatatcgtgaccaaggatccatggaacgaaaagctcgcattaggctgccggtcggccgttaccgacatgttcataatactcgcaagagatccgccttgccaatcgcttcgatatacatggatgcgttatcttccagacaacatggcagtttccacgattttctcaggatacgataaccatatatgtgaagtgctaagcgaggaggcattgtacctcactgaatcgggcgcaatgactattgctcaagcagcattatatgttccagatgacttgcgtagcccgggtggttgtcctttgagtctcgctccattgacagcttcgagttatatttcgagacactatgcgtcgcaggacttacaagcgctcaaaaagctcggtatcaaggagctcccgatcatccgcttcttggatgatctagctcgagtcattacatcagtcacgcttacaaaagcatactgttctttcttggctcctgtcttgctcaaactctatggcgatcctccatgccgtcatattatcaaatctctccccattatcagagttcggggcaggccagaaggagcctgggtctccgcctctgaagctgaagtattttttcctggaagccaggacaacttcgagatcccagaaggcgtaaatgccagggtagctacgagccagttcgtgaaagatgtcaacattcgaacattgtaccaggccctaggtgtgaggcagttgaccaggcttgaggtttgtcaactgatcatcgcatgtcacgtcagcccttcctttgaggccgaggaattggagattggagacatgctctcgcacgttttgtttctgttccgttccgattacagtgacaaagatcaggcatcacgcatggtcctcctgacggataaaaacgagtacgtgagagcatcaaacatgtaccaggtctctgatcacgaacactctgcggtgtcctactttcggatggagaacaacaattatccttgccacttcattgacccacgctaccttcaactcgtcccagattgttccaaagagtttagtcgctggttgaaaacttgtcttgacgtgtgggatgtgcctcgcctggctttcaaagacaaacgtggtagattatccatgacatcggagttcaggtggttagcggaaacggcctcacagtgggcactgctgcttctcagggatctctgggagtcgctatactctgcaaccttccctcctcgttttgaaagtagtgatgaagtgatcctcgcgtctagcgtggctctcaaacaggagctggccgtattcgacgtttcccgtagtgatgggagcaaggcacccctcaatcagaccttcttcccattttctgagtcgggaacttgggccagcggaactcctgtgctggtcgttccggagccgcaagatccccggtgggacttcctccgcaacttcggtgttgaggtaaaaaataatgccggtttttaccttcactgtatcgagactcttgcttcaaactatcatctgccgtccgcgtctgtattggatcaaatcaaacctctctacgaaggtattcaagactgtctaggagacagcaaaaatatggtgaggaaattttttaggactaaggcagccatttttgtgccctcaggcgagcctcaagtccccggtagctggcatgagctcaaaacgtgtatctgggaaggtcctgacatgaagtgtttcgtcagcatatctaaacactatccttcacaggctcgactgttccatgaagtactggacatcaaaaatctcgaagtaagtaacttgatggacgagatcaatcacttcagtcatgatgagaatatggagtatgtcttatcgatctggcaactcttgaacgattggtttcgaagggacaacaaagatcacacggctctcaagcagttggtgagccaaagggccttcccagtccgagcatcgctttcccagtctggtcccgttgtgtactttgcgacagcccgaacctggattgagtggtttattcctgaccgagagggattagatgtcctctttgctagcaaggtcccgctccttgcattcagcgtagacgtgaacatagaactaaagaagctgttccagcacctgaacctcgataatcggttcctatctaacgcagccaagccatcttatagctatcagggtggatttagcgtggaccactcatatactgccattttggcgagcaaagtaccgtacttgaccaggttaatccccgaagccaatcaagatcggaaggcaattgctcaaagcctccgcgaggttactgtgtacgcggcaggatatatcgaacagacctactcgatcatccaacatggcaaaagggtacagagcaggtctctagctatacccgccggccatgaagtcacagaaggcaagcttcaaatttatcttttgaaacaacacctgcagaggaggcattacttcgagttccaattcgatttgatagatattctagtgtcacactgccaggtggaagacgattccaagctgcttgtgggttatgtcatgcaagaaaacaacgaagtgctcataaagagggcttttgcaaagaagggcatccgcagtctgatgacggacgagaacgttttcaaaccctcgtacttccagcgtgttagagatggtgacgtgaagaatgcgaagacatcctcgcgcatcaaggaacttgctagtggtgtaatgacatccacgaaaaaggttaggatcttcagaggccggaaaaggccgggcgaaagaaaggccactcgatccactacagctacatcgggttccagctccggcaatcagctttctgcgctgccggtctcaaacgactatgactcggacggaacggaaaaatactacctcttctccgacactaactcctgggtgtcatcttcagatgaatcagacgaaaatgatagcaacggtatagaaggggagatcgttagcatacgcatcacgaaaggtagcaagaaactacgacgccgtctcaggaagaagaggcgaaaggaactacccagccttgagctggaccaggaagttactaccgctggggaactctggctatccaatttctttgcttcttttcttcccgacttttacgattccactaagcactggagcagtatgagacgtgtagaagccggcctacctgctatcaaggaatcggactatgacctctgcttctcttcgttcaccattcccgacttccctggatcgttcacaaagttcttgattgggctcggatactccgaattagagcactggttgacagatccaccgacatattacatagaggccgtggggacgatggatggcctggggtctcgtttcctactgcgcaatgactggtggaaattggctcggaaatatgctcttccaggctggatacacaatgtgaggcatttcgatgtcccgagaagcgtatgtatccttgcaagggttcatgacttggaaagtgaagacgacaagaacgttgcttttttcctggatccgtggacgtggtttctcgaacgtaatatatcaatggaggcgccggagatgtacattggccgggttcgtacttga

SEQ ID NO: 25726 - protein, 1503 aa, Muscodor strobelii
  misc_feature: SGI Peptide ID NO. 568782
  misc_feature (3)..(1123): NCBI GI: 261353273 Blast Desc: conserved [Verticillium albo-atrum VaMs.102]
  misc_feature (56)..(1174): NCBI GI: 240110131 Blast Desc: Heterokaryon incompatibility protein, [Coccidioides posadasii C735 delta SOWgp]
  misc_feature (36)..(1263): NCBI GI: 256730293 Blast Desc: NECHADRAFT_82646 [Nectria haematococca mpVI 77-13-4]
  misc_feature (9)..(1175): NCBI GI: 256731925 Blast Desc: NECHADRAFT_80792 [Nectria haematococca mpVI 77-13-4]
  misc_feature (9)..(1181): NCBI GI: 256720532 Blast Desc: NECHADRAFT_88029 [Nectria haematococca mpVI 77-13-4]
  misc_feature (9)..(1174): NCBI GI: 119179507 Blast Desc: CIMG_08498 [Coccidioides immitis RS]
  misc_feature (8)..(1080): NCBI GI: 255951655 Blast Desc: Pc23g00270 [Penicillium chrysogenum Wisconsin 54-1255] gi|211904215|emb|CAP79521.1| Pc23g00270 [Penicillium chrysogenum Wisconsin 54-1255]
  misc_feature (43)..(1167): NCBI GI: 171679363 Blast Desc: protein product [Podospora anserina] gi|170939307|emb|CAP64535.1| protein product [Podospora anserina]
  misc_feature (6)..(935): NCBI GI: 145246728 Blast Desc: An12g05450 [Aspergillus niger] gi|134080334|emb|CAK46256.1| protein product [Aspergillus niger]
  misc_feature (5)..(1025): NCBI GI: 46127439 Blast Desc: FG08097.1 [Gibberella zeae PH-1]
MAPTAARLDAKQHITDIRKNKGLDNPTRNAGLIAEFERAIEVISDTLYRESTHFLLEILQNADDNKYAGVEPSLKFTLKSNSLQIDCNEIGFTRQNVDSICTVALSTKTGINKNSEFVGEKGIGFKSVFKVASVVWISSRAYSFKFDKTKPLGMIAPIWDEAFPGTKKHAHTSFFLELQPECNLEGLLRDLKNIDRRSMIFLRNIRQITIQDLRSPNSRVYEIDVQKDESTGGDFTRVVVRENGNREHFLAYKQLVDGLPVDPGQRRPTESLVTIALPLSGENQPKVEQQSLYAFLPIRSYGFKFLLNADFILTASREDIVTKDPWNEKLALGCRSAVTDMFIILARDPPCQSLRYTWMRYLPDNMAVSTIFSGYDNHICEVLSEEALYLTESGAMTIAQAALYVPDDLRSPGGCPLSLAPLTASSYISRHYASQDLQALKKLGIKELPIIRFLDDLARVITSVTLTKAYCSFLAPVLLKLYGDPPCRHIIKSLPIIRVRGRPEGAWVSASEAEVFFPGSQDNFEIPEGVNARVATSQFVKDVNIRTLYQALGVRQLTRLEVCQLIIACHVSPSFEAEELEIGDMLSHVLFLFRSDYSDKDQASRMVLLTDKNEYVRASNMYQVSDHEHSAVSYFRMENNNYPCHFIDPRYLQLVPDCSKEFSRWLKTCLDVWDVPRLAFKDKRGRLSMTSEFRWLAETASQWALLLLRDLWESLYSATFPPRFESSDEVILASSVALKQELAVFDVSRSDGSKAPLNQTFFPFSESGTWASGTPVLVVPEPQDPRWDFLRNFGVEVKNNAGFYLHCIETLASNYHLPSASVLDQIKPLYEGIQDCLGDSKNMVRKFFRTKAAIFVPSGEPQVPGSWHELKTCIWEGPDMKCFVSISKHYPSQARLFHEVLDIKNLEVSNLMDEINHFSHDENMEYVLSIWQLLNDWFRRDNKDHTALKQLVSQRAFPVRASLSQSGPVVYFATARTWIEWFIPDREGLDVLFASKVPLLAFSVDVNIELKKLFQHLNLDNRFLSNAAKPSYSYQGGFSVDHSYTAILASKVPYLTRLIPEANQDRKAIAQSLREVTVYAAGYIEQTYSIIQHGKRVQSRSLAIPAGHEVTEGKLQIYLLKQHLQRRHYFEFQFDLIDILVSHCQVEDDSKLLVGYVMQENNEVLIKRAFAKKGIRSLMTDENVFKPSYFQRVRDGDVKNAKTSSRIKELASGVMTSTKKVRIFRGRKRPGERKATRSTTATSGSSSGNQLSALPVSNDYDSDGTEKYYLFSDTNSWVSSSDESDENDSNGIEGEIVSIRITKGSKKLRRRLRKKRRKELPSLELDQEVTTAGELWLSNFFASFLPDFYDSTKHWSSMRRVEAGLPAIKESDYDLCFSSFTIPDFPGSFTKFLIGLGYSELEHWLTDPPTYYIEAVGTMDGLGSRFLLRNDWWKLARKYALPGWIHNVRHFDVPRSVCILARVHDLESEDDKNVAFFLDPWTWFLERNISMEAPEMYIGRVRT

SEQ ID NO: 25727 - DNA, 5738 bp, Muscodor strobelii
  misc_feature: SGI EST ID NO. CUFF.60688.1
  misc_feature: Variant of the nucleotide sequence at SEQ ID NO 25725
cgttaggcaactcattgggctgacaaggcgcatgtcggccaagctgcattctcggattgatcacgacctggtaagctttgtaccatcactgcagtccttaggaatgtccattagttctcaatatcctttctcacttcacagctcgtagggtgtggtgccagtaaaaccagttaatatttcctcccacgtggatattttggcatggcaccgacagcggcgaggctcgatgcgaaacagcacataacagacattcgcaagaacaaagggctggataatccgaccagaaatgctggattaatcgccgagtttgaaagggcaatcgaagtgatttcagatacattataccgcgaatcaacccatttcctattggagatactccaaaatgccgatgacaacaagtacgccggtgtcgagccctccttgaagtttaccctcaagtcaaactccctccagatcgactgcaatgagataggattcacgcggcagaatgttgactcaatctgcaccgtggccctcagcacaaagaccggtattaataagaactccgagttcgtcggcgagaagggaatcggtttcaaatctgtcttcaaggtggcgtcggtggtctggatctcgtcgagggcttactcgtttaagttcgacaaaactaagccgctgggtatgattgcgccaatttgggatgaagcttttcccggcacaaaaaagcacgctcacacttctttcttccttgagttgcagcctgaatgcaatcttgaggggctactgagagatttgaagaacatcgaccgcaggtctatgatatttttacgaaatatcagacagatcacgatacaagatttgcggtcgccaaattcgcgagtgtatgagatagatgtccaaaaggatgagtctacggggggtgacttcacgcgtgtggtagttcgagagaatggaaatagagaacatttcttggcctacaagcagctggtagatggccttcctgtcgaccccgggcaaagacggcccactgaatcgctggtgacgattgcgttgccattaagcggcgaaaatcaacccaaggtcgagcagcaatctttatacgctttccttcctatccggagttacggcttcaagttcctactgaatgcggatttcatcttgactgcgagcagggaagatatcgtgaccaaggatccatggaacgaaaagctcgcattaggctgccggtcggccgttaccgacatgttcataatactcgcaagagatccgccttgccaatcgcttcgatatacatggatgcgttatcttccagacaacatggcagtttccacgattttctcaggatacgataaccatatatgtgaagtgctaagcgaggaggcattgtacctcactgaatcgggcgcaatgactattgctcaagcagcattatatgttccagatgacttgcgtagcccgggtggttgtcctttgagtctcgctccattgacagcttcgagttatatttcgagacactatgcgtcgcaggacttacaagcgctcaaaaagctcggtatcaaggagctcccgatcatccgcttcttggatgatctagctcgagtcattacatcagtcacgcttacaaaagcatactgttctttcttggctcctgtcttgctcaaactctatggcgatcctccatgccgtcatattatcaaatctctccccattatcagagttcggggcaggccagaaggagcctgggtctccgcctctgaagctgaagtattttttcctggaagccaggacaacttcgagatcccagaaggcgtaaatgccagggtagctacgagccagttcgtgaaagatgtcaacattcgaacattgtaccaggccctaggtgtgaggcagttgaccaggcttgaggtttgtcaactgatcatcgcatgtcacgtcagcccttcctttgaggccgaggaattggagattggagacatgctctcgcacgttttgtttctgttccgttccgattacagtgacaaagatcaggcatcacgcatggtcctcctgacggataaaaacgagtacgtgagagcatcaaacatgtaccaggtctctgatcacgaacactctgcggtgtcctactttcggatggagaacaacaattatccttgccacttcattgacccacgctaccttcaactcgtcccagattgttccaaagagtttagtcgctggttgaaaacttgtcttgacgtgtgggatgtgcctcgcctggctttcaaagacaaacgtggtagattatccatgacatcggagttcaggtggttagcggaaacggcctcacagtgggcactgctgcttctcagggatctctgggagtcgctatactctgcaaccttccctcctcgttttgaaagtagtgatgaagtgatcctcgcgtctagcgtggctctcaaacaggagctggccgtattcgacgtttcccgtagtgatgggagcaaggcacccctcaatcagaccttcttcccattttctgagtcgggaacttgggccagcggaactcctgtgctggtcgttccggagccgcaagatccccggtgggacttcctccgcaacttcggtgttgaggtaaaaaataatgccggtttttaccttcactgtatcgagactcttgcttcaaactatcatctgccgtccgcgtctgtattggatcaaatcaaacctctctacgaaggtattcaagactgtctaggagacagcaaaaatatggtgaggaaattttttaggactaaggcagccatttttgtgccctcaggcgagcctcaagtccccggtagctggcatgagctcaaaacgtgtatctgggaaggtcctgacatgaagtgtttcgtcagcatatctaaacactatccttcacaggctcgactgttccatgaagtactggacatcaaaaatctcgaagtaagtaacttgatggacgagatcaatcacttcagtcatgatgagaatatggagtatgtcttatcgatctggcaactcttgaacgattggtttcgaagggacaacaaagatcacacggctctcaagcagttggtgagccaaagggccttcccagtccgagcatcgctttcccagtctggtcccgttgtgtactttgcgacagcccgaacctggattgagtggtttattcctgaccgagagggattagatgtcctctttgctagcaaggtcccgctccttgcattcagcgtagacgtgaacatagaactaaagaagctgttccagcacctgaacctcgataatcggttcctatctaacgcagccaagccatcttatagctatcagggtggatttagcgtggaccactcatatactgccattttggcgagcaaagtaccgtacttgaccaggttaatccccgaagccaatcaagatcggaaggcaattgctcaaagcctccgcgaggttactgtgtacgcggcaggatatatcgaacagacctactcgatcatccaacatggcaaaagggtacagagcaggtctctagctatacccgccggccatgaagtcacagaaggcaagcttcaaatttatcttttgaaacaacacctgcagaggaggcattacttcgagttccaattcgatttgatagatattctagtgtcacactgccaggtggaagacgattccaagctgcttgtgggttatgtcatgcaagaaaacaacgaagtgctcataaagagggcttttgcaaagaagggcatccgcagtctgatgacggacgagaacgttttcaaaccctcgtacttccagcgtgttagagatggtgacgtgaagaatgcgaagacatcctcgcgcatcaaggaacttgctagtggtgtaatgacatccacgaaaaaggttaggatcttcagaggccggaaaaggccgggcgaaagaaaggccactcgatccactacagctacatcgggttccagctccggcaatcagctttctgcgctgccggtctcaaacgactatgactcggacggaacggaaaaatactacctcttctccgacactaactcctgggtgtcatcttcagatgaatcagacgaaaatgatagcaacggtatagaaggggagatcgttagcatacgcatcacgaaaggtagcaagaaactacgacgccgtctcaggaagaagaggcgaaaggaactacccagccttgagctggaccaggaagttactaccgctggggaactctggctatccaatttctttgcttcttttcttcccgacttttacgattccactaagcactggagcagtatgagacgtgtagaagccggcctacctgctatcaaggaatcggactatgacctctgcttctcttcgttcaccattcccgacttccctggatcgttcacaaagttcttgattgggctcggatactccgaattagagcactggttgacagatccaccgacatattacatagaggccgtggggacgatggatggcctggggtctcgtttcctactgcgcaatgactggtggaaattggctcggaaatatgctcttccaggctggatacacaatgtgaggcatttcgatgtcccgagaagcgtatgtatccttgcaagggttcatgacttggaaagtgaagacgacaagaacgttgcttttttcctggatccgtggacgtggtttctcgaacgtaatatatcaatggaggcgccggagatgtacattggccgggttcgtacttgaacttaatcaaaatatcggagcgcctcgcgggtagaatctgcggcccagattacctctagatgtattgatgataggtcatggcatttgcttgccaacagcaacgagagaagaggaggctcggccttgttagtatgtgacactagtagcggaaatgtctatcatgggcttatcgtttggaactctctcttagtaatgtagtgtagattgcacattacccggcattgaaggtgcgacccgagttagtaatcagtccaaggctaagacagagatgaggaacggcagagaggtggtgaagcatcgcgaacaaaaacatgacttttctttagcccaactagatacggcggacgtaaaattaacccaaggcgacgagaaaatgcgctgactcactgggtggtaaccctgatgacgggtcagtggtcaacattttggtcatgacttactgggcaaaccaaaaagacaatgcgcagatcttggcctccttgatggtccgggcttccgccacggtaccctaactcttgattttcatctccacgtgtagactgcatgaaatggtcaaatggactgcgagctgcacgtcgacttcatgaaagcgaattgcggagtgaggcaaatgagggttaaaaggctagctaatttagtcgatagtgtcaaatagtgaattggggaagatatcagctcatgcaacactatcaccttgacccccaccatagcatcgcacaaccacaacggcagctagaagggataggtccagctcatatgatgcttgattgggaggagaatgatatgcatgatagtggaacatagcacgcctttttaaattagggaattgactttctcatatctggggcccataccgtacaaggttgagttgacgagcgatgctgtgccagattaaaatgcaatgtttggcagtaatagcttagacactgaacatgggatttggatacttaggcgatattggcaagcaggtgatagacaatcatcaaagaagggaaaactgataacgatgttacgtttgatctcac

SEQ ID NO: 25728 - DNA, 561 bp, Muscodor strobelii
  misc_feature: SGI cDNA ID NO. 568783
  misc_feature: Encodes the peptide sequence at SEQ ID NO 25729
atgacggactactccctcgatccatccagccttacccgagagagcatcataaaagatagcggaggaatgtcacaggcaggcgaaaaagctaaaggcgatcgtattggtcgagatcaactgatatggcagccgaccgttcgccttagaacctgctccaagcgttacgtcccaggcatgctgggaatactaccaatgttgggcgtaattctatccttcccatctctccaaattgaggagccaagtgatcatttggcgcacatcatccagacacttcgcgaactcatgccggctcaacgtccccagatccttttcctattcctaggcagcgccctcacacagtggctatgcatattcgacctttacaaggaccttgatggagaggatggtctcgttgcaaaactattcatgtacgatgcattcgccgcattccttggcttatggttcggcgttagcgttctggagatgcttgtcttaattctgccaagtaccaccatgctggtcttgatagtttctagagctgcgactcctcttggccacagaggcggctccgaatggtgctaa

SEQ ID NO: 25729 - protein, 186 aa, Muscodor strobelii
  misc_feature: SGI Peptide ID NO. 568783
MTDYSLDPSSLTRESIIKDSGGMSQAGEKAKGDRIGRDQLIWQPTVRLRTCSKRYVPGMLGILPMLGVILSFPSLQIEEPSDHLAHIIQTLRELMPAQRPQILFLFLGSALTQWLCIFDLYKDLDGEDGLVAKLFMYDAFAAFLGLWFGVSVLEMLVLILPSTTMLVLIVSRAATPLGHRGGSEWC

SEQ ID NO: 25730 - DNA, 1311 bp, Muscodor strobelii
  misc_feature: SGI EST ID NO. CUFF.60698.1
  misc_feature: Variant of the nucleotide sequence at SEQ ID NO 25728
gttgatcttagctccctttctctgtttcccctccttcagacttatgaaagttgtcgcctcttaccccttcaagtgcggagtcaaactggttgcgagcatttagactcgtgccgctcaagaccacttcgccattattgttttgacctggtggttctctgggtcaaagtcgaaagcgattccgttggaccggtctgcaaagtcttactctatagccgaaagcacagtcagccactgttcatcagcgcttcaatccccagagtcaacagaagaacgcccacagtcttgcaactccccagcaggaagacttgcttgagatttggcctgaagattcccttaaccgttcggccggtgtctcgtgcgaggtcggcctctacttgccaagacgaacaccatgagctgggatgccgaagcgaagatcacggcaagatgacggactactccctcgatccatccagccttacccgagagagcatcataaaagatagcggaggaatgtcacaggcaggcgaaaaagctaaaggcgatcgtattggtcgagatcaactgatatggcagccgaccgttcgccttagaacctgctccaagcgttacgtcccaggcatgctgggaatactaccaatgttgggcgtaattctatccttcccatctctccaaattgaggagccaagtgatcatttggcgcacatcatccagacacttcgcgaactcatgccggctcaacgtccccagatccttttcctattcctaggcagcgccctcacacagtggctatgcatattcgacctttacaaggaccttgatggagaggatggtctcgttgcaaaactattcatgtacgatgcattcgccgcattccttggcttatggttcggcgttagcgttctggagatgcttgtcttaattctgccaagtaccaccatgctggtcttgatagtttctagagctgcgactcctcttggccacagaggcggctccgaatggtgctaagagctttgtggtccgaggacatgcatcgaaatttgcgcatgcggtatttgaagtgcccagcctagctacaactaagatatgtgatgaatggctatttgttacttggcttctgcaattgataatgtccgcattcgcttccttcttgtttggcaagttggacatatcacgccagcgttgctcagattcagatggcaagttggaagctacccggttatctctcagataacctcacgacgtacgcatcctcaataattgaccctaaacgaggtcgttcttacggtagaaatccatgaattgaagacgtttgccatcaaccttcgagac

SEQ ID NO: 25731 - DNA, 921 bp, Muscodor strobelii
  misc_feature: SGI cDNA ID NO. 568784
  misc_feature: Encodes the peptide sequence at SEQ ID NO 25732
atggcatatagcacagcctcacctccccagcgaagttcccgagaccagcgtaagtcttcttttgacatcaacatcatcatatatccaaaattctacccaaaattgttcttgcgaaaaatatatctagacgagcagactcggcgaacaagcgcgcgaaccatccatcctgaagaccccgccttcagcaatttgccaatccatacaccgatcatcatcatcatatccacgtggccaggcattgtcaattcacataccgttgtgtgtccaagcagtgttcctggggtaccagtcggtgccgtcatggccttgtgggttggcgatgtatggcgctggaggcggggactctacttcgcgtctgttccatgggccattggagtcatagtctgcaaggccctggcagaagagaatgacacctggataataccacttgcggtctcttacgtgatttgggtcgtgaagtttgggacttttgcatacgcttgctgtcagaggcggtccgatcctgtgctgcttgcattctcccactctatctgcatagccgcagtcctgttattctttagccaggttgctaccgccgatgatcataagactttgctggtcttactaccgatatctggaaacctgggggttttcaccgcagtgggaatctccgctgtaatcgccggcataactgcagcctccataaggcggggtcttctctggagcatcgacagcatcagggaagtgctggtaggagaatcattgtcggcaccagagttgccactttgggcaacgagagtgggctacggcaatggaccagccaccccgactccaggtacagcaacgttgctgttgttgcagcaagccgatatgggacaaccacacacatcaagttcaatcagcgccacaatcgagggtgaagagaacccgtggaggttataa

SEQ ID NO: 25732 - protein, 306 aa, Muscodor strobelii
  misc_feature: SGI Peptide ID NO. 568784
MAYSTASPPQRSSRDQRKSSFDINIIIYPKFYPKLFLRKIYLDEQTRRTSARTIHPEDPAFSNLPIHTPIIIIISTWPGIVNSHTVVCPSSVPGVPVGAVMALWVGDVWRWRRGLYFASVPWAIGVIVCKALAEENDTWIIPLAVSYVIWVVKFGTFAYACCQRRSDPVLLAFSHSICIAAVLLFFSQVATADDHKTLLVLLPISGNLGVFTAVGISAVIAGITAASIRRGLLWSIDSIREVLVGESLSAPELPLWATRVGYGNGPATPTPGTATLLLLQQADMGQPHTSSSISATIEGEENPWRL

SEQ ID NO: 25733 - DNA, 3522 bp, Muscodor strobelii
  misc_feature: SGI EST ID NO. CUFF.60726.0
  misc_feature: Variant of the nucleotide sequence at SEQ ID NO 25731
ttttgacatcaacatcatcatatatccaaaattctacccaaaattgttcttgcgaaaaatatatctagacgagcagactcggcgaacaagcgcgcgaaccatccatcctgaagaccccgccttcagcaatttgccaatccatacaccgatcatcatcatcatatccacgtggccaggcattgtcaattcacataccgttgtgtgtccaagcagtgttcctggggtaccagtcggtgccgtcatggccttgtgggttggcgatgtatggcgctggaggcggggactctacttcgcgtctgttccatgggccattggagtcatagtctgcaaggccctggcagaagagaatgacacctggataataccacttgcggtctcttacgtgatttgggtcgtgaagtttgggacttttgcatacgcttgctgtcagaggcggtccgatcctgtgctgcttgcattctcccactctatctgcatagccgcagtcctgttattctttagccaggttgctaccgccgatgatcataagactttgctggtcttactaccgatatctggaaacctgggggttttcaccgcagtgggaatctccgctgtaatcgccggcataactgcagcctccataaggcggggtcttctctggagcatcgacagcatcagggaagtgctggtaggagaatcattgtcggcaccagagttgccactttgggcaacgagagtgggctacggcaatggaccagccaccccgactccaggtacagcaacgttgctgttgttgcagcaagccgatatgggacaaccacacacatcaagttcaatcagcgccacaatcgagggtgaagagaacccgtggaggttataatctccactttatacagcatggtctatcgagggcgacttgcctcgcttggaatgagcaaagcgaacgtcatcgtcgctttgctaatatgatagtaatgccggggactagcataatgaaagcaacagggaacgcggtgccgaactgatgagggcgaaatactgacagaacgatgcatgtcggaagactgcattagcggcgattaaagatgtagaagtcagctatacgtactctttttttgcgcgtgtgggattctggcagccgtttcccccagatggcagctaagattaccgcatagcacgattgaggaagcagaaatcctcttttactcctggcagtggtcatcttgactgcagctaagggatagtctgggtctccgcgtgtgcgagaacttcttgcaacccacctcaacggctgggcagcttagaggtaatgctgaaaccgtgatgcataagctttgcattgggtctagtctcatcttaggccagggagtctgtcaggggagtccagtctttatcatacagtactagagcctcaatacctgaggaagactatgcatgcatgtgtgatgctgagcaatagcgcaacaacgattgttgcggctattgctggcggcagtgaacgcgtaccgccggttcactagctagaacagctacatagcatctttttcatcaacaatatgacgcaattcgccgcgtatggatagtaattagtcctgctcactgtgacacggcgaggctaaatttacccaggacattaggtgatgtgagtaaatgaaaccgttacttcactcgggatactcttcgataggacgataccgtgcataggcgggcattgacgattgtcgtgaagtatttgtcggagaagcgataaacccgccactttgagaagtttggggcatctatcgcgaggttgcggtactatgcggcgaaggtggtgacgcaatgagcggtcacattctttgcgaaccgtgaacttagtcaaggaagcttgttaaacgtctacggtgacaagtcgtctattgaaatgtggccgttcagcgacataccctccgtcgccgctttactcgattgtgtctttttcaagtgtctccgattcttctggtacagcttgcgcttctctctcctggcttcattctcctttctcttaatgcttcgtggaatttccgcctcgttgtgaccctggctgggaggaatgacttgccctatagagcttgcttgtgactcgggcggagaccagctcgtactgtcgacatccaagagcgatgcagtggaaggcatggaatcgggcacagatgctatagtaatagattccttctctttcttcttcaggctttggttattcctttggctcatcgctaatctcacgacatctggaggcaatgaaagaggtaagttacccctggtgttgttctggatggcattggtccttgggggaataatcgcctccggatgctccactaaatcacggatgaatgccggtgccatcacgtcggaggatactctagaaccgtacttgtggaacaacgggtcgacctcgctatgcggcttcccgactgtcgggcctccatgcgcttggctctccggattgccccctggtattggtgtaagttctggtggggtagtagcgctggcatcacactcgattagtcttgagcttccaattgaagttggtctgttaagaggtcgcatcagagcctctgctattggcgacttctgaatgttacgaatattcgggttggaattctgtgatattgcgatctggtttctgggtctcgccgataacctccttcgagaggagggagtggagaccagatcgtcatctacaacatttaacaatctataggggagaatgtcggcaacctcgagaggcggatcattccacggctgtggaaaaagggagtcaagaccggaaaacggtgttgtttgcgtcgcagtatagtgtacgttatcagcagagcaatggctgcaacatacatcgggtggatctggcctatcatcagtattattgtcgcacttcatgtgatgtcgcgcagtcgcaccgtcattgtagtcatcattatagtccatcatggctctatattctgccaaggtgtttgcgccagttcggcccccagcagacgcagtgttttcaagccgcggctggtagaagtctgtcatctcgacaaacagagaatttgattgtagtgcaaggcaagggaagagccccttgtgggaatgtgtaaaattcgagatgatctgatcgaatactccgagagattgcagcgatcttgaattctccatatcgaatgcaagatcggctccgtgatggctaaagaggacgaataccttgccattctctcgactctcggtgaagatcgcccgatgttgaaatccggccccttccacggcttgtgtgaaatggcggtggaaccttgacctagtaaacactagtaagtcgttgccttcgtacggcatatacaacaagaaatgtcgtgctctagtgattgcaaggaacttctgtagatcactgatcgtgttttccacccggagctccatcatcaagttgctgggtctagtattcactgtatcaatgccctgtgccgtgacctgttcgttgtaagtcaggatcgactgaaatcctttgatttcgaacagggagaaatggctggggcgttgttgcta

SEQ ID NO: 25734 - DNA, 1014 bp, Muscodor strobelii
  misc_feature: SGI cDNA ID NO. 568785
  misc_feature: Encodes the peptide sequence at SEQ ID NO 25735
atgacagacttctaccagccgcggcttgaaaacactgcgtctgctgggggccgaactggcgcaaacaccttggcagaatatagagccatgatggactataatgatgactacaatgacgatccacccgatccgtggaatgatccgcctctcgaggttgccgacattctcccctatagattgttaaatgttgtagatgacgatctggtctccactccctcctctcgaaggaggttatcggcgagacccagaaaccagatcgcaatatcacagaattccaacccgaatattcgtaacattcagaagtcgccaatagcagaggctctgatgcgacctcttaacagaccaacttcaattggaagctcaagactaatcgagtgtgatgccagcgctactaccccaccagaacttacaccaataccagggggcaatccggagagccaagcgcatggaggcccgacagtcgggaagccgcatagcgaggtcgacccgttgttccacaagtacggttctagagtatcctccgacgtgatggcaccggcattcatccgtgatttagtggagcatccggaggcgattattcccccaaggaccaatgccatccagaacaacaccaggggtaacttacctctttcattgcctccagatgtcgtgagattagcgatgagccaaaggaataaccaaagcctgaagaagaaagagaaggaatctattactatagcatctgtgcccgattccatgccttccactgcatcgctcttggatgtcgacagtacgagctggtctccgcccgagtcacaagcaagctctatagggcaagtcattcctcccagccagggtcacaacgaggcggaaattccacgaagcattaagagaaaggagaatgaagccaggagagagaagcgcaagctgtaccagaagaatcggagacacttgaaaaagacacaatcgagtaaagcggcgacggagggtatgtcgctgaacggccacatttcaatagacgacttgtcaccgtag

SEQ ID NO: 25735 - protein, 337 aa, Muscodor strobelii
  misc_feature: SGI Peptide ID NO. 568785
MTDFYQPRLENTASAGGRTGANTLAEYRAMMDYNDDYNDDPPDPWNDPPLEVADILPYRLLNVVDDDLVSTPSSRRRLSARPRNQIAISQNSNPNIRNIQKSPIAEALMRPLNRPTSIGSSRLIECDASATTPPELTPIPGGNPESQAHGGPTVGKPHSEVDPLFHKYGSRVSSDVMAPAFIRDLVEHPEAIIPPRTNAIQNNTRGNLPLSLPPDVVRLAMSQRNNQSLKKKEKESITIASVPDSMPSTASLLDVDSTSWSPPESQASSIGQVIPPSQGHNEAEIPRSIKRKENEARREKRKLYQKNRRHLKKTQSSKAATEGMSLNGHISIDDLSP

SEQ ID NO: 25736 - DNA, 3637 bp, Muscodor strobelii
  misc_feature: SGI EST ID NO. CUFF.60727.1
  misc_feature: Variant of the nucleotide sequence at SEQ ID NO 25734
tagcaacaacgccccagccatttctccctgttcgaaatcaaaggatttcagtcgatcctgacttacaacgaacaggtcacggcacagggcattgatacagtgaatactagacccagcaacttgatgatggagctccgggtggaaaacacgatcagtgatctacagaagttccttgcaatcactagagcacgacatttcttgttgtatatgccgtacgaaggcaacgacttactagtgtttactaggtcaaggttccaccgccatttcacacaagccgtggaaggggccggatttcaacatcgggcgatcttcaccgagagtcgagagaatggcaaggtattcgtcctctttagccatcacggagccgatcttgcattcgatatggagaattcaagatcgctgcaatctctcggagtattcgatcagatcatctcgaattttacacattcccacaaggggctcttcccttgccttgcactacaatcaaattctctgtttgtcgagatgacagacttctaccagccgcggcttgaaaacactgcgtctgctgggggccgaactggcgcaaacaccttggcagaatatagagccatgatggactataatgatgactacaatgacgatccacccgatgtatgttgcagccattgctctgctgataacgtacactatactgcgacgcaaacaacaccgttttccggtcttgactccctttttccacagccgtggaatgatccgcctctcgaggttgccgacattctcccctatagattgttaaatgttgtagatgacgatctggtctccactccctcctctcgaaggaggttatcggcgagacccagaaaccagatcgcaatatcacagaattccaacccgaatattcgtaacattcagaagtcgccaatagcagaggctctgatgcgacctcttaacagaccaacttcaattggaagctcaagactaatcgagtgtgatgccagcgctactaccccaccagaacttacaccaataccagggggcaatccggagagccaagcgcatggaggcccgacagtcgggaagccgcatagcgaggtcgacccgttgttccacaagtacggttctagagtatcctccgacgtgatggcaccggcattcatccgtgatttagtggagcatccggaggcgattattcccccaaggaccaatgccatccagaacaacaccaggggtaacttacctctttcattgcctccagatgtcgtgagattagcgatgagccaaaggaataaccaaagcctgaagaagaaagagaaggaatctattactatagcatctgtgcccgattccatgccttccactgcatcgctcttggatgtcgacagtacgagctggtctccgcccgagtcacaagcaagctctatagggcaagtcattcctcccagccagggtcacaacgaggcggaaattccacgaagcattaagagaaaggagaatgaagccaggagagagaagcgcaagctgtaccagaagaatcggagacacttgaaaaagacacaatcgagtaaagcggcgacggagggtatgtcgctgaacggccacatttcaatagacgacttgtcaccgtagacgtttaacaagcttccttgactaagttcacggttcgcaaagaatgtgaccgctcattgcgtcaccaccttcgccgcatagtaccgcaacctcgcgatagatgccccaaacttctcaaagtggcgggtttatcgcttctccgacaaatacttcacgacaatcgtcaatgcccgcctatgcacggtatcgtcctatcgaagagtatcccgagtgaagtaacggtttcatttactcacatcacctaatgtcctgggtaaatttagcctcgccgtgtcacagtgagcaggactaattactatccatacgcggcgaattgcgtcatattgttgatgaaaaagatgctatgtagctgttctagctagtgaaccggcggtacgcgttcactgccgccagcaatagccgcaacaatcgttgttgcgctattgctcagcatcacacatgcatgcatagtcttcctcaggtattgaggctctagtactgtatgataaagactggactcccctgacagactccctggcctaagatgagactagacccaatgcaaagcttatgcatcacggtttcagcattacctctaagctgcccagccgttgaggtgggttgcaagaagttctcgcacacgcggagacccagactatcccttagctgcagtcaagatgaccactgccaggagtaaaagaggatttctgcttcctcaatcgtgctatgcggtaatcttagctgccatctgggggaaacggctgccagaatcccacacgcgcaaaaaaagagtacgtatagctgacttctacatctttaatcgccgctaatgcagtcttccgacatgcatcgttctgtcagtatttcgccctcatcagttcggcaccgcgttccctgttgctttcattatgctagtccccggcattactatcatattagcaaagcgacgatgacgttcgctttgctcattccaagcgaggcaagtcgccctcgatagaccatgctgtataaagtggagattataacctccacgggttctcttcaccctcgattgtggcgctgattgaacttgatgtgtgtggttgtcccatatcggcttgctgcaacaacagcaacgttgctgtacctggagtcggggtggctggtccattgccgtagcccactctcgttgcccaaagtggcaactctggtgccgacaatgattctcctaccagcacttccctgatgctgtcgatgctccagagaagaccccgccttatggaggctgcagttatgccggcgattacagcggagattcccactgcggtgaaaacccccaggtttccagatatcggtagtaagaccagcaaagtcttatgatcatcggcggtagcaacctggctaaagaataacaggactgcggctatgcagatagagtgggagaatgcaagcagcacaggatcggaccgcctctgacagcaagcgtatgcaaaagtcccaaacttcacgacccaaatcacgtaagagctgccgtcgagaacccaaactagatcagtccattactctagcggcgccggaagataatgaactaatactcacaccgcaagtggtattatccaggtgtcattctcttctgccagggccttgcagactatgactccaatggcccatggaacagacgcgaagtagagtccccgcctccagcgccatacatcgccaacccacaaggccatgacggcaccgactggtaccccaggaacactgcttggacacacaacggtatgtgaattgacaatgcctggccacgtggatatgatgatgatgatcggtgtatggattggcaaattgctgaaggcggggtcttcaggatggatggttcgcgcgcttgttcgccgagtctgctcgtctgccgaccgtcagtaaccttgtaccaggccagtttcagcgaattataacgacaagcattgtacatagtcgacgcagaattgtgtggactcacctacctagatatatttttcgcaagaacaattttgggtagaattttggatatatgatgatgttgatgtcaaaa

SEQ ID NO: 25737 - DNA, 1068 bp, Muscodor strobelii
  misc_feature: SGI cDNA ID NO. 568786
  misc_feature: Encodes the peptide sequence at SEQ ID NO 25738
atgacagacttctaccagccgcggcttgaaaacactgcgtctgctgggggccgaactggcgcaaacaccttggcagaatatagagccatgatggactataatgatgactacaatgacggtgcgactgcgcgacatcacatgaagtgcgacaataatactgatgataggccagatccacccgatccgtggaatgatccgcctctcgaggttgccgacattctcccctatagattgttaaatgttgtagatgacgatctggtctccactccctcctctcgaaggaggttatcggcgagacccagaaaccagatcgcaatatcacagaattccaacccgaatattcgtaacattcagaagtcgccaatagcagaggctctgatgcgacctcttaacagaccaacttcaattggaagctcaagactaatcgagtgtgatgccagcgctactaccccaccagaacttacaccaataccagggggcaatccggagagccaagcgcatggaggcccgacagtcgggaagccgcatagcgaggtcgacccgttgttccacaagtacggttctagagtatcctccgacgtgatggcaccggcattcatccgtgatttagtggagcatccggaggcgattattcccccaaggaccaatgccatccagaacaacaccaggggtaacttacctctttcattgcctccagatgtcgtgagattagcgatgagccaaaggaataaccaaagcctgaagaagaaagagaaggaatctattactatagcatctgtgcccgattccatgccttccactgcatcgctcttggatgtcgacagtacgagctggtctccgcccgagtcacaagcaagctctatagggcaagtcattcctcccagccagggtcacaacgaggcggaaattccacgaagcattaagagaaaggagaatgaagccaggagagagaagcgcaagctgtaccagaagaatcggagacacttgaaaaagacacaatcgagtaaagcggcgacggagggtatgtcgctgaacggccacatttcaatagacgacttgtcaccgtag

SEQ ID NO: 25738 - protein, 355 aa, Muscodor strobelii
  misc_feature: SGI Peptide ID NO. 568786
MTDFYQPRLENTASAGGRTGANTLAEYRAMMDYNDDYNDGATARHHMKCDNNTDDRPDPPDPWNDPPLEVADILPYRLLNVVDDDLVSTPSSRRRLSARPRNQIAISQNSNPNIRNIQKSPIAEALMRPLNRPTSIGSSRLIECDASATTPPELTPIPGGNPESQAHGGPTVGKPHSEVDPLFHKYGSRVSSDVMAPAFIRDLVEHPEAIIPPRTNAIQNNTRGNLPLSLPPDVVRLAMSQRNNQSLKKKEKESITIASVPDSMPSTASLLDVDSTSWSPPESQASSIGQVIPPSQGHNEAEIPRSIKRKENEARREKRKLYQKNRRHLKKTQSSKAATEGMSLNGHISIDDLSP

SEQ ID NO: 25739 - DNA, 981 bp, Muscodor strobelii
  misc_feature: SGI cDNA ID NO. 568787
  misc_feature: Encodes the peptide sequence at SEQ ID NO 25740
atgatgcggaacgaaaccgaacccacaacacatcactatctatatgagtacatgggtgtagagcgtatgcttcccaggctggacttcgtcacttgcgcagtaaatattggctattataccatgtttgccgtagacgctctctatgtcttgctcgggacaccatttttcattacgagttacgctttcgatattctcctatgtatactgccgtggacgcgaccgactgccgaatggaccatcaatgagatgctgggcgcaacgtggacgcctgcacggccgccccctgcagtctcaacaacggtcgcattgcattttcatggtgggggtttcgtgattggcaacggtcgagatagtgacacaggataccttgccggaacccttgtgcgccagctaggctgtacacatgtacacttggtcgaagaattaagaatccctccatcacagatcatcctatcgggcgactcagcaggcggaaatcttgttcttggtctgcttagatatatacaggaatacggcaaagctcttggtatcgcggcaccaggggcagcgatgctgtggtctccgtgggtggatgtcagcgcggcactgattcacgacgtaaagtcgtccccaaattctcgtacagactacataaacaccgaattcgctcgatggggagccactacagtctctagattcggagcagttgatcctgcaggcccttatttgtctccgttgcatcatccttttcgattagacagcaacatgcccgtttttataaatgccgggggatttgaggtactgtgcgacgacatcgtttcattcgccaaggcttccgcagagctcgattggaacctacatttgattgtttcaaagggctgccctcacgatattctattacttgggccacggatgggctttgctcgcgaagcggaggaggctgtgagggaagctaagaactttcttactagccaatctgccttcaggttacggagcacttaa

SEQ ID NO: 25740 - protein, 326 aa, Muscodor strobelii
  misc_feature: SGI Peptide ID NO. 568787
  misc_feature (47)..(325): NCBI GI: 46139569 Blast Desc: FG11299.1 [Gibberella zeae PH-1]
  misc_feature (33)..(325): NCBI GI: 256721227 Blast Desc: NECHADRAFT_34839 [Nectria haematococca mpVI 77-13-4]
  misc_feature (82)..(323): NCBI GI: 116200945 Blast Desc: CHGG_08357 [Chaetomium globosum CBS 148.51] gi|88176875|gb|EAQ84343.1| CHGG_08357 [Chaetomium globosum CBS 148.51]
  misc_feature (82)..(320): NCBI GI: 145231321 Blast Desc: An02g00070 [Aspergillus niger] gi|134056047|emb|CAK96222.1| protein product [Aspergillus niger]
  misc_feature (84)..(318): NCBI GI: 189201383 Blast Desc: alpha/beta hydrolase fold-3 domain containing protein [Pyrenophora tritici-repentis Pt-1C-BFP] gi|187984127|gb|EDU49615.1| alpha/beta hydrolase fold-3 domain
  misc_feature (80)..(314): NCBI GI: 156042101 Blast Desc: SS1G_11601 [Sclerotinia sclerotiorum 1980] gi|154695984|gb|EDN95722.1| SS1G_11601 [Sclerotinia sclerotiorum 1980]
  misc_feature (82)..(314): NCBI GI: 154299472 Blast Desc: BC1G_10998 [Botryotinia fuckeliana B05.10] gi|150857340|gb|EDN32532.1| BC1G_10998 [Botryotinia fuckeliana B05.10]
  misc_feature (84)..(317): NCBI GI: 169619948 Blast Desc: SNOG_13174 [Phaeosphaeria nodorum SN15] gi|111058381|gb|EAT79501.1| SNOG_13174 [Phaeosphaeria nodorum SN15]
  misc_feature (84)..(320): NCBI GI: 255953197 Blast Desc: Pc21g02870 [Penicillium chrysogenum Wisconsin 54-1255] gi|211589062|emb|CAP95184.1| Pc21g02870 [Penicillium chrysogenum Wisconsin 54-1255]
  misc_feature (82)..(316): NCBI GI: 255946570 Blast Desc: Pc22g00020 [Penicillium chrysogenum Wisconsin 54-1255] gi|211591069|emb|CAP97290.1| Pc22g00020 [Penicillium chrysogenum Wisconsin 54-1255]
MMRNETEPTTHHYLYEYMGVERMLPRLDFVTCAVNIGYYTMFAVDALYVLLGTPFFITSYAFDILLCILPWTRPTAEWTINEMLGATWTPARPPPAVSTTVALHFHGGGFVIGNGRDSDTGYLAGTLVRQLGCTHVHLVEELRIPPSQIILSGDSAGGNLVLGLLRYIQEYGKALGIAAPGAAMLWSPWVDVSAALIHDVKSSPNSRTDYINTEFARWGATTVSRFGAVDPAGPYLSPLHHPFRLDSNMPVFINAGGFEVLCDDIVSFAKASAELDWNLHLIVSKGCPHDILLLGPRMGFAREAEEAVREAKNFLTSQSAFRLRST

SEQ ID NO: 25741 - DNA, 1071 bp, Muscodor strobelii
  misc_feature: SGI cDNA ID NO. 568788
  misc_feature: Encodes the peptide sequence at SEQ ID NO 25742
atgtcatccatattatactcaccagccataggcatcgtcacctctctacgtcaggcggttttatcccctctcttttcagggccacttctgcttttcgcgagctatgcccaagactctacccgtcatgccctattaaaaacaatcagcgactggcctctgctgcgtgccattcagagcgccacatatatcaagatcttaaggatcttgtttgttttgagcttattaaagcagctgaatagagtgttaaacacgatggctagcaattcatggcgtctgacagcaagcaaaggttgggactggtcaaatgagattgccgttgtcacaggtggttcaagtggcatcggcaaaatcattgtcgaaaagttgtcagctcttggtgtacgcgtggctgttctagatgtccaagatatgcccaaggagatgcataacgaccgggtccgcttctttgagtgcgacgtaacactatcccgctccgttgcggcggccgcggatgccgttcggcgagaattcggacaccccacgatcctgatcaacaacgctggcgtcgcgaagcctttacccatcctgaagatgccctatgagctcttgcaaaagacatttggtgtgaacaccatggcacactggctcacagttcagcaattcctcccgcatatgatacagatcaacaagggccacgtcgttaccgtcgccagcgttgcttcatttgtcgcattgccggctgcagccgactattctgcatccaaagcggctgcgctagctttccacgaaagtctcacaagtgaagtgaagcatttttataaagcgcctaacgttctcacgacggttgtacatccaaacttcgtccgaacacctcttattaaggatttcggggattttcttgaaagtattggcactccgatgctcaccagcgaacaggtggcagacccaatagtagcacagcttaaaaagggcaaaggtggccaagtgataatccccagtcatacatctattgtcactggaattagaggttggccgacgtggacacaggagatgttgcgtgacatcttgggtcgtgcagcagcgggcttgtag

SEQ ID NO: 25742 - protein, 356 aa, Muscodor strobelii
  misc_feature: SGI Peptide ID NO. 568788
  misc_feature (103)..(263): Pfam Id: PF00106 Pfam Desc: short chain dehydrogenase
  misc_feature (1)..(353): NCBI GI: 256721226 Blast Desc: NECHADRAFT_34821 [Nectria haematococca mpVI 77-13-4]
  misc_feature (1)..(353): NCBI GI: 46139571 Blast Desc: FG11300.1 [Gibberella zeae PH-1]
  misc_feature (85)..(353): NCBI GI: 116200947 Blast Desc: CHGG_08358 [Chaetomium globosum CBS 148.51] gi|88176876|gb|EAQ84344.1| CHGG_08358 [Chaetomium globosum CBS 148.51]
  misc_feature (21)..(347): NCBI GI: 169596913 Blast Desc: SNOG_01230 [Phaeosphaeria nodorum SN15] gi|160707398|gb|EAT90879.2| SNOG_01230 [Phaeosphaeria nodorum SN15]
  misc_feature (11)..(347): NCBI GI: 256722304 Blast Desc: NECHADRAFT_54364 [Nectria haematococca mpVI 77-13-4]
  misc_feature (64)..(347): NCBI GI: 238500317 Blast Desc: short-chain dehydrogenases/reductase, [Aspergillus flavus NRRL3357] gi|220693146|gb|EED49492.1| short-chain dehydrogenases/reductase, [Aspergillus flavus NRRL3357]
  misc_feature (90)..(353): NCBI GI: 256722349 Blast Desc: NECHADRAFT_94746 [Nectria haematococca mpVI 77-13-4]
  misc_feature (64)..(346): NCBI GI: 238507499 Blast Desc: short-chain dehydrogenase/reductase 2, [Aspergillus flavus NRRL3357] gi|220689664|gb|EED46015.1| short-chain dehydrogenase/reductase 2, [Aspergillus flavus NRRL3357]
  misc_feature (12)..(346): NCBI GI: 189195172 Blast Desc: dehydrogenase/reductase SDR family member 8 precursor [Pyrenophora tritici-repentis Pt-1C-BFP] gi|187979803|gb|EDU46429.1| dehydrogenase/reductase SDR family 8
  misc_feature (64)..(348): NCBI GI: 119484006 Blast Desc: short-chain dehydrogenase/reductase 2, [Neosartorya fischeri NRRL 181] gi|119410062|gb|EAW20009.1| short-chain dehydrogenase/reductase 2, [Neosartorya fischeri NRRL 181]
  misc_feature (101)..(287): SWISSPROT Homolog: EC 1.1.1.105 Retinol dehydrogenase
MSSILYSPAIGIVTSLRQAVLSPLFSGPLLLFASYAQDSTRHALLKTISDWPLLRAIQSATYIKILRILFVLSLLKQLNRVLNTMASNSWRLTASKGWDWSNEIAVVTGGSSGIGKIIVEKLSALGVRVAVLDVQDMPKEMHNDRVRFFECDVTLSRSVAAAADAVRREFGHPTILINNAGVAKPLPILKMPYELLQKTFGVNTMAHWLTVQQFLPHMIQINKGHVVTVASVASFVALPAAADYSASKAAALAFHESLTSEVKHFYKAPNVLTTVVHPNFVRTPLIKDFGDFLESIGTPMLTSEQVADPIVAQLKKGKGGQVIIPSHTSIVTGIRGWPTWTQEMLRDILGRAAAGL

SEQ ID NO: 25743 - DNA, 1295 bp, Muscodor strobelii
  misc_feature: SGI EST ID NO. CUFF.60719.0
  misc_feature: Variant of the nucleotide sequence at SEQ ID NO 25741
gcaatacctccatgtagttgggaaacataagtagctcctagacgagccagagctcattcgaagcacgatagacaatcatcatcgaaagcccaacatgtcatccatattatactcaccagccataggcatcgtcacctctctacgtcaggcggttttatcccctctcttttcagggccacttctgcttttcgcgagctatgcccaagactctacccgtcatgccctattaaaaacaatcagcgactggcctctgctgcgtgccattcagagcgccacatatatcaagatcttaaggatcttgtttgttttgagcttattaaagcagctgaatagagtgttaaacacgatggctagcaattcatggcgtctgacagcaagcaaaggttgggactggtcaaatgagattgccgttgtcacaggtggttcaagtggcatcggcaaaatcattgtcgaaaagttgtcagctcttggtgtacgcgtggctgttctagatgtccaagatatgcccaaggagatgcataacgaccgggtccgcttctttgagtgcgacgtaacactatcccgctccgttgcggcggccgcggatgccgttcggcgagaattcggacaccccacgatcctgatcaacaacgctggcgtcgcgaagcctttacccatcctgaagatgccctatgagctcttgcaaaagacatttggtgtgaacaccatggcacactggctcacagttcagcaattcctcccgcatatgatacagatcaacaagggccacgtcgttaccgtcgccagcgttgcttcatttgtcgcattgccggctgcagccgactattctgcatccaaagcggctgcgctagctttccacgaaagtctcacaagtgaagtgaagcatttttataaagcgcctaacgttctcacgacggttgtacatccaaacttcgtccgaacacctcttattaaggatttcggggattttcttgaaagtattggcactccgatgctcaccagcgaacaggtggcagacccaatagtagcacagcttaaaaagggcaaaggtggccaagtgataatccccagtcatacatctattgtcactggaattagaggttggccgacgtggacacaggagatgttgcgtgacatcttgggtcgtgcagcagcgggcttgtagacctttgacccttcagtgtcgatatcaaatacagaatgccttcgacaatgctgttgatgagcgacatagctacgctttcgttcattagtatctagaccatgtccatcaaagaaatatagctgtttcatgc

SEQ ID NO: 25744 - DNA, 1641 bp, Muscodor strobelii
  misc_feature: SGI cDNA ID NO. 568789
  misc_feature: Encodes the peptide sequence at SEQ ID NO 25745
atggtgtttcccggccgttttagcaccggctgcaagcgctgtcgccagcgcaagctgaagtgcgatgaggcgagaccgtcctgtcggcgttgctacatctacggaaagccttgtcccggctatacggatcaattccaattccgctttgaaaatgctggccccaaacaagagaactcgtcgtcgtcctcgtcgttgtcgtcgccgacctcccagcgtagcgagcagagtcctgtcccatgccaaccccagccggcgaaagccaatagcagtcagatcattgtaccagttcatcacacttcaccgttgaccatcacggcgcatccagaggtttcgtatgaccagtactcggtgtcgtatttcattcagcgtttcgtaacaccagatgagaatgatagcttccctggattcctaagctttctgccgaatctttatgaccataatgcaagtggtcttctcgagctcgccaccttgagtgttgcgcaaatggctgcttacaatcaatttggcggagacaaattccgcctccaatcatatcaaaactatggtcgtgcgcttcgcacattacgagaaactattcaaaccgaacgcgatgttaaagatgaccgggtcctcgctgctgtgttgctactgtgcatgtttaaggacgtaggcgaagagagctggggagatcctaacgaacatgcttcaggcttatattacatcctagaaaagagagggtttgagcagctatttacgagcgtggggttcgaaatgttcattacagccttgctcaagttgcaagtatattcgtttctacatcaagacgacagatatagcgacccagggggtgttgtctcctggctcagcccatttgatccaatgatgcgtgctatggccttaatgaccaaagtcttgtcgttgcggcatgacttaggaacttgcacagcggatcttcaagttggcgtagagcttaagcatgatgtctcggccgtcgatggtaacgaggatactagagatgcatcaatcatggaggcatgcttcaatacactggccgaatttgacacatgggataccgaagctgagtcatattggagaaacactttcgaaggccgacctgtcccggttgcgctgggcaagttctcgacaagcggaactaactatgacacccgaacggcctgtactatcattctcgtccggtctgcccgcttgattttgttgctcagcatcttggattatcgcgatgcaacccaaaaattgcgaggtaaaggtaatgatgcagcgtggggagactgcgttccagttcttgaggaaaacatccgattggtgattgacgacatgctttggtgcgtgccgtttgccatgggcgatgttgattcaaacaagagtccagccgtcatgttacacgatggggctgcggcattgacaattatacaaccacttaggttgatcacatattgcatctatgcgactccccagcaaagaacaatggctcatgacagacttagtcgaatgaatgctggtattggtatcaggtcggccatatcgtgggagcgacaagcgaccttagaacaacaagaccctagcccccaaaggatagatcgaatcatgaccttaagggcttccagtgcttccccaactctacagtcaatatatcctacttga

SEQ ID NO: 25745 - protein, 546 aa, Muscodor strobelii
  misc_feature: SGI Peptide ID NO. 568789
  misc_feature (9)..(48): Pfam Id: PF00172 Pfam Desc: Fungal Zn(2)-Cys(6) binuclear cluster domain
  misc_feature (1)..(509): NCBI GI: 46139573 Blast Desc: FG11301.1 [Gibberella zeae PH-1]
  misc_feature (101)..(459): NCBI GI: 256721244 Blast Desc: NECHADRAFT_15414 [Nectria haematococca mpVI 77-13-4]
  misc_feature (108)..(459): NCBI GI: 116200949 Blast Desc: CHGG_08359 [Chaetomium globosum CBS 148.51] gi|88176877|gb|EAQ84345.1| CHGG_08359 [Chaetomium globosum CBS 148.51]
  misc_feature (157)..(514): NCBI GI: 261360039 Blast Desc: conserved [Verticillium albo-atrum VaMs.102]
  misc_feature (1)..(520): NCBI GI: 67540096 Blast Desc: AN6218.2 [Aspergillus nidulans FGSC A4] gi|40738814|gb|EAA58004.1| AN6218.2 [Aspergillus nidulans FGSC A4] gi|259479582|tpe|CBF69936.1| TPA: Zn(II)2Cys6 transcription
  misc_feature (1)..(507): NCBI GI: 121715760 Blast Desc: C6 zinc finger domain protein [Aspergillus clavatus NRRL 1] gi|119403646|gb|EAW14063.1| C6 zinc finger domain protein [Aspergillus clavatus NRRL 1]
  misc_feature (1)..(513): NCBI GI: 255946295 Blast Desc: Pc20g14370 [Penicillium chrysogenum Wisconsin 54-1255] gi|211588650|emb|CAP86766.1| Pc20g14370 [Penicillium chrysogenum Wisconsin 54-1255]
  misc_feature (1)..(506): NCBI GI: 242809918 Blast Desc: C6 transcription factor, [Talaromyces stipitatus ATCC 10500] gi|218716099|gb|EED15521.1| C6 transcription factor, [Talaromyces stipitatus ATCC 10500]
  misc_feature (1)..(506): NCBI GI: 212537207 Blast Desc: C6 transcription factor, [Penicillium marneffei ATCC 18224] gi|210068501|gb|EEA22592.1| C6 transcription factor, [Penicillium marneffei ATCC 18224]
  misc_feature (1)..(506): NCBI GI: 145251822 Blast Desc: An16g01110 [Aspergillus niger] gi|134082963|emb|CAK97706.1| protein product [Aspergillus niger]
MVFPGRFSTGCKRCRQRKLKCDEARPSCRRCYIYGKPCPGYTDQFQFRFENAGPKQENSSSSSSLSSPTSQRSEQSPVPCQPQPAKANSSQIIVPVHHTSPLTITAHPEVSYDQYSVSYFIQRFVTPDENDSFPGFLSFLPNLYDHNASGLLELATLSVAQMAAYNQFGGDKFRLQSYQNYGRALRTLRETIQTERDVKDDRVLAAVLLLCMFKDVGEESWGDPNEHASGLYYILEKRGFEQLFTSVGFEMFITALLKLQVYSFLHQDDRYSDPGGVVSWLSPFDPMMRAMALMTKVLSLRHDLGTCTADLQVGVELKHDVSAVDGNEDTRDASIMEACFNTLAEFDTWDTEAESYWRNTFEGRPVPVALGKFSTSGTNYDTRTACTIILVRSARLILLLSILDYRDATQKLRGKGNDAAWGDCVPVLEENIRLVIDDMLWCVPFAMGDVDSNKSPAVMLHDGAAALTIIQPLRLITYCIYATPQQRTMAHDRLSRMNAGIGIRSAISWERQATLEQQDPSPQRIDRIMTLRASSASPTLQSIYPT

SEQ ID NO: 25746 - DNA, 3071 bp, Muscodor strobelii
  misc_feature: SGI EST ID NO. CUFF.60750.0
  misc_feature: Variant of the nucleotide sequence at SEQ ID NO 25744
tttcggatccccgattttacgtctacaagtatccatagatccatccactgtcaagttcgcatgaaaatcgcatgtacctagctgacactaatgcatgcattaatactgtacatgatgtaggcagcaaagtaaagcaatggggacttaattacataggcaggcagtaagaatgctgcgtttgactcgttcgtactggtcggggagacggttagtcagagtggcagtcaagatggtaacgctcacgagcctcgggagtattggatgccaagcacgatgacgactcgcaagctagactcatcacagcgcaaacgcgcagcaacccctgcaggttccccagacggctagccgaagctggtcgagtcgcaggcctcacttcccatttcttctgtcgccggcgagcgtctgccgtgccttatcatcacctccttcgctaatcatccacactggtggatttggtctgggaaccttacaaacggccgacgcatgtcataggatctcctcgttattcgggccgccccctttcttatcctggaatgcggaacgtctcagtctcgccagtcgcccagtcttgtctccataattttgccccgaccgcccgcgtccttcgcataccatggtgtttcccggccgttttagcaccggctgcaagcgctgtcgccagcgcaagctgaagtgcgatgaggcgagaccgtcctgtcggcgttgctacatctacggaaagccttgtcccggctatacggatcaattccaattccgctttgaaaatgctggccccaaacaagagaactcgtcgtcgtcctcgtcgttgtcgtcgccgacctcccagcgtagcgagcagagtcctgtcccatgccaaccccagccggcgaaagccaatagcagtcagatcattgtaccagttcatcacacttcaccgttgaccatcacggcgcatccagaggtttcgtatgaccagtactcggtgtcgtatttcattcagcgtttcgtaacaccagatgagaatgatagcttccctggattcctaagctttctgccgaatctttatgaccataatgcaagtggtcttctcgagctcgccaccttgagtgttgcgcaaatggctgcttacaatcaatttggcggagacaaattccgcctccaatcatatcaaaactatggtcgtgcgcttcgcacattacgagaaactattcaaaccgaacgcgatgttaaagatgaccgggtcctcgctgctgtgttgctactgtgcatgtttaaggacgtaggcgaagagagctggggagatcctaacgaacatgcttcaggcttatattacatcctagaaaagagagggtttgagcagctatttacgagcgtggggttcgaaatgttcattacagccttgctcaagttgcaagtatattcgtttctacatcaagacgacagatatagcgacccagggggtgttgtctcctggctcagcccatttgatccaatgatgcgtgctatggccttaatgaccaaagtcttgtcgttgcggcatgacttaggaacttgcacagcggatcttcaagttggcgtagagcttaagcatgatgtctcggccgtcgatggtaacgaggatactagagatgcatcaatcatggaggcatgcttcaatacactggccgaatttgacacatgggataccgaagctgagtcatattggagaaacactttcgaaggccgacctgtcccggttgcgctgggcaagttctcgacaagcggaactaactatgacacccgaacggcctgtactatcattctcgtccggtctgcccgcttgattttgttgctcagcatcttggattatcgcgatgcaacccaaaaattgcgaggtaaaggtaatgatgcagcgtggggagactgcgttccagttcttgaggaaaacatccgattggtgattgacgacatgctttggtgcgtgccgtttgccatgggcgatgttgattcaaacaagagtccagccgtcatgttacacgatggggctgcggcattgacaattatacaaccacttaggttgatcacatattgcatctatgcgactccccagcaaagaacaatggctcatgacagacttagtcgaatgaatgctggtattggtatcaggtcggccatatcgtgggagcgacaagcgaccttagaacaacaagaccctagcccccaaaggatagatcgaatcatgaccttaagggcttccagtgcttccccaactctacagtcaatatatcctacttgaagaggcgttggattagtcagataggaatgatagataccgcagtacagaaggcatcaaactcgatctggtggatgttatgaagtcgtcccataactgtgttggcacttcttgtttcctcattgatcccgtgccatcacttcacggttcaaaggacattttcagcctcggcagcaaagttatcgagttgagcgaacacgagtgtagcatatgaatggaagcattcagtgatgccaatagagctgtgaggggatgaatttagctgtgttggggagtggcttgcgaagttgtgccatggacaggtggaggtttcagatgtgttgaacatgaggggataagtacctagagttgtaatgtttcgtatcatcttgcgagttgggtaaggagaaaagatacatagtgagactaaaggatgtcaaatatgtcccgaggtctttgagtcttgatattcaaaaaaaagtggctgcttgcgaggcggctcttccagcggagccctaacccatcgccctcggaggctaaaccccatgtgattgtgggttgcgacgtgcaggtgggtggtcgccacatggctacctgcctgttcccggcgttgcaaatttcaacgtttctgctgccgcgacagacctggtcctccatcgccctaccaatgtcgagtacttcccccacgatatgagctcgtgtacaggtacatggttgaagcaacacgttcttccatcgatctgcacgtcatggcttcacgttttgggactaattagtacaaacgcggctgctagcctgccatgcaacattcaaaatagggccaatactcgtagtcccccgg

SEQ ID NO: 25747 - DNA, 1644 bp, Muscodor strobelii
  misc_feature: SGI cDNA ID NO. 568790
  misc_feature: Encodes the peptide sequence at SEQ ID NO 25748
atgggtttatctgctaaggcgttcagcttttcgagtctaactctcgcggctgcgcttgaatctttcttcgctctcaagtattttcccgtcattttcccaggtagtttcatatccaagggtcacatcactcccgtggccacggtttttatcttcaactacaccttaggtgctttattctggggcctcgtttatcccacattcctcagccctttacgacgaattccaggaccaaagtcgctgattagcgttcactatcgaacgcttattgagaggaagaagccgtcaggagacctagtcctagacattgtcagacgataccctggcgaggacattatcaatctcagtgcgtttgatcggtttgttctaatcgcaagaccgcgaatgcttgcggacctgcttgtccataaagcatatgatttcattaaaccgacgaaaatatcgggctttttacaccatgtgctcggtgatggccttatcgtcatcgagggcgaccagcacaaattcgtgcgcaagaatgcgatgcccgcattctccttccgtcacatcaaagacctgtatcccatgatgtggacaaaagctgaactcatgacctcaacgatacgacaagaaattgttcaagcacagaagagctcagaccaaatcgagctctcaagttgggcaagcagagtcactctagacatcattggcgtggcaggaatgggccgagagtttaacatgcttaagaaatcagaagacccgctgcttgaagtatacgagcaacttcttgagccagcccccgagaaactcgtattctccatgtgttgcttcacattcggtctcgctttcattaggctgctcccttggcacatgaacaatgtcttcaactacttgactagcagcgtcgatcgtatttgcatgtctatggtgcaagacaaaaaagaggcgatgattaagaaaaaagaagatcatttcgatattttgtctctcttgatcaaatccgacaactttaccgatcgacaactcaaggatcagatgctaacctttttagctgccggacacgagactacatcatcggctcttacctgggcatgctatctcttgtctaaagacctaaagctacaagaaaagctccgacaagaagttcgagaatcgttacctgacgatttgattgttgaacaatcaaccgatcttgctggtacacttgaacaaatgccttatctgaacggtgtcatgaatgagacattacgtctatatccgactgtcccgatgacactacgcgaagcgattcgcgacactgatctttcgggtcaagtcataccaaagggcactacccttgtcttgtcgatgtggcagatgaacaggtctccagaactttggggtcctgacgctggggagttcaggcctgaacgatggatcacatctgggaaacctaataccaacggaggcgcgaatagcaactatgagttcttgacgttcttacatgggcctcgatcctgcatcggtcagggatttgccaaggcggaaatgcgctgcttgttggcttccatggtccgcactttctcgtgggacttggccatggaggagtcaaaaataatgccaaggggggtggttactatcaaaccagaaaatggaatgtatctaaatatgaagccactgaaacgataa

SEQ ID NO: 25748 - protein, 547 aa, Muscodor strobelii
  misc_feature: SGI Peptide ID NO. 568790
  misc_feature (74)..(541): Pfam Id: PF00067 Pfam Desc: Cytochrome P450
  misc_feature (119)..(541): Pfam Id: PF00067 Pfam Desc: Cytochrome P450
  misc_feature (1)..(545): NCBI GI: 256721243 Blast Desc: NECHADRAFT_34857 [Nectria haematococca mpVI 77-13-4]
  misc_feature (1)..(545): NCBI GI: 46139577 Blast Desc: FG11303.1 [Gibberella zeae PH-1]
  misc_feature (1)..(547): NCBI GI: 116200951 Blast Desc: CHGG_08360 [Chaetomium globosum CBS 148.51] gi|88176878|gb|EAQ84346.1| CHGG_08360 [Chaetomium globosum CBS 148.51]
  misc_feature (4)..(545): NCBI GI: 85089893 Blast Desc: NCU09419 [Neurospora crassa OR74A] gi|28919490|gb|EAA28923.1| [Neurospora crassa OR74A]
  misc_feature (1)..(547): NCBI GI: 261360037 Blast Desc: cytochrome P450 4F4 [Verticillium albo-atrum VaMs.102]
  misc_feature (31)..(546): NCBI GI: 169609042 Blast Desc: SNOG_07606 [Phaeosphaeria nodorum SN15] gi|160701769|gb|EAT85072.2| SNOG_07606 [Phaeosphaeria nodorum SN15]
  misc_feature (8)..(543): NCBI GI: 189200112 Blast Desc: cytochrome P450 3A4 [Pyrenophora tritici-repentis Pt-1C-BFP] gi|187983492|gb|EDU48980.1| cytochrome P450 3A4 [Pyrenophora tritici-repentis Pt-1C-BFP]
  misc_feature (58)..(543): NCBI GI: 46108332 Blast Desc: FG01048.1 [Gibberella zeae PH-1]
  misc_feature (53)..(543): NCBI GI: 256735154 Blast Desc: NECHADRAFT_98771 [Nectria haematococca mpVI 77-13-4]
  misc_feature (1)..(547): NCBI GI: 169618405 Blast Desc: SNOG_12393 [Phaeosphaeria nodorum SN15] gi|111059086|gb|EAT80206.1| SNOG_12393 [Phaeosphaeria nodorum SN15]
  misc_feature (121)..(542): SWISSPROT Homolog: EC 1.14.14.1 Unspecific monooxygenase
MGLSAKAFSFSSLTLAAALESFFALKYFPVIFPGSFISKGHITPVATVFIFNYTLGALFWGLVYPTFLSPLRRIPGPKSLISVHYRTLIERKKPSGDLVLDIVRRYPGEDIINLSAFDRFVLIARPRMLADLLVHKAYDFIKPTKISGFLHHVLGDGLIVIEGDQHKFVRKNAMPAFSFRHIKDLYPMMWTKAELMTSTIRQEIVQAQKSSDQIELSSWASRVTLDIIGVAGMGREFNMLKKSEDPLLEVYEQLLEPAPEKLVFSMCCFTFGLAFIRLLPWHMNNVFNYLTSSVDRICMSMVQDKKEAMIKKKEDHFDILSLLIKSDNFTDRQLKDQMLTFLAAGHETTSSALTWACYLLSKDLKLQEKLRQEVRESLPDDLIVEQSTDLAGTLEQMPYLNGVMNETLRLYPTVPMTLREAIRDTDLSGQVIPKGTTLVLSMWQMNRSPELWGPDAGEFRPERWITSGKPNTNGGANSNYEFLTFLHGPRSCIGQGFAKAEMRCLLASMVRTFSWDLAMEESKIMPRGVVTIKPENGMYLNMKPLKR

SEQ ID NO: 25749 - DNA, 2155 bp, Muscodor strobelii
  misc_feature: SGI EST ID NO. CUFF.60753.0
  misc_feature: Variant of the nucleotide sequence at SEQ ID NO 25747
ggttccctcatccacgtgtgcaggtttattgttcactacaatctgggcggcaaatctttgctgcctacacgtttcctctctgaagacttggcatttatttgatctacacctaggcgacctttgtctcgtgctcatctatattgagtacataattgccttatagatccgttttctttctaagcttgggtgtaattgaatcaatgaactagtctcctcgatcatcataggattccaaggcacctctttcgaatatgggtttatctgctaaggcgttcagcttttcgagtctaactctcgcggctgcgcttgaatctttcttcgctctcaagtattttcccgtcattttcccaggtagtttcatatccaagggtcacatcactcccgtggccacggtttttatcttcaactacaccttaggtgctttattctggggcctcgtttatcccacattcctcagccctttacgacgaattccaggaccaaaggtttgggaaattccagaagttacatgtatgtggtcaataactaacccctcctacacagtcgctgattagcgttcactatcgaacgcttattgagaggaagaagccgtcaggagacctagtcctagacattgtcagacgataccctggcgaggacattatcaatctcagtgcgtttgatcggtttgttctaatcgcaagaccgcgaatgcttgcggacctgcttgtccataaagcatatgatttcattaaaccgacgaaaatatcgggctttttacaccatgtgctcggtgatggccttatcgtcatcgagggcgaccagcacaaattcgtgcgcaagaatgcgatgcccgcattctccttccgtcacatcaaagacctgtatcccatgatgtggacaaaagctgaactcatgacctcaacgatacgacaagaaattgttcaagcacagaagagctcagaccaaatcgagctctcaagttgggcaagcagagtcactctagacatcattggcgtggcaggaatgggccgagagtttaacatgcttaagaaatcagaagacccgctgcttgaagtatacgagcaacttcttgagccagcccccgagaaactcgtattctccatgtgttgcttcacattcggtctcgctttcattaggctgctcccttggcacatgaacaatgtcttcaactacttgactagcagcgtcgatcgtatttgcatgtctatggtgcaagacaaaaaagaggcgatgattaagaaaaaagaagatcatttcgatattttgtctctcttgatcaaatccgacaactttaccgatcgacaactcaaggatcagatgctaacctttttagctgccggacacgagactacatcatcggctcttacctgggcatgctatctcttgtctaaagacctaaagctacaagaaaagctccgacaagaagttcgagaatcgttacctgacgatttgattgttgaacaatcaaccgatcttgctggtacacttgaacaaatgccttatctgaacggtgtcatgaatgagacattacgtctatatccgactgtcccgatgacactacgcgaagcgattcgcgacactgatctttcgggtcaagtcataccaaagggcactacccttgtcttgtcgatgtggcagatgaacaggtctccagaactttggggtcctgacgctggggagttcaggcctgaacgatggatcacatctgggaaacctaataccaacggaggcgcgaatagcaactatgagttcttgacgttcttacatgggcctcgatcctgcatcggtcagggatttgccaaggcggaaatgcgctgcttgttggcttccatggtccgcactttctcgtgggacttggccatggaggagtcaaaaataatgccaaggggggtggttactatcaaaccagaaaatggaatgtatctaaatatgaagccactgaaacgataagagaggcaagtgtggaggacgacgcaaagagtattatttcgattttgcactgattctcactatatgaagatcaccaagcggttatgggacgattgaacgacgaaacgatgaaatacccaatgaaaaatgaaggtagaccactcggaagggttgatagacccaatagactccgacactaagggttcatcttgttactaggcag

SEQ ID NO: 25750 - DNA, 990 bp, Muscodor strobelii
  misc_feature: SGI cDNA ID NO. 568791
  misc_feature: Reduced expression when VOC is produced
  misc_feature: Encodes the peptide sequence at SEQ ID NO 25751
atgccccgcaggctttatgatacgttttcgcaagcctatccacccaagcctggctttactgaacgagatctaccctcgttgcgcggaaaggtctatctcatcaccggctccaacactggagttggcaaacaattagcccaaattttgtactcgaaaggcgcaaaggtatacgtggtggcgcgctcagagacaaaagcggaaggtgcgattgatgagatcaagaaggcagagccgaattcccaaggagaactcgtattccttcgactcgaccttgcagatctaagcaccatcaaagcatccgcagagaaattcctccagcaagagacaaaactccatgttttatttaacaatgcaggcgttatgaagcccgacgaaggcgccaagtccgcacaaggctatgaactccagcttggtgtgaataatatcggtaccttcatgttcaccaagctccttactcctattctcgcttcgactgccaagacagaacccgcaggtgcagttcgcgttgtgtgggttagctcatcagctgcagagagcccgatggctccgcagggcggtgtgccaatggacaatctcgattatcataatgacgtaggctggtttccaaaatatgccattagcaaagcaggaaattatctccacgggtcggagtatgctcagcggcacaaagcagacggggtactaagcgtgtcgttaaatccaggaaacctggacagcgacttgtggagaaatcaaccctttttaattgctaaattcctgaagtggttcgttcttcacccatctatcaacggtgcttatacagagctctttgctggactgtctccagcagttacgatggagaagacaggcgcgtggattgtcccatggggtcggttcatggaacctcgtaaagacctccaagacgcgacaaagtcaaaggccaagggtggtagcggcatcgctgcagagttttgggactggactgaagagcaagtcaagccatttgtctaa

SEQ ID NO: 25751 - protein, 329 aa, Muscodor strobelii
  misc_feature: SGI Peptide ID NO. 568791
  misc_feature (30)..(187): Pfam Id: PF00106 Pfam Desc: short chain dehydrogenase
  misc_feature (30)..(120): Pfam Id: PF00106 Pfam Desc: short chain dehydrogenase
  misc_feature (8)..(329): NCBI GI: 256730375 Blast Desc: NECHADRAFT_95027 [Nectria haematococca mpVI 77-13-4]
  misc_feature (1)..(329): NCBI GI: 239610907 Blast Desc: short-chain dehydrogenase [Ajellomyces dermatitidis ER-3]
  misc_feature (1)..(329): NCBI GI: 261206248 Blast Desc: short-chain dehydrogenase [Ajellomyces dermatitidis SLH14081] gi|239592920|gb|EEQ75501.1| short-chain dehydrogenase [Ajellomyces dermatitidis SLH14081]
  misc_feature (5)..(329): NCBI GI: 240280835 Blast Desc: short-chain dehydrogenase [Ajellomyces capsulatus H143]
  misc_feature (5)..(329): NCBI GI: 225560611 Blast Desc: short-chain dehydrogenase [Ajellomyces capsulatus G186AR]
  misc_feature (1)..(328): NCBI GI: 46122791 Blast Desc: FG05773.1 [Gibberella zeae PH-1]
  misc_feature (5)..(329): NCBI GI: 242801946 Blast Desc: estradiol 17 beta-dehydrogenase, [Talaromyces stipitatus ATCC 10500] gi|218717219|gb|EED16640.1| estradiol 17 beta-dehydrogenase, [Talaromyces stipitatus ATCC 10500]
  misc_feature (5)..(329): NCBI GI: 212545773 Blast Desc: short-chain dehydrogenase, [Penicillium marneffei ATCC 18224] gi|210064560|gb|EEA18655.1| short-chain dehydrogenase, [Penicillium marneffei ATCC 18224]
  misc_feature (5)..(329): NCBI GI: 256719854 Blast Desc: NECHADRAFT_56763 [Nectria haematococca mpVI 77-13-4]
  misc_feature (7)..(329): NCBI GI: 256727198 Blast Desc: NECHADRAFT_32256 [Nectria haematococca mpVI 77-13-4]
  misc_feature (17)..(237): SWISSPROT Homolog: EC 1.3.1.33 Protochlorophyllide reductase
  misc_feature: Useful for introducing or modulating the production of volatile compounds
MPRRLYDTFSQAYPPKPGFTERDLPSLRGKVYLITGSNTGVGKQLAQILYSKGAKVYVVARSETKAEGAIDEIKKAEPNSQGELVFLRLDLADLSTIKASAEKFLQQETKLHVLFNNAGVMKPDEGAKSAQGYELQLGVNNIGTFMFTKLLTPILASTAKTEPAGAVRVVWVSSSAAESPMAPQGGVPMDNLDYHNDVGWFPKYAISKAGNYLHGSEYAQRHKADGVLSVSLNPGNLDSDLWRNQPFLIAKFLKWFVLHPSINGAYTELFAGLSPAVTMEKTGAWIVPWGRFMEPRKDLQDATKSKAKGGSGIAAEFWDWTEEQVKPFV

SEQ ID NO: 25752 - DNA, 1485 bp, Muscodor strobelii
  misc_feature: SGI EST ID NO. CUFF.60799.1
  misc_feature: Variant of the nucleotide sequence at SEQ ID NO 25750
tagccacggaggttctaacagttctggctcttaattcaattcaaccctgattgaagctgcaaccacctgaggcgcattatagtggactgagtataacaccagcgacacatactatacctattgcagcgtagggcaacgtttcagacagtcgatgacatatgtatgtctttcgtcttgtatcatatttagctaccgtcgcctaggtatcttggacaaagaaacagtcaagatttgtaccactggtgttctctatttttccaaatcgtcttcgttttagttcaataacggctgcgtttatcacggcggctactttcaaaatgccccgcaggctttatgatacgttttcgcaagcctatccacccaagcctggctttactgaacgagatctaccctcgttgcgcggaaaggtctatctcatcaccggctccaacactggagttggcaaacaattagcccaaattttgtactcgaaaggcgcaaaggtatacgtggtggcgcgctcagagacaaaagcggaaggtgcgattgatgagatcaagaaggcagagccgaattcccaaggagaactcgtattccttcgactcgaccttgcagatctaagcaccatcaaagcatccgcagagaaattcctccagcaagagacaaaactccatgttttatttaacaatgcaggcgttatgaagcccgacgaaggcgccaagtccgcacaaggctatgaactccagcttggtgtgaataatatcggtaccttcatgttcaccaagctccttactcctattctcgcttcgactgccaagacagaacccgcaggtgcagttcgcgttgtgtgggttagctcatcagctgcagagagcccgatggctccgcagggcggtgtgccaatggacaatctcgattatcataatgacgtaggctggtttccaaaatatgccattagcaaagcaggaaattatctccacgggtcggagtatgctcagcggcacaaagcagacggggtactaagcgtgtcgttaaatccaggaaacctggacagcgacttgtggagaaatcaaccctttttaattgctaaattcctgaagtggttcgttcttcacccatctatcaacggtgcttatacagagctctttgctggactgtctccagcagttacgatggagaagacaggcgcgtggattgtcccatggggtcggttcatggaacctcgtaaagacctccaagacgcgacaaagtcaaaggccaagggtggtagcggcatcgctgcagagttttgggactggactgaagagcaagtcaagccatttgtctaagaatttaggaacagggtgctatctgttgttgtaatgtgagcagcgcatggggacttcaggcgacagaaatcttatgatattaatgaaaatcagcgactgttatagcatcatgtagtatagtcaatactagtatttagacataagacaataatcatttccaactctatagcctgcgccg

SEQ ID NO: 25753 - DNA, 1908 bp, Muscodor strobelii
  misc_feature: SGI cDNA ID NO. 568792
  misc_feature: Encodes the peptide sequence at SEQ ID NO 25754
atgtcggcgccaactaaacaaggacatcgaaagcgcgagcgtaatagcgatagttccaactcctcagattcagacaacacacttatcagtgagccaaagaaagttagggtagacccttatgactacaccgtcactacttacggctatgatccgagagacgccctgggccagcagagaggaccaaagccaagaccacccctgcccccaggcatcgctgcggatcttaccgcaaagggcgtaactgttcacgttccgggtgaggtagaatacgaacgcgctgttgcagcaaacaatcttctgtatcgcttcactcggccgatatgcgtagtccagcctattgagcccagtgatgtccaagccgcggtcttggcggcacggaagcataagacaagtcttactactaagaatggcgggcattcttattccggatcgtctactacggacacaggcgtgttattagatttgtcgaaaatgaataatgtcgatctcgacctcgattcgcaaatcgttaccgtggaaggcggcgccttatggggacatgtgtacaagagcctgatcaacggatggcataatggatgggcggttaacggaggtcgatgtcctacggtcggcgtgagcggatatgtcctgggtggagggttcggaccattttcacggactttaggtatgggatgtgacacagtcacgcagtttacagtcgtcactgccgatggcgagctggtcacggtcggtgaagaagacaaaccctcgtccaaaaagggtatgctgttttgggcgcttagaggtggaggaggtgggaacttcggaatcgtcgtcgaaatgaagttgcgggtgcttaagctcagtggaaacgatggtctagtaacagctggccggtacacgtggtatccagatccacgagatgatcatcgcgcactgagaacctccatgaatcgattttatacgactaattggtcagatcaaatgaccgtggatacttcttggctttgcgatacccaagagaacaacggcgagataggagttcgcttcctagcctattttgatggcaatcagcacgatttcggaaagcaaattcagaatgcttcgctggacagagatcttgaaaagcaattgaagcgtagggtgctgcaggagaaatcgacacgcttttatcacgagaccctcgttgcacaatgggacgaagaaaccatcagagcattcccatcaaatagtacctttcgcttgtttcactcattctgttttttgaacgatcctcagcagattgaagcaatcacgcggattgtaatggaagaactaacttcctttaaagaattattcaaaggcgaaacgaactgtctttgccaggtttcgttcatccactctggaggcgaggcgtctcgaagaccgagaggagaaacggcatttcgctggcgtgagtcagtattcaacacgtacataatgtgccaatttagagacaaattcctggagagggatctgaggacattcttggggagatttagagatagattgaagcccctgtctatgacgaaacaagccgcatctctcaacttcccagacgcatccctcgctgacgatgcatatgagaaggcttattatggcgagaaccggctgaagcttcaacaaattaagaaaatttgggacaaggacaatttcttcgactgggcccaagcagtcaagcttccgcccaaatcacaaaatctgaaaatagcgctgggtgcagtcgagaaccaagagtccgagttctccgacggcgaagacgtgagttacgagggtttgacagattctatagcttcactcagatgggaaagtatatttgacccggctccttccgaatggcttgcaactggagggcctgaaggaggcggttctttttatggcaccaatggtgcacgcgctcgaaccttctaa

SEQ ID NO: 25754 - protein, 635 aa, Muscodor strobelii
  misc_feature: SGI Peptide ID NO. 568792
  misc_feature (513)..(559): Pfam Id: PF08031 Pfam Desc: Berberine and berberine like
  misc_feature (106)..(244): Pfam Id: PF01565 Pfam Desc: FAD binding domain
  misc_feature (70)..(607): NCBI GI: 238503005 Blast Desc: conserved [Aspergillus flavus NRRL3357] gi|220691546|gb|EED47894.1| conserved [Aspergillus flavus NRRL3357]
  misc_feature (70)..(607): NCBI GI: 169776325 Blast Desc: [Aspergillus oryzae RIB40] gi|83771364|dbj|BAE61496.1| protein product [Aspergillus oryzae]
  misc_feature (77)..(561): NCBI GI: 256726988 Blast Desc: NECHADRAFT_12886 [Nectria haematococca mpVI 77-13-4]
  misc_feature (71)..(561): NCBI GI: 85106124 Blast Desc: NCU07970 [Neurospora crassa OR74A] gi|28923698|gb|EAA32867.1| conserved [Neurospora crassa OR74A]
  misc_feature (80)..(588): NCBI GI: 238504516 Blast Desc: conserved [Aspergillus flavus NRRL3357] gi|220690960|gb|EED47309.1| conserved [Aspergillus flavus NRRL3357]
  misc_feature (80)..(588): NCBI GI: 169764263 Blast Desc: [Aspergillus oryzae RIB40] gi|83764457|dbj|BAE54601.1| protein product [Aspergillus oryzae]
  misc_feature (75)..(530): NCBI GI: 171692621 Blast Desc: protein product [Podospora anserina] gi|170946259|emb|CAP73060.1| protein product [Podospora anserina]
  misc_feature (75)..(565): NCBI GI: 116198609 Blast Desc: CHGG_07460 [Chaetomium globosum CBS 148.51] gi|88178739|gb|EAQ86207.1| CHGG_07460 [Chaetomium globosum CBS 148.51]
  misc_feature (70)..(374): NCBI GI: 238488753 Blast Desc: 6-hydroxy-D-nicotine oxidase, [Aspergillus flavus NRRL3357] gi|220698002|gb|EED54342.1| 6-hydroxy-D-nicotine oxidase, [Aspergillus flavus NRRL3357]
  misc_feature (70)..(374): NCBI GI: 169762938 Blast Desc: [Aspergillus oryzae RIB40] gi|83770397|dbj|BAE60530.1| protein product [Aspergillus oryzae]
MSAPTKQGHRKRERNSDSSNSSDSDNTLISEPKKVRVDPYDYTVTTYGYDPRDALGQQRGPKPRPPLPPGIAADLTAKGVTVHVPGEVEYERAVAANNLLYRFTRPICVVQPIEPSDVQAAVLAARKHKTSLTTKNGGHSYSGSSTTDTGVLLDLSKMNNVDLDLDSQIVTVEGGALWGHVYKSLINGWHNGWAVNGGRCPTVGVSGYVLGGGFGPFSRTLGMGCDTVTQFTVVTADGELVTVGEEDKPSSKKGMLFWALRGGGGGNFGIVVEMKLRVLKLSGNDGLVTAGRYTWYPDPRDDHRALRTSMNRFYTTNWSDQMTVDTSWLCDTQENNGEIGVRFLAYFDGNQHDFGKQIQNASLDRDLEKQLKRRVLQEKSTRFYHETLVAQWDEETIRAFPSNSTFRLFHSFCFLNDPQQIEAITRIVMEELTSFKELFKGETNCLCQVSFIHSGGEASRRPRGETAFRWRESVFNTYIMCQFRDKFLERDLRTFLGRFRDRLKPLSMTKQAASLNFPDASLADDAYEKAYYGENRLKLQQIKKIWDKDNFFDWAQAVKLPPKSQNLKIALGAVENQESEFSDGEDVSYEGLTDSIASLRWESIFDPAPSEWLATGGPEGGGSFYGTNGARARTF
